United States Patent Application Publication US 2026/0191920 A1 - sequence listing, part 4

SEQ ID NO: 9700 - protein, 244 aa, unidentified
  source 1..244: note = Larkinella knui
  REGION 1..244: note = tr|A0A3P1CWX2|A0A3P1CWX2_9BACT GTP cyclohydrolase 1; OS = Larkinella knui OX=2025310 GN=folE PE=3 SV=1
MKPNGTSLNTRSNGHHLAYDLLNDVSVDEMGDDHVASSSETPMREDAFELSDDTKIELIEGHFREIMNILGLDLTDDSLKGTPRRVAKMYVKEIFSGLNPAKKPIATLFENKYQYSEMLVEKGITVHSQCEHHFVPIIGRAHVAYISSGKVIGLSKLNRIVQYFAKRPQVQERLTVQIANELKAVLQTEDVAVIIDARHLCVSMRGVQDANSSTVTVHYCGKFKDDEATRQEFLRHVSEPTATL

SEQ ID NO: 9701 - protein, 244 aa, unidentified
  source 1..244: note = Larkinella rosea
  REGION 1..244: note = tr|A0A3P1C0N8|A0A3P1C0N8_9BACT GTP cyclohydrolase 1; OS = Larkinella rosea OX=2025312 GN=folE PE=3 SV=1
MKPNGTSLNTRSNGHHPAYDVLSDLTIDEMGDDHVASAVETPLRADAFEISDDTKIELIEDHFREILTILGLDLTDDSLKGTPHRVAKMYVKEIFSGLNPAKKPKATLFENKYQYNEMLVEKGITVHSHCEHHLVPIIGRAHVAYISSGKVIGLSKLNRLVQYFAKRPQVQERLTEQIANELKTVLQTEDVAVIIDARHLCVSMRGVQDVNSSTVTAHYGGKFKEDEATRQEFLRHVSEPTASL

SEQ ID NO: 9702 - protein, 244 aa, Larkinella sp.
  REGION 1..244: note = tr|A0A368JRX7|A0A368JRX7_9BACT GTP cyclohydrolase 1; OS = Larkinella sp. ZZJ9 OX=2315727 GN=folE PE=3 SV=1
MKPNGTSLNTRSNGHHPAYDLLHDVTVDEMGDDHVASSIETPLRDDAFDLSDEAKMDLIEGHFRHIMNILGLDLTDDSLKGTPRRVAKMYVKEIFSGLNPAKKPQAALFENKYQYNEMLVEKGITVHSHCEHHFVPIIGRAHVAYISSGKVIGLSKLNRIVQYFAKRPQVQERLTVQIANELKAVLETEDVAVVIDARHLCVSMRGVQDVNSSTVTVHYGGKFKSDEATRQEFLRHVSEPTAAL

SEQ ID NO: 9703 - protein, 244 aa, Larkinella sp.
  REGION 1..244: note = tr|A0A4R8D0K7|A0A4R8D0K7_9BACT GTP cyclohydrolase 1; OS = Larkinella sp. BK230 OX=2512173 GN=folE PE=3 SV=1
MKPNGTSLNTRSNGHHHNYDLLNELTVEEIGDDHVASSLETPLRDDAFALTDETKMELIEDHFREIMNILGLDLTDDSLKGTPRRVAKMYVKEIFSGLNPKNKPKAALFENKYQYSEMLVEKNITVQSHCEHHFVPIMGRAHVAYISSGKVIGLSKLNRIVQYFAKRPQVQERLTVQIANELKEVLQTEDVAVIIDARHLCVSMRGVQDVNSSTVTAHYGGKFKDDEATRQEFLRHVSEPTAAL

SEQ ID NO: 9704 - protein, 193 aa, unidentified
  source 1..193: note = Latescibacteria bacterium
  REGION 1..193: note = tr|A0A0S7XG06|A0A0S7XG06_9BACT GTP cyclohydrolase 1; OS = Latescibacteria bacterium DG_63 OX=1703781 GN=folE PE=3; SV = 1
MPKAKKQRAIDLAKIERAVRSILEAIGENPRREGIKNTPRRVAELYQRVFSGIGQDPTRNLKLYTVENQDGMILVRDILFHSMCEHHLLPFFGKIQLAYLPDNNRIAGLSSLTKIVEILSQKPQLQERLTNEIADALMKALKPKGLLVAVEAQHLCMVMNGTDRSGTVTVSYAMRGVMAKEAMKAEILSILRS

SEQ ID NO: 9705 - protein, 252 aa, Lautropia sp.
  REGION 1..252: note = tr|A0A1D2SGR7|A0A1D2SGR7_9BURK GTP cyclohydrolase FolE2 OS=Lautropia sp. SCN 69-89 OX=1660104 GN=folE2 PE=3; SV = 1
MTCRAAPLPIQRVGVKGLRYPLRWRSAGADQPSVGQFGLYVALPAEQKGTHMSRFVALLEARLADGRPALDAAGMRAMFVEMLGLLEADSGRIELALPLFVRKTAPVSQVQSLMDYDLSIVVEGGARDAVTTLTVVVPCTSLCPCSKTISDYGAHNQRSHLTVSVVADAAIEPEELIVLAEAQASSEIYGLLKRVDEKHVTERAYDNPKFVEDLVRDVATALRRDARVRRFVVEAENFESIHNHSAYARIEG

SEQ ID NO: 9706 - protein, 276 aa, Lautropia sp.
  REGION 1..276: note = tr|A0A3B8RMV5|A0A3B8RMV5_9BURK GTP cyclohydrolase FolE2 OS=Lautropia sp. OX=2053568 GN=folE2 PE=3 SV=1
MNTRDLNQNQAIPDVQGYRDQRNLAIQRVGVRGLKYPLRWRAQDGVQHTVMQAALDVALPADQKGTHMSRFIALLQAQGQEDALDLEGMLKLHHKMLERLQAQDGQIELQFPLFLKKKAPVSGVESLLDYQIVLKTQGSLDATHCELSVTAPVTSLCPCSKEVSAYGAHNQRSHLALEVRLNPTRLADCDAESLIAIAESQASSEVYGLLKRVDEKHVTERAYDNPKFVEDLVHDVAAALHASQDQFGLIAYCVRAENFESIHNHSAWAELHSANW

SEQ ID NO: 9707 - protein, 195 aa, unidentified
  source 1..195: note = Lawsonella clevelandensis
  REGION 1..195: note = tr|A0A2W5ID32|A0A2W5ID32_9ACTN GTP cyclohydrolase 1; OS = Lawsonella clevelandensis OX=1528099 GN=folE PE=3 SV=1
MSYGEYDAQRVEHAVRELLIGIGEDPDREGLRDTPSRVARAYTEIFGGLHCDPADVLATSFTEGYDELVLVRDIPVYSMCEHHLLPFHGVAHIGYIPNKETGRIMGLSKLARLVDLYAKRPQIQERLTGQVADAIMDRLDARGAVVVIECEHLCMAMRGIRKPGAITTTSAVRGSLRANATSRAEALALIRDPRC

SEQ ID NO: 9708 - protein, 231 aa, unidentified
  source 1..231: note = Lawsonella clevelandensis
  REGION 1..231: note = tr|A0A5E3ZYM9|A0A5E3ZYM9_9ACTN GTP cyclohydrolase 1; OS = Lawsonella clevelandensis OX=1528099 GN=folE PE=3 SV=1
MTGWAAYSAAGAPASGGTNLHPAPTSTPNSTRIDTIMSYGEYDAARVEHAIRELLIGIGEDPDREGLRDTPNRVARAYTEIFGGLHCEPSDVLATAFTEGYDELVLVRDIPVYSMCEHHLLPFHGVAHIGYLPNKETGRITGLSKLARLVDLYAKRPQVQERLTGQVADAIMERLDARGAVVVIECEHLCMAMRGIRKPGSITTTSAVRGSLRTNATSRAEALALIRDPRR

SEQ ID NO: 9709 - protein, 258 aa, Lawsonia intracellularis
  REGION 1..258: note = sp|Q1MPD2|GCH4_LAWIP GTP cyclohydrolase FolE2; OS = Lawsonia intracellularis (strain PHE/MN1-00) OX=363253; GN = folE2 PE=3 SV=1
MKDIQSTPAQIAFPIDRVGVKGLKFPIQIQTRDIGMQHTVAIVDMGVDLSVSSRGTHMSRFVEVLQDWNEPLCCESLERLVKQTQKKLQSQHAYIAFFFPYFLHKRAPSTNMLSLFSYDCKLSAKSINYNIEFILELTVPVMTVCPCSKAISHEGAHSQRSEIYIQLRLEQFRFIEDFIVLAESSASSPLYSLLKRADEKYVTEDAFAHPKFVEDVVRNISSKLITVTDVLGFRVEVESFESIHAHNAFAYIEHEFIC

SEQ ID NO: 9710 - protein, 221 aa, Leadbetterella byssophila
  REGION 1..221: note = tr|E4RZB3|E4RZB3_LEAB4 GTP cyclohydrolase 1; OS = Leadbetterella byssophila (strain DSM 17132 / KACC 11308 / 4M15) OX=649349 GN=folE PE=3 SV=1
MLNILKTEDEIGNDHQMTSAKTPLRPDAFELSDEEKIEKIAVHFREIMHTLGLDLNDESLAGTPRRVAKMYVQELFSGLRPDNMPSVTLFENNYKFSEILVERDITFYSNCEHHFVPIVGKVHIGYISTGKVIGLSKLHRIVNYFSRRPQVQERLTIQIGETLTRVLATEDVAVVVDADHFCVSSRGIADQSSSTVTSFFSGAFHDSAKKEEFLQLVKLRA

SEQ ID NO: 9711 - protein, 255 aa, unidentified
  source 1..255: note = Lebetimonas natsushimae
  REGION 1..255: note = tr|A0A292YFQ7|A0A292YFQ7_9PROT GTP cyclohydrolase I; OS = Lebetimonas natsushimae OX=1936991 GN=LNAT_P1137 PE=4; SV = 1
MLEKIRKIYESKNLTTPFEKALEIYNSTPCFKINENVYDKNPNWNDDVHFLMRLIATEKMKKVFKALKIDMDDPNVAENLEEGNIGTAGRIVKMWSGRDTKDDRELMGGRFNKPVRLAKFPNEISRDFDNPIIKEVDLTAVCSHHFAPFSTKFSDKAKIVIAYIPKDYVLGISKLQRVVRFIAQRGWLQEDLTKAIYKEISKTAETDDVYVKLKNIKHSCEFLRGALSESDGFTTEYFGGKFRKNRDLLDFVRNY

SEQ ID NO: 9712 - protein, 206 aa, Lechevalieria deserti
  REGION 1..206: note = tr|A0A316HVU6|A0A316HVU6_9PSEU GTP cyclohydrolase 1; OS = Lechevalieria deserti OX=531939 GN=folE PE=3 SV=1
MTNTLDRLAPSESLVSSGPVDTERVADLVGQLLAAIGEDPGREGLSDTPARVAAWWRRFFSPEPSAAPTSFPEQHLSGQLVVIGGMSVWSLCEHHLLPMNLDVAVGYVPDGEVIGLSKFGRIAQQYAGRLQVQERFTRQVADEIAVVIGSSDVAVAVRGTHLCMSARGVRMEAARTTTVQAGGRFESDPVLSQQFLTLATDRWRVA

SEQ ID NO: 9713 - protein, 186 aa, Lechevalieria deserti
  REGION 1..186: note = tr|A0A316I0N8|A0A316I0N8_9PSEU GTP cyclohydrolase 1; OS = Lechevalieria deserti OX=531939 GN=folE PE=3 SV=1
MTDPVIDTEAARHAVTDLLKALGKDPFSVHLADTPRRVAEAYAELLTPRAFNLTTFPNDEGYDELVLARGIPVQSLCEHHMLPFHGVAHVGYLPGERILGLSKLARVVEMFARDLQVQERLTKQVADWLQEHLRPKGVGVVIEAEHLCMALRGVRVNGSRTVTSALQGLLRSDPASRQEFFTLVHA

SEQ ID NO: 9714 - protein, 215 aa, Lechevalieria fradiae
  REGION 1..215: note = tr|A0A1G8AR82|A0A1G8AR82_9PSEU GTP cyclohydrolase 1; OS = Lechevalieria fradiae OX=200378 GN=folE PE=3 SV=1
MTEHDQLDADAGLTLDGEAGVSARRVFDQARAEAAVRELLIACGEDPEREGLRETPARVARAYRELFAGLYTDADAVLAKTFDESHEELVLVTDIPMFSFCEHHLLPFHGVAHVGYIPNEQGRVTGLSKLARLVDLYSKRPQVQERLTSQVADALVRKLEPRGVIVVVEAEHLCMGMRGVRKPGSRTTTSAVRGILRTSASSRAEAIELIRGRTR

SEQ ID NO: 9715 - protein, 192 aa, Lechevalieria fradiae
  REGION 1..192: note = tr|A0A1G7UJL4|A0A1G7UJL4_9PSEU GTP cyclohydrolase 1; OS = Lechevalieria fradiae OX=200378 GN=folE PE=3 SV=1
MTLPSRTEASPIDTEAARQAVADLLKALGKDPFSVHLADTPRRVADAYAELLTPRTFTLTTFPNDEGYDELVLARGIPVQSLCEHHMLPFHGVAHVGYLPGERILGLSKLARVVEMFARDLQVQERLTKQVADWLQEHLRPKGVGVVIEAEHMCMALRGVRVAGSSTVTSALQGVLREDPASRQEFFTLVHA

SEQ ID NO: 9716 - protein, 215 aa, Lechevalieria xinjiangensis
  REGION 1..215: note = tr|A0A1H9EYK0|A0A1H9EYK0_9PSEU GTP cyclohydrolase 1; OS = Lechevalieria xinjiangensis OX=402600 GN=folE PE=3 SV=1
MTEHHQLDADAGLTHNGEAGVSARRVFDQARAEAAVRELLLACGEDPEREGLRDTPARVARAYRELFAGLYTDADTVLAKTFDESHEELVLVTDIPMFSFCEHHLLPFHGVAHVGYIPNEAGRVTGLSKLARLVDLYSKRPQVQERLTSQVADALVRRLEPRGVIVVVEAEHLCMGMRGVRKPGSRTTTSAVRGLLRTSASTRAEAIELIRGRSR

SEQ ID NO: 9717 - protein, 222 aa, Leclercia adecarboxylata
  REGION 1..222: note = tr|A0A3E2A0P0|A0A3E2A0P0_9ENTR GTP cyclohydrolase 1; OS = Leclercia adecarboxylata OX=83655 GN=folE PE=3 SV=1
MSSMSKEAALVHEALVAHGLETPLRPPVQDLDNETRKRLISGHMTEIMQLLNLDLSDDSLMETPRRIAKMYVDEIFSGLDYANFPKITVIENKMKVDEMVTVRDITLTSTCEHHFVTIDGKATVAYIPKDSVIGLSKINRIVQFFAQRPQVQERLTQQILIALQTLLGTNNVAVSIDAVHYCVKARGIRDATSATTTTSLGGLFKSSQNTRQEFLRAVRHHN

SEQ ID NO: 9718 - protein, 222 aa, Leclercia adecarboxylata
  REGION 1..222: note = tr|A0A5B7XG06|A0A5B7XG06_9ENTR GTP cyclohydrolase 1; OS = Leclercia adecarboxylata OX=83655 GN=folE PE=3 SV=1
MSSMSKEAALVHEALVAHGLETPLRPPVQDLDNETRKRLISGHMTEIMQLLNLDLSDDSLMETPRRIAKMYVDEIFSGLDYANFPKITVIENKMKVDEMVTVRDITLTSTCEHHFVTIDGKATVAYIPKDAVIGLSKINRIVQFFAQRPQVQERLTQQILIALQTLLGTNNVAVSIDAVHYCVKARGIRDATSATTTTSLGGLFKSSQNTRQEFLRAVRHHN

SEQ ID NO: 9719 - protein, 222 aa, Leclercia sp.
  REGION 1..222: note = tr|A0A2I8NWX3|A0A2I8NWX3_9ENTR GTP cyclohydrolase 1; OS = Leclercia sp. LSNIH1 OX=1920114 GN=folE PE=3 SV=1
MSSMSKEAALVHEALVAHGLETPLRPPVQEMDNETRKSLISGHMTEIMQLLNLDLSDDSLMETPRRIAKMYVDEIFSGLDYANFPKITVIENKMKVDEMVTVRDITLTSTCEHHFVTIDGKATVAYIPKDAVIGLSKINRIVQFFAQRPQVQERLTQQILIALQTLLGTNNVAVSIDAVHYCVKARGIRDATSATTTTSLGGLFKSSQNTRQEFLRAVRHVS

SEQ ID NO: 9720 - protein, 222 aa, Leclercia sp.; identical to SEQ ID NO: 7844
  REGION 1..222: note = tr|A0A0J6MFF2|A0A0J6MFF2_9ENTR GTP cyclohydrolase 1; OS = Leclercia sp. LK8 OX=1628210 GN=folE PE=3 SV=1

SEQ ID NO: 9721 - protein, 199 aa, Leeuwenhoekiella aequorea
  REGION 1..199: note = tr|A0A4Q0P2P1|A0A4Q0P2P1_9FLAO GTP cyclohydrolase 1; OS = Leeuwenhoekiella aequorea OX=283736 GN=folE PE=3 SV=1
MSPYKKFEEYNIDLKDEIKDSYSSIIKDLGEDVTRDGLLKTPERAAKAMMYLTSGYDVDPAEILKGAMFKEDYREMVIVKDIELYSLCEHHLLPFFGKAHIAYIPNGSIVGLSKLPRIVDVFSRRLQVQERLTHDILECINTTLKPEGVAVVIEASHMCMMMRGVQKQNSTTTTSGFRGQFEKIETRNEFLKLISSDLS

SEQ ID NO: 9722 - protein, 228 aa, Leeuwenhoekiella aequorea
  REGION 1..228: note = tr|A0A4V1KQU4|A0A4V1KQU4_9FLAO GTP cyclohydrolase 1; OS = Leeuwenhoekiella aequorea OX=283736 GN=folE PE=3 SV=1
MNMNFENEELKAIDEAGDDHHSASATTPLREDAFEMSDAEKIALIKEDVSHIMHTLGLDLTDDSLKGTPNRVAKMFVNELFAGLHPQRKPKASTFENNYKYGEMLVEKNITVYSTCEHHLLPIIGRAHVAYISNGTVVGLSKMNRIVDYYAKRPQVQERLTMQIVEELQIALGTQDVACVIDAKHLCVNSRGIRDIESSTVTSEFGGKFKEESVRREFLDYIKLDTTF

SEQ ID NO: 9723 - protein, 226 aa, Leeuwenhoekiella blandensis
  REGION 1..226: note = tr|A3XJQ3|A3XJQ3_LEEBM GTP cyclohydrolase 1; OS = Leeuwenhoekiella blandensis (strain CECT 7118 / CCUG 51940 / MED217) OX=398720 GN=folE PE=3 SV=1
MNIENEELKAIDEIGDNHHNTSAETPLRDDAFELSDSEKIELIKEDVTRIMQTLGLDLEDDSLKGTPNRVAKMFVNEIFGGLNPQRKPKASTFKNNYKYGEMLVEKNITVYSTCEHHLLPIVGRAHVAYISNGTVVGLSKMNRVVDYYAKRPQVQERLTMQVVQELQKVLGTEDVACVIDAKHLCVNSRGIRDIESSTVTSEFGGKFKEEAVRREFLDYIKLETPF

SEQ ID NO: 9724 - protein, 199 aa, Leeuwenhoekiella blandensis
  REGION 1..199: note = tr|A3XM03|A3XM03_LEEBM GTP cyclohydrolase 1; OS = Leeuwenhoekiella blandensis (strain CECT 7118 / CCUG 51940 / MED217) OX=398720 GN=folE PE=3 SV=1
MAPYRQFEEYNIDVKEDVKDRYKAIITDLGEDVTREGIVKTPERAAKAMMYLTSGYDMDASEILKGAMFKEDYREMVIVKNIELYSLCEHHLLPFFGKAHIAYIPDGHIVGLSKLPRVVDVFSRRLQVQERLTHDILECINNTLKPQGVAVVIEASHMCMMMRGVQKQNSTTTTSGFRGQFEHNETRNEFLKLIGSDLG

SEQ ID NO: 9725 - protein, 199 aa, Leeuwenhoekiella marinoflava
  REGION 1..199: note = tr|A0A4Q0PQ12|A0A4Q0PQ12_9FLAO GTP cyclohydrolase 1; OS = Leeuwenhoekiella marinoflava OX=988 GN=folE PE=3 SV=1
MRPYREFEEYNIEVQEGIKDRYKSIIADLGEDVNREGIVKTPERAAKAMMYLTSGYDVDASEILSGAMFKEDYNEMVIVKNIELYSLCEHHLLPFFGKAHIAYIPNGHIVGLSKLPRVVDVFSRRLQVQERLTHDILECINNTLKPQGVAVVIEASHMCMMMRGVQKQNSTTTTSGFRGQFEHNETRNEFLKLIGSDLS

SEQ ID NO: 9726 - protein, 228 aa, Leeuwenhoekiella marinoflava
  REGION 1..228: note = tr|A0A4Q0PJI6|A0A4Q0PJI6_9FLAO GTP cyclohydrolase 1; OS = Leeuwenhoekiella marinoflava OX=988 GN=folE PE=3 SV=1
MKMNFDNEELKAIDEIGDNHHGTSAETPLRDDAFKLSDSEKIELIKEDVARIMQTLGLDLTDDSLKGTPNRVAKMFVNEIFGGLNPARKPKASTFDNNYKYGEMLVEKNITVYSTCEHHLLPIVGRAHVAYISNGSVVGLSKMNRVVDYYSKRPQVQERLTMQVVQELQKVLGTQDVACVIDAKHLCVNSRGIRDIESSTVTSEFGGKFKEEAVRREFLDYIKLDTPF

SEQ ID NO: 9727 - protein, 226 aa, unidentified
  source 1..226: note = Leeuwenhoekiella nanhaiensis
  REGION 1..226: note = tr|A0A2G1VRZ1|A0A2G1VRZ1_9FLAO GTP cyclohydrolase 1; OS = Leeuwenhoekiella nanhaiensis OX=1655491 GN=folE PE=3; SV = 1
MKIDNEELNTLDELGDNHHSTSAQTPLREDAFKLTDAEKIELIREDVNHIMQTLGLDLTDDSLKGTPNRVAKMFVNEIFGGLSPARKPKASTFKNNYKYGEMLVEKNITVYSTCEHHLLPIVGRAHVAYISNGTVVGLSKMNRIVDYYAKRPQVQERLTMQIVQELQEALGTEDVACVIDAKHLCVNSRGIRDIESSTVTSEFGGKFKEEAVRREFLDYIKLDTPF

SEQ ID NO: 9728 - protein, 199 aa, unidentified
  source 1..199: note = Leeuwenhoekiella nanhaiensis
  REGION 1..199: note = tr|A0A2G1VUP1|A0A2G1VUP1_9FLAO GTP cyclohydrolase 1; OS = Leeuwenhoekiella nanhaiensis OX=1655491 GN=folE PE=3; SV = 1
MSPYQKFEEYNIEVQEDVKARYKSIIADLGEDVDREGIVKTPERAAKAMMYLTSGYDVDASEILRGAMFKEDYNEMVIVKNIELYSLCEHHLLPFFGKAHIAYIPNGHIVGLSKIPRIVDVFARRLQVQERLTHNILECINQTLKPQGVAVVIEASHMCMMMRGVQKQNSTTTTSGFRGQFENNETRNEFLKLISNDLS

SEQ ID NO: 9729 - protein, 199 aa, Leeuwenhoekiella palythoae
  REGION 1..199: note = tr|A0A1M5T476|A0A1M5T476_9FLAO GTP cyclohydrolase 1; OS = Leeuwenhoekiella palythoae OX=573501 GN=folE PE=3 SV=1
MAPYRKFEEYNISVQDDVKDRYKAIISDLGEDVNREGIVKTPERAAKAMMYLTSGYDMDASEILKGAMFKEDYNEMVIVKNIELYSLCEHHLLPFFGKAHIAYIPNGHIVGLSKLPRVVDVFSRRLQVQERLTHDILECINTTLKPQGVAVVIEASHMCMMMRGVQKQNSTTTTSGFRGQFEHNETRNEFLKLIGSDLS

SEQ ID NO: 9730 - protein, 228 aa, Leeuwenhoekiella palythoae
  REGION 1..228: note = tr|A0A1M5Z8R5|A0A1M5Z8R5_9FLAO GTP cyclohydrolase 1; OS = Leeuwenhoekiella palythoae OX=573501 GN=folE PE=3 SV=1
MKMNFENEELKEIDELGDNHHSTSAITPLRDDAFELSDLEKIELIKEDVTRIMQTLGLDLKDDSLKGTPNRVAKMFVNEIFGGLNPQRKPKASTFQNNYKYGEMLVEKNITVYSTCEHHLLPIVGRAHVAYISNGTVVGLSKMNRVVDYYAKRPQVQERLTMQVVQELQKVLGTEDVACVIDAKHLCVNSRGIRDIESSTVTSEFGGKFKEEAVKREFLDYIKLETPF

SEQ ID NO: 9731 - protein, 199 aa, unidentified
  source 1..199: note = Leeuwenhoekiella polynyae
  REGION 1..199: note = tr|A0A4Q0P407|A0A4Q0P407_9FLAO GTP cyclohydrolase 1; OS = Leeuwenhoekiella polynyae OX=1550906 GN=folE PE=3 SV=1
MTPYKQFEEYNVEVQEDVRDCYKSIIGGLGEDVNREGIVKTPERAAKAMMYLTSGYDVDASEILRGAMFKEDYNEMVIVKNIELYSLCEHHLLPFFGKAHIAYIPNGHIVGLSKLPRVVDVFSRRLQVQERLTHDILECINTTLKPQGVAVVIEASHMCMMMRGVQKQNSTTTTSGFRGQFEHNETRNEFLKLIGSDLN

SEQ ID NO: 9732 - protein, 228 aa, unidentified
  source 1..228: note = Leeuwenhoekiella polynyae
  REGION 1..228: note = tr|A0A4Q0NW29|A0A4Q0NW29_9FLAO GTP cyclohydrolase 1; OS = Leeuwenhoekiella polynyae OX=1550906 GN=folE PE=3 SV=1
MKMNFENEELKAIDEIGDNHHSTSAETPLRDDAFKLSDSEKIELIKEDVARIMQTLGLDLTDDSLKGTPNRVAKMFVNEIFGGLNPARKPKASTFDNNYKYGEMLVEKNITVYSTCEHHLLPIVGRAHVAYISNGSVVGLSKMNRVVDYYAKRPQVQERLTMQVVQELQKVLGTQDVACVIDAKHLCVNSRGIRDIESSTVTSEFGGKFKEEAVRREFLDYIKLDTPF

SEQ ID NO: 9733 - protein, 228 aa, Leeuwenhoekiella sp.; identical to SEQ ID NO: 9730
  REGION 1..228: note = tr|A0A2E0JPC3|A0A2E0JPC3_9FLAO GTP cyclohydrolase 1; OS = Leeuwenhoekiella sp. OX=1977054 GN=folE PE=3 SV=1

SEQ ID NO: 9734 - protein, 199 aa, Leeuwenhoekiella sp.
  REGION 1..199: note = tr|A0A4Q0NX69|A0A4Q0NX69_9FLAO GTP cyclohydrolase 1; OS = Leeuwenhoekiella sp. R-50232 OX=2249425 GN=folE PE=3; SV = 1
MTPYKQFEEYNIEVQEDVKDCYKSIIGGLGEDVKREGIVKTPERAAKAMMYLTSGYDVDASEILRGAMFKEDYNEMVIVKNIELYSLCEHHLLPFFGKAHIAYIPNGHIVGLSKLPRVVDVFSRRLQVQERLTHDILECINTTLKPQGVAVVIEASHMCMMMRGVQKQNSTTTTSGFRGQFEHNETRNEFLKLIGSDLS

SEQ ID NO: 9735 - protein, 180 aa, Legionella adelaidensis
  REGION 1..180: note = tr|A0A0W0R0D8|A0A0W0R0D8_9GAMM GTP cyclohydrolase 1; OS = Legionella adelaidensis OX=45056 GN=folE PE=3 SV=1
MQQLYRELLIQLGEDINREGLKGTPERAATAMQYLTKGYNENIEDIINNALFESDMSEMVIVKDIEMYSLCEHHLLPFLGKCHVGYLPNGKVLGLSKIARIVDFYARRLQIQERLTTEIANCIAEITNARGVGVIIEAQHLCMMMRGVEKQNSVLTTSVMLGDMRTNPSSRSELLNLVKK

SEQ ID NO: 9736 - protein, 181 aa, Legionella anisa
  REGION 1..181: note = tr|A0A2Z3KU78|A0A2Z3KU78_9GAMM GTP cyclohydrolase 1; OS = Legionella anisa OX=28082 GN=folE PE=3 SV=1
MEKLYKELLTQLGEDVTREGLMDTPERAANAMRYLTKGYNESLEEIINNALFDSDMSEMVIVKDIEMYSMCEHHLLPFLGKCHVGYIPNGKVIGLSKIARIVDYFARRLQIQERLTTEIASCLESITGARGVAVVIEAKHLCMMMRGVEKQNSIMTTSVMLGEMRNNPTSRAEFLTLTHNK

SEQ ID NO: 9737 - protein, 179 aa, Legionella beliardensis
  REGION 1..179: note = tr|A0A378I4F8|A0A378I4F8_9GAMM GTP cyclohydrolase 1; OS = Legionella beliardensis OX=91822 GN=folE PE=3 SV=1
MHDLYKQILEQIGEDPEREGLRDTPQRAATAMHYLTKGYSEKLEDIINNALFISDMSEMVIVKDVELYSLCEHHLLPFIGKCHIGYIPHGKVLGLSKLARIVDYYARRLQIQERLTSEIAHCIEDITGARGVAVVIEAKHLCMMMRGVEKQNSSMVTSVMLGEMRDHSISRSEFLKLIR

SEQ ID NO: 9738 - protein, 204 aa, Legionella birminghamensis
  REGION 1..204: note = tr|A0A378IA93|A0A378IA93_9GAMM GTP cyclohydrolase 1; OS = Legionella birminghamensis OX=28083 GN=folE_1 PE=3 SV=1
MQANKYLIDIIQEKQKDDEQEAKNVITRMLQLIGEETGREGLVDTPRRVFESWKELYEGYFIDPEKILSTCFSNDKKYSQLVILRDIEIFSMCEHHMLPFYGQVHIGYIPDTKVVGLSKLARLAECFSRRLQIQEQLTVQIAEAIQKYLNPKGVGVMVECQHLCMVARGVNKKNPHMVTSHFMGVLETDPERRKEFNEQITRKL

SEQ ID NO: 9739 - protein, 180 aa, Legionella birminghamensis
  REGION 1..180: note = tr|A0A378IDR1|A0A378IDR1_9GAMM GTP cyclohydrolase 1; OS = Legionella birminghamensis OX=28083 GN=folE_2 PE=3 SV=1
MHELYKKILEEIGEDPNREGLKDTPKRAATAFQYLTKGYNEDLQEIINDALFESDMSEMVIVKDIELYSMCEHHLLPFLGKCHVGYIPNGKVLGLSKVARIVEYFARRLQIQERLTMEIASCIESITRAKGVAVVVEAKHLCMMMRGVEKQNSQMLTSVMLGDMRHNVSSRAEFLSLIGK

SEQ ID NO: 9740 - protein, 180 aa, Legionella brunensis
  REGION 1..180: note = tr|A0A0W0S084|A0A0W0S084_9GAMM GTP cyclohydrolase 1; OS = Legionella brunensis OX=29422 GN=folE PE=3 SV=1
MQELYKKILERIGEDPEREGLRDTPERAANALIYLTKGYNERLDEIINDALFESDMSEMVIVRDIEMYSMCEHHLLPFLGKCHVGYLPNGKVLGLSKVARIVDYFARRLQIQERLTAEIANCIESITGARGVAVVVEAKHLCMMMRGVEKQNSIMTTSVMLGEMRNNPSSRSEFLQLIHS

SEQ ID NO: 9741 - protein, 179 aa, Legionella busanensis
  REGION 1..179: note = tr|A0A378JMZ2|A0A378JMZ2_9GAMM GTP cyclohydrolase 1; OS = Legionella busanensis OX=190655 GN=folE PE=3 SV=1
MHDLYRQILKNIGEDPDREGLIDTPTRAANAMHYLTKGYQEKLEDIINNALFISDMSEMVIVKDIELYSMCEHHLLPFFGKCHIGYIPHGKVLGLSKFARLVDYYARRLQIQERLTSEIAHCIEDITGARGVAVVIEAKHLCMMMRGVEKQNSAMITSVMLGEMREHSISRSEFLKLIK

SEQ ID NO: 9742 - protein, 204 aa, Legionella cherrii
  REGION 1..204: note = tr|A0A0W0S8H7|A0A0W0S8H7_9GAMM GTP cyclohydrolase 1; OS = Legionella cherrii OX=28084 GN=folE_1 PE=3 SV=1
MQAEKYSIDMDEEQQKTDDQEAGDVIKKLLRLIGENPEREGLVDTPRRVVDSWKELYGGYSIDPAKVLSTCFSNKKQYNQLVLLRDIEMFSMCEHHMLPFYGRVHIGYIPDNKVVGLSKLARIVECFSRRLQIQEQLTVEIAEAIHTHLKPKGVGVMIECQHLCMVARGVNKQNPYMVTSHFMGILETESERRKEFNEQITRKL

SEQ ID NO: 9743 - protein, 181 aa, Legionella cherrii
  REGION 1..181: note = tr|A0A0W0SCS2|A0A0W0SCS2_9GAMM GTP cyclohydrolase 1; OS = Legionella cherrii OX=28084 GN=folE_2 PE=3 SV=1
MEKLYKELLTQLGEDITRQGLVDTPARAANAIRYLTKGYNENLDDIINDALFDSDMNEMVIVKDIEMYSMCEHHLLPFLGKCHVGYIPNGKVIGLSKMARIVDYYARRLQIQERLTTEIAKCLESITGARGVAVVIEAKHLCMMMRGVEKQNSVMTTSVMLGEMRNNPTSRAEFLTLTQRK

SEQ ID NO: 9744 - protein, 181 aa, Legionella cincinnatiensis
  REGION 1..181: note = tr|A0A378IFP9|A0A378IFP9_9GAMM GTP cyclohydrolase 1; OS = Legionella cincinnatiensis OX=28085 GN=folE PE=3 SV=1
MEQLYTELLKLIGEDVTREGLIDTPARAANAMHYLTKGYQENLEDIINGALFESDMSEMVIVKDIEMYSMCEHHLLPFLGKCHVGYLPHGKVIGLSKIARIVDYFARRLQIQERLTTEIANCIESITGARGVAVVVEAKHLCMMMRGVEKQNSVMTTSVMLGDMRNNPTSRAEFLTLIHGK

SEQ ID NO: 9745 - protein, 179 aa, unidentified
  source 1..179: note = Legionella clemsonensis
  REGION 1..179: note = tr|A0A222NZ51|A0A222NZ51_9GAMM GTP cyclohydrolase 1; OS = Legionella clemsonensis OX=1867846 GN=folE PE=3 SV=1
MQELYKQILKRIGEDPEREGLRDTPERAANALLYLTNGYHEQLDDIINDALFESDMSEMVIVKNIEMYSLCEHHLLPFLGKCHVGYLPNGKVLGLSKIARIVDYFARRLQIQERLTSEIANCIQSITGARGVAVVMEAKHLCMMMRGVEKQNSVMTTSVMLGDMRHNPSSRSEFLQLIS

SEQ ID NO: 9746 - protein, 112 aa, unidentified
  source 1..112: note = Legionella clemsonensis
  REGION 1..112: note = tr|A0A222P297|A0A222P297_9GAMM GTP cyclohydrolase 1 type 2 OS=Legionella clemsonensis OX=1867846 GN=clem_07145; PE = 4 SV=1
MQYQVEKLINYKLSFYVPKSHLEQVKQAVFTAGAGRQGDYEYCCWQCLGQGQFKPLAGANPAVGTINTLTVVPEYKVEMICSANCIDKVVQALKFTHPYEEPAYEVVRLENY

SEQ ID NO: 9747 - protein, 185 aa, unidentified
  source 1..185: note = Legionella donaldsonii
  REGION 1..185: note = tr|A0A378J0I8|A0A378J0I8_9GAMM GTP cyclohydrolase 1; OS = Legionella donaldsonii OX=45060 GN=folE PE=3 SV=1
MQELYKEIIKRLGEDVNREGLRDTPERAANALRYLTKGYNENLEDIINNALFESDMSEMVIVKEIEMYSMCEHHLLPFLGKCHVGYLPNGKVLGLSKIARIVDYFARRLQIQERLTSEIAYCIASITGARGVAVVMEAKHLCMMMRGVEKQNSIMTTSVMLGEMRDNPASRSEFLRLISRVSSLS

SEQ ID NO: 9748 - protein, 181 aa, Legionella drancourtii
  REGION 1..181: note = tr|G9EU17|G9EU17_9GAMM GTP cyclohydrolase 1; OS = Legionella drancourtii LLAP12 OX=658187 GN=folE PE=3; SV = 1
MQELYKKLLTELGEDVTREGLVDTPERAANAMCYLTKGYHENLNDIINDALFDSDMSEMVVVKDIEMYSMCEHHLLPFLGKCHVGYIPNGKVLGLSKVARIVDFFARRLQIQERLTTEIANCVEAITGARGVAVVIEAKHLCMMMRGVEKQNSVMATSVMLGDMRNNATSRAEFLNLIRKS

SEQ ID NO: 9749 - protein, 190 aa, Legionella drozanskii
  REGION 1..190: note = tr|A0A0W0SX71|A0A0W0SX71_9GAMM GTP cyclohydrolase 1; OS = Legionella drozanskii LLAP-1 OX=1212489 GN=folE PE=3; SV = 1
MASWLGQETMQELYKQILESIGEDVEREGLRGTPERAANALRYLTKGYHENLDEIINDALFDSDMSEMVIVKDIEMYSMCEHHLLPFLGKCHVGYLPNGKVLGLSKIARIVDYFARRLQIQERLTSEIADCIASITNARGVAVVIEAKHLCMMMRGVEKQNSIMTTSVMRGEMRDSSSSRSEFLRLISKS

SEQ ID NO: 9750 - protein, 185 aa, unidentified
  source 1..185: note = Legionella endosymbiont
  REGION 1..185: note = tr|A0A2D3R8C0|A0A2D3R8C0_9GAMM GTP cyclohydrolase 1; OS = Legionella endosymbiont of Polyplax serrata OX=2005262; GN = folE PE=3 SV=1
MATWIKMQELYKKILETIGEDVKRDGLKKTPERAAKTFRYLTNGYKKDLNKITNNSIFQSDIKDLILIKKIKIYSICEHHLLPFLGYCHIGYIPNGKILGISKIVEIIECYSRRLQIQERLTTEIANYISYILQAKGVGVMIEAKHLCIEMREFKKQNPYITTLSMTDEIKNKPYKRNEFLTLIK

SEQ ID NO: 9751 - protein, 179 aa, Legionella erythra
  REGION 1..179: note = tr|A0A0W0TFQ5|A0A0W0TFQ5_LEGER GTP cyclohydrolase 1; OS = Legionella erythra OX=448 GN=folE PE=3 SV=1
MQELYKKILEEIGEDPSREGLRDTPERAANALRYLTKGYAEDLNEIINNALFESDMSEMVIVKEIELYSMCEHHLLPFLGKCHVGYLPSGRVLGLSKIARIVDYFARRLQIQERLTAEIATCIESITGARGVGVVIEAKHLCMMMRGVEKQNSVMTTSVMLGDMRNNANTRLEFLKLIR

SEQ ID NO: 9752 - protein, 179 aa, Legionella fallonii
  REGION 1..179: note = tr|A0A098G9Z3|A0A098G9Z3_9GAMM GTP cyclohydrolase 1; OS = Legionella fallonii LLAP-10 OX=1212491 GN=folE PE=3 SV=1
MEQLYTKLLQELGEDINREGLKDTPARASNAMRYLTKGYREDLDDIINGALFDSDMSELVIVKDIELYSMCEHHLLPFLGKCHVGYLPNGKVIGLSKIARIVDFFARRLQIQERMTGEIARCIESVTGARGVAVVIEAKHLCMMMRGVEKQNSVMTTSMMLGEMGSNHSSRSEFLNLIR

SEQ ID NO: 9753 - protein, 185 aa, Legionella feeleii
  REGION 1..185: note = tr|A0A0W0TN65|A0A0W0TN65_9GAMM GTP cyclohydrolase 1; OS = Legionella feeleii OX=453 GN=folE PE=3 SV=1
MQELYKEIIKRLGEDVNREGLRDTPERAANAIRYLTKGYNENLEDIINNALFESDMSEMVIVKEIEMYSMCEHHLLPFLGKCHVGYLPNGKVLGLSKIARIVDYFARRLQIQERLTSEIAYCIESITGARGVAVVMEAKHLCMMMRGVEKQNSIMTTSVMLGEMRDNPASRSEFLRLISRASSLY

SEQ ID NO: 9754 - protein, 189 aa, Legionella geestiana
  REGION 1..189: note = tr|A0A0W0U968|A0A0W0U968_9GAMM GTP cyclohydrolase 1; OS = Legionella geestiana OX=45065 GN=folE PE=3 SV=1
MATGLRNHRNMQELFKKLLTSIGEDPEREGLRDTPARAEAAWQFLTKGYRENLDDIINNALFESDMNEMVVVRDIELYSMCEHHLLPFIGKCHVGYLPGGKVIGLSKIARLVDFYARRLQIQERLTSEIAQTLVRITGARGVAVVVEAKHLCMMMRGVEKQNSVMTTSVMLGAMRDSPETRAEFLRLIR

SEQ ID NO: 9755 - protein, 179 aa, Legionella geestiana
  REGION 1..179: note = tr|A0A5E8QZ62|A0A5E8QZ62_9GAMM GTP cyclohydrolase 1; OS = Legionella geestiana OX=45065 GN=folE PE=3 SV=1
MQELFKKLLTSIGEDPEREGLRDTPARAEAAWQFLTKGYRENLDDIINNALFESDMNEMVVVRDIELYSMCEHHLLPFIGKCHVGYLPGGKVIGLSKIARLVDFYARRLQIQERLTSEIAQTLVRITGARGVAVVVEAKHLCMMMRGVEKQNSVMTTSVMLGAMRDSPETRAEFLRLIR

SEQ ID NO: 9756 - protein, 181 aa, Legionella gratiana
  REGION 1..181: note = tr|A0A378J1G7|A0A378J1G7_9GAMM GTP cyclohydrolase 1; OS = Legionella gratiana OX=45066 GN=folE PE=3 SV=1
MEQLYKDLLERIGEDVTREGLLDTPARAANAMHYLTKGYKENLEDIINDALFESDMSEMVIVKEIEMYSMCEHHLLPFLGKCHVGYLPHGKVIGLSKIARIVDYYARRLQIQERLTTEIASCIESITGARGVAVVIEAKHLCMMMRGVEKQNSVMTTSVMLGDMRNNPTSRAEFLTLIHGK

SEQ ID NO: 9757 - protein, 180 aa, Legionella hackeliae
  REGION 1..180: note = tr|A0A0A8UT98|A0A0A8UT98_LEGHA GTP cyclohydrolase 1; OS = Legionella hackeliae OX=449 GN=folE PE=3 SV=1
MQELYKQILKRIGEDPEREGLRDTPERAVNALLYLTKGYHEQLDEIINDALFESDMSEMVLVKDIEMYSMCEHHLLPFLGKCHVGYLPNGKVLGLSKIARIVDYFARRLQIQERLTSEIANCIQSITGARGVAVVMEAKHLCMMMRGVEKQGSVMTTSVMLGDMRNNTSSRIEFLQLIGS

SEQ ID NO: 9758 - protein, 179 aa, Legionella israelensis
  REGION 1..179: note = tr|A0A516MYN0|A0A516MYN0_9GAMM GTP cyclohydrolase 1; OS = Legionella israelensis OX=454 GN=folE PE=3 SV=1
MQEYYRKIIEEIGEDPAREGLRDTPERASNALKYLTKGYSESLKEIINNALFESDMSEMVIVKDIEMYSMCEHHLLPFLGKCHIGYLPNGKVIGLSKLARIVDYFARRLQIQERLTAEIAECIESITGARGVAVVIEAKHLCMMMRGVEKQNSIMTTSVMLGEMKNNPPSRSEFLNLIR

SEQ ID NO: 9759 - protein, 179 aa, Legionella israelensis
  REGION 1..179: note = tr|A0A0W0W8R7|A0A0W0W8R7_9GAMM GTP cyclohydrolase 1; OS = Legionella israelensis OX=454 GN=folE PE=3 SV=1
MQEYYRKIIEEIGEDPAREGLRDTPERAANALKYLTKGYSESLKEIINNALFESDMSEMVIVKDIEMYSMCEHHLLPFLGKCHIGYLPNGKVIGLSKLARIVDYFARRLQIQERLTAEIAECIESITGARGVAVVIEAKHLCMMMRGVEKQNSIMTTSVMLGEMKNNPPSRSEFLNLIR

SEQ ID NO: 9760 - protein, 179 aa, Legionella jamestowniensis
  REGION 1..179: note = tr|A0A0W0UHZ6|A0A0W0UHZ6_9GAMM GTP cyclohydrolase 1; OS = Legionella jamestowniensis OX=455 GN=folE PE=3 SV=1
MHELYKQILKRIGEDPEREGLRDTPERAANALLYLTKGYHEQLDDIINDALFESDMSEMVIVKDIEMYSMCEHHLLPFLGKCHVGYLPNGKVLGLSKIARIVDYFARRLQIQERLTSEIANCIQSITGARGVAVVMEAKHMCMMMRGVEKQNSVMTTSVMLGDMRNNPSSRSEFLQLIG

SEQ ID NO: 9761 - protein, 179 aa, Legionella jordanis
  REGION 1..179: note = tr|A0A0W0VDE1|A0A0W0VDE1_9GAMM GTP cyclohydrolase 1; OS = Legionella jordanis OX=456 GN=folE PE=3 SV=1
MQELYKEILTRIGEDPNREGLRDTPERAANAFRYLTKGYHEHLDDIINEALFESDMSEMVIVKDIEMYSMCEHHLLPFLGKCHVGYLPDGKVLGLSKVARIVDYFARRLQIQERLTTEIAHCIESITNARGVAVVMEAKHLCMMMRGVEKQGSVMTTSVMLGEMRNNPSSRSEFLRLIR

SEQ ID NO: 9762 - protein, 183 aa, Legionella lansingensis
  REGION 1..183: note = tr|A0A0W0VIW6|A0A0W0VIW6_9GAMM GTP cyclohydrolase 1; OS = Legionella lansingensis OX=45067 GN=folE PE=3 SV=1
MNLQRVEALIQELLIEMGEDISRKGLKRTPTRFAKALEFLTSGYTEDFKTIINETYFPHNSGLVINKNIAIYSLCEHHLLPFFGICHIGYIPKHQVIGLSKLTRISQTYARRLQVQERLTEQIAKTLMEEINAIGVGVMLNCRHLCNEMRGVEQNQSVMITCSTVGNLGLSEKEFIHFITSLE

SEQ ID NO: 9763 - protein, 179 aa, Legionella lansingensis
  REGION 1..179: note = tr|A0A0W0VRL4|A0A0W0VRL4_9GAMM GTP cyclohydrolase 1; OS = Legionella lansingensis OX=45067 GN=folE PE=3 SV=1
MQELYKQILKRIGEDPEREGLLDTPERAASALQYLTKGYHERLEEIINDALFESDMEEMVIVKDIEMYSLCEHHLLPFLGKCHVGYIPNGKVLGLSKVARIVDYYARRLQIQERLTTEIANCIESITGARGVAVVIEAKHLCMMMRGVEKQNSTMTTSVMLGEMRANASSRSEFLRLID

SEQ ID NO: 9764 - protein, 179 aa, Legionella londiniensis
  REGION 1..179: note = tr|A0A0W0VIY6|A0A0W0VIY6_9GAMM GTP cyclohydrolase 1; OS = Legionella londiniensis OX=45068 GN=folE PE=3 SV=1
MQELYKQLLEQIGENIDREGLKDTPERAANAIRYLTKGYREDLNEIINDALFESDMSEMVIVKDIEMYSMCEHHLLPFLGKCHVGYLPHGKVLGLSKIARIVDYFARRLQIQERLTTEIANCIAHITNARGVAVVIEARHLCMMMRGVEKQNSIMTTSVMLGDMRNNPSSRMEFLNLIR

SEQ ID NO: 9765 - protein, 179 aa, Legionella longbeachae
  REGION 1..179: note = tr|A0A378L355|A0A378L355_LEGLO GTP cyclohydrolase 1; OS = Legionella longbeachae OX=450 GN=folE PE=3 SV=1
MQDLYKTLLIEIGEDVAREGLRDTPERAAKAMRFLTKGYQEDLNEIINDALFESDMSEMVIVKDIELYSMCEHHLLPFLGKCHVGYLPNGKVLGLSKIARIVDYFARRLQIQERLTSEIANCISTITGAHGVAVIIEARHLCMMMRGVEKQNSVMSTSVMLGAMRNNASSRLEFLNLVR

SEQ ID NO: 9766 - protein, 181 aa, Legionella longbeachae
  REGION 1..181: note = tr|D3HP13|D3HP13_LEGLN GTP cyclohydrolase 1; OS = Legionella longbeachae serogroup 1 (strain NSW150); OX = 661367 GN=folE PE=3 SV=1
MEQIYTELLKLIGEDVTREGLVDTPARAANAMHYLTKGYQENLDDIINGALFESDMGEMVIVKDIEMYSMCEHHLLPFLGKCHVGYLPHGKVIGLSKIARIVDYFARRLQIQERLTTEIANCIESITGARGVAVVIEAKHLCMMMRGVEKQNSVMKTSVMLGEMRNNPTSRAEFLTLIHGK

SEQ ID NO: 9767 - protein, 181 aa, unidentified
  source 1..181: note = Legionella maceachernii
  REGION 1..181: note = tr|A0A0W0W6U1|A0A0W0W6U1_9GAMM GTP cyclohydrolase 1; OS = Legionella maceachernii OX=466 GN=folE PE=3 SV=1
MQELYKQILESIGEDIEREGLRSTPERAANALRYLTKGYHENLDEIINDALFDSDMSEMVIVKEIEMYSMCEHHLLPFLGKCHVGYIPNGKVLGLSKIARIVDYFARRLQIQERLTLEIADCISSITNARGVAVVIEAKHLCMMMRGVEKQDSVMTTSVMLGEMRDNASSRSEFLRLISKN

SEQ ID NO: 9768 - protein, 181 aa, unidentified
  source 1..181: note = Legionella massiliensis
  REGION 1..181: note = tr|A0A078KS91|A0A078KS91_9GAMM GTP cyclohydrolase 1; OS = Legionella massiliensis OX=1034943 GN=folE PE=3 SV=1
MRELYKKILEELGEDVNREGLRDTPERAANAIRYLTKGYNENLSDIINDALFASDMDEMVIVKDIELYSLCEHHLLPFIGKCHVGYLPNGKVIGLSKIARIVDYYARRLQIQERLTSEIATCIESITGARGVAVVIEAKHLCMMMRGVEKQHSIMTTSIMLGEMRSQQSSRSEFLLLAKGQ

SEQ ID NO: 9769 - protein, 179 aa, Legionella moravica
  REGION 1..179: note = tr|A0A378K2P4|A0A378K2P4_9GAMM GTP cyclohydrolase 1; OS = Legionella moravica OX=39962 GN=folE PE=3 SV=1
MEQLYKKLIEEVGEDVQREGLVDTPARAANAMRYLTKGYHESLDDIINNALFDSDMSEMVIVKDIELYSLCEHHLLPFIGKCHVGYLPSGKVIGLSKIARIVDFYARRLQIQERMTGEIAHCIEDITGARGVAVVIEAKHLCMMMRGVEKQNSVMTTSVMLGEMHHNSNCRLEFLNLVR

SEQ ID NO: 9770 - protein, 181 aa, Legionella nautarum
  REGION 1..181: note = tr|A0A0W0WLB6|A0A0W0WLB6_9GAMM GTP cyclohydrolase 1; OS = Legionella nautarum OX=45070 GN=folE PE=3 SV=1
MQELYKQILESIGEDVEREGLRGTPERAANAFRYLTKGYQENLDEIINDALFDSDMAEMVIVKDIEMYSMCEHHLLPFLGKCHVGYLPNGKVLGLSKIARIVDYFARRLQIQERLTLEIADCIASITNARGVAVVIEAKHLCMMMRGVEKQNSIMTTSVMRGEMQESSLSRSEFLRLISKG

SEQ ID NO: 9771 - protein, 179 aa, unidentified
  source 1..179: note = Legionella norrlandica
  REGION 1..179: note = tr|A0A0A2SXB4|A0A0A2SXB4_9GAMM GTP cyclohydrolase 1; OS = Legionella norrlandica OX=1498499 GN=folE PE=3 SV=1
MEKLYSNLLKELGEDITREGLKDTPGRAANALRYLTKGYNENLDEIINEALFDSDMSEMVIVKDIELYSLCEHHLLPFLGKCHVGYLPHGKVIGLSKIARIVDFYARRLQIQERLTGEIAHCIESITGARGVAVVIEAKHLCMMMRGVEKQNSVMTTSVMLGEMRNSPSSRIEFLNLIS

SEQ ID NO: 9772 - protein, 179 aa, Legionella oakridgensis; identical to SEQ ID NO: 9765
  REGION 1..179: note = tr|A0A0W0X4R1|A0A0W0X4R1_9GAMM GTP cyclohydrolase 1; OS = Legionella oakridgensis OX=29423 GN=folE PE=3 SV=1

SEQ ID NO: 9773 - protein, 179 aa, Legionella oakridgensis; identical to SEQ ID NO: 9765
  REGION 1..179: note = tr|W0BED7|W0BED7_9GAMM GTP cyclohydrolase 1; OS = Legionella oakridgensis ATCC 33761 = DSM 21215; OX = 1268635 GN=folE PE=3 SV=1

SEQ ID NO: 9774 - protein, 181 aa, Legionella parisiensis
  REGION 1..181: note = tr|A0A1E5JME8|A0A1E5JME8_9GAMM GTP cyclohydrolase 1; OS = Legionella parisiensis OX=45071 GN=folE PE=3 SV=1
MEKLYKELLIQLGEDVTREGLVDTPLRAANAMRYLTKGYNESLEEIINDALFDSDMSEMVILKDIEMYSMCEHHLLPFLGKCHVGYIPNGKVIGLSKIARIVDYFARRLQIQERLTTEIASCLEAITGARGVAVVIEAKHLCMMMRGVEKQNSIMTTSVMLGDMRNNPTSRSEFLTLTRNN

SEQ ID NO: 9775 - protein, 179 aa, Legionella pneumophila
  REGION 1..179: note = tr|A0A140IZ67|A0A140IZ67_LEGPN GTP cyclohydrolase 1; OS = Legionella pneumophila subsp. pascullei OX=91890; GN = folE PE=3 SV=1
MEKLYSNLLKELGEDISREGLKDTPGRAANALRYLTKGYNENLDEIINGALFDSDMSEMVIVKDIELYSLCEHHLLPFLGKCHVGYLPDGKVIGLSKIARIVDFYARRLQIQERLTGEIAHCIESITGARGVAVVIEAKHLCMMMRGVEKQNSVMTTSVMLGEMRNNSSCRLEFLNLIR

SEQ ID NO: 9776 - protein, 188 aa, Legionella pneumophila
  REGION 1..188: note = tr|Q5ZRW0|Q5ZRW0_LEGPH GTP cyclohydrolase 1; OS = Legionella pneumophila subsp. pneumophila (strain Philadelphia 1 / ATCC 33152 / DSM 7513) OX=272624 GN=folE2; PE = 3 SV=1
MAARLGILAMEKLYSNLLKELGEDINREGLKDTPGRAANALRYLTKGYNENLDEIINGALFDSDMSEMVIVKDIELYSLCEHHLLPFLGKCHVGYLPDGKVIGLSKIARIVDFYARRLQIQERLTGEIAHCIESTTGARGVAVVIEAKHLCMMMRGVEKQNSVMTTSVMLGEMRNNSSCRLEFLNLIR

SEQ ID NO: 9777 - protein, 179 aa, Legionella quateirensis
  REGION 1..179: note = tr|A0A378L0A0|A0A378L0A0_9GAMM GTP cyclohydrolase 1; OS = Legionella quateirensis OX=45072 GN=folE PE=3 SV=1
MEQLYKKLLEEVGEDIKREGLVDTPARAANAMRYLTKGYTESLDDIINGALFDSDMNEMVIVKDIELYSLCEHHLLPFIGKCHVGYLPNGKVIGLSKIARIVDFYARRLQIQERMTGEIARCVEDITGARGVAVVVEAKHLCMMMRGVEKQNSVMTTSVMLGEMRQNSNSRLEFLNLVR

SEQ ID NO: 9778 - protein, 180 aa, Legionella quinlivanii
  REGION 1..180: note = tr|A0A364LLE0|A0A364LLE0_9GAMM GTP cyclohydrolase 1; OS = Legionella quinlivanii OX=45073 GN=folE PE=3 SV=1
MHELYTKILEEIGEDPNREGLKDTPKRAATAFQYLTKGYNEDLQDIINNALFESDMSEMVIVKDIELYSMCEHHLLPFLGKCHVGYLPNGKVLGLSKVARIVEYFARRLQIQERLTMEIASCIESITGAKGVAVVIEAKHLCMMMRGVEKQNSSMLTSVMLGAMRQNVSSRAEFLSLIGK

SEQ ID NO: 9779 - protein, 180 aa, Legionella quinlivanii
  REGION 1..180: note = tr|A0A0W0Y4M4|A0A0W0Y4M4_9GAMM GTP cyclohydrolase 1; OS = Legionella quinlivanii OX=45073 GN=folE PE=3 SV=1
MHELYTKILEEIGEDPNREGLRDTPKRAATAFQYLTKGYNEDLQDIINNALFESDMSEMVIVKDIELYSMCEHHLLPFLGKCHVGYLPNGKVLGLSKVARIVEYFARRLQIQERLTMEIASCIESITGAKGVAVVIEAKHLCMMMRGVEKQNSSMLTSVMLGDMRQNVSSRAEFLSLIGK

SEQ ID NO: 9780 - protein, 179 aa, Legionella rubrilucens
  REGION 1..179: note = tr|A0A0W0XQJ5|A0A0W0XQJ5_9GAMM GTP cyclohydrolase 1; OS = Legionella rubrilucens OX=458 GN=folE PE=3 SV=1
MQELYKKILEEIGEDPSREGLRDTPERAANAIRYLTKGYTEDLNDIINNALFESDMSEMVIVKEIELYSMCEHHLLPFLGKCHVGYLPSGKVLGLSKIARIVDYFARRLQIQERLTAEIAACIENITGARGVGVVIEAKHLCMMMRGVEKQNSVMTTSVMLGDMRNNSNTRSEFLKLIR

SEQ ID NO: 9781 - protein, 181 aa, Legionella sainthelensi
  REGION 1..181: note = tr|A0A0W0YND7|A0A0W0YND7_9GAMM GTP cyclohydrolase 1; OS = Legionella sainthelensi OX=28087 GN=folE PE=3 SV=1
MEQLYTELLKLIGEDVTREGLIDTPARAANAMHYLTKGYQENLEDIINGALFESDMSEMVIVKDIEMYSMCEHHLLPFLGKCHVGYLPHGKVIGLSKIARIVDYFARRLQIQERLTTEIANCIESITGARGVAVVIEAKHLCMMMRGVEKQNSVMTTSVMLGDMRNNPTSRSEFLTLIHGK

SEQ ID NO: 9782 - protein, 181 aa, Legionella sainthelensi
  REGION 1..181: note = tr|A0A447SUK2|A0A447SUK2_9GAMM GTP cyclohydrolase 1; OS = Legionella sainthelensi OX=28087 GN=folE PE=3 SV=1
MEQLYTELLKLIGEDVTREGLIDTPARAANAMHYLTKGYQENLEDIINGALFESDMSEMVIVKDIEMYSMCEHHLLPFLGKCHVGYLPHGKVIGLSKIARIVDYFARRLQIQERLTTEIANCIESITGARGVAVVIEAKHLCMMMRGVEKQNSVMTTSVMLGDMRNNPTSRAEFLTLIHRK

SEQ ID NO: 9783 - protein, 181 aa, Legionella santicrucis
  REGION 1..181: note = tr|A0A0W0Z8J2|A0A0W0Z8J2_9GAMM GTP cyclohydrolase 1; OS = Legionella santicrucis OX=45074 GN=folE PE=3 SV=1
MEQLYTELLKLIGEDVTREGLVDTPTRAANAMHYLTKGYQENLEDIINGALFESDMSEMVIVKDIEMYSMCEHHLLPFLGKCHVGYLPHGKVIGLSKIARIVDYFARRLQIQERLTTEIANCIESITGARGVAVVIEAKHLCMMMRGVEKQNSVMTTSVMLGDMRNNPTSRAEFLTLIHGK

SEQ ID NO: 9784 - protein, 179 aa, Legionella shakespearei
  REGION 1..179: note = tr|A0A0W0YQT4|A0A0W0YQT4_9GAMM GTP cyclohydrolase 1; OS = Legionella shakespearei DSM 23087 OX=1122169 GN=folE; PE = 3 SV=1
MEQLYKKLLKELGEDVTREGLIDTPARATNAMRYLTKGYTENIDDIINGALFESEMSEMVIVKDIELYSLCEHHLLPFLGKCHVGYLPNSKVIGLSKIARIVDFYARRLQIQERLTGEIAQCIESITGAHGVAVVIEAKHLCMMMRGVEKQNSVMTTSVMLGEMRSNADSRMEFLNLTR

SEQ ID NO: 9785 - protein, 182 aa, Legionella sp.
  REGION 1..182: note = tr|A0A1Q4BDY1|A0A1Q4BDY1_9GAMM GTP cyclohydrolase 1; OS = Legionella sp. 40-6 OX=1895903 GN=folE PE=3 SV=1
MHELYKKILLEIGEEPNRQGLIDTPERAANAMRYLTKGYQEDIHDIINNALFDSEMSELVIVKDIELYSLCEHHLLPFFGKCHVGYIPNGKVLGLSKIARIVDLFARRLQIQERLTSEIAHCIEDATQAQGVGVVIEARHLCMMMRGVEKQNSIMSTSVLLGDLRLNPTSRAEFLTLIQSKN

SEQ ID NO: 9786 - protein, 204 aa, Legionella sp.
  REGION 1..204: note = tr|A0A1Q3TYH6|A0A1Q3TYH6_9GAMM GTP cyclohydrolase 1; OS = Legionella sp. 39-23 OX=1895902 GN=folE PE=3 SV=1
MQAQKYSIDLDQEQERLDDQDAGDVIKQMLELIGENPDREGLVDTPRRVVDSWKELYEGYSIDPAKVLSTCFSNKKQYNQLVLLRDIEMFSMCEHHMLPFYGRVHIGYIPDNKVVGLSKLARIVECFSRRLQIQEQLTVQIAEAIQTHLNPKGVGVMIECQHLCMVARGVNKQNPYMVTSHFMGILETDPERRKEFNEQITRKL

SEQ ID NO: 9787 - protein, 179 aa, Legionella spiritensis
  REGION 1..179: note = tr|A0A0W0Z7H1|A0A0W0Z7H1_LEGSP GTP cyclohydrolase 1; OS = Legionella spiritensis OX=452 GN=folE PE=3 SV=1
MQELYKKILTEIGEDPSREGLRDTPERAANALRYLTKGYHENLYDIINNALFESDMSEMVIVKDIEMYSMCEHHLLPFLGKCYVGYLPNGKVLGLSKIARIVDFFARRLQIQERLTTEIAKCLESITNARGVAVVIEAKHLCMMMRGVEKQNSTMTTSVMLGEMRDNPGSRNEFLRLIR

SEQ ID NO: 9788 - protein, 181 aa, unidentified
  source 1..181: note = Legionella steelei
  REGION 1..181: note = tr|A0A0W0ZP14|A0A0W0ZP14_9GAMM GTP cyclohydrolase 1; OS = Legionella steelei OX=947033 GN=folE PE=3 SV=1
MEKLYKELLTQLGEDVTRQGLVDTPARAANAIRYLTKGYNENLDDIVNDALFDSDMNEMVIVKDIEMYSMCEHHLLPFLGKCHVGYIPNGKVIGLSKMARIVDYFARRLQIQERLTTEIATCLESITGARGVAVVIEAKHLCMMMRGVEKQNSIMTTSVMLGEMRNNPTSRAEFLMLTQGK

SEQ ID NO: 9789 - protein, 181 aa, Legionella steigerwaltii
  REGION 1..181: note = tr|A0A378LEQ9|A0A378LEQ9_9GAMM GTP cyclohydrolase 1; OS = Legionella steigerwaltii OX=460 GN=folE PE=3 SV=1
MEKLYKELLTQLGEDVTRQGLIDTPERAANAIRYLTKGYNENLEDIINGALFDSDMSEMVIVKDIEMYSMCEHHLLPFLGKCHVGYIPNGKVIGLSKIARIVDYFARRLQIQERLTTEIANCLQSITGARGVAVVIEAKHLCMMMRGVEKQNSIMTTSVMLGDMRNNPTSRAEFLTLTHGN

SEQ ID NO: 9790 - protein, 179 aa, Legionella taurinensis
  REGION 1..179: note = tr|A0A3A5LKD9|A0A3A5LKD9_9GAMM GTP cyclohydrolase 1; OS = Legionella taurinensis OX=70611 GN=folE PE=3 SV=1
MQELYKKILEEIGEDPSREGLRDTPERAANAMRYLTKGYAEDLNDIINNALFESDMSEMVIVKEIELYSMCEHHLLPFLGKCHVGYLPSGKVLGLSKIARIVDYFARRLQIQERLTTEIAACIESITGARGVGVVIEAKHLCMMMRGVEKQNSIMTTSVMLGDMRNNSNTRSEFLKLIR

SEQ ID NO: 9791 - protein, 181 aa, Legionella tucsonensis
  REGION 1..181: note = tr|A0A0W0ZTE9|A0A0W0ZTE9_9GAMM GTP cyclohydrolase 1; OS = Legionella tucsonensis OX=40335 GN=folE PE=3 SV=1
MEKLYKELLIQLGEDVTREGLVDTPLRAANAMRYLTKGYNESLEEIINDALFDSDMSEMVIVKDIEMYSMCEHHLLPFLGKCHVGYIPNGKVIGLSKIARIVDYFARRLQIQERLTTEIASCLESITGARGVAVVIEAKHLCMMMRGVEKQNSIMTTSVMLGDMRNNPTSRAEFLTLTLNK

SEQ ID NO: 9792 - protein, 183 aa, Legionella wadsworthii
  REGION 1..183: note = tr|A0A378LQF3|A0A378LQF3_9GAMM GTP cyclohydrolase 1; OS = Legionella wadsworthii OX=28088 GN=folE PE=3 SV=1
MEKLYKELLSQLGEDVNRQGLIDTPARAANAMRYLTKGYNESLEEIINGALFDSDMSEMVIVKDIEMYSMCEHHLLPFLGKCHVGYIPNGKVIGLSKIARIVDYFARRLQIQERLTTEIANCLESITGARGVAVVIEAKHLCMMMRGVEKQNSIMTTSVMLGDMRNNPTSRGEFLTLTHNYNK

SEQ ID NO: 9793 - protein, 179 aa, Legionella waltersii
  REGION 1..179: note = tr|A0A0W1AK27|A0A0W1AK27_9GAMM GTP cyclohydrolase 1; OS = Legionella waltersii OX=66969 GN=folE PE=3 SV=1
MEQLFSKLIKEIGEDLNREGLRDTPERAANALRYLTKGYFENLDDVINGALFDSDMSEMVIVKDIELYSLCEHHMLPFLGKCHVGYMPNGKVIGLSKIARIVDYFARRLQIQERLTGEIASCIESITGARGVSVVIEAKHLCMMMRGVEKQNSIMTTSVMLGDMRNSASSRAEFLNLIR

SEQ ID NO: 9794 - protein, 179 aa, Legionella worsleiensis
  REGION 1..179: note = tr|A0A0W1AF57|A0A0W1AF57_9GAMM GTP cyclohydrolase 1; OS = Legionella worsleiensis OX=45076 GN=folE PE=3 SV=1
MEQLYKKLLEDIGEDIQREGLVETPARAANAMRYLTKGYSESLDDIINGALFESDMSEMVIVKDIELYSLCEHHLLPFIGKCHVGYLPNGKVIGLSKIARIVDFYARRLQIQERLTGEIAHCIEQITGARGVAVVVEAKHLCMMMRGVEKQNSVMTTSVMLGEMRHNSSCRLEFLNLIR

SEQ ID NO: 9795 - protein, 187 aa, unidentified
  source 1..187: note = Legionellaceae bacterium
  REGION 1..187: note = tr|A0A2E5Y7R4|A0A2E5Y7R4_9GAMM GTP cyclohydrolase 1; OS = Legionellaceae bacterium OX=2026753 GN=folE PE=3 SV=1
MATRLGFFMQTLYRQIITELGEDAEREGLVNTPLRAANAMRYLTKGYTENLDEILNNALFDSDMSEMVIVKDIELYSMCEHHLLPFIGKCHIGYLPDKKVLGLSKIARIVDHFAKRLQIQERLTSEIAHCMNDVTHARGVAVVVQAKHLCMMMRGVEKQNSSMVTSVMLGDMRHNPVSRAEFLKLID

SEQ ID NO: 9796 - protein, 225 aa, unidentified
  source 1..225: note = Legionellaceae bacterium
  REGION 1..225: note = tr|A0A2E2WLD7|A0A2E2WLD7_9GAMM GTP cyclohydrolase 1; OS = Legionellaceae bacterium OX=2026753 GN=folE PE=3 SV=1
MDLEKQLKDIEAMGNAHAGSSSDTPLRDDAFELSDMEKIAAIKEDVKHILETLGMDLTDDSLKGTPSRVAKMFVQEIFAGLHPDRKPKASTFENKYKYGEMLVEKNITLYSTCEHHLLPIVGKAHIAYISNGTVVGLSKMNRVVDYFAKRPQVQERLTMQIVKELQGILGTDDVACVIDAKHLCVNSRGIRDIDSSTVTSEFGGKFKDPAVRSEFLDYIKLETEF

SEQ ID NO: 9797 - protein, 180 aa, unidentified
  source 1..180: note = Legionellales bacterium
  REGION 1..180: note = tr|A0A1G0X354|A0A1G0X354_9GAMM GTP cyclohydrolase 1; OS = Legionellales bacterium RIFCSPHIGHO2_12_FULL_37_14; OX = 1798568 GN=folE PE=3 SV=1
MQHLFKEILKSIGEDPTREGLVRTPERAADALSYLTQGYKQNFNEIINGAIFESTMNEMVIVKNIEMYSMCEHHLLPFHGQCHVGYLPNGKIIGLSKIARIVDYYARRLQVQERLSLEIAECIESITGARGVGVVIEAKHLCMMMRGVTKQNSTMATSVMLGEMRNNPSSRMEFIQLIHS

SEQ ID NO: 9798 - protein, 185 aa, unidentified
  source 1..185: note = Legionellales bacterium
  REGION 1..185: note = tr|A0A2E2TIX9|A0A2E2TIX9_9GAMM GTP cyclohydrolase 1; OS = Legionellales bacterium OX=2026754 GN=folE PE=3 SV=1
MQEKLITNFREIISSIGEDLNRDGLKKTPERAASAFEFLTQGYQQNLDEIINEAVFESDNDEMVIVRNIELYSLCEHHLLPFTGKCHVAYIPTGKVLGLSKIARIVDYFARRLQIQETLTKEIADTIMQATNAEGVGVIIEAKHLCMMMRGVEKQNSTMTTSMMLGSFRHEASTRNEFLTLAMKD

SEQ ID NO: 9799 - protein, 191 aa, Leifsonia aquatica
  REGION 1..191: note = tr|U2RRL7|U2RRL7_LEIAQ GTP cyclohydrolase 1; OS = Leifsonia aquatica ATCC 14665 OX=1358026 GN=folE PE=3; SV = 1
MTGFDRARIEAAVAEILAAIGEDPSRPGLASTPSRVADAYAEFFSGVGVDASALLGEPVPLESDHADTVILRDIAFRSVCEHHLLPFVGVAHVAYLPGESVVGLGRIPRVIDALAARPQLQERLTEQIADAVESGAGARGVLVVLDASHACVTTRGPRQTAATTVTVATRGAYTDPVARAELMALIGSGAA

SEQ ID NO: 9800 - protein, 198 aa, unidentified
  source 1..198: note = Leifsonia flava
  REGION 1..198: note = tr|A0A4Y9RAJ8|A0A4Y9RAJ8_9MICO GTP cyclohydrolase 1; OS = Leifsonia flava OX=2561933 GN=folE PE=3 SV=1
MTGVDRPRIEAAVTELLLAIGEDPSRPGLVKTPKRVADSYAEFFGGLEVDPVSHLLDAVPLGSSDDGLPQTSDAVIVRGIDFRSICEHHLLPFVGIVHVAYLPGERIVGLGKLADVVETLSTRPQLQERLTEEIADALETGLAARGVLVVMDAVHRCVVARGSRQAGSSTVTVASRGELTDAVARAELMALIGESPRG

SEQ ID NO: 9801 - protein, 195 aa, Leifsonia rubra
  REGION 1..195: note = tr|S7VY00|S7VY00_9MICO GTP cyclohydrolase 1; OS = Leifsonia rubra CMS 76R OX=1348338 GN=folE PE=3 SV=1
MSIDVARIEAAVAEMLSAVGEDPARAGLTATPRRVAEAYSEFFAGNELNALDHLSDSIEFTAKADQTGELVLVRDIEFRSMCEHHLLPFLGVAHVAYVPDERIIGLGNIARVVETISARAQLQERLTEEITDAINDGLSPRGVLVVIDAVHGCVSTRGPRQTASSTVTLASRGILGDPLERAEVMALIGSRGGDG

SEQ ID NO: 9802 - protein, 192 aa, Leifsonia sp.
  REGION 1..192: note = tr|A0A1H4BVN6|A0A1H4BVN6_9MICO GTP cyclohydrolase 1; OS = Leifsonia sp. 21MFCrub1.1 OX=1798223 GN=folE PE=3 SV=1
MSGIDRPRIEAAVAEILAAIGEDPARPGLESTPSRVADSYAEFFAGIGRDAEADLGEPVPLEEGRQAETVLLRDIEFRSVCEHHLLPFVGVAHVAYLPGDTVIGLGRIPRAIDTLASRPQIQERLTEQIADTIEQGAAARGVLVVLDAAHSCVTTRGPRQTGSTTVTVAARGAYTDPVVRAELIALIGRGVK

SEQ ID NO: 9803 - protein, 220 aa, Leifsonia sp.
  REGION 1..220: note = tr|A0A421AEY0|A0A421AEY0_9MICO GTP cyclohydrolase 1; OS = Leifsonia sp. M321 24_2 OX=2183919 GN=folE PE=3 SV=1
MSLTTESHEDDPPLHPVPDPLPGPRTAAVDRLRAEAAIADLLNALGRDTRDPQLADTPRRVAAAFAELLDAPPLRPTTFPNDEQYDDLVLVRGIPFTSLCAHHLLPFRGVAHVGYLPGDRLLGLSKLARAVEHFSRDLQLQERLTAQVADWLDTELAPRGVGVVLEAEHLCMAIRGVRAPGAVTRTSRFTGELASTGARRFAEASSFDAASPFDEWRAER

SEQ ID NO: 9804 - protein, 191 aa, Leifsonia xyli
  REGION 1..191: note = sp|Q6ACQ1|GCH1_LEIXX GTP cyclohydrolase 1; OS = Leifsonia xyli subsp. xyli (strain CTCB07) OX=281090; GN = folE PE=3 SV=1
MTGFDRARIEAAVAEILAAVGEDPSRPGLSATPSRVADAYAEFFAGLGRDAEAELGEPVPLEQGQAETVILREISFRSVCEHHLLPFIGVAHVAYLPGEAVIGLGRIPRVIDTLAARPQVQERLTEQIADTFEAGAGARGVLVVLSAEHGCVTARGPRQVAATTVTLAARGEFAEPAARAELIALIGCGAA

SEQ ID NO: 9805 - protein, 191 aa, Leifsonia xyli; identical to SEQ ID NO: 9804
  REGION 1..191: note = tr|A0A1E2SIU1|A0A1E2SIU1_LEIXY GTP cyclohydrolase 1; OS = Leifsonia xyli subsp. xyli OX=59736 GN=folE PE=3 SV=1

SEQ ID NO: 9806 - protein, 367 aa, unidentified
  source 1..367: note = Leisingera aquaemixtae
  REGION 1..367: note = tr|A0A0P1H8U4|A0A0P1H8U4_9RHOB GTP cyclohydrolase FolE2 OS=Leisingera aquaemixtae OX=1396826 GN=folE2 PE=3; SV = 1
MNIHNRDAVEAPDREAAAAALDVLRAWAGTVTETEIAELDPAVARLLPGREVGNYPELSRQYPEDFKSDEAYRATLPDLQNGPTSLIRGAKEQIQHVGISNFRLPIRFHTRDDGDLTLETSVTGTVSLDAGKKGINMSRIMRTFYKHAERTFSFEVMARALDDYLSDLDSPDARIQMRFSFPARVESLRSGLSGYQYYDFALELVDHDGVREKIMHLDYVYSSTCPCSLELSEHARQARGQLATPHSQRSVARISVQSVPGSQCLWFEDLIELCRKAVPTETQVMVKREDEQAFAELNAANPIFVEDAARLFCEALQGDPRIGDFRVVASHQESLHSHDAVSVLTQGPLFKAMSLDPKLFATLIHHG

SEQ ID NO: 9807 - protein, 367 aa, Leisingera methylohalidivorans
  REGION 1..367: note = tr|V9VQL5|V9VQL5_9RHOB GTP cyclohydrolase FolE2; OS = Leisingera methylohalidivorans DSM 14336 OX=999552; GN = folE2 PE=3 SV=1
MNIHNRDAAGAPDREAAAAALDVLRAWAGTVTETEIAQLDPAVARLLPGREVGNYPDLSRHYPEDFKSDEAYRATLPDLQNGPTSLIRGAQEQIQHVGISNFRLPIRFHTRDDGDLTLETSVTGTVSLDAAKKGINMSRIMRTFYNHAERTFSFEVMAAALDDYLSDLDSPDARIQMRFSFPARVESLRSGLSGYQYYDFALELVDHDGVREKIMHLDYVYSSTCPCSLELSEHARQSRGQLATPHSQRSVARISVQSVPDSGCLWFEDLIELCRQAVPTETQVMVKREDEQAFAELNAANPIFVEDAARLFCEALQGDARIGDFRVIASHQESLHSHDAVSVLTQGPLFKAMSLDPKLFATLIHQG

SEQ ID NO: 9808 - protein, 367 aa, Leisingera sp.
  REGION 1..367: note = tr|A0A0C1G8A4|A0A0C1G8A4_9RHOB GTP cyclohydrolase FolE2 OS=Leisingera sp. ANG-M7 OX=1577902 GN=folE2 PE=3; SV = 1
MNMHNRDAAEAPDREAAAAALDVLRAWAGTVTETEIAELDPAVARLLPGREVGNYPELSRQYPEDFKSDEAYRATLPDLQNGPTSLIRGAKEQIQHVGISNFRLPIRFHTRDDGDLTLETSVTGTVSLDAGKKGINMSRIMRTFYKHAESTFSFEVMASALDDYLSDLDSPDARIQMRFSFPARVSSLRSGLSGYQYYDFALELVDHDGVREKIMHLDYVYSSTCPCSLELSEHARHARGQLATPHSQRSVARISVQSVPGSECLWFEDLIELCRKAVPTETQVMVKREDEQAFAELNAANPIFVEDAARLFCEALQADDRIGDFRVIASHQESLHSHDAVSVLTQGPLFKAMSLDPKLFSTLIHQG

SEQ ID NO: 9809 - protein, 367 aa, Leisingera sp.
  REGION 1..367: note = tr|A0A481PJ27|A0A481PJ27_9RHOB GTP cyclohydrolase FolE2 OS=Leisingera sp. NJS204 OX=2508307 GN=folE2 PE=3; SV = 1
MNIHNRDAAEAPDREAAAAALDVLRAWAGTVTETEIAQLDPAVARLLPGREVGNYPDLSRHYPEDFTSDEAYRATLPDLQNGPTSLIRGAQEQIQHVGISNFRLPIRFHTRDDGDLTLETSVTGTVSLDAGKKGINMSRIMRTFYKHAERTFSFEVMAAALDDYLSDLDSPDARIQMRFSFPARVQSLRSGLSGYQYYDFALELVDHDGVREKIMHMDYVYSSTCPCSLELSEHARQSRGQLATPHSQRSVARISLQSVPGSDCLWFEDLIELCRQAVPTETQVMVKREDEQAFAELNAANPIFVEDAARLFCEALQGDARIGDFRVVASHQESLHSHDAVSVLTQGPLFKAMSLDPKLFSTLIHQG

SEQ ID NO: 9810 - protein, 222 aa, unidentified
  source 1..222: note = Lelliottia amnigena
  REGION 1..222: note = tr|A0A1A9FEB8|A0A1A9FEB8_LELAM GTP cyclohydrolase 1; OS = Lelliottia amnigena OX=61646 GN=folE PE=3 SV=1
MPSLSKEAALVHEALVARGLETPLRPPVNELDNETRKRLISGHMTEIMQLLNLDLSDDSLMETPQRIAKMYVDEIFSGLDYANFPKITVIENKMNVDEMVTVRDITLTSTCEHHFVTIDGKATVAYIPKDTVIGLSKINRIVQFFAQRPQVQERLTQQILTALQTLLGTNNVAVSIDAVHYCVKARGVRDATSATTTTSLGGLFKSSQNTRQEFLRAVRHHN

SEQ ID NO: 9811 - protein, 222 aa, unidentified
  source 1..222: note = Lelliottia amnigena
  REGION 1..222: note = tr|A0A3S5XR66|A0A3S5XR66_LELAM GTP cyclohydrolase 1; OS = Lelliottia amnigena OX=61646 GN=folE PE=3 SV=1
MPSLSKEAALVHEALVARGLETPLRPPVTELDNETRKRLIAGHMTEIMQLLNLDLSDDSLMETPQRIAKMYVDEIFSGLDYANFPKITVIENKMKVDEMVTVREITLTSTCEHHFVTIDGKATVAYIPKDTVIGLSKINRIVQFFAQRPQVQERLTQQILTALQTLLGTNNVAVSIDAVHYCVKARGVRDATSATTTTSLGGLFKSSQNTRQEFLRAVRHHN

SEQ ID NO: 9812 - protein, 222 aa, unidentified
  source 1..222: note = Lelliottia nimipressuralis
  REGION 1..222: note = tr|A0A4Q0W576|A0A4Q0W576_9ENTR GTP cyclohydrolase 1; OS = Lelliottia nimipressuralis OX=69220 GN=folE PE=3 SV=1
MPSLSKEAALVHEALVARGLETPLRPPVNELDNETRKRLISGHMTEIMQLLNLDLSDDSLMETPNRIAKMYVDEIFSGLDYANFPKITVIENKMKVDEMVTVRDITLTSTCEHHFVTIDGKATVAYIPKDTVIGLSKINRIVQFFAQRPQVQERLTQQILTALQTLLGTNNVAVSIDAVHYCVKARGVRDATSATTTTSLGGLFKSSQNTRQEFLRAVRHHN

SEQ ID NO: 9813 - protein, 222 aa, unidentified; identical to SEQ ID NO: 7844
  source 1..222: note = Lelliottia nimipressuralis
  REGION 1..222: note = tr|A0A1J5WNQ6|A0A1J5WNQ6_9ENTR GTP cyclohydrolase 1; OS = Lelliottia nimipressuralis OX=69220 GN=folE PE=3 SV=1

SEQ ID NO: 9814 - protein, 222 aa, unidentified
  source 1..222: note = Lelliottia sp.
  REGION 1..222: note = tr|A0A2S5C851|A0A2S5C851_9ENTR GTP cyclohydrolase 1; OS = Lelliottia sp. 7254-16 OX=2080842 GN=folE PE=3 SV=1
MPSLSKEAALVHEALVARGLETPLRPPVNELDKETRKRLISGHMTEIMQLLNLDLSDDSLMETPNRIAKMYVDEIFSGLDYANFPKITVIENKMKVDEMVTVRDITLTSTCEHHFVTIDGKATVAYIPKDTVIGLSKINRIVQFFAQRPQVQERLTQQILTALQTLLGTNNVAVSIDAVHYCVKARGVRDATSATTTTSLGGLFKSSQNTRQEFLRAVRHHN

SEQ ID NO: 9815 - protein, 223 aa, Leminorella grimontii
  REGION 1..223: note = tr|A0A085HKD9|A0A085HKD9_9GAMM GTP cyclohydrolase 1; OS = Leminorella grimontii ATCC 33999 = DSM 5078 OX=1005999; GN = folE PE=3 SV=1
MSSLSQEAILVHAALEAKGLETPLRGTPVDADTRKQKIEEHMTAIMGLLNLDLTDDSLAETPSRIAKMYVDEVFSGLDYANFPKITLIENKMRVDEMVTVRDITLTSTCEHHFVTIDGKATVAYIPKDYVIGLSKINRIVRFFSQRPQVQERLTQQILVALQTLLGTTNVAVSIDAIHYCVKSRGVCDATSSTSTTSLGGIFKSNPSTRQEFLRSVRHAPHHP

SEQ ID NO: 9816 - protein, 223 aa, Leminorella grimontii; identical to SEQ ID NO: 9815
  REGION 1..223: note = tr|A0A485AFJ2|A0A485AFJ2_9GAMM GTP cyclohydrolase 1; OS = Leminorella grimontii OX=82981 GN=folE PE=3 SV=1

SEQ ID NO: 9817 - protein, 223 aa, Leminorella richardii
  REGION 1..223: note = tr|A0A2X4V3U9|A0A2X4V3U9_9GAMM GTP cyclohydrolase 1; OS = Leminorella richardii OX=158841 GN=folE PE=3 SV=1
MSSLSQEAMLVHAALEAKGLETPLRGAPVDAATSKQQIEEHMTAIMRLLNLDLTDDSLAETPSRIAKMYVDEIFSGLDYANFPKITLIENKMSVDEMVTVRDITLTSTCEHHFVTIDGKATVAYIPKDYVIGLSKINRIVRFFSQRPQVQERLTQQILVALQTLLGTTNVAVSIDAIHYCVKSRGVCDATSSTSTTSLGGLFKSNPSTRQEFLRSVRHAPHHP

SEQ ID NO: 9818 - protein, 308 aa, unidentified
  source 1..308: note = Lentibacillus amyloliquefaciens
  REGION 1..308: note = tr|A0A0U4F2T6|A0A0U4F2T6_9BACI GTP cyclohydrolase FolE2 OS=Lentibacillus amyloliquefaciens OX=1472767; GN = folE2 PE=3 SV=1
MNKVRSISNKQLPNKAQRHKLFGSVEPGPRTKPSEKSKMADLQNSKEDFLFDLDEVGIANVKHPITVASSLEPKSQTTIGTFEFSSSIDKSSKGTNMSRFTEQLQAFHQKGFVIDIKTLKIFTKDLAERLDQKDAEIKVSFPWFYERRGPQSDLPGMNHADITICVNYDQSAGYTVEASMSALITTLCPCSKEISEYSAHNQRGEVSINVSLIEDFDEESADWKAFLLEAAESNASARLHPVLKRPDEKMVTEQAYENPRFVEDLARLVAADLYEMPFVAKFQVKCRNEESIHMHDAIASITYDKSQQ

SEQ ID NO: 9819 - protein, 314 aa, Lentibacillus halodurans
  REGION 1..314: note = tr|A0A1I0VHB3|A0A1I0VHB3_9BACI GTP cyclohydrolase FolE2 OS=Lentibacillus halodurans OX=237679 GN=folE2 PE=3; SV = 1
MDKVRTISKKQLPDKAQRHKLFGSVEPGPRTKPREKSKMADLQNTREDFLFDLDAVGIANVKHPITVASNLEPKTQTTVGTFEFSSSIDKSSKGTNMSRFTEQLQAFHQKGFVINLKTLKRFAKDLAERLDQKDAEIKVSYPWFYERRGPQSDLSGMNHADITIRVNYDTSAGCSIEASMSSLITTLCPCSKEISEYSAHNQRGEVTMTVSLTEGFDEETMDWKELLLEAAESNASARLHPVLKRPDEKMVTEQAYENPRFVEDLARLVAADLYEMPFVTRFQVQCRNEESIHMHDAIASITYDKLEDDESQEG

SEQ ID NO: 9820 - protein, 312 aa, Lentibacillus persicus
  REGION 1..312: note = tr|A0A1I1V5K4|A0A1I1V5K4_9BACI GTP cyclohydrolase FolE2 OS=Lentibacillus persicus OX=640948 GN=folE2 PE=3; SV = 1
MNKVTSISKKQLPDKAQRHKLFGSVEPGPRTKPSEKSKMADLQNSKEDFLFDLDAVGIANVKHPITVASSLEPKTQTTIGTFEFSSRIDKSSKGTNMSRFTEQLQSFHQKGFIIDIKTLKRFAKDLAERLDQKDAEIKVSFPWFYERRGPQSDLSGMNHADITIHVNYDRTKGYTVEASMSALITTLCPCSKEISEYSAHNQRGEVSMKVSLTADFEEEATDWKELLLEAAESNASSRLHPVLKRPDEKMVTEQAYENPRFVEDLTRLVAADLYEMPFVAKFQVKCRNEESIHMHDAVASVTYDKQQEKLEG

SEQ ID NO: 9821 - protein, 313 aa, Lentibacillus salicampi
  REGION 1..313: note = tr|A0A4Y9AI51|A0A4Y9AI51_9BACI GTP cyclohydrolase FolE2 OS=Lentibacillus salicampi OX=175306 GN=folE2 PE=3; SV = 1
MDKARTIAKKQLPDKAQRHKLFGSVEPGPRTKPSKKSQMADLQNTKKDFLFDLDAVGIANVKHPITIASNQEPKTQTTIGTFEFSSSIEKSSKGTNMSRFTEQLQEFYQKGLVIDLKTLKGFTKNLAERLDQKDSEIKVQFPWFYERRGPQSGLSGMNHADITIRVKYDTEAGYTIEVSLSSLVTTLCPCSKEISEYSAHNQRGEVTITVSLAEDFDEESMDWKEWLLDAAESNASARLHPVLKRPDEKMVTEHAYENPRFVEDLARLVAADLYEMSFVNKFHVHCRNEESIHMHDAVASITYDKLQSESQEG

SEQ ID NO: 9822 - protein, 189 aa, Lentibacillus sp.
  REGION 1..189: note = tr|A0A549YJ65|A0A549YJ65_9BACI GTP cyclohydrolase 1; OS = Lentibacillus sp. NKC851-2 OX=2584959 GN=folE PE=3 SV=1
MAVDHEKIEQAARMMLEAIGEDPDREGLIDTPSRIARMYEEVFQGLNQDPKEYFATIFGEDHEELVLVKDIPFYSMCEHHLVPFYGVAHVGYIPKGGRVTGLSKLARAVEAVTRRPQLQERVTATIADSLKETLDPHGVIVVVEAEHMCMTMRGVKKPGSKTVTSAVRGIFQTDAASRAEVFSLIKGNN

SEQ ID NO: 9823 - protein, 190 aa, Lentibacillus sp.
  REGION 1..190: note = tr|A0A4Q3X3G9|A0A4Q3X3G9_9BACI GTP cyclohydrolase 1; OS = Lentibacillus sp. SSKP1-9 OX=2510307 GN=folE PE=3 SV=1
MAVDHAKIEQAARMILEAIGEDPDREGLVETPSRIARMYDEVFQGMNQDPKEYFATIFGEDHEELVLVKDIPFYSMCEHHLVPFYGVAHVGYIPKGGKVTGISKLARAVEAVTRRPQLQERVTATIADSLKETLDPHGVIVVVEAEHMCMTMRGIKKPGSKTVTSAVRGTFQTDAASRAEVFSLIKGNNG

SEQ ID NO: 9824 - protein, 366 aa, Lentibacter algarum
  REGION 1..366: note = tr|A0A1H3HVZ4|A0A1H3HVZ4_9RHOB GTP cyclohydrolase FolE2 OS=Lentibacter algarum OX=576131 GN=folE2 PE=3 SV=1
MNKQVGHMIAAPDRAEAKAALARLRAWAQCATPEEVADLDPVISRLLPSGEVQNYPALARAYPDEFEVSEAYKATLPDLQNGPSSLIKGAPRVIQHVGISNFRLPLKFHTRDNGDLTLETSVTGTVSLEAGKKGINMSRIMRSFYKHSASTFSFDIIEAALDDYKTDLESFDARIQMRFSFPMKVASLRSGLEGYQYYDFALELIEVEGVRRKIMHLDYVYSSTCPCSLELSEHARQTRGQLATPHSQRSVARISAEAAQGDCLWFEDLIEMCRAAVPTETQVMVKREDEQAFAELNAANPIFVEDAARLFAQRLEQDERVGDFRVIASHQESLHSHDAVSVLTEGELFESESLDPKLFSTLFHVG

SEQ ID NO: 9825 - protein, 205 aa, unidentified
  source 1..205: note = Lentimicrobiaceae bacterium
  REGION 1..205: note = tr|A0A2E2XZN1|A0A2E2XZN1_9BACT GTP cyclohydrolase 1; OS = Lentimicrobiaceae bacterium OX=2026756 GN=folE PE=3 SV=1
MEKPLNLLGYEKIEKFNPENLNKLEYHYKEILKLIGEDVNREGLIQTPKRVAKSIQFLTQGHDHDPEEILMSAMFKEDYRQMVLVKDIEIFSMCEHHMIPFIGKAHVAYIPDGYITGLSKIARVVEAYSRRLQVQERLTTQIKNAIQTTLKPLGVAVVIEARHLCMAMRGIQKQHSVTITSDFTGAFERAQTRAEFISLISTSLS

SEQ ID NO: 9826 - protein, 221 aa, unidentified
  source 1..221: note = Lentimicrobium saccharophilum
  REGION 1..221: note = tr|A0A0S7C246|A0A0S7C246_9BACT GTP cyclohydrolase 1; OS = Lentimicrobium saccharophilum OX=1678841 GN=folE PE=3; SV = 1
MSSEIVKDMIIENMMDDYEIKDGYQKRDLYNQKTIKKLAGHYREILKLIGEDPTREGLEKTPERVSKAMQFLTHGYDLNPEDILRSAMFKEDYKQMVLVKDIEVYSMCEHHMIPFFGRAHVAYIPNGYIVGLSKIPRIVDAFARRLQVQERLTTQIKECIQNTLKPLGVAVVIEAQHMCMSMRGIQKQNSVTTTSDFTGAFLGEKTRAEFIHLIGSRLHGN

SEQ ID NO: 9827 - protein, 223 aa, Lentisphaera araneosa
  REGION 1..223: note = tr|A6DNS0|A6DNS0_9BACT GTP cyclohydrolase 1; OS = Lentisphaera araneosa HTCC2155 OX=313628 GN=folE PE=3; SV = 1
MLDTSKTDITLGHEVEAYLASKGQSTPLVKSDLGAKQKIQKIESLFGEIMETLGLDLKDDSLMDSPSRVAKMYVNEIFWGLNPDNFPKCTAIENKMAYDEMVTVSDIKVMSNCEHHFVVIDGFAHVSYIPNKKVIGLSKINRIVDYFSRRPQVQERLTHQIFHTLCYILDTQDVAVVIDATHYCVKSRGIQDASSRTSTSKIGGQFKRNPATRAEFFSQINNK

SEQ ID NO: 9828 - protein, 180 aa, unidentified
  source 1..180: note = Lentisphaerae bacterium
  REGION 1..180: note = tr|A0A1G0Z4N1|A0A1G0Z4N1_9BACT GTP cyclohydrolase 1; OS = Lentisphaerae bacterium GWF2_44_16 OX=1798571 GN=folE; PE = 3 SV=1
MKKAIREILLKIGEDPDREGLRETPARAAKSFEFLTKGYRENEKDIIKNAIFTEACDDMVILKDIEFYSMCEHHLLPFFGKCSIGYIPKGKIFGVSKLARIVEMYSRRLQLQERLTKQIAQTICDTIQPEGVGVVMQAQHLCMVMRGVEKQHSEMVTSAMLGSFRKEIATRNEFLNLIKM

SEQ ID NO: 9829 - protein, 252 aa, unidentified
  source 1..252: note = Lentisphaerae bacterium
  REGION 1..252: note = tr|A0A1V6FQP6|A0A1V6FQP6_9BACT Putative GTP cyclohydrolase 1 type 2 OS=Lentisphaerae bacterium ADurb.Bin082 OX=1852899 GN=BWX73_01118 PE=4 SV=1
MLLHDFCAHLETYFTDLHFDDCSNNGLQVEASTEVTKVAFAVDACQATFQQAAAVGAELLVVHHGLSWGSGVRRFKGCIGWRLAELFRNGVSLYACHLPFDAHPTLGNNAGLAAMLGLQDPQPFFQYGGGLIGLYGGLAAPASLEALANILNRKLPTTCRLFPIEKQGLVSRIGVVSGGGADAIPECQELGLDCLVTGEMEHKFYHEARESGIAVIAGGHYATETVGVKLVMQRIQADLGLECVFLDAPTGM

SEQ ID NO: 9830 - protein, 191 aa, unidentified
  source 1..191: note = Lentisphaerales bacterium
  REGION 1..191: note = tr|A0A524N3L3|A0A524N3L3_9BACT GTP cyclohydrolase 1; OS = Lentisphaerales bacterium OX=2448604 GN=folE PE=3 SV=1
MNHERVKDLVTQLLIEIGEDPNREGLRDTPRRVAEVFECLTSGYKSNPDDIVKNAAFTAEANNMIILRDIEVYSLCEHHMLPFFGKCHVGYIPSKTILGISKVARVVDCYARRLQMQERLTAQIADAIRSSVDAEGVGVVMECRHLCMMMRGVEKQNSVMTTSSVLGTFHSSVATRTEFLRLIDGRQPRSA

SEQ ID NO: 9831 - protein, 180 aa, unidentified
  source 1..180: note = Lentisphaeria bacterium
  REGION 1..180: note = tr|A0A3D1K8G9|A0A3D1K8G9_9BACT GTP cyclohydrolase 1; OS = Lentisphaeria bacterium OX=2053569 GN=folE PE=3 SV=1
MKEQIRKILKAIGEDPDRPGLRHTPLRVEKSYQFLTNGYKQDVKKLINNAIYEEECNDMVIVKNIEFYSMCEHHMLPFYGKCHIGYIPDGKVFGVSKLARIVDCYARRLQLQERLTRQIANTILESICPEGVGVVMEAQHMCMRMRGVEKQESLMVTSAMLGSFRKEQSTRMEFLNLIRG

SEQ ID NO: 9832 - protein, 180 aa, unidentified
  source 1..180: note = Lentisphaeria bacterium
  REGION 1..180: note = tr|A0A3D1UP01|A0A3D1UP01_9BACT GTP cyclohydrolase 1; OS = Lentisphaeria bacterium OX=2053569 GN=folE PE=3 SV=1
MEEEIKNILLQLGEDPEREGLKKTPERVRKSLEYLTRGYQQDLEKVVNGAIFEVESQDMVIVRDIEFYSMCEHHMLPFFGKCSIGYIPKGKIFGVSKLARIVDMFARRLQIQERLSNQIARTIYETIQPEGVGVVMEAQHLCMLMRGVQKQNSTMVTSAMFGSFRSQQSTRMEFLKLIKN

SEQ ID NO: 9833 - protein, 214 aa, unidentified
  source 1..214: note = Lentzea aerocolonigenes
  REGION 1..214: note = tr|A0A0F0H6I0|A0A0F0H6I0_LENAE GTP cyclohydrolase 1; OS = Lentzea aerocolonigenes OX=68170 GN=folE PE=3 SV=1
MNDHKDLVAARLLSSRDTEVRTTGTVDLARIEDAVRDILVAVGEDPDRHGLKETPKRVAHAYAELFAGLRVDPIDALGTTFEEGHQELVMVCDIEVQSFCEHHLLPFIGKAHIGYVPGLSGCVAGLSKLARLVDIYARRPQVQERLTTQIADCLHAALDAAGVIVVIECEHTCMTMRGIRKAGARTITSAVRGTLQSDPRTRNEAMELLRRGAA

SEQ ID NO: 9834 - protein, 202 aa, unidentified
  source 1..202: note = Lentzea aerocolonigenes
  REGION 1..202: note = tr|A0A0F0H4C7|A0A0F0H4C7_LENAE GTP cyclohydrolase 1; OS = Lentzea aerocolonigenes OX=68170 GN=folE PE=3 SV=1
MTVITVSRADSGVAEAAEHARAMFTALGIPCDTTSTERTPLRFVRALAELTSGLRLDPTRHLRVQFPPESVNQGVIAAVDVPFVALCEHHVLPFLGRATVAYLPSPGGQIVGLSKLARVIQEFAARPQVQERLGEQVVEALMGHLAASGAACLIRSEHACLTMRGAEAHGAVMVTSHLAGDFTTDAALRTQVMGLAPTCIRR

SEQ ID NO: 9835 - protein, 215 aa, Lentzea albida
  REGION 1..215: note = tr|A0A1H9AY90|A0A1H9AY90_9PSEU GTP cyclohydrolase 1; OS = Lentzea albida OX=65499 GN=folE PE=3 SV=1
MTEQQQLDGDAGLTHNGEAGVSARRVFDQARAEAAVRELLLACGEDPDREGLRETPARVARAYRELFAGLYTDADSVLAKTFDESHEELVLVTDIPMFSFCEHHLLPFHGVAHVGYIPNEQGRVTGLSKLARLVDLYSKRPQVQERLTSQVADALVRKLEPRGVIVVMEAEHLCMGMRGVRKPGSRTTTSAVRGLLRTSASTRAEAIELIRGRTR

SEQ ID NO: 9836 - protein, 215 aa, Lentzea albidocapillata
  REGION 1..215: note = tr|A0A1W2FHJ3|A0A1W2FHJ3_9PSEU GTP cyclohydrolase 1; OS = Lentzea albidocapillata OX=40571 GN=folE PE=3 SV=1
MTEQNQLDGDAGLTHDGEAGVSARRVFDHARAEAAVRELLIACGEDPDREGLRETPARVARAYRELFAGLYTEPDSVLAKTFDESHEELVLLTDIPMFSFCEHHLLPFHGVAHVGYIPNEHGRVTGLSKLARLVDLYSKRPQVQERLTSQVADALVRKLEPRGVIVVMEAEHLCMGMRGVRKPGSRTTTSAVRGLLRTSASSRAEAIELIRGRSR

SEQ ID NO: 9837 - protein, 182 aa, Lentzea albidocapillata
  REGION 1..182: note = tr|A0A1W2F7B0|A0A1W2F7B0_9PSEU GTP cyclohydrolase 1; OS = Lentzea albidocapillata OX=40571 GN=folE PE=3 SV=1
MDLEAAQQAVTDLLKALGKDPYSVHLADTPRRVAEAYAEMLTPREFTMTTFPNDEGYDELVLARSIPVQSLCEHHMLPFHGVAHVGYLPGERILGLSKLARVVEMFARDLQVQERLTKQVADWLQDQLQPLGVGVVIEAEHMCMAHRGVRVSGSRTITSALKGVLRKDPASRQEFFTLVHAA

SEQ ID NO: 9838 - protein, 182 aa, Lentzea flaviverrucosa
  REGION 1..182: note = tr|A0A1H9XW75|A0A1H9XW75_9PSEU GTP cyclohydrolase 1; OS = Lentzea flaviverrucosa OX=200379 GN=folE PE=3 SV=1
MDVEAAQQAVTDLLKALGKDPYSVHLADTPRRVAEAYAEMLTPRAFTMTTFPNDEGYDELVLARSIPVQSLCEHHMLPFHGVAHVGYLPGERILGLSKLARVVEMFARDLQVQERLTKQVADWLQDRLQPLGVGVVIEAEHMCMAHRGVRVSGSSTVTSALKGVLRTNPASRQEFFALVHAA

SEQ ID NO: 9839 - protein, 215 aa, Lentzea flaviverrucosa
  REGION 1..215: note = tr|A0A1H9X4K6|A0A1H9X4K6_9PSEU GTP cyclohydrolase 1; OS = Lentzea flaviverrucosa OX=200379 GN=folE PE=3 SV=1
MTEQHQRDGDAGLTQDGEAGVSARRVFDHARAEAAVRELLIACGEDPEREGLRETPARVARAYQELFAGLYTDADSVLAKTFDESHEELVLVTDIPMFSFCEHHLLPFHGVAHVGYIPNEHGRVTGLSKLARLVDLYSKRPQVQERLTSQVADALVRKLEPRGVIVVVEAEHLCMGMRGVRKPGSRTTTSAVRGLLRTSASSRAEAIELIRGRSR

SEQ ID NO: 9840 - protein, 208 aa, unidentified
  source 1..208: note = Lentzea guizhouensis
  REGION 1..208: note = tr|A0A1B2HE54|A0A1B2HE54_9PSEU GTP cyclohydrolase 1; OS = Lentzea guizhouensis OX=1586287 GN=folE PE=3 SV=1
MTNTLDRPAPSGSQDLASPGLVDTERVADLVGQLLAAIGEDPGREGLSDTPARVAAWWLSFLSPQPSATPTCFPEQHLSGQLVVIGGMSVWSLCEHHLLPMNLDVAVGYVPDGEVMGLSKFGRIAQQYAGRLQVQERFTREVANEIAAVLGSNDVAVAVRGTHLCMSARGVRMEAARTTTVQSGGRFESDPVLSQQFLTLATDRWRTA

SEQ ID NO: 9841 - protein, 215 aa, unidentified
  source 1..215: note = Lentzea guizhouensis
  REGION 1..215: note = tr|A0A1B2HGD4|A0A1B2HGD4_9PSEU GTP cyclohydrolase 1; OS = Lentzea guizhouensis OX=1586287 GN=folE PE=3 SV=1
MTEHHQLDADAGLTHNGEAGVSARRAFDHARAEAAVRELLIACGEDPEREGLRETPARVARAYRELFAGLYTDADSVLAKTFDESHEELVLVTDIPMFSFCEHHLLPFHGVAHVGYIPNERGRVTGLSKLARLVDLYSKRPQVQERLTSQVADALVRKLEPRGVIVVVEAEHLCMGMRGVRKPGSRTTTSAVRGLLRTSASSRAEAIELIRGRLR

SEQ ID NO: 9842 - protein, 215 aa, unidentified
  source 1..215: note = Lentzea jiangxiensis
  REGION 1..215: note = tr|A0A1H0ND77|A0A1H0ND77_9PSEU GTP cyclohydrolase 1; OS = Lentzea jiangxiensis OX=641025 GN=folE PE=3 SV=1
MTEQHQLDGDAGLTRNGEAGVSARRVFDQARAEAAVRELLVACGEDPEREGLRETPARVARAYRELFAGLYTDADSVLAKTFDESHEELVLVTDIPMFSFCEHHLLPFHGVAHVGYIPNEHGRVTGLSKLARLVDLYSKRPQVQERLTSQVADALVRKLEPRGVIVVVEAEHLCMGMRGVRKPGSRTTTSAVRGLLRTSASSRAEAIELIRGRTR

SEQ ID NO: 9843 - protein, 213 aa, Lentzea sp.
  REGION 1..213: note = tr|A0A563EUW2|A0A563EUW2_9PSEU GTP cyclohydrolase 1; OS = Lentzea sp. FXJ1.1311 OX=2591470 GN=folE PE=3 SV=1
MSERTDVDAGLSPNGEAGVAAQRTFDHARAEAAVRELLLACGEDPEREGLRETPARVARAYRELFAGLYTDPDSVLARTFDESHEELVLVTDIPMFSFCEHHLLPFHGVAHVGYIPNEAGRVTGLSKIARLVDLYAKRPQVQERLTSQVADALVRRLEPRGVIVVIEAEHLCMGMRGVRKPGSRTTTSAVRGLLRSQASSRAEAIELIRGRLR

SEQ ID NO: 9844 - protein, 215 aa, Lentzea violacea
  REGION 1..215: note = tr|A0A1G9HP69|A0A1G9HP69_9PSEU GTP cyclohydrolase 1; OS = Lentzea violacea OX=128104 GN=folE PE=3 SV=1
MTEQNQLDGDAGLTHDGEAGVSARRVFDHARAEAAVRELLIACGEDPDREGLRETPARVARAYRELFAGLYTEPDSVLAKTFDESHEELVLVTDIPMFSFCEHHLLPFHGVAHVGYIPNEHGRVTGLSKLARLVDLYSKRPQVQERLTSQVADALVRKLEPRGVIVVMEAEHLCMGMRGVRKPGSRTTTSAVRGLLRTSASSRAEAIELIRGRSR

SEQ ID NO: 9845 - protein, 182 aa, Lentzea violacea
  REGION 1..182: note = tr|A0A1G9EZM0|A0A1G9EZM0_9PSEU GTP cyclohydrolase 1; OS = Lentzea violacea OX=128104 GN=folE PE=3 SV=1
MDLEAAQQAVTDLLKALGKDPYSVHLADTPRRVAEAYADMLTPRAFTMTTFPNDEGYDELVLARSIPVQSLCEHHMLPFTGVAHVGYLPGERILGLSKLARVVEMFARDLQVQERLTKQVADWLQDQLQPLGVGVVIEAEHMCMAHRGVRVSGSRTITSALKGVLRKNPASRQEFFTLVHAA

SEQ ID NO: 9846 - protein, 215 aa, Lentzea waywayandensis
  REGION 1..215: note = tr|A0A1I6ECH2|A0A1I6ECH2_9PSEU GTP cyclohydrolase 1; OS = Lentzea waywayandensis OX=84724 GN=folE PE=3 SV=1
MTENHQLDADAGLTHNGEAGVSAQRVFDHARAEAAVRELLIACGEDPDREGLLETPARVARAYRELFAGLYTDPDSVLAKTFDESHEELVLVTDIPMFSFCEHHLLPFHGVAHVGYIPNEQGRVTGLSKLARLVDLYAKRPQVQERLTSQVADALVRRLEPRGVIVVIEAEHLCMGMRGVRKPGSRTTTSAVRGLLRTSASSRAEAIELIRGRLR

SEQ ID NO: 9847 - protein, 187 aa, Leptolinea tardivitalis
  REGION 1..187: note = tr|A0A0P6XDM7|A0A0P6XDM7_9CHLR GTP cyclohydrolase 1; OS = Leptolinea tardivitalis OX=229920 GN=folE PE=3 SV=1
MKNSVSTILKAIGEDPNREGLVNTPSRVAKSYDELLSGYRVDPYKLINGALFEVEYDEMVIVRDIEFYSMCEHHMLPFIGRAHVAYLPDKKVIGLSKIPRIVDMFARRLQVQERMTQQVAQFLDEALHPHGVAVVIEALHLCSMMRGVKKHDSRMTTSAMLGYFRKNLATRTEFLDNISRSAEPLHF

SEQ ID NO: 9848 - protein, 245 aa, unidentified
  source 1..245: note = Leptolyngbya antarctica
  REGION 1..245: note = tr|A0A2W4WJV4|A0A2W4WJV4_9CYAN GTP cyclohydrolase 1; OS = Leptolyngbya antarctica OX=268115 GN=folE PE=3 SV=1
MTIASSNSLNDKTTNGAGSNGAGSNGAVSKGKAHEIRPDRTHSDRKEADQYPIPETSLEDMSDAVHTMLLSVGEDPEREGLLKTPKRVAEAMRFLTSGYQQSLEELVNGAIFNEGHNEMVLVRDINLFSLCEHHMLPFMGRAHVAYIPNQRVVGLSKLARIVEMYSRRLQVQERLNRQIAEAVQEILDPKGVAVVVEASHMCMVMRGVQKPGSWTVTSAMLGSFQEDPKTREEFLSLIRHQPSFF

SEQ ID NO: 9849 - protein, 218 aa, unidentified
  source 1..218: note = Leptolyngbya boryana
  REGION 1..218: note = tr|A0A1Z4JNR8|A0A1Z4JNR8_LEPBY GTP cyclohydrolase 1; OS = Leptolyngbya boryana NIES-2135 OX=1973484 GN=folE PE=3; SV = 1
MNPQSSSDLVLPDSSETFAALKTQSKPPVSDAEMMQAVRTLLLGLGEDPDREGLRDTPKRVVKALKFLTQGYNQSLDELLNGAVFHENANEMVLVRDIDLFSSCEHHILPILGRAHVAYIPNGKVIGLSKIARICEMYARRLQVQERLTSQIADALQGLLKPQGVAVVVEASHMCMVMRGVQKPGSWTVTSAMKGVFADDAKTRQEFMDLIRHSPKFN

SEQ ID NO: 9850 - protein, 225 aa, unidentified
  source 1..225: note = Leptolyngbya boryana
  REGION 1..225: note = tr|A0A1Z4JNI4|A0A1Z4JNI4_LEPBY GTP cyclohydrolase 1; OS = Leptolyngbya boryana NIES-2135 OX=1973484 GN=folE PE=3; SV = 1
MTLATPNGFSSKNLESRPDRNTQNGQEAKITPPSDETREQMMDAVRTMLVGVGEDPEREGLLKTPKRVADAMRFLTSGYNQSLEELVNGAIFDEGHNEMVLVRDINFFSLCEHHMLPFMGRAHVAYIPNEKVVGLSKLARIVEMYSRRLQVQERLTRQVAEALQEVLQPRGVAVVMEASHMCMVMRGVQKPGSWTVTSAMVGVFQDDQKTREEYLNLIRHQPSFW

SEQ ID NO: 9851 - protein, 231 aa, unidentified
  source 1..231: note = Leptolyngbya foveolarum
  REGION 1..231: note = tr|A0A2W4TY83|A0A2W4TY83_9CYAN GTP cyclohydrolase 1; OS = Leptolyngbya foveolarum OX=47253 GN=folE PE=3 SV=1
MTLSDSIATANGKPGPEVRPSRETKHGHPQCQISQVDPTQDNGPMMDAVHTMLLSVGEDPEREGLLKTPHRVAEAMRFLTQGYSQSLETIVNGAIFDEGHNEMVLVRDINFFSLCEHHMLPFMGRAHVAYIPNQRVVGLSKLARIVEMYARRLQVQERLNRQIADAVQEVLEPRGVAVVMEASHMCMAMRGVQKPGSWTVTSAMVGVFEEDAKTREEFLSLIRHQPGFANY

SEQ ID NO: 9852 - protein, 233 aa, unidentified
  source 1..233: note = Leptolyngbya frigida
  REGION 1..233: note = tr|A0A2T1DX50|A0A2T1DX50_9CYAN GTP cyclohydrolase 1; OS = Leptolyngbya frigida ULC18 OX=2107698 GN=folE PE=3 SV=1
MTIASSQGSNGSESTAKKTKGLTTRPDRNTLGGGQEPKLQTPPEALQDDMMDAVKTILLGVGEDPDREGLLKTPKRVAEAMRFLTSGYHQSLEELVNGAIFDEGHNEMVLVRDITAFSLCEHHMLPFMGKVHVAYIPNQKVVGLSKLARIVEMYSRRLQVQERLTRQIAEAVQTILEPQGVAVVMEATHMCMVMRGVQKPGSWTVTSAMVGVFQEDQKTREEFLNLIRHQPSW

SEQ ID NO: 9853 - protein, 212 aa, Leptolyngbya sp.
  REGION 1..212: note = tr|K9EP51|K9EP51_9CYAN GTP cyclohydrolase 1; OS = Leptolyngbya sp. PCC 7375 OX=102129 GN=folE PE=3 SV=1
MTLSISSDDIRSQLISTETEAPVSDEDMQQAVRTLLLGLGEDPDREGLRDTPKRVVKALKFLTSGYHQSLDELLNGAVFHEDANEMVLVRDIDLFSSCEHHILPILGRAHVAYIPNGKVIGLSKIARICEMYGRRLQVQERLTQQIANALQGLLQPQGVAVVVEASHMCMVMRGVQKPGSWTVTSSMQGVFADDARTRQEFMDLIRHSPSFH

SEQ ID NO: 9854 - protein, 226 aa, Leptolyngbya sp.
  REGION 1..226: note = tr|A0A0S3U2R4|A0A0S3U2R4_9CYAN GTP cyclohydrolase 1; OS = Leptolyngbya sp. NIES-3755 OX=1752064 GN=folE PE=3 SV=1
MTIASPNGFSAKNKLESRPDRNTQNGLEAKIKPPSEETSEEMMEAVRTMLVGVGEDPEREGLLKTPKRVADAMRFLTSGYNQSLEELVNGAIFDEGHNEMVLVRDINFFSLCEHHMLPFMGRAHVAYIPNEKVVGLSKLARIVEMYSRRLQVQERLTRQVAEALQEVLQPRGVAVVMEASHMCMVMRGVQKPGSWTVTSAMVGCFQDDQKTREEYLNLIRHQPSFW

SEQ ID NO: 9855 - protein, 314 aa, unidentified
  source 1..314: note = Leptolyngbya valderiana
  REGION 1..314: note = tr|A0A168TJM1|A0A168TJM1_9CYAN GTP cyclohydrolase FolE2 OS=Leptolyngbya valderiana BDU 20041 OX=322866; GN = folE2 PE=3 SV=1
MPDIASQAKAQVAGKLDWVGMNHIEMPLILETEGQRPVQASARISAFVDLGKEDTRGIHMSRLYLHLDRTLGEQPLSPLMLRRILKDFMASHADLSSQAMVRMDFDYLIKRKSLVSDNAGWKNYPFSLIASMRDGEFALEMAYQVVYSSTCPCSAALARQLIQDQFRKDFAGQDRLDPAQVIEWLGTEEGILATPHSQRSHADIRLQLSPGFEAFPFVEMIDAIEDALKTPVQAAVKREDEQAFALLNGQNLMFCEDAARRVQDALNAKEKVVDFWARCSHFESLHPHNAVSIVTKGIKDGYEPIDGHPSAWHS

SEQ ID NO: 9856 - protein, 216 aa, unidentified
  source 1..216: note = Leptolyngbya valderiana
  REGION 1..216: note = tr|A0A166TTG8|A0A166TTG8_9CYAN GTP cyclohydrolase 1; OS = Leptolyngbya valderiana BDU 20041 OX=322866 GN=folE; PE = 3 SV=1
MTSQFSSEFLPSEAAIANIPEATRTQVSTEEMERAVRTLLVGLGEDPDREGLRDTPKRVVKALKFLTQGYNQSLDELLNGAVFHEDTDEMVLVRDIDIFSSCEHHILPIIGRVHVAYIPNGRVIGLSKIARICEMYARRLQVQERLTNRIAEALESILKPQGVAVVVEATHMCMVMRGVEKPGSWTVSSAMRGVFAEDVRTRQEFMSLIRHTPAFH

SEQ ID NO: 9857 - protein, 308 aa, Leptonema illini
  REGION 1..308: note = tr|H2CFG0|H2CFG0_9LEPT GTP cyclohydrolase I; OS = Leptonema illini DSM 21528 OX=929563 GN=Lepil_3122 PE=4; SV = 1
MTPKELASLRESFPIQDESGLNDFQKLPDETGIAIEEVGINRFRVPLNYRHADGSVMNHDTEATMSVRLRAGKTGINMSRLCLILQDEGNKDTVRSQMIHRLLGRFQTEMRDEPDEDPFEEAHVRLDFSYPVRQQSLKSDNSGWQYYRSFIEGRKIGNEVKLYFGLQYEYSSTCPCSLSLAHQYEDEYRRGLTTEGNGIAAAHAQRSVARVTVEVDPEENFYLEELVQILRGAIPTETQVLVKRVDEQAFAILNGSHPIFVEHVARKLYQTLNNDERILDWSAEVEHQESLHSHNARARIRKGLPGGL

SEQ ID NO: 9858 - protein, 183 aa, unidentified
  source 1..183: note = Leptospira adleri
  REGION 1..183: note = tr|A0A2M9YS55|A0A2M9YS55_9LEPT GTP cyclohydrolase 1; OS = Leptospira adleri OX=2023186 GN=folE PE=3 SV=1
MEEEVVKILKSIGEDPNREGLRDTPKRVSKAYDFLTSGYRADINTLVNGAIFDEPTEGMVLVRDIEMYSLCEHHLLPFYGRAHVAYLPNKKIIGISKIPRIVDVFARRLQVQERLTEQIAYAIQEVLDPQGVAVVIKAKHLCMMMRGVEKQNSELFTSCMLGAFKDNMVTRSEFLDLIRTGST

SEQ ID NO: 9859 - protein, 183 aa, Leptospira alexanderi
  REGION 1..183: note = tr|V6HUH8|V6HUH8_9LEPT GTP cyclohydrolase 1; OS = Leptospira alexanderi serovar Manhao 3 str. L 60; OX = 1049759 GN=folE PE=3 SV=1
MEENIVNILKSIGEDPTREGLLNTPKRVKKAYDFLTSGYHVDITKVVNGAIFEEPTEGMILVRDIEVYSLCEHHLLPFYGRAHVAYLPNKKIIGISKIPRIVDVFARRLQVQERLTEQIAYAVQEVLDPQGVAVVIKAKHLCMMMRGVEKQNSELFTSCLLGAFKENMVTRSEFLDLIRTGST

SEQ ID NO: 9860 - protein, 183 aa, unidentified
  source 1..183: note = Leptospira alstonii
  REGION 1..183: note = tr|M6D9T8|M6D9T8_9LEPT GTP cyclohydrolase 1; OS = Leptospira alstonii serovar Sichuan str. 79601; OX = 1218565 GN=folE PE=3 SV=1
MEEDIVNILKSIGEDPNREGLLDTPKRVKKAYDFLTSGYRADITKIVNGAIFEEPTDGMVLVRDIEMYSLCEHHLLPFYGRAHVAYLPNKKIIGISKIPRIVDVFARRLQVQERLTEQIAYAIQEVLEPQGVGVVIKAKHLCMMMRGVEKQNSELFTSCMLGAFKENMVTRSEFLDLIRTGST

SEQ ID NO: 9861 - protein, 183 aa, unidentified; identical to SEQ ID NO: 9860
  source 1..183: note = Leptospira alstonii
  REGION 1..183: note = tr|T0HBE2|T0HBE2_9LEPT GTP cyclohydrolase 1; OS = Leptospira alstonii serovar Pingchang str. 80-412; OX = 1218564 GN=folE PE=3 SV=1

SEQ ID NO: 9862 - protein, 194 aa, unidentified
  source 1..194: note = Leptospira andrefontaineae
  REGION 1..194: note = tr|A0A4R9H1D0|A0A4R9H1D0_9LEPT GTP cyclohydrolase 1; OS = Leptospira andrefontaineae OX=2484976 GN=folE PE=3 SV=1
MHFRSEERRDTLENEVTSILKAIGEDPNREGLLNTPKRVRKAYEFLTSGYKADIDTIVNGAIFEEDSQGMVLVRDIEMYSLCEHHLLPFFGKAHVGYIPNKKIIGISKIPRIVDVFARRLQVQERMTEQIAYALMEVLDPLGVAVVIKAKHLCMMMRGVEKQNSELFTSCMLGEFKTNMVTRSEFLDLIRTGST

SEQ ID NO: 9863 - protein, 183 aa, unidentified
  source 1..183: note = Leptospira bandrabouensis
  REGION 1..183: note = tr|A0A4Z1AXL3|A0A4Z1AXL3_9LEPT GTP cyclohydrolase 1; OS = Leptospira bandrabouensis OX=2484903 GN=folE PE=3 SV=1
MENLIEEILKQIGEDPSREGLVKTPNRVKKAYDFLTSGYKADLNQIVNGAIFEESTTGMVLVRDIEMYSLCEHHLLPFYGRAHVAYIPNKKIIGISKIPRIVDVFARRLQVQERLTDQIAQAIQETLDPLGVGVVIKAKHLCMMMRGVEKQNSELFTSSLLGLFKTDPTTRSEFLDLIRTGSH

SEQ ID NO: 9864 - protein, 183 aa, unidentified
  source 1..183: note = Leptospira barantonii
  REGION 1..183: note = tr|A0A2M9YXJ4|A0A2M9YXJ4_9LEPT GTP cyclohydrolase 1; OS = Leptospira barantonii OX=2023184 GN=folE PE=3 SV=1
MEEDIVNILKSIGEDPTREGLLNTPKRVKKAYDFLTSGYRADITKIVNGAIFEEPTDGMVLVRDIEMYSLCEHHLLPFYGRAHVAYLPNKKIIGISKIPRIVDVFARRLQVQERLTEQIAYAIQEVLEPQGVAVVIKAKHLCMMMRGVEKQNSELFTSCMLGAFKENMVTRSEFLDLIRTGST

SEQ ID NO: 9865 - protein, 183 aa, unidentified
  source 1..183: note = Leptospira barantonii
  REGION 1..183: note = tr|A0A5F2BRD3|A0A5F2BRD3_9LEPT GTP cyclohydrolase 1; OS = Leptospira barantonii OX=2023184 GN=folE PE=3 SV=1
MEEDIVNILKSIGEDPTREGLLNTPKRVKKAYDFLTSGYRADITKIVNGAIFEEPTDGMVLVRDIEMYSLCEHHLLPFYGRAHVAYLPNKKIIGISKIPRIVDVFARRLQVQERLTEQIAYAIQDVLEPQGVAVVIKAKHLCMMMRGVEKQNSELFTSCMLGAFKENMVTRSEFLDLIRTGST

SEQ ID NO: 9866 - protein, 183 aa, Leptospira biflexa
  REGION 1..183: note = sp|B0SRX6|GCH1_LEPBP GTP cyclohydrolase 1; OS = Leptospira biflexa serovar Patoc (strain Patoc 1 / ATCC 23582 / Paris) OX=456481 GN=folE PE=3 SV=1
MENLIEEILKQIGEDPNREGLVKTPNRVKKAYDFLTSGYKADINQLVNGAIFEENTTGMVLVRDIEMYSLCEHHLLPFYGRAHVAYIPNKKIIGISKIPRIVDVFARRLQVQERLTDQIAQAIQETLDPLGVGVVIKAKHLCMMMRGVEKQNSELFTSSLLGLFKTDPTTRSEFLDLIRTGSH

SEQ ID NO: 9867 - protein, 183 aa, Leptospira biflexa; identical to SEQ ID NO: 9866
  REGION 1..183: note = tr|A0A5F2CG89|A0A5F2CG89_LEPBI GTP cyclohydrolase 1; OS = Leptospira biflexa OX=172 GN=folE PE=3 SV=1

SEQ ID NO: 9868 - protein, 183 aa, Leptospira borgpetersenii
  REGION 1..183: note = sp|Q04P36|GCH1_LEPBJ GTP cyclohydrolase 1; OS = Leptospira borgpetersenii serovar Hardjo-bovis (strain JB197) OX=355277 GN=folE PE=3 SV=1
MEENIVNILKSIGEDPTREGLLNTPKRVKKAYDFLTSGYHVDITKVVNGAIFEESTEGMILVRDIEVYSLCEHHLLPFYGRAHVAYLPNKKIIGISKIPRIVDVFARRLQVQERLTEQIAYAVQEVLDPQGVAVVIKAKHLCMMMRGVEKQNSELFTSCLLGAFKENMVTRSEFLDLIRTGST

SEQ ID NO: 9869 - protein, 183 aa, Leptospira borgpetersenii; identical to SEQ ID NO: 9859
  REGION 1..183: note = tr|M6WJ65|M6WJ65_LEPBO GTP cyclohydrolase 1; OS = Leptospira borgpetersenii serovar Pomona str. 200901868; OX = 1192866 GN=folE PE=3 SV=1

SEQ ID NO: 9870 - protein, 183 aa, unidentified
  source 1..183: note = Leptospira bourretii
  REGION 1..183: note = tr|A0A4R9IRJ1|A0A4R9IRJ1_9LEPT GTP cyclohydrolase 1; OS = Leptospira bourretii OX=2484962 GN=folE PE=3 SV=1
MENLIEEILKQIGEDPSREGLVKTPNRVKKAYDFLTSGYKADLNQLVNGAIFEESTTGMVLVRDIEMYSLCEHHLLPFYGRAHVAYIPNKKIIGISKIPRIVDVFARRLQVQERLTDQIAQAIQETLDPLGVGVVIKAKHLCMMMRGVEKQNSELFTSSLLGLFKTDPTTRSEFLDLIRTGSH

SEQ ID NO: 9871 - protein, 183 aa, unidentified
  source 1..183: note = Leptospira bouyouniensis
  REGION 1..183: note = tr|A0A4R9HM12|A0A4R9HM12_9LEPT GTP cyclohydrolase 1; OS = Leptospira bouyouniensis OX=2484911 GN=folE PE=3 SV=1
MENLIEEILKQIGEDPNREGLVKTPNRVKKAYDFLTSGYKADINQLVNGAIFEENTTGMVLVRDIEMYSLCEHHLLPFYGRAHVAYIPNKKIIGISKIPRIVDVFARRLQVQERLTDQIAQAIQETLDPLGVGVVIKAKHLCMMMRGVEKQNSELFTSSLLGLFKTDSTTRSEFLDLIRTGSH

SEQ ID NO: 9872 - protein, 183 aa, unidentified
  source 1..183: note = Leptospira brenneri
  REGION 1..183: note = tr|A0A2M9Y5Y9|A0A2M9Y5Y9_9LEPT GTP cyclohydrolase 1; OS = Leptospira brenneri OX=2023182 GN=folE PE=3 SV=1
MENLIEEILKQIGEDPAREGLVKTPNRVKKAYDFLTSGYKADLNQIVNGAIFEESTTGMVLVRDIEMYSLCEHHLLPFYGRAHVAYIPNKKIIGISKIPRIVDVFARRLQVQERLTDQIAQAIQETLDPLGVGVVIKAKHLCMMMRGVEKQNSELFTSSLLGLFKTDPTTRSEFLDLIRTGSH

SEQ ID NO: 9873 - protein, 183 aa, Leptospira broomii
  REGION 1..183: note = tr|T0F984|T0F984_9LEPT GTP cyclohydrolase 1; OS = Leptospira broomii serovar Hurstbridge str. 5399; OX = 1049789 GN=folE PE=3 SV=1
MEEEVTKILKAIGEDPSREGLRDTPKRVKKAYEFLTSGYKADIHHIVNNAIFEEDSQGMVLVRDIEMYSLCEHHLLPFFGKAHVGYIPNKKIIGISKIPRIVDIFARRLQVQERMTEQIGNALMEVLDPLGVAVVIKAKHLCMMMRGVEKQNSELFTSCMLGEFKTNMVTRSEFLDLIRTGST

SEQ ID NO: 9874 - protein, 183 aa, unidentified
  source 1..183: note = Leptospira congkakensis
  REGION 1..183: note = tr|A0A4Z1A9R5|A0A4Z1A9R5_9LEPT GTP cyclohydrolase 1; OS = Leptospira congkakensis OX=2484932 GN=folE PE=3 SV=1
MENLIEEILKQIGEDPSREGLVKTPNRVKKAYDFLTSGYKADLNHIVNGAIFEESTTGMVLVRDIEMYSLCEHHLLPFYGRAHVAYIPNKKIIGISKIPRIVDVFARRLQVQERLTDQIAQAIQETLDPLGVGVVIKAKHLCMMMRGVEKQNSELFTSSLLGLFKTDPTTRSEFLDLIRTGSH

SEQ ID NO: 9875 - protein, 183 aa, unidentified
  source 1..183: note = Leptospira dzianensis
  REGION 1..183: note = tr|A0A5F2AS66|A0A5F2AS66_9LEPT GTP cyclohydrolase 1; OS = Leptospira dzianensis OX=2484905 GN=folE PE=3 SV=1
MEDNIVNILKSIGEDPNREGLLNTPKRVKKAYDFLTSGYHADITKIVNGAIFEEPTDGMVLVRDIEMYSLCEHHLLPFYGRAHVAYLPNKKIIGISKIPRIVDVFARRLQVQERLTEQIAYAIQDVLEPQGVAVVIKAKHLCMMMRGVEKQNSELFTSCMLGAFKENMVTRSEFLDLIRTGST

SEQ ID NO: 9876 - protein, 183 aa, unidentified
  source 1..183: note = Leptospira dzianensis
  REGION 1..183: note = tr|A0A5F2EBJ4|A0A5F2EBJ4_9LEPT GTP cyclohydrolase 1; OS = Leptospira dzianensis OX=2484905 GN=folE PE=3 SV=1
MEDNIVNILKSIGEDPNREGLLDTPKRVKKAYDFLTSGYHADITKIVNGAIFEEPTDGMVLVRDIEMYSLCEHHLLPFYGRAHVAYLPNKKIIGISKIPRIVDVFARRLQVQERLTEQIAYAIQDVLEPQGVAVVIKAKHLCMMMRGVEKQNSELFTSCMLGAFKENMVTRSEFLDLIRTGST

SEQ ID NO: 9877 - protein, 194 aa, unidentified
  source 1..194: note = Leptospira dzoumogneensis
  REGION 1..194: note = tr|A0A4Z1AL33|A0A4Z1AL33_9LEPT GTP cyclohydrolase 1; OS = Leptospira dzoumogneensis OX=2484904 GN=folE PE=3 SV=1
MHFQSEERRDNLENEVTSILKAIGEDPNREGLLNTPKRVRKAYEFLTSGYRADIDTLVNGAIFEEDSQGMVLVRDIEMYSLCEHHLLPFFGKAHVGYIPNKKIIGISKIPRIVDVFARRLQVQERMTEQIAYALMEVLDPLGVAVVIKAKHLCMMMRGVEKQNSELFTSCMLGEFKTNMVTRSEFLDLIRTGST

SEQ ID NO: 9878 - protein, 183 aa, unidentified
  source 1..183: note = Leptospira ellinghausenii
  REGION 1..183: note = tr|A0A2P2DFN9|A0A2P2DFN9_9LEPT GTP cyclohydrolase 1; OS = Leptospira ellinghausenii OX=1917822 GN=folE PE=3 SV=1
MENLIEEILKQIGEDPNREGLVKTPNRVKKAYDFLTSGYKADINQLVNGAIFEESTTGMVLVRDIEMYSLCEHHLLPFYGRAHVAYIPNKKIIGISKIPRIVDVFARRLQVQERLTDQIAQAIQETLDPLGVGVVIKAKHLCMMMRGVEKQNSELFTSSLLGVFKTDPTTRSEFLDLIRTGSH

SEQ ID NO: 9879 - protein, 194 aa, unidentified
  source 1..194: note = Leptospira elllisii
  REGION 1..194: note = tr|A0A2N0BPR0|A0A2N0BPR0_9LEPT GTP cyclohydrolase 1; OS = Leptospira elllisii OX=2023197 GN=folE PE=3 SV=1
MREKRTEESFTLEEEVVKILKSIGEDPNREGLLNTPSRVKKAYDFLTSGYRADITKIVNGAIFEEPTEGMVLVRDIEMYSLCEHHLLPFYGKAHVAYLPNKKIIGISKIPRIVDVFARRLQVQERLTEQIAYAIQEVLDPQGVAVVIKAKHLCMMMRGVEKQNSELFTSCMLGAFKENMVTRSEFLDLIRTGST

SEQ ID NO: 9880 - protein, 217 aa, Leptospira fainei
  REGION 1..217: note = tr|S3URH5|S3URH5_9LEPT GTP cyclohydrolase 1; OS = Leptospira fainei serovar Hurstbridge str. BUT 6; OX = 1193011 GN=folE PE=3 SV=1
MKHNWISRDLAFSSSKYCSFYIRVKRFTIQRRFGLEEEVTKILKAIGEDPSREGLRDTPKRVKKAYEFLTSGYKADIHHIVNNAIFEEDSQGMVLVRDIEMYSLCEHHLLPFFGKAHIGYIPNKKIIGISKIPRIVDIFARRLQVQERMTEQIGNALMEVLDPLGVAVVIKAKHLCMMMRGVEKQNSELFTSCMLGEFKTNMVTRSEFLDLIRTGST

SEQ ID NO: 9881 - protein, 183 aa, unidentified
  source 1..183: note = Leptospira fletcheri
  REGION 1..183: note = tr|A0A4V3JDY7|A0A4V3JDY7_9LEPT GTP cyclohydrolase 1; OS = Leptospira fletcheri OX=2484981 GN=folE PE=3 SV=1
MEEEVTKILKAIGENPSREGLLDTPKRVKKAYEFLTSGYTADIHKIVNNAIFEEESRGMVLVRDIEMYSLCEHHLLPFFGKAHVGYIPNKKIIGISKIPRIVDVFARRLQVQERMTEQIGNALMEVLEPLGVAVVVKAKHLCMMMRGVEKQNSELFTSCMLGEFKTNMVTRNEFLDLIRTGST

SEQ ID NO: 9882 - protein, 183 aa, unidentified
  source 1..183: note = Leptospira fluminis
  REGION 1..183: note = tr|A0A4R9GSM3|A0A4R9GSM3_9LEPT GTP cyclohydrolase 1; OS = Leptospira fluminis OX=2484979 GN=folE PE=3 SV=1
MEEEVTKILKAIGENPSREGLLDTPKRVKKAYEFLTSGYTADINKIVNNAIFEEESRGMVLVRDIEMYSLCEHHLLPFFGKAHVGYIPNKKIIGISKIPRIVDIFARRLQVQERMTEQIGNALMEVLEPLGVAVVVKAKHLCMMMRGVEKQNSELFTSCMLGEFKTNMVTRNEFLDLIRTGST

SEQ ID NO: 9883 - protein, 183 aa, unidentified
  source 1..183: note = Leptospira gomenensis
  REGION 1..183: note = tr|A0A5F1YZ75|A0A5F1YZ75_9LEPT GTP cyclohydrolase 1; OS = Leptospira gomenensis OX=2484974 GN=folE PE=3 SV=1
MEEEIVKILKSIGEDPNREGLLNTPSRVKKAYDFLTSGYRADITKIVNGAIFEEPTEGMVLVRDIEMYSLCEHHLLPFYGKAHVAYLPNKKIIGISKIPRIVDVFARRLQVQERLTEQIAYAIQEVLDPQGVAVVIKAKHLCMMMRGVEKQNSELFTSCMLGAFKENMVTRSEFLDLIRTGST

SEQ ID NO: 9884 - protein, 194 aa, unidentified; identical to SEQ ID NO: 9862
  source 1..194: note = Leptospira haakeii
  REGION 1..194: note = tr|A0A2N0C0N7|A0A2N0C0N7_9LEPT GTP cyclohydrolase 1; OS = Leptospira haakeii OX=2023198 GN=folE PE=3 SV=1

SEQ ID NO: 9885 - protein, 183 aa, unidentified; identical to SEQ ID NO: 9863
  source 1..183: note = Leptospira harrisiae
  REGION 1..183: note = tr|A0A2N0AGU5|A0A2N0AGU5_9LEPT GTP cyclohydrolase 1; OS = Leptospira harrisiae OX=2023189 GN=folE PE=3 SV=1

SEQ ID NO: 9886 - protein, 193 aa, unidentified
  source 1..193: note = Leptospira hartskeerlii
  REGION 1..193: note = tr|A0A2M9XHA7|A0A2M9XHA7_9LEPT GTP cyclohydrolase 1; OS = Leptospira hartskeerlii OX=2023177 GN=folE PE=3 SV=1
MFEAKNGETTLENEVTSILKAIGEDPNREGLLNTPKRVRKAYEFLTSGYRADIDTIVNGAIFEEDSQGMVLVRDIEMYSLCEHHLLPFFGKAHVGYIPNKKIIGISKIPRIVDVFARRLQVQERMTEQIAYALMEVLDPLGVAVVIKAKHLCMMMRGVEKQNSELFTSCMLGEFKTNMVTRSEFLDLIRTGST

SEQ ID NO: 9887 - protein, 183 aa, unidentified
  source 1..183: note = Leptospira idonii
  REGION 1..183: note = tr|A0A4V3JYI8|A0A4V3JYI8_9LEPT GTP cyclohydrolase 1; OS = Leptospira idonii OX=1193500 GN=folE PE=3 SV=1
MEDLIEGIIKQIGEDPQREGLVKTPNRVKKAYEFLTSGYKADMNSLVNGAIFEESTTGMVLVRDIEMYSLCEHHLLPFYGRAHVAYIPNKKIIGISKIPRIVDVFARRLQVQERLTDQIAQAIQETLDPLGVGVVIKAKHLCMMMRGVEKQNSELFTSSLLGVFKSDPTTRSEFLDLIRTGSH

SEQ ID NO: 9888 - protein, 183 aa, unidentified
  source 1..183: note = Leptospira ilyithenensis
  REGION 1..183: note = tr|A0A4R9LTF4|A0A4R9LTF4_9LEPT GTP cyclohydrolase 1; OS = Leptospira ilyithenensis OX=2484901 GN=folE PE=3 SV=1
MEDLIEGIIKQIGEDPHREGLLKTPSRVKKAYEFLTSGYKADLDSLVNGAIFEENTTGMVLVRDVEMYSLCEHHLLPFYGRAHVAYIPNKKIIGISKIPRIVDVFARRLQVQERLTDQIAQAIQETLDPLGVGVVIKAKHLCMMMRGVEKQNSELFTSSLLGLFKSDPTTRSEFLDLIRTGSH

SEQ ID NO: 9889 - protein, 183 aa, Leptospira inadai
  REGION 1..183: note = tr|V6HQM2|V6HQM2_9LEPT GTP cyclohydrolase 1; OS = Leptospira inadai serovar Lyme str. 10 OX=1049790; GN = folE PE=3 SV=1
MEEEVTKILKAIGENPNREGLRDTPKRVKKAYEFLTSGYKADIHHIVNNAIFEEDSQGMVLVRDIEMYSLCEHHLLPFFGKAHVGYIPNKKIIGISKIPRIVDIFARRLQVQERMTEQIGNALMEVLDPLGVAVVIKAKHLCMMMRGVEKQNSELFTSCMLGEFKTNMVTRNEFLDLIRTGST

SEQ ID NO: 9890 - protein, 183 aa, Leptospira interrogans
  REGION 1..183: note = sp|Q72LY8|GCH1_LEPIC GTP cyclohydrolase 1; OS = Leptospira interrogans serogroup Icterohaemorrhagiae serovar copenhageni (strain Fiocruz L1-130) OX=267671; GN = folE PE=3SV=1
MEEDVINILKSIGEDPTREGLLNTPKRVKKAYEFLTSGYRADITKIVNGAIFEEPTEGMVLVRDIEMYSLCEHHLLPFYGKAHVAYLPNKKIIGISKIPRIVDVFARRLQVQERLTEQIAYAIQEVLDPQGVAVVIKAKHLCMMMRGVEKQNSELFTSCMLGAFKENMVTRSEFLDLIRTGST

SEQ ID NO: 9891 - protein, 183 aa, Leptospira interrogans; identical to SEQ ID NO: 9890
  REGION 1..183: note = tr|A0A0E2CP07|A0A0E2CP07_LEPIR GTP cyclohydrolase 1; OS = Leptospira interrogans serovar Bataviae str. L1111; OX = 1049804 GN=folE PE=3 SV=1

SEQ ID NO: 9892 - protein, 183 aa, unidentified; identical to SEQ ID NO: 9866
  source 1..183: note = Leptospira jelokensis
  REGION 1..183: note = tr|A0A4Z0ZRY4|A0A4Z0ZRY4_9LEPT GTP cyclohydrolase 1; OS = Leptospira jelokensis OX=2484931 GN=folE PE=3 SV=1

SEQ ID NO: 9893 - protein, 183 aa, unidentified
  source 1..183: note = Leptospira johnsonii
  REGION 1..183: note = tr|A0A2P2D5B6|A0A2P2D5B6_9LEPT GTP cyclohydrolase 1; OS = Leptospira johnsonii OX=1917820 GN=folE PE=3 SV=1
MENEVTSILKAIGEDPNREGLLNTPKRVRKAYEFLTSGYRADIDTIVNGAIFEEDSQGMVLVRDIEMYSLCEHHLLPFFGKAHVGYIPNKKIIGISKIPRIVDVFARRLQVQERMTEQIAYALMEVLDPLGVAVVIKAKHLCMMMRGVEKQNSELFTSCMLGEFKTNMVTRSEFLDLIRTGST

SEQ ID NO: 9894 - protein, 183 aa, unidentified; identical to SEQ ID NO: 9870
  source 1..183: note = Leptospira kanakyensis
  REGION 1..183: note = tr|A0A4R9HNW3|A0A4R9HNW3_9LEPT GTP cyclohydrolase 1; OS = Leptospira kanakyensis OX=2484968 GN=folE PE=3 SV=1

SEQ ID NO: 9895 - protein, 183 aa, unidentified; identical to SEQ ID NO: 9866
  source 1..183: note = Leptospira kemamanensis
  REGION 1..183: note = tr|A0A4R9JNX0|A0A4R9JNX0_9LEPT GTP cyclohydrolase 1; OS = Leptospira kemamanensis OX=2484942 GN=folE PE=3 SV=1

SEQ ID NO: 9896 - protein, 183 aa, Leptospira kirschneri
  REGION 1..183: note = tr|M6IAC8|M6IAC8_9LEPT GTP cyclohydrolase 1; OS = Leptospira kirschneri serovar Bim str. 1051 OX=1049941; GN = folE PE=3 SV=1
MEEDIINILKSIGEDPTREGLLNTPKRVKKAYEFLTSGYRADITKIVNGAIFEEPTEGMVLVRDIEMYSLCEHHLLPFYGKAHVAYLPNKKIIGISKIPRIVDVFARRLQVQERLTEQIAYAIQEVLDPQGVAVVIKAKHLCMMMRGVEKQNSELFTSCMLGAFKENMVTRSEFLDLIRTGST

SEQ ID NO: 9897 - protein, 183 aa, Leptospira kirschneri; identical to SEQ ID NO: 9896
  REGION 1..183: note = tr|A0A0E2B3P2|A0A0E2B3P2_9LEPT GTP cyclohydrolase 1; OS = Leptospira kirschneri str. H1 OX=1049966 GN=folE PE=3; SV = 1

SEQ ID NO: 9898 - protein, 190 aa, Leptospira kmetyi
  REGION 1..190: note = tr|A0A2M9XN93|A0A2M9XN93_9LEPT GTP cyclohydrolase 1; OS = Leptospira kmetyi OX=408139 GN=folE PE=3 SV=1
MKRREFNLEDEIVNILKSIGEDPTREGLLNTPKRVKKAYDFLTSGYTADITKIVNGAIFEEPTDGMVLVRDIEMYSLCEHHLLPFYGRAHVAYLPNKKIIGISKIPRIVDVFARRLQVQERLTEQIAYAIQDVLEPQGVAVVIKAKHLCMMMRGVEKQNSELFTSCMLGAFKENMVTRSEFLDLIRTGST

SEQ ID NO: 9899 - protein, 183 aa, Leptospira kmetyi
  REGION 1..183: note = tr|A0A5F1XQH4|A0A5F1XQH4_9LEPT GTP cyclohydrolase 1; OS = Leptospira kmetyi OX=408139 GN=folE PE=3 SV=1
MEDEIVNILKSIGEDPTREGLLNTPKRVKKAYDFLTSGYTADITKIVNGAIFEESTDGMVLVRDIEMYSLCEHHLLPFYGRAHVAYLPNKKIIGISKIPRIVDVFARRLQVQERLTEQIAYAIQDVLEPQGVAVVIKAKHLCMMMRGVEKQNSELFTSCMLGAFKENMVTRSEFLDLIRTGST

SEQ ID NO: 9900 - protein, 183 aa, unidentified
  source 1..183: note = Leptospira kobayashii
  REGION 1..183: note = tr|A0A2P2DSR9|A0A2P2DSR9_9LEPT GTP cyclohydrolase 1; OS = Leptospira kobayashii OX=1917830 GN=folE PE=3 SV=1
MEDLIEGIIKQIGEDPGREGLLKTPSRVKKAYEFLTSGYKADLDSLVNGAIFEENTTGMVLVRDIEMYSLCEHHLLPFYGRAHVAYIPNKKIIGISKIPRIVDVFARRLQVQERLTDQIAQAIQETLDPLGVGVVIKAKHLCMMMRGVEKQNSELFTSSLLGLFKSDPTTRSEFLDLIRTGSH

SEQ ID NO: 9901 - protein, 194 aa, unidentified; identical to SEQ ID NO: 9862
  source 1..194: note = Leptospira koniamboensis
  REGION 1..194: note = tr|A0A4R9J8U0|A0A4R9J8U0_9LEPT GTP cyclohydrolase 1; OS = Leptospira koniamboensis OX=2484950 GN=folE PE=3 SV=1

SEQ ID NO: 9902 - protein, 183 aa, unidentified
  source 1..183: note = Leptospira langatensis
  REGION 1..183: note = tr|A0A5F1ZVD5|A0A5F1ZVD5_9LEPT GTP cyclohydrolase 1; OS = Leptospira langatensis OX=2484983 GN=folE PE=3 SV=1
MEEEVTNILKAIGEDPSREGLVNTPKRVRKSYEFLTSGYRADMNSIVNGAIFEEDSQGMVLVRDIEMYSLCEHHLLPFFGKAHVGYIPNKKIIGISKIPRIVDVFARRLQVQERMTEQIAYALMEVLDPLGVAVVIKAKHLCMMMRGVEKQNSELFTSCMLGEFKTNMVTRSEFLDLIRTGST

SEQ ID NO: 9903 - protein, 183 aa, unidentified
  source 1..183: note = Leptospira levettii
  REGION 1..183: note = tr|A0A2N0AWM0|A0A2N0AWM0_9LEPT GTP cyclohydrolase 1; OS = Leptospira levettii OX=2023178 GN=folE PE=3 SV=1
MENLIEEILKQIGEDPNREGLVKTPNRVKKAYDFLTSGYKADINQLVNGAIFEESTTGMVLVRDIEMYSLCEHHLLPFYGRAHVAYIPNKKIIGISKIPRIVDVFARRLQVQERLTDQIAQAIQETLDPLGVGVVIKAKHLCMMMRGVEKQNSELFTSSLLGVFKSDPTTRSEFLDLIRTGSH

SEQ ID NO: 9904 - protein, 183 aa, Leptospira licerasiae
  REGION 1..183: note = tr|I0XV40|I0XV40_9LEPT GTP cyclohydrolase 1; OS = Leptospira licerasiae serovar Varillal str. VAR 010; OX = 1049972 GN=folE PE=3 SV=1
MENEVTSILKAIGEDPNREGLLNTPKRVRKAYEFLTSGYKADIDTIVNGAIFEEDSQGMVLVRDIEMYSLCEHHLLPFFGKAHVGYIPNKKIIGISKIPRIVDVFARRLQVQERMTEQIAYALMEVLDPLGVAVVIKAKHLCMMMRGVEKQNSELFTSCMLGEFKTNMVTRSEFLDLIRTGST

SEQ ID NO: 9905 - protein, 194 aa, Leptospira licerasiae
  REGION 1..194: note = tr|A0A5F2DXJ6|A0A5F2DXJ6_9LEPT GTP cyclohydrolase 1; OS = Leptospira licerasiae OX=447106 GN=folE PE=3 SV=1
MYFQSEERRETLENEVTSILKAIGEDPNREGLLNTPKRVRKAYEFLTSGYKADIDTIVNGAIFEEDSQGMVLVRDIEMYSLCEHHLLPFFGKAHVGYIPNKKIIGISKIPRIVDVFARRLQVQERMTEQIAYALMEVLDPLGVAVVIKAKHLCMMMRGVEKQNSELFTSCMLGEFKTNMVTRSEFLDLIRTGST

SEQ ID NO: 9906 - protein, 183 aa, unidentified; identical to SEQ ID NO: 9863
  source 1..183: note = Leptospira macculloughii
  REGION 1..183: note = tr|A0A2N0C3Q5|A0A2N0C3Q5_9LEPT GTP cyclohydrolase 1; OS = Leptospira macculloughii OX=2023202 GN=folE PE=3 SV=1

SEQ ID NO: 9907 - protein, 183 aa, unidentified; identical to SEQ ID NO: 9903
  source 1..183: note = Leptospira macculloughii
  REGION 1..183: note = tr|A0A2N0CIR0|A0A2N0CIR0_9LEPT GTP cyclohydrolase 1; OS = Leptospira macculloughii OX=2023202 GN=folE PE=3 SV=1

SEQ ID NO: 9908 - protein, 183 aa, unidentified
  source 1..183: note = Leptospira mayottensis
  REGION 1..183: note = tr|A0A3Q9DXA1|A0A3Q9DXA1_9LEPT GTP cyclohydrolase 1; OS = Leptospira mayottensis 200901116 OX=1192864 GN=folE; PE = 3 SV=1
MEENIVNILKSIGEDPTREGLLNTPKRVKKAYDFLTSGYHADITKVVNGAIFEEPTEGMILVRDIEVYSLCEHHLLPFYGRAHVAYLPNKKIIGISKIPRIVDVFARRLQVQERLTEQIAYAVQEVLDPQGVAVVIKAKHLCMMMRGVEKQNSELFTSCLLGAFKENMVTRSEFLDLIRTGST

SEQ ID NO: 9909 - protein, 183 aa, unidentified; identical to SEQ ID NO: 9908
  source 1..183: note = Leptospira mayottensis
  REGION 1..183: note = tr|A0A5F2E802|A0A5F2E802_9LEPT GTP cyclohydrolase 1; OS = Leptospira mayottensis OX=1137606 GN=folE PE=3 SV=1

SEQ ID NO: 9910 - protein, 183 aa, Leptospira meyeri; identical to SEQ ID NO: 9863
  REGION 1..183: note = tr|A0A4R8MV24|A0A4R8MV24_LEPME GTP cyclohydrolase 1; OS = Leptospira meyeri OX=29508 GN=folE PE=3 SV=1

SEQ ID NO: 9911 - protein, 183 aa, unidentified
  source 1..183: note = Leptospira montravelensis
  REGION 1..183: note = tr|A0A4Z0ZEP4|A0A4Z0ZEP4_9LEPT GTP cyclohydrolase 1; OS = Leptospira montravelensis OX=2484961 GN=folE PE=3 SV=1
MENLIEEILKQIGEDPSREGLVKTPNRVKKAYDFLTSGYKADLNQIVNGAIFEENTTGMVLVRDIEMYSLCEHHLLPFYGRAHVAYIPNKKIIGISKIPRIVDVFARRLQVQERLTDQIAQAIQETLDPLGVGVVIKAKHLCMMMRGVEKQNSELFTSSLLGLFKTDPTTRSEFLDLIRTGSH

SEQ ID NO: 9912 - protein, 183 aa, unidentified; identical to SEQ ID NO: 9874
  source 1..183: note = Leptospira mtsangambouensis
  REGION 1..183: note = tr|A0A5F2DEA7|A0A5F2DEA7_9LEPT GTP cyclohydrolase 1; OS = Leptospira mtsangambouensis OX=2484912 GN=folE PE=3 SV=1

SEQ ID NO: 9913 - protein, 195 aa, unidentified
  source 1..195: note = Leptospira neocaledonica
  REGION 1..195: note = tr|A0A2N0A0Y0|A0A2N0A0Y0_9LEPT GTP cyclohydrolase 1; OS = Leptospira neocaledonica OX=2023192 GN=folE PE=3 SV=1
MHFSKRRTERYTLENEVTSILKAIGEDPNREGLLNTPKRVRKAYEFLTSGYKADIDTIVNGAIFEEDSQGMVLVRDIEMYSLCEHHLLPFFGKAHVGYIPNKKIIGISKIPRIVDVFARRLQVQERMTEQIAYALMEVLDPLGVAVVIKAKHLCMMMRGVEKQNSELFTSCMLGEFKTNMVTRSEFLDLIRTGST

SEQ ID NO: 9914 - protein, 183 aa, Leptospira noguchii
  REGION 1..183: note = tr|V6GM55|V6GM55_9LEPT GTP cyclohydrolase 1; OS = Leptospira noguchii str. Cascata OX=1193054 GN=folE; PE = 3 SV=1
MEEDIINILKSIGEDPTREGLINTPKRVKKAYEFLTSGYRADITKIVNGAIFEEPTEGMVLVRDIEMYSLCEHHLLPFYGKAHVAYLPNKKIIGISKIPRIVDVFARRLQVQERLTEQIAYAIQEVLDPQGVAVVIKAKHLCMMMRGVEKQNSELFTSCMLGAFKENMVTRSEFLDLIRTGST

SEQ ID NO: 9915 - protein, 183 aa, Leptospira noguchii; identical to SEQ ID NO: 9914
  REGION 1..183: note = tr|T0GYH7|T0GYH7_9LEPT GTP cyclohydrolase 1; OS = Leptospira noguchii serovar Panama str. CZ214; OX = 1001595 GN=folE PE=3 SV=1

SEQ ID NO: 9916 - protein, 183 aa, unidentified; identical to SEQ ID NO: 9911
  source 1..183: note = Leptospira noumeaensis
  REGION 1..183: note = tr|A0A4R9I6V5|A0A4R9I6V5_9LEPT GTP cyclohydrolase 1; OS = Leptospira noumeaensis OX=2484964 GN=folE PE=3 SV=1

SEQ ID NO: 9917 - protein, 183 aa, unidentified
  source 1..183: note = Leptospira ognonensis
  REGION 1..183: note = tr|A0A4R9KAR9|A0A4R9KAR9_9LEPT GTP cyclohydrolase 1; OS = Leptospira ognonensis OX=2484945 GN=folE PE=3 SV=1
MEDLVEEILRQVGEDPSREGLVKTPNRVKKAYEFLTSGYIADIGQIVNGAIFEEKTTGMVLVRDIELYSLCEHHLLPFFGRAHVAYIPNKKIIGISKIPRIVDVFARRLQVQERLTDQIAQAIQETLDPLGVGVVIKAKHLCMMMRGVEKQNSELFTSSLIGLFKSDATTRSEFLDLIRTGSH

SEQ ID NO: 9918 - protein, 183 aa, unidentified
  source 1..183: note = Leptospira perdikensis
  REGION 1..183: note = tr|A0A4R9JH64|A0A4R9JH64_9LEPT GTP cyclohydrolase 1; OS = Leptospira perdikensis OX=2484948 GN=folE PE=3 SV=1
MENLIEEILKQIGEDPTREGLMKTPNRVKKAYDFLTSGYKADLNQIVNGAIFEENTTGMVLVRDIEMYSLCEHHLLPFYGRAHVAYIPNKKIIGISKIPRIVDVFARRLQVQERLTDQIAQAIQETLDPLGVGVVIKAKHLCMMMRGVEKQNSELFTSSLLGLFKTDPTTRSEFLDLIRTGSH

SEQ ID NO: 9919 - protein, 198 aa, unidentified
  source 1..198: note = Leptospira perolatii
  REGION 1..198: note = tr|A0A2M9ZKK6|A0A2M9ZKK6_9LEPT GTP cyclohydrolase 1; OS = Leptospira perolatii OX=2023191 GN=folE PE=3 SV=1
MEWGNRSWRRVRRFDLEQEVINILKEIGEDPNREGLIDTPKRVKKAYEFLTSGYRANIETIVNNAIFEEDSQGMVLVRDIELYSLCEHHMLPFFGKAHVGYIPNKKIIGISKIPRIVDVFARRLQVQERMTEQIAYALMEVLDPLGVAVVIKAKHLCMMMRGVEKQNSELFTSCMLGEFKTNMVTRSEFLDLIRTGST

SEQ ID NO: 9920 - protein, 183 aa, unidentified
  source 1..183: note = Leptospira putramalaysiae
  REGION 1..183: note = tr|A0A4V3JVH1|A0A4V3JVH1_9LEPT GTP cyclohydrolase 1; OS = Leptospira putramalaysiae OX=2484984 GN=folE PE=3 SV=1
MEEEVVKILKAIGEDPNREGLRDTPKRVSKAYDFLTSGYRADITTIVNGAIFDEPTEGMVLVRDIEMYSLCEHHLLPFYGRAHVAYLPNKKIIGISKIPRIVDVFARRLQVQERLTEQIAYAIQEVLDPQGVAVVIKAKHLCMMMRGVEKQNSELFTSCMLGAFKDNMVTRSEFLDLIRTGST

SEQ ID NO: 9921 - protein, 183 aa, unidentified
  source 1..183: note = Leptospira ryugenii
  REGION 1..183: note = tr|A0A2P2E395|A0A2P2E395_9LEPT GTP cyclohydrolase 1; OS = Leptospira ryugenii OX=1917863 GN=folE PE=3 SV=1
MENLIEEILRQVGEDPDREGLVKTPNRVKKAYEFLTSGYKANIDELVNGAIFEESTTGMVLVRDIELYSLCEHHLLPFFGRAHVAYIPNKKIIGISKIPRIVDVFARRLQVQERLTDQIAQAIQETLDPLGVGVVIKAKHLCMMMRGVEKQNSELFTSSLLGLFKTDATTRSEFLDLIRTGSH

SEQ ID NO: 9922 - protein, 194 aa, unidentified; identical to SEQ ID NO: 9862
  source 1..194: note = Leptospira saintgironsiae
  REGION 1..194: note = tr|A0A2M9YFZ5|A0A2M9YFZ5_9LEPT GTP cyclohydrolase 1; OS = Leptospira saintgironsiae OX=2023183 GN=folE PE=3 SV=1

SEQ ID NO: 9923 - protein, 219 aa, Leptospira santarosai
  REGION 1..219: note = tr|M6YWY6|M6YWY6_9LEPT GTP cyclohydrolase 1; OS = Leptospira santarosai str. 200702252 OX=1049977 GN=folE; PE = 3 SV=1
MGMKRWIRKTDPEFSERNPTKRPPNRIGIIERREFNLEENIVNILKSIGEDPTREGLLNTPKRVKKAYDFLTSGYHADIKKVVNGAIFEERTEGMILVRDIELYSLCEHHLLPFYGRAHVAYLPNQKIIGISKIPRIVDVFARRLQVQERLTEQIAYAVQEVLDPQGVAVVIKAKHLCMMMRGVEKQNSELFTSCLLGAFKENMVTRSEFLDLIRTGST

SEQ ID NO: 9924 - protein, 218 aa, Leptospira santarosai
  REGION 1..218: note = tr|A0A2P1QQG2|A0A2P1QQG2_9LEPT GTP cyclohydrolase 1; OS = Leptospira santarosai OX=28183 GN=folE PE=3 SV=1
MGMKRWIRKTDPKFSERNPTKRLPSRIGIIEREFNLEENIVNILKSIGEDPTREGLLNTPKRVKKAYDFLTSGYHADIKKVVNGAIFEERTEGMILVRDIELYSLCEHHLLPFYGRAHVAYLPNQKIIGISKIPRIVDVFARRLQVQERLTEQIAYAVQEVLDPQGVAVVIKAKHLCMMMRGVEKQNSELFTSCLLGAFKENMVTRSEFLDLIRTGST

SEQ ID NO: 9925 - protein, 195 aa, unidentified
  source 1..195: note = Leptospira sarikeiensis
  REGION 1..195: note = tr|A0A4R9K4C0|A0A4R9K4C0_9LEPT GTP cyclohydrolase 1; OS = Leptospira sarikeiensis OX=2484943 GN=folE PE=3 SV=1
MHLKSEERRRDALEHEVTNILKAIGEDPSREGLLNTPKRVRKAYEFLTSGYKADIDTIVNGAIFEEDSQGMVLVRDIEMYSLCEHHLLPFYGKAHVGYIPNKKIIGISKIPRIVDVFARRLQVQERMTEQIAYALMDVLDPLGVAVVIKAKHLCMMMRGVEKQNSELFTSCMLGEFKTNMVTRSEFLDLIRTGST

SEQ ID NO: 9926 - protein, 194 aa, unidentified; identical to SEQ ID NO: 9862
  source 1..194: note = Leptospira selangorensis
  REGION 1..194: note = tr|A0A4V3JDB3|A0A4V3JDB3_9LEPT GTP cyclohydrolase 1; OS = Leptospira selangorensis OX=2484982 GN=folE PE=3 SV=1

SEQ ID NO: 9927 - protein, 183 aa, unidentified
  source 1..183: note = Leptospira semungkisensis
  REGION 1..183: note = tr|A0A4R9G6K0|A0A4R9G6K0_9LEPT GTP cyclohydrolase 1; OS = Leptospira semungkisensis OX=2484985 GN=folE PE=3 SV=1
MEQEVTNILKAIGEDPSREGLLNTPKRVRKSYEFLTSGYRADMNSIVNGAIFEEDSQGMVLVRDIEMYSLCEHHLLPFFGKAHVGYIPNKKIIGISKIPRIVDVFARRLQVQERMTEQIAYALMEVLDPLGVAVVIKAKHLCMMMRGVEKQNSELFTSCMLGEFKTNMVTRSEFLDLIRTGST

SEQ ID NO: 9928 - protein, 225 aa, Leptospira sp.
  REGION 1..225: note = tr|A0A2M8HRC4|A0A2M8HRC4_9LEPT GTP cyclohydrolase 1; OS = Leptospira sp. OX=178 GN=folE PE=3 SV=1
MILNPEYDTFTSQGDNHSMTSIETPLREDAFVKTDEEKIQNIQKYFALIMGELGLDLTDDSLRGTPYRVAKMYVQEIFSGLNPANKPVISTFDNKYQYDKMLVESNISFSSSCEHHFLPIVGKSHVGYISNGRVIGLSKINRIVDYFAKRPQVQERMTVQIIEELKKVLNTEDVIVVVEAGHMCVSTRGINDKSSMTTTIEYSGKFMSPSLRNEFFQLIAKKSIS

SEQ ID NO: 9929 - protein, 183 aa, Leptospira sp.; identical to SEQ ID NO: 9859
  REGION 1..183: note = tr|M6EN06|M6EN06_9LEPT GTP cyclohydrolase 1; OS = Leptospira sp. serovar Kenya str. Sh9 OX=1242991; GN = folE PE=3 SV=1

SEQ ID NO: 9930 - protein, 183 aa, unidentified; identical to SEQ ID NO: 9920
  source 1..183: note = Leptospira stimsonii
  REGION 1..183: note = tr|A0A396ZD73|A0A396ZD73_9LEPT GTP cyclohydrolase 1; OS = Leptospira stimsonii OX=2202203 GN=folE PE=3 SV=1

SEQ ID NO: 9931 - protein, 183 aa, unidentified
  source 1..183: note = Leptospira terpstrae
  REGION 1..183: note = tr|N1W4N1|N1W4N1_9LEPT GTP cyclohydrolase 1; OS = Leptospira terpstrae serovar Hualin str. LT 11-33 = ATCC 700639 OX=1257025 GN=folE PE=3 SV=1
MENLIEEILKQIGEDPKREGLTKTPSRVKKAYDFLTSGYKADLNQIVNGAIFEENTTGMVLVRDIEMYSLCEHHLLPFYGRAHVAYIPNKKIIGISKIPRIVDVFARRLQVQERLTDQIAQAIQETLDPLGVGVVIKAKHLCMMMRGVEKQNSELFTSSLLGLFKTDPTTRSEFLDLIRTGSH

SEQ ID NO: 9932 - protein, 183 aa, unidentified
  source 1..183: note = Leptospira tipperaryensis
  REGION 1..183: note = tr|A0A1D7V2X3|A0A1D7V2X3_9LEPT GTP cyclohydrolase 1; OS = Leptospira tipperaryensis OX=2564040 GN=folE PE=3 SV=1
MEEEVVKILKSIGEDPNREGLRDTPKRVAKSYEFLTSGYRADITTIVNGAIFEEPTEGMVLVRDIEMYSLCEHHLLPFYGRAHVAYLPNKKIIGISKIPRIVDVFARRLQVQERLTEQIAYAIQEVLDPQGVAVVIKAKHLCMMMRGVEKQNSELFTSCMLGAFKDNMVTRSEFLDLIRTGST

SEQ ID NO: 9933 - protein, 183 aa, unidentified
  source 1..183: note = Leptospira vanthielii
  REGION 1..183: note = tr|N1W5R5|N1W5R5_9LEPT GTP cyclohydrolase 1; OS = Leptospira vanthielii serovar Holland str. Waz Holland = ATCC 700522 OX=1218591 GN=folE PE=3 SV=1
MENLIEEILKQIGEDPTREGLMKTPSRVKKAYDFLTSGYKADLNQIVNGAIFEENTTGMVLVRDIEMYSLCEHHLLPFYGRAHVAYIPNKKIIGISKIPRIVDVFARRLQVQERLTDQIAQAIQETLEPLGVGVVIKAKHLCMMMRGVEKQNSELFTSSLLGLFKTDPTTRSEFLDLIRTGSH

SEQ ID NO: 9934 - protein, 183 aa, unidentified; identical to SEQ ID NO: 9933
  source 1..183: note = Leptospira vanthielii
  REGION 1..183: note = tr|A0A4R9LEX4|A0A4R9LEX4_9LEPT GTP cyclohydrolase 1; OS = Leptospira vanthielii OX=293085 GN=folE PE=3 SV=1

SEQ ID NO: 9935 - protein, 183 aa, Leptospira weilii
  REGION 1..183: note = tr|M6FTW8|M6FTW8_9LEPT GTP cyclohydrolase 1; OS = Leptospira weilii str. 2006001855 OX=996804 GN=folE; PE = 3 SV=1
MEENIVNILKSIGEDPNREGLLNTPKRVKKAYDFLTSGYHVDITKVVNGAIFEEPTEGMILVRDIEVYSLCEHHLLPFYGRAHVAYLPNKKIIGISKIPRIVDVFARRLQVQERLTEQIAYAVQEVLDPQGVAVVIKAKHLCMMMRGVEKQNSELFTSCLLGAFKENMVTRSEFLDLIRTGST

SEQ ID NO: 9936 - protein, 183 aa, Leptospira weilii
  REGION 1..183: note = tr|N1WJA0|N1WJA0_9LEPT GTP cyclohydrolase 1; OS = Leptospira weilii serovar Ranarum str. ICFT OX=1218598; GN = folE PE=3 SV=1
MEEDIVNILKSIGEDPTREGLLDTPKRVKKAYDFLTSGYRADITKIVNGAIFEEPTDGMVLVRDIEMYSLCEHHLLPFYGRAHVAYLPNKKIIGISKIPRIVDVFARRLQVQERLTEQIAYAIQEVLEPQGVGVVIKAKHLCMMMRGVEKQNSELFTSCMLGAFKENMVTRSEFLDLIRTGST

SEQ ID NO: 9937 - protein, 183 aa, Leptospira wolbachii; identical to SEQ ID NO: 9933
  REGION 1..183: note = tr|R9A1W4|R9A1W4_9LEPT GTP cyclohydrolase 1; OS = Leptospira wolbachii serovar Codice str. CDC OX=1218599; GN = folE PE=3 SV=1

SEQ ID NO: 9938 - protein, 183 aa, Leptospira wolffii
  REGION 1..183: note = tr|S3UXW0|S3UXW0_9LEPT GTP cyclohydrolase 1; OS = Leptospira wolffii serovar Khorat str. Khorat-H2; OX = 1193069 GN=folE PE=3 SV=1
MEQEVTNILKEIGEDPKREGLLNTPKRVKKAYEFLTSGYRANIDTIVNGAIFEEDSEGMVLVRDIEMYSLCEHHLLPFFGKAHVGYIPNKKIIGISKIPRIVDVFARRLQVQERMTEQIANALMEVLDPLGVAVVIKAKHLCMMMRGVEKQNSELFTSCMLGEFKTNMVTRSEFLDLIRTGST

SEQ ID NO: 9939 - protein, 203 aa, Leptospira wolffii
  REGION 1..203: note = tr|A0A2M9ZF05|A0A2M9ZF05_9LEPT GTP cyclohydrolase 1; OS = Leptospira wolffii OX=409998 GN=folE PE=3 SV=1
MRPENRLNTESRFSKGRRETLEQEVTNILKEIGEDPKREGLLNTPKRVKKAYEFLTSGYKADIDTIVNGAIFEEHSEGMVLVRDIEMYSLCEHHLLPFFGKAHVGYIPNKKIIGISKIPRIVDVFARRLQVQERMTEQIANALMEVLDPLGVAVVIKAKHLCMMMRGVEKQNSELFTSCMLGEFKTNMVTRSEFLDLIRTGST

SEQ ID NO: 9940 - protein, 183 aa, unidentified
  source 1..183: note = Leptospira yanagawae
  REGION 1..183: note = tr|A0A4R9IZ63|A0A4R9IZ63_9LEPT GTP cyclohydrolase 1; OS = Leptospira yanagawae OX=293069 GN=folE PE=3 SV=1
MENLIEEILKQIGEDPNREGLVKTPNRVKKAYDFLTSGYKADINQLVNGAIFEENTTGMVLVRDIEMYSLCEHHLLPFYGRAHVAYIPNKKIIGISKIPRIVDVFARRLQVQERLTDQIAHAIQETLDPLGVGVVIKAKHLCMMMRGVEKQNSELFTSSLLGLFKTDPTTRSEFLDLIRTGSH

SEQ ID NO: 9941 - protein, 183 aa, unidentified; identical to SEQ ID NO: 9866
  source 1..183: note = Leptospira yanagawae
  REGION 1..183: note = tr|A0A5E8HEJ2|A0A5E8HEJ2_9LEPT GTP cyclohydrolase 1; OS = Leptospira yanagawae serovar Saopaulo str. Sao Paulo = ATCC 700523 OX=1249483 GN=folE PE=3 SV=1

SEQ ID NO: 9942 - protein, 183 aa, unidentified; identical to SEQ ID NO: 9876
  source 1..183: note = Leptospira yasudae
  REGION 1..183: note = tr|A0A418AEF0|A0A418AEF0_9LEPT GTP cyclohydrolase 1; OS = Leptospira yasudae OX=2202201 GN=folE PE=3 SV=1

SEQ ID NO: 9943 - protein, 191 aa, unidentified
  source 1..191: note = Leptospiraceae bacterium
  REGION 1..191: note = tr|A0A357IUP2|A0A357IUP2_9LEPT GTP cyclohydrolase 1; OS = Leptospiraceae bacterium OX=2026757 GN=folE PE=3 SV=1
MNKEVSREQALDAVRTLLRYIGDDPDREGLQDTPDRVVRSYEHIYSGYQKDHKEILGKTFTSSTEEMVVLSNIELYSMCEHHMLPFTGKCHIGYIPKGKVLGISKLARVMEVFARRLQIQEELCHQIATAIDTELKPAGVGVVIEARHMCMTCRGVEKQHSIMTSSTLLGSFREDPRTRQEFFDLIRSNGN

SEQ ID NO: 9944 - protein, 191 aa, unidentified
  source 1..191: note = Leptospiraceae bacterium
  REGION 1..191: note = tr|A0A2E5S4I6|A0A2E5S4I6_9LEPT GTP cyclohydrolase 1; OS = Leptospiraceae bacterium OX=2026757 GN=folE PE=3 SV=1
MKKEVSREEALDAVRTLLRYIGDDPEREGLLETPDRVVRSFEHIYSGYRKDHKEILGKTFTSSTEEMVVLSNIELYSMCEHHMLPFTGKCHIGYIPKGKVLGISKLARVMEVFARRLQIQEELCHQIATAIDTELRPAGVGVVIEARHMCMTCRGVEKQHSIMTSSTLLGSFREDPRTRQEFFDLIRSNGN

SEQ ID NO: 9945 - protein, 191 aa, Leptospirillum ferriphilum
  REGION 1..191: note = tr|J9ZB45|J9ZB45_LEPFM GTP cyclohydrolase 1; OS = Leptospirillum ferriphilum (strain ML-04) OX=1048260; GN = folE PE=3 SV=1
MIDPEKIEQGVRLILEGIGEDALRPGLKETPRRIAELYRDLFRGLDPSLPRPLSLIEGEEFDEMIALAGVPFHSMCEHHFLPFFGKAHIAYIPKEGRMTGLSDLARMLDLYARRPQIQERLTSQLADRIVETLTPQGVMVVLEAEHLCLSMRGIKKPGVPIVTSAVRGIFRKNAKTRQEFLSLIRLDGPGR

SEQ ID NO: 9946 - protein, 191 aa, Leptospirillum ferriphilum
  REGION 1..191: note = tr|A0A094WBD6|A0A094WBD6_9BACT GTP cyclohydrolase 1; OS = Leptospirillum ferriphilum OX=178606 GN=folE PE=3 SV=1
MIDPEKIEQGVRLILEGIGEDALRPGLKETPRRIAELYQDLFRGLDATLSRPLSLIEGEEFDEMIALAGVPFHSMCEHHFLPFFGKAHIAYIPKEGRMTGLSDLGRMLDLYARRPQIQERLTSQLADRIVETLTPQGVMVVLEAEHLCLSMRGIKKPGVPVVTSAVRGIFRKNAKTRQEFLSLIRLDGPDR

SEQ ID NO: 9947 - protein, 187 aa, unidentified
  source 1..187: note = Leptospirillum ferrodiazotrophum
  REGION 1..187: note = tr|C6HTR5|C6HTR5_9BACT GTP cyclohydrolase 1; OS = Leptospirillum ferrodiazotrophum OX=412449 GN=folE PE=3; SV = 1
MVDREKIERGFRMVLEGLGEDLSRPGLAETPARVATLYADLFSGLFQKPAETLSLIEGESFDEMVVLKRLPFYSMCEHHFLPFFGHASIAYIPDHGRMTGLSDLGRVVETYARRAQIQERMTSQIADCLMETLTPQGAMVILEAEHLCLSMRGLKKPGVPVVTSAVRGIFLKNAKTRQELLSLIRSS

SEQ ID NO: 9948 - protein, 190 aa, Leptospirillum ferrooxidans
  REGION 1..190: note = tr|I0IN73|I0IN73_LEPFC GTP cyclohydrolase 1; OS = Leptospirillum ferrooxidans (strain C2-3) OX=1162668; GN = folE PE=3 SV=1
MIDQKKIAEGFRLILEGLGENPGRPGLQETPRRVAELYAEILGGIHENPTEILRPIKGEDFDEMVALAGIPFHSMCEHHFLPFFGKGHIAYIPKEGRMTGLSSLARLLDIFARRPQIQERLTAEVADGIMEGLSPQGVMVVLEAEHLCLSMRGIKKPGVPVVTSAVRGIFRKNAKTRQEFLSLISMKNHG

SEQ ID NO: 9949 - protein, 191 aa, Leptospirillum sp.
  REGION 1..191: note = tr|A0A0K0WLS8|A0A0K0WLS8_9BACT GTP cyclohydrolase 1; OS = Leptospirillum sp. Group II 'CF-1' OX=1660083 GN=folE; PE = 3 SV=1
MIDPEKIEQGVRLILEGIGEDALRPGLKETPRRIAELYRDLFRGLDPALPRPLSLIEGEEFDEMIALAGVPFHSMCEHHFLPFFGKAHIAYIPKEGRMTGLSDLARMLDLYARRPQIQERLTSQLADRIVETLTPQGVMVVLEAEHLCLSMRGIKKPGVPIVTSAVRGIFRKNAKTRQEFLSLIRLDGPGR

SEQ ID NO: 9950 - protein, 90 aa, Leptospirillum sp.
  REGION 1..90: note = tr|T0XT80|T0XT80_9BACT GTP cyclohydrolase 1; OS = Leptospirillum sp. Group IV 'UBA BS' OX=1260983; GN = D084_Lepto4C00657G0002 PE=3 SV=1
MTGLSDLGRVVEIFARRAQIQERMTSQIADCLMETLTPQGAMVILEAEHLCLSMRGLKKPGVPVVTSAVRGIFLKNAKTRQELLSLIRSS

SEQ ID NO: 9951 - protein, 250 aa, Leptothrix cholodnii
  REGION 1..250: note = tr|B1XZX0|B1XZX0_LEPCP GTP cyclohydrolase I; OS = Leptothrix cholodnii (strain ATCC 51168 / LMG 8142 / SP-6) OX=395495 GN=Lcho_1830 PE=4 SV=1
MTTHHSLPILAAERGLAVQETDDSGVPVSVRIRERIKAARQRFHANDNIAEFIRPGELEALLDEVSGKMSAVLSSLVIDTESDHNTQDTARRVAKMYLKEVFRGRYVEQPPVTEFPNVERLNELMIVGPVTVRSACSHHLCPIVGKLWIGVMPNEHSNLIGLSKYARLAEWIMSRPQIQEEAVTQVADLLQDKMQPDGLAVVMEADHFCMSWRGVKDMDSKMINSVMRGSFLKDPNLRREFLSLLQHKKT

SEQ ID NO: 9952 - protein, 198 aa, Leptotrichia buccalis
  REGION 1..198: note = tr|C7NAF7|C7NAF7_LEPBD GTP cyclohydrolase 1; OS = Leptotrichia buccalis (strain ATCC 14201 / DSM 1135 / JCM 12969 / NCTC 10249 / C-1013-b) OX=523794 GN=folE PE=3; SV = 1
MTENKNLDIDKKTRLENIENAVRKILINIGEDINREGLIETPKRVAKMYEEILSTKSINDFDNYKLFEVDLDNSQEMILIKDIPFFSMCEHHMLPFFGKVHVAYIPRENKVIGLSKIPRLVEFVSRKLSVQEEITVNVAKKLIEILNPLGVAVVVEARHMCIEMRGINKIGSVTKTSFYSGEFKVNVDRKKEFLDGIK

SEQ ID NO: 9953 - protein, 196 aa, Leptotrichia hofstadii
  REGION 1..196: note = tr|A0A510JHE3|A0A510JHE3_9FUSO GTP cyclohydrolase 1; OS = Leptotrichia hofstadii OX=157688 GN=folE PE=3 SV=1
MKKNKNIDKETRLKNIENAVREILINIGEDVDREGLIETPKRVAKMYDEILSTKSVDNFENYKLFDVDLGDSQEMVLVKEIPFFSMCEHHMLPFFGKVHVAYIPRENKVIGLSKIPRLVEFVSRKLSVQEEITVNVAKKLIEILNPLGVAVVVEARHMCIEMRGVNKIGSVTRTSFYSGEFKENVDRKKEFLEGIK

SEQ ID NO: 9954 - protein, 151 aa, Leptotrichia hofstadii
  REGION 1..151: note = tr|C9MW76|C9MW76_9FUSO GTP cyclohydrolase 1; OS = Leptotrichia hofstadii F0254 OX=634994; GN = GCWU000323_00797 PE=3 SV=1
MYEEILSTKSVDDFENYKLFDVDLGDSQEMVLVKEIPFFSMCEHHMLPFFGKVHVAYIPRENKVIGLSKIPRLVEFVSRKLSVQEEITVNVAKKLIEILNPLGVAVVIEARHMCIEMRGVNKIGSVTRTSFYSGEFKENADRKKEFLDGIK

SEQ ID NO: 9955 - protein, 196 aa, Leptotrichia hongkongensis
  REGION 1..196: note = tr|A0A510L6C5|A0A510L6C5_9FUSO GTP cyclohydrolase 1; OS = Leptotrichia hongkongensis OX=554406 GN=folE PE=3 SV=1
MKKNKNIDKETRLKNIENAVREILINIGEDADREGLIETPKRVAKMYEEILSTKSVDDFENYKLFDVDLGDSQEMVLVKEIPFFSMCEHHMLPFFGKVHVAYIPRENKVIGLSKIPRLVEFISRKLSVQEEITVNIAKKLIKILNPLGVAVVVEARHMCIEMRGVNKIGSVTRTSFYSGEFKENVDRKKEFLDGIK

SEQ ID NO: 9956 - protein, 196 aa, Leptotrichia sp.
  REGION 1..196: note = tr|U2PWP9|U2PWP9_9FUSO GTP cyclohydrolase 1; OS = Leptotrichia sp. oral taxon 879 str. F0557 OX=1227268; GN = folE PE=3 SV=1
MKKNKNIDKETRLKNIENAVREILINIGEDADREGLIETPKRVAKMYDEILSTKSVDNFENYKLFDVDLGDSQEMVLVKEIPFFSMCEHHMLPFFGKVHVAYIPRENKVIGLSKIPRLVEFISRKLSVQEEITVNVAKKLIEILNPLGVAVVVEARHMCIEMRGVNKIGSVTRTSFYSGEFKENVDRKKEFLDGIK

SEQ ID NO: 9957 - protein, 196 aa, Leptotrichia sp.
  REGION 1..196: note = tr|U2V9I8|U2V9I8_9FUSO GTP cyclohydrolase 1; OS = Leptotrichia sp. oral taxon 225 str. F0581 OX=1321774; GN = folE PE=3 SV=1
MKKNKNIDKETRLKNIENAVREILINIGEDADREGLVETPKRVAKMYEEILSTKSVDDFENYKLFDVDLGDSQEMVLVKEIPFFSMCEHHMLPFFGKVHVAYIPRDNKVIGLSKIPRLVEFISRKLSVQEEITVNVAKKLIKILNPLGVAVVVEARHMCIEMRGVNKIGSVTRTSFYSGEFKENADKKKEFLDGIK

SEQ ID NO: 9958 - protein, 196 aa, Leptotrichia trevisanii
  REGION 1..196: note = tr|A0A510KLB4|A0A510KLB4_9FUSO GTP cyclohydrolase 1; OS = Leptotrichia trevisanii OX=109328 GN=folE PE=3 SV=1
MKKNKSIDKETRLKNIENAVREILISIGEDVNREGLVETPKRVAKMYDEILSTKSVDDFENYKLFDVDLGDSQEMVLVKEIPFFSMCEHHMLPFFGKVHVAYIPRDNKVIGLSKIPRLVEFISRKLSVQEEITVNVAKKLIEILNPLGVAVVVEARHMCIEMRGVNKIGSVTRTSFYSGEFKENVGRKKEFLEGIK

SEQ ID NO: 9959 - protein, 196 aa, Leptotrichia trevisanii
  REGION 1..196: note = tr|A0A510K299|A0A510K299_9FUSO GTP cyclohydrolase 1; OS = Leptotrichia trevisanii OX=109328 GN=folE PE=3 SV=1
MKKNKSIDKETRLKNIENAVREILINIGEDVYREGLIETPKRVAKMYEEILSTKNVNDFENYKLFDVNLGESQEMVLVKEIPFFSMCEHHMLPFFGKVHVAYIPRDNKVIGLSKIPRLVEFISKKLSVQEEITVNIAKKLIEILNPLGVAVVVEARHMCIEMRGINKIGSVTRTSFYSGEFKENADRKKEFLDGIK

SEQ ID NO: 9960 - protein, 201 aa, Leptotrichia wadei
  REGION 1..201: note = tr|A0A510KT16|A0A510KT16_9FUSO GTP cyclohydrolase 1; OS = Leptotrichia wadei OX=157687 GN=folE PE=3 SV=1
MEKNKNNLDKKTRLKNIENAVREILINVGEDVDREGLIETPKRVAKMYEEILSTKNVDDFKNYKLFDVDLGDSQEMVLVKEIPFFSMCEHHMLPFFGKVHVAYIPQDNRVIGLSKIPRLVEFVSRKLSVQEEITVNVAKKLIEILNPLGVAVVVEARHMCIEMRGVNKIGSVTRTSFYSGEFKENADRKREFLDGIRDGKF

SEQ ID NO: 9961 - protein, 199 aa, Leptotrichia wadei
  REGION 1..199: note = tr|U2PVJ8|U2PVJ8_LEPWF GTP cyclohydrolase 1; OS = Leptotrichia wadei (strain F0279) OX=888055 GN=folE; PE = 3 SV=1
MKKNKNNLDKETKLKNIENAVREILINIGEDVNRKGLIETPKRVAKMYEEILSTKKGDDFENYKLFDVDLGDSQEMVLVKEIPFFSMCEHHILPFFGKVHVAYIPRDNKVIGLSKIPRLVEFVSRKLSVQEEITVDVAKKLIEILNPLGVAVVVEARHMCVEMRGINKIGSITRTSFYSGEFKENTDKKREFLVGIRKE

SEQ ID NO: 9962 - protein, 195 aa, Leucobacter chromiiresistens
  REGION 1..195: note = tr|A0A1H0Z7R2|A0A1H0Z7R2_9MICO GTP cyclohydrolase 1; OS = Leucobacter chromiiresistens OX=1079994 GN=folE PE=3; SV = 1
MGDTVDRERIASAVRELISAIGENPDSPELASTPFRVADSYAEFFAGVGRDPAVLLSDSVPVGDDTGELVVVRDISLRSMCEHHLLPFRGRAHIAYRPNERVVGLSAIPRVVDVLAARPQMQERLGEQIAQTLDDGLRPHGVLVVLEASHGCVADRGVRQSDSTIITVASRGSLEGAAEQAAVFALIGRPEGGAA

SEQ ID NO: 9963 - protein, 195 aa, Leucobacter chromiiresistens
  REGION 1..195: note = tr|A0A147EBV1|A0A147EBV1_9MICO GTP cyclohydrolase 1; OS = Leucobacter chromiiresistens OX=1079994 GN=folE PE=3; SV = 1
MGDTVDRERIASAVRELISAIGENPDSPELASTPFRVADSYAEFFAGVGRDPAVLLSDSVPVGDDTGELVVVRDISLRSMCEHHLLPFRGRAHIAYRPNERVVGLSAIPRVVDVLAARPQMQERLGEQIAQTLDDGLRPRGVLVVLEASHGCVADRGVRQSDSAIITVASRGSLADAAEQAAVFALIGRPEGGAA

SEQ ID NO: 9964 - protein, 196 aa, Leucobacter komagatae
  REGION 1..196: note = tr|A0A542Y5Y7|A0A542Y5Y7_9MICO GTP cyclohydrolase 1; OS = Leucobacter komagatae OX=55969 GN=folE PE=3 SV=1
MSAGVDRDRVARAVRELLGAIGADPESDELRATPSRVAESYAEFFAGVGVDPQQFLADAVPVDGETGELVLMRDIALRSVCEHHLLPFRGKAHVAYQPRDRVVGLSALPRVVDTLAARPQVQERLGEQIAQTLQDGLDPLGVLVVLEASHGCVSDRGVREADAEAVTIASRGSLADPAARAEVVALIAPAGSRSAL

SEQ ID NO: 9965 - protein, 196 aa, Leucobacter komagatae
  REGION 1..196: note = tr|A0A0D0IJD3|A0A0D0IJD3_9MICO GTP cyclohydrolase 1; OS = Leucobacter komagatae OX=55969 GN=folE PE=3 SV=1
MNAAVDRDRVARAVRELLGAIGADPESAELRETPARVAESYAEFFSGVGVDPQQFLADAVPVDGETGELVLMRDISLRSICEHHLLPFRGRAHVAYQPSERVVGLSALPRVVAALAARPQVQERLGEQIAQAIDDGLSPRGVLVVLEASHGCVADRGVRETDAAAVTIASRGGLSEPAARAEIMALIGTGGDRRAL

SEQ ID NO: 9966 - protein, 198 aa, Leucobacter luti
  REGION 1..198: note = tr|A0A4V3CYI9|A0A4V3CYI9_9MICO GTP cyclohydrolase 1; OS = Leucobacter luti OX=340320 GN=folE PE=3 SV=1
MNETVDRERIAAAVRELLSAIGSDPDSPELASTPFRVADSYAEFFAGVGQDPSGFLSDAVPVGEDTGELVLVRDIVLRSVCEHHLLPFRGRAHVAYRPGGRVVGLSAIPRIVDVLAARPQVQERLGEQIAQTLVDGLDPLGVLVVLEASHGCVADRGVRQTEALAVTVASRGTLSDPQAQAAVFALLGRATALGSSSA

SEQ ID NO: 9967 - protein, 198 aa, Leucobacter luti
  REGION 1..198: note = tr|A0A4Q7U480|A0A4Q7U480_9MICO GTP cyclohydrolase 1; OS = Leucobacter luti OX=340320 GN=folE PE=3 SV=1
MGETVDRERIVAAVRELLSAIGSDPDSAELASTPGRVADSYAEFFAGVGQDPAALLSDAVPVGADTGELVLVRDISLRSVCEHHLLPFRGRAHIAYRPGERVVGLSAIPRVVDVLAARPQVQERLGEQIAQTLADGLDPLGVLVVLEASHGCVADRGVRQIDATVATVASRGSLSDPREQAAVFALLGRGAAGGSGAA

SEQ ID NO: 9968 - protein, 198 aa, unidentified
  source 1..198: note = Leucobacter massiliensis
  REGION 1..198: note = tr|A0A2S9QSS0|A0A2S9QSS0_9MICO GTP cyclohydrolase 1; OS = Leucobacter massiliensis OX=1686285 GN=folE PE=3 SV=1
MGESIDRVRIAAAVRELLSAIGADPDSPELAATPGRVADSYAEFFAGVGKDPLGLLADSVPVGADTGELVLVRDIALRSVCEHHLLPFRGRAHVAYRPGERVVGLSAIPRVVEMLAARPQVQERLGEQIAQALYDGLAPRGVLVVLEASHGCVADRGVRQGEALAVTVAARGVLGDPAEQAGVFALLGGGAGWAGAHA

SEQ ID NO: 9969 - protein, 195 aa, Leucobacter sp.
  REGION 1..195: note = tr|A0A373DLW1|A0A373DLW1_9MICO GTP cyclohydrolase 1; OS = Leucobacter sp. wl10 OX=2304677 GN=folE PE=3 SV=1
MGETVDRERIAAAVRELLSAIGSDPDSPELSSTPFRVAEAYAEFFSGVGQDAGRLLSDAVPVGDDTGELVLVRDIVLRSVCEHHLLPFRGRAHVAYRPGDRVVGLSAIPRVVEVLAARPQVQERLGEQIAQTIEDRLGPRGVLVVLEASHGCVADRGVRQSGALAVTVASRGSLGDPAEQAGVFALLGRAEGGEP

SEQ ID NO: 9970 - protein, 196 aa, Leucobacter sp.
  REGION 1..196: note = tr|A0A1R4HT02|A0A1R4HT02_9MICO GTP cyclohydrolase 1; OS = Leucobacter sp. 7(1) OX=1255613 GN=folE PE=3 SV=1
MNETVDRERVAAAVRELLHAIGADPDSPELASTPARVAESYTEFFAGMGQDPAAFLSDAIPVGADTGELVLVRDITLRSMCEHHLLPFRGRAHIAYRPGRSVVGLSAIPRVVDALAARPQVQERLGEQIAQTLADGLDPEGVLVVLEARHGCVSDRGVRQADAVTVTVASRGVLADPTQQAAVFALLGHGGSEGAQ

SEQ ID NO: 9971 - protein, 198 aa, unidentified
  source 1..198: note = Leucobacter triazinivorans
  REGION 1..198: note = tr|A0A4P6KDS1|A0A4P6KDS1_9MICO GTP cyclohydrolase 1; OS = Leucobacter triazinivorans OX=1784719 GN=folE PE=3 SV=1
MGDTVDRERIAAAVRELLSAIGSDPDSPELGSTPFRVAEAYAEFFSGVGQDAGRLLSDAVPVGSDTGELVLVRDIALRSMCEHHLLPFRGRAHVAYLPDARVVGLSAIPRVVEALAARPQVQERLGEQIAQTIDDGLAPRGVLVVLEASHGCVADRGVRQTEALAVTVASRGALSEPTQQAGVFALLGGEIERTTDRA

SEQ ID NO: 9972 - protein, 262 aa, Leuconostoc carnosum
  REGION 1..262: note = tr|A0A2U3MNP6|A0A2U3MNP6_LEUCA Putative GTP cyclohydrolase 1 type 2 OS=Leuconostoc carnosum OX=1252; GN = LCAC16_130067 PE=4 SV=1
MIKAQDLITKIEQFAPKQLAEAGDPTGLQIGDPNQVIKRVMTVLDVRPEVVQEAINHQVDFIWAHHEVMFFPAKNLDLTNPQNKMYADLLQHHIVVYASHTNLDSAKGGMNDWLAQAIGLQNTQPLEPNADGETGLGRIGELPKTVSVKDYAARLRDLFHVKAVRVIAKDLNRPIKKIAVLGGDGGKWWAVAQAAGADAYVTADIYYHIGHDILAADFVVIDPDHHMEAIANAQMAVKVHDWFGDALLVSPTNTNTDPYTYI

SEQ ID NO: 9973 - protein, 191 aa, Leuconostoc citreum
  REGION 1..191: note = tr|B1MZ42|B1MZ42_LEUCK GTP cyclohydrolase 1; OS = Leuconostoc citreum (strain KM20) OX=349519 GN=folE; PE = 3 SV=1
MKTFNQEQTETLVQGVKYLLTAVGDDPERTGLLETPERVIKAHAEIYAHTGETTFKDYKLFDTTDDADMVIVEDIPFYAMCEHHLLPFFGTIDVAYVPDGEVIGLSKIPRLVDWASRRPSVQENLTALIADQMQRIVHPKGLAVNVTARHMCMEMRGINRPGTQTNTTIHRGLLQTDTFLKDSFSRRVRGH

SEQ ID NO: 9974 - protein, 191 aa, Leuconostoc kimchii
  REGION 1..191: note = tr|D5T0F4|D5T0F4_LEUKI GTP cyclohydrolase 1; OS = Leuconostoc kimchii (strain IMSNU 11154 / KCTC 2386 / IH25) OX=762051 GN=folE PE=3 SV=1
MTMFNDEKTTTLMQGVTNLLRVIGDDDKREGLIETPMRVVKAQAEIFAHTGEAQFDDFKLFSTTNDADMVIVESIPFYSMCEHHLLPFFGTVDVAYVPDGQIIGLSKIPRLIEWASRRPNVQENLTHLIASEMNRIVAPKGVAVNVTARHMCMEMRGINQPGTQTNTAIYRGLLQTDTFLKESFTHRVNKH

SEQ ID NO: 9975 - protein, 191 aa, Leuconostoc lactis
  REGION 1..191: note = tr|A0A5B8T9M8|A0A5B8T9M8_LEULA GTP cyclohydrolase 1; OS = Leuconostoc lactis OX=1246 GN=folE PE=3 SV=1
MKTFNNEQILKLQTGVTDLLAAIGDDPDRSGVIETPERVVKAHAEIFAHTGETQFSDYKLFDTTQDADMVVVEGIPFYSMCEHHLLPFFGTVDVSYVPDGEIIGLSKVPRLVDWASRRPSVQENLTHLIADEMQRIVHPKGLAVNVTARHMCMEMRGINQPGTQTNTSIYRDLLKTDTFLRDSFARRVSQR

SEQ ID NO: 9976 - protein, 191 aa, Leuconostoc lactis
  REGION 1..191: note = tr|A0A5B8TH70|A0A5B8TH70_LEULA GTP cyclohydrolase 1; OS = Leuconostoc lactis OX=1246 GN=folE PE=3 SV=1
MKTFNNEQILKLQTGVTDLLAAIGDDPNRSGVIETPERVVKAHAEIFAHTGETQFSDYKLFDTTQDADMVVVEGIPFYSMCEHHLLPFFGTVDVAYVPDGEIIGLSKVPRLVDWASRRPSVQENLTHLIADEMQRIVHPKGLAVNVTARHMCMEMRGINQPGTQTNTSIYRDLLKTDTFLRDSFARRVSQR

SEQ ID NO: 9977 - protein, 215 aa, Leuconostoc sp.
  REGION 1..215: note = tr|W1UXY2|W1UXY2_9LACT GTP cyclohydrolase 1; OS = Leuconostoc sp. DORA_2 OX=1403934 GN=folE PE=3 SV=1
MTTNNDHYNEAELLASYFFETANNSELLQQKLTDVQQIEQALQTLMALCGQDDNNPDLDKTPFRVVKAFLEYTSGYREDPTAHLEKVFDIQQNDPIIVKDIEFYSMCEHHFAPFFGVAHVAYLPDQKVTGLSKIARVVEGYARRFQVQERLTNQIADAIDTVLQPKGVMVAIEAKHLCVSSRGAKKEQAQTFTLASRGAYIKDSQLRSEFMTAIK

SEQ ID NO: 9978 - protein, 190 aa, unidentified
  source 1..190: note = Leuconostoc suionicum
  REGION 1..190: note = tr|A0A2N9KGU7|A0A2N9KGU7_9LACT GTP cyclohydrolase 1; OS = Leuconostoc suionicum OX=1511761 GN=folE PE=3 SV=1
MKIFDTETNQRLEKDVKNVLTTIGDDVSRDGLLETPARVSRAYAEIFAHTGERIFQDYKVFSTESDTDIVIVENIPFYSMCEHHLLPFFGTVDIAYVPNHKIIGLSKLPRLVDWSARRPSVQESLTTLVADEVTRIVEPKGVAVNITARHMCMEMRGINRPGTQTNTSVYRGVLKTDALLRQQFMQRVIR

SEQ ID NO: 9979 - protein, 261 aa, unidentified
  source 1..261: note = Leuconostoc suionicum
  REGION 1..261: note = tr|A0A2N9K9S5|A0A2N9K9S5_9LACT GTP cyclohydrolase 1 type 2 OS=Leuconostoc suionicum OX=1511761; GN = LES9216_00899 PE=4 SV=1
MIAQELINKIELFAPKQLAEEGDPTGLQIGDPKQPVHRVMTALDVRPEVVQEAIDNQVDFIWAHHEVMFFPAKNLDLSQPQNRMYADLIQHHIVVYASHTNMDSAQGGMNDWLAEALGIQNAVPLVPNVDKRTGLGRIGQLVQPISVQEYAVKIRDLFQVQAVRVIANDVTKPIQKIAVLGGDGGRWWRVAQQAGADAYVTADVYYHVGHDILASNFIVIDPDHHMEAIANKKMVAKVKEWFGDTVDVVATKINTDPYKYI

SEQ ID NO: 9980 - protein, 324 aa, unidentified
  source 1..324: note = Leucothrix pacifica
  REGION 1..324: note = tr|A0A317C176|A0A317C176_9GAMM GTP cyclohydrolase FolE2 OS=Leucothrix pacifica OX=1247513 GN=folE2 PE=3 SV=1
MSTTNCAQDNCNVLPDIANEPHTGPNGLLNWVGMSEIEMPVKMTTGNGETMQTVARIQAYVNLTDPASKGIHMSRLYLTVDQMLGNEVLTPALLQKVVQQFVKTHDGISDNAYLECRFEFLERRRALISDNTGWKGYKVRAIASLRKGVLTSELGIEVPYSSTCPCSAALARDLIQQGFRNQFGSEGMVSLDEVHQWLGTKEGISATPHSQRSLAQVRVNLSDEVGELPISQLIDSIEDALQTPVQAAVKREDEQEFARLNGQNLMFCEDAARRLHEALDKQDSLKDFWIRVNHMESLHPHDAVAIVVKGVENGYRDDPREFPH

SEQ ID NO: 9981 - protein, 315 aa, Leucothrix sp.
  REGION 1..315: note = tr|A0A317CM78|A0A317CM78_9GAMM GTP cyclohydrolase FolE2 OS=Leucothrix sp. IMCC9719 OX=1481894 GN=folE2 PE=3; SV = 1
MSNTMPDIANEPHTGPNSLLNWVGMSEIEMPIRILNGNGDNMQTVGRIQAYVNLIDPKSKGIHMSRLYLAVDQMMGNEVLNPKLLHKIVKQFVQTHDGISNNAYLECRFEYLERRKALVSDNTGWKGYKVRTICVYRDGEISTELSVEVPYSSTCPCSAALARDLIQQGFSKAFGTEGSVSLEDVHAWLGTKEGISATPHSQRSLAQVRVKLDESVDSLPISALIDRIEDALQTPVQAAVKREDEQEFARLNGQNLMFCEDAARRLHEALDTDSTLKDFWVRVNHLESLHPHDAVAIVVKGLEDGYRDDPREFPH

SEQ ID NO: 9982 - protein, 187 aa, Levilinea saccharolytica
  REGION 1..187: note = tr|A0A0P6Y4V7|A0A0P6Y4V7_9CHLR GTP cyclohydrolase 1; OS = Levilinea saccharolytica OX=229921 GN=folE PE=3 SV=1
MQDAVRKILSAVGEDPQREGLQRTPERVARAYDELLAGYRMDPEALINGALFEDSYDEMVIVRDIEFYSLCEHHMLPFIGRAHVAYMPNGRVLGLSKIPRVVDLFARRLQVQERMTRQIADFLNELLKPRGVAVVVEALHLCSMMRGVKKHDSRMTTSAMLGAFRNNMATRMEFLDNISRSSMPLHF

SEQ ID NO: 9983 - protein, 198 aa, Lewinella agarilytica
  REGION 1..198: note = tr|A0A1H9L0M0|A0A1H9L0M0_9BACT GTP cyclohydrolase 1; OS = Lewinella agarilytica OX=478744 GN=folE PE=3 SV=1
MAFTKTLNYDDKVTDQLSKNFTDIISGVGEEVSREGLLKTPERAAKAMQFLTQGYEQDAEAILRSAMFAEDYSEMVIVKDIELYSLCEHHLLPFFGKAHVAYIPDGYIVGLSKIPRVIDVYARRFQVQERLTDQILQAIQTTLNPLGVAVVIEARHMCMMMRGVQKQNSATTTSAFTGAFKAERTRNEFLKLITGDLG

SEQ ID NO: 9984 - protein, 198 aa, Lewinella marina
  REGION 1..198: note = tr|A0A2G0CFB1|A0A2G0CFB1_9BACT GTP cyclohydrolase 1; OS = Lewinella marina OX=438751 GN=folE PE=3 SV=1
MPLQQVLNYDEETTDTISDHYTRILQDLGEDPSRDGLLKTPVRAAKAMQFLTQGYEMNAENILRSAMFAENYSEMVIVKDIEFYSLCEHHMLPFFGKAHVAYIPDGYIVGLSKIPRVIEVFSRRLQVQERLTDDVLKAIHTTLNPLGVAVVMEARHMCMMMRGVQKQSSVTTTSAFTGAFESERTRNEFLKLITSNLH

SEQ ID NO: 9985 - protein, 198 aa, Lewinella nigricans
  REGION 1..198: note = tr|A0A2D0N5R2|A0A2D0N5R2_9BACT GTP cyclohydrolase 1; OS = Lewinella nigricans DSM 23189 = NBRC 102662 OX=1122177; GN = folE PE=3 SV=1
MVMNELEKSQLEALEELKEHYEGVLTLVGEDPDREGLVKTPERAAKAMQFLTAGYEQDGEAILRSAMFKEDYSEMVLVKDIELYSLCEHHMLPFFGKAHVAYIPNGHIVGLSKIPRVIDVFARRLQVQERLTDQILQCIHQTLQPLGVAVVIEARHMCMMMRGVQKQNSVTTTSAFTGEFKNSETRSEFLTLIGSKLH

SEQ ID NO: 9986 - protein, 198 aa, Lewinella sp.
  REGION 1..198: note = tr|A0A5C7FJ99|A0A5C7FJ99_9BACT GTP cyclohydrolase 1; OS = Lewinella sp. SSH13 OX=2602767 GN=folE PE=3 SV=1
MPFSQQLNYDDAITEKLSDNFANIIDGVGEDKDREGLIKTPERAAKAMQFLTQGYEQDAEAILRSAMFAEDYSEMVIVKNIELYSLCEHHLLPFFGKAHVAYIPDGYIVGLSKIPRVIDVFARRFQVQERLTDQVLQAIHKTLNPLGVAVVIEARHMCMMMRGVQKQTSVTTTSAFTGAFKAERTRNEFLKLITSDLG

SEQ ID NO: 9987 - protein, 198 aa, Lewinella sp.
  REGION 1..198: note = tr|A0A180EPU1|A0A180EPU1_9BACT GTP cyclohydrolase 1; OS = Lewinella sp. 4G2 OX=1803372 GN=folE PE=3 SV=1
MPFSKDLKYDPAITEALAENYTSIIEGAGEDVNREGLLKTPERASKAMQFLTQGYEQDAEAILKGAMFAEDYSEMVIVKNIEFYSLCEHHLLPFFGKAHIAYIPEGYIVGLSKIPRVVDVFARRFQVQERLTDQILNSIQKTLNPMGVAVVIEAQHMCMMMRGVQKQASVTTTSAFTGAFKSERTRNEFLKLITSDLT

SEQ ID NO: 9988 - protein, 198 aa, unidentified
  source 1..198: note = Lewinella xylanilytica
  REGION 1..198: note = tr|A0A2S6I0L6|A0A2S6I0L6_9BACT GTP cyclohydrolase 1; OS = Lewinella xylanilytica OX=1514080 GN=folE PE=3 SV=1
MPHDKALVTDKAVTDQLSDHYSSIITELGEDVSRDGLLKTPVRAAKAMQFLTQGYEMDAENILRSAMFAEDYSEMVIVKDIEFYSLCEHHVLPFFGRAHVAYIPDGYIVGLSKIPRVIEVFARRLQVQERLTDQILQAIHTTLNPLGVAVVIEARHMCMMMRGIQKQSSVTTTSAFTGAFKSERTRNEFLKLITSNLH

SEQ ID NO: 9989 - protein, 198 aa, unidentified
  source 1..198: note = Lewinellaceae bacterium
  REGION 1..198: note = tr|A0A2C6B794|A0A2C6B794_9BACT GTP cyclohydrolase 1; OS = Lewinellaceae bacterium SD302 OX=2014804 GN=folE PE=3; SV = 1
MAYTKTEEYDEAVTENISKCFTSIIADIGEDAQREGLIKTPERAAKAMQFLTQGYDMDAKAILRSAMFAEDYSEMVIVKNIELYSLCEHHMLPFFGKAHVAYIPNGHIVGLSKIPRVIDVFARRLQVQERLTDQILDAIQDTLKPLGAAVVIEASHMCMMMRGVQKQNSVTTTSAFTGAFERVQTRNEFMKLISNDLS

SEQ ID NO: 9990 - protein, 205 aa, unidentified
  source 1..205: note = Liberibacter asiaticus
  REGION 1..205: note = tr|C6XG54|C6XG54_LIBAP GTP cyclohydrolase 1; OS = Liberibacter asiaticus (strain psy62) OX=537021 GN=folE; PE = 3 SV=1
MKCLRTGVFNMKLKKPTVEEAKEAIRVILRWIGDDPDREGLKDTPDRVIKSYKELFAGYKQIPTTQDTSRFHFGEASKYQDMVLIKDISFFSYCEHHILPIWGKIHLAYIPKKHVIGLSKLVRILEVYSRRLQIQERLTMQIAHAIESSTDSKGVAVLIEGQHMCMSMRGIKRDGLTTVTTAFTGEFSRDKGKTDFFLKMTHNQR

SEQ ID NO: 9991 - protein, 198 aa, unidentified
  source 1..198: note = Liberibacter crescens
  REGION 1..198: note = tr|L0EW24|L0EW24_LIBCB GTP cyclohydrolase 1; OS = Liberibacter crescens (strain BT-1) OX=1215343 GN=folE; PE = 3 SV=1
MSYSDLKPVKPTLKEVEEAVKTIIRWIGDDPEREGLKDTPARVVKSYAELFDGYNKSIDNMAASSFEEVGGYNDIVLLKDIPFFSHCEHHIVPIIGKAHIAYFPEKRVIGLSKIVRIVNLYAHRLQTQEKITAQIANGMEKVLHSRGVAILVEGEHMCMSMRGIRTVNVKTITTSFTGVFSNISENQSRFMKMVGYDR

SEQ ID NO: 9992 - protein, 195 aa, unidentified
  source 1..195: note = Liberibacter solanacearum
  REGION 1..195: note = tr|E4UDL9|E4UDL9_LIBSC GTP cyclohydrolase 1; OS = Liberibacter solanacearum (strain CLso-ZC1) OX=658172; GN = folE PE=3 SV=1
MKSKNPTSEEAKEAIRVILRWIGDDPEREGLKDTPERVIKSYKELFSGYEQDFIVQDTSRFYFGEVSNYGDMVLIKDISFSSYCEHHILPIFGKIHLAYIPKKRVIGLSKLIRILEIYSRRLQIQERLTMQIANEIGNVADSKGVAVLIEGQHMCMSMRGIKREGLTTVTTSFTGEFNSNKENKDIFIRMINNKR

SEQ ID NO: 9993 - protein, 188 aa, unidentified
  source 1..188: note = Lihuaxuella thermophila
  REGION 1..188: note = tr|A0A1H8F9A6|A0A1H8F9A6_9BACL GTP cyclohydrolase 1; OS = Lihuaxuella thermophila OX=1173111 GN=folE PE=3 SV=1
MEVDHQKIEEAVRMILEAVGEDPNREGLIDTPKRVARMYQEIFSGLREDPKEHFSVIFSEDHEELVLVKDIPFFSTCEHHLVPFFGKAHVGYIPRGGRVTGLSKLARAVEAVARRPQLQERITATVADAIMEKLDPHGVIVVVEAEHMCMTMRGVRKPGAKTVTSAVRGVFAKDPTTRAEALSLIGIK

SEQ ID NO: 9994 - protein, 372 aa, unidentified
  source 1..372: note = Limimaricola cinnabarinus
  REGION 1..372: note = tr|A0A2G1MJA4|A0A2G1MJA4_9RHOB GTP cyclohydrolase FolE2 OS=Limimaricola cinnabarinus OX=1125964 GN=folE2; PE = 3 SV=1
MTQATRDLHRAQTSQPVPDRDDAATALRLLRSWAAHATPEEVAALDPMVGRLVPGQDVSNYPALARAYPEDFVVDEAYRAMLPDLQNGPSSLIRGAARAIQHVGISNFRLPIRFHTRDGGDLALEASVTGTVSLEAEKKGINMSRIMRSFYRHADKTFSFDVIEAALADYITDLESFDARIQMRVRFPMLRPSLRSGLSGYQYYDLTLELVEQAGVAKKIIHLDYVYSSTCPCSLELSEHARQSRGQLATPHSQRSVARLSVVAQPGPVLWFEDLVEMARAAVPTETQVMVKREDEQAFAELNAANPIFVEDAARLFAEQLMADPRIGDFRIMASHQESLHSHDAVSLLTEGPTFAQESLDPQLFASLLHAG

SEQ ID NO: 9995 - protein, 372 aa, unidentified
  source 1..372: note = Limimaricola cinnabarinus
  REGION 1..372: note = tr|U2YHJ8|U2YHJ8_9RHOB GTP cyclohydrolase FolE2; OS = Limimaricola cinnabarinus LL-001 OX=1337093 GN=folE2; PE = 3 SV=1
MTQATRDLHRSNDSHPVPNRDDAAAALRLLRSWATLATPEEVATLDPLIGRLVPGQELSNYPALARAYPEDFVVDDAYRAMLPDLQNGPSSLIRGAARAIQHVGISNFRLPIKFHTRDGDDIALEASVTGTVSLEAEKKGINMSRIMRSFYRHADKTFSFDVIEAALADYIADLKSFDARIQMRVRFPMLRPSLRSGLSGYQYYDLTLELVEQAGVAKKIIHLDYVYSSTCPCSLELSEHARQFRGQLATPHSQRSVARLSVVAEPGPVLWFEDLVEMARAAVPTETQVMVKREDEQAFAELNAANPIFVEDAARLFAEQLMADPRIGDFRVMASHQESLHSHDAVSLLTEGTTFANESLDPQLFASLLHAG

SEQ ID NO: 9996 - protein, 376 aa, unidentified
  source 1..376: note = Limimaricola hongkongensis
  REGION 1..376: note = tr|A0A017H9C7|A0A017H9C7_9RHOB GTP cyclohydrolase FolE2 OS=Limimaricola hongkongensis DSM 17492 OX=1122180; GN = folE2 PE=3 SV=1
MTQATRELHRAAPPATAKAGGPGRDDAAAALKLLRDWAAAATPEEVATLDPLVGRLVPGRELPNYPALARAYPEDFVVDEAYRDMLPDLQNGPSSLIRGAARAIQHVGISNFRLPIRFHTRDGEDIALEASVTGTVSLEAEKKGINMSRIMRSFYRHADKTFSFEVIEAALADYIADLKSFDARIQMRVRFPMLRPSLRSGLSGYQYYDLTLELIEQKGVAKRIVHLDYVYSSTCPCSLELSEHARQFRGQLATPHSQRSVARLSVVAEPGPVLWFEDLVEMARRAVPTETQVMVKREDEQAFAELNAANPIFVEDAARLFAEQLMADPRVGDFRVMASHQESLHSHDAVSLLTEGPTFAAESLDPKLFASLLHAG

SEQ ID NO: 9997 - protein, 372 aa, unidentified
  source 1..372: note = Limimaricola pyoseonensis
  REGION 1..372: note = tr|A0A1G7D3U5|A0A1G7D3U5_9RHOB GTP cyclohydrolase FolE2 OS=Limimaricola pyoseonensis OX=521013 GN=folE2 PE=3; SV = 1
MTHADRELHRQPDQPRAPGREDAAEALKLLRDWAARATPEEIATLDPLVGRLVPGREVSNYPALARAYPEEFAVDDAYRAALPDLQNGPASLIRGAARPIQHVGISNFRLPVRFHTRDNGDLSLEASVTGTVSLEAEKKGINMSRIMRSFYRHAGKTFSFDTVRAALADYKTDLGSFDARIQMRFRFPMLRPSLRSGLEGYQYYDIALELVEQGGVEKTIVHLDYVYSSTCPCSLELSEHARQFRGQLATPHSQRSVARLSVVTQPGPRLWFEDLIDLARAAVPTETQVMVKREDEQAFAELNAANPIFVEDAARLFAEQLLADPRIGDFRVMASHQESLHSHDAVSLLTEGPTFAAESLDPRLLASLIHPG

SEQ ID NO: 9998 - protein, 374 aa, unidentified
  source 1..374: note = Limimaricola soesokkakensis
  REGION 1..374: note = tr|A0A1X6YAD1|A0A1X6YAD1_9RHOB GTP cyclohydrolase FolE2 OS=Limimaricola soesokkakensis OX=1343159 GN=folE2; PE = 3 SV=1
MTQATRDLHRPAAPANPDAPGRDDAAAALRLLRVWAAQASPEEVATLDPLVGRLLPGQELSNYPALARAYPEDFVVDEAYREMLPDLQNGPASLIRGAARPIQHVGISNFRLPIKFHTRDGGDIALEASVTGTVSLEAEKKGINMSRIMRSFYRHADKTFSFEVIETALADYIADLKSFDARIQMRVRFPMLRPSLRSGLSGYQYYDLTLELIEQAGVAKRIVHLDYVYSSTCPCSLELSEHARQFRGQLATPHSQRSVARLSVVVNPGPVLWFEDLVEMARAAVPTETQVMVKREDEQAFAELNAANPIFVEDAARLFAEQLLADERVGDFRVMASHQESLHSHDAVSLLTEGPTFAQESLDPQLFASLLHAG

SEQ ID NO: 9999 - protein, 220 aa, unidentified
  source 1..220: note = Limimonas halophila
  REGION 1..220: note = tr|A0A1G7U1N5|A0A1G7U1N5_9PROT GTP cyclohydrolase 1; OS = Limimonas halophila OX=1082479 GN=folE PE=3 SV=1
MNDSQATHPAATGGDQLTEAADTARPTRDEAEQAVRTLLKWAGDDPDREGLLDTPKRVARAYEDWFSGYFENPVEILQRTFEEVEGYDEMVVLRDVRVESHCEHHLAPIIGRAHVAYMPSKRVVGISKLARVVEIYAKRMQIQEKLTAQIANCINEVLEPRGVAVVVEAEHQCMTTRGIQKPGVTMVTSRMLGSFRKNEATRREVLAFISNSGGAAHHVG

SEQ ID NO: 10000 - protein, 267 aa, Limnobacter sp.
  REGION 1..267: note = tr|A0A151QGT4|A0A151QGT4_9BURK GTP cyclohydrolase FolE2 OS=Limnobacter sp. CACIAM 66H1 OX=1813033 GN=folE2; PE = 3 SV=1
MNAPDGLFLPDEQSRADKRNIAIQRVGVRSIKHPIIVETLEGPQPSVATIDMSVFLPSDVKGTHMSRFLEILQTQESALTPVGMKQMMRDMLQRLDSNAGTITMKFPYFVRKVAPVSGVASLLDYEVTLEADNNGSNTDVFMTVVVPVTSLCPCSKKISEYGAHNQRSHITIRALVADGIAVEELIRMAEESASCELWGLLKRPDEKYVTERAYDNPKFVEDLVRDVAIRLRANKKVLAYRIESENFESIHNHSAVAWIEEDKRKQN

SEQ ID NO: 10001 - protein, 284 aa, Limnobacter sp.
  REGION 1..284: note = tr|A0A520TIZ2|A0A520TIZ2_9BURK GTP cyclohydrolase FolE2 OS=Limnobacter sp. OX=2003368 GN=folE2 PE=3 SV=1
MPRTHEEVMNTRDKGLENAVATNPIDQAIPDVQSTIDTRHIAIQSVGIRSVKYPVLIELQGQKPMPSVAEFEMTVFLPADQKGTHMSRFIALLEEAQGTVLTVSGFRAMLVEMLQRLDAPSGRIKMELPYFLSKVAPISGVSSLMDYQLTLEGSATATGQDIYLTVVVPVTSLCPCSKKISEYGAHNQRSHVTARVQLKEDVDIAQFISAIEQQASCELYGLLKRPDEKYVTERAYDNPKFVEDLVRDVAIAMNKFSQVGQYTVEAENFESIHNHSAYARIDRA

SEQ ID NO: 10002 - protein, 223 aa, unidentified
  source 1..223: note = Limnobaculum parvum
  REGION 1..223: note = tr|A0A2Y9TVN9|A0A2Y9TVN9_9ENTR GTP cyclohydrolase 1; OS = Limnobaculum parvum OX=2172103 GN=folE PE=3 SV=1
MSSLSKEAMLVHAALEARGLETPLRGQPLDANTRKQKIEEHMTSIMQLLNLDLSDDSLAETPKRIAKMYVDEIFSGLDYANFPKITLIENKMKVDEMVTVRDITLTSTCEHHFVTIDGKATVAYIPKDYVIGLSKINRIVQFFSQRPQVQERLTQQILLALQTLLGTANVAVSIDAIHYCVKSRGVCDATSSTSTTSIGGIFKSNPSTRQEFLRAVRHSPHHM

SEQ ID NO: 10003 - protein, 204 aa, unidentified
  source 1..204: note = Limnochorda pilosa
  REGION 1..204: note = tr|A0A0K2SFX3|A0A0K2SFX3_9FIRM GTP cyclohydrolase 1; OS = Limnochorda pilosa OX=1555112 GN=folE PE=3 SV=1
MRVDAERNGTTRVRPGVALERIEAAVREIIEAIGEDPGREGLQETPRRIAEMYAELFSGLREDPARHLAVSFEEGHDEMVIVKEIPFYSMCEHHFMPFHGAVHVGYLPRGRVVGISKVARVVEDLARRPQLQERLTTQVADTLMQGLEPRGVGVVIEAEHTCMTARGVRKPGSRIVTSATRGLFRENMATRHEFLSLIGRGLKG

SEQ ID NO: 10004 - protein, 252 aa, Limnohabitans sp.
  REGION 1..252: note = tr|A0A0P0ME55|A0A0P0ME55_9BURK Putative GTP cyclohydrolase 1 type 2 OS=Limnohabitans sp. 103DPR2; OX = 1678129 GN=ybgI PE=4 SV=1
MTDFKTLLQAFDQLLQPERFKDYGPNGLQVEGKPSVGKLVSGVTASRELIDAAIEVKADAIFVHHGLFWRGQDGRVVGWMKERLQRLLAHNINLYAYHLPLDAHPELGNNAQLGKVLGLQAHAWCGDQNLVSVGHSLNPQGFQNAEALASHVQSVLGRHITCVAPTAKPIQRIAWCSGGAQSYFEAAIAEGVDAFITGEISEPQAHIAKETGVAFLACGHHATERYGAPAVAAHVAAELGLSHQFIDIHNPA

SEQ ID NO: 10005 - protein, 259 aa, Limnohabitans sp.
  REGION 1..259: note = tr|A0A0P0MAX2|A0A0P0MAX2_9BURK Putative GTP cyclohydrolase 1 type 2 OS=Limnohabitans sp. 63ED37-2; OX = 1678128 GN=L63ED372_02574 PE=4 SV=1
MDTPDRPSTMTDAKTLGQAFDALLQPEKFRDYGPNGLQVEGDRQVRLLVSGVTASRALIEAAIEVQADAIVVHHGLFWRGQDGRVMGWMRERLRLLLAHGIHLFAYHLPLDAHPELGNNAQLARVLGLQADGRFGDQDLGFVGTGTQAWARPEALAEHVAAVLGRPVTCVGGSDRPVRRVAWCTGGAQGYFESAIAQGVDAFITGEISEPQAHLARETGVAFLACGHHATERYGAPALAAHVAQALGIEHRFIEIDNPA

SEQ ID NO: 10006 - protein, 231 aa, unidentified
  source 1..231: note = Limnoraphis robusta
  REGION 1..231: note = tr|A0A0F5YLQ6|A0A0F5YLQ6_9CYAN GTP cyclohydrolase 1; OS = Limnoraphis robusta CS-951 OX=1637645 GN=folE PE=3 SV=1
MTIASNGNSSKPANVSSRIQSRPDRTTSSSNGHPVEYQPLTEVSDEQMMEAVRTMLLGVGEDPEREGLLKTPKRVAEAMRFLTSGYSQSLEDLVNGAIFDEGHSEMVLVRDITVFSMCEHHMLPFMGKAHVAYIPNQKVIGLSKLARIVEMYARRLQVQERLTRQIAEAVQEVLEPQGVAVVIEASHMCMVMRGVQKPGSWTVTSAMLGVFQDEQKTREEFLNLIRHQSSF

SEQ ID NO: 10007 - protein, 239 aa, unidentified; identical to SEQ ID NO: 4836
  source 1..239: note = Limnospira indica
  REGION 1..239: note = tr|H1WA50|H1WA50_9CYAN GTP cyclohydrolase 1; OS = Limnospira indica PCC 8005 OX=376219 GN=folE2 PE=3 SV=1

SEQ ID NO: 10008 - protein, 215 aa, unidentified; identical to SEQ ID NO: 4834
  source 1..215: note = Limnospira indica
  REGION 1..215: note = tr|H1WDN4|H1WDN4_9CYAN GTP cyclohydrolase 1; OS = Limnospira indica PCC 8005 OX=376219 GN=folE1 PE=3 SV=1

SEQ ID NO: 10009 - protein, 239 aa, unidentified
  source 1..239: note = Limnothrix rosea
  REGION 1..239: note = tr|A0A1Q4R4E1|A0A1Q4R4E1_9CYAN GTP cyclohydrolase 1; OS = Limnothrix rosea IAM M-220 OX=454133 GN=folE PE=3 SV=1
MTTSSINGNNSSSSSIATDALGRDLADIVTRPDRNSNDGKTASIRPSSDESQKKMMEAVYTMLESVGEDPEREGLLKTPKRVAKAMAFLTQGYNQSLEELVNGAIFDEGHNEMVLVRDIDFFSLCEHHMLPFMGRAHVAYIPNQKVVGLSKLARIVEMYSRRLQVQERLTRQIAEAVEEILEPRGVAVVMEGMHMCMSMRGVQKPGSWTVTSAMIGSFQDEQKTREEFLNLIRHQPSFM

SEQ ID NO: 10010 - protein, 238 aa, unidentified
  source 1..238: note = Limnothrix sp.
  REGION 1..238: note = tr|A0A372DQ34|A0A372DQ34_9CYAN GTP cyclohydrolase 1; OS = Limnothrix sp. CACIAM 69d OX=1890733 GN=folE PE=3 SV=1
MTIAASNAISNGMVNPSSSATEDEGKGLLTRPDRNTHDGQPAQVHQPPAVSKDDMMDAVRTILLGVGEDPDREGLLKTPHRVAEAMRFLTSGYDMSLETLVNGAIFDEGHNEMVLVRDINFFSLCEHHMLPFMGRAHVAYIPNQKVVGLSKLARIVEMYARRLQVQERLTRQVAEAIQEVLEPRGVAVVMEGTHMCMSMRGVQKPGSWTVTSAMVGVFQEDQKTREEFLNLIRHQPSF

SEQ ID NO: 10011 - protein, 211 aa, unidentified
  source 1..211: note = Limnothrix sp.
  REGION 1..211: note = tr|A0A1C0V5H9|A0A1C0V5H9_9CYAN GTP cyclohydrolase 1; OS = Limnothrix sp. P13C2 OX=1880902 GN=folE PE=3 SV=1
MTLSIESPRPNLITTAAKSPVSQAEMEQAVRTLLIGLGEDPDREGLRDTPKRVVKALQFLTSGYRQSLDELLNGAVFHENANEMVLVRDIDLFSSCEHHILPIIGRAHVAYIPDGRVIGLSKIARICEMYARRLQVQERLTAQIADAIQGLLMPQGVAVVVEATHMCMVMRGVQKPGSWTVTSAVRGVFAEDPKTRQEFMDLVMHQRGFRA

SEQ ID NO: 10012 - protein, 197 aa, Lishizhenia tianjinensis
  REGION 1..197: note = tr|A0A1I7BNN6|A0A1I7BNN6_9FLAO GTP cyclohydrolase 1; OS = Lishizhenia tianjinensis OX=477690 GN=folE PE=3 SV=1
MQEKLIYDDKVTEKLSAVYKEVLGEIGEDPNREGLLKTPERVAKALQYLTKGYDEDPEEILKGALFNEEYSEMVIVKDIEVYSMCEHHMLPFFGKAHIAYIPDGKIVGLSKLPRVVDAFARRLQVQERLTIEIRDCIEKTLNPKGVAVVLECNHMCMQMRGVQKQNSSTTSSAFTGLFLSNDSTRKEFINLVQAKLH

SEQ ID NO: 10013 - protein, 175 aa, unidentified
  source 1..175: note = Listeria aquatica
  REGION 1..175: note = tr|W7B169|W7B169_9LIST GTP cyclohydrolase 1; OS = Listeria aquatica FSL S10-1188 OX=1265818 GN=folE PE=3; SV = 1
MILEAVGENPEREGLIETPMRVARMYEEIFAGLHKDPSVHFNKVFEEQHDELVLVKDIRFSSVCEHHLVPFFGVAHVAYLPQNGRVAGLSKLARVVDDVSKRPQLQERITKTVAEIMMEKLNPLGVMVILEAEHMCMTIRGVNKPGAKTVTSAVRGAFRTDDKLRSEVLSLIKHS

SEQ ID NO: 10014 - protein, 188 aa, unidentified
  source 1..188: note = Listeria booriae
  REGION 1..188: note = tr|A0A099W877|A0A099W877_9LIST GTP cyclohydrolase 1; OS = Listeria booriae OX=1552123 GN=folE PE=3 SV=1
MEQIDKQKIADAVKVILEAVGENPEREGLLDTPMRVARMYEEVFSGLKKDPSVHFNTVFEEQHEELVLVKDIRFSSMCEHHLVPFFGVAHVAYLPQNGRVAGLSKLARVVDDVSKRPQLQERITTTVAEIMMDKLKPLGVMVIVEAEHMCMTIRGVNKPGAKTVTSAVRGAFRNDDKLRSEVMALIKN

SEQ ID NO: 10015 - protein, 188 aa, unidentified
  source 1..188: note = Listeria cornellensis
  REGION 1..188: note = tr|W7C5Y6|W7C5Y6_9LIST GTP cyclohydrolase 1; OS = Listeria cornellensis FSL F6-0969 OX=1265820 GN=folE; PE = 3 SV=1
MEQIDKQKIADAVKIILEAVGENPEREGLLDTPMRVARMYEEVFSGLQKDPSIHFNTVFEEQHEELVLVKDIRFSSMCEHHLVPFFGVAHVAYLPQNGRVAGLSKLARVVDDVSKRPQLQERITTTVAEIMMDKLKPLGVMVILEAEHMCMTIRGVNKPGARTVTSAVRGAFRNDDKLRSEVMALIKN

SEQ ID NO: 10016 - protein, 189 aa, unidentified
  source 1..189: note = Listeria fleischmannii
  REGION 1..189: note = tr|A0A0J8JAF4|A0A0J8JAF4_9LIST GTP cyclohydrolase 1; OS = Listeria fleischmannii 1991 OX=1430899 GN=folE PE=3 SV=1
MEEINKKKIANAVREILEAVGENPDREGLLDTPMRVARMYEEVFSGLKKDPSIHFNTVFEEQHEELVLVRDIRFSSMCEHHLVPFFGVAHVAYLPQNGRVAGLSKLARVVDDVSKRPQLQERITTTVAETMMDKLNPLGVMVVLEAEHMCMTIRGVNKPGAKTITSAVRGAFRSDDKLRSEVMSLINHS

SEQ ID NO: 10017 - protein, 189 aa, unidentified; identical to SEQ ID NO: 10016
  source 1..189: note = Listeria fleischmannii
  REGION 1..189: note = tr|A0A2X3GNF9|A0A2X3GNF9_9LIST GTP cyclohydrolase 1; OS = Listeria fleischmannii subsp. fleischmannii OX=1671902; GN = folE PE=3 SV=1

SEQ ID NO: 10018 - protein, 188 aa, unidentified
  source 1..188: note = Listeria floridensis
  REGION 1..188: note = tr|W7C0K2|W7C0K2_9LIST GTP cyclohydrolase 1; OS = Listeria floridensis FSL S10-1187 OX=1265817 GN=folE; PE = 3 SV=1
MTEMNKEKIADAVRMILEAVGEDPDREGLLDTPMRVARMYEEIFAGLKKDPSVHFNKVFEEQHDELVLVKDIRFSSVCEHHLVPFFGVAHVAYLPQNGRVAGLSKLARVVDDVSKRPQLQERITTTVAEIMMDKLDPLGVMVILEAEHMCMTIRGVNKPGTKTVTSAVRGAFRKDDKLRSEVLSLIKH

SEQ ID NO: 10019 - protein, 188 aa, unidentified
  source 1..188: note = Listeria grandensis
  REGION 1..188: note = tr|W7BEZ4|W7BEZ4_9LIST GTP cyclohydrolase 1; OS = Listeria grandensis FSL F6-0971 OX=1265819 GN=folE PE=3; SV = 1
MEQIDKQKIADAVKVILEAVGENPEREGLLDTPMRVARMYEEVFSGLKKDPSIHFDTVFEEQHEELVLVKDIRFSSMCEHHLVPFFGVAHVAYLPQNGRVAGLSKLARVVDDVSKRPQLQERITTTVAEIMMDKLKPLGVMVIVEAEHMCMTIRGVNKPGAKTVTSAVRGAFRNDDKLRSEVMSLIKN

SEQ ID NO: 10020 - protein, 185 aa, Listeria grayi
  REGION 1..185: note = tr|A0A378MIL6|A0A378MIL6_LISGR GTP cyclohydrolase 1; OS = Listeria grayi OX=1641 GN=folE PE=3 SV=1
MDKDKIAEAVKMILEAVGENPEREGLLDTPMRVARMYEEIFAGLHQDPSVHFNTVFEEQHEELVLVKDIRFSSMCEHHLVPFYGVAHVAYLPQHGRVAGLSKLARVVDDVSKRPQLQERITTTVAEIMMEKLKPLGVMVIIEAEHMCMTIRGVNKPGTKTITSAVRGAFRNDDKLRSEVMSLIKG

SEQ ID NO: 10021 - protein, 185 aa, Listeria grayi; identical to SEQ ID NO: 10020
  REGION 1..185: note = tr|D7UXX9|D7UXX9_LISGR GTP cyclohydrolase 1; OS = Listeria grayi DSM 20601 OX=525367 GN=folE PE=3 SV=1

SEQ ID NO: 10022 - protein, 189 aa, Listeria innocua
  REGION 1..189: note = sp|Q92A75|GCH1_LISIN GTP cyclohydrolase 1; OS = Listeria innocua serovar 6a (strain ATCC BAA-680 / CLIP 11262) OX=272626 GN=folE PE=3 SV=1
MEQIDKQKIADAVKVILEAVGENPEREGLIDTPMRVARMYEEVFAGLKKDPSVHFDTIFEEQHEELVLVKDIRFSSMCEHHLVPFFGVAHVAYLPQNGRVAGLSKLARVVDDVSRRPQLQERITTTVAEIMMDKLKPLGVMVIMEAEHMCMTIRGVNKPGTKTITSAVRGAFKNDDKLRSEVLALIKHN

SEQ ID NO: 10023 - protein, 189 aa, Listeria innocua; identical to SEQ ID NO: 10022
  REGION 1..189: note = tr|A0A3T1N2I2|A0A3T1N2I2_LISIO GTP cyclohydrolase 1; OS = Listeria innocua OX=1642 GN=folE PE=3 SV=1

SEQ ID NO: 10024 - protein, 189 aa, Listeria ivanovii
  REGION 1..189: note = tr|A0A097B6P0|A0A097B6P0_LISIV GTP cyclohydrolase 1; OS = Listeria ivanovii subsp. londoniensis OX=202752 GN=folE; PE = 3 SV=1
MEQIDKQKIADAVKVILEAVGENPEREGLIDTPMRVARMYEEVFAGLKKDPSVHFNTIFEEQHEELVLVRDIRFSSMCEHHLVPFFGVAHVAYLPQNGRVAGLSKLARVVDDVSKRPQLQERITTTVAEIMMDKLKPLGVMVIMEAEHMCMTIRGVNKPGTKTITSAVRGAFKNDDKLRSEVLALIKHN

SEQ ID NO: 10025 - protein, 189 aa, Listeria ivanovii
  REGION 1..189: note = tr|G2ZCM0|G2ZCM0_LISIP GTP cyclohydrolase 1; OS = Listeria ivanovii (strain ATCC BAA-678 / PAM 55); OX = 881621 GN=folE PE=3 SV=1
MEQIDKQKIADAVKVILEAVGENPEREGLIDTPMRVARMYEEVFAGLKKDPSVHFNTIFEEQHEELVLVRDIRFFSMCEHHLVPFFGVAHVAYLPQNGRVAGLSKLARVVDDVSKRPQLQERITTTVAEIMMDKLKPLGVMVIMEAEHMCMTIRGVNKPGTKTITSAVRGAFKNDDKLRSEVLALIKHN

SEQ ID NO: 10026 - protein, 189 aa, unidentified
  source 1..189: note = Listeria kieliensis
  REGION 1..189: note = tr|A0A3D8TTT4|A0A3D8TTT4_9LIST GTP cyclohydrolase 1; OS = Listeria kieliensis OX=1621700 GN=folE PE=3 SV=1
MTEMDKEKIADAVRMILEAVGENPEREGLIETPMRVARMYEEIFAGLHKDPSVHFNKVFEEQHDELVLVKDIRFSSVCEHHLVPFFGVAHVAYLPQNGRVAGLSKLARVVDDVSKRPQLQERITKTVAEIMMDKLDPLGVMVILEAEHMCMTIRGVNKPGTKTVTSAVRGAFRTDDKIRSEVLSLIKHS

SEQ ID NO: 10027 - protein, 189 aa, Listeria marthii
  REGION 1..189: note = tr|E3YRM5|E3YRM5_9LIST GTP cyclohydrolase 1; OS = Listeria marthii FSL S4-120 OX=702457 GN=folE PE=3 SV=1
MEQIDKQKIADAVKVILEAVGENPEREGLIDTPMRVARMYEEVFSGLKKDPSVHFDTIFEEQHEELVLVKDIRFSSMCEHHLVPFFGVAHVAYLPQNGRVAGLSKLARVVDDVSRRPQLQERITTNVAEIMMDKLKPLGVMVIMEAEHMCMTIRGVNKPGTKTITSAVRGAFKNDDKLRSEVLALIKHN

SEQ ID NO: 10028 - protein, 189 aa, Listeria monocytogenes
  REGION 1..189: note = sp|B8DBZ3|GCH1_LISMH GTP cyclohydrolase 1; OS = Listeria monocytogenes serotype 4a (strain HCC23); OX = 552536 GN=folE PE=3 SV=1
MEQIDKQKIADAVKVILEAVGENPDREGLIDTPMRVARMYEEVFAGLKKDPSVHFDTIFEEQHEELVLVKDIRFSSMCEHHLVPFFGVAHVAYLPQNGRVAGLSKLARVVDDVSRRPQLQERITTTVAEIMMDKLKPLGVMVIMEAEHMCMTIRGVNKPGTKTITSAVRGAFKNDDKLRSEVLALIKHN

SEQ ID NO: 10029 - protein, 189 aa, Listeria monocytogenes
  REGION 1..189: note = tr|A0A241SRE8|A0A241SRE8_LISMN GTP cyclohydrolase 1; OS = Listeria monocytogenes serotype 1/2b str. 10-0811; OX = 1196164 GN=folE PE=3 SV=1
MEQIDKQKIADAVKVILEAVGENPEREGLIDTPMRVARMYEEVFAGLKKDPSVHFDTIFEEQHEELVLVKDIRFSSMCEHHLVPFFGVAHVAYLPQNGRVAGLSKLARVVDDVSRRPQLQERITTTVAEIMMEKLKPLGVMVIMEAEHMCMTIRGVNKPGTKTITSAVRGAFKNDDKLRSEVLALIKHN

SEQ ID NO: 10030 - protein, 188 aa, unidentified
  source 1..188: note = Listeria riparia
  REGION 1..188: note = tr|W7D3A0|W7D3A0_9LIST GTP cyclohydrolase 1; OS = Listeria riparia FSL S10-1204 OX=1265816 GN=folE PE=3; SV = 1
MEQIDKQKIADAVKVILEAVGENPEREGLLDTPMRVARMYEEVFSGLRKDPSVHFNTVFEEQHEELVLVKDIRFSSMCEHHLVPFFGVAHVAYLPQNGRVAGLSKLARVVDDVSKRPQLQERITTTVAEIMMDKLKPLGVMVIVEAEHMCMTIRGVNKPGAKTVTSAVRGAFRNDDKLRSEVMALIKN

SEQ ID NO: 10031 - protein, 188 aa, Listeria rocourtiae
  REGION 1..188: note = tr|A0A4R6ZSV0|A0A4R6ZSV0_9LIST GTP cyclohydrolase 1; OS = Listeria rocourtiae OX=647910 GN=folE PE=3 SV=1
MEQIDKQKIADAVKMILEAVGENPEREGLLDTPMRVARMYEEVFSGLKKDPSIHFNTVFEEQHEELVLVKDIRFSSMCEHHLVPFFGVAHVAYLPQNGRVAGLSKLARVVDDVSKRPQLQERITTTVAEIMMDKLKPLGVMVILEAEHMCMTIRGVNKPGARTVTSAVRGAFRNDDKLRSEIMALIKN

SEQ ID NO: 10032 - protein, 189 aa, Listeria seeligeri; identical to SEQ ID NO: 10024
  REGION 1..189: note = tr|A0A5B8ABK9|A0A5B8ABK9_LISSE GTP cyclohydrolase 1; OS = Listeria seeligeri OX=1640 GN=folE PE=3 SV=1

SEQ ID NO: 10033 - protein, 189 aa, Listeria seeligeri; identical to SEQ ID NO: 10024
  REGION 1..189: note = tr|E3ZRY9|E3ZRY9_LISSE GTP cyclohydrolase 1; OS = Listeria seeligeri FSL N1-067 OX=702453 GN=folE PE=3; SV = 1

SEQ ID NO: 10034 - protein, 188 aa, Listeria sp.
  REGION 1..188: note = tr|A0A3N9TWU8|A0A3N9TWU8_9LIST GTP cyclohydrolase 1; OS = Listeria sp. SHR_NRA_18 OX=2269046 GN=folE PE=3 SV=1
MEQIDKQKIADAVKVILEAVGENPEREGLLDTPMRVARMYEEVFSGLQKDPSVHFNTVFEEQHEELVLVKDIRFSSMCEHHLVPFFGVAHVAYLPQNGRVAGLSKLARVVDDVSKRPQLQERITTTVAEIMMDKLKPLGVMVILEAEHMCMTIRGVNKPGARTVTSAVRGAFRNDDKLRSEVMALIKN

SEQ ID NO: 10035 - protein, 188 aa, unidentified
  source 1..188: note = Listeria weihenstephanensis
  REGION 1..188: note = tr|A0A1S7FTJ0|A0A1S7FTJ0_9LIST GTP cyclohydrolase 1; OS = Listeria weihenstephanensis OX=1006155 GN=folE PE=3 SV=1
MEQIDKQKIADAVKVILEAVGENPEREGLLDTPMRVARMYEEVFSGLKKDPSIHFNTVFEEQHEELVLVKDIRFSSMCEHHLVPFFGVAHVAYLPQNGRVAGLSKLARVVDDVSKRPQLQERITTTVAEIMMDKLKPLGVMVIMEAEHMCMTIRGVNKPGAKTITSAVRGAFRNNDKLRSEVMALIKH

SEQ ID NO: 10036 - protein, 188 aa, unidentified; identical to SEQ ID NO: 10035
  source 1..188: note = Listeria weihenstephanensis
  REGION 1..188: note = tr|W7CMY2|W7CMY2_9LIST GTP cyclohydrolase 1; OS = Listeria weihenstephanensis FSL R9-0317 OX=1265845; GN = folE PE=3 SV=1

SEQ ID NO: 10037 - protein, 189 aa, Listeria welshimeri
  REGION 1..189: note = sp|A0AK45|GCH1_LISW6 GTP cyclohydrolase 1; OS = Listeria welshimeri serovar 6b (strain ATCC 35897 / DSM 20650 / SLCC5334) OX=386043 GN=folE PE=3 SV=1
MEQIDKQKIADAVKVILEAVGENPEREGLIDTPMRVARMYEEVFSGLKKDPSIHFDTIFAEQHEELVLVKDIRFSSMCEHHLVPFFGVAHVAYLPQNGRVAGLSKLARVVDDVSKRPQLQERITTTVAEIMMDKLKPLGVMVIMEAEHMCMTIRGVNKPGTKTITSAVRGAFKNDDKLRSEVLALIKHN

SEQ ID NO: 10038 - protein, 188 aa, unidentified; identical to SEQ ID NO: 10034
  source 1..188: note = Listeriaceae bacterium
  REGION 1..188: note = tr|A0A099WJG9|A0A099WJG9_9LIST GTP cyclohydrolase 1; OS = Listeriaceae bacterium FSL A5-0209 OX=1497679 GN=folE; PE = 3 SV=1

SEQ ID NO: 10039 - protein, 366 aa, Litoreibacter albidus
  REGION 1..366: note = tr|A0A1H2SC31|A0A1H2SC31_9RHOB GTP cyclohydrolase FolE2 OS=Litoreibacter albidus OX=670155 GN=folE2 PE=3 SV=1
MNVHSPKSDEPTREEAEEALALLRQWAGNADPVEVAEMDPLISRLIPGAELANYPALARAYPEDFAVDEAYKASMPDLQNGPSSLIRGAKQHIQHVGISNFRLPIRVHTRDGDDLTLETSVTGTVSLEAEKKGINMSRIMRSFYRHAEQTFSFEVIEETLDAYKTDLESFDARIQMRFSFPMKVDSLRSGLSGYQYYDIALEVVDVAGTRKKILHLDYVYSSTCPCSLELSEHARQFRGQLATPHSQRSVARISVEVDSAATCLWFEDVIELCRAAVPTETQVMVKREDEQAFAELNAANPIFVEDAARSFCAQLQAEPRIKDFRVIASHQESLHSHDAVSVMTEGPTFAADSLDPKLFNTLFHVG

SEQ ID NO: 10040 - protein, 363 aa, unidentified
  source 1..363: note = Litoreibacter arenae
  REGION 1..363: note = tr|S9S1H7|S9S1H7_9RHOB GTP cyclohydrolase FolE2; OS = Litoreibacter arenae DSM 19593 OX=1123360 GN=folE2 PE=3; SV = 1
MNVHTPEPTREEAEAALALLRQWAGKVSAVEVADLDPLVSRLIPGQEVANYPALARAYPEEFAVDEAYRASMPDLQNGPSSLIRGAKQHIQHVGISNFRLPIRVHTRDGGDLTLETSVTGTVSLEAEKKGINMSRIMRSFYAQAEQTFSFDVIEATLDAYKTDLESFDARIQMRFSFPMKMQSLRSGLEGYQYYDIALEVVDTQGTRKKIMHLDYVYSSTCPCSLELSEHARQFRGQLATPHSQRSVARVSVEVDCERNCLWFEDLIELCRAAVPTETQVMVKREDEQAFAELNAANPIFVEDAARSFCEQLQADPRIKDFRVIASHQESLHSHDAVSVMTEGPTFAADSLDPKLFNTLFHVG

SEQ ID NO: 10041 - protein, 363 aa, unidentified
  source 1..363: note = Litoreibacter ascidiaceicola
  REGION 1..363: note = tr|A0A1M4T9G8|A0A1M4T9G8_9RHOB GTP cyclohydrolase FolE2 OS=Litoreibacter ascidiaceicola OX=1486859 GN=folE2; PE = 3 SV=1
MNVHTPEPTREEAEAALALLRQWAGKVSAVEVADLDPLVSRLIPGQELANYPALARAYPEEFAVDEAYKASMPDLQNGPSSLIRGAKQHIQHVGISNFRLPIRFHTRGGDDLTLETSVTGTVSLEAEKKGINMSRIMRSFYAQAEQTFSFEVIEATLDAYKTDLESFDARIQMRFSFPMKVQSLRSGLEGYQYYDIALEVVDTQGTRKKILHLDYVYSSTCPCSLELSEHARQFRGQLATPHSQRSVARVSVEVDCERNCLWFEDLIELCRTAVPTETQVMVKREDEQAFAELNAANPIFVEDAARSFCEQLQADPRIKDFRVIASHQESLHSHDAVSVMTEGPTFAADSLDPKLFNTLFHVG

SEQ ID NO: 10042 - protein, 363 aa, unidentified
  source 1..363: note = Litoreibacter halocynthiae
  REGION 1..363: note = tr|A0A4R7LHS8|A0A4R7LHS8_9RHOB GTP cyclohydrolase FolE2 OS=Litoreibacter halocynthiae OX=1242689 GN=folE2; PE = 3 SV=1
MNVHTPEPTREEAEAALALLRQWAGKVSPIEVADLDPLVSRLIPGQELANYPALARAYPEEFAVDEAYKATMPDLQNGPSSLIRGAKQHIQHVGISNFRLPIQVHTRDGDDLTLETSVTGTVSLEAEKKGINMSRIMRSFYRHAEQTFSFEVIEQTLDAYKTDLESFDARIQMRFSFPMKVQSLRSGLEGYQYYDIALEVVDTQGTRKKILHLDYVYSSTCPCSLELSEHARQYRGQLATPHSQRSVARVSVEVDSTQTCLWFEDLIELCRAAVPTETQVMVKREDEQAFAELNAANPIFVEDAARSFCEQLQADPRIKDFRVIASHQESLHSHDAVSVMTEGPTFAADSLDPKLFNTLFHVG

SEQ ID NO: 10043 - protein, 366 aa, Litoreibacter janthinus
  REGION 1..366: note = tr|A0A1I6HEQ4|A0A1I6HEQ4_9RHOB GTP cyclohydrolase FolE2 OS=Litoreibacter janthinus OX=670154 GN=folE2 PE=3; SV = 1
MNVHAPEPDEPTREEAEAALALLRRWAGKVSPVEVSDLDPLVSRLIPGQELANYPALARAYPEDFAVDEAYKASMPDLQNGPSSLIRGAKQHIQHVGISNFRLPVRVHTRGGGDLTLETSVTGTVSLEAEKKGINMSRIMRSFYKRAEQTFSFEVIEATLDAYKSDLESFDARIQMRFSFPMKVESLRSGLEGYQYYDLALEVVDTQGTRKKIMHLDYVYSSTCPCSLELSEHARQFRGQLATPHSQRSVARVSVEVDCKQNCLWFEDLIELCRAAVPTETQVMVKREDEQAFAELNAANPIFVEDAARSFCEQLKADPRIKDFRVVASHQESLHSHDAVSVMTEGPTFASDSLDPKLFNTLFHVG

SEQ ID NO: 10044 - protein, 363 aa, unidentified
  source 1..363: note = Litoreibacter meonggei
  REGION 1..363: note = tr|A0A497X4M6|A0A497X4M6_9RHOB GTP cyclohydrolase FolE2 OS=Litoreibacter meonggei OX=1049199 GN=folE2 PE=3; SV = 1
MNVHTPEPTREEAEAALALLRQWAGKVSAVEVADLDPLVSRLIPGQELANYPALARAYPEEFAVDEAYKATMPDLQNGPSSLIRGAKQHIQHVGISNFRLPIRVHTRDGDDLTLETSVTGTVSLEAEKKGINMSRIMRSFYAQAEQTFSFEVIEQTLDAYKTDLESFDARIQMRFSFPMKLQSLRSGLEGYQYYDIALEVVDTQGTRKKILHLDYVYSSTCPCSLELSEHARQYRGQLATPHSQRSVARVSVEVDCEQDCLWFEDLIELCRTAVPTETQVMVKREDEQAFAELNAANPIFVEDAARSFCEQLQADPRIKDFRVIASHQESLHSHDAVSVMTEGPTFAADSLDPKLFNTLFHVG

SEQ ID NO: 10045 - protein, 367 aa, unidentified
  source 1..367: note = Litoreibacter ponti
  REGION 1..367: note = tr|A0A2T6BK01|A0A2T6BK01_9RHOB GTP cyclohydrolase FolE2 OS=Litoreibacter ponti OX=1510457 GN=folE2 PE=3 SV=1
MNLHTPDLEREPTRADAERALALLRQWAGSVTDIEVADLDPLVSRLIPGQEVANYPALARAYPEDFAVDDAYKATMPDLQNGPSSLIRGAKQQIQHVGISNFRLPIRFHTRDNGDLTLETSVTGTVSLEAEKKGINMSRIMRSFYKQADETFSFEVIEKTLDAYKTDLESFDARIQMRFSFPMKVQSLRSGLEGYQYYDIALEVVDTAGERKKILHLDYVYSSTCPCSLELSEHARQFRGQLATPHSQRSVARVSVEVDCDADCLWFEDLIEMCRDAVPTETQVMVKREDEQAFAELNAANPIFVEDAARSFCAVLLADERIKDFRVVASHQESLHSHDAVSVLTEGETFASDSLDPKLFNTLFHVG

SEQ ID NO: 10046 - protein, 366 aa, Litoreibacter sp.
  REGION 1..366: note = tr|A0A5B8J3R2|A0A5B8J3R2_9RHOB GTP cyclohydrolase FolE2 OS=Litoreibacter sp. LN3S51 OX=2599296 GN=folE2 PE=3; SV = 1
MNAPAKPTVTSPDRTDAERALRILRKWVEEADDAEIADLDPVVGRLREDRAVSNYPDLSRVYPEHFEVTADYKAGLPDLQNGPASLIRGARAQIQHVGISNFRLPIRYKLREGGELMLETSVTGTVSLEPEKKGINMSRIMRTFYRHSERTFSFEVIEAVLDDYKTDLESLDARIEMRFSFPVRQKALRSGLEGYQYYDIALELIEHQGQRRKIVHLDYVYSSTCPCSLELSEHARRSRNQLATPHSQRSVARVSVEMLGEECLWFEDLIDICRKAVPTETQVMVKREDEQAFAELNAANPIFVEDAARLFCEHLRADKRIGDFRVVASHQESLHSHDAVSILTHGDTFEVNSLDPRMMASLHHIG

SEQ ID NO: 10047 - protein, 223 aa, unidentified
  source 1..223: note = Litorilinea aerophila
  REGION 1..223: note = tr|A0A540VEM0|A0A540VEM0_9CHLR GTP cyclohydrolase 1; OS = Litorilinea aerophila OX=1204385 GN=folE PE=3 SV=1
MKHETILPVNGHAETVAQSQKVHEPDAPTAAGEDKPYDPVLADLVRQMLVRLGEDPTREGLVRTPQRVARAMGFLTSGYHISLDEVVNDAIFQDDGEEMVLVRDIEFYSLCEHHMLPFFGKVHIAYVPNGKIIGLSKLARIADLYARRLQVQERLTNQIADALEQVLAPRGVAVVAEAVHFCMMMRGVQKQHSATLTRAMRGVFKSDAQLRREFMDAVGQRQG

SEQ ID NO: 10048 - protein, 308 aa, unidentified
  source 1..308: note = Litorilituus sediminis
  REGION 1..308: note = tr|A0A4P6P9K4|A0A4P6P9K4_9GAMM GTP cyclohydrolase FolE2 OS=Litorilituus sediminis OX=718192 GN=folE2 PE=3; SV = 1
MPTSMPDIANHTTAQTEGALDWVGMSKIEMPIMLASKGENDRMVSTHIDAFVNLKDPQAKGIHMSRLYLILDELSTSNTLSYQTLVSVLDSFVSSHDDLSDQAKVEFNFEYHLRRKSLISGKEGWKAYPVKLTGLLNQGKLTIELSVEVRYSSTCPCSAALSRQLIQQAFQQKFSGSEQVALNDVHEWLGTSEGIVATPHSQRSIAEVKVKLNNSLNEFPITELVNLLEDALQTPVQAAVKREDEQEFARLNGQNLMFCEDAARRVQHCLNQNEQYDDFWLRINHLESLHAHDAVSITTKGISGGYQP

SEQ ID NO: 10049 - protein, 212 aa, unidentified
  source 1..212: note = Litorilituus sediminis
  REGION 1..212: note = tr|A0A4P6P6P1|A0A4P6P6P1_9GAMM GTP cyclohydrolase 1; OS = Litorilituus sediminis OX=718192 GN=folE PE=3 SV=1
MISLEAALVRDTLVAKGLETPLLPSDMSADEKYLRIKGLLTEVVSTLGLDLQDDSLAETPHRIAKMYVHEIFSGLDYQNFPSISLIENKMAVDEMVKVSNINLTSTCEHHFVTIDGLAKVAYIPKDKILGLSKINRIVRFFAQRPQVQERLTQQILIAIQALTETDNVAVSIEATHYCVKSRGVMDVNSSTSTTALGGIFKSNPQTRAEFLM

SEQ ID NO: 10050 - protein, 308 aa, unidentified
  source 1..308: note = Litorilituus sp.
  REGION 1..308: note = tr|A0A502KPI6|A0A502KPI6_9GAMM GTP cyclohydrolase FolE2 OS=Litorilituus sp. RZ04 OX=2491017 GN=folE2 PE=3; SV = 1
MPTSMPDIANHTRAQTEGTLDWVGMSNIEMPIMVASKGEAERMVSAHVDAFVNLKEAQAKGIHMSRLYLLLDELSTNGTLTYQSLVTLLDGFISSHDDLSDQAKVQFNFEYHLRRKSLISGKEGWKAYPVTVTGLLNQGQLTVELAIDVRYSSTCPCSAALARQLIQQAFQDKFSKQSELALADVHEWLGTTEGIVATPHSQRSVAEVKVKLNSQVSDFPITSLVDLIEDSLQTPVQAAVKREDEQEFARLNGQNLMFCEDAARRLQHSMNLATQYDDFWLKINHLESLHAHDAVSITTKGISGGYQP

SEQ ID NO: 10051 - protein, 366 aa, Litorimicrobium taeanense
  REGION 1..366: note = tr|A0A1H9ET56|A0A1H9ET56_9RHOB GTP cyclohydrolase FolE2 OS=Litorimicrobium taeanense OX=657014 GN=folE2 PE=3; SV = 1
MNLHTPEIDRHPSRDEAAEALQQLRAWATRATPAEIADLDPSLARLLPHTAEDSYPVLSRSYPHAFEVDAAYKDDLPDLQNGPSSLIRGARKPIQHVGISNFRLPIRFHSRDSGDLALETSVTGTVSLEAEKKGINMSRIMRSFYAHAEKTFSFEVIQAALDDYKADLESFDARIQMRFSYPVRVESLRSGLHGYQYYDIALELVELAGQRKKIVHLDYVYSSTCPCSLELSEHARRARGQLATPHSQRSVARISVEVKDGDCLWFEDVIDMARAAVPTETQVMVKREDEQAFAELNAANPIFVEDAARLFCAQLEADPRVGDFRIVASHQESLHSHDAVSILTEGDTFTCDSIDPRLFNTLYHVG

SEQ ID NO: 10052 - protein, 206 aa, Litorimonas taeanensis
  REGION 1..206: note = tr|A0A420WE15|A0A420WE15_9RHOB GTP cyclohydrolase 1; OS = Litorimonas taeanensis OX=568099 GN=folE PE=3 SV=1
MKNDTVQKPTLKAVHSAPRPSQEEAMEAVRTLIAWAGDNPDREGLIDTPKRVVKAYKEWFRGYDMDPAEELSRVFEDVSGYDDMVVLREIDVESHCEHHIAPFLGKAYVAYLPTDKVVGISKLVKVVEIFAKRLQTQETMTAQIAEAIDEALKPRGSAIMIDAVHQCMSTRGVHHPDVSTITTQFTGEFKTNPQLQDRFLKLIGKA

SEQ ID NO: 10053 - protein, 384 aa, Loktanella atrilutea
  REGION 1..384: note = tr|A0A1M5ARI9|A0A1M5ARI9_9RHOB GTP cyclohydrolase FolE2 OS=Loktanella atrilutea OX=366533 GN=folE2 PE=3 SV=1
MRAPHLRASTPHKGSAVMNLQSRDLDRQPSRAEAEAALSLLRRWAGGATPEEIGALDPLVGRLLPGQAVSNYPALARAYPEDFEVDAAYRATMPDLQNGPASLIRGLPRQIQHVGISNFRLPIRFHTRAGGDLTLETSVTGTVSLDAEKKGINMSRIMRTFYQHAEETFSFDVIERALDAYMTDLDSFDARIQMRFSFPMKVQSLRSGLSGYQYYDIALELVEQSGVRQKIVHLDYVYSSTCPCSLELSEHARQFRGQLATPHSQRSVARLSVVLVPGQRVMWFEDLIDMARAAVPTETQVMVKREDEQAFAELNAANPIFVEDAARLFTEQLHLDQRVGDFRVVASHQESLHSHDAVSVLTEGPTFAAASLDPRLFASLHHAG

SEQ ID NO: 10054 - protein, 367 aa, Loktanella fryxellensis
  REGION 1..367: note = tr|A0A1H8GHL3|A0A1H8GHL3_9RHOB GTP cyclohydrolase FolE2 OS=Loktanella fryxellensis OX=245187 GN=folE2 PE=3; SV = 1
MNHHSRDMDRHPSRAEAEAALSLLRRWADTATADEITTLDPLVGRLIPGRAVPDYPALARAYPEDFAVDAAYKASMPDLQNGPSSLIRGAQQQIQHVGISNFRLPIRFHTRDNGDLTLETSVTGTVSLEAEKKGINMSRIMRTFYAHAEETFSFDVIERALDAYKTDLDSFDARIQMRFSFPMKVQSLRSGLQGYQYYDIALELVEQGGVRRKIVHLDYVYSSTCPCSLELSEHARQFRGQLATPHSQRSVARISVALEPGQPVTWFEDLIDMARAAVPTETQVMVKREDEQAFAELNAANPIFVEDAARLFTEQLQLDPRIGDFRVIASHQESLHSHDAVSVLTEGPTFAAQSLDPRLFASLFHVG

SEQ ID NO: 10055 - protein, 367 aa, Loktanella salsilacus
  REGION 1..367: note = tr|A0A1I4FTB4|A0A1I4FTB4_9RHOB GTP cyclohydrolase FolE2 OS=Loktanella salsilacus OX=195913 GN=folE2 PE=3 SV=1
MNIQSRDLDRQPSRAEAEAALSLLRRWAGDASAEEIVTLDPQIGSLLPGQSASDYPAMARVYPEDFVVDAAYKATLPDLQNGPTSLIRGAQRQIQHVGISNFRLPIRFHTRDAGDLTLETSVTGTVSLEAEKKGINMSRIMRTFYKHAEETFSFEVIERALDAYKTDLESFDARIQMRFSFPMKVESLRSGLSGYQYYDIALELVETDGVRRKIIHLDYVYSSTCPCSLELSEHARQFRGQLATPHSQRSVARVSVVLEPGQQTAWFEDLIEMARAAVPTETQVMVKREDEQAFAELNAANPIFVEDAARLFAEQLQMDPRIGDYRIVASHQESLHSHDAVSVLTEGPTFAAQSIDPRLFASLFHVG

SEQ ID NO: 10056 - protein, 367 aa, Loktanella sp.
  REGION 1..367: note = tr|A0A4Q3YEC6|A0A4Q3YEC6_9RHOB GTP cyclohydrolase FolE2 OS=Loktanella sp. IMCC34160 OX=2510646 GN=folE2 PE=3; SV = 1
MNIHSVDLDRDPTRDEAETALALLRRWAGGVTPEEVATLDPLVSRLIPGQEVSNYPALARAYPEDFVVDDDYKASMPDLQNGPESLIKGAKRQIQHVGISNFRLPIRFHTRDNGDLTLETSVTGTVSLEAGKKGINMSRIMRSFYKYAEETFSFAVVERALDAYKADLDSFDARIQMRFSFPMKVKSLRSGLEGFQYYDIALELVEQNGVRKEIVHLDYVYSSTCPCSLELSEHARQFRGQLATPHSQRSVARVSVALEPGSKCLWFEDLIDMARVAVPTETQVMVKREDEQAFAELNAANPIFVEDAARLFAEQLQKDPRIGDFRVIASHQESLHSHDAVSVLTEGETFASQSLDPKLFNTLFHVG

SEQ ID NO: 10057 - protein, 367 aa, Loktanella sp.
  REGION 1..367: note = tr|A0A0F4RLV7|A0A0F4RLV7_9RHOB GTP cyclohydrolase FolE2 OS=Loktanella sp. S4079 OX=579483 GN=folE2 PE=3 SV=1
MNMHTSQLNDTLSREDAEAALAVLRRWASAVSAEEVATLDPLVSRLIPGQEVSNYPALARAYPDAFEVDDAYKASMPDLQNGPSSLIKGAKQQIQHVGISNFRLPIRFHTRDGGDLTLETSVTGTVSLDAEKKGINMSRIMRTFYKHAEETFSFDVIERALDAYKTDLESFDARIQMRFSFPMKVESLRSGLSGYQYYDIALELVESAGVRKQIIHLDYVYSSTCPCSLELSEHARQFRGQLATPHSQRSVARLSVLVDQTQSCLWFEDLIDRARLAVPTETQVMVKREDEQAFAELNAANPIFVEDAVRLFTEQLQAENRVSDFRVIASHQESLHSHDAVSVLTEGETFASESLDPKLFATLFHVG

SEQ ID NO: 10058 - protein, 218 aa, Lonepinella koalarum
  REGION 1..218: note = tr|A0A5D1ZMB8|A0A5D1ZMB8_9PAST GTP cyclohydrolase 1; OS = Lonepinella koalarum OX=53417 GN=folE PE=3 SV=1
MSNISAEAIKVRDALVVKGIETPMINLAKSKDQRRDEIEQKMRDVLTLIGLDLTDDSIEETPHRLAKMFVDEIFSGLDYVNFPKITNIENRMKVSEMVLVNDVTLTSTCEHHFVTIDGTVSVAYYPKKWVIGLSKINRVIAFFAQRPQVQERLTEQVLLAFQTILETEDVAVYVKATHFCVKCRGIKDSNSYTVTSAFGGVFLEDRETRKEFLSLINK

SEQ ID NO: 10059 - protein, 218 aa, Lonepinella koalarum
  REGION 1..218: note = tr|A0A4R1KSW6|A0A4R1KSW6_9PAST GTP cyclohydrolase 1; OS = Lonepinella koalarum OX=53417 GN=folE PE=3 SV=1
MSNILAEAIKVRDALVAKGIETPMINLTKSKDQRRDEIEQKMRDVLTLIGLDLTDDSIEETPHRLAKMFVDEIFSGLDYANFPKITNIENRMKVSEMVLVNDVTLTSTCEHHFVTIDGTVSVAYYPKKWVIGLSKINRVIAFFAQRPQVQERLTEQVLLAFQTILETEDVAVYVKATHFCVKCRGIKDSNSYTVTSAFGGVFLEDRETRKEFLSLINK

SEQ ID NO: 10060 - protein, 219 aa, unidentified
  source 1..219: note = Longibacter salinarum
  REGION 1..219: note = tr|A0A2A8CTU8|A0A2A8CTU8_9BACT GTP cyclohydrolase 1; OS = Longibacter salinarum OX=1850348 GN=folE PE=3 SV=1
MSEKKILSNELRMNGTPHGGPPRLYERRDLYDEQATTSIAENVQEVLSQLGEDPEREGLQKTPERVAKAYQFLTHGYSQDARAILEGALFEEAYDEMILVKDIELYSLCEHHMLPFYGKAHVAYIPNGRIVGLSKIPRTVEVFARRLQVQERLTMQIRDAIDDVLQPLGTAVVIEARHLCMMMRGAEKQNSMTTTSSMSGEFEEHRTRAEFMRLIRATD

SEQ ID NO: 10061 - protein, 219 aa, Longilinea arvoryzae
  REGION 1..219: note = tr|A0A0S7B5U9|A0A0S7B5U9_9CHLR GTP cyclohydrolase 1; OS = Longilinea arvoryzae OX=360412 GN=folE PE=3 SV=1
MHIHDDPDDSEYLESMKLQMRQISDEQFHKFEGYAAEIFSAFGLNLNTPATKDTPRRFIKALFDSTEGYDGDPKLLRIFDTECRGEPDCRLSQVVEGPIPFFALCEHHALPFYGMAYVGYIAHENIIGISKLTRLVRIFSKRFAVQERIGQQIADTLETMLHPHGVAVYLEAHHLCMEMRGVRETSPKTRTTVWRGYFAEDPSLRAEFFTACGLQRNER

SEQ ID NO: 10062 - protein, 211 aa, Longilinea arvoryzae
  REGION 1..211: note = tr|A0A0S7BK39|A0A0S7BK39_9CHLR GTP cyclohydrolase 1; OS = Longilinea arvoryzae OX=360412 GN=folE PE=3 SV=1
MDDNDGAVYKAAELFMDSEIDVDTIQNAVSSMLEAFGEDPKREGLVKTPDRVARMYEELLAGYRTDPIVMVNDALFDVEYDEMVVVRDIEFYSLCEHHMLPFIGRAHVAYIPKGRVIGLSKIPRVVDMFARRLQVQERMTRQIGDFINELLHPQGVAVVVEALHLCSMIRGVKKHDSRMTTSTMLGAFRTDLALRMEFLDNISRGAQPLHF

SEQ ID NO: 10063 - protein, 217 aa, unidentified
  source 1..217: note = Longimonas halophila
  REGION 1..217: note = tr|A0A2H3NN38|A0A2H3NN38_9BACT GTP cyclohydrolase 1; OS = Longimonas halophila OX=1469170 GN=folE PE=3 SV=1
MAEKKIVTDDIVENGTVVGDYPTHYERRDMYDAETTRDVADHVASIIQKLGEDPEREGLVKTPERVAKAYQFLTQGYAQDPKAILRQAMFEETYNEIILVKDIEVYSLCEHHMLPFFGKAHVAYIPDGHIVGLSKIPRTVEVFARRLQVQERLTLQIREAIDEVLKPQGAAVVIEAQHLCMMMRGVEKQNSCTTTSAVSGAFRNHSTRDEFMRLVRS

SEQ ID NO: 10064 - protein, 221 aa, unidentified
  source 1..221: note = Lonsdalea britannica
  REGION 1..221: note = tr|A0A1X3RUR8|A0A1X3RUR8_9GAMM GTP cyclohydrolase 1; OS = Lonsdalea britannica OX=1082704 GN=folE PE=3 SV=1
MSSPLTQEAALVHEALLARGLETPLRGEMLDRETRKSRIAEHMTEIMNLLSLDLTDDSLTETPHRIAKMYVDEIFSGLDYTNFPKITIIQNKMKVDEMVTVRDITLTSTCEHHFVTIDGKATVAYIPKDGVIGLSKINRIVQFFSQRPQVQERLTQQILVALQTLLGTNNVAVSIDAVHYCVKARGIRDATSATTTTSLGGLFKSSQNTRQEFLRAVRHHN

SEQ ID NO: 10065 - protein, 221 aa, unidentified
  source 1..221: note = Lonsdalea iberica
  REGION 1..221: note = tr|A0A1X3RZZ6|A0A1X3RZZ6_9GAMM GTP cyclohydrolase 1; OS = Lonsdalea iberica OX=1082703 GN=folE PE=3 SV=1
MSSPLTQEAALVHEALLARGLETPLRGEMLDRETRKSRIAEHMTEIMNLLSLDLTDDSLTETPHRIAKMYVEEIFAGLDYTNFPKITIIQNKMKVDEMVTVRDITLTSTCEHHFVTIDGKATVAYIPKDGVIGLSKINRIVQFFSQRPQVQERLTQQILVALQTLLGTNNVAVSIDAVHYCVKARGIRDATSATTTTSLGGLFKSSQNTRQEFLRAVRHHN

SEQ ID NO: 10066 - protein, 221 aa, unidentified
  source 1..221: note = Lonsdalea populi
  REGION 1..221: note = tr|A0A3N0UJ51|A0A3N0UJ51_9GAMM GTP cyclohydrolase 1; OS = Lonsdalea populi OX=1172565 GN=folE PE=3 SV=1
MSSPLTQEAALVHEALLARGLETPLCGEMLDRETRKTRIAEHMTEIMNLLSLDLTDDSLMETPHRIAKMYVDEIFSGLDYTNFPKITIIQNKMKVDEMVTVRDINLTSTCEHHFVTIDGKATVAYIPKDGVIGLSKINRIVQFFSQRPQVQERLTQQILVALQTLLGTNNVAVSIDAVHYCVKARGIRDATSATTTTSLGGLFKSSQNTRQEFLRAVRHHN

SEQ ID NO: 10067 - protein, 221 aa, unidentified
  source 1..221: note = Lonsdalea quercina
  REGION 1..221: note = tr|A0A1H4BPV3|A0A1H4BPV3_9GAMM GTP cyclohydrolase 1; OS = Lonsdalea quercina OX=71657 GN=folE PE=3 SV=1
MSSPLTQEAALVHEALLARGLETPLRGEMLDRETRKSRIAEHMTEIMNLLSLDLTDDSLTETPHRIAKMYVEEIFAGLDYTNFPKITIIQNKMKVDEMVTVRDITLTSTCEHHFVTIDGKATVAYIPKDGVIGLSKINRIVQFFAQRPQVQERLTQQILIALQTLLGTNNVAVSIDAVHYCVKARGIRDATSATTTTSLGGLFKSSQNTRQEFLRAVRHHN

SEQ ID NO: 10068 - protein, 263 aa, unidentified
  source 1..263: note = Lucifera butyrica
  REGION 1..263: note = tr|A0A498R2J7|A0A498R2J7_9FIRM GTP cyclohydrolase FolE2 OS=Lucifera butyrica OX=1351585 GN=folE2 PE=3 SV=1
MRDVQNSSDMRGIAIQKVGVKDVHLPFLIKTKEGHFQSVLAKIELTVDLPQEFKGTHMSRFIEVLSDWSQKPVSGREMENILTDTIQRLNAQSAELAIRFKYFVEKVAPVSQLKSMLDYDCSFTGKLAQGGKLDFTMGLAVPFTSLCPCSKEISRYGAHNQRGLMRVNLKYAKGKFIWIEDLAALMEAQGSCPVYPLLKREDEKYVTERAYENPKFVEDILRDLVLALRALDGVEWFEIHCENYESIHNHSAYAAHVETVGIC

SEQ ID NO: 10069 - protein, 184 aa, unidentified
  source 1..184: note = Luminiphilus syltensis
  REGION 1..184: note = tr|B8KRR5|B8KRR5_9GAMM GTP cyclohydrolase 1; OS = Luminiphilus syltensis NOR5-1B OX=565045 GN=folE PE=3; SV = 1
MEHHWQSIIEAIGEDVTRPGLEDTPKRAAKAFKFLTRGYDQELDTVVNNALFPTDSSEMVLVQDIEMYSLCEHHMLPFIGRCHVAYIPTGKVLGLSKVARIVDMYARRLQIQEQLTLQIANAVQQVTDAEGVGVIIEAEHMCMMMRGVEKQNSVTKTSTMLGSFREDARTRREFLSLLQLPRIR

SEQ ID NO: 10070 - protein, 226 aa, unidentified
  source 1..226: note = Lunatimonas lonarensis
  REGION 1..226: note = tr|R7ZLR2|R7ZLR2_9BACT GTP cyclohydrolase 1; OS = Lunatimonas lonarensis OX=1232681 GN=folE PE=3 SV=1
MNTKDIDLVNAFDEMGDSHAASSHDTPLREDAFEMDDELKMELIEKHFREIMHILGLDLTDDSLRGTPKRVAKMFVQEVFSGLDPKNKPVGKLFENKYHYNEMLVEKDITFYSHCEHHFVPIYGKAHVAYISNGKVIGLSKINRIVQYYSKRPQVQERLTMQIGNELKEMLGTEDVAVVMDAYHMCVSSRGVKDVNSSTITSFYSGKFKEDEKRRTEFLKYLTLKK

SEQ ID NO: 10071 - protein, 307 aa, unidentified
  source 1..307: note = Luteibacter pinisoli
  REGION 1..307: note = tr|A0A4Y5Z4K3|A0A4Y5Z4K3_9GAMM GTP cyclohydrolase FolE2 OS=Luteibacter pinisoli OX=2589080 GN=folE2 PE=3 SV=1
MYIQDSPTRLLPDVASQEHALSIGTLDWVGMDGMEMPVAFDAGDGDVRSTGARVGAFVNLTQPEKRGIHMSRLYLLVSEALSAGPLTIGGIRALLGEFLSSHEGLSDHARITIGFEHLVRRRALRSDNSGWRAYPITIDATLRGNQFHLEVTTDVVYSSTCPASAALSRQLIQDNFAKSFPAEQALDRETILAWLGTEQGIIATPHAQRSTATIRVAPKGDQVFDLIGMIDRVEAALGTPVQTAVKRADEQAFALANGSNLMFCEDAARRIQKTLEAEPAVADFHVRVAHHESLHPHDAVAFASKAR

SEQ ID NO: 10072 - protein, 198 aa, unidentified
  source 1..198: note = Luteibacter pinisoli
  REGION 1..198: note = tr|A0A4Y5ZA28|A0A4Y5ZA28_9GAMM GTP cyclohydrolase 1; OS = Luteibacter pinisoli OX=2589080 GN=folE PE=3 SV=1
MSDDSSSRPVTREQAEEAVRTLLLWAGEDPKREGLLDTPKRVVKAYSDWFKGYDEDPAEYLRRTFKEVEGYDEMIVLRDIEFESHCEHHMAPIIGRAHVGYVPTDRVVGISKLARVVDGFARRFQVQEKLTAQIAHCIEDTLRPRGVGVVIDASHECMTTRGVHKRGVSMVTSQMLGSFREDPRTRGEFLRFVGVDRR

SEQ ID NO: 10073 - protein, 198 aa, Luteibacter rhizovicinus
  REGION 1..198: note = tr|A0A0G9HBH7|A0A0G9HBH7_9GAMM GTP cyclohydrolase 1; OS = Luteibacter rhizovicinus DSM 16549 OX=1440763 GN=folE; PE = 3 SV=1
MSDDATSRPVTREQAEEAVRTLLLWSGEDPTREGLLDTPKRVVKAYSDWFKGYDEDPAEYLRRTFKEVEGYDEMIVLRDIEFESHCEHHMAPIIGRAHVGYVPTDRVVGISKLARVVDGFARRFQVQEKLTAQIAHCIEDTLRPRGVGVVIDASHECMTTRGVHKRGVSMVTSQMLGSFREDPRTRGEFLRFVGVDRR

SEQ ID NO: 10074 - protein, 198 aa, Luteibacter rhizovicinus
  REGION 1..198: note = tr|A0A4R3YU35|A0A4R3YU35_9GAMM GTP cyclohydrolase 1; OS = Luteibacter rhizovicinus OX=242606 GN=folE PE=3 SV=1
MSDDAKPGSVTREQAEEAVRTLLVWAGEDPSREGLLDTPKRVVKAYSDWFNGYAVDPAEYLRRTFEEVAGYDEMVVLRDIEFESHCEHHMAPIVGRAHVGYIPTDRVVGISKLARVVDGFARRFQVQEKLTAQIAHCIDETLRPRGVGVVIDASHECMTTRGVHKRGVSMVTSQMLGSFREDPRTRGEFLRFVGVDRR

SEQ ID NO: 10075 - protein, 307 aa, Luteibacter sp.
  REGION 1..307: note = tr|A0A1K1NG47|A0A1K1NG47_9GAMM GTP cyclohydrolase FolE2 OS=Luteibacter sp. UNCMF366Tsu5.1 OX=1502758; GN = folE2 PE=3 SV=1
MYIHDSPHRLLPDVASQEHALAVGTLDWVGMDGMEMPVAFDAGDGDVRSTGARVGAFVDLKKPEARGIHMSRLYLLVSDALSAGPLTVAGVRSLLQSFLSSHEGLSDRARITIGFEHLVRRKSLRSENSGWRAYPVTIDATLNGDDFRIEITTDVVYSSTCPASAALSRQLIQDNFAKTFAAGEPLDRETILAWLGTEQGIVATPHAQRSTATIRVRPVGEGVFPLVDMIDNVEAALGTPVQTAVKRADEQAFALANGQNLMFCEDAARRIQKTLEADPRIADFHLRVAHHESLHPHDAVAFASKAR

SEQ ID NO: 10076 - protein, 308 aa, Luteibacter sp.
  REGION 1..308: note = tr|A0A1I0MDH8|A0A1I0MDH8_9GAMM GTP cyclohydrolase FolE2 OS=Luteibacter sp. 329MFSha OX=1798239 GN=folE2 PE=3; SV = 1
MYIHDSPTRLLPDVASQEHALAIGTLDWVGMDGMEMPVAFDAGDGDVRSTGARVGAFVNLTKPEARGIHMSRLYLLVSDALSAGPLTVAGVRGLLESFLSSHEGLSDHARITIGFEHLVRRKSLRSDNSGWRAYPITIDATLSGSEFCLQITTDVVYSSTCPASAALSRQLIQDNFAKTFAADQPLDRETILAWLGTEQGIVATPHAQRSTATIRVKPTGEGVFNLIGMIDNVENALGTPVQTAVKRADEQAFALANGQNLMFCEDAARRIQKALSDDGNIADFHLRVAHHESLHPHDAVAFASKVQR

SEQ ID NO: 10077 - protein, 198 aa, Luteibacter yeojuensis
  REGION 1..198: note = tr|A0A0F3KZM2|A0A0F3KZM2_9GAMM GTP cyclohydrolase 1; OS = Luteibacter yeojuensis OX=345309 GN=folE PE=3 SV=1
MSDESRSRPVTREQAEEAVRTLLLWAGEDPKREGLLDTPKRVVKAYGDWFKGYDEDPAEYLRRTFKEVEGYDEMIVLRDIEFESHCEHHMAPIIGRAHVGYVPTDRVVGISKLARVVDGFARRFQVQEKLTAQIAHCIEDTLRPRGVGVVIDASHECMTTRGVHKRGVSMVTSQMLGSFREDPRTRGEFLRFVGVDRR

SEQ ID NO: 10078 - protein, 308 aa, Luteibacter yeojuensis
  REGION 1..308: note = tr|A0A561HAZ4|A0A561HAZ4_9GAMM GTP cyclohydrolase FolE2 OS=Luteibacter yeojuensis OX=345309 GN=folE2 PE=3; SV = 1
MYIQDSPTRLLPDVASQEHALAIGTLDWVGMDGMEMPVAFDAGDGDVRATGARVGAFVNLNKSEARGIHMSRLYLLVSEALSAGPLTIGGIRDLLGQFLSSHEGLSDHARITIGFEHLVRRRALRSDNSGWRAYPITVDATLKGEAFHVEITTDVVYSSTCPASAALSRQLIQDSFAKAFPADQSMDRETILAWLGTEQGIVATPHAQRSTATIRVRPAGEGTFDLIGMIDRVESALGTPVQTAVKRADEQAFALANGSNLMFCEDAARRIQKTLDADDGIADFHVRVAHHESLHPHDAVAFSSKVRR

SEQ ID NO: 10079 - protein, 218 aa, unidentified
  source 1..218: note = Luteibaculum oceani
  REGION 1..218: note = tr|A0A5C6V0G9|A0A5C6V0G9_9FLAO GTP cyclohydrolase 1; OS = Luteibaculum oceani OX=1294296 GN=folE PE=3 SV=1
MKPETILQNITVSKNGESEEAYERIDRYHEKSIEKLSGLYEGVIQEIGEDPTREGLLKTPERVAKAIQFLTHGYSLDPAEILKSAMFKEEYRQMVLVKEIELYSMCEHHMLPFFGKAYVAYIPDGQIVGLSKIPRVVDAYARRLQVQERLTYQIRDCIQETLRPLGVAVVIEAQHMCMQMRGVQKQNSVTTTSAFTGEFLKENTRNEFISLISSDLNK

SEQ ID NO: 10080 - protein, 192 aa, Luteimicrobium subarcticum
  REGION 1..192: note = tr|A0A2M8WSM8|A0A2M8WSM8_9MICO GTP cyclohydrolase 1; OS = Luteimicrobium subarcticum OX=620910 GN=folE PE=3 SV=1
MSDKKSPVDLARAEAAVRELLLAIGEDPDRDGLADTPARVARSYREIFRGLHQSPAEVLSTTFDLGHEEMILVKDIEVYSTCEHHLVPFHGVAHVGYIPRDGRVTGLSKLARLVDVYAKRPQVQERLTSQVADALVEHLDALGVIVVVECEHLCMSMRGVRKPGARTVTSAVRGQMRDPATRAEAMSLILGR

SEQ ID NO: 10081 - protein, 211 aa, Luteimonas aestuarii
  REGION 1..211: note = tr|A0A4R5TMJ7|A0A4R5TMJ7_9GAMM GTP cyclohydrolase 1; OS = Luteimonas aestuarii OX=453837 GN=folE PE=3 SV=1
MSTLRSRGPPVSKHDDTRNGVPRDQAEEAVRTLLRWAGEDPAREGLLDTPKRVANAYGEWFSGYALDPDEYLARTFEEVAGYDEMIVLRDIEFESHCEHHMAPIIGRVHVGYLPKGKVVGISKLARVVEAYSKRFQVQEKMTAQIAGCIQRALAPHGVGVVVDGAHECMTTRGVHKRGVSMITSTMLGSFREDARTRAEFLRFIEAGGGRR

SEQ ID NO: 10082 - protein, 298 aa, Luteimonas aestuarii
  REGION 1..298: note = tr|A0A4V3ALZ4|A0A4V3ALZ4_9GAMM GTP cyclohydrolase FolE2 OS=Luteimonas aestuarii OX=453837 GN=folE2 PE=3 SV=1
MPDVAGDAARAARTLDWVGMDRIALPVRIAGEAGVAMQVPAAVDIAVDLRDADVRGIHMSRLYLRLQDALTAESPSHAGLRRVLQDCIDSQQGLSTRARIAIRYEHLLKRRALASDNSGWKAYPVEIVATLADGHLALDMTFSVDYSSTCPASAALSRQLNADRFAEDFATSGAVPAAGVRDWLASERGLAATPHAQRSRATITVGLRPAFDELPLASLVDAVEAALGTPVQTAVKREDEQAFAALNAANLMFCEDSARRIAAVLAGDARVEHYDATVSHLESLHAHDAVARVSGRNA

SEQ ID NO: 10083 - protein, 310 aa, unidentified
  source 1..310: note = Luteimonas cucumeris
  REGION 1..310: note = tr|A0A562L7E4|A0A562L7E4_9GAMM GTP cyclohydrolase FolE2 OS=Luteimonas cucumeris OX=985012 GN=folE2 PE=3 SV=1
MSSSPSIPSRLPDVADDAVALARQLSWVGMDRIALPLRVHGADGDTLQVAASIDAAVNLQDAGARGIHMSRLYLRLQDAFAGEALTPAGLRRVLQDMVESQRGLSTAARLVIRYDLLLKRRALASEHSGWKNYPVEIEATLRDGHLKLAVAFAAEYSSTCPASAALSRQLNAERFAEDFANAHPLSTGVVSEWLHSERGLAATPHAQRSRADVRVELRAAFDELPFTALIDSVEQAVGTPVQTAVKREDEQAFARLNAENLMFCEDAARRVAAALADDARVDRYDVTVSHFESLHAHDAVARVSGVGNRS

SEQ ID NO: 10084 - protein, 199 aa, unidentified
  source 1..199: note = Luteimonas cucumeris
  REGION 1..199: note = tr|A0A562KWL0|A0A562KWL0_9GAMM GTP cyclohydrolase 1; OS = Luteimonas cucumeris OX=985012 GN=folE PE=3 SV=1
MASNQDSSDVSRAQAEDAVRVLLRWAGEDPAREGLLDTPKRVVEAYRDWFSGYSDDPQEFLARTFKEVAGYDEMIVLRDIEFESHCEHHMAPIIGRAHVGYLPDGKVVGISKLARVVETYARRFQVQEKMTAQIATVIQEVLNPRGVGVVIEATHECMTTRGIHKRGVSMVTSKMLGGFRDDARTRAEFLRFIRDGHVG

SEQ ID NO: 10085 - protein, 308 aa, Luteimonas marina
  REGION 1..308: note = tr|A0A5C5UCZ8|A0A5C5UCZ8_9GAMM GTP cyclohydrolase FolE2 OS=Luteimonas marina OX=488485 GN=folE2 PE=3 SV=1
MVTTSSPRELPDVAGDAARAARALDWVGMDRIALPVRVAGADGDAPILVPASVDVAVDLRDPDARGIHMSRLYLRLQDALAAEPPGHAALRRVLQDCIDSQQGLSTRARIVIRYGHMLRRPALASDNAGWKTYPVELVAELADGHLALDLSFAVEYSSTCPASAALSRQLNAQRFAADFAAAKPLSTGVVRDWLASERGLAATPHAQRSRADVIVRLRPAFDQLPLAELVDAIEDALGTPVQTAVKREDEQAFAALNAANLMFCEDAARRVAAALAADARVERFDATVSHFESLHAHDAVARVSSAPR

SEQ ID NO: 10086 - protein, 200 aa, Luteimonas marina
  REGION 1..200: note = tr|A0A5C5U852|A0A5C5U852_9GAMM GTP cyclohydrolase 1; OS = Luteimonas marina OX=488485 GN=folE PE=3 SV=1
MSNQDDARNGVPRAQAEDAVRTLLRWAGEDPAREGLLDTPKRVVNAYTEWFNGYELDPDEYLARTFKEVAGYDEMIVLRDIEFESHCEHHMAPIIGRVHVGYLPDGKVVGISKLARVVEAYARRFQVQEKMTAQIAGCIQRALAPQGVGVVVDGSHECMTTRGVHKRGVSMVTSTMLGSFREDARTRAEFLRFIETGHRR

SEQ ID NO: 10087 - protein, 303 aa, Luteimonas sp.
  REGION 1..303: note = tr|A0A0H1ATE6|A0A0H1ATE6_9GAMM GTP cyclohydrolase FolE2 OS=Luteimonas sp. FCS-9 OX=1547516 GN=folE2 PE=3 SV=1
MNLPLPDVSLTEAASGASPLEWVGMQGIDLPVLLAEPGYRRVLHARADAQVDLPATHVKGIHMSRLYRLLDDGLGEDAALSPEGLRQLLQAMIASHGDCNSRNARLRLSFDLLVRRPALVSEGLAGWKAYPVTIHAALIGEVLTLRALVTVGYSSTCPCSAALSRQLVERGFLSAFPGPGSVEPAAVAAWLRRHATLATPHSQRSQAQVGIDVAPDVSTLGLLDLIGRVEQAVGTPVQTAVKRADEQAFAALNGQNLMFVEDAARRIHEALHETSANLRVHVRHLESLHPHDAVAWAGGGGLG

SEQ ID NO: 10088 - protein, 203 aa, Luteimonas sp.
  REGION 1..203: note = tr|A0A290XHQ5|A0A290XHQ5_9GAMM GTP cyclohydrolase 1; OS = Luteimonas sp. 100111 OX=2006110 GN=folE PE=3 SV=1
MTRSPDDDARHGVSRDEAESAVRTLLRWAGEDPAREGLLDTPRRVAKAYTEWFSGYALDADAYLARTFEEVAGYDEMIVLRDIEYESHCEHHMAPIIGKVHVGYLPAGKVVGISKLARVVEAYARRFQVQEKMTAQIAGCIQRALAPLGVGVVVEGAHECMTTRGVHKRGVSMITSTMLGSFREDARTRAEFLQFIQVGGVRR

SEQ ID NO: 10089 - protein, 203 aa, unidentified
  source 1..203: note = Luteimonas terrae
  REGION 1..203: note = tr|A0A4R5U666|A0A4R5U666_9GAMM GTP cyclohydrolase 1; OS = Luteimonas terrae OX=1530191 GN=folE PE=3 SV=1
MTQSPDFDARHGVSRDDAESAVRTLLRWAGEDPAREGLLDTPRRVADAYTEWFSGYATDADAYLARTFEEVAGYDEMIVLRDIEYESHCEHHMAPIIGKVHVGYLPAGKVVGISKLARVVEAYAKRFQVQEKMTAQIAGCIQRALAPLGVGVVVEGAHECMTTRGVHKRGVSMITSTMLGSFREDARTRAEFLQFIEVGGGRR

SEQ ID NO: 10090 - protein, 304 aa, unidentified
  source 1..304: note = Luteimonas terrae
  REGION 1..304: note = tr|A0A4R5UCW6|A0A4R5UCW6_9GAMM GTP cyclohydrolase FolE2 OS=Luteimonas terrae OX=1530191 GN=folE2 PE=3 SV=1
MSTASNTDRLPDVAGDKAQAARLLDWVGMGNIALPLRIEDANGGAVTVPASADIGVNLVDPDARGIHMSRLYLHLQDALSSRTLDRAALETVLRDCIESQRGLADRVQLTLRYGQLLRRPALASAHSGWKTYPVEIDAVLGPAGLALTLSLSVEYSSTCPASAALSRQLNAARFAGDFNTDTAGYDAVRDWLESPRGLAATPHAQRSRADVRLVLADSVDAFPILAIVDALEHALGTPVQTAVKREDEQAFASLNAENLMFCEDAARRVAAALSTDPRIACFDAKVSHFESLHAHDAVARVSGP

SEQ ID NO: 10091 - protein, 192 aa, unidentified
  source 1..192: note = Luteipulveratus halotolerans
  REGION 1..192: note = tr|A0A0L6CE56|A0A0L6CE56_9MICO GTP cyclohydrolase 1; OS = Luteipulveratus halotolerans OX=1631356 GN=folE PE=3; SV = 1
MSTPRGIDLPRAAAAVRELLIALGEDPEREGLQDTPDRVARAYAEQFAGMHQDPAEALSRTFDVDHDEMVLVRDIEVYSTCEHHLVPFHGVAHVGYIPSKTGRVTGLSKLARLVDVFAKRPQVQERLTTQIADAIVDHLDAQGVIVVLECEHLCMSMRGVRKPGARTLTSAVRGQLRDPATRAEAMSLVMGR

SEQ ID NO: 10092 - protein, 192 aa, Luteipulveratus mongoliensis
  REGION 1..192: note = tr|A0A0K1JNB1|A0A0K1JNB1_9MICO GTP cyclohydrolase 1; OS = Luteipulveratus mongoliensis OX=571913 GN=folE PE=3 SV=1
MSTPRPIDHERAAAAVRELLIAVGEDPDREGLKDTPDRVARAYAEAFAGMVQEPADVLARTFDVAHDELVLVKDIEVYSTCEHHLVPFHGLAHVGYIPDEHGRITGLSKLARLVDVFAKRPQVQERLTTQIADALTEHLNARGVIVVLECEHLCMSMRGVRKPGARTVTSAVRGQLRNPATRAEAMSLVMGR

SEQ ID NO: 10093 - protein, 148 aa, unidentified
  source 1..148: note = Luteitalea pratensis
  REGION 1..148: note = tr|A0A143PSB3|A0A143PSB3_9BACT GTP cyclohydrolase 1; OS = Luteitalea pratensis OX=1855912 GN=folE PE=3 SV=1
MKFLTSGYAADIGDILNGALFTVDYSEMVIVKDVDYYSLCEHHLLPFFGKCHVAYIPRTQVIGISKIPRLVDVFSRRLQVQERLTNEIAECIREAVDPLGVGVIMHGTHLCMAMRGVEKQNSATVTSAMLGTFRSDARTRAEFLQLAQ

SEQ ID NO: 10094 - protein, 195 aa, Luteococcus japonicus
  REGION 1..195: note = tr|A0A1R4ICP9|A0A1R4ICP9_9ACTN GTP cyclohydrolase 1; OS = Luteococcus japonicus LSP_Lj1 OX=1255658 GN=folE PE=3; SV = 1
MSDIGKDIDQDRIAAAVREILYAVGEDPDREGLRETPARVARSYAEIFAGLGQDPAELLGTTFDISHDEMVLVRDIELWSMCEHHLVPFTGVAHVGYIPAKDGRVTGLSKLARLVDLYAKRPQVQERLTTQVADAIVEHLHARGVIVVIECEHLCMTMRGVRKPGAKTVTSAVRGYLRESATRAEAMALIMGGHR

SEQ ID NO: 10095 - protein, 209 aa, Luteococcus japonicus
  REGION 1..209: note = tr|A0A3N1ZTZ2|A0A3N1ZTZ2_9ACTN GTP cyclohydrolase 1; OS = Luteococcus japonicus OX=33984 GN=folE PE=3 SV=1
MCRATRGDGAYHGGVSDIGKDIDQDRIAAAVREILYAVGEDPDREGLRETPARVARSYAEIFAGLGQDPAELLGTTFDISHDEMVLVRDIELWSMCEHHLVPFTGVAHVGYIPAKDGRVTGLSKLARLVDLYAKRPQVQERLTTQVADAIVEHLHARGVIVVIECEHLCMTMRGVRKPGAKTVTSAVRGYLRESATRAEAMALIMGGHR

SEQ ID NO: 10096 - protein, 233 aa, unidentified
  source 1..233: note = Lutibacter agarilyticus
  REGION 1..233: note = tr|A0A238YQY3|A0A238YQY3_9FLAO GTP cyclohydrolase 1; OS = Lutibacter agarilyticus OX=1109740 GN=folE PE=3 SV=1
MKHQETLLNFPTNGNKLNGFSFDEIGDDHLYTGIDTPLTKDAFKLSDDEKKDKIAGLFAEIMQVMGLDLTDDSLNGTPKRVAKMYIDEIFSGLNPENKPKIALFENKYQYSQMLVEKNIQFYSNCEHHFVPIFGKVHVAYVSSGKVIGLSKINRIVQYFANRPQVQERLTNQIALELASVLETDDIAVIIDAKHLCVASRGIKDDSSATVTSYYGGIFNKPEKIVELQNYLKQ

SEQ ID NO: 10097 - protein, 228 aa, unidentified
  source 1..228: note = Lutibacter agarilyticus
  REGION 1..228: note = tr|A0A238XPD7|A0A238XPD7_9FLAO GTP cyclohydrolase 1; OS = Lutibacter agarilyticus OX=1109740 GN=folE PE=3 SV=1
MFEGKNIMIDKIDEMGEDHVGSSAKTPLRADAFDISNEEKRKRIEASVRDILDTLGMDLDDDSIKGTPRRVAKAYVNEIFGGLDPANKPKLSTFDNNYKYGEMLVEKNITVYSTCEHHLLPIIGRAHVAYISNGNVIGLSKMNRIVDYYAKRPQVQERLTMQVVQALQEAMGTENVACVIDAKHLCVNSRGVKDIASSTVTAEFGGKFKDPAVKKEFMDYINLDTIFE

SEQ ID NO: 10098 - protein, 233 aa, unidentified
  source 1..233: note = Lutibacter flavus
  REGION 1..233: note = tr|A0A238VTG0|A0A238VTG0_9FLAO GTP cyclohydrolase 1; OS = Lutibacter flavus OX=691689 GN=folE PE=3 SV=1
MKHQETLLNTPINGTKLNGFTFDEIGDDHLYTGIETPMTRDAFVLSDDEKKEKISHLFAQIMDVMGLDLTDDSLKGTPKRVAKMYIDEIFSGLNPVNKPKIALFDNKYQYNQMLVEKNIQFYSNCEHHFVPIFGKVHVAYVSSGKVIGLSKINRIVQYFANRPQVQERLTNQIALELSDILETDDVAVIIDAKHLCVASRGIKDDSSATVTSFFGGVFNNSKKIVELQNYLKL

SEQ ID NO: 10099 - protein, 228 aa, unidentified
  source 1..228: note = Lutibacter flavus
  REGION 1..228: note = tr|A0A238VC47|A0A238VC47_9FLAO GTP cyclohydrolase 1; OS = Lutibacter flavus OX=691689 GN=folE PE=3 SV=1
MFEGKDIMTNKIDERGDDHVGSSAKTPLRADAFDISDLEKVKRIQESVKDILETLGMDLEDDSLKGTPKRVAKAFVNELFSGLNPNNKPKLSTFDNNYKYGEMLVEKNITVYSTCEHHLLPIVGRAHVAYISSGRVIGLSKMNRLVDYFAKRPQVQERLTMQVVQALQLALGTDDVACVIDAKHLCVNSRGVRDIESSTVTSEFGGKFKDKEVRREFLDYIKMDTDFE

SEQ ID NO: 10100 - protein, 231 aa, Lutibacter maritimus
  REGION 1..231: note = tr|A0A1I6NV43|A0A1I6NV43_9FLAO GTP cyclohydrolase 1; OS = Lutibacter maritimus OX=593133 GN=folE PE=3 SV=1
MFESKNIMTNKIDERGDDHVGSSAKTPLRADAFEISDEEKRNRIESSVRDILETLGMDLQDDSLKGTPRRVAKAFVNELFSGLNPANKPKLSTFDNNYKYGEMLVEKNITVYSTCEHHLLPIVGRAHVAYISNGNVIGLSKMNRIVDYFAKRPQVQERLTMQVVQALQEALGTDDVACVIDAKHLCVNSRGVRDIESSTVTSEFGGKFKDKDIRREFLDYIKMDTNFNEIQ

SEQ ID NO: 10101 - protein, 224 aa, Lutibacter maritimus
  REGION 1..224: note = tr|A0A1I6SRX6|A0A1I6SRX6_9FLAO GTP cyclohydrolase 1; OS = Lutibacter maritimus OX=593133 GN=folE PE=3 SV=1
MKTTTTNNFDLITIDEIGDNHLYTTLETPMKKNAHKLSDTEKKETISYLFREIMDVLGLDLTDDSLKGTPDRVAKMYVDEIFAGLNPKNKPKIALFDNKYQYNQMLVEKNITFYSNCEHHFVPIFGKVHIAYISSGKVIGLSKLNRIVQYFALRPQVQERMTMQIGKELQEILQTDDVAVIVDAKHLCVASRGIKDDTSATVTTFYGGAFNNQQKIAELQNYLQ

SEQ ID NO: 10102 - protein, 233 aa, unidentified
  source 1..233: note = Lutibacter oceani
  REGION 1..233: note = tr|A0A3D9RJ02|A0A3D9RJ02_9FLAO GTP cyclohydrolase 1; OS = Lutibacter oceani OX=1853311 GN=folE PE=3 SV=1
MKHQETLLKFPINGTKLNGFTFDEIGDDHLYTGIETPLTADAFDISDEEKKDKIANLFSQIMEVMGLDLTDDSLKGTPKRVAKMYIEEIFSGLNPANKPKIALFENKYKYNQMLVEKNIQFYSNCEHHFVPIFGKVHVAYVSSGKVIGLSKINRIVQYFANRPQVQERLTNQIALELAEILDTKDIAVIVDAKHLCVASRGIKDDSSATVTSYYGGVFNTPEKIVELQNYLKL

SEQ ID NO: 10103 - protein, 228 aa, unidentified
  source 1..228: note = Lutibacter oceani
  REGION 1..228: note = tr|A0A3D9RZZ2|A0A3D9RZZ2_9FLAO GTP cyclohydrolase 1; OS = Lutibacter oceani OX=1853311 GN=folE PE=3 SV=1
MFEGKDIMTNKIDEIGDDHVGSSAKTPLRADAFDISDAEKRDRIEANIRDILDALGMDLEDDSIKGTPRRVAKAFVNELFSGLNPANKPKLSTFDNNYKYGEMLVEKNITVYSTCEHHLLPIVGRAHVAYISNGNVIGLSKMNRIVDYFAKRPQVQERLTMQVVQALQKALGTEDVACVIDAKHLCVNSRGVRDIESSTVTSEFGGKFKDKEVRREFLDYIKMDTDFE

SEQ ID NO: 10104 - protein, 233 aa, unidentified
  source 1..233: note = Lutibacter oricola
  REGION 1..233: note = tr|A0A1H3A8N6|A0A1H3A8N6_9FLAO GTP cyclohydrolase 1; OS = Lutibacter oricola OX=762486 GN=folE PE=3 SV=1
MKHPETLSNIHTSNNVLEGFSLEEIGDDHLYTGLETPLKKDAFELSDNFKKEQIADLFAQIMEVMGLDLTDDSLKGTPKRVAKMYIDEIFSGLNPANKPKIALFDNKYKYNQMLVEKNIQFYSNCEHHFVPIFGKVHVAYVSSGKVIGLSKINRIVKYFANRPQVQERLTNQIAKELENILNTKDIAVIVDAKHLCVASRGIKDDSSATVTSYYGGVFKSQDKIVELQNYLKL

SEQ ID NO: 10105 - protein, 220 aa, unidentified
  source 1..220: note = Lutibacter oricola
  REGION 1..220: note = tr|A0A1H3EV85|A0A1H3EV85_9FLAO GTP cyclohydrolase 1; OS = Lutibacter oricola OX=762486 GN=folE PE=3 SV=1
MNKEQIDIIGDNHISSNVDTPMRANAFEKSNDEKIKNIQHYFGKIMEELGLDLTDDSLSGTPYRVAKMYVKELFYGLNPENKPKLSVFENKYDYKKMLVEQNITIDSACEHHFLPITGHAHIAYIPKDKVVGLSKINRLVDYYSHRPQVQERLSLQILKDLQVTLNTEDVIVMINAKHLCVSSRGIKDKSSFTTTLEYGGCFKEKSFRDDFFKIINQKMI

SEQ ID NO: 10106 - protein, 221 aa, unidentified
  source 1..221: note = Lutibacter profundi
  REGION 1..221: note = tr|A0A0X8G8W7|A0A0X8G8W7_9FLAO GTP cyclohydrolase 1; OS = Lutibacter profundi OX=1622118 GN=folE PE=3 SV=1
MKNRIDELGDDHVGSSAKTPLRADAFDISDQEKLIKIESSVKDILTTLGMDLEDDSLKGTPQRVAKAYVNEIFSGLNPKNRPKLSTFDNNYKYGEMLVEKNITVYSTCEHHLLPIVGRAHVAYISNGNVIGLSKMNRIVDYYAKRPQVQERLTMQVVQALQEALGTEDVACVIDAKHLCVNSRGVRDIESSTVTSEFGGKFKNKEIKREFLDYIKMETDFE

SEQ ID NO: 10107 - protein, 221 aa, Lutibacter sp.
  REGION 1..221: note = tr|A0A2G1XXF7|A0A2G1XXF7_9FLAO GTP cyclohydrolase 1; OS = Lutibacter sp. OX=1925666 GN=folE PE=3 SV=1
MTNKTDEIGDDHIGSSAKTPLRADAFEISDKEKRKRIEASIRDILETLGMDLEDDSLKGTPRRVAKAYVNEIFGGLNPENKPKLSTFDNNYKYGEMLVEKNITVYSTCEHHLLPIVGKAHVAYISNGHVIGLSKMNRIVDYYAKRPQVQERLTMQIVQALQKALGTEDVACVIDAKHLCVNSRGVRDIVSSTVTSEFGGQFKETSKKQEFLDYIKIDTDFE

SEQ ID NO: 10108 - protein, 229 aa, Lutibacter sp.
  REGION 1..229: note = tr|A0A559RZA2|A0A559RZA2_9FLAO GTP cyclohydrolase 1; OS = Lutibacter sp. Hel_I_33_5 OX=1566289 GN=folE PE=3 SV=1
MFELNSKMNEERIEEIGENHVGTSATTPLRADAFNISDEEKIDKIQESVKDILETLGMDLTDDSLQGTPKRVAKAFVNELFMGLNPKNMPKASTFDNNYKYGEMLVEKNIVVYSTCEHHLLPIIGRAHVAYISDGKVIGLSKMNRIVEYFSKRPQVQERLTMQVVQSLQEALGTQDVACVIDAKHLCVNSRGIKDIESSTVTAEFGGKFKDRDRKREFLDYLKMDTDFD

SEQ ID NO: 10109 - protein, 215 aa, unidentified
  source 1..215: note = Lutibaculum baratangense
  REGION 1..215: note = tr|V4R8D9|V4R8D9_9RHIZ GTP cyclohydrolase 1; OS = Lutibaculum baratangense AMV1 OX=631454 GN=folE PE=3; SV = 1
MVERSGSKSAEATVHALVPPGERTPLKRPTREEAEAAVRTLIAWTGDDPLREGLLETPKRVTKAFQEFYRGYDDDPVEVLSRTFEDVGGYDDIVLLRDVPFNSHCEHHMVPFIGKAHVAYLPSGRVVGLSKLARVVEIYARRLQTQENLTAQVAATIDEVLKPRGVAVMIESEHMCMTLRGVQKNGSSTVTTMFTGEFRDDRDQKRRFLELVNGR

SEQ ID NO: 10110 - protein, 367 aa, unidentified
  source 1..367: note = Lutimaribacter litoralis
  REGION 1..367: note = tr|A0A521BFZ8|A0A521BFZ8_9RHOB GTP cyclohydrolase FolE2 OS=Lutimaribacter litoralis OX=1010611 GN=folE2 PE=3; SV = 1
MTVHTPEIDRAYSRDDAVQALARLREWAGGASSEELAALDPALARLLRGTNAPDYPDLSREYPQDFTVDAAYKAGLPDLQNGPASLIKGAKRQIQHVGISNFRLPVRFHTRNDGDLTLETSVTGTVSLEAEKKGINMSRIMRSFYKHAEKTFSFEVIEAALEDYKSDLESFDARIQMRFSYPAKVESLRSGLMGYQYYDIALELVESAGQRKKIVHLDYVYSSTCPCSLELSEHARMTRGQLATPHSQRSVARISLVSAPGGDCLWFEDVIDMARAAVPTETQVMVKREDEQAFAELNAANPIFVEDAARLFCAQLQNDPRVGDFRVVASHQESLHSHDAVSILVEGDTFASESIDPRLFTTLFHVG

SEQ ID NO: 10111 - protein, 367 aa, unidentified
  source 1..367: note = Lutimaribacter pacificus
  REGION 1..367: note = tr|A0A1H0BCY5|A0A1H0BCY5_9RHOB GTP cyclohydrolase FolE2 OS=Lutimaribacter pacificus OX=391948 GN=folE2 PE=3; SV = 1
MNIHTPEIDRQPDREDAREALMRLRRWAEGASVEEIADLDPAIARLLPGAGASDYPALSREYPEGFSVDSAYKASLPDMQNGPASLIRGEKQQIQHVGISNFRLPIQYHTRDNGDLTLETSVTGTVSLEADKKGINMSRIMRSFYKHAEKTFSFEVIEAALDDYMSDLESFDARIQMRFSYPVRVPSLRSGLAGYQYYDIALELVESAGVRKKIIHLDYVYSSTCPCSLELSEHARMTRGQLATPHSQRSVARISVELAPGGDCLWFEDLIDMARAAVPTETQVVVKREDEQAFAELNAANPIFVEDAARLFCERLKRDGRVGDFRVIASHQESLHSHDAVSVLTEGATFAAESLDPRLFASLFHVG

SEQ ID NO: 10112 - protein, 366 aa, Lutimaribacter saemankumensis
  REGION 1..366: note = tr|A0A1G8IGG6|A0A1G8IGG6_9RHOB GTP cyclohydrolase FolE2 OS=Lutimaribacter saemankumensis OX=490829 GN=folE2; PE = 3 SV=1
MNIHTPDIDRQPDRDDAREALMRLRQWAEKASAEEISDLDPAIARLLPGAGAAKYPALSREYPDGFTVDTAYKASLPDLQNGPSSLIRGAKQQIQHVGISNFRLPIQYHTRDNGDLTLETSVTGTVSLEADKKGINMSRIMRSFYKHAEKTFSFGVIEAALEDYKTDLESFDARIQMRLSYPVKVPSLRSGLSGYQYYDIALELVERAGVRKKIIHLDYVYSSTCPCSLELSEHARMSRGQLATPHSQRSVARISVELAEGDCLWFEDLIDMAREAVPTETQVMVKREDEQAFAELNAANPIFVEDAARLFCEQLKRDERVGDFRVIASHQESLHSHDAVSVLTEGDTFACESLDPRLFASLFHVG

SEQ ID NO: 10113 - protein, 231 aa, Lyngbya aestuarii
  REGION 1..231: note = tr|U7QQ37|U7QQ37_9CYAN GTP cyclohydrolase 1; OS = Lyngbya aestuarii BL J OX=1348334 GN=folE PE=3 SV=1
MTIASNGNGSKPANGSSPILSRPDRTTSALNDHPIQKQPLTEVSDDQMMEAVRTMLLGVGEDPEREGLLKTPKRVAEAMRFLTSGYNQSLEDLVNEAIFDEGHEEMVLVRDITVFSMCEHHMLPFMGKAHVAYIPNQKVIGLSKLARIVEMYARRLQVQERLTRQIAEAVQGVLDPQGVAVVIEASHMCMVMRGVQKPGSWTVTSAMLGVFQEEQKTREEFLNLIRHQPSF

SEQ ID NO: 10114 - protein, 216 aa, Lyngbya aestuarii
  REGION 1..216: note = tr|U7QHK3|U7QHK3_9CYAN GTP cyclohydrolase 1; OS = Lyngbya aestuarii BL J OX=1348334 GN=folE PE=3 SV=1
MTLANSSPKGNQNGNLPNLKTQSELPVSEEEMRQAVRTLLLGLGENPDREGLKDTPKRVVKALKFLTSGYHQSLDELLNGAVFHEQTDEMVLVRDIDIFSSCEHHILPILGRAHVAYIPDGKVIGLSKVARICEMYARRLQVQERLTAQIADALQGLLNPKGVAVVVEASHMCMVMRGVQKVGSWTSTSAVRGVFAEDAKTRQEFMSLIRHTPSWS

SEQ ID NO: 10115 - protein, 212 aa, Lyngbya confervoides
  REGION 1..212: note = tr|A0A0C1VH57|A0A0C1VH57_9CYAN GTP cyclohydrolase 1; OS = Lyngbya confervoides BDU141951 OX=1574623 GN=folE PE=3; SV = 1
MTLSISRDDMRSGTLKTKAEPPVSDKEMQQAVRTLLLGLGEDPDREGLVDTPKRVVKALKFLTSGYHQSLDELLNGAVFHENTNEMVLVRDIDLFSSCEHHILPILGRAHVAYIPNGKVIGLSKVARICEMYARRLQVQERLTAQIADALEGLLKPQGVAVVVEATHMCMVMRGVQKPGSWTTTSAMRGTFAEDPKTRQEFMSLIRHSPNFH

SEQ ID NO: 10116 - protein, 240 aa, Lyngbya confervoides; identical to SEQ ID NO: 8835
  REGION 1..240: note = tr|A0A0C1Y4L8|A0A0C1Y4L8_9CYAN GTP cyclohydrolase 1; OS = Lyngbya confervoides BDU141951 OX=1574623 GN=folE PE=3; SV = 1

SEQ ID NO: 10117 - protein, 231 aa, Lyngbya sp.
  REGION 1..231: note = tr|A0YRC3|A0YRC3_LYNSP GTP cyclohydrolase 1; OS = Lyngbya sp. (strain PCC 8106) OX=313612 GN=folE PE=3; SV = 1
MTIASNGNGSKPANGSSPILSRPDRTTSALNDHPVQQQPLTEVSDDQMMEAVRTMLLGVGEDPEREGLLKTPKRVADAMRFLTSGYNQSLEDLVNEAIFDEGHEEMVLVRDITVFSMCEHHMLPFMGKAHVAYIPNQKVIGLSKLARIVEMYARRLQVQERLTRQIAEAVQGVLDPQGVAVVIEASHMCMVMRGVQKPGSWTVTSAMVGVFQDEQKTREEFLNLIRHQPSF

SEQ ID NO: 10118 - protein, 127 aa, Lyngbya sp.
  REGION 1..127: note = tr|A0YW76|A0YW76_LYNSP GTP cyclohydrolase 1; OS = Lyngbya sp. (strain PCC 8106) OX=313612 GN=folE PE=3; SV = 1
MLNGAIFHEQTDEMVLVRDIDIFSSCEHHILPILGRAHVAYIPDGKVIGLSKVARICEMYGRRLQVQERLTAQIADALQGLLKPKGVAVVVEASHMCMVMRGVQKVGSWTSTSAVRGVFAEDAKTRQ

SEQ ID NO: 10119 - protein, 189 aa, unidentified
  source 1..189: note = Lysinibacillus acetophenoni
  REGION 1..189: note = tr|A0A285U726|A0A285U726_9BACI GTP cyclohydrolase 1; OS = Lysinibacillus acetophenoni OX=614649 GN=folE PE=3 SV=1
MSNVDLMKIQEAIKMILDAVGEDVNREGLLDTPKRVAKMYEEMFSGIGQDPKEFFSTVFHEDHEELVLVKDIPFYSMCEHHLVPFYGKAHIAYIPRDGRVAGLSKLGRCVESVARRPQLQERITSTVADSIMEMLTPHGVYVVIEAEHMCMTMRGLKKPGSKTVTSVARGIFETDDAKRNEVISFIQMS

SEQ ID NO: 10120 - protein, 189 aa, Lysinibacillus boronitolerans
  REGION 1..189: note = tr|A0A0A3J204|A0A0A3J204_9BACI GTP cyclohydrolase 1; OS = Lysinibacillus boronitolerans JCM 21713 = 10a = NBRC 103108 OX=1294264 GN=folE PE=3 SV=1
MSNIDLLKIEEAVKMILEAVGEDVNREGLLDTPKRVAKMYAEMFSGLHEDAKDYFKTVFHEEHEELVLVKDIPFYSMCEHHLVPFYGKAHVAYIPNDGVVAGLSKLGRAVETIARRPQLQERITSSVADTIMEMLAPKGVYVVIEAEHMCMTMRGLKKPGSKTVTSVARGIYEEDEVKRREVLSFIQMS

SEQ ID NO: 10121 - protein, 189 aa, unidentified
  source 1..189: note = Lysinibacillus chungkukjangi
  REGION 1..189: note = tr|A0A318TG28|A0A318TG28_9BACI GTP cyclohydrolase 1; OS = Lysinibacillus chungkukjangi OX=1202712 GN=folE PE=3; SV = 1
MSKVNLEKIEEAVKMILEAVGEDVDREGLLDTPKRVSKMYAEMFSGINQDPREFFSTVFHENHDELVLVKDIPFYSMCEHHLVPFYGKAHVAYLPQGGRVAGLSKLGRCVESVARRPQLQERITSTVADTIMEMLEPIGVYVVIEAEHMCMTMRGLKKPGAKTITSVARGVYAEDEVLRREVISFIQMS

SEQ ID NO: 10122 - protein, 189 aa, unidentified
  source 1..189: note = Lysinibacillus composti
  REGION 1..189: note = tr|A0A3N9UDH8|A0A3N9UDH8_9BACI GTP cyclohydrolase 1; OS = Lysinibacillus composti OX=720633 GN=folE PE=3 SV=1
MSKVDLNKIEEAVKMILEAVGEDTTREGLQDTPTRVAKMYAEMFSGINEDPREFFSTVFHEEHEELVLVKDIPFYSMCEHHLVPFYGKAHVAYIPHDGKVAGLSKLGRCVESVARRPQLQERITSTVADTLMEMLQPFGVYVVIEAEHMCMTMRGLKKPGSKTVTSVARGVFEEDEVKRREVISFIQMS

SEQ ID NO: 10123 - protein, 189 aa, unidentified
  source 1..189: note = Lysinibacillus contaminans
  REGION 1..189: note = tr|A0A0M8QAG8|A0A0M8QAG8_9BACI GTP cyclohydrolase 1; OS = Lysinibacillus contaminans OX=1293441 GN=folE PE=3 SV=1
MSNVDIKKIEDAVKMILEAVGEDINREGLLDTPKRVAKMYAEMFSGLHEDAKDYFKTVFHEDHEELVLVKDIPFYSMCEHHLVPFYGKAHVAYIPEGGVVAGLSKLGRAVETIARRPQLQERITSSVADTIMEMLSPKGVYVVIEAEHMCMTMRGLKKPGAKTVTSVARGVYAEDEVKRREVLSFIQMS

SEQ ID NO: 10124 - protein, 189 aa, unidentified
  source 1..189: note = Lysinibacillus endophyticus
  REGION 1..189: note = tr|A0A494Z156|A0A494Z156_9BACI GTP cyclohydrolase 1; OS = Lysinibacillus endophyticus OX=1978490 GN=folE PE=3 SV=1
MSNVDLNKIEEAVKMILEAVGEDVNREGLLDTPSRVAKMYEEMFSGLNEDPREYFSTVFNENHDELVLVKDIPFYSMCEHHLVPFYGKAHVAYLPKEGKVAGLSKLGRCLESVARRPQLQERITATVADSIMEMLDPYGVYVVVEAEHMCMTMRGLKKPGSKTVTSAARGVYETDDVLRREVISFIQMS

SEQ ID NO: 10125 - protein, 189 aa, Lysinibacillus fusiformis
  REGION 1..189: note = tr|A0A1E4R583|A0A1E4R583_9BACI GTP cyclohydrolase 1; OS = Lysinibacillus fusiformis OX=28031 GN=folE PE=3 SV=1
MSNIDLLKIEEAVKMILEAVGEDVNREGLLDTPKRVAKMYAEMFSGLHEDAKDYFRTVFHEDHEELVLVKDIPFYSMCEHHLVPFYGKAHVAYIPNDGIVAGLSKLGRAVETIARRPQLQERITSSVADTIMEMLAPKGVYVVIEAEHMCMTMRGLKKPGSKTVTSVARGVYEHDEVKRREVLSFIQMS

SEQ ID NO: 10126 - protein, 189 aa, Lysinibacillus fusiformis
  REGION 1..189: note = tr|D7WYI8|D7WYI8_9BACI GTP cyclohydrolase 1; OS = Lysinibacillus fusiformis ZC1 OX=714961 GN=folE PE=3; SV = 1
MSNIDLLKIEEAVKMILEAVGEDVNREGLLDTPKRVAKMYAEMFSGLHEDAKDYFKTVFHEDHEELVLVKDIPFYSMCEHHLVPFYGKAHVAYIPNDGVVAGLSKLGRAVETIARRPQLQERITSSVADTIMEMLSPKGVYVVIEAEHMCMTMRGLKKPGSKTVTSVARGIYEKDEVKRREVLSFIQMS

SEQ ID NO: 10127 - protein, 189 aa, unidentified
  source 1..189: note = Lysinibacillus halotolerans
  REGION 1..189: note = tr|A0A3M8HER1|A0A3M8HER1_9BACI GTP cyclohydrolase 1; OS = Lysinibacillus halotolerans OX=1368476 GN=folE PE=3 SV=1
MSKVNLQKIEEAVKMILEAVGENVDREGLLDTPKRVSKMYEEMFSGINEDPREFFSTVFHEDHEDLVLVKDIPFYSMCEHHLVPFYGKAHIAYLPKDGRVAGLSKLGRCVESVARRPQLQERITSTVADSIMEMLQPQGVYVVVEAEHMCMTMRGLKKPGSKTVTSVARGVYEEDEVLRREVISFIQMS

SEQ ID NO: 10128 - protein, 189 aa, Lysinibacillus macroides
  REGION 1..189: note = tr|A0A0M9DLV7|A0A0M9DLV7_9BACI GTP cyclohydrolase 1; OS = Lysinibacillus macroides OX=33935 GN=folE PE=3 SV=1
MSNIDLLKIEEAVKMILEAVGEDINREGLLDTPKRVAKMYAEMFSGLHEDAKDYFKTVFHEDHEELVLVKDIPFYSMCEHHLVPFYGKAHVAYIPNDGVVAGLSKLGRAVETIARRPQLQERITSSVAETIMEMLAPKGVYVVIEAEHMCMTMRGLKKPGSKTVTSVARGIYEEDEVKRREVLSFIQMS

SEQ ID NO: 10129 - protein, 282 aa, Lysinibacillus macroides
  REGION 1..282: note = tr|A0A0M9DL57|A0A0M9DL57_9BACI GTP cyclohydrolase FolE2 OS=Lysinibacillus macroides OX=33935 GN=folE2 PE=3; SV = 1
MNHKLKTLFHSDEAFLNQQEGLKDVQQQKGNFEFDIQEVGISNVKLPIILKEQERLQTPLATIKLTTSLKSNERGTHMSRLIQNLELYLAKPLTLPLVKELVQQIARSLAQERVDLAIDFPWVFDTTSPVMQLTSTQHANLQLNISYDSPQTMELWVVMKIGVTTLCPCSKEISMYGAHNQRGFITMQAKVDETAISDNWKHDLKNIALSNASAPIYNVLKREDEKFVTEEAYQNPRFVEDLARLVAADLEEVHWIKHYKVTCENEESIHLHNAIAVIESNK

SEQ ID NO: 10130 - protein, 189 aa, unidentified
  source 1..189: note = Lysinibacillus manganicus
  REGION 1..189: note = tr|A0A0A3IXK7|A0A0A3IXK7_9BACI GTP cyclohydrolase 1; OS = Lysinibacillus manganicus DSM 26584 OX=1384049 GN=folE; PE = 3 SV=1
MSNVDLKKIEEAVKMILEAVGEDVEREGLLDTPKRVSKMYEEMFSGIHQDPREFFSTVFHEDHEELVLVKDIPFHSMCEHHLVPFYGKAHVAYIPRDGRVAGLSKLGRCVEAVARRPQLQERITSTVADSLMEMLTPYGVYVVIEAEHMCMTMRGLKKPGSKTVTSVARGIFETDDVKRKEVISFIQMS

SEQ ID NO: 10131 - protein, 189 aa, unidentified
  source 1..189: note = Lysinibacillus mangiferihumi
  REGION 1..189: note = tr|A0A4U2Z1J8|A0A4U2Z1J8_9BACI GTP cyclohydrolase 1; OS = Lysinibacillus mangiferihumi OX=1130819 GN=folE PE=3; SV = 1
MSNVDLLKIEQAVKMILEAVGEDVNREGLLDTPKRVAKMYAEMFSGLHEDAKDYFKTVFHEDHEELVLVKDIPFYSMCEHHLVPFYGKAHVAYIPNDGIVAGLSKLGRAVETIARRPQLQERITSSVADTIMEMLSPKGVYVVIEAEHMCMTMRGLKKPGSKTVTSVARGIYEQDEVKRREVLSFIQMS

SEQ ID NO: 10132 - protein, 189 aa, unidentified
  source 1..189: note = Lysinibacillus massiliensis
  REGION 1..189: note = tr|A0A0A3J044|A0A0A3J044_9BACI GTP cyclohydrolase 1; OS = Lysinibacillus massiliensis 4400831 = CIP 108448 = CCUG 49529 OX=1211035 GN=folE PE=3 SV=1
MSKVDLQKIEEAVKMILEAVGEDVNREGLLDTPKRVSKMYEEMFSGIGEDPREYFSTVFHEDHEELVLVKDIPFYSMCEHHLVPFYGKAHIAYIPRDGRVAGLSKLGRCVESVARRPQLQERITSTVADSIMEMLTPYGVYVVIEAEHMCMTMRGLKKPGSKTVTSAARGIFENDENKRREVISFIQMS

SEQ ID NO: 10133 - protein, 185 aa, unidentified
  source 1..185: note = Lysinibacillus massiliensis
  REGION 1..185: note = tr|A0A0A3IZZ0|A0A0A3IZZ0_9BACI GTP cyclohydrolase 1; OS = Lysinibacillus massiliensis 4400831 = CIP 108448 = CCUG 49529 OX=1211035 GN=folE PE=3 SV=1
MDNQIIEDAMRTILNELGEDIHREGLLDTPKRVAKMYREVFQGVGIDPEIALTTTFAEDYEGIVTVKDITFYTFCEHHIIPFFGKAHIGYIPNGRVVGLSKFARLVELTSQRPQVQERMTTQIANAIENVLQPKGVIVTLEAEHLCMCARGVKKPGTKTVTTIKKGLFASDVSLCEEFERSISRD

SEQ ID NO: 10134 - protein, 189 aa, unidentified
  source 1..189: note = Lysinibacillus odysseyi
  REGION 1..189: note = tr|A0A0A3IQ12|A0A0A3IQ12_9BACI GTP cyclohydrolase 1; OS = Lysinibacillus odysseyi 34hs-1 = NBRC 100172 OX=1220589; GN = folE PE=3 SV=1
MSNVDLKKIEEAVKMILEAVGEDVNREGLLDTPKRVSKMYAEMFSGLQEDPREYFSTVFHEDHEELVLVKDIPFYSMCEHHLVPFYGKAHIAYVPSDGKVAGLSKLGRCVESVARRPQLQERITSTVADAIMEMLNPKGVYVIVEAEHMCMTMRGLKKPGAKTVTSAARGIYETDDVKRSEIISFIQMS

SEQ ID NO: 10135 - protein, 189 aa, unidentified
  source 1..189: note = Lysinibacillus saudimassiliensis
  REGION 1..189: note = tr|A0A078MJB1|A0A078MJB1_9BACI GTP cyclohydrolase 1; OS = Lysinibacillus saudimassiliensis OX=1461583 GN=folE; PE = 3 SV=1
MSKVDLPKIEEAVKMILEAVGEDVNREGLLDTPKRVAKMYAEMFSGLHEDARDYFQTVFHENHEELVLVKDIPFYSMCEHHLVPFYGKAHVAYIPQDGVVAGLSKLGRAVETIARRPQLQERITSSVAEVIMETLGAKGVYVIIEAEHMCMTMRGLKKPGAKTVTSVARGVYEQDDVLRREVVSFIQMS

SEQ ID NO: 10136 - protein, 189 aa, unidentified
  source 1..189: note = Lysinibacillus sinduriensis
  REGION 1..189: note = tr|A0A0A3HUZ8|A0A0A3HUZ8_9BACI GTP cyclohydrolase 1; OS = Lysinibacillus sinduriensis BLB-1 = JCM 15800; OX = 1384057 GN=folE PE=3 SV=1
MSKVDLEKIEEAVKMILEAVGEDVEREGLLDTPQRVSKMYAEMFSGIDEDPREFFSTVFHENHEELVLVKDIPFYSMCEHHLVPFYGKAHIAYLPQGGKVAGLSKLGRCVESVARRPQLQERITSTVADTLMEMLEPYGVYVVIEAEHMCMTMRGLKKPGSKTVTSVARGVYAENDVLRREVISFIQMS

SEQ ID NO: 10137 - protein, 189 aa, Lysinibacillus sp.
  REGION 1..189: note = tr|A0A0B1YAC1|A0A0B1YAC1_9BACI GTP cyclohydrolase 1; OS = Lysinibacillus sp. A1 OX=1571920 GN=folE PE=3 SV=1
MSNIDLLKIEEAVKMILEAVGEDVNREGLLDTPKRVAKMYAEMFSGLHEDAKDYFRTVFHEDHEELVLVKDIPFYSMCEHHLVPFYGKAHVAYIPNDGIVAGLSKLGRAVETIARRPQLQERITSSVADTIMEMLAPKGVYVVIEAEHMCMTMRGLKKPGSKTVTSVARGVYEQDEVKRREVLSFIQMS

SEQ ID NO: 10138 - protein, 189 aa, Lysinibacillus sp.
  REGION 1..189: note = tr|A0A4R7UA48|A0A4R7UA48_9BACI GTP cyclohydrolase 1; OS = Lysinibacillus sp. YR326 OX=1855296 GN=folE PE=3 SV=1
MSNVDLLKIEEAVKMILEAVGEDVNREGLLDTPKRVAKMYAEMFSGLHEDAKDYFKTVFHEDHEELVLVKDIPFYSMCEHHLVPFYGKAHVAYIPNDGIVAGLSKLGRAVETIARRPQLQERITSSVAETIMEMLSPKGVYVVIEAEHMCMTMRGLKKPGSKTVTSVARGIYEEDEVKRREVLSFIQMS

SEQ ID NO: 10139 - protein, 189 aa, Lysinibacillus sphaericus
  REGION 1..189: note = sp|B1HTA3|GCH1_LYSSC GTP cyclohydrolase 1; OS = Lysinibacillus sphaericus (strain C3-41) OX=444177; GN = folE PE=3 SV=1
MSNIDLLKIEEAVKMILEAVGEDVNREGLLDTPKRVAKMYAEMFSGLHEDAKDYFRTVFHEDHEELVLVKDIPFYSMCEHHLVPFYGKAHVAYIPNDGIVAGLSKLGRAVETIARRPQLQERITSSVADTIMEMLAPKGVYVVIEAEHMCMTMRGLKKPGSKTVTSVARGVYEEDEVKRREVLSFIQMS

SEQ ID NO: 10140 - protein, 189 aa, Lysinibacillus sphaericus; identical to SEQ ID NO: 10131
  REGION 1..189: note = tr|A0A2S0K2K1|A0A2S0K2K1_LYSSH GTP cyclohydrolase 1; OS = Lysinibacillus sphaericus OX=1421 GN=folE PE=3 SV=1

SEQ ID NO: 10141 - protein, 189 aa, unidentified; identical to SEQ ID NO: 10131
  source 1..189: note = Lysinibacillus tabacifolii
  REGION 1..189: note = tr|A0A4V5TI27|A0A4V5TI27_9BACI GTP cyclohydrolase 1; OS = Lysinibacillus tabacifolii OX=1173107 GN=folE PE=3 SV=1

SEQ ID NO: 10142 - protein, 189 aa, unidentified
  source 1..189: note = Lysinibacillus telephonicus
  REGION 1..189: note = tr|A0A3S0JPY6|A0A3S0JPY6_9BACI GTP cyclohydrolase 1; OS = Lysinibacillus telephonicus OX=1714840 GN=folE PE=3 SV=1
MSEVNLKKIEEAVKMILEAVGEDVNREGLIDTPKRVSKMYEEMFSGINEDPREFFSTVFHEEHEEVVLVKDIPFYSMCEHHLVPFYGKAHVAYIPKDGRVAGLSKLGRCVESVARRPQLQERITSTVADSIMEMLQPHGVYVVVEAEHMCMTMRGLKKPGSKTITSAARGNYENDDVLRREVISLIQMS

SEQ ID NO: 10143 - protein, 189 aa, unidentified; identical to SEQ ID NO: 10131
  source 1..189: note = Lysinibacillus varians
  REGION 1..189: note = tr|X2GJT9|X2GJT9_9BACI GTP cyclohydrolase 1; OS = Lysinibacillus varians OX=1145276 GN=folE PE=3 SV=1

SEQ ID NO: 10144 - protein, 189 aa, Lysinibacillus xylanilyticus
  REGION 1..189: note = tr|A0A0K9FF09|A0A0K9FF09_9BACI GTP cyclohydrolase 1; OS = Lysinibacillus xylanilyticus OX=582475 GN=folE PE=3 SV=1
MSNIDLLKIEEAVKMILEAVGEDVNREGLLDTPKRVAKMYAEMFSGLHEDAKDYFKTVFHEDHEELVLVKDIPFYSMCEHHLVPFYGKAHVAYIPNDGIVAGLSKLGRAVETIARRPQLQERITSSVAETIMEMLSPKGVYVVIEAEHMCMTMRGLKKPGSKTVTSVARGIYEEDEVKRREVLSFIQMS

SEQ ID NO: 10145 - protein, 189 aa, Lysinibacillus xylanilyticus; identical to SEQ ID NO: 10138
  REGION 1..189: note = tr|A0A2M9Q187|A0A2M9Q187_9BACI GTP cyclohydrolase 1; OS = Lysinibacillus xylanilyticus OX=582475 GN=folE PE=3 SV=1

SEQ ID NO: 10146 - protein, 189 aa, unidentified
  source 1..189: note = Lysinibacillus xyleni
  REGION 1..189: note = tr|A0A285TDS9|A0A285TDS9_9BACI GTP cyclohydrolase 1; OS = Lysinibacillus xyleni OX=614648 GN=folE PE=3 SV=1
MSKVDLNKIEEAVKMILEAVGEDVDREGLLDTPSRVAKMYEEMFSGLNEDPREFFSTVFNENHDELVLVKDIPFYSMCEHHLVPFYGKAHIAYLPKEGKVAGLSKLGRCLESVARRPQLQERITATVADSIMEMLDPYGVYVVVEAEHMCMTMRGLKKPGSKTVTSAARGIYETEDVLRREVISFIQMS

SEQ ID NO: 10147 - protein, 188 aa, unidentified
  source 1..188: note = Lysinimicrobium mangrovi
  REGION 1..188: note = tr|A0A1H6YQI6|A0A1H6YQI6_9MICO GTP cyclohydrolase 1; OS = Lysinimicrobium mangrovi OX=1043493 GN=folE PE=3 SV=1
MAVDEPRIEAAVREILAAVGEDPDRDGLKDTPSRVARAYAEFFQGLHQDPADVLSAVFELGHEEMILVKDIELYSMCEHHLVPFHGVAHVAYIPGADGRITGLSKLARLVDVFAKRPQVQERLTTQVADALVDELGARGVIVVVEAEHLCMSMRGVRKPGSRTVTSAVRGIMRDAATRAEAMSLIVGK

SEQ ID NO: 10148 - protein, 195 aa, unidentified
  source 1..195: note = Lysinimonas sp.
  REGION 1..195: note = tr|A0A387B5J0|A0A387B5J0_9MICO GTP cyclohydrolase 1; OS = Lysinimonas sp. 2DFWR-13 OX=2419774 GN=folE PE=3 SV=1
MSIDSGRIEAAVVELLHAIGEDPARPGLVATPRRIAESYAELFAGVDEDPLVHLADAAEFTAGDAVGELVLVRDIAFRSTCEHHLLPFTGVAHLAYLPAGRIVGLGKLARVVETLSSRPQLQERLTDQIADTLERGLEPRGVLVVMDARHGCVTARGTRQADSTTVTVAGRGALADPGAQAGVLALIGAGGGGSA

SEQ ID NO: 10149 - protein, 200 aa, unidentified
  source 1..200: note = Lysinimonas sp.
  REGION 1..200: note = tr|A0A5C1Y8A6|A0A5C1Y8A6_9MICO GTP cyclohydrolase 1; OS = Lysinimonas sp. KACC 19322 OX=2592654 GN=folE PE=3 SV=1
MPIDSKRIEAAVVELLRAIGEDPARPGLAQTPERIAASYGELFAGLDEDPLEHLADAEEFTGEADGLGDLVLVRDISFRSTCEHHLLPFVGVAHLAYVPGERIVGLGKLARVVETLSSRPQLQERLTEQIADALDQGLAPRGALVVLDARHGCVSARGTRQVDSTTVTVASRGTLAEPAAQAGVLALIGSGIGAGAAGTP

SEQ ID NO: 10150 - protein, 311 aa, unidentified
  source 1..311: note = Lysobacter aestuarii
  REGION 1..311: note = tr|A0A508AFI3|A0A508AFI3_9GAMM GTP cyclohydrolase FolE2 OS=Lysobacter aestuarii OX=1706195 GN=folE2 PE=3 SV=1
MKPASASARHLPDVAHEAAAEARPLDWVGMANIALPLRVAAAGGEPIQVAASVDVGVNLKDPDARGIHMSRLYLHLQDAFASEIVTPAGLRRILQSLVASQKGLSTSARLVIRHDQMLLRPALASGNAGWKRYPVEIDAHLVDGHLRLGLAFSVEYSSTCPASAALSRQLNAERFNADFADARPISVGVVGDWLASERGLAATPHAQRSRASVRIQLRPQFEELPLANLIDALEQALGTPVQTAVKREDEQAFAALNAANLMFCEDAARRVASVLAHDPHVEHFDAEVEHYESLHPHDAVARISGQGPAVD

SEQ ID NO: 10151 - protein, 196 aa, unidentified
  source 1..196: note = Lysobacter aestuarii
  REGION 1..196: note = tr|A0A508AT08|A0A508AT08_9GAMM GTP cyclohydrolase 1; OS = Lysobacter aestuarii OX=1706195 GN=folE PE=3 SV=1
MADSRKPTREQAEAAVRTLLSWAGDDPGREGLADTPKRVVKAYSDWFSGYETDPAEYLKRTFEEVEGYDEMIVLRDIEFESHCEHHMAPIIGKAHVGYLPDGKVVGISKLARVVESFARRLQVQEKMTAQIAQVIQDVLQPRGVGVVIVGAHECMTTRGVHKRGVSMITSKMLGSFRDDARTRAEFLQFIDVGPGR

SEQ ID NO: 10152 - protein, 197 aa, Lysobacter antibioticus
  REGION 1..197: note = tr|A0A0S2DUG6|A0A0S2DUG6_9GAMM GTP cyclohydrolase 1; OS = Lysobacter antibioticus OX=84531 GN=folE PE=3 SV=1
MADNDSKPSREQAEAAVRTLLSWAGEDPAREGLLDTPKRVVEAYGDWFSGYGDDPREYLARTFEEVAGYDEMIVLRDIEFESHCEHHMAPIIGKAHVGYLPSGKVVGISKLARVVETYARRFQVQEKMTAQIAQSIQDVLQPLGVGVVIEGAHECMTTRGVHKRGVSMITSKMLGMFRDDARTRAEFLRFIDVGPGR

SEQ ID NO: 10153 - protein, 313 aa, Lysobacter antibioticus
  REGION 1..313: note = tr|A0A0S2FCZ9|A0A0S2FCZ9_9GAMM GTP cyclohydrolase FolE2 OS=Lysobacter antibioticus OX=84531 GN=folE2 PE=3; SV = 1
MNPPNTPSALKPVLPDVAFDAAAAARPLDWVGMSNIALPLRIAAADGGSIQVAASVDVSVNLRDADARGIHMSRMYLHLQNAFASETVTPAGLRRVLQSLVDGQGGISSAARLVLRYEQLLLRPALASHNAGWKRYPVEIDARLLDGHLHLGLRFAIEYSSTCPASAALSRQLNAERFADDFAAAHPLSTAVVSDWLASERGLAATPHAQRSRADVRVELRPAFDEVPLVALIDAIEQALGTPVQTAVKREDEQAFARLNAENLMFCEDAARRVAAALSHDKRIERFDAQIAHFESLHAHDAVARVTGQGARD

SEQ ID NO: 10154 - protein, 196 aa, unidentified
  source 1..196: note = Lysobacter arseniciresistens
  REGION 1..196: note = tr|A0A0A0ESY8|A0A0A0ESY8_9GAMM GTP cyclohydrolase 1; OS = Lysobacter arseniciresistens ZS79 OX=913325 GN=folE; PE = 3 SV=1
MADPTRPTREDAESAVRTLLRWAGEDPAREGLLDTPKRVAKAYQDWFSGYALDPDDYLARTFEEVCGYDELIVLRDIEFESHCEHHMAPIIGKAHVGYLPDGKVVGISKLARVVDAYSRRFQVQEKMTSQIADCIQRVLQPRGVGVVIEGAHECMTTRGVHKRGVSMITSKMLGSFREDARTRAEFLQFIDVGPGR

SEQ ID NO: 10155 - protein, 309 aa, unidentified
  source 1..309: note = Lysobacter arseniciresistens
  REGION 1..309: note = tr|A0A0A0EYP2|A0A0A0EYP2_9GAMM GTP cyclohydrolase FolE2 OS=Lysobacter arseniciresistens ZS79 OX=913325; GN = folE2 PE=3 SV=1
MNTSPNAPRRLPDVAHDAAALARPLDWVGMSNIAVPLRVAGPAGESIQVAASVDVSVNLLDPDARGIHMSRLYLELQHAFATEVVTPAGLRRVLQTLVDTQSGLSGAARLVLRYDQLLLRPALASGNAGWKRYPVEIDACLVDGHLKLALRFAVEYSSTCPASAALSRQLNADRFAEDFADARPLAGAIHDWLASERGLAATPHAQRSRADVRVELRPAFDELPLTALIDALEQALATPVQTAVKREDEQAFARLNAANLMFCEDAARRVAAVLSDDRRIERFDAEVAHFESLHAHDAVARVTGSGAPA

SEQ ID NO: 10156 - protein, 311 aa, Lysobacter capsici
  REGION 1..311: note = tr|A0A125U029|A0A125U029_9GAMM GTP cyclohydrolase FolE2 OS=Lysobacter capsici AZ78 OX=1444315 GN=folE2 PE=3; SV = 1
MTTSHLPHRSTLPDVAFDAAAAARPLDWVGMANIALPLRIASADGGAIQVAASVDVSVDLRDANARGIHMSRMYLQLQNAFASESLTPAGLRRVLQGLVDGQGGISSAARVVLRYEQLLLRPALASQNAGWKRYPVEIDARLIDGHLQLGLRFSVEYSSTCPASAALSRQLNAERFAADFAAVHPLSTAVVSDWLASERGLAATPHAQRSRADVRVELRPAFDELPLTALIDAIEQALGTPVQTAVKREDEQAFARLNAENLMFCEDAARRVAAALARDPRIERFDAQVSHFESLHAHDAVARVTGEGARD

SEQ ID NO: 10157 - protein, 197 aa, Lysobacter capsici
  REGION 1..197: note = tr|A0A291A7C5|A0A291A7C5_9GAMM GTP cyclohydrolase 1; OS = Lysobacter capsici OX=435897 GN=folE PE=3 SV=1
MADNDNKPSREQAEAAVRVLLSWAGEDPDREGLLDTPKRVVTAYGDWFSGYTDDPREYLARTFEEVAGYDEMIVLRDIEFESHCEHHMAPIIGKAHVGYLPSGKVVGISKLARVVETYARRFQVQEKMTAQIAQSIQDVLQPLGVGVVIEGAHECMTTRGVHKRGVSMITSKMLGMFRDDARTRAEFLRFIDVGPGR

SEQ ID NO: 10158 - protein, 196 aa, Lysobacter concretionis
  REGION 1..196: note = tr|A0A0A0EMR7|A0A0A0EMR7_9GAMM GTP cyclohydrolase 1; OS = Lysobacter concretionis Ko07 = DSM 16239 OX=1122185; GN = folE PE=3 SV=1
MADPDKPTREQAEAAVRTLLSWAGDDPTREGLLDTPKRVAKAYADWFSGYAMDPDEYLARTFEEVAGYDELIVLRDIRFESHCEHHMAPIIGRAHVGYLPDGKVVGISKLARVVDAYARRLQVQEKMTAQIADCIQRVLNPRGVGVVIEATHGCMTTRGVHKRGVSMITSKMLGGFRDDARTRSEFLQFIGSEPRR

SEQ ID NO: 10159 - protein, 197 aa, Lysobacter daejeonensis
  REGION 1..197: note = tr|A0A0A0ESF5|A0A0A0ESF5_9GAMM GTP cyclohydrolase 1; OS = Lysobacter daejeonensis GH1-9 OX=1385517 GN=folE PE=3; SV = 1
MADTPRKPSREEAEAAIRTLLSWAGDDPAREGLIDTPKRVVEAYGDWFSGYGEDPAEYLKRTFEEVEGYDEMIVLRDIEFESHCEHHMAPIIGKAHVGYLPNGKVVGISKLARVVETYARRLQVQEKMTAQIAQVIQDVLQPRGVGVVVEGAHECMTTRGVHKRGVSMITSKMLGTFREDARTRAEFLRFIDVGPGR

SEQ ID NO: 10160 - protein, 208 aa, Lysobacter daejeonensis
  REGION 1..208: note = tr|A0A0A0EWV9|A0A0A0EWV9_9GAMM GTP cyclohydrolase 1; OS = Lysobacter daejeonensis GH1-9 OX=1385517 GN=folE PE=3; SV = 1
MLDARLHSVDSTVPARGPAAGEPRPSRQEAEAAVRTLIRWAGDHPGREGLLDTPARVVRAYEEWFGGYALDPEVILGRHFDRAGYDDVVLLRDIPVRSVCEHHMAAIRGVAHVAYLPGERVVGISKLARLVDAYARRLQIQERLTAEIADTLQHVLQPRGVAVVVQASHDCIASRGVGMHGVAMVTRRLLGRFEQEPYRTDVLAALAV

SEQ ID NO: 10161 - protein, 194 aa, Lysobacter defluvii
  REGION 1..194: note = tr|A0A0A0M749|A0A0A0M749_9GAMM GTP cyclohydrolase 1; OS = Lysobacter defluvii IMMIB APB-9 = DSM 18482 OX=1385515; GN = folE PE=3 SV=1
MSDKHRPSREQAEDAVRTLLAWAGEDPAREGLVDTPRRVVEAYGDWFSGYEIDPDEYMGRTFEEVGGYDEMVVLRDIQFESHCEHHMAPIIGRAHVGYLPHGRVVGISKLARVVDAYARRFQVQEKMTAQIADCIQRALAPRGVGVVIEAAHECMTTRGVHKRGVAMTTSKMLGAFRDDARTRAEFLEFIRGGA

SEQ ID NO: 10162 - protein, 198 aa, Lysobacter dokdonensis
  REGION 1..198: note = tr|A0A0A2WF18|A0A0A2WF18_9GAMM GTP cyclohydrolase 1; OS = Lysobacter dokdonensis DS-58 OX=1300345 GN=folE PE=3; SV = 1
MSDTRNNVSRSQAEDAIRTLLRWSGEDPAREGLIDTPKRVVKAYEDWFSGYALDPDDYLQRTFEEVEGYDELIVLRDIQFESHCEHHMAPIIGRAHVGYLPAGKVVGISKLARVVEAYARRFQVQEKMTAQIAGCIERALHPLGVGVVVEAAHECMTTRGVHKRGVSMVTSTMLGTFREDARTRGEFLQFISVGAGHR

SEQ ID NO: 10163 - protein, 299 aa, Lysobacter dokdonensis
  REGION 1..299: note = tr|A0A0A2WLR0|A0A0A2WLR0_9GAMM GTP cyclohydrolase FolE2 OS=Lysobacter dokdonensis DS-58 OX=1300345 GN=folE2; PE = 3 SV=1
MLPDVAHEAAALARPLDWVGMDRIAVPVRIHDADGQAVQVAADVDVAVDLRDGQARGIHMSRLYLQLQQAFASEAITPGGLRRVLQGFVDSQKGASTRARLHIRYEHLLQRRALASDNVGWKRYPVTIEAELSEGHLHLALGFAVEYSSTCPASAALSRQVNAERFASDFAAARPMSTQVVAEWLASERGLAATPHAQRSRADVRVVLRPAFDELPLLDLVDAVEASLGTPVQTAVKREDEQAFAELNAANLMFCEDAARRVAGALSNDARIERYDIRVAHFESLHPHDAVARVSGTNA

SEQ ID NO: 10164 - protein, 197 aa, Lysobacter enzymogenes
  REGION 1..197: note = tr|A0A0S2DAA9|A0A0S2DAA9_LYSEN GTP cyclohydrolase 1; OS = Lysobacter enzymogenes OX=69 GN=folE PE=3 SV=1
MADTPDKPSREQAEAAVRTLLAWAGEDPSREGLLDTPKRVVTAYGDWFSGYDDDPREYLARTFEEVAGYDEMIVLRDIEFESHCEHHMAPIIGKAHVGYLPSGKVVGISKLARVVETYARRFQVQEKMTAQIAQSIQDVLQPLGVGVVVEGAHECMTTRGVHKRGVSMITSKMLGMFRDDARTRAEFLRFIDVGPGR

SEQ ID NO: 10165 - protein, 311 aa, Lysobacter enzymogenes
  REGION 1..311: note = tr|A0A1H3A7R6|A0A1H3A7R6_LYSEN GTP cyclohydrolase FolE2 OS=Lysobacter enzymogenes OX=69 GN=folE2 PE=3 SV=1
MNTPFVPSRSSLPDVAFDAAAAARPLDWVGMSHIALPLRIAGADGAAIQVPASVDVSVNLRDANARGIHMSRMYLHLQNAFASETVTPAGLRRVLQSLIEGQGGISSAARLVLRYEQLLLRPALASDNAGWKRYPVEIDARLVDGHLHLGLRFAVEYSSTCPASAALSRQLNAERFAADFAAAHPLSTAVVSDWLASERGLAATPHAQRSRADVRVELRPAFDELPLVALIDALETALATPVQTAVKREDEQAFARLNAENLMFCEDAARRVAAALSADPRIERFDAEVAHFESLHAHDAVARVTGQGARE

SEQ ID NO: 10166 - protein, 197 aa, Lysobacter gummosus
  REGION 1..197: note = tr|A0A0S2GE72|A0A0S2GE72_9GAMM GTP cyclohydrolase 1; OS = Lysobacter gummosus OX=262324 GN=folE PE=3 SV=1
MADTPDKPSRDQAEAAVRTLLAWAGEDPAREGLLDTPKRVVEAYGDWFSGYDDDPREYLARTFEEVAGYDEMIVLRDIEFESHCEHHMAPIIGKAHVGYLPNGKVVGISKLARVVETYARRFQVQEKMTAQIAQSIQDVLQPLGVGVVIEGAHECMTTRGVHKRGVSMITSKMLGMFRDDARTRAEFLRFIDVGPGR

SEQ ID NO: 10167 - protein, 300 aa, Lysobacter gummosus
  REGION 1..300: note = tr|A0A0S2G5E0|A0A0S2G5E0_9GAMM GTP cyclohydrolase FolE2 OS=Lysobacter gummosus OX=262324 GN=folE2 PE=3 SV=1
MPDVAFDAAAAARALDWVGMSNIALPLRIAGGDGTPIQVAASVDVSVNLRDANARGIHMSRMYLHLQNAFASETVTPAGLRRALQSLIDGQGGISNAARLVLRYEQLLLRPALASHNAGWKRYPVEIDARLIDGHLHLGLRFAVEYSSTCPASAALSRQLNAERFAADFAAAHPLSTAVVSDWLASERGMAATPHAQRSRADVRVELRPAFDELPLVALIDALERALATPVQTAVKREDEQAFARLNAENLMFCEDAARRVAAALSADARIERFDAEVAHFESLHAHDAVARVTGQGARE

SEQ ID NO: 10168 - protein, 203 aa, unidentified
  source 1..203: note = Lysobacter lycopersici
  REGION 1..203: note = tr|A0A516V656|A0A516V656_9GAMM GTP cyclohydrolase 1; OS = Lysobacter lycopersici OX=1324796 GN=folE PE=3 SV=1
MSDDNNPGDSRNDVTRRQAEDAVRTLLKWAGDDPSREGLLDTPKRVAKAYQDWFSGYALDPDDYMARTFEEVGGYDEMIVLRDIEYESHCEHHMAPIIGKVHVGYLPDGKVVGISKLARVVEAYARRFQVQEKMTAQIANCIQRALNPRGVGVVVEGAHECMTTRGIHKRGVSMVTSKMLGSFREDARTRGEFLRFIEVGNGH

SEQ ID NO: 10169 - protein, 309 aa, unidentified
  source 1..309: note = Lysobacter lycopersici
  REGION 1..309: note = tr|A0A516V3S3|A0A516V3S3_9GAMM GTP cyclohydrolase FolE2 OS=Lysobacter lycopersici OX=1324796 GN=folE2 PE=3; SV = 1
MARMANRNPAQLPDVAGDTVALARPLDWVGMDHIALPVRIPDGQGGQLQVAADIDVAVNLKNADARGIHMSRLYLQLQDGLAREAITPAGLRHLLQDGIASQQGLATQARLHIRYDALLQRPALESGFAGWKRYPVEIEATLADGHLQLALSFAVEYSSTCPASAALSRQANAERFAEDFAAARPLSVGVVRDWLASDRGMAATPHAQRSRAQVHVELKPQFEELPLLALVDALEAALATPVQTAVKREDEQAFARLNAENLMFCEDAARRVASVLANDPRVERYDATVSHFESLHPHDAMARVSGVNA

SEQ ID NO: 10170 - protein, 309 aa, unidentified
  source 1..309: note = Lysobacter maris
  REGION 1..309: note = tr|A0A508BDA8|A0A508BDA8_9GAMM GTP cyclohydrolase FolE2 OS=Lysobacter maris OX=1605891 GN=folE2 PE=3 SV=1
MTPPSSQTRQLPDVAFEAAAEARTLEWVGMSHIALPLRVATPGGEPVQVAASVDVAVSLDDADARGIHMSRLYLRLQDAFASEAVTPAGLRRVLQSLVDSQEGLSSSARLVLRYDQMLLRPALASGNAGWKRYPVEIEALLEDGHLRLSLAFSVEYSSTCPASAALSRQLNAERFVADFADARPISTSVVGDWLASERGLAATPHAQRSRASVRLQLRPQFEELPLAAMIDALEQRLATPVQTAVKRQDEQAFAALNAANLMFCEDAARRVASVLAHDPHVERFEAEVAHFESLHPHDAVARVSGSGPR

SEQ ID NO: 10171 - protein, 196 aa, unidentified
  source 1..196: note = Lysobacter maris
  REGION 1..196: note = tr|A0A2U9TED5|A0A2U9TED5_9GAMM GTP cyclohydrolase 1; OS = Lysobacter maris OX=1605891 GN=folE PE=3 SV=1
MADSDKPTREDAEAAVRTLLRWAGDDPAREGLLDTPKRVVKAYRDWFSGYAEDPADYLKRTFEEVEGYDEMIVLRDIEFESHCEHHMAPIIGKAHVGYLPNGKVVGISKLARVVETYARRLQVQEKMTAQIAQVIQDVLQPRGVGVVVIGAHECMTTRGVHKRGVSMVTSTMLGSFREDARTRAEFLRFIETSTGR

SEQ ID NO: 10172 - protein, 298 aa, unidentified
  source 1..298: note = Lysobacter pythonis
  REGION 1..298: note = tr|A0A3M2HXS0|A0A3M2HXS0_9GAMM GTP cyclohydrolase FolE2 OS=Lysobacter pythonis OX=2483112 GN=folE2 PE=3 SV=1
MSVSRPLPDVAFESAALARPLDWVGMEGIALPLALGGVRVPASIDVAVNLGEAGQRGIHMSRLYLKLQQVLPSARLDDANLRALMRGLIDSQEGIAQRARLVLRFDQLLERPALISANRGWKRYPVELALEAEEDALRAWLRVEVEYSSTCPASAALSRELNAEAFAAEFGEGVVEADAVRDWLASKAGLAATPHAQRSVATVRVALREGFEDLPLQALVDALEAALGTPVQTAVKREDEQAFARANAENLMFCEDAARRVGATLAALPWLAAWEASVAHLESLHAHDAVARLSGRND

SEQ ID NO: 10173 - protein, 193 aa, unidentified
  source 1..193: note = Lysobacter pythonis
  REGION 1..193: note = tr|A0A3M2HT13|A0A3M2HT13_9GAMM GTP cyclohydrolase 1; OS = Lysobacter pythonis OX=2483112 GN=folE PE=3 SV=1
MRHGVSREDAEEAVRTLLRWAGEDPAREGLLDTPKRVVKAYGDWFSGYAIDPDEYLLRTFEEVCGYDEMIVLRDIEYESHCEHHMAPIIGRVHVGYLPSGRVVGISKLARVVDAYARRFQVQEKMTAQIANCIQRALEPAGVAVVVEGAHECMTTRGVHKRGVSMVTSTMLGVFREDARTRKEFLSFIENGRR

SEQ ID NO: 10174 - protein, 197 aa, Lysobacter ruishenii
  REGION 1..197: note = tr|A0A562M0L0|A0A562M0L0_9GAMM GTP cyclohydrolase 1; OS = Lysobacter ruishenii OX=686800 GN=folE PE=3 SV=1
MADTPRKPSREEAEAAIRTLLSWAGDDPGREGLLDTPKRVVEAYGDWFSGYGEDPAEYLKRTFEEVEGYDEMIVLRDIEFESHCEHHMAPIIGKAHVGYLPDGKVVGISKLARVVETYARRLQVQEKMTAQIAQAIQDVLQPRGVAVVVEGSHECMTTRGVHKRGVSMITSTMLGTFREDARTRAEFLRFIDVGSGR

SEQ ID NO: 10175 - protein, 330 aa, Lysobacter ruishenii
  REGION 1..330: note = tr|A0A562LWA4|A0A562LWA4_9GAMM GTP cyclohydrolase FolE2 OS=Lysobacter ruishenii OX=686800 GN=folE2 PE=3 SV=1
MSRVAIPPSIPISLAVTTSINPPRILPDVAFDAAAAARPLDWVGMSNIALPLNVASGTGETLQVAASADVAVNLAKADARGIHMSRLYLELQHAFTGEVLTPAGLRRVLQTLVDTQAGLSSAARLVLRYEHLLLRPALASEHAGWKRYPVEIDARLEDGHLHLGLRFALEYSSTCPASAALSRQINAERFAEDFADARPMSTAVVRDWLASPRGLAATPHAQRSRADVHVALRPAFDELPLGHLIDELERGLATPVQTAVKREDEQAFARLNADNLMFCEDAARRVAAVLSGDPRVERFDATVSHFESLHAHDAVATVAGHGPASASPEG

SEQ ID NO: 10176 - protein, 201 aa, unidentified
  source 1..201: note = Lysobacter silvestris
  REGION 1..201: note = tr|A0A2K1Q173|A0A2K1Q173_9GAMM GTP cyclohydrolase 1; OS = Lysobacter silvestris OX=1645665 GN=folE PE=3 SV=1
MDEPDSPDRRNGVSRNDAEAAVRTLLRWAGDDPTREGLLDTPKRVVKAYGDWFSGYAIDPDDYLQRTFEEVEGYDEMIVLRDIEYESHCEHHMAPIIGRVHVGYLPKGRVVGISKLARVVEAYARRFQVQEKMTAQIAQCIQRALRPQGVAVVVEGAHECMTTRGIHKRGVSMMTSSMLGTFREDARTRNEFLGFIQPGRR

SEQ ID NO: 10177 - protein, 299 aa, unidentified
  source 1..299: note = Lysobacter silvestris
  REGION 1..299: note = tr|A0A2K1Q431|A0A2K1Q431_9GAMM GTP cyclohydrolase FolE2 OS=Lysobacter silvestris OX=1645665 GN=folE2 PE=3; SV = 1
MNLESRKTLMPDVAHETATHARGLDWVGMEGIALPLRLDGDIIAPAIADVFVNLADANARGIHMSRLYLQLQESLANGDVSIARIGDFLQACIVSQNGLSTAARVRLRYDVLLERPALASANAGWRDYPIELEVELDGDGLRAAFTIELQYSSTCPASAALSRQVISEHFLRAFPNGGDAGEIAAWLASPAGMAATPHAQRSVARIRVELANGVDVLPIAVLVDAVERALGTPVQTAVKREDERAFAEANAANLMFCEDAARRVASVVSKMAGCLRYRVQVSHLESLHAHDAVAVVCSK

SEQ ID NO: 10178 - protein, 325 aa, Lysobacter soli
  REGION 1..325: note = tr|A0A3D8V833|A0A3D8V833_9GAMM GTP cyclohydrolase FolE2 OS=Lysobacter soli OX=453783 GN=folE2 PE=3 SV=1
MARLALPRANPTSSAVTTTSTTPRRLPDVAFDAAAAARPLDWVGMSNIALPLRVAGPDGEAITVAASVDVSVDLKDANARGIHMSRMYLQLQNAFASETVTPAGLRRVLQTLVEKQGGISTSARLVLRYEQLLLRRALASDNAGWKRYPVEIDATLRDGHLHLALAFSVEYSSTCPASAALSRQLNAERFAEDFAAARPLSAAVVSEWLASERGLAATPHAQRSRADVRVELRPAFDEVPLAALIDALETALATPVQTAVKREDEQAFARLNAENLMFCEDAARRVAAVLSADARIERFDAQVSHFESLHAHDAVARVTGQGASA

SEQ ID NO: 10179 - protein, 196 aa, Lysobacter soli
  REGION 1..196: note = tr|A0A3D8VA18|A0A3D8VA18_9GAMM GTP cyclohydrolase 1; OS = Lysobacter soli OX=453783 GN=folE PE=3 SV=1
MAQDDKPTRDQAEAAVRTLLRWAGDDPAREGLLDTPKRVAKAYQDWFSGYAEDPADYLMRTFKEVEGYDEMIVLRDIEFESHCEHHMAPIIGKAHVGYLPDGKVVGISKLARVVDAYARRLQVQEKMTAQIAQVIQDVLQPRGVGVVIEGAHECMTTRGVHKRGVSMITSKMLGSFREDARTRAEFLQFIDVGPGR

SEQ ID NO: 10180 - protein, 195 aa, Lysobacter sp.
  REGION 1..195: note = tr|A0A5C8KJF0|A0A5C8KJF0_9GAMM GTP cyclohydrolase 1; OS = Lysobacter sp. Alg18-2.2 OX=2603204 GN=folE PE=3 SV=1
MSKPDSAVTREAAEEAVRTLLRWSGDDPAREGLLDTPRRVVDAYSDWFCGYQVDPSEYLRRTFEEVAGYDEMVVLRDIGFESHCEHHMAPIIGVAHVGYLPTNKVVGISKLARVVEAYARRFQVQEKMTAQVAGCIQEVLQPRGVGVVIEASHQCMTTRGVHKTGVSMVTSQMLGSFREDPSTRAEFLRFIGSRG

SEQ ID NO: 10181 - protein, 196 aa, Lysobacter sp.
  REGION 1..196: note = tr|A0A0D0S3H1|A0A0D0S3H1_9GAMM GTP cyclohydrolase 1; OS = Lysobacter sp. A03 OX=1199154 GN=folE PE=3 SV=1
MADPVRPTREEAEAAVRTLLSWAGDDPAREGLIDTPKRVAKAYADWFSGYAIDPDEYLARTFEEVAGYDELIVLRDIRFESHCEHHMAPIIGRAHVGYLPDGKVVGISKLARVVDAYARRLQVQEKMTAQIADCIQRVLQPRGVGVVIEASHGCMTTRGVHKRGVAMVTSKMMGGFRDDGRTRAEFLQFIGSPSRS

SEQ ID NO: 10182 - protein, 205 aa, Lysobacter spongiicola
  REGION 1..205: note = tr|A0A1T4Q327|A0A1T4Q327_9GAMM GTP cyclohydrolase 1; OS = Lysobacter spongiicola DSM 21749 OX=1122188 GN=folE; PE = 3 SV=1
MAEDPRQHDDLEQPRPTREDAEAAIATLLRWAGDDPSREGLLDTPRRVAKAYTEWFSGYGLDPDAYLARTFEEVAGYDELIVLRDIQFESHCEHHMAPIIGRVHVGYLPDNKVVGISKLARVVEAFSRRLQVQEKMTSQIADCIQRVLQPRGVGVVVEGAHQCMTTRGVYNRGVSMITSKMLGSFREDARTRAEFLQFIDVGPGR

SEQ ID NO: 10183 - protein, 227 aa, unidentified
  source 1..227: note = Lysobacter tolerans
  REGION 1..227: note = tr|A0A1N6RAU4|A0A1N6RAU4_9GAMM GTP cyclohydrolase 1; OS = Lysobacter tolerans OX=1604334 GN=folE PE=3 SV=1
MAACMAIRNQDGLWGCGIPASRYHARMNAPDDNDSRHGVGRTEAEAAVRTLLKWAGEDPTREGLLDTPKRVVKAYGDWFSGYAIDPDEYLSRTFEEVGGYDEMIVLRDIEYESHCEHHMAPIIGKVHVGYLPNGRVVGISKLARVVDAYARRFQVQEKMTAQIANCIQRALMPAGVAVVVEGAHECMTTRGVHKRGVSMVTSSMLGVFREDARTRKEFLSFIEGGRR

SEQ ID NO: 10184 - protein, 302 aa, unidentified
  source 1..302: note = Lysobacter tolerans
  REGION 1..302: note = tr|A0A1N6X2V7|A0A1N6X2V7_9GAMM GTP cyclohydrolase FolE2 OS=Lysobacter tolerans OX=1604334 GN=folE2 PE=3 SV=1
MLMSANRPLPDVAFDAAALSRALDWVGMEGIALPVRLSDRGLQAAARVDVGVNLRDPERRGIHMSRLYLQLQQALPQARLDSLELDGLLVGLIESQQGAADRVQLVLHYDHLLERPALVSQNAGWKRYPVQLRSERGPEGSRHWLSLSVEYSSTCPASAALSRELNAESFLAAFGEGDVDTDAVRDWLAGKDGLAATPHAQRSMAEVEVELADGFDHLPVAALADVLEQALGTPVQTAVKREDEQAFARANAQNLMFCEDAARRVGAALSSLPWVRTWQAKVSHLESLHAHDAVARVAGRND

SEQ ID NO: 10185 - protein, 195 aa, unidentified
  source 1..195: note = Macellibacteroides sp.
  REGION 1..195: note = tr|A0A1C2BRJ7|A0A1C2BRJ7_9PORP GTP cyclohydrolase 1; OS = Macellibacteroides sp. HH-ZS OX=1857568 GN=folE PE=3; SV = 1
MKEVKEETLLKREELALHYSRILDLLGEDVEREGLIKTPERVAKAMQFLTKGYDEDPQKVLSAAMFEEEGYKQMVIVKDIDFFSLCEHHMLPFFGKAHVAYIPNKYITGLSKIPRVVDIFARRLQIQERMTLQIKECIQNTLNPLGVMVVIEAQHMCMQMRGVEKQNSLTTTSDFTGFFQQAKTREEFINLIKNK

SEQ ID NO: 10186 - protein, 292 aa, unidentified
  source 1..292: note = Macrococcus bohemicus
  REGION 1..292: note = tr|A0A4R5Y028|A0A4R5Y028_9STAP GTP cyclohydrolase FolE2 OS=Macrococcus bohemicus OX=1903056 GN=folE2 PE=3; SV = 1
MDQYNLNTREGRWKHFGSVDPIKGSKPTEKEKMTDLQSSKKDFLFEIDHVGIKNLTYPVRLDGYQTAGTFSLSTHLAKDEKGINMSRILESVEAHYDNGLSLDFETLKAVLVTLQTVMHQKDATVDVDAKWFFDRFSPVTNLRAIGHADTRFSMTVEGDAVVNKSLTLTAMVTTLCPCSKEISEYSAHNQRGIVTVKADFAPEGELPDDFKERILEAMEVNASSMLYPILKRTDEKSVTERAYENPRFVEDLLRLIAADLVELEFVEGFTIECRNEESIHQHDAFARLTYKK

SEQ ID NO: 10187 - protein, 292 aa, unidentified
  source 1..292: note = Macrococcus bohemicus
  REGION 1..292: note = tr|A0A328A2R4|A0A328A2R4_9STAP GTP cyclohydrolase FolE2 OS=Macrococcus bohemicus OX=1903056 GN=folE2 PE=3; SV = 1
MDQYNLNTREGRWKHFGSVDPIKGTKPTEKEKMTDLQSSKKDFLFEIDHVGIKNLTYPVRLDGYQTAGTFSLSTHLAKDEKGINMSRILESVEAHYDNGLSLDFETLKAVLVTLQTVMHQKDATVDVDAKWFFDRFSPVTNLRAIGHADTRFSMTVEGDAVVNKSLTLTAMVTTLCPCSKEISEYSAHNQRGIVTVKADFAPEGELPDDFKERILEAMEVNASSMLYPILKRTDEKSVTERAYENPRFVEDLLRLIAADLVELEFVEGFTIECRNEESIHQHDAFARLTYKK

SEQ ID NO: 10188 - protein, 290 aa, Macrococcus bovicus
  REGION 1..290: note = tr|A0A4R6BYH7|A0A4R6BYH7_9STAP GTP cyclohydrolase FolE2 OS=Macrococcus bovicus OX=69968 GN=folE2 PE=3 SV=1
MKEYNLKTREGRWRHFGSVDPIKGTKPTEKELMMDLQSSKKDFLFEIDHVGIKNLTYPVRIGDFQTVGHFSLSTHLAKDEKGINMSRILESVESHYENGLTLDFDTLKKVLITLQTAMKQKNASVEVEGVWFFDRYSPITNLKAVGHADTTFEMTVADEKVISQSLTIKAQVTTLCPCSKEISEYSAHNQRGVVTVKADLTEELPADYKEQMLEAMEINASSMLYPILKRTDEKSVTERAYENPRFVEDLLRLIAADLVELPFITGFEIECRNEESIHQHDAFARLKYSK

SEQ ID NO: 10189 - protein, 290 aa, Macrococcus brunensis
  REGION 1..290: note = tr|A0A4R6BDW7|A0A4R6BDW7_9STAP GTP cyclohydrolase FolE2 OS=Macrococcus brunensis OX=198483 GN=folE2 PE=3 SV=1
MKEYNLKTREGRWRHFGSVDPIKGTKPTEKELMMDLQSSKKDFLFEIDHVGIKNLTYPVRIGDFQTVGNFSLSTHLAKDEKGINMSRILESVESHYENGLTLDFDTLKKVLITLQTAMKQKNASVEVEGVWFFDRYSPITNLKAVGHADTTFEMTVADEEVISQSLTIKAQVTTLCPCSKEISEYSAHNQRGVVTVKADLAEELPADYKEQMLEAMEINASSMLYPILKRTDEKSVTERAYENPRFVEDLLRLIAADLVELPFIKGFEIECRNEESIHQHDAFARLKYSK

SEQ ID NO: 10190 - protein, 292 aa, unidentified
  source 1..292: note = Macrococcus canis
  REGION 1..292: note = tr|A0A4R6C4K5|A0A4R6C4K5_9STAP GTP cyclohydrolase FolE2 OS=Macrococcus canis OX=1855823 GN=folE2 PE=3 SV=1
MDQYNLNTREGRWKHFGSVDPIKGTKPTIKEEMTDLQSSKKDFLFEIDHVGIKNLTYPVRLDGYQTAGTFSLSTHLAKDEKGINMSRILESVEAHYDNGLPLDFDTLKAVLITLQTVMHQKDATVDVDAKWFFDRFSPVTNLRAVGHADTRFSMTVEGDTTVHKSLTLTAMVTTLCPCSKEISEYSAHNQRGIVTVKVDFAPEDELPADFKERILEAMEVNASSMLYPILKRTDEKSVTERAYENPRFVEDLLRLIAADLVELDFITGFTIECRNEESIHQHDAFARLTYNK

SEQ ID NO: 10191 - protein, 292 aa, unidentified
  source 1..292: note = Macrococcus canis
  REGION 1..292: note = tr|A0A1W7AEF7|A0A1W7AEF7_9STAP GTP cyclohydrolase FolE2 OS=Macrococcus canis OX=1855823 GN=folE2 PE=3 SV=1
MDQYNLNTREGRWKHFGSVDPIKGTKPTIKEEMTDLQSSKKDFLFEIDHVGIKNLTYPVRLDGYQTAGTFSLSTHLAKDEKGINMSRILESVEAHYDNGLPLDFDTLKAVLITLQTVMHQKDATVDVDAKWFFDRFSPVTNLRAVGHADTRFSMTVEGDTTVNKSLTLTAMVTTLCPCSKEISEYSAHNQRGIVTVKADFAPEDELPADFKERILEAMEVNASSMLYPILKRTDEKSVTERAYENPRFVEDLLRLIAADLVELDFITGFTIECRNEESIHQHDAFARLTYNK

SEQ ID NO: 10192 - protein, 290 aa, Macrococcus carouselicus
  REGION 1..290: note = tr|A0A4R6BHA7|A0A4R6BHA7_9STAP GTP cyclohydrolase FolE2 OS=Macrococcus carouselicus OX=69969 GN=folE2 PE=3; SV = 1
MKEYNLNTREGRWRHFGSVDPVKGTKPTEKERMTDLQSSKKDFLFEIDHVGIKNLTYPVRIGDFQTVGNFSLSTHLAKDEKGINMSRILESVESHYDGGLVLDFATLKKVLITLQTAMKQKEASVEVEGVWFFDRFSPVTNLKAVGHADTVFAMTVADEEVLNQSLTIKAEVTTLCPCSKEISEYSAHNQRGVVTVQADLTEDLPADFKEQMLEAMEINASSMLYPILKRTDEKSVTERAYENPRFVEDLLRLIAADLVELPFIKGFEIECRNEESIHQHDAFARLKYSK

SEQ ID NO: 10193 - protein, 292 aa, Macrococcus caseolyticus
  REGION 1..292: note = sp|B9E8N6|GCH4_MACCJ GTP cyclohydrolase FolE2; OS = Macrococcus caseolyticus (strain JCSC5402) OX=458233; GN = folE2 PE=3 SV=1
MDQYNLNTREGRWKHFGSVDPIKGTKPTEKEKMTDLQSSKKDFLFEIDHVGIKNLTYPVRLDGYQTAGTFSLSTHLAKDEKGINMSRILESVEAHYDNGLSLDFDTLKTVLITLQTVMHQKDATVDVDAKWFFDRFSPVTNLRAIGHADTRFSMTVEGDTTVNKSLTLTAMVTTLCPCSKEISEYSAHNQRGIVTVKADFAPEGELPANFKERILEAMEVNASSMLYPILKRTDEKSVTERAYENPRFVEDLLRLIAADLVELDFVTGFTIECRNEESIHQHDAFARLSYNK

SEQ ID NO: 10194 - protein, 292 aa, Macrococcus caseolyticus
  REGION 1..292: note = tr|A0A3B0ET09|A0A3B0ET09_9STAP GTP cyclohydrolase FolE2 OS=Macrococcus caseolyticus OX=69966 GN=folE2 PE=3; SV = 1
MDQYNLNTREGRWKHFGSVDPIKGTKPTEKEKMTDLQSSKKDFLFEIDHVGIKNLTYPVRLDGYQTAGTFSLSTHLAKDEKGINMSRILESVEAHYDNGLSLDFDTLKTVLITLQTVMHQKDATVDVDAKWFFDRFSPVTNLRAIGHADTRFSMTVEGDTTVNKSLTLTAMVTTLCPCSKEISEYSAHNQRGIVTVKADFAPEGELPVNFKERILEAMEVNASSMLYPILKRTDEKSVTERAYENPRFVEDLLRLIAADLVELDFVTGFTIECRNEESIHQHDAFARLTYNK

SEQ ID NO: 10195 - protein, 292 aa, unidentified
  source 1..292: note = Macrococcus epidermidis
  REGION 1..292: note = tr|A0A327ZS18|A0A327ZS18_9STAP GTP cyclohydrolase FolE2 OS=Macrococcus epidermidis OX=1902580 GN=folE2 PE=3; SV = 1
MDQYNLNTREGRWKHFGSVDPIKGTKPTEKEKMTDLQSSKKDFLFEIDHVGIKNLTYPVRLDGYQTAGTFSLSTHLAKDEKGINMSRILESVEAHYENGLSLDFETLKAVLVTLQTVMHQKDATVDVDAKWFFDRFSPVTNLRAIGHADTRFSMTVEDETTVNKSLTLTAMVTTLCPCSKEISEYSAHNQRGIVTVKADFAPEGELPEDFKERILEAMEVNASSMLYPILKRTDEKSVTERAYENPRFVEDLLRLIAADLVELDFIEGFTIECRNEESIHQHDAFARLTYKK

SEQ ID NO: 10196 - protein, 292 aa, unidentified
  source 1..292: note = Macrococcus goetzii
  REGION 1..292: note = tr|A0A4R6CA43|A0A4R6CA43_9STAP GTP cyclohydrolase FolE2 OS=Macrococcus goetzii OX=1891097 GN=folE2 PE=3 SV=1
MDQYNLNTREGRWKHFGSVDPIKGTKPTEKEKMTDLQSSKKDFLFEIDHVGIKNLTYPVLLDGYQTAGTFSLSTHLAKDEKGINMSRILESVEAHYDNGLALDFETLKAVLVTLQTVMHQKDATVDVDAKWFFDRFSPVTNLRAIGHADTRFSMTVEDETTVNKSLTLTAMVTTLCPCSKEISEYSAHNQRGIVTVKADFAPEGELPEDFKERILEAMEVNASSMLYPILKRTDEKSVTERAYENPRFVEDLLRLIAADLVELDFIEGFTIECRNEESIHQHDAFARLTYKK

SEQ ID NO: 10197 - protein, 292 aa, unidentified
  source 1..292: note = Macrococcus goetzii
  REGION 1..292: note = tr|A0A2G5NT28|A0A2G5NT28_9STAP GTP cyclohydrolase FolE2 OS=Macrococcus goetzii OX=1891097 GN=folE2 PE=3 SV=1
MDQYNLNTREGRWKHFGSVDPIKGTKPTEKEKMTDLQSSKKDFLFEIDHVGIKNLTYPVRLDGYQTAGTFSLSTHLAKDEKGINMSRILESVEAHYDNGLALDFETLKAVLVTLQTVMHQKDATVDVDAKWFFDRFSPVTNLRAIGHADTRFSMTVEDETTVNKSLTLTAMVTTLCPCSKEISEYSAHNQRGIVTVKADFAPEGELPEDFKERILEAMEVNASSMLYPILKRTDEKSVTERAYENPRFVEDLLRLIAADLVELDFIEGFTIECRNEESIHQHDAFARLTYKK

SEQ ID NO: 10198 - protein, 290 aa, Macrococcus hajekii
  REGION 1..290: note = tr|A0A4R6BIA6|A0A4R6BIA6_9STAP GTP cyclohydrolase FolE2 OS=Macrococcus hajekii OX=198482 GN=folE2 PE=3 SV=1
MNEYNLNTREGRWRHFGSVDPIKGTKPTEKELMTDLQSSKKDFLFEIDHVGIKNLTYPVRIGDFQTVGNFSLSTHLAKDEKGINMSRILESVESHYDNGLTLDFDTLKKVLITLQTAMKQKNASVEVEGIWFFNRYSPITNLKAVGHADTTFAMMVADEEIISQSVTIKAQVTTLCPCSKEISEYSAHNQRGVITVKAYLEHSLPTDYKEQILEAMEINASSMLYPILKRTDEKSVTERAYENPRFVEDLLRLIAADLVEIPFIKGFEIECRNEESIHQHDAFARLKYSK

SEQ ID NO: 10199 - protein, 289 aa, Macrococcus lamae
  REGION 1..289: note = tr|A0A4R6BVG1|A0A4R6BVG1_9STAP GTP cyclohydrolase FolE2 OS=Macrococcus lamae OX=198484 GN=folE2 PE=3 SV=1
MDNNLATREGRWKHFGSVDPIKGTKPTEKELMTDLQNSKKDFLFEIDHVGIKNLTYPVRIGDYQTAGTFSLSTHLAQDEKGINMSRILESVEAHYDKGLPLDFDTLKTVLITLQTTMKQRSASVDVSAVWFFDRFSPVTNLKAVGHADVTLSQTVEDETVTEQTVTIQAAVTTLCPCSKEISEYSAHNQRGIVTVKAMLTEAVPDDFKEQLLDAMEANASSMLYPILKRTDEKAVTERAYENPRFVEDLLRLIAADLVELPFVTGFEIECRNEESIHQHDAFARLHYTK

SEQ ID NO: 10200 - protein, 292 aa, Macrococcus sp.
  REGION 1..292: note = tr|A0A4Q1AYI7|A0A4Q1AYI7_9STAP GTP cyclohydrolase FolE2 OS=Macrococcus sp. DPC7161 OX=2507060 GN=folE2 PE=3; SV = 1
MENYNLNTREGRWKHFGSVDPIKGTKPTEKEKMTDLQSSKKDFLFEIDHVGIKNLTYPVRLDGYQTAGTFSLSTHLAKDEKGINMSRILESVEAHYDNGLALDFNTLKDVLVTLQTVMYQKDASVDAQAKWFFDRFSPVTNLRAIGHADATFSLSVEGEKVKHKSLTLTAMVTTLCPCSKEISEYSAHNQRGIVTVKAVFDNESELPENFKERILEAMEVNASSMLYPILKRTDEKSVTERAYENPRFVEDLLRLIAADLVELDFVKGFEIECRNEESIHQHDAFARLRYNL

SEQ ID NO: 10201 - protein, 265 aa, unidentified
  source 1..265: note = Magnetococcus marinus
  REGION 1..265: note = sp|A0L8I1|GCH4_MAGMM GTP cyclohydrolase FolE2; OS = Magnetococcus marinus (strain ATCC BAA-1437 / JCM 17883 / MC-1) OX=156889 GN=folE2 PE=3 SV=2
MNNCQLPLSDVQSRQDHRRLDIDKVGVKNIRYPIVVKDRSVGSQSTTARINMYVNLPHQFKGTHMSRFLEVLAENQRAISIENLPKLLKEVKQRLDAEEAHIELDFPYFITKKAPVSGVEALMDYQVHFSGVMRGNAYQLTLTVEVPVTSLCPCSKEISAYGAHNQRSHVKVSVQFSQFVWIEEVVDLVERNASCELFTILKRPDEKFVTEKAYDNPKFVEDMVRDLADELTHDPRISWFAVESENFESIHNHSAYAFIEGGQRS

SEQ ID NO: 10202 - protein, 269 aa, unidentified
  source 1..269: note = Magnetococcus massalia
  REGION 1..269: note = tr|A0A1S7LH87|A0A1S7LH87_MAGMO GTP cyclohydrolase FolE2 OS=Magnetococcus massalia (strain MO-1) OX=451514; GN = folE PE=3 SV=1
MDNQDTPCASPLCDVQSQQDHRRLPIDKVGIKDIRYPIVVKDRSTGKQHTNATVNMYVNLPHQFKGTHMSRFLEVLAEHDRAISVESLQEMLKAMQQRLDAEEAHIELVFPYFVLKAAPVSGASALMDYQVRFTGVMQGDAYNMTLQVEVPVTSLCPCSKEISQYGAHNQRSIVKVTLQTNAFVWIEEVVDMVEGKASCELYTILKRPDEKYVTEKAYENPRFVEDMVRDLAETLRDDPRVTWFTVESENFESIHNHSAYAFIEGGQRR

SEQ ID NO: 10203 - protein, 277 aa, unidentified
  source 1..277: note = Magnetofaba australis
  REGION 1..277: note = tr|A0A1Y2K5J5|A0A1Y2K5J5_9PROT GTP cyclohydrolase FolE2 OS=Magnetofaba australis IT-1 OX=1434232 GN=folE2; PE = 3 SV=1
MDEKVSNLMPDCCDASADALPDMQASRDTRRLPIDKVGVKGIRHPIVVKDRNRGAQNTVADINMTVNLPHHFKGTHMSRFLEVLADHDDAISVENLPDLLTKVQERLSAHEAHIEMTFPYFMRKEAPVSKQAGLMDYQARFVASKKGDEFLMTLGVDVAVTSLCPCSKEISQYGAHNQRSLVSLNIQSNAFVWIEELIELVEANASCELYAILKRPDEKYVTERAYENPRFVEDMVRDLAEKLDADARITWFSVASENFESIHNHSAYAFIEGGEAR

SEQ ID NO: 10204 - protein, 213 aa, unidentified
  source 1..213: note = Magnetospira sp.
  REGION 1..213: note = tr|W6KFF6|W6KFF6_MAGSQ GTP cyclohydrolase 1; OS = Magnetospira sp. (strain QH-2) OX=1288970 GN=folE PE=3; SV = 1
MNVSTGKNLPREIHGVDLPKPSRDEAEQAVRTLLRWAGDDPTREGLLDTPKRVVRAYEEFFAGYEQDPVEILERTFEETDGYDEMVLLKDIRIESHCEHHMVPIIGRAHVAYMPHKRVVGISKLARVVEVYAKRLQIQEKMTAQIANAINGVLQPQGVAVVIEAAHQCMTTRGVNKPGVTMVTSTMLGIFRENPTTRREFLSMIGNPSSGGCA

SEQ ID NO: 10205 - protein, 219 aa, unidentified
  source 1..219: note = Magnetospirillum caucaseum
  REGION 1..219: note = tr|M2ZSS6|M2ZSS6_9PROT GTP cyclohydrolase 1; OS = Magnetospirillum caucaseum OX=1244869 GN=folE PE=3 SV=1
MSKDASSLTLPKELLPAAQPRLDKPSREEAEEAVRTLLRWAGDDPDREGLVGTPDRVVRAYEEFFSGYDQDPTEILHRTFEETDGYDEMVLLRDIRLESHCEHHVVPIIGKAHVAYLPNRRVVGISKLARVVEIYSRRLQIQEKLTAQIANTINDVLQPKGVAVVIEAAHQCMTTRGIHKPGVTMVTSRMLGAFRDDAATRREFMALIHNQHSGGLSNV

SEQ ID NO: 10206 - protein, 203 aa, Magnetospirillum gryphiswaldense
  REGION 1..203: note = tr|V6F6Q5|V6F6Q5_MAGGM GTP cyclohydrolase 1; OS = Magnetospirillum gryphiswaldense (strain DSM 6361 / JCM 21280 / NBRC 15271 / MSR-1) OX=431944 GN=folE PE=3 SV=1
MNATPGLIVPAPCQISGRPSRAEAESAVRTLIQWAGDDPDREGLVATPDRVVRSYEEFFAGYDQDPVEMLQRTFEETDGYDEMVILRDITLESHCEHHMVPIVGKAHVAYLPDRRVVGISKLARVVEVFSKRLQIQEKLTAQIANTINDVLQPKGVAVIIEAAHQCMTTRGVHKPGVTMVTSRMLGVFRENAATRKEFMSLIR

SEQ ID NO: 10207 - protein, 220 aa, Magnetospirillum gryphiswaldense
  REGION 1..220: note = tr|A4TWP0|A4TWP0_9PROT GTP cyclohydrolase 1; OS = Magnetospirillum gryphiswaldense OX=55518 GN=folE PE=3; SV = 1
MSQEPDVNSHSPLSSRHTEAQSSHRPSREEAEAAVRTLIQWAGDDPDREGLVGTPDRVVRSYEEFFAGYDLDPVEMLKRTFEETDGYDEMVILRDIRLESHCEHHMVPIIGKAHVAYLPDRRVVGISKLARVVEVFSKRLQIQEKLTAQIANTINEVLQPKGVAVIIEAAHQCMTTRGIHKPGVTMVTSRMLGVFRDHPPTRKEFMSLVQGQHGSGLSNA

SEQ ID NO: 10208 - protein, 212 aa, unidentified
  source 1..212: note = Magnetospirillum kuznetsovii
  REGION 1..212: note = tr|A0A364P3W9|A0A364P3W9_9PROT GTP cyclohydrolase 1; OS = Magnetospirillum kuznetsovii OX=2053833 GN=folE PE=3; SV = 1
MTLPKELVPDELSARVRPSRSEAEAAVRTLLRWAGDDPDREGLIGTPDRVVRAYEEFFAGYDQDPTEILHRTFEETDGYDEMVLLRDIRLESHCEHHVVPIIGKAHVAYLPDRRVVGISKLARVVEIYSRRLQIQEKLTAQIANTINDVLQPKGVAVVIEAAHQCMTTRGIHKPGVTMVTSRMLGDFRDNPATRREFMALIHNQHSGGLSNV

SEQ ID NO: 10209 - protein, 290 aa, unidentified
  source 1..290: note = Magnetospirillum magneticum
  REGION 1..290: note = tr|Q2W0Y5|Q2W0Y5_MAGSA GTP cyclohydrolase 1; OS = Magnetospirillum magneticum (strain AMB-1 / ATCC 700264) OX=342108 GN=folE PE=3 SV=1
MAENDAVDLPPEAPAKKPRRKPAPPKEAGGIPIVYRGPEGFVGLNKNDRTGSWEAMCKPEGTTRHVTITLAAKSEEDAKSEAIFALKHDSQHRIHRRPTREDAMEAVKTLIAYSGDNPYREGLRGTPDRVIRAYDEFFAGYHSTAAEVLKTTFAETGSYDEMVTLTDIEFDSHCEHHMVPFTGVVHIAYIPDKTVVGISKLARLVEIYARRLQIQEKMTTQIADKLHMALKPKGVAVVIAGQHMCMTTRGVKKKRVKMITSTMTGVFREDPKVRSEFMNLIGNPKGGMEK

SEQ ID NO: 10210 - protein, 231 aa, unidentified
  source 1..231: note = Magnetospirillum magneticum
  REGION 1..231: note = tr|Q2VZE8|Q2VZE8_MAGSA GTP cyclohydrolase 1; OS = Magnetospirillum magneticum (strain AMB-1 / ATCC 700264) OX=342108 GN=folE PE=3 SV=1
MPDRDHRERKAAMSKDATSLTLPRELLPATGSRLDKPSREEAEEAVRTLLRWAGDDPDREGLVGTPDRVVRAYEEFFSGYDQDPTEILHRTFEETDGYDEMVLLRDIRLESHCEHHVVPIIGKAHVAYLPNRRVVGISKLARVVEIYSRRLQIQEKLTAQIANTINDVLQPKGVAVVIEAAHQCMTTRGIHKPGVTMVTSRMLGAFREDPATRREFMALIHNQHSGGLSNV

SEQ ID NO: 10211 - protein, 231 aa, Magnetospirillum magnetotacticum
  REGION 1..231: note = tr|A0A0C2YCJ5|A0A0C2YCJ5_MAGMG GTP cyclohydrolase 1; OS = Magnetospirillum magnetotacticum MS-1 OX=272627 GN=folE; PE = 3 SV=1
MPDRDQSERNAAVSNDSASLTLPKELLPAQAHRLAKPSREEAEEAVRTLLRWAGDDPDREGLVGTPDRVVRAYEEFFSGYDLDPTEILHRTFEETDGYDEMVLLRDIRLESHCEHHVVPIIGKAHVAYLPNRRVVGISKLARVVEIYARRLQIQEKLTAQIANTINDVLQPKGVAVVIEAAHQCMTTRGIHKPGVTMVTSRMLGAFRDDPATRREFMALIHNQHSGGLSNV

SEQ ID NO: 10212 - protein, 210 aa, unidentified
  source 1..210: note = Magnetospirillum marisnigri
  REGION 1..210: note = tr|A0A178MP42|A0A178MP42_9PROT GTP cyclohydrolase 1; OS = Magnetospirillum marisnigri OX=1285242 GN=folE PE=3 SV=1
MPRELLPQERSHPSRPSRAEAEAAVRTLLRWAGDDPDREGLVGTPDRVVRAYEEFFQGYDQDPTEILHRTFEETDGYDEMVLLRDIRLESHCEHHVVPIIGKAHVAYLPNRRVVGISKLARVVEIYSRRLQIQEKLTAQIANTINDVLQPKGVAVVIEAAHQCMTTRGIHKPGVTMVTSRMLGEFRDNPATRREFMALIHNQHGGGLSNV

SEQ ID NO: 10213 - protein, 187 aa, unidentified
  source 1..187: note = Magnetospirillum marisnigri
  REGION 1..187: note = tr|A0A178MHV8|A0A178MHV8_9PROT GTP cyclohydrolase 1; OS = Magnetospirillum marisnigri OX=1285242 GN=folE PE=3 SV=1
MEAIKTLIAYTGDNPYREGLRGTPDRVIRAYDEFFAGYHSTAAEVLKTTFAETGSYDEMVTLTDIEFDSHCEHHMVPFTGVVHIAYIPDKTVVGISKLARLVEIYARRLQIQEKMTTQIADKLHMVLKPKGVAVVIAGQHMCMTTRGVKKKRVKMITSTMTGVFREDPKVRSEFMNLIGNPKSGMEK

SEQ ID NO: 10214 - protein, 212 aa, unidentified
  source 1..212: note = Magnetospirillum moscoviense
  REGION 1..212: note = tr|A0A178N0W8|A0A178N0W8_9PROT GTP cyclohydrolase 1; OS = Magnetospirillum moscoviense OX=1437059 GN=folE PE=3; SV = 1
MTTATLPAELRPHLKDRPAREEAEAAVRTLLRWAGDDPDREGLVGTPERVVRAYEEFFEGYEQDPVEILQRTFEETDGYDEMVVLRDIRLESHCEHHMVPIIGKAHVAYLPGRRVVGISKLARIVEVFSKRLQIQEKLTSQIANAINEVLQPKGVAVVIEAAHQCMTTRGVRKPGVTMVTSRMLGEFRDNPATRREFMSLIQGQHGDGLSNV

SEQ ID NO: 10215 - protein, 231 aa, Magnetospirillum sp.
  REGION 1..231: note = tr|A0A0U5MBX6|A0A0U5MBX6_9PROT GTP cyclohydrolase 1; OS = Magnetospirillum sp. XM-1 OX=1663591 GN=folE PE=3 SV=1
MPDRDQRERNAAVSSDAPSLSLPKELLPATGSRQDKPTREEAEEAVRTLLRWAGDDPDREGLVGTPDRVVRAYEEFFSGYDQDPTEILHRTFEETDGYDEMVLLRDIRLESHCEHHVVPIIGKAHVAYLPNRRVVGISKLARVVEIYSRRLQIQEKLTAQIANTINDVLQPKGVAVVIEAAHQCMTTRGIHKPGVTMVTSRMLGAFRDNPATRREFMALIHNQHSGGLSNV

SEQ ID NO: 10216 - protein, 220 aa, Magnetospirillum sp.
  REGION 1..220: note = tr|A0A1M3LKF0|A0A1M3LKF0_9PROT GTP cyclohydrolase 1; OS = Magnetospirillum sp. 64-120 OX=1895778 GN=folE PE=3 SV=1
MTKESDVKSQNPPLPKDSDTLSTGKPSREQAEEAVRTLIRWAGDDPDREGLVGTPDRVVRSYEEFFAGYDLDPGEMLARTFEETDGYDEMVILRDIRLESHCEHHMVPIIGKCHVAYLPDRRVVGISKLARVVEVFAKRLQIQEKLTAQIANTINEVLQPKGVAVIIEAAHQCMTTRGIHKPGVTMVTSRMLGVFRDNPATRKEFMSLVQGQHGSGLSNA

SEQ ID NO: 10217 - protein, 216 aa, unidentified
  source 1..216: note = Magnetovibrio blakemorei
  REGION 1..216: note = tr|A0A1E5QBF8|A0A1E5QBF8_9PROT GTP cyclohydrolase 1; OS = Magnetovibrio blakemorei OX=28181 GN=folE PE=3 SV=1
MRTTPLANHKPLTIVTDGASRPDRTEAEQAVRTLIQWAGDNPDREGLLDTPARVVRAFEEYFQGYNADPQEILERTFEEVEGYDEMVLLKDIRFESHCEHHMAPIIGKAHVAYLPKSRVVGISKLARVVEIYAQRLQIQEKMTAQIANAINDVLQPDGVAVVIEASHQCMTCRGVHKPGVSMITSKMLGAFRENDRTRREFLSMVSNPSGSAFEMV

SEQ ID NO: 10218 - protein, 212 aa, unidentified
  source 1..212: note = Magnetovibrio sp.
  REGION 1..212: note = tr|A0A2D8YYE4|A0A2D8YYE4_9PROT GTP cyclohydrolase 1; OS = Magnetovibrio sp. OX=2024836 GN=folE PE=3 SV=1
MRTVTAKKHLSVANVAANAAKTQSGKPSRAEAEQAVRTLIRWAGDDPTREGLIDTPKRVASAYEEFFAGYDADPVEILQRTFEETDGYDEIVVLKDIRLESHCEHHMVPIIGVAHVAYLPHRRVVGISKLARVVEAYAKRLQIQEKMTAQVANAIHDVLEPKGVAVVIEAAHQCMTTRGVSKPGVTMVTSRMLGAFRDDPTTRREFLAMIGH

SEQ ID NO: 10219 - protein, 214 aa, unidentified
  source 1..214: note = Magnetovibrio sp.
  REGION 1..214: note = tr|A0A2E3KYZ6|A0A2E3KYZ6_9PROT GTP cyclohydrolase 1; OS = Magnetovibrio sp. OX=2024836 GN=folE PE=3 SV=1
  VARIANT 56: note = Xaa can be any naturally occurring amino acid
  VARIANT 84: note = Xaa can be any naturally occurring amino acid
  VARIANT 86..87: note = Xaa can be any naturally occurring amino acid
  VARIANT 99: note = Xaa can be any naturally occurring amino acid
  VARIANT 104: note = Xaa can be any naturally occurring amino acid
MTSEKSFSVITENQDETNKPSRLEAEAAVRTLIRWAGDDPDREGLVDTPDRVVRSXEEFFAGYAADPKAILERTFEEVDGYDEXVXXRDIRLESHCEHXMVPIXGKAHVAYMPHRRVVGISKLARLVEAYSKRLQIQEKLTSQVANAIDEILQPLGTAVIVEAAHQCMTTRGVHKAGVTMVTSRMLGAFRENGETRREFLAMIGNPSSGETRFG

SEQ ID NO: 10220 - protein, 186 aa, Mahella australiensis
  REGION 1..186: note = tr|F3ZVJ4|F3ZVJ4_MAHA5 GTP cyclohydrolase 1; OS = Mahella australiensis (strain DSM 15567 / CIP 107919 / 50-1 BON) OX=697281 GN=folE PE=3 SV=1
MVDQQKIEQAMRMMIEAIGEDPEREGLKDTPKRVARMYAELFSGIEENPRKYLEVWFNEDHEEMVLVKDIPFYSMCEHHFLPFVGKAHVAYIPTKGKVTGLSKLARVVESVARRPQLQERLTSQIADILMECLDPQGVVVVIEAEHMCMSMRGVKKPGTTTVTSAVRGIFRRDAKSRAEAFALIKG

SEQ ID NO: 10221 - protein, 188 aa, unidentified
  source 1..188: note = Maledivibacter halophilus
  REGION 1..188: note = tr|A0A1T5IL07|A0A1T5IL07_9CLOT GTP cyclohydrolase 1; OS = Maledivibacter halophilus OX=36842 GN=folE PE=3 SV=1
MDKQKIERAVRDIIEAIGEDPDREGLKDTPRRIAKMYEEIFSGLKEDPGKHLEIYFQDEKHEEMVLVKDIPFYSTCEHHFAPFFGKAHVGYLPKGGKLTGLSKLARVVETVARRPQLQERLTATIAETMMEKLEPHGVIVVVEAEHMCMTMRGIKKPGSKTVTSAVRGLFNKDAKARAEAMSLINFGR

SEQ ID NO: 10222 - protein, 366 aa, unidentified
  source 1..366: note = Maliponia aquimaris
  REGION 1..366: note = tr|A0A238KM45|A0A238KM45_9RHOB GTP cyclohydrolase FolE2 OS=Maliponia aquimaris OX=1673631 GN=folE2 PE=3 SV=1
MNIHTPEIDRKPSAEEAADALALLRRWTSKAHDAEIEALDPVLARLTPEAAKDSYPVLSRVYPEGFAVDGSYKATLPDLQNGPSSLIRGANRAIQHVGISNFRLPIQYHTRDNGDLRLETSVTGTVSLDADKKGINMSRIMRSFYVHADKTFSFGVIEAALDDYKSDLESFDARINMRFSFPMKVQSLRSGLSGYQYYDIALELVEVDGVRRKIMHLDYVYSSTCPCSLELSEHARRERGQLATPHSQRSVARISVEVKDGACLWFEDLVDMCRRAVPTETQVMVKREDEQAFAELNAANPIFVEDAARLFAEQLQADARVGDFRVIASHQESLHSHDAVSVLTEGALFAAESLDPKLFSTLFHVG

SEQ ID NO: 10223 - protein, 260 aa, Malonomonas rubra
  REGION 1..260: note = tr|A0A1M6JS87|A0A1M6JS87_MALRU GTP cyclohydrolase FolE2 OS=Malonomonas rubra DSM 5091 OX=1122189 GN=folE2; PE = 3 SV=1
MAKMPDMQQSRDTRNIAIDKVGVKDIRYPIVVQDKHKEKQHTVARVNMYVDLPEEFKGTHMSRFIEVLNLYHGSISIENIGTILAEMKQRLEATRAHLELDFPYFIEKTAPVSGARSLLEYQCRMVGTLGKKFDFVLEASIPVTSLCPCSKEISERGAHNQRSIVTVQIRYKEHVWLEDLIAWVESCASCQVYSLLKREDEKAVTEQAYDNPMFVEDMVRAVTEKLRSVPQIAWFKVQCENFESIHNHSAYAMVEEQNSR

SEQ ID NO: 10224 - protein, 366 aa, Mameliella alba
  REGION 1..366: note = tr|A0A0B3RTB9|A0A0B3RTB9_9RHOB GTP cyclohydrolase FolE2 OS=Mameliella alba OX=561184 GN=folE2 PE=3 SV=1
MNVHTPEIDRKPSQEEAAEALELLRRWASKAQDAEIEALDPLVARLAPDSAPDSYPALSRAYPDNFSVDSDYKAGLPDLQNGPSSLIRGANRAIQHVGISNFRLPIQYHTRDNGDLHLETSVTGTVSLEADKKGINMSRIMRSFYAHADKTFSFEVIEAALDDYKSDLESFDARINMRFSFPMKVDSLRSGLSGYQYYDIALELVEQDGVRRKVMHLDYVYSSTCPCSLELSEHARRTRGQLATPHSQRSVARISVEVKEGECLWFEDVVDMCRRAVPTETQVMVKREDEQAFAELNAANPIFVEDAARLFAEQLQADARVGDYRVVASHQESLHSHDAVSVLTEGDLFAAESLDPKLFSTLFHVG

SEQ ID NO: 10225 - protein, 366 aa, Mameliella sp.; identical to SEQ ID NO: 4653
  REGION 1..366: note = tr|A0A2E9I2K5|A0A2E9I2K5_9RHOB GTP cyclohydrolase FolE2 OS=Mameliella sp. OX=1924940 GN=folE2 PE=3 SV=1

SEQ ID NO: 10226 - protein, 222 aa, unidentified
  source 1..222: note = Mangrovibacter phragmitis
  REGION 1..222: note = tr|A0A1B7L9G9|A0A1B7L9G9_9ENTR GTP cyclohydrolase 1; OS = Mangrovibacter phragmitis OX=1691903 GN=folE PE=3 SV=1
MPSLSKEAAQVHDALVARGLETPLRQPAEQLDNETRKARIAEHMAGIMQLMNLDLSDDSLMETPHRIAKMYVDEIFSGLDYANFPKITVIENKMKVDEMVTVRDITLTSTCEHHFVTIDGKATVAYIPKDAVIGLSKINRIVQFFAQRPQVQERLTQQILVALQTLLGTSNVAVSIDAVHYCVKARGIRDATSATTTTSLGGLFKSSQNTRQEFLRAVRHHN

SEQ ID NO: 10227 - protein, 222 aa, Mangrovibacter plantisponsor
  REGION 1..222: note = tr|A0A317Q5Y0|A0A317Q5Y0_9ENTR GTP cyclohydrolase 1; OS = Mangrovibacter plantisponsor OX=451513 GN=folE PE=3 SV=1
MPSLSKEAAQVHDALVARGLETPLRQPAEQLDNETRKARIAEHMTGIMQLMNLDLSDDSLMETPHRIAKMYVDEIFSGLDYANFPKITVIENKMKVDEMVTVRDITLTSTCEHHFVTIDGKATVAYIPKDAVIGLSKINRIVQFFAQRPQVQERLTQQILVALQTLLGTNNVAVSIDAVHYCVKARGIRDATSATTTTSLGGLFKSSQNTRQEFLRAVRHHN

SEQ ID NO: 10228 - protein, 222 aa, Mangrovibacter sp.
  REGION 1..222: note = tr|A0A071LNX4|A0A071LNX4_9ENTR GTP cyclohydrolase 1; OS = Mangrovibacter sp. MFB070 OX=1224318 GN=folE PE=3 SV=1
MPSFSKEAAQVHDALVARGLETPLRQPAEQLDNETRKARIAEHMTGIMQLMNLDLSDDSLMETPHRIAKMYVDEIFSGLDYANFPKITVIENKMKVDEMVTVRDITLTSTCEHHFVTIDGKATVAYIPKDAVIGLSKINRIVQFFAQRPQVQERLTQQILVALQTLLGTNNVAVSIDAVHYCVKARGIRDATSATTTTSLGGLFKSSQNTRQEFLRAVRHHN

SEQ ID NO: 10229 - protein, 242 aa, unidentified
  source 1..242: note = Mangrovibacterium diazotrophicum
  REGION 1..242: note = tr|A0A419VZ59|A0A419VZ59_9BACT GTP cyclohydrolase 1; OS = Mangrovibacterium diazotrophicum OX=1261403 GN=folE; PE = 3 SV=1
MKVNGFVKTSPAKQNGHQNIPLVKNGSAIELIGDNHIGTSIDTPMRADAFEKSDEEKMAIIEDRFRDIMETLGLDLTDDSLSGTPRRVAKMYVQEIFNGLNPQNKPKISVFENKFNYGEMLVERNINLNSTCEHHFLPIMGKAHVAYIANGEVIGLSKINRIVDYFARRPQVQERLTVQIANELKTLLNTEDVAVVIDAKHMCVSSRGIEDESSSTVTAEYCGAFKNTERRDEFLKYVSLGK

SEQ ID NO: 10230 - protein, 205 aa, unidentified
  source 1..205: note = Mangrovibacterium diazotrophicum
  REGION 1..205: note = tr|A0A419VWL9|A0A419VWL9_9BACT GTP cyclohydrolase 1; OS = Mangrovibacterium diazotrophicum OX=1261403 GN=folE; PE = 3 SV=1
MEDSYNGEFSGYKRIDRFNESVTEQISEHYTGIIKLLGEDVEREGLQKTPLRVAKAMQFLLQGYEQDPEAMIRKAMFKEDYKQMVIVKDIEIYSMCEHHMLPFIGKAHVGYIPNGYITGLSKIARVVDAFARRLQVQERLTSQIKDCIQQTLNPLGVAVVIEAQHLCMQMRGVQKQHSVTTTSDFTGAFERVATREEFIRLISSK

SEQ ID NO: 10231 - protein, 205 aa, unidentified
  source 1..205: note = Mangrovibacterium marinum
  REGION 1..205: note = tr|A0A2T5C4G4|A0A2T5C4G4_9BACT GTP cyclohydrolase 1; OS = Mangrovibacterium marinum OX=1639118 GN=folE PE=3 SV=1
MEDSFNGDLSGYQRIDRFDEKTTAELGEHYSRILKLVGEDVNREGLQKTPLRVAKAMQFLLQGYDQNPEEMLRGAMFREDYSQMVIVKDIEIYSMCEHHMLPFIGKAHVAYIPDGYITGLSKIARVVDAFARRLQVQERLTSQIKDCIQKTLNPLGVAVVIEAQHLCMQMRGVQKQHSVTTTSDFTGAFERVATRDEFIRLISSK

SEQ ID NO: 10232 - protein, 242 aa, unidentified
  source 1..242: note = Mangrovibacterium marinum
  REGION 1..242: note = tr|A0A2T5BYZ7|A0A2T5BYZ7_9BACT GTP cyclohydrolase 1; OS = Mangrovibacterium marinum OX=1639118 GN=folE PE=3 SV=1
MKVNGFIKSGSVSRNGQNTIPRVNNSSSVDLIGDHHVGTSVDTPMRPDAFEKTDQEKMAVIEDHFREIMETLGLDLTDDSLSGTPHRVAKMYVQEIFNGLNPVNKPKISVFGNKFNYGEMLVERNINLNSTCEHHFLPIVGKAHVAYIANGQVIGLSKINRVVDYFARRPQVQERLTVQIANELKQILQTEDVAVVIDAKHLCVSSRGIEDESSSTVTAEYSGVFKEKERKDEFLKYVSFGK

SEQ ID NO: 10233 - protein, 225 aa, unidentified
  source 1..225: note = Mangrovimonas sp.
  REGION 1..225: note = tr|A0A1V1ZDZ5|A0A1V1ZDZ5_9FLAO GTP cyclohydrolase 1; OS = Mangrovimonas sp. DI 80 OX=1779330 GN=folE PE=3 SV=1
MKIENDIEDFEALGNDHIGTSANTPMREDAFKLSNDEKIDIIKDDVRHIMETLGLDLTDDSLKGTPMRVAKMFVKEIFGGLNPDKKPNASTFDNKYKYGEMLVEKNITVYSTCEHHLLPIVGKAHVAYISNGTVVGLSKMNRIVDYFAKRPQVQERLTIQIVKELQEVLNTEDVACVIDAKHLCVNSRGIRDVDCSTVTSEFGGKFKEKETRREFLDYIKLDTQF

SEQ ID NO: 10234 - protein, 225 aa, unidentified
  source 1..225: note = Mangrovimonas sp.
  REGION 1..225: note = tr|A0A3R9MF37|A0A3R9MF37_9FLAO GTP cyclohydrolase 1; OS = Mangrovimonas sp. HN-E26 OX=2494697 GN=folE PE=3 SV=1
MKLDKNIEEFDALGDDHIGTSFDTPLRKDAFNLSNEEKIDIIKDDVRHIMETLGLDLTDDSLNGTPMRVAKMFVKELFGGLNPENKPKASTFDNKYKYGEMLVEKNITVYSTCEHHLLPIVGKAHVAYISSGNVVGLSKMNRIVDYFAKRPQVQERLTIQIVRELQKVLNTEDVACVIDAKHLCVNSRGIRDIESSTVTSEFGGKFKDIATRKEFLDYIKLDTAF

SEQ ID NO: 10235 - protein, 225 aa, unidentified
  source 1..225: note = Mangrovimonas yunxiaonensis
  REGION 1..225: note = tr|A0A084TIW9|A0A084TIW9_9FLAO GTP cyclohydrolase 1; OS = Mangrovimonas yunxiaonensis OX=1197477 GN=folE PE=3 SV=1
MKFDSKIEEFESLGDAHIGTSSDTPLRKDAFTLSNEEKIDIIKDDVRHIMETLGLDLSDDSLKGTPMRVAKMYVKEIFGGLNPNTKPKASTFDNKYKYGEMLVEKNITVYSTCEHHLLPIVGKAHVAYISNGTVVGLSKMNRIVDHFAKRPQVQERLTIQIVRELQKVLNTEDVACVIDAKHLCVNSRGIRDVDSSTVTSEFGGKFKEKETRREFLDYIKLDTSF

SEQ ID NO: 10236 - protein, 198 aa, unidentified
  source 1..198: note = Mangrovimonas yunxiaonensis
  REGION 1..198: note = tr|A0A084THX9|A0A084THX9_9FLAO GTP cyclohydrolase 1; OS = Mangrovimonas yunxiaonensis OX=1197477 GN=folE PE=3 SV=1
MPYKHFEEYNMQVTDDVKARYKSIIEDLGEDINRDGLQKTPERASKAMQFLTQGYHQDAAEILKSAMFKESYNEMVIVKDIELYSLCEHHMLPFFGKAHIAYIPNGKIVGLSKIPRIVDVFARRLQVQERLTEQILDCINETLQPQGVAVVIEASHMCMMMRGVQKQNSVTTTSGFRGQFEKSETRNEFLKLISEKLS

SEQ ID NO: 10237 - protein, 229 aa, Mannheimia haemolytica
  REGION 1..229: note = tr|A0A378NFL9|A0A378NFL9_MANHA GTP cyclohydrolase 1; OS = Mannheimia haemolytica OX=75985 GN=folE PE=3 SV=1
MTTISPELTITENTLSPEAQKVRQALLAKGIETPTVAHTKDKASRRAEIQQHMQAVLELLGLDLNDDSLEETPHRLAKMYVDEIFSGLDYATFPKITNIENRMKVSEMVLVDDITLTSTCEHHFVTIDGKVAVAYYPKKWVIGLSKINRVVQFFAQRPQVQERFTEQILTAFQTILETDDVAVYVKATHFCVKCRGVKDTNSYTVTSAFGGVFLEDRETRKEFLGLLNK

SEQ ID NO: 10238 - protein, 229 aa, Mannheimia haemolytica
  REGION 1..229: note = tr|A0A248ZY79|A0A248ZY79_MANHA GTP cyclohydrolase 1; OS = Mannheimia haemolytica OX=75985 GN=folE PE=3 SV=1
MTTISPELTITENTLSPEAQKVRQALLAKGIETPTVTHTKDKASRRAEIQQHMQAVLELLGLDLSDDSLEETPHRLAKMYVDEIFSGLDYATFPKITNIENRMKVSEMVLVDDITLTSTCEHHFVTIDGKVAVAYYPKKWVIGLSKINRVVQFFAQRPQVQERFTEQILTAFQTILETDDVAVYVKATHFCVKCRGIKDTNSYTVTSAFGGVFLEDRETRKEFLGLLNK

SEQ ID NO: 10239 - protein, 234 aa, Mannheimia sp.
  REGION 1..234: note = tr|W0Q6Q1|W0Q6Q1_9PAST GTP cyclohydrolase 1; OS = Mannheimia sp. USDA-ARS-USMARC-1261 OX=1432056 GN=folE; PE = 3 SV=1
MRGKPMTTISPELNSAENQLSPEAQKVRQALLAKGIETPTVAHQKDKDSRRAEIQQHMQAVLELLGLDLTDDSLEETPHRLAKMYVDEIFSGLDYATFPKITNIENRMKVSEMVLVDDITLTSTCEHHFVTIDGKVAVAYYPKKWVIGLSKINRVVQFFAQRPQVQERFTEQILTAFQTILETDDVAVYVKATHFCVKCRGVKDTNSYTVTSAFGGVFLEDRETRKEFLGLLNK

SEQ ID NO: 10240 - protein, 218 aa, unidentified
  source 1..218: note = Mannheimia succiniciproducens
  REGION 1..218: note = sp|Q65TR0|GCH1_MANSM GTP cyclohydrolase 1; OS = Mannheimia succiniciproducens (strain MBEL55E); OX = 221988 GN=folE PE=3 SV=1
MSRISAEAEKVRHALIEKGIETPMIALTKSKNERRIGIENRMREVMQLIGLDLTDDSLEETPVRLAKMFIDEIFSGLDYTNFPKITNIENRMKVSEMVLVNDVTLTSTCEHHFVTIDGLVSVAYYPKKWVIGLSKINRVVQFFAQRPQVQERLTEQILLAFQTILETEDVAVYMKATHFCVKCRGIKDTNSYTVTSAFGGVFLEDRETRKEFLSLINK

SEQ ID NO: 10241 - protein, 229 aa, Mannheimia varigena
  REGION 1..229: note = tr|W0QCJ6|W0QCJ6_9PAST GTP cyclohydrolase 1; OS = Mannheimia varigena USDA-ARS-USMARC-1296 OX=1433287; GN = folE PE=3 SV=1
MTTISPELKNAENQLSPEAQKVRQALLAKGIETPTVAHQKDKDSRRAEIQQHMQAVLELLGLDLTDDSLEETPHRLAKMYVDEIFSGLDYATFPKITNIENRMKVSEMVLVDDITLTSTCEHHFVTIDGKVAVAYYPKKWVIGLSKINRVVQFFAQRPQVQERFTEQILTAFQTILETDDVAVYVKATHFCVKCRGVKDTNSYTVTSAFGGVFLEDRETRKEFLGLLNK

SEQ ID NO: 10242 - protein, 232 aa, Maribacter aquivivus
  REGION 1..232: note = tr|A0A1M6U654|A0A1M6U654_9FLAO GTP cyclohydrolase 1; OS = Maribacter aquivivus OX=228958 GN=folE PE=3 SV=1
MKHQEIMLNTLTKENNLNGFSEEEIGDDHIYTGLETPMKTDAFKISDEEKKDKIADLFSQIMDVMGLNLEDDSLKGTPNRVAKMYIDEIFSGLNPANKPKVALFDNKYQYNQMLVEKNITFYSNCEHHFVPIIGKAHIAYISSGKVIGLSKLNRIVQYYAKRPQVQERLTNQIAAELRQILETEDVAVIIDAKHLCVSSRGIKDDTSATVTSFYGGIFNTSSKIAELQNYLN

SEQ ID NO: 10243 - protein, 226 aa, Maribacter aquivivus
  REGION 1..226: note = tr|A0A1M6MJE4|A0A1M6MJE4_9FLAO GTP cyclohydrolase 1; OS = Maribacter aquivivus OX=228958 GN=folE PE=3 SV=1
MKIEDTLENQFDELGNDHISTSEDTPLRSDAFDLDDAEKIERIRENVREIMLTLGLDLTDDSLKGTPNRVAKMYVNEIFGGLSPAKKPKASTFDNKYKYGEMLVEKNITLYSTCEHHFLPIVGRAHVAYISNGTVVGLSKMNRIVDYYAKRPQVQERLNIQIVRELQKALGTEDVACVIDAKHLCVNSRGIRDIDSSTVTAEYGGKFKEELVRREFLNYLNLDTHF

SEQ ID NO: 10244 - protein, 199 aa, Maribacter arcticus
  REGION 1..199: note = tr|A0A1T5D457|A0A1T5D457_9FLAO GTP cyclohydrolase 1; OS = Maribacter arcticus OX=561365 GN=folE PE=3 SV=1
MSPYRNLEEYNLEITDEVRSMYSSIINEIGEDISREGLVKTPERAAKAMLFLTQGYQQDAVEILKGAMFKESYDDMVIIKDIELYSLCEHHMLPFFGKAHIAYIPNGHIVGLSKIPRVVDVFARRLQVQERLTHDILECINNTLQPKGVAVVIEASHMCMMMRGVQKQNSVTTTSGFRGQFEKIETRNEFLKLISSKLS

SEQ ID NO: 10245 - protein, 226 aa, Maribacter arcticus
  REGION 1..226: note = tr|A0A1T4ZRX2|A0A1T4ZRX2_9FLAO GTP cyclohydrolase 1; OS = Maribacter arcticus OX=561365 GN=folE PE=3 SV=1
MKIEDTLENQFDELGNDHISTSEDTPLRKDAFVLDDATKIERIRENVRDIMLTLGLDLNDDSLKGTPNRVAKMYVNEIFGGLHPNKKPKASTFDNKYKYGEMLVEKNITLYSTCEHHFLPIVGRAHVAYISNGTVVGLSKMNRVVDYYAKRPQVQERLNIQIVRELQKVLGTEDVACVIDAKHLCVNSRGIRDIDSSTVTAEYGGKFKEELVRREFLNYLNLDTHF

SEQ ID NO: 10246 - protein, 233 aa, unidentified
  source 1..233: note = Maribacter caenipelagi
  REGION 1..233: note = tr|A0A4V3E1P7|A0A4V3E1P7_9FLAO GTP cyclohydrolase 1; OS = Maribacter caenipelagi OX=1447781 GN=folE PE=3 SV=1
MKHQEIMLNTLIKTNKLNGFSEEEIGDDHIYTGLETPMKSNAFKISDEEKKDKIAHLFSEIMDVMGLDLEDDSLKGTPNRVAKMYIDEIFSGLNPANKPKVALFDNKYQYNQMLVEKNITFYSNCEHHFVPIIGKAHIAYISSGKVIGLSKLNRIVQYYAKRPQVQERLTNQIAAELSQILETDDIAVIIDAKHLCVSSRGIKDDTSATVTSFYGGVFNTSNKITELQNYLNH

SEQ ID NO: 10247 - protein, 199 aa, unidentified
  source 1..199: note = Maribacter caenipelagi
  REGION 1..199: note = tr|A0A4R7DH64|A0A4R7DH64_9FLAO GTP cyclohydrolase 1; OS = Maribacter caenipelagi OX=1447781 GN=folE PE=3 SV=1
MSPYKNLEEYNLEITDEVKSRYSSIIDEIGEDVEREGLVKTPERAAKAMLFLTQGYQQDAVEILKGAMFKEDYDDMVIIKDIELYSLCEHHMLPFFGKAHIAYIPNGHIVGLSKIPRVVDVFARRLQVQERLTHDILECINNTLKPKGVAVVIEASHMCMMMRGVQKQNSVTTTSGFRGQFEKIETRNEFLKLISAKLS

SEQ ID NO: 10248 - protein, 199 aa, unidentified
  source 1..199: note = Maribacter cobaltidurans
  REGION 1..199: note = tr|A0A223VAG6|A0A223VAG6_9FLAO GTP cyclohydrolase 1; OS = Maribacter cobaltidurans OX=1178778 GN=folE PE=3 SV=1
MSPYRNLEEYNLEITDEIKEKFSSVIDEIGEDKNREGLLKTPERAAKAMLFLTQGYKQDAEEILRGAMFKEDYDDMVIIKDIELYSLCEHHMLPFFGKAHIAYIPNGHIVGLSKIPRIVDVFARRLQVQERLTHDILECLNNTLKPKGVAVVIEASHMCMMMRGVQKQNSVTTTSGFRGQFEKIETRNEFLKLISSDLS

SEQ ID NO: 10249 - protein, 226 aa, unidentified
  source 1..226: note = Maribacter cobaltidurans
  REGION 1..226: note = tr|A0A223V1K9|A0A223V1K9_9FLAO GTP cyclohydrolase 1; OS = Maribacter cobaltidurans OX=1178778 GN=folE PE=3 SV=1
MKTEGTLEEHFEQLGDDHISSSEETPLRKDAFILSDEEKIERIKGSVREILLTLGMDLTDDSLKGTPNRVAKMFVKEIFGGLHPDRKPNSSTFENKYKYGEMLVEKNITLYSTCEHHLLPIVGRAHVAYISKGSVVGLSKMNRIVDYYAKRPQVQERLNIQIVRELQKVLGTEDVACVIDAKHLCVNSRGIRDIESSTVTAEYGGKFKEEAVRNEFLEYINMDTQF

SEQ ID NO: 10250 - protein, 199 aa, Maribacter dokdonensis
  REGION 1..199: note = tr|A0A1H4RNJ9|A0A1H4RNJ9_9FLAO GTP cyclohydrolase 1; OS = Maribacter dokdonensis OX=320912 GN=folE PE=3 SV=1
MSPYRNLEEYNLEITDEVKSRYSSIIDEIGEDVAREGLVKTPERAAKAMLFLTQGYKQDAVEILKGAMFKEDYDDMVIIKDIELYSLCEHHMLPFFGKAHIAYIPNGHIVGLSKIPRVVDVFARRLQVQERLTHDILECINNTLKPKGVAVVIEASHMCMMMRGVQKQNSVTTTSGFRGQFEKIETRNEFLKLISAKLS

SEQ ID NO: 10251 - protein, 226 aa, Maribacter dokdonensis
  REGION 1..226: note = tr|A0A1H4P047|A0A1H4P047_9FLAO GTP cyclohydrolase 1; OS = Maribacter dokdonensis OX=320912 GN=folE PE=3 SV=1
MKIEDTLENQFDEIGNDHISTSEDTPLRSDAFDLDDAEKIERIRNNVREIMHTLGLDLNDDSLKGTPNRVAKMYVNEIFGGLNPSRRPKASTFDNKYKYGEMLVEKNITLYSTCEHHLLPIVGRAHVAYISNGTVVGLSKMNRIVDYYAKRPQVQERLNIQIVRELQKALGTEDVACVIDAKHLCVNSRGIRDIDSSTVTAEYGGKFKEELVRREFLNYLNLDTHF

SEQ ID NO: 10252 - protein, 226 aa, unidentified
  source 1..226: note = Maribacter flavus
  REGION 1..226: note = tr|A0A5B2TW35|A0A5B2TW35_9FLAO GTP cyclohydrolase 1; OS = Maribacter flavus OX=1658664 GN=folE PE=3 SV=1
MKTEGTLEEHFEQLGDDHISSSEETPLRKDAFLLSDEEKIERIKGSVREILLTLGMDLEDDSLKGTPNRVAKMFVKEIFGGLHPDRKPNSSTFDNKYKYGEMLVEKNITLYSTCEHHLLPIVGRAHVAYISNGSVVGLSKMNRIVDYYAKRPQVQERLNIQIVRELQKVLGTEDVACVIDAKHLCVNSRGIRDIESSTVTAEYGGKFKQEAVRNEFLEYINMDTQF

SEQ ID NO: 10253 - protein, 199 aa, unidentified
  source 1..199: note = Maribacter flavus
  REGION 1..199: note = tr|A0A5B2TT59|A0A5B2TT59_9FLAO GTP cyclohydrolase 1; OS = Maribacter flavus OX=1658664 GN=folE PE=3 SV=1
MAPYRNLEEYNMEITDGIKEKFASVIDEIGEDKSREGLLKTPERAAKAMLFLTQGYKQDAEEILKGAMFKEDYDDMVIIKDIELYSLCEHHMLPFFGKAHIAYIPNGHIVGLSKIPRIVDVFARRLQVQERLTHDILECINNTLKPKGVAVVIEASHMCMMMRGVQKQNSVTTTSGFRGQFEKIETRNEFLKLISSDLS

SEQ ID NO: 10254 - protein, 226 aa, Maribacter orientalis
  REGION 1..226: note = tr|A0A1H7NIG9|A0A1H7NIG9_9FLAO GTP cyclohydrolase 1; OS = Maribacter orientalis OX=228957 GN=folE PE=3 SV=1
MKIEDTLENQFDELGNDHISTSEDTPLRKDAFVLDDATKIERIRENVRDIMLTLGLDLNDDSLKGTPNRVAKMYVNEIFGGLHPSRKPKASTFDNKYKYGEMLVEKNITLYSTCEHHFLPIVGRAHVAYISNGTVVGLSKMNRIVDYYAKRPQVQERLNIQIVRELQEVLGTEDVACVIDAKHLCVNSRGIRDIDSSTVTAEYGGKFKEELVRREFLNYLNLDTHF

SEQ ID NO: 10255 - protein, 223 aa, Maribacter orientalis
  REGION 1..223: note = tr|A0A1H7UGW1|A0A1H7UGW1_9FLAO GTP cyclohydrolase 1; OS = Maribacter orientalis OX=228957 GN=folE PE=3 SV=1
MLLIKENINFVEDNYEYIKHKIKSMSPYRNLEEYNLEITDEVKSRYSSIIAEIGEDVGREGLVKTPERAAKAMLFLTQGYQQDAVEILKGAMFKESYDEMVIIKDIELYSLCEHHMLPFFGKAHIAYIPNGHIVGLSKIPRVVDVFARRLQVQERLTHDILECINNTLKPKGVAVVIEASHMCMMMRGVQKQNSVTTTSGFRGQFEKIETRNEFLKLISSKLS

SEQ ID NO: 10256 - protein, 199 aa, Maribacter polysiphoniae
  REGION 1..199: note = tr|A0A316DV56|A0A316DV56_9FLAO GTP cyclohydrolase 1; OS = Maribacter polysiphoniae OX=429344 GN=folE PE=3 SV=1
MTPYRSFEEYDLEITKDVQERYAKIIEEIGEDVSREGLMKTPERAAKAMLFLTQGYEQDAAQILKSAMFNESYNEMVIVKDIELYSLCEHHMLPFFGKAHIAYIPDGQIVGLSKLPRIVDVFARRLQVQERLTEQILDCINDTLKPQGVAVVIEASHMCMMMRGVQKQNSVTTTSGFRGSFVKEETRNEFLKLISSSLS

SEQ ID NO: 10257 - protein, 226 aa, Maribacter polysiphoniae
  REGION 1..226: note = tr|A0A316E3B4|A0A316E3B4_9FLAO GTP cyclohydrolase 1; OS = Maribacter polysiphoniae OX=429344 GN=folE PE=3 SV=1
MKMDSTLEEQYEEIGNDHVSSAEDTPLRDDAFVLSDNEKIERIKTNVREIMLTLGLDLDDDSLMGTPNRVAKMFVKEIFSGLDPKKMPNSSTFDNKYKYGEMLVEKNITVYSTCEHHLLPIVGRAHVAYISNGTVVGLSKMNRIVDYYAKRPQVQERLTIQVVRELQRVLNTEDVACVIDAKHLCVNSRGIRDIESSTVTAEYGGKFKNEALRSEFLEYLNLETKF

SEQ ID NO: 10258 - protein, 199 aa, Maribacter sp.
  REGION 1..199: note = tr|A0A3R8Q2T7|A0A3R8Q2T7_9FLAO GTP cyclohydrolase 1; OS = Maribacter sp. PoM-212 OX=2498892 GN=folE PE=3 SV=1
MAPYRNLEEYNMEITDGIKEKFASVIDEIGEDKSREGLLKTPERAAKAMLFLTQGYKQDAEEILRGAMFKEDYDDMVIIKDIELYSLCEHHMLPFFGKAHVAYIPNGHIVGLSKIPRIVDVFARRLQVQERLTHDILECINNTLQPKGVAVVIEASHMCMMMRGVQKQNSVTTTSGFRGQFEKIETRNEFLKLISSDLS

SEQ ID NO: 10259 - protein, 199 aa, Maribacter sp.
  REGION 1..199: note = tr|A0A559NL79|A0A559NL79_9FLAO GTP cyclohydrolase 1; OS = Maribacter sp. MAR_2009_72 OX=1250050 GN=folE PE=3 SV=1
MSSYRNLEEYNLEITDEVRSRYSSIIEEIGENVEREGLIKTPERAAKAMLFLTQGYKQDAVEILKGAMFKESYDDMVIIKDIELYSLCEHHMLPFFGKAHIAYIPNGHIVGLSKIPRVVDVFARRLQVQERLTHDILECINTTLKPKGVAVVIEASHMCMMMRGVQKQNSVTTTSGFRGQFEKIETRNEFLKLISAKLS

SEQ ID NO: 10260 - protein, 226 aa, unidentified
  source 1..226: note = Maribacter spongiicola
  REGION 1..226: note = tr|A0A4R7K7E6|A0A4R7K7E6_9FLAO GTP cyclohydrolase 1; OS = Maribacter spongiicola OX=1206753 GN=folE PE=3 SV=1
MKIEDTLENQFDELGNDHISTSEDTPLRSDAFDLDDAEKIERIRENVREIMLTLGLDLTDDSLKGTPNRVAKMYVNEIFGGLNPARKPKASTFDNKYKYGEMLVEKNITLYSTCEHHLLPIVGRAHVAYISNGTVVGLSKMNRIVDYYAKRPQVQERLNIQIVRELQKALGTEDVACVIDAKHLCVNSRGIRDIDSSTVTAEYGGKFKEELVRREFLNYLNLDTHF

SEQ ID NO: 10261 - protein, 199 aa, unidentified
  source 1..199: note = Maribacter spongiicola
  REGION 1..199: note = tr|A0A4R7K2L3|A0A4R7K2L3_9FLAO GTP cyclohydrolase 1; OS = Maribacter spongiicola OX=1206753 GN=folE PE=3 SV=1
MSPYRNLEEYNLEITDEVKSRYSSIIEEIGEDVKREGLVKTPERAAKAMLFLTQGYQQDPVEILEGAMFKEDYDDMVIIKDIELYSLCEHHMLPFFGKAHIAYIPNGQIVGLSKIPRVVDVFARRLQVQERLTHDILECINNTLKPKGVAVVIEASHMCMMMRGVQKQNSVTTTSGFRGQFEKIETRNEFLKLISAKLS

SEQ ID NO: 10262 - protein, 226 aa, Maribacter stanieri
  REGION 1..226: note = tr|A0A1I6IGG1|A0A1I6IGG1_9FLAO GTP cyclohydrolase 1; OS = Maribacter stanieri OX=440514 GN=folE PE=3 SV=1
MKIEDTLENQFEELGNDHISTSEDTPLRSDAFDLDDAEKIERIRENVREIMLTLGLDLTDDSLKGTPNRVAKMYVNEIFGGLNPAKKPKASTFDNKYKYGEMLVEKNITLYSTCEHHLLPIVGRAHVAYISKGTVVGLSKMNRIVDYYAKRPQVQERLNIQIVRELQKALGTEDVACVIDAKHLCVNSRGIRDIDSSTVTAEYGGKFKEELVRREFLNYLNLDTHF

SEQ ID NO: 10263 - protein, 202 aa, Maribacter stanieri
  REGION 1..202: note = tr|A0A1I6JZV9|A0A1I6JZV9_9FLAO GTP cyclohydrolase 1; OS = Maribacter stanieri OX=440514 GN=folE PE=3 SV=1
MHFMSPYKNLEEYNLEITDEVKSRYSSIIDEIGEDVEREGLVKTPERAAKAMLFLTQGYQQDAVEILKGAMFKESYDDMVIIKDIELYSLCEHHMLPFFGKAHIAYIPNGHIVGLSKIPRVVDVFARRLQVQERLTHDILECINNTLKPKGVAVVIEASHMCMMMRGVQKQNSVTTTSGFRGQFEKIETRNEFLKLISAKLS

SEQ ID NO: 10264 - protein, 199 aa, Maribacter ulvicola
  REGION 1..199: note = tr|A0A1N6YN12|A0A1N6YN12_9FLAO GTP cyclohydrolase 1; OS = Maribacter ulvicola OX=228959 GN=folE PE=3 SV=1
MSPYKNLEEYNLEITDEVKSRYSSIIDEIGEDVAREGLVKTPERAAKAMLFLTQGYQQDAVEILQGAMFKEDYDDMVIIKDIELYSLCEHHMLPFFGKAHIAYIPDGQIVGLSKIPRVVDVFARRLQVQERLTHDILECINNTLKPKGVAVVIEASHMCMMMRGVQKQNSVTTTSGFRGQFEKIETRNEFLKLISAKLS

SEQ ID NO: 10265 - protein, 226 aa, Maribacter ulvicola
  REGION 1..226: note = tr|A0A1N6RZN3|A0A1N6RZN3_9FLAO GTP cyclohydrolase 1; OS = Maribacter ulvicola OX=228959 GN=folE PE=3 SV=1
MKIEDTLENQFDELGNDHISTSEDTPLRSDAFDLDDAEKIERIRENVREIMLTLGLDLTDDSLKGTPNRVAKMYVNEIFGGLNPSKKPKASTFDNKYKYGEMLVEKNITLYSTCEHHLLPIVGRAHVAYISNGTVVGLSKMNRIVDYYAKRPQVQERLNIQIVRELQKALGTEDVACVIDAKHLCVNSRGIRDIESSTVTAEYGGKFKEELVRREFLNYLNLDTHF

SEQ ID NO: 10266 - protein, 226 aa, unidentified
  source 1..226: note = Maribacter vaceletii
  REGION 1..226: note = tr|A0A495E678|A0A495E678_9FLAO GTP cyclohydrolase 1; OS = Maribacter vaceletii OX=1206816 GN=folE PE=3 SV=1
MKIDTTLEEQFDNMGDDHISSAEDTPMREDAFVLNDKEKIEKIKASVTDILHTLGLDLNDDSLKGTPNRVAKMFVNEIFGGLHPDRKPKASTFDNKYKYGEMLVEKNITLYSTCEHHLLPIVGRAHIAYISSGSVVGLSKMNRIVDYYAKRPQVQERLTIQVVKELQKVLGTEDVACIIDAKHLCVNSRGISDIESSTVTAEYGGKFKEEAVRREFLNFIQLETKF

SEQ ID NO: 10267 - protein, 199 aa, unidentified
  source 1..199: note = Maribacter vaceletii
  REGION 1..199: note = tr|A0A495E7G0|A0A495E7G0_9FLAO GTP cyclohydrolase 1; OS = Maribacter vaceletii OX=1206816 GN=folE PE=3 SV=1
MSSYKNLEEYDQEVTKEVQEKYTSILNGIGEDVSREGLVKTPERAAKAMQFLTQGYDLDPVKILKGAMFKEDYDDMVIIKDIELYSLCEHHMLPFFGKAHIAYIPNGHIVGLSKIPRIVDVFARRLQVQERLTHDILECINNTLKPQGVAVVIEASHMCMMMRGVQKQNSVTTTSGFRGQFEKQETRNEFLKLISSHLS

SEQ ID NO: 10268 - protein, 366 aa, Maribius pelagius
  REGION 1..366: note = tr|A0A1H8LFJ0|A0A1H8LFJ0_9RHOB GTP cyclohydrolase FolE2 OS=Maribius pelagius OX=387096 GN=folE2 PE=3 SV=1
MNIHLHDHDGDMSRQEAQRLMARLRAWARSADPDDLATLDPAIRSLAGGLGDDYPALDDVYDDTFRADAAYRATMPDLQNGPASLIEGAPRQIQHVGISNFRLPIRFRTRDNGDLTLETSVTGTVSLEAEKKGINMSRIMRTFYRRAEETFSFAVIEAALDDYKADLESFDARIQMRFSFPMKVESLRSGLTGYQYYDFALELVEKAGVRRKIVHLDYVYSSTCPCSLELSEHARRERGQLATPHSQRSVARVSVVLDEGHGTLWFEDLIDLCRAAVPTETQVMVKREDEQAFAELNAANPIFVEDAARLFALQLQDEPRVGDFRVVASHQESLHSHDAVSVLTEGPTFDHDSLDPRLFATLFHVG

SEQ ID NO: 10269 - protein, 366 aa, Maribius salinus
  REGION 1..366: note = tr|A0A1M6LGH0|A0A1M6LGH0_9RHOB GTP cyclohydrolase FolE2 OS=Maribius salinus OX=313368 GN=folE2 PE=3 SV=1
MNIHLHDHDGDMSRQEAQRLMARLRAWARSADPDDLATLDPAIRSLAGGLGDDYPALDDVYDDTFRADAAYRATMPDLQNGPASLIEGAPRQIQHVGISNFRLPIRFRTRDNGDLTLETSVTGTVSLEAEKKGINMSRIMRTFYRRAEETFSFAVIEAALDDYKADLESFDARIQMRFSFPMKVESLRSGLTGYQYYDFALELVEKAGVRRKIVHLDYVYSSTCPCSLELSEHARRERGQLATPHSQRSVARVSVVLDEGDDTLWFEDLIDLCRAAVPTETQVMVKREDEQAFAELNAANPIFVEDAARLFALQLQDEPRVGDFRVVASHQESLHSHDAVSVLTEGPTFDHDSLDPRLFATLFHVG

SEQ ID NO: 10270 - protein, 205 aa, Maricaulis maris
  REGION 1..205: note = sp|Q0AM02|GCH1_MARMM GTP cyclohydrolase 1; OS = Maricaulis maris (strain MCS10) OX=394221 GN=folE PE=3; SV = 1
MDAVTPDAARIAAAINTKPSREEAEAAVRTLISWAGDDPTREGLLDTPKRVVKAYEEWFSGYDADPLKALGKTFEDVQGYDDMVMLTNIDVESHCEHHLAPIMGVAHVAYLPSKAVVGISKIARVVEIFSKRMQTQETMTAQIADALTEAMEPRGVAVLVDAKHQCMTTRGVHHPNVSTITTTFTGEFRNDRDLKDRFMRLLERA

SEQ ID NO: 10271 - protein, 205 aa, Maricaulis maris
  REGION 1..205: note = tr|A0A495CYD1|A0A495CYD1_9RHOB GTP cyclohydrolase 1; OS = Maricaulis maris OX=74318 GN=folE PE=3 SV=1
MDAVTPDAARLAAAIKSKPSREEAEAAVRTLISWAGDDPDREGLLDTPKRVVKAYEEWFSGYGADPLKALGKTFEDVQGYDDMVMLTNIDVESHCEHHLAPIMGVAHVAYLPSKAVVGISKIARVVEIFSKRMQTQETMTAQIADALTEAMEPRGVAVLVDAKHQCMTTRGVHHPNVSTITTTFTGEFRNDRDLKDRFMRLLERA

SEQ ID NO: 10272 - protein, 205 aa, Maricaulis salignorans
  REGION 1..205: note = tr|A0A1G9URG1|A0A1G9URG1_9RHOB GTP cyclohydrolase 1; OS = Maricaulis salignorans OX=144026 GN=folE PE=3 SV=1
MDAVTTDSTRLTEAKPARPSRHEAEEAVRTLIAWAGDDPAREGLLDTPKRVAKAYEEWFSGYGADPAAALGKTFEDVQGYDDMVMLTNIDVESHCEHHLAPIMGVAHVAYLPSAAVVGISKIARVVEIFCKRMQTQETMTAQIADALMDAMNPRGVAILIDAKHQCMTTRGVHHPNVSTITSTFTGEFKTDANLRDRFMRLAEKA

SEQ ID NO: 10273 - protein, 209 aa, Maricaulis sp.
  REGION 1..209: note = tr|A0A2D8BVR1|A0A2D8BVR1_9RHOB GTP cyclohydrolase 1; OS = Maricaulis sp. OX=1486257 GN=folE PE=3 SV=1
MDAHNRDALRVVSNKNRPTREQAEEAVRTLIAWAGDDPTREGLLDTPKRVAKAWEEWFSGYQADPAEELSRVFEEVGGYDDLVLLTNIDVESHCEHHLAPILGVAHVAYLPKSKVVGISKIARVVEIFSKRMQTQETMTAQIANALMDAMDARGVAVLVDAKHQCMTTRGVHHPNVSTVTTTFTGEFKTNDELRGRFLRHIDRAQVVQR

SEQ ID NO: 10274 - protein, 205 aa, Maricaulis sp.; identical to SEQ ID NO: 10271
  REGION 1..205: note = tr|A0A1Q8FJ27|A0A1Q8FJ27_9RHOB GTP cyclohydrolase 1; OS = Maricaulis sp. W15 OX=1772333 GN=folE PE=3 SV=1

SEQ ID NO: 10275 - protein, 282 aa, Marichromatium gracile
  REGION 1..282: note = tr|A0A4R4A6G9|A0A4R4A6G9_MARGR GTP cyclohydrolase FolE2 OS=Marichromatium gracile OX=1048 GN=folE2 PE=3 SV=1
MEHVLESNRCNATADIADVQGSADTRRIAIDKVGIKDIRHPVRVRDRSGNEQHTVATFNMYVYLPHDFKGTHMSRFVQVLNNHEEEIGVASFKDMLAEMSTRLESEAGHIEMRFPFFMRKQAPVSGVQSLLDYEVTLIGEIRHGEPALQVKVVIPVTSLCPCSKKISAYGAHNQRSHVTLQVRMRDFIWIEELIEMVESEASSELFGLLKRPDEKYVTEHAYDNPKFVEDMVRDVAKRLNEDDRILYYVVEAENFESIHNHSAYALIERDKEAEARTAEASL

SEQ ID NO: 10276 - protein, 212 aa, Marichromatium gracile
  REGION 1..212: note = tr|A0A4R4A6X0|A0A4R4A6X0_MARGR GTP cyclohydrolase 1; OS = Marichromatium gracile OX=1048 GN=folE PE=3 SV=1
MAEQARAPKIVTHSHYATSFEAESEAEVYDPRKEGLVREMLDALGEDAEREGLKRTPLRVAKALDFLTSGYQMSAEEIIKKALFEEDAKEMVIVRDIEFYSMCEHHMLPFFGHAHVGYLPNGKVVGLSKIARVVDVFARRLQVQERLTNQVADALMEHLGAHGVAVVMEASHTCMMMRGVQKQRSTTVSSAMRGAFESDPRTRAEFMSFVRG

SEQ ID NO: 10277 - protein, 282 aa, Marichromatium purpuratum
  REGION 1..282: note = tr|W0E155|W0E155_MARPU GTP cyclohydrolase FolE2; OS = Marichromatium purpuratum 984 OX=765910 GN=folE2 PE=3; SV = 1
MEHVLESNRCNATADIADVQGSADTRRIAIDKVGIKDIRHPVRVRDRSGSEQHTVATFNMYVYLPHDFKGTHMSRFVQVLNNHEREISIASFKEMLIEMSTRLESEAGHIEMRFPFFMSKRAPVSGVESLLDYEVTLIGEIRDGEPALQVKVVIPVTSLCPCSKKISAYGAHNQRSHVTLQVRMRDFIWIEELIEMVEAEASSELFGLLKRPDEKYVTEHAYDNPKFVEDLVRDVAKRLNEDDRILYYVVEAENFESIHNHSAYALIERDKEAEARTAEASL

SEQ ID NO: 10278 - protein, 212 aa, Marichromatium purpuratum
  REGION 1..212: note = tr|W0DXR3|W0DXR3_MARPU GTP cyclohydrolase 1; OS = Marichromatium purpuratum 984 OX=765910 GN=folE PE=3; SV = 1
MAEQARAPKIVTHSHYATSFEAESEAEVYDPRKEGLVREMLDALGEDAEREGLKRTPLRVAKALDFLTSGYQMSAEEIIKKALFEEDAKEMVIVRDIEFYSMCEHHMLPFFGHAHVGYLPNGKVVGLSKIARVVDVFARRLQVQERLTNQVADALMEHLGAHGVAVVMEASHTCMMMRGVQKQRSTTVSSAMRGTFESDPSTRAEFMSFVRG

SEQ ID NO: 10279 - protein, 206 aa, Marihabitans asiaticum
  REGION 1..206: note = tr|A0A560WDG8|A0A560WDG8_9MICO GTP cyclohydrolase 1; OS = Marihabitans asiaticum OX=415218 GN=folE PE=3 SV=1
MSHDLTAEAAAWDTPPDRAMDLPRIEAAVREILIAVGEDPDREGLLDTPARVARSYAETFAGLHQDPAGLLATTFDIDHDELVIVRDIALYSTCEHHLVPFHGVAHVGYVPGRSGKVTGLSKLARLVDVYARRPQVQERLTTQIADALVEHLDVAGVIVVVEAEHLCMSMRGVRKPGARTLTSAVRGQLRDPATRAEAMALLTEAR

SEQ ID NO: 10280 - protein, 205 aa, Marinactinospora thermotolerans
  REGION 1..205: note = tr|A0A1T4SSH5|A0A1T4SSH5_9ACTN GTP cyclohydrolase 1; OS = Marinactinospora thermotolerans DSM 45154 OX=1122192; GN = folE PE=3 SV=1
MTDSAEDDLTLGHPISTEVDQPRIEKAVREILLAIGEDPDRDGLRDTPARVARAYAEQFAGLGQGPEDVLTTVFEAGHEEMVLVKDIELYSTCEHHLVPFYGVAHVGYIPNAKGQITGLSKLARLVDVYARRPQVQERLTTQVADAVMTHLEPRGVIVVVEAEHLCMTMRGVRKPGAKTVTSAVRGDFRNRDRTRAEAMSLILRD

SEQ ID NO: 10281 - protein, 198 aa, unidentified
  source 1..198: note = Unknown
  REGION 1..198: note = tr|A0A0C1RBE3|A0A0C1RBE3_9ACTN GTP cyclohydrolase 1; OS = marine actinobacterium MedAcidi-G1 OX=1550399 GN=folE; PE = 3 SV=1
MSLDSLEKKLFDSTRAENAVRELLYAIGEDPDRDGLLETPKRVARMYEEVTSGIRCEPAEELNKCFDVDHNEMIMVRDISLYSLCEHHLVPFIGQAHIAYIPRTNGSIVGLSKLARLVDGYAKRLQVQERLTSQIADALESKLNPIGALVVIEAEHLCMSMRGIKKPGSSTVTSAVRGIFRDDVSARSEAMRFLDHSR

SEQ ID NO: 10282 - protein, 194 aa, unidentified
  source 1..194: note = Unknown
  REGION 1..194: note = tr|A4AFQ1|A4AFQ1_9ACTN GTP cyclohydrolase 1; OS = marine actinobacterium PHSC20C1 OX=312284 GN=folE PE=3; SV = 1
MSIDVARIEAAVAEILDAIGEDPARAGLTATPRRVAEAYAEFFAGNGMDALDHLADSIEFTANADQTGELVVLRDIEFRSMCEHHLLPFLGVAHVAYVPDERIIGLGNLARVVETISARAQLQERLTEEIADAIDTGLSPRGVLVIIDAAHGCVSARGSRQTSSSTVTLASRGVLSQPVERAEVLALIGRADNA

SEQ ID NO: 10283 - protein, 219 aa, unidentified
  source 1..219: note = Unknown
  REGION 1..219: note = tr|A0A1Q3GN98|A0A1Q3GN98_9BACT GTP cyclohydrolase 1; OS = marine bacterium AO1-C OX=1905359 GN=folE PE=3 SV=1
MENGKYEEMGDEHVATSYETPMRDDAFELSDDTKIKLIEERFREIMDILGLDLTDDSLNGTPHRVAKMYVKEIFSGLNPENKPKPTMFENLYKYNEMLVEKDITFYSNCEHHFVPIYGKAHVAYISSGKVIGLSKINRIVQYYARRPQVQERLTMQIGKELEKMLETENVAVILDADHMCVSSRGVQDTSSSTITSYYGGKFQEENTRNEFLKYVDMRK

SEQ ID NO: 10284 - protein, 227 aa, unidentified
  source 1..227: note = Unknown
  REGION 1..227: note = tr|A0A1Q3GZH6|A0A1Q3GZH6_9BACT GTP cyclohydrolase 1; OS = marine bacterium AO1-C OX=1905359 GN=folE PE=3 SV=1
MIQEKLNGLDADEIGDLHVATSYDTPLREDAFLLDDATKMKLIEEYFGKIMHTLGLDLNDDSLKGTPHRVAKMYVKEIFSGLNPANKPKVKVFDNKYQYGEMLIEKNITLYSSCEHHFLPIIGKAHVGYIANDKVIGLSKINRIVDYFARRPQVQERLSRQIFEEMKKDLGTEDVAVVIESKHLCVSSRGVQDTDSSTITAEYGGKFKDNEVRKEFLAYINQDYLKE

SEQ ID NO: 10285 - protein, 235 aa, unidentified
  source 1..235: note = Unknown
  REGION 1..235: note = tr|A0Z6H9|A0Z6H9_9GAMM GTP cyclohydrolase 1; OS = marine gamma proteobacterium HTCC2080 OX=247639 GN=folE; PE = 3 SV=1
MLTSTHQKPQALELADNTVNLRPSISREATLVREALVARGLETPLIDNGLNREQKLAIVKEAFTDITQALGLDLTDDSLCDTPDRISRMYIDEIFSGLDYGNFPKISVIDNKMQVDEMVMIDDIDLTSTCEHHFVTIDGQARVAYLPRNKIIGLSKINRIVRFFAQRPQVQERLTQQILVALQTLLETDNVAVSMEAVHYCVKSRGVMDTSSRTRTTSLGGMFKENPAARSEFLR

SEQ ID NO: 10286 - protein, 201 aa, unidentified
  source 1..201: note = Unknown
  REGION 1..201: note = tr|A0YDA3|A0YDA3_9GAMM GTP cyclohydrolase 1; OS = marine gamma proteobacterium HTCC2143 OX=247633 GN=folE; PE = 3 SV=1
MGQPITTSKEDNVPDDNIETMESAYATIIDGIGEDLSRDGLLDTPKRAAKAMKFLTHGYNQTVEEIVNGALFESDASEMVLVSDIELYSMCEHHVLPFIGKCHVAYIPGGKVLGLSKVARIVDMYARRLQIQESLTTQIARSVMDITGAAGVGVIIEAKHMCMMMRGVQKQNSVMRTSSLLGCFRDNDKTRAEFLSLVNVR

SEQ ID NO: 10287 - protein, 367 aa, unidentified
  source 1..367: note = Marinibacterium profundimaris
  REGION 1..367: note = tr|A0A225NK54|A0A225NK54_9RHOB GTP cyclohydrolase FolE2 OS=Marinibacterium profundimaris OX=1679460 GN=folE2; PE = 3 SV=1
MTIHAPTLQRKPDQDEAAEALAVLRSWARGASDAEISQLDPAIAKLIPGGGAVSYPSLSRQYPDDFAVDANYKASLPDLQNGPSSLIRGAKQEIQHVGISNFRLPIRFHTRDNGDVTLETSVTGSVSLEADKKGINMSRIMRSFYAHAEKTFSFEVIEAALDDYKSDLESFDARIMMRFSFPMKVDSLRSGLAGYQYYDIALELVERAGTRRKIMHLDYVYSSTCPCSLELSEHARSMRGQLATPHSQRSVARISVELERDAGCLWFEDLVEACRRAVPTETQVMVKREDEQAFAELNAANPIFVEDAARLFCESLEADARIGDFRIIASHQESLHSHDAVSVLTRGTTFDSESLDPQLFATLHHRG

SEQ ID NO: 10288 - protein, 190 aa, unidentified
  source 1..190: note = Mariniblastus fucicola
  REGION 1..190: note = tr|A0A5B9PAP3|A0A5B9PAP3_9PLAN GTP cyclohydrolase 1; OS = Mariniblastus fucicola OX=980251 GN=folE PE=3 SV=1
MKKDVDHEAIKQAVRTILLSVGEDPDRPGLVETPRRVAGMYAEMFSGLDVDPGRHLEVTFPEEYDEMVLVRDISFTSMCEHHLLPFTGVAHVAYVPHGKVTGLSKLARVVEEVSRRPQVQERMTQTVADLIDEKLSTRGVAVVCSAEHSCMSIRGIRKPGSRTVTSALRGIFKTDQATRAEFMSLINGSQ

SEQ ID NO: 10289 - protein, 263 aa, unidentified
  source 1..263: note = Mariniblastus fucicola
  REGION 1..263: note = tr|A0A5B9PH15|A0A5B9PH15_9PLAN GTP cyclohydrolase 1 type 2 OS=Mariniblastus fucicola OX=980251 GN=MFFC18_39780; PE = 4 SV=1
MNTIASICDFLDQFAPTSLAEDWDNVGLILGDPNREAARVMTCLTVTPESATEAIEKKADLIVSHHPLPFSPTKRITTDQTATRLIWELAGAGVSIHSPHTGFDSANEGINQMLCDRLSIAATRPIVPNRNDPEMPGAGRIGKLPASTSLREFALTVKELFALPRIQVVGDLDASIQRVASACGSGGSFLSGAASRGAECLVTGEATFHSVLEARARKVGLILMGHYFSERFAIEVLSDKLSEAFPEATVWASEQECDPIESL

SEQ ID NO: 10290 - protein, 209 aa, unidentified
  source 1..209: note = Marinicauda algicola
  REGION 1..209: note = tr|A0A4S2H4G4|A0A4S2H4G4_9RHOB GTP cyclohydrolase 1; OS = Marinicauda algicola OX=2029849 GN=folE PE=3 SV=1
MDALTDKKTLDAATASTIARPSRQEAEEAVRTLLRWAGDDPRREGLIDTPKRVVKAYEEWFAGYSKDAGAELGKVFEDVQGYDDMVMLTNMDVESHCEHHMAPILGTACVAYLPDRAVVGISKIAKVVEIFSKRLQTQETMTAQIADAIEEAMKPRGVAVFVDAKHQCMTTRGVHHPNVSTITTTFTGEFKANPELRERFMRLCEKNYR

SEQ ID NO: 10291 - protein, 209 aa, unidentified
  source 1..209: note = Marinicauda pacifica
  REGION 1..209: note = tr|A0A4S2HAQ7|A0A4S2HAQ7_9RHOB GTP cyclohydrolase 1; OS = Marinicauda pacifica OX=1133559 GN=folE PE=3 SV=1
MDALTDKTVLDAASASGVERPSRDEAEEAVRTLLRWAGDDPRREGLLDTPKRVVKAYEEWFAGYTKDAAAELGKVFEDVQGYDDMVMLTNMDVESHCEHHMAPILGTACVAYLPDRAVVGISKIAKVVEIFSKRLQTQETMTAQIADVIESAMKPRGVAVFVDAKHQCMTTRGVHHPNVSTVTTTFTGEFKANPELRERFMRLCERNAR

SEQ ID NO: 10292 - protein, 208 aa, unidentified
  source 1..208: note = Marinicauda sp.
  REGION 1..208: note = tr|A0A2U2BQR2|A0A2U2BQR2_9RHOB GTP cyclohydrolase 1; OS = Marinicauda sp. WD6-1 OX=2135793 GN=folE PE=3 SV=1
MDAITDKTMLETAEEVPARPSREEAEEAVRTLIRWAGDDPRREGLLDTPGRVVKAYQEWFAGYEKDAADELGRVFEDVQGYDDMVMLTDIDVESHCEHHMAPIIGTACVAYLPDRAVVGISKIAKVVEIFSKRLQTQETMTAQIADAIEEAMKPRGVAVFVDAKHQCMTTRGVHHPNVSTITTTFTGEFKANPELRERFMRLTEKSRR

SEQ ID NO: 10293 - protein, 197 aa, unidentified
  source 1..197: note = Marinicaulis flavus
  REGION 1..197: note = tr|A0A2S7JZC7|A0A2S7JZC7_9PROT GTP cyclohydrolase 1; OS = Marinicaulis flavus OX=2058213 GN=folE PE=3 SV=1
MSGQFGERTEEQRERALEAVRELIRWIGDNPAREGLKDTPRRVVDAYLEYFQGYDQQPEDYLTRTFEQVGGYDEIVLLKEIPFHSHCEHHMAPIIGKAHVAYLPTDKVVGISKLARVVQAYARRLQVQERLTAEIADCIQKVLEPQGVAVVIEASHACMTARGVNTPGVSMTTSRMMGVFREDQKAREEVIKLIGIK

SEQ ID NO: 10294 - protein, 274 aa, unidentified
  source 1..274: note = Marinicaulis flavus
  REGION 1..274: note = tr|A0A2S7KB94|A0A2S7KB94_9PROT GTP cyclohydrolase FolE2 OS=Marinicaulis flavus OX=2058213 GN=folE2 PE=3 SV=1
MPANEFDVSALPDIQNRRDSRNVAIDHVGVKGVRYPVVIMSTQGAIPTIGEFSMSVGLKSEVKGTHMSRFIEMLESHSSPLTQENFVNLARATADRLDAPFCEIELKFPFFQNKSAPVSGAQSLLDYDVVWRTVVSGASGAKFTLKAIVPATSLCPCSKEISKYGAHNQRSLISIEATLLEMVSLEELVNVAQNAASCEVYGLLKRPDEKFVTERAYDNPKFVEDMVRDVAVALSADSRILDYAVEVENFESIHNHTAYARIVGRPDTKIQKAA

SEQ ID NO: 10295 - protein, 306 aa, Marinicella litoralis
  REGION 1..306: note = tr|A0A4R6Y0J5|A0A4R6Y0J5_9GAMM GTP cyclohydrolase FolE2 OS=Marinicella litoralis OX=644220 GN=folE2 PE=3 SV=1
MLDSTNQSCTLPDIASEEKAKIGGQLQWVGMSDIEMPLLMSADVSVPASVARVRAEVSLDDEASKGIHMSRLYLACDQAFSHETIDYLVLHQLTQNFLQTHKKLSQNALIEVEGEALLRRKALVSDHSGWRSYPIKLSVVQCKKSGLSKYLSFQVTYSSTCPCSAALARQLIQENFKQQFDQNNISKQDVIDWLGSEQGINATPHSQRSSAVIKVKLQNEQQEIPLETLINLVENSLQTAVQAAVKRADEQAFALRNGQNLMFCEDAARRIKQVLSKSALVKQFHLRVTHHESLHPHDATAEAYSE

SEQ ID NO: 10296 - protein, 208 aa, unidentified
  source 1..208: note = Marinifilaceae bacterium
  REGION 1..208: note = tr|A0A434AET7|A0A434AET7_9BACT GTP cyclohydrolase 1; OS = Marinifilaceae bacterium T3-2 S1-C OX=2487017 GN=folE; PE = 3 SV=1
MEFSLNGYDNKGFTKIEKYNQETTEELMYHYKKVLELLGEDAEREGLLKTPLRVAKAMQFLTQGYHSKPEDILRSAMFQEDYKQMVIVKDIEVYSMCEHHMLPFVGRAHVAYIPNGHITGLSKIARVVDAFARRLQVQERLTTQIKDCIQDTLNPLGVAVVIEAQHMCMSMRGVQKQNAITTTSDFTGAFQKVATREEFIRLISAKTI

SEQ ID NO: 10297 - protein, 208 aa, unidentified
  source 1..208: note = Marinifilum breve
  REGION 1..208: note = tr|A0A2V3ZV59|A0A2V3ZV59_9BACT GTP cyclohydrolase 1; OS = Marinifilum breve OX=2184082 GN=folE PE=3 SV=1
MEFSINGQEDKGFTKIEKYNQETTEELMYHYKKVLELLGEDAEREGLVKTPLRVAKAMQFLTQGYHIKPEDILRSAMFKEDYKQMVIVKDIEVYSMCEHHMLPFVGRAHVAYIPNGYITGLSKIARVVDAFARRLQVQERLTTQIKDCINDTLNPLGVAVVIEAQHMCMSMRGVQKQNSITTTSDFTGAFEKVATREEFIRLISAKTI

SEQ ID NO: 10298 - protein, 208 aa, unidentified
  source 1..208: note = Marinifilum flexuosum
  REGION 1..208: note = tr|A0A419X816|A0A419X816_9BACT GTP cyclohydrolase 1; OS = Marinifilum flexuosum OX=1117708 GN=folE PE=3 SV=1
MEFSINGQEDKGFTKIEKYNQETTEELMYHYKKVLELLGEDAEREGLEKTPLRVAKAMQFLTQGYHIKPEDILRSAMFKEDYKQMVIVKDIEVYSMCEHHMLPFVGRAHVAYIPNGYITGLSKIARVVDAFARRLQVQERLTTQIKDCINDTLSPLGVAVVIEAQHMCMSMRGVQKQNSITTTSDFTGAFENLATREEFIRLISAKTI

SEQ ID NO: 10299 - protein, 256 aa, Marinifilum sp.
  REGION 1..256: note = tr|A0A4T2AEU7|A0A4T2AEU7_9BACT GTP cyclohydrolase FolE2 OS=Marinifilum sp. JC120 OX=2302941 GN=folE2 PE=3; SV = 1
MEDVQNSPAKVAMPIDRVGVRDLTLPLVVRDRESGSQSTMAKVALSVDLPAHFKGTHMSRFVEALEDWTEELDYQSFYNLLSDILRRLEAERAHAELSFPYCLQKKSPVSGRKGIMSYECTVEGEMVGENLEFTLGVKVPVMTVCPCSKAISDEGAHSQRAVVHIRTKSKGFVWIEDLVEIAEASGSCEVFSLLKREDEKHVTEKSFSNPTFVEDVVRNAAMGLEKHPKILWYKVDVESFESIHNHCAFASIAKPE

SEQ ID NO: 10300 - protein, 195 aa, Mariniflexile fucanivorans
  REGION 1..195: note = tr|A0A4R1RNX7|A0A4R1RNX7_9FLAO GTP cyclohydrolase 1; OS = Mariniflexile fucanivorans OX=264023 GN=folE PE=3 SV=1
MPYKHFEEYNIQVTDDVKDRYKHIIEDLGENTQRDGLLKTPERAAKAMQFLTQGYNQDPVEILKSAMFKESYNEMVIVKDIELYSLCEHHILPFFGKAHIAYIPNGQIVGLSKLPRIVDVFARRLQVQERLTEQILDCINDTLNPQGVAVVIEASHMCMMMRGVQKQNSTTTTSGFRGQFEKIETRNEFLKLIGK

SEQ ID NO: 10301 - protein, 231 aa, Mariniflexile fucanivorans
  REGION 1..231: note = tr|A0A4R1RPG3|A0A4R1RPG3_9FLAO GTP cyclohydrolase 1; OS = Mariniflexile fucanivorans OX=264023 GN=folE PE=3 SV=1
MIKEAVVNKKNGHNLNVFSFEDIGDDHIYTGLETPMKKDAFKRSDTEKKQRIALLFEEIMDVMGLDLTDDSLKGTPERVAKMYIDEIFSGLNQANKPKIALFDNKYQYNQMLVEKNISFYSNCEHHFVPIYGKAHVAYISSGKVIGLSKLNRIVQYYSKRPQVQERLTNQIAEDLKNILETEDVAVIIDAKHLCVSSRGIKDESSATVTSYYGGQFNNASKIAELQNYLKD

SEQ ID NO: 10302 - protein, 225 aa, Mariniflexile sp.
  REGION 1..225: note = tr|A0A385BJX5|A0A385BJX5_9FLAO GTP cyclohydrolase 1; OS = Mariniflexile sp. TRM1-10 OX=2027857 GN=folE PE=3 SV=1
MKIKNNIEEFDSLGDDHIGTSSDTPLRSDAFKLTNEEKIDIIKDDVRHIMETLGLDLTDDSLNGTPNRVAKMFVKEIFGGLDPKKKPSASTFDNKYKYGEMLVEKNITVYSTCEHHLLPIVGKAHIAYISSGSVVGLSKMNRIVDYYAKRPQVQERLTIQIVKELQEVLKTQDVACVIDAKHLCVNSRGIRDVDSSTVTSEFGGKFKEETTRREFLDYIKLDTKF

SEQ ID NO: 10303 - protein, 224 aa, Mariniflexile sp.
  REGION 1..224: note = tr|A0A385BJV6|A0A385BJV6_9FLAO GTP cyclohydrolase 1; OS = Mariniflexile sp. TRM1-10 OX=2027857 GN=folE PE=3 SV=1
MTKLNGNTRLVEESLKNSNQHVSIKNPLRDDAFDVDDTLKTELIAEKFKDIIEILGFDLTNDSIKDTPNRVAKMYVNEIFKGLNPINKPKVAVFKNEYGYHTPLVELNIPFTSFCEHHFVPIQGKVNIAYIPKDYVIGLSKIHRLVDFYARRPQVQERLTMQIVQELSTTLDTKDVGVVLKANHSCISCRGVEDFGSLTLTSVFLGQIENDYNLMSVLLGSNSV

SEQ ID NO: 10304 - protein, 207 aa, Marinilabilia salmonicolor
  REGION 1..207: note = tr|A0A2T0XDN3|A0A2T0XDN3_9BACT GTP cyclohydrolase 1; OS = Marinilabilia salmonicolor OX=989 GN=folE PE=3 SV=1
MEHTLHGDNGYAKIESYDDKTTEALSDHYTEVLKLLGEDETREGLEKTPLRVAKAMQFLTQGYNMDPEDILKSAMFREDYQQMVVVKDIELYSMCEHHMLPFFGKAHVAYIPRHHITGLSKIARVVEAFARRLQVQERLTTQIKECIHNTLNPLGVAVVIEAQHMCMQMRGVQKQHSVTTTSDFTGAFLKNQATREEFFNIIGSSLH

SEQ ID NO: 10305 - protein, 207 aa, Marinilabilia sp.
  REGION 1..207: note = tr|A0A2U2BA74|A0A2U2BA74_9BACT GTP cyclohydrolase 1; OS = Marinilabilia sp. WTE OX=2162893 GN=folE PE=3 SV=1
MKHTLHGDNGYAKIESYDDKTTDELSTHYREVLKILGEDETREGLEKTPLRVAKAMQFLTQGYNMDPEDIVKSAMFREDYQQMVVVKDIELYSMCEHHMLPFFGKAHVAYIPRHHITGLSKIARVVEAYARRLQVQERLTTQIKECLHKTLNPLGVAVVIEAQHMCMQMRGVQKQHSVTTTSDFTGAFLKNMATREEFFNIIGSSLH

SEQ ID NO: 10306 - protein, 207 aa, unidentified
  source 1..207: note = Marinilabiliaceae bacterium
  REGION 1..207: note = tr|A0A4Q8RM15|A0A4Q8RM15_9BACT GTP cyclohydrolase 1; OS = Marinilabiliaceae bacterium JC017 OX=2234116 GN=folE; PE = 3 SV=1
MEFTLNGKKGYAKIESFDDKTTEDLSQSYFRVLELLGEDPTREGLEKTPLRVAKAMQFLTQGYNMNPEEIIRSAMFKEDYQQMVVVKDIELYSMCEHHILPFFGKAHVAYIPRHHITGLSKIARVVEAFARRLQVQERLTTQIKNCIQDTLNPLGVAVVIEAQHMCMQMRGVQKQHSVTTTSDFTGAFMKNIATREEFFNIIGTKLH

SEQ ID NO: 10307 - protein, 207 aa, unidentified
  source 1..207: note = Marinilabiliaceae bacterium
  REGION 1..207: note = tr|A0A359FUH2|A0A359FUH2_9BACT GTP cyclohydrolase 1; OS = Marinilabiliaceae bacterium OX=2053574 GN=folE PE=3 SV=1
MDFSLNGGRGYSKIESYDDQMTTELAKIYKRSLELLGEDISREGLEKTPLRVAKAMQFLTQGYNMKPDEIIRSAMFREDYQQMVVVKDIELYSMCEHHLLPFFGKAHVAYIPRHHITGLSKIARVVEAFARRLQVQERLTTQIKNCIQETLNPLGVAVLIEAQHTCMQMRGVQKQHSVTTTSDFTGAFLKSIATREEFFNIIGSRLH

SEQ ID NO: 10308 - protein, 211 aa, unidentified
  source 1..211: note = Marinilabiliales bacterium
  REGION 1..211: note = tr|A0A2N5Z3G6|A0A2N5Z3G6_9BACT GTP cyclohydrolase 1; OS = Marinilabiliales bacterium OX=2053303 GN=folE PE=3 SV=1
MKYLNSNLETSESDGFTKIEKYSEKTTRELADSYRKVLVGLGEDPEREGLVKTPERVAKAMQFLTHGYNLNPEDILKSAMFKEEYKQMVIVKDIEIYSMCEHHMLPFIGKAHVAYIPNGYITGLSKIARVVEAYSRRLQVQERLTTQIRDCIQNTIKPLGVAVVIEARHLCMMMRGVQKQNSVTTTSAFTGAFMKDVTRQEFNHLIATQLH

SEQ ID NO: 10309 - protein, 213 aa, unidentified
  source 1..213: note = Marinilabiliales bacterium
  REGION 1..213: note = tr|A0A356H8W1|A0A356H8W1_9BACT GTP cyclohydrolase 1; OS = Marinilabiliales bacterium OX=2053303 GN=folE PE=3 SV=1
MKTITNGLIDPDDDFGYLRIDHYNEERTKKLTLLYEQVLDALGENVDREGLARTPVRVAKALQFLTHGYSAKPEEILKSAMFKEDYSQMVLVKDIEVYSMCEHHMLPFFGKAHVAYIPDGYITGLSKVARVVEVFARRLQVQERLTNQIKDCIQDTLKPKGVAVVIEAAHMCMQMRGIEKQESVTTTSAFTGVFLNNPSTREEFIHLIGTKLH

SEQ ID NO: 10310 - protein, 192 aa, unidentified
  source 1..192: note = Marinimicrobia bacterium
  REGION 1..192: note = tr|A0A101I983|A0A101I983_9BACT GTP cyclohydrolase 1; OS = Marinimicrobia bacterium 46_43 OX=1635280 GN=folE PE=3; SV = 1
MSNPRIKKLETITLDLLKEIGEDPQRDGLIKTPYRVAKSWEFLSKGYEMNLKDIINDAIYDEESRGMVVVRDIDFFSMCEHHMLPFFGVVHVGYIPNGKVLGLSKIPRIVEMYSRRLQIQERMTRQIAETLWKTVHPIGVGVVIEGQHMCMQMRGVEKKNSYTTTSTVLGEFHDDPETRAEFLTMISKKTFG

SEQ ID NO: 10311 - protein, 192 aa, unidentified; identical to SEQ ID NO: 10310
  source 1..192: note = Marinimicrobia bacterium
  REGION 1..192: note = tr|A0A117LL79|A0A117LL79_9BACT GTP cyclohydrolase 1; OS = Marinimicrobia bacterium 46_47 OX=1635279 GN=folE PE=3; SV = 1

SEQ ID NO: 10312 - protein, 179 aa, Marinimicrobium koreense
  REGION 1..179: note = tr|A0A3N1NYA8|A0A3N1NYA8_9GAMM GTP cyclohydrolase 1; OS = Marinimicrobium koreense OX=306545 GN=folE PE=3 SV=1
MKEHFARIIEGIGEDLTRPGLVDTPKRAAKAFQFLTKGYEQDLEEVVNGALFPSDSSEMIMVKDIELYSLCEHHLLPFIGKAHVAYIPTGHVLGLSKVARIVDMFARRLQIQEQLTVQIAESIQNITGASGVGVIIEAQHMCMMMRGVEKQNSVMKTSAMLGTFRSNQATRTEFLSLLR

SEQ ID NO: 10313 - protein, 179 aa, Marinimicrobium sp.; identical to SEQ ID NO: 10312
  REGION 1..179: note = tr|A0A2D8WKW3|A0A2D8WKW3_9GAMM GTP cyclohydrolase 1; OS = Marinimicrobium sp. OX=2024837 GN=folE PE=3 SV=1

SEQ ID NO: 10314 - protein, 193 aa, unidentified
  source 1..193: note = Marininema halotolerans
  REGION 1..193: note = tr|A0A1I6TYJ7|A0A1I6TYJ7_9BACL GTP cyclohydrolase 1; OS = Marininema halotolerans OX=1155944 GN=folE PE=3 SV=1
MNVDHNKIQQAVRMILEAVGEDPDREGLLDTPARVARMYAEVFSGIDKDPKEHFGTIFSEDHEELVLVKDISFFSMCEHHLVPFYGRAHVGYIPKSGRVTGLSKLARAVDDIARRPQLQERITYTLANSIMETLEPHGVIVVVEAEHMCMTMRGVKKPGAMTVTSAVRGVFEKDPAVRAEAFSLIGIGGKLKG

SEQ ID NO: 10315 - protein, 192 aa, Marininema mesophilum
  REGION 1..192: note = tr|A0A1H2UT30|A0A1H2UT30_9BACL GTP cyclohydrolase 1; OS = Marininema mesophilum OX=1048340 GN=folE PE=3 SV=1
MNVDHEKIQQAVRMILEAVGEDPDREGLLDTPARVARMYAEVFSGLGEDPKKHFGTIFSEDHEELVLVKDISFFSMCEHHLVPFYGRAHVGYIPKSGRVTGLSKLARAVDDIARRPQLQERISYTLANSIMETLEPHGVIVVVEAEHMCMTMRGVKKPGAMTVTSAVRGVFEKDPAVRAEAFSLIGIGGKRG

SEQ ID NO: 10316 - protein, 228 aa, unidentified
  source 1..228: note = Mariniphaga anaerophila
  REGION 1..228: note = tr|A0A1M5A3R5|A0A1M5A3R5_9BACT GTP cyclohydrolase 1; OS = Mariniphaga anaerophila OX=1484053 GN=folE PE=3 SV=1
MNLFSFLKKNQSLYEINEITKMCNSGINHSNVYERIEVFDEEVTEELSQNYKNILQVLGEDVSREGLNKTPERVAKAMQFLLQGYKTDPVEILRSAMFKEDYRQMVIVKDIEIYSMCEHHLLPFFGKAHVAYIPNGTITGLSKIARVVDVFARRLQVQERLTSQIKDCIQDTLKPLGVAVVIEAQHLCMQMRGIQKQHSITTTSDFTGAFQKDATRDEFIKLISTKFS

SEQ ID NO: 10317 - protein, 240 aa, unidentified
  source 1..240: note = Mariniphaga anaerophila
  REGION 1..240: note = tr|A0A1M4T9P4|A0A1M4T9P4_9BACT GTP cyclohydrolase 1; OS = Mariniphaga anaerophila OX=1484053 GN=folE PE=3 SV=1
MKEDLLFKPVNGKVKSNGNGHSREEANGYEILGDHHIGTSAETPIRSDAFDKSDDEKIALIEDKFRDIMETIGLDLTDDSLRGTPHRVAKMFVKEIFYGLNPANKPKISVFDNKFKYNEMLLERDISLNSFCEHHFLPIVGKAHVAYVSSGEVIGLSKINRIVDYFARRPQVQERLTVQIANELKKVLKTEDVAVVIDAKHMCVSCRGIGDESSTTVTAEYSGKFKDKAVREEFLRYINL

SEQ ID NO: 10318 - protein, 242 aa, unidentified
  source 1..242: note = Mariniphaga sediminis
  REGION 1..242: note = tr|A0A399D329|A0A399D329_9BACT GTP cyclohydrolase 1; OS = Mariniphaga sediminis OX=1628158 GN=folE PE=3 SV=1
MKDDLILRSVNGNGKTKLNGNGHTKEEVNGFEIHGDNHVGTSAETPIRPDAFEKSEEEKIAVIEDKFRDIMETIGLDLTDDSLRGTPHRVAKMFVQEIFYGLNPANKPKISVFDNKFKYNEMLVEKSINLNSFCEHHFLPIYGKAHVAYISSGEVIGLSKINRIVDYFARRPQVQERLTVQIANELKKVLKTDDVAVLIDAKHMCVSCRGVGDESSTTVTSEYGGRFKDKAVREEFLKYIGL

SEQ ID NO: 10319 - protein, 207 aa, unidentified
  source 1..207: note = Mariniphaga sediminis
  REGION 1..207: note = tr|A0A399CUN6|A0A399CUN6_9BACT GTP cyclohydrolase 1; OS = Mariniphaga sediminis OX=1628158 GN=folE PE=3 SV=1
MSTTEINNSNVYERIEVYDEALTNKLSKNYRDILELIGEDISREGLDKTPERVAKAMQFLLQGYKNDPVEVLQSAMFKEDYRQMVIVKDIEIYSLCEHHLLPFFGKAHVAYIPNGTITGLSKIARVVDIFSRRLQVQERLTSQIKECIQETLKPLGVAVVIEAQHLCMQMRGIQKQHSITTTSDFTGAFQKNATRDEFIKLISTKFS

SEQ ID NO: 10320 - protein, 221 aa, unidentified
  source 1..221: note = Mariniradius saccharolyticus
  REGION 1..221: note = tr|M7X8C6|M7X8C6_9BACT GTP cyclohydrolase 1; OS = Mariniradius saccharolyticus AK6 OX=1239962 GN=folE; PE = 3 SV=1
MGIDFSHSIDEIGDEHVGTSIDTPLREDAFEMDDDLKIELIEKHFKEIMYVLGLDLTDDSLKGTPKRVAKMYVKEIFSGLNPKNKPDAKLFENKYKYNEMLVEKDITFFSNCEHHFVPIYGKAHVAYISNGNVIGLSKINRIVQYYSKRPQVQERLTMQIGNELKEALGTEDVAVVLDAHHMCVSTRGVQDVNSSTVTSFYSGKFERDENARAEFMKYISL

SEQ ID NO: 10321 - protein, 259 aa, unidentified
  source 1..259: note = Marinirhabdus gelatinilytica
  REGION 1..259: note = tr|A0A370QLX7|A0A370QLX7_9FLAO GTP cyclohydrolase 1; OS = Marinirhabdus gelatinilytica OX=1703343 GN=folE PE=3; SV = 1
MELNTFVQIFIPLVEIRIFAHCILKYATTLHMDLEKQISDTDNIGNDHIGTSTHTPLRNDAFDLSDIEKIASIKKDVHNIMQTLGLDLTDDSLKGTPNRVAKMFVQELFGGLHPDRKPKASTFENKYKYGEMLVEKNITLYSTCEHHLLPIVGKAHIAYISNGTVVGLSKMNRIVDYYAKRPQVQERLTMQIVKELQSVLNTEDVACVIDAKHLCVNSRGIRDIDSSTVTSEYGGKFKDAETRRDFLDYIQLNTDFEGV

SEQ ID NO: 10322 - protein, 199 aa, unidentified
  source 1..199: note = Marinirhabdus gelatinilytica
  REGION 1..199: note = tr|A0A370QAJ0|A0A370QAJ0_9FLAO GTP cyclohydrolase 1; OS = Marinirhabdus gelatinilytica OX=1703343 GN=folE PE=3; SV = 1
MGSYKNTEEYAIETTTKLAENFSEILKGIGENVEREGIVKTPERAAKAMQFLTSGHCQDPAGILKSAMFAEDYNDMVVVKDIELYSLCEHHILPFFGKAHIAYIPDGHIVGLSKLPRVVDVFARRLQVQERLTHDILECINNTLKPKGVAVVIEASHMCMMMRGVQKQNSVTTTSGFRGQFEKIETRNEFLKLITSDLS

SEQ ID NO: 10323 - protein, 186 aa, unidentified
  source 1..186: note = Marinisporobacter balticus
  REGION 1..186: note = tr|A0A4R2KTJ7|A0A4R2KTJ7_9CLOT GTP cyclohydrolase 1; OS = Marinisporobacter balticus OX=2018667 GN=folE PE=3 SV=1
MDKPRIEKAVREILEAIGEDPDREGLKNTPKRIAKMYEEIFSGLHEDPKKHLEIFFEEEKHEELVLVKDIPFYSMCEHHLVPFFGKAHVGYLPRNGKLTGLSKLARVVETVARRPQLQERLTACVAEALVEQLAPYGVIVVVEAEHMCMTMRGVKKSGSKTITSAVRGLFQKDAKARAEAMALIKF

SEQ ID NO: 10324 - protein, 201 aa, unidentified
  source 1..201: note = Marinitenerispora sediminis
  REGION 1..201: note = tr|A0A368TA12|A0A368TA12_9ACTN GTP cyclohydrolase 1; OS = Marinitenerispora sediminis OX=1931232 GN=folE PE=3 SV=1
MTGGFPGAEPAAGTVDHLRIEKAVREILIAIGEDPDRDGLRDTPARVARAYAEQFAGLNQRPEDVLTTVFDAGHDEIVLVKDIELYSTCEHHLVPFYGVAHVGYIPNSDGRITGLSKLARLVDVFARRPQVQERLTTQVADAVMDLLEPRGVIVVIEAEHLCMTMRGVRKPGAKTVTSAVRGDFRNRDRTRAEAMSLILGR

SEQ ID NO: 10325 - protein, 203 aa, Marinithermus hydrothermalis
  REGION 1..203: note = tr|F2NL77|F2NL77_MARHT GTP cyclohydrolase 1; OS = Marinithermus hydrothermalis (strain DSM 14884 / JCM 11576 / T1) OX=869210 GN=folE PE=3 SV=1
MERKRIELEDTGLSFETEMDLERLRVLAREWIELIGEDPEREGLERTPERVAKAWAYLTRGYRQTLEEVVNGAVFAAEGSEMVVVKGIEFYSLCEHHLLPFYGKVHVGYIPNGKILGLSKFARITEMYARRLQVQERLALQIAQAIEAVLKPQGVGVVVEGVHLCMMMRGVEKQHSATTTSAMLGVFRENAKTREEFLSLVRT

SEQ ID NO: 10326 - protein, 262 aa, Marinitoga hydrogenitolerans
  REGION 1..262: note = tr|A0A1M4VHC9|A0A1M4VHC9_9BACT GTP cyclohydrolase FolE2 OS=Marinitoga hydrogenitolerans DSM 16785 OX=1122195; GN = folE2 PE=3 SV=1
MKQKIILYTTGVNELKDVQSELDSRGIYIHGVGISDLEYPIIFNGNHTIGSFTMLVDLDENVRGTHMSRFVEVLNKYYDNLSEKKLLDMSEELKNVLEAKKAYIKVSFPYFSLKKAPITKLESYTKCDVTYEVIDDEIKLYLAIPIITLCPCSKAISNYGAHNQRALVEIGLKLNDEIKLEEIAKYVEKSSSGMVFSLLKREDEKYVTEHMYDNPHFVEDVVRDLSVFLENDNRIGGYKIKVISYESIHNHNAFSEREGKAW

SEQ ID NO: 10327 - protein, 209 aa, Marinobacter adhaerens
  REGION 1..209: note = tr|E4PIB7|E4PIB7_MARAH GTP cyclohydrolase 1; OS = Marinobacter adhaerens (strain DSM 23420 / HP15); OX = 225937 GN=folE PE=3 SV=1
MFYSEMKTLGSLRSSELKKREKVMSLENLTKQYEEILMGLDPNPSRNGLVGTPQRAAKAMQFLCRGYDQSLDEVVNGALFESDNDEMVLVKDIELYSLCEHHMLPFVGKAHVAYIPSGKVIGLSKVARIVDMFARRLQIQENLTREIAEALQSVTQADGVAVVIEARHMCMMMRGVEKQNSKMYSSVMLGAFRESVNTRQEFLQLVSRG

SEQ ID NO: 10328 - protein, 189 aa, Marinobacter adhaerens
  REGION 1..189: note = tr|A0A353LDJ0|A0A353LDJ0_9ALTE GTP cyclohydrolase 1; OS = Marinobacter adhaerens OX=1033846 GN=folE PE=3 SV=1
MSKLLDDLSGHFRAIIDGLGEDPDREGLQDTPMRAAKAMQFLTCGYQQDLGDLVNNAVFESAMDEMVVVQDIELYSMCEHHMLPFIGKCHIAYLPAGKVLGLSKFARIVDMYARRLQIQENLTRQIAEAVESVTGAKGVAVVIEAQHMCMMMRGVEKQNSRMKTSMMLGQFRKSQATRTEFLTLISNNR

SEQ ID NO: 10329 - protein, 188 aa, Marinobacter algicola
  REGION 1..188: note = tr|A6F1S2|A6F1S2_9ALTE GTP cyclohydrolase 1; OS = Marinobacter algicola DG893 OX=443152 GN=folE PE=3 SV=1
MTNKLDDLASHFQQIIAGLGENPDREGLQDTPIRAAKAMQFLTQGYRQSLDTLVNNAVFESAMDEMVVVQDIELYSMCEHHMLPFIGKCHIAYLPSGKVLGLSKFARIVDMYARRLQIQENLTREIAEAIETVTGAKGVAVVIEAQHMCMMMRGVEKQNSRMKTSMMLGQFRKSQATRTEFLTLIRDR

SEQ ID NO: 10330 - protein, 189 aa, unidentified
  source 1..189: note = Marinobacter antarcticus
  REGION 1..189: note = tr|A0A1M6Q8L7|A0A1M6Q8L7_9ALTE GTP cyclohydrolase 1; OS = Marinobacter antarcticus OX=564117 GN=folE PE=3 SV=1
MTKLLDDLAGHYRAIINGLGEDTNREGLQDTPMRAAKAMQFLTHGYQQDLDDLVNNAVFESAMDEMVVVQDIELYSMCEHHILPFIGKCHIAYMPQGRVLGLSKFARIVDMYARRLQIQENLTREIAEAVESVTNAKGVAVVIEAQHMCMMMRGVEKQNSKMKTSMMLGQFRTSQATRAEFLNLISNNR

SEQ ID NO: 10331 - protein, 188 aa, unidentified
  source 1..188: note = Marinobacter confluentis
  REGION 1..188: note = tr|A0A4Z1BPJ3|A0A4Z1BPJ3_9ALTE GTP cyclohydrolase 1; OS = Marinobacter confluentis OX=1697557 GN=folE PE=3 SV=1
MTNKLDDLASHYQQIIAGIGEDPHREGLQDTPVRAAKAMQFLTHGYQQNLETLVNGAVFESTMDEMVVIKDIELYSMCEHHLLPFIGKCHIAYLPQGKVLGLSKFARIVDMYARRYQIQENLTRQIAEAIESVTGAKGVAVVIEAKHMCMMMRGVEKQNSSMKTSMMLGQFRKSQATRTEFLTLIRDH

SEQ ID NO: 10332 - protein, 189 aa, Marinobacter daqiaonensis
  REGION 1..189: note = tr|A0A1I6I9C8|A0A1I6I9C8_9ALTE GTP cyclohydrolase 1; OS = Marinobacter daqiaonensis OX=650891 GN=folE PE=3 SV=1
MTDPLDNLSDHYRAIIEGLGENPDREGLQDTPKRAAKAMQFLTRGYNQTLGELVNRAVFESSMDEMVLVKDIELYSLCEHHLLPFIGKCHIAYIPNGRVLGLSKFARIVDMYARRLQIQENLTRDIAEAVEQVTGAAGVAVVIEARHMCMMMRGVEKQNSVMKTSMMLGAFRRSQATRTEFLQLIASRD

SEQ ID NO: 10333 - protein, 304 aa, Marinobacter excellens
  REGION 1..304: note = tr|A0A0P8CU55|A0A0P8CU55_9ALTE GTP cyclohydrolase FolE2 OS=Marinobacter excellens HL-55 OX=1305731 GN=folE-2; PE = 3 SV=1
MNQDLPDVASNETSAIRAPLEWVGMSRIDIPVQLDEPGCPGTVHAVADLQVNLPALTVKGIHMSRLYRMLDELNRLEAVAPGDLRQLLQQMVASHKDCYTDGARVVLDFSLLARRPALRTPGLAGWKSYPIRLEATLADTWFALKASVQVEYSSTCPCSAALARQLVADGFREHFPDRSGLTSEEVAAWLQQNATLATPHSQRSEATVSVNISDSSESFRLMALIDQIEAVLATPVQTAVKRADEQAFAWLNGQNLMYVEDAARRIQSALSGLYDNLRTHVRHLESLHSHDAVASASGDFQGVI

SEQ ID NO: 10334 - protein, 189 aa, Marinobacter excellens
  REGION 1..189: note = tr|A0A0N8KK24|A0A0N8KK24_9ALTE GTP cyclohydrolase 1; OS = Marinobacter excellens HL-55 OX=1305731 GN=folE PE=3; SV = 1
MTLPLDDLAGHYRAIIEGLGENADREGLQDTPMRAAKAMQFLTRGYQQDLGELVNNAVFESAMDEMVVVQDIELYSMCEHHMLPFIGKCHIAYLPQGKVLGLSKFARIVDMYARRLQIQENLTRQIAEAVESVTDANGVAVVIEAQHMCMMMRGVEKQNSRMKTSMMLGQFRKSQATRSEFLNLIGNNR

SEQ ID NO: 10335 - protein, 189 aa, Marinobacter flavimaris; identical to SEQ ID NO: 10328
  REGION 1..189: note = tr|A0A3D8H0Z1|A0A3D8H0Z1_9ALTE GTP cyclohydrolase 1; OS = Marinobacter flavimaris OX=262076 GN=folE PE=3 SV=1

SEQ ID NO: 10336 - protein, 189 aa, unidentified
  source 1..189: note = Marinobacter fuscus
  REGION 1..189: note = tr|A0A2T1KNX3|A0A2T1KNX3_9ALTE GTP cyclohydrolase 1; OS = Marinobacter fuscus OX=2109942 GN=folE PE=3 SV=1
MYAPLDDLTDHYRSIITGLGENAQREGLQDTPKRAAKAMQFLTHGYQQNLEELVNNAVFESAMDEMVVVQDIELYSLCEHHMLPFIGKCHIAYLPQGKVLGLSKFARIVDMYARRLQIQENLTRQIAEAVESVTQAAGVAVVIEAQHMCMMMRGVEKQNSRMKTSMMLGQFRKSQATRTEFLTLISNNR

SEQ ID NO: 10337 - protein, 189 aa, Marinobacter gudaonensis
  REGION 1..189: note = tr|A0A1I6H160|A0A1I6H160_9ALTE GTP cyclohydrolase 1; OS = Marinobacter gudaonensis OX=375760 GN=folE PE=3 SV=1
MTKLLDDLSGHYRAIISGLGEDPDREGLQDTPMRAAKAMQFLTRGYQQDLGDLVNNAVFESAMDEMVVVQDIELYSMCEHHMLPFIGKCHIAYLPQGRVLGLSKFARIVDMYARRLQIQENLTRQIAEAIESVTNAKGVAVVIEAQHMCMMMRGVEKQNSRMKTSMMLGQFRKSQATRTEFLNLIGGHR

SEQ ID NO: 10338 - protein, 189 aa, Marinobacter guineae
  REGION 1..189: note = tr|A0A2G1VEK4|A0A2G1VEK4_9ALTE GTP cyclohydrolase 1; OS = Marinobacter guineae OX=432303 GN=folE PE=3 SV=1
MTKLLDDLSGHYRAIIDGLGEDTNREGLQDTPMRAAKAMQFLTRGYQQDLGDLVNNAVFESAMDEMVVVQDIELYSMCEHHILPFIGKCHIAYLPQGKVLGLSKFARIVDMYARRLQIQENLTRQIAEAIESVTDAKGVAVVIEAQHMCMMMRGVEKQNSRMKTSMMLGQFRKSQATRTEFLTLIGTNR

SEQ ID NO: 10339 - protein, 189 aa, unidentified
  source 1..189: note = Marinobacter halophilus
  REGION 1..189: note = tr|A0A2T1KIQ4|A0A2T1KIQ4_9ALTE GTP cyclohydrolase 1; OS = Marinobacter halophilus OX=1323740 GN=folE PE=3 SV=1
MTLPLDDLAGHYRAIIEGLGENADREGLQDTPMRAAKAMQFLTRGYQQNLDELVNNAVFESAMDEMVVIQDIELYSMCEHHMLPFIGKCHIAYLPQGKVLGLSKFARIVDMYARRLQIQENLTRQIAEAVENVTGAKGVAVVIEAQHMCMMMRGVEKQNSRMKTSMMLGQFRKSQATRSEFLNLIGNHR

SEQ ID NO: 10340 - protein, 189 aa, Marinobacter hydrocarbonoclasticus
  REGION 1..189: note = tr|A0A1M2UU76|A0A1M2UU76_MARHY GTP cyclohydrolase 1; OS = Marinobacter hydrocarbonoclasticus OX=2743 GN=folE PE=3; SV = 1
MTLPLDDLAGHYRAIIEGLGENADREGLQDTPMRAAKAMQFLTRGYQQDLADLVNNAVFESAMDEMVVVQDIELYSMCEHHMLPFIGKCHIAYLPQGRVLGLSKFARIVDMYARRLQIQENLTRQIAEAVESVTNAKGVAVVIEAQHMCMMMRGVEKQNSRMKTSMMLGQFRKSQATRTEFLTLIGNNR

SEQ ID NO: 10341 - protein, 189 aa, Marinobacter hydrocarbonoclasticus
  REGION 1..189: note = tr|A0A455W9G5|A0A455W9G5_MARHY GTP cyclohydrolase 1; OS = Marinobacter hydrocarbonoclasticus OX=2743 GN=folE1; PE = 3 SV=1
MTIPLDDLAGHYRAIIEGLGENADREGLQDTPMRAAKAMQFLTRGYQQDLADLVNNAVFESAMDEMVVVQDIELYSMCEHHMLPFIGKCHIAYLPQGRVLGLSKFARIVDMYARRLQIQENLTRQIAEAVESVTNAKGVAVVIEAQHMCMMMRGVEKQNSRMKTSMMLGQFRKSQATRTEFLTLIGNNR

SEQ ID NO: 10342 - protein, 189 aa, Marinobacter lipolyticus
  REGION 1..189: note = tr|R8B004|R8B004_9ALTE GTP cyclohydrolase 1; OS = Marinobacter lipolyticus SM19 OX=1318628 GN=folE PE=3; SV = 1
MSNSLEDLAGHYRDIINGLGEDTSREGLMDTPKRAAKAMQFLTNGYQQDLGELVNNAVFESSMDEMVMIQDIELYSMCEHHMLPFIGKCHIAYMPQGKVLGLSKFARIVDMYARRLQIQENLTREIAEAIESVTGAKGVAVVIEAQHMCMMMRGVEKQNSRMKTSVMLGQFRKSQATRTEFLQLLSHRD

SEQ ID NO: 10343 - protein, 247 aa, Marinobacter litoralis
  REGION 1..247: note = tr|A0A3M2RFA9|A0A3M2RFA9_9ALTE Putative GTP cyclohydrolase 1 type 2 OS=Marinobacter litoralis; OX = 187981 GN=DOQ08_01293 PE=4 SV=1
MATRNQILTKINEWLQPENFQDYAPNGLQVEGKEEVQTIISGVTASQALIDAAVKQNADMILVHHGYFWKGEDQTIRGMKKRRIKQLLENDINLVAYHLPLDDHPDYGNNRQLAKVLGIQNPRPVGGLVWQGELAEPMTPETLGRHIETALNRQPLHVGEGADLIKTVAWCTGGAQGFITKALELGVDAYISGEISEPTTHTARESGIHYYAAGHHATERYGAKALGEALAKEFGVKHQFIDCDNPV

SEQ ID NO: 10344 - protein, 103 aa, Marinobacter litoralis
  REGION 1..103: note = tr|A0A3M2REP6|A0A3M2REP6_9ALTE Putative GTP cyclohydrolase 1 type 2 OS=Marinobacter litoralis; OX = 187981 GN=DOQ08_01105 PE=4 SV=1
MFKLCYFVPESHLDITKQALFDAGAGKIGDYDSCAWQCKGQGQFRPLEGSDPFLGQKGELEVVNEFKVELVCSEEKVQGAIEALKQAHPYEEPAYEVFRLEAF

SEQ ID NO: 10345 - protein, 304 aa, Marinobacter lutaoensis
  REGION 1..304: note = tr|A0A1V2DXV8|A0A1V2DXV8_9ALTE GTP cyclohydrolase FolE2 OS=Marinobacter lutaoensis OX=135739 GN=folE2 PE=3; SV = 1
MNAVLPDVSRTDKAPRLSPLDWVGMQGIDLPVTIAEPGYRRELHARADVQVDLPLPHVKGIHMSRLYQLLDTLAGEPLSPRVLHRLLRAMIDSHQDCNSQNARLRLELALLVRRPALVSAGLSGWKSYPLTLDASLHGDAFRARLGVAVGYSSTCPCSAALSRQLVEQGFLDAFAGQERLDPEAVAHWLRRHATLATPHSQRSEARVAVDLASDGDTLGLLALIDRIEAALGTPVQTAVKRADEQAFAALNGQNLMFVEDAARRIRDALGDDFANPAVHVRHMESLHPHDAAAWVAPRPEDTAG

SEQ ID NO: 10346 - protein, 189 aa, Marinobacter lutaoensis
  REGION 1..189: note = tr|A0A1V2DPA2|A0A1V2DPA2_9ALTE GTP cyclohydrolase 1; OS = Marinobacter lutaoensis OX=135739 GN=folE PE=3 SV=1
MSKLLDDLAGHYRAIIEGLGEDSHREGLRDTPMRAAKAMQFLTRGYQQDLDELVNNAVFESSMDEMVVVQDIELYSMCEHHMLPFIGKCHIAYMPQGKVLGLSKFARIVDMYARRLQIQENLTREIAEAIERVTKAKGVAVVIEAQHMCMMMRGVEKQNSRMKTSVMLGQFRTSQATRTEFLNLIGHNR

SEQ ID NO: 10347 - protein, 189 aa, unidentified; identical to SEQ ID NO: 10328
  source 1..189: note = Marinobacter manganoxydans
  REGION 1..189: note = tr|G6YSU2|G6YSU2_9ALTE GTP cyclohydrolase 1; OS = Marinobacter manganoxydans MnI7-9 OX=1094979 GN=folE; PE = 3 SV=1

SEQ ID NO: 10348 - protein, 188 aa, Marinobacter mobilis
  REGION 1..188: note = tr|A0A1H2WY61|A0A1H2WY61_9ALTE GTP cyclohydrolase 1; OS = Marinobacter mobilis OX=488533 GN=folE PE=3 SV=1
MADTLNTLTGHYRHIIQHLGENPQREGLLDTPERAAKAMQFLTRGYQQSLEELVNGAVFESAMDEMVVVQDIELYSLCEHHLLPFIGKCHIAYIPQGKVLGLSKFARIVDMYARRLQIQENLTREIAEAIEQVTDASGVAVVIEAQHMCMMMRGVEKQNSLMKTSMMLGSFRNSQATRTEFLTLIQKR

SEQ ID NO: 10349 - protein, 213 aa, Marinobacter mobilis
  REGION 1..213: note = tr|A0A1H2YBX5|A0A1H2YBX5_9ALTE GTP cyclohydrolase 1; OS = Marinobacter mobilis OX=488533 GN=folE PE=3 SV=1
MLSPEALAVQAALIERGLETPLKENVLDRDQKVERIRDLMAQVVATLGLDLNDDSLADTPARIARMYVDEVFSGLDYRHFPKISQIENKMGVDDMIRIRDIEVLSTCEHHFVTIDGKARVAYIPGDRVIGLSKINRIVRFFAQRPQVQERLTHQILVALQTLLGVEDVAVQIDATHYCVKARGVMDGGSATETVALGGAFSSDQNRRREFLAG

SEQ ID NO: 10350 - protein, 237 aa, unidentified
  source 1..237: note = Marinobacter nanhaiticus
  REGION 1..237: note = tr|N6VXI7|N6VXI7_9ALTE GTP cyclohydrolase 1; OS = Marinobacter nanhaiticus D15-8W OX=626887 GN=folE PE=3; SV = 1
MSQRSQASKLQATSLLQEADPITVPCLTREALAVRTALVEKGLETPMVDNGLTRDQKVERIEGLMTRVAETLGLDLADDSLTETPNRIARMYVDEVFSGLDYTQFPKITQIENKMGVEEMIKVRDISVISTCEHHFVTIDGRARVAYMPKDKVIGLSKINRIVRFFARRPQVQERLTHQILVALQTLLEVEDVAVHIDATHYCVKARGVQDADSQTETIALGGRFKTNTEYRREFMG

SEQ ID NO: 10351 - protein, 188 aa, unidentified
  source 1..188: note = Marinobacter nanhaiticus
  REGION 1..188: note = tr|N6WV14|N6WV14_9ALTE GTP cyclohydrolase 1; OS = Marinobacter nanhaiticus D15-8W OX=626887 GN=folE PE=3; SV = 1
MTDKTDTIAQSFKTIMQALGEDTRREGLLDTPRRAAKAMQFLTQGYAQDLESVVNNATFESDMDEMVVVQDIELYSLCEHHLLPFIGKCHIAYIPQGRVLGLSKLARIVDMYARRFQIQENLTRQIAEAVENVTGAEGVGVVIEAQHMCMMMRGVEKQNSLMKTSVMLGSFRKSQATRNEFLTLISRR

SEQ ID NO: 10352 - protein, 189 aa, unidentified
  source 1..189: note = Marinobacter nitratireducens
  REGION 1..189: note = tr|A0A072N743|A0A072N743_9ALTE GTP cyclohydrolase 1; OS = Marinobacter nitratireducens OX=1137280 GN=folE PE=3; SV = 1
MTKPLDDLAGHFEAIIDGLGEDTRREGLQDTPRRAAKAMQFLTQGYQQDLNDLVNNAVFESSMDEMVVVQDIELYSMCEHHMLPFIGKCHIAYLPQGRVLGLSKFARIVDMYARRLQIQENLTRQIAEAVESVTNAKGVAVVIEAQHMCMMMRGVEKQNSRMKTSMMLGQFRKSQATRTEFLNLIGGNR

SEQ ID NO: 10353 - protein, 189 aa, Marinobacter pelagius
  REGION 1..189: note = tr|A0A366GYP2|A0A366GYP2_9ALTE GTP cyclohydrolase 1; OS = Marinobacter pelagius OX=379482 GN=folE PE=3 SV=1
MTKLLDDLAGHYRAIIDGLGEDSNREGLQDTPMRAAKAMQFLTRGYQQDLGDLVNNAVFESAMDEMVVVQDIELYSMCEHHMLPFIGKCHIAYLPQGKVLGLSKFARIVDMYARRLQIQENLTRQIAEAIESVTNAKGVAVVIEAQHMCMMMRGVEKQNSRMKTSMMLGQFRKSQATRTEFLNLIGNNR

SEQ ID NO: 10354 - protein, 189 aa, Marinobacter pelagius
  REGION 1..189: note = tr|A0A1I4R8I3|A0A1I4R8I3_9ALTE GTP cyclohydrolase 1; OS = Marinobacter pelagius OX=379482 GN=folE PE=3 SV=1
MTKLLDDLAGHYRAIIDGLGEDSNREGLQDTPMRAAKAMQFLTRGYQQDLGDLVNNAVFESAMDEMVVVQDIELYSMCEHHILPFIGKCHIAYLPQGKVLGLSKFARIVDMYARRLQIQENLTRQIAEAIESVTNAKGVAVVIEAQHMCMMMRGVEKQNSRMKTSMMLGQFRKSQATRTEFLNLIGNNR

SEQ ID NO: 10355 - protein, 189 aa, unidentified
  source 1..189: note = Marinobacter persicus
  REGION 1..189: note = tr|A0A1I3XQU8|A0A1I3XQU8_9ALTE GTP cyclohydrolase 1; OS = Marinobacter persicus OX=930118 GN=folE PE=3 SV=1
MSLPLEELADHYRAIIDGLGENSNREGLQDTPMRAAKAMQFLTQGYQQDLGTLVNNAVFESAMDEMVVVQDIELYSMCEHHVLPFIGKCHIAYLPQGKVLGLSKFARIVDMYARRLQIQENLTRQIAEAIEQVTGAKGVAVVIEAQHMCMMMRGVEKQNSRMKTSMMLGQFRKSQATRTEFLNLISNNR

SEQ ID NO: 10356 - protein, 189 aa, unidentified
  source 1..189: note = Marinobacter persicus
  REGION 1..189: note = tr|A0A2S6G8D3|A0A2S6G8D3_9ALTE GTP cyclohydrolase 1; OS = Marinobacter persicus OX=930118 GN=folE PE=3 SV=1
MSLPVEDLAEHFRAIIDGLGEDPDREGLQDTPTRAAKAMKFLTQGYEQDLAELVNNAVFESAMDEMVVIQDIELYSMCEHHMLPFIGKCHIAYLPQGRVLGLSKFARVVDMYARRLQIQENLTREIAEAIENVTGAKGVAVVIEAQHMCMMMRGVEKQNSRMKTSMMLGQFRKSQATRTEFLNLISNNR

SEQ ID NO: 10357 - protein, 186 aa, Marinobacter psychrophilus
  REGION 1..186: note = tr|A0A0H4I5W5|A0A0H4I5W5_9ALTE GTP cyclohydrolase 1; OS = Marinobacter psychrophilus OX=330734 GN=folE PE=3 SV=1
MTDDLAGHYRAIINGLGENCDREGLQNTPQRAAKAMQFLTRGYQQNLNELVNNAVFESAMDEMVVIQDIELYSMCEHHVLPFIGKCHIAYLPQGKVLGLSKFARIVDMYARRLQIQENLTRQIAEAVESVTNAKGVAVVIEAQHMCMMMRGVEKQNSKMKTSMMLGQFRKSQATRLEFFNLISTNR

SEQ ID NO: 10358 - protein, 188 aa, unidentified
  source 1..188: note = Marinobacter salarius
  REGION 1..188: note = tr|A0A1W6K4Y0|A0A1W6K4Y0_9ALTE GTP cyclohydrolase 1; OS = Marinobacter salarius OX=1420917 GN=folE PE=3 SV=1
MTNKLDDLASHFQQIIAGLGENPDREGLQDTPIRAAKAMQFLTQGYKQSLDTLVNNAVFESAMDEMVVVQDIELYSMCEHHMLPFIGKCHIAYLPNGKVLGLSKFARIVDMYARRLQIQENLTREIAEAIEAVTGAKGVAVVIEAQHMCMMMRGVEKQNSRMKTSMMLGQFRRSQATRTEFLTLIRDR

SEQ ID NO: 10359 - protein, 189 aa, unidentified
  source 1..189: note = Marinobacter salarius
  REGION 1..189: note = tr|W5YPP3|W5YPP3_9ALTE GTP cyclohydrolase 1; OS = Marinobacter salarius OX=1420917 GN=folE PE=3 SV=1
MTNKLDDLASHFQQIIAGLGENPDREGLQDTPIRAAKAMQFLTQGYKQSLDTLVNNAVFESAMDEMVVVQDIELYSMCEHHMLPFIGKCHIAYLPQGKVLGLSKFARIVDMYARRLQIQENLTREIAEAVESVTDANGVAVVIEAQHMCMMMRGVEKQNSRMKTSVMLGAFRKSQATRAEFLQLLNQRN

SEQ ID NO: 10360 - protein, 189 aa, unidentified
  source 1..189: note = Marinobacter salinus
  REGION 1..189: note = tr|A0A1D9GPL6|A0A1D9GPL6_9ALTE GTP cyclohydrolase 1; OS = Marinobacter salinus OX=1874317 GN=folE PE=3 SV=1
MTKLLDDLAGHYTAIINGLGEDTSREGLQDTPMRAAKAMQFLTQGYQQSLGDLVNNAVFESAMDEMVVVQDIELYSMCEHHMLPFIGKCHIAYLPQGKVLGLSKFARIVDMYARRLQIQENLTRQIAEAVESVTNAKGVAVVIEAQHMCMMMRGVEKQNSRMKTSMMLGQFRKSQATRTEFLNLIGNNR

SEQ ID NO: 10361 - protein, 189 aa, Marinobacter santoriniensis
  REGION 1..189: note = tr|M7D1Z7|M7D1Z7_9ALTE GTP cyclohydrolase 1; OS = Marinobacter santoriniensis NKSG1 OX=1288826 GN=folE; PE = 3 SV=1
MTKLLDDLAGHYRAIIDGLGEDPDREGLQDTPLRAAKAMQFLTHGYQQDLNDLVNGAVFESAMDEMVVVQDIELYSMCEHHMLPFIGKCHIAYLPQGRVLGLSKFARIVDMYARRLQIQENLTRQIAEAIESVTNAKGVAVVIEAQHMCMMMRGVEKQNSRMKTSMMLGQFRKSQATRTEFLNLISTYR

SEQ ID NO: 10362 - protein, 189 aa, Marinobacter segnicrescens
  REGION 1..189: note = tr|A0A1I0ENS5|A0A1I0ENS5_9ALTE GTP cyclohydrolase 1; OS = Marinobacter segnicrescens OX=430453 GN=folE PE=3 SV=1
MTDVLDSLSANYRAILEGLGEDPDREGLRDTPTRAAKAMQFLTHGYNQNLDDLVNGAVFESAMDEMVVVKDIELYSLCEHHVLPFIGKCHIAYIPDGKVLGLSKFARIVDMYARRLQIQENLTREIAEAVEQVTQAAGVAVVIEARHMCMMMRGVEKQNSVMKTSMMLGGFRKNQATRTEFLQLVSGRD

SEQ ID NO: 10363 - protein, 189 aa, unidentified; identical to SEQ ID NO: 10340
  source 1..189: note = Marinobacter shengliensis
  REGION 1..189: note = tr|A0A2T1KJL0|A0A2T1KJL0_9ALTE GTP cyclohydrolase 1; OS = Marinobacter shengliensis OX=1389223 GN=folE PE=3 SV=1

SEQ ID NO: 10364 - protein, 189 aa, unidentified
  source 1..189: note = Marinobacter similis
  REGION 1..189: note = tr|W5YL63|W5YL63_9ALTE GTP cyclohydrolase 1; OS = Marinobacter similis OX=1420916 GN=folE PE=3 SV=1
MTKLLDDLAGHYSSIINGLGEDTDREGLQDTPMRAAKAMQFLTQGYQQSLSDLVNNAVFESAMDEMVVVQDIELYSMCEHHMLPFIGKCHIAYLPQGRVLGLSKFARIVDMYARRLQIQENLTRQIAEAIEEVTNAKGVAVVIEAQHMCMMMRGVEKQNSRMKTSMMLGQFRKSQATRTEFLNLIGNNR

SEQ ID NO: 10365 - protein, 188 aa, Marinobacter sp.
  REGION 1..188: note = tr|A0A1E7PVL8|A0A1E7PVL8_9ALTE GTP cyclohydrolase 1; OS = Marinobacter sp. X15-166B OX=1897620 GN=folE PE=3 SV=1
MSDSPSKISKHYREIIRGLGEDPDREGLRDTPMRAAKAIRFLTRGYQQTLAELINDAVFASTMDEMVVVQDIELYSLCEHHLLPFIGKCHIAYIPQGKVLGLSKFARIVDMYARRLQIQENLTWEIATAIEQVTRASGVAVVIEAQHMCMMMRGVEKQNSLMKTSMMLGSFRDSQATRAEFLNLINKR

SEQ ID NO: 10366 - protein, 189 aa, Marinobacter sp.; identical to SEQ ID NO: 10359
  REGION 1..189: note = tr|A0A434AP81|A0A434AP81_9ALTE GTP cyclohydrolase 1; OS = Marinobacter sp. NP-6 OX=2488666 GN=folE PE=3 SV=1

SEQ ID NO: 10367 - protein, 189 aa, unidentified
  source 1..189: note = Marinobacter subterrani
  REGION 1..189: note = tr|A0A0J7JF73|A0A0J7JF73_9ALTE GTP cyclohydrolase 1; OS = Marinobacter subterrani OX=1658765 GN=folE PE=3 SV=1
MTKLLDDLAGHYRAIIDGLGEDPDREGLQDTPLRAAKAMQFLTRGYQQDLGDLVNNAVFESAMDEMVVVQDIELYSMCEHHMLPFIGKCHIAYLPQGRVLGLSKFARIVDMYARRLQIQENLTRQIAEAIESVTNAKGVAVVIEAQHMCMMMRGVEKQNSRMKTSMMLGQFRKSQATRTEFLNLISSNR

SEQ ID NO: 10368 - protein, 189 aa, Marinobacter vinifirmus
  REGION 1..189: note = tr|A0A259W0W4|A0A259W0W4_9ALTE GTP cyclohydrolase 1; OS = Marinobacter vinifirmus OX=355591 GN=folE PE=3 SV=1
MTLPLDDLAGHYYSILDGLGENPEREGLKDTPMRAAKAMQFLTRGYQQDLQDLVNNAVFESAMDEMVVVQDIELYSMCEHHMLPFIGKCHIAYLPQGKVLGLSKFARIVDMYARRLQIQENLTRQIAEAVESVTGAKGVAVVIEAQHMCMMMRGVEKQNSRMKTSMMLGQFRKSQATRTEFLNLISSNH

SEQ ID NO: 10369 - protein, 188 aa, Marinobacter zhejiangensis
  REGION 1..188: note = tr|A0A1I4LFD1|A0A1I4LFD1_9ALTE GTP cyclohydrolase 1; OS = Marinobacter zhejiangensis OX=488535 GN=folE PE=3 SV=1
MADKLNAIAGHYRQIIQHLGEDAEREGLLDTPTRAGKAMQFLTKGYQESLEQLVNGAVFESSMDEMVVIQDIELYSLCEHHLLPFIGKCHIAYMPQGKVLGLSKFARIVDMYARRLQIQENLTREIAEAIERVTNARGVAVVVEAQHMCMMMRGVEKQNSLMKTSMMLGSFRTSQATRTEFLTLIQKR

SEQ ID NO: 10370 - protein, 213 aa, Marinobacter zhejiangensis
  REGION 1..213: note = tr|A0A1I4M3C1|A0A1I4M3C1_9ALTE GTP cyclohydrolase 1; OS = Marinobacter zhejiangensis OX=488535 GN=folE PE=3 SV=1
MLSPEALAVQAALIERGLETPLKENVLDRDQKVERITDLMAQVVATLGLDLNDDSLADTPSRIARMYVDEIFSGLDYRQFPKITQIENKMGVDDMIRVRDIEVLSTCEHHFITIDGTARVAYIPRDRVIGLSKINRIVRFFAQRPQVQERLTHQVLVALQTLLDVDDVAVQIRATHYCVKARGVMDSGSSTETVALGGVFRSDQCRRQEFLAG

SEQ ID NO: 10371 - protein, 212 aa, unidentified
  source 1..212: note = Marinobacterium aestuarii
  REGION 1..212: note = tr|A0A1A9EV45|A0A1A9EV45_9GAMM GTP cyclohydrolase 1; OS = Marinobacterium aestuarii OX=1821621 GN=folE PE=3 SV=1
MISNEAKIVREVLIARGLETPLLENGMSSEQKYERIKSLMTEVVGTLGLDLSDDSLAETPHRIAKMYVNEIFAGLDYARFPKMALIENKMQVEEMVKVRDISVVSTCEHHFVTIDGVAKVAYIPDQTIIGLSKINRIVRFFAQRPQVQERLTQQILVALQTLLETDNVAVSISAVHYCVKSRGVMDANSQTETTALGGIFKSNARTRAEFLG

SEQ ID NO: 10372 - protein, 307 aa, unidentified
  source 1..307: note = Marinobacterium aestuarii
  REGION 1..307: note = tr|A0A1A9F6E9|A0A1A9F6E9_9GAMM GTP cyclohydrolase FolE2 OS=Marinobacterium aestuarii OX=1821621 GN=folE2; PE = 3 SV=1
MTTSPRASIGGTLDGVGMSGLALPVTLAESDRSHVAVQATASLYVNLRDPQAKGIHMSRLYLLLEAFAEREALRPAILCQFLQQALQSHRDISDTASLSLSFQYLSRRPALSSNHQGWKAYPVVLSARRAQGHTTIELGVSVPYSSTCPCSASLSRQLIADAFRDAFSSRSNPPIDAVARWLQEEGGSWATPHSQRSYADVRVRLAESAAFPIEKLIGTLEEALQTPVQTAVKREDEQAFARLNGQNLMFCEDAARRLKAALNATPWLDDFQIRVEHQESLHAHNAVAMVAKGLAGGYTADAPGLWR

SEQ ID NO: 10373 - protein, 296 aa, Marinobacterium georgiense
  REGION 1..296: note = tr|A0A1H4EX44|A0A1H4EX44_9GAMM GTP cyclohydrolase FolE2 OS=Marinobacterium georgiense DSM 11526 OX=1122198; GN = folE2 PE=3 SV=1
MNAVLPDVSLTDDAPFMTPLQWVGMQDIDLPITLKEPGYRRSLHACADAQVDLPAAHIKGIHMSRLYRLLDGLGEDALTPERIQQVLQAMIDSHRDCNSSSARIGLSFDLLVRRAALVSEALAGWKSYPVRLNAQLVQGRFSLRAEVVVEYSSTCPCSAALARQLVERRFLDDFPGDQPLNREEMASWLRRNATLATPHSQRSEARVSVGLEATDPSLALLALIDTIEAAVATPVQTAVKRADEQAFAALNGANLMFVEDAARRIQDALQSHFRAPRTQVKHLESLHPHDAVAWAE

SEQ ID NO: 10374 - protein, 179 aa, Marinobacterium georgiense
  REGION 1..179: note = tr|A0A1H3ZMR0|A0A1H3ZMR0_9GAMM GTP cyclohydrolase 1; OS = Marinobacterium georgiense DSM 11526 OX=1122198 GN=folE; PE = 3 SV=1
MEAEYASIIEQLGEDIGRDGLRDTPARAAKAMRFLTRGYNQSLDEVVNGALFSSDNSEMVLVRDIELYSMCEHHLLPFIGKAHVAYIPQGKVVGLSKIARIVDMYARRLQIQENMTKEIAEAIQQVTDAAGVGVVIEAQHMCMMMRGVEKQNAMMKTSMMLGSFRENPATRTEFLSLIR

SEQ ID NO: 10375 - protein, 311 aa, Marinobacterium halophilum
  REGION 1..311: note = tr|A0A2P8F219|A0A2P8F219_9GAMM GTP cyclohydrolase FolE2 OS=Marinobacterium halophilum OX=267374 GN=folE2; PE = 3 SV=1
MTITLLPDVAHHTEADQHCTLDWVGMSGIDLPLMLAGQPDTTLPAKVDMHVDIATPRHRGIHMSRLYLALQDTLAHAPLDRNRLEQLLQSSLDSHAGISQHACIKLQFQLPLLRPALKSQFSGWKTYPVTLEAQLGRQGLQTELTVEIPYSSTCPCSAALSRQLLQQAFIDTFSMDATLSTKQVSQWLYEHGSLATPHSQRSTAKLHVRLEPKGWINPPIHSLIDTAEAALQTAVQTAVKREDEQAFAALNGRNQMFCEDAARRLKHALLGDAAWADFWIRVEHHESLHAHDATAVCIKGVPGGYTPLLSR

SEQ ID NO: 10376 - protein, 179 aa, Marinobacterium halophilum
  REGION 1..179: note = tr|A0A2P8EZI5|A0A2P8EZI5_9GAMM GTP cyclohydrolase 1; OS = Marinobacterium halophilum OX=267374 GN=folE PE=3 SV=1
METAYAQIIEQLGEDLNREGLKDTPARAAKAMRFLTRGYNQDLEEVVNDALFPSDNSEMVVVQNIELYSLCEHHLLPFIGKAHVAYIPQGKVLGLSKLARIVDMYGRRLQIQENMTKEVAEAIQRVTGAAGVGVVIEAQHMCMMMRGVEKQNASMKTSMMLGSFRENPATRAEFLALLK

SEQ ID NO: 10377 - protein, 317 aa, Marinobacterium lutimaris
  REGION 1..317: note = tr|A0A1H5Z0W3|A0A1H5Z0W3_9GAMM GTP cyclohydrolase FolE2 OS=Marinobacterium lutimaris OX=568106 GN=folE2 PE=3; SV = 1
MNSLSITPNHLPDIASSAKAGISSRLDWVGMSGMALPFQIMEAERGSLPLQGKADIHVDIARPEVKGIHMSRLYLLLEQLAESTPLSPAVLSSFLWQQLETHRDISHAAGLSVQFPYLSRRPALKSDNNGWKEYPAAIHARLQDDLLIELELAIPYSSTCPCSASLSRQLLVEALDSDFADRARLTLEEMRHWLLENGSLATPHSQRSWAKLKLALKEDAGAFEIESLIAAVESALGTPVQTAVKREDEQAFARLNGSNLMFCEDAARRISKALSQRDDVKDFWIRVEHQESLHAHDAVAVVTAGVPGGYQPFLRQG

SEQ ID NO: 10378 - protein, 179 aa, Marinobacterium lutimaris
  REGION 1..179: note = tr|A0A1H5UNV6|A0A1H5UNV6_9GAMM GTP cyclohydrolase 1; OS = Marinobacterium lutimaris OX=568106 GN=folE PE=3 SV=1
MENAYAKIIERLGEDLEREGLKDTPKRAAKAMQFLTRGYQQSLEEVVNGALFPSDNSEMVLVKNIELYSMCEHHLLPFIGKAHVAYIPNGQVVGLSKIARIVDMFARRLQIQENMTKQIAEAIQEVTGAQGVGVVIEAKHMCMMMRGVEKQNGEMKTSMMLGTFRSNPATRNEFLSLVN

SEQ ID NO: 10379 - protein, 179 aa, unidentified; identical to SEQ ID NO: 10378
  source 1..179: note = Marinobacterium mangrovicola
  REGION 1..179: note = tr|A0A4V2PEK2|A0A4V2PEK2_9GAMM GTP cyclohydrolase 1; OS = Marinobacterium mangrovicola OX=1476959 GN=folE PE=3; SV = 1

SEQ ID NO: 10380 - protein, 317 aa, unidentified
  source 1..317: note = Marinobacterium mangrovicola
  REGION 1..317: note = tr|A0A4R1GV89|A0A4R1GV89_9GAMM GTP cyclohydrolase FolE2 OS=Marinobacterium mangrovicola OX=1476959 GN=folE2; PE = 3 SV=1
MNSLSITPNHLPDIASSAKAGISSRLDWVGMSGMALPLQIMEAERGSLPLQGKADIHVDIARPEVKGIHMSRLYLLLEQLAESTPLSPAVLSSFLWQQLETHRDISHAAGLSVQFPYLSRRPALKSENSGWKEYPAAIHARLQDDLLIELELAIPYSSTCPCSASLSRQLLVEALDSDFADRARMTLEEVREWLLTNGSLATPHSQRSWAKLKLALKEDAPAFEIESLIAAVEGALGTPVQTAVKREDEQAFARLNGSNLMFCEDAARRISQALSQRDEVKDFWIRVEHQESLHAHDAVAVVTAGVPGGYQPSLRQG

SEQ ID NO: 10381 - protein, 317 aa, Marinobacterium sp.
  REGION 1..317: note = tr|A0A081G499|A0A081G499_9GAMM GTP cyclohydrolase FolE2 OS=Marinobacterium sp. AK27 OX=1232683 GN=folE2 PE=3; SV = 1
MNKPIMPCTALPDIASSATASISSRLDWVGMSGLALPFRLSESRRGSVMCQGNADIHVDIARPEVKGIHMSRLYLLLESLVDDTTLSPEILCLFLDTQLNSHRDISGAAGLAIHFSYLSRRPALKSAHQGWKAYPASIHATRVNNEPCIELELAIPYSSTCPCSASLSRQLLADEFEGDFSERLHLEKGDIRRWLLEKGSLATPHSQRSWAKLRVQITDEASAFPIESIIESIEQALGTPVQTAVKREDEQAFARLNGDNLMFCEDAARRIKQALEARSDLLDFWVRVEHQESLHAHDAVAVVTAGIPGGYQPLLSR

SEQ ID NO: 10382 - protein, 179 aa, Marinobacterium sp.
  REGION 1..179: note = tr|A0A081FZ55|A0A081FZ55_9GAMM GTP cyclohydrolase 1; OS = Marinobacterium sp. AK27 OX=1232683 GN=folE PE=3 SV=1
MEKSYAQIIESLGEDLQREGLKDTPKRAAKAMKFLTRGYEQSLEEVVNGALFPSDNSEMVLVKNIELYSMCEHHLLPFIGKAHVAYIPNGQVVGLSKIARIVDMYARRLQIQENMTKEIAEAIQQVTGALGVGVVIEAQHMCMMMRGVEKQNAEMKTSMMLGTFRSNPATRAEFLSLVN

SEQ ID NO: 10383 - protein, 314 aa, Marinobacterium stanieri
  REGION 1..314: note = tr|A0A1N6SAN4|A0A1N6SAN4_9GAMM GTP cyclohydrolase FolE2 OS=Marinobacterium stanieri OX=49186 GN=folE2 PE=3; SV = 1
MPLTSQHMPDIANDSTPERLRPLSWVGMSGIDLPCTLLLPGALPQQVLCKASLHVDIAKEDQRGIHMSRLYLELQHAFKERLLCVESLNKLLDACLGHHAGISQNASLELAFDLPLKRSALLSANSGWHAYPVRIHAQLSPEGTRLELSAAVKYSSTCPCSSALSRQLLEQAFQSTFAGQTTVDPEAVGQWLQENGSLATPHSQRSTAQVRVLLADNSQSLPLETLIDQIEGAVQTAVQTAVKREDEQAFAELNGRNQMFCEDAARRTAHALDQESQWQDFWVRIEHHESLHAHDATAVAVKGIPNGYSPLLQR

SEQ ID NO: 10384 - protein, 179 aa, Marinobacterium stanieri
  REGION 1..179: note = tr|A0A1N6PVH7|A0A1N6PVH7_9GAMM GTP cyclohydrolase 1; OS = Marinobacterium stanieri OX=49186 GN=folE PE=3 SV=1
METAYSQIIEQLGEDLEREGLKDTPARAAKAMKFLTRGYTQTLDEVVNDALFPSDNSEMVLVRNIELYSLCEHHLLPFIGKAHVAYIPQGKVVGLSKLARIVDMYARRLQIQENMTKEIAEAIQSVTGAAGVGVVIEAQHMCMMMRGVEKQNASMTTSMMLGSFRSSEATRNEFLSLIK

SEQ ID NO: 10385 - protein, 190 aa, Marinococcus halophilus
  REGION 1..190: note = tr|A0A510Y7X0|A0A510Y7X0_MARHA GTP cyclohydrolase 1; OS = Marinococcus halophilus OX=1371 GN=folE PE=3 SV=1
MNSFDHEKIKQGVQLLLEGIGEDPRREGLLETPDRVARFYKEIFSGLNKPSHTYLETSFTDDHEELVLVKDISFFSVCEHHLVPFFGQAHVAYIPKEGEVTGLSKLARTVEAVAQKPQLQERMTYTIANNIMSVLQPHGVMVILEAEHLCMAMRGVKKPGAVTVTSAVRGHFAQELAARQEVLELIRHHK

SEQ ID NO: 10386 - protein, 188 aa, Marinococcus halophilus
  REGION 1..188: note = tr|A0A510Y3K4|A0A510Y3K4_MARHA GTP cyclohydrolase 1; OS = Marinococcus halophilus OX=1371 GN=folE PE=3 SV=1
MANFDHEKIKEGVKLILEGVGEDAGREGLLDTPDRVARLYQEVFAGLHESADEHLKTVFGEDHEELVLVKDIPFFSMCEHHLVPFFGKAHVAYIPKGGMVTGLSKLARTVETIAKRPQLQERITYTIANEIVSTLEPHGVMVVLEAEHMCMTMRGVKKPGSMTVTSAVRGTFEKDQAARSEVLSLIKH

SEQ ID NO: 10387 - protein, 188 aa, Marinococcus luteus
  REGION 1..188: note = tr|A0A1H2REV3|A0A1H2REV3_9BACI GTP cyclohydrolase 1; OS = Marinococcus luteus OX=1122204 GN=folE PE=3 SV=1
MANFDHEKIKEGVRLILEGVGEDAGREGLLDTPDRVARLYQEVFAGLHESANEHLKTVFGEDHEELVLVKDIPFFSMCEHHLVPFFGKAHVAYIPKGGMVTGLSKLARTVETIAKRPQLQERITYTVANEIVSTLEPHGVMVVLEAEHMCMTMRGVKKPGSMTVTSAVRGTFEGDQAARSEVLSLIKH

SEQ ID NO: 10388 - protein, 227 aa, Marinomonas alcarazii
  REGION 1..227: note = tr|A0A318V5H3|A0A318V5H3_9GAMM GTP cyclohydrolase 1; OS = Marinomonas alcarazii OX=491949 GN=folE PE=3 SV=1
MEANLAKQTNLNRLELSSEATKVRDALIKSGLETPMIDNGLTSEEKYQRIKSAFEDVVSTLGLDLTDDSLAETPHRIAKMYVKEIFSGLDYAQFPKITVIENKMKVDEMVKVSDISFTSTCEHHFVTIDGLAKVAYLPKNKIIGLSKINRIVRFFAQRPQVQERLTQQILVTLQALLETDNVAVSINAVHYCVKARGVMDASSSTQTTALGGLFKRSDKTRGEFLAR

SEQ ID NO: 10389 - protein, 244 aa, Marinomonas aquimarina
  REGION 1..244: note = tr|A0A1A8T4W9|A0A1A8T4W9_9GAMM Putative GTP cyclohydrolase 1 type 2 OS=Marinomonas aquimarina; OX = 295068 GN=MAQ5080_00788 PE=4 SV=1
MTALYQPRLFKDYAPNGLQVEGKQEINKVVTGVTASMALIEAAIEKQADAIIVHHGYFWKGEVPEIVGMKYRRLSSLIKNDINLFGYHLPMDAHLLAGNNANLARALGVESLRPLESEKPLEESIGVVGKLQEPLAPAAFKAIIEQVVGRVVLFEAVSGAPISEVALCTGGAQGYIGKALAANADVFITGEVSEQTIHTAREEGIHFCAAGHHATECFGPRALAEHIRDNWGIDCEFIDIPNPA

SEQ ID NO: 10390 - protein, 102 aa, Marinomonas aquimarina
  REGION 1..102: note = tr|A0A1A8TLW2|A0A1A8TLW2_9GAMM Putative GTP cyclohydrolase 1 type 2 OS=Marinomonas aquimarina; OX = 295068 GN=MAQ5080_02766 PE=4 SV=1
MYSLVFYVPETHLESVKEAVFAAGAGRIGEYEACCWQVKGHGQFRPSAAANPFIGEAGKLEQVEEYRVEMVLLSELKEAVVSALKHSHPYEEVAYHLIQVEC

SEQ ID NO: 10391 - protein, 227 aa, Marinomonas aquiplantarum
  REGION 1..227: note = tr|A0A366D1P2|A0A366D1P2_9GAMM GTP cyclohydrolase 1; OS = Marinomonas aquiplantarum OX=491951 GN=folE PE=3 SV=1
MKANIAENSTVNHAFLSDEAKQVRDALIKSGLETPMIDNGLTTEEKYQRIKTAFEDVVSTLGLDLTDDSLAETPHRIAKMYVKEIFSGLDYTQFPKITVIENKMKVDEMVKVSDISFTSTCEHHFVTIDGMAKVAYLPKNKIIGLSKINRIVRFFAQRPQVQERLTQQILVTLQALLETDNVAVSISAVHYCVKARGVMDASSSTQTTALGGLFKRSDKTRGEFLAQ

SEQ ID NO: 10392 - protein, 228 aa, Marinomonas balearica
  REGION 1..228: note = tr|A0A4V3CGY6|A0A4V3CGY6_9GAMM GTP cyclohydrolase 1; OS = Marinomonas balearica OX=491947 GN=folE PE=3 SV=1
MTTAIAENTSSLGLTELSEEAVKVRDALVKHGLETPMIDNGLSSEEKYQRIKSAFEDVVYTLGLDMSDDSLAETPHRIAKMYVREIFSGLDYAKFPKITVIDNKMSVDEMVKVNNISFTSTCEHHFVTIDGFAKVAYLPKNKIIGLSKINRIVRFFGQRPQVQERLTQQILVTLQTLLETDNVAVSIEATHYCVKARGVMDASSSTQTTALGGLFKRSDKTRSEFLSN

SEQ ID NO: 10393 - protein, 227 aa, Marinomonas communis
  REGION 1..227: note = tr|A0A4R6XIT5|A0A4R6XIT5_9GAMM GTP cyclohydrolase 1; OS = Marinomonas communis OX=28254 GN=folE PE=3 SV=1
MTTAMAETSNVSPFALSAEASKVRDALIKHGLETPMIDNGLTTEEKYQRIKSAFEDVVYTLGLDLTDDSLCETPHRIAKMYVKEIFSGLDYSQFPKITVIENKMKVDEMVKVSDISFTSTCEHHFVTIDGLAKVAYLPKNKIIGLSKINRIVRFFGQRPQVQERLTQQVLVTLQTLLETDNVAVSIDATHYCVKARGVMDASSSTQTTALGGLFKRSDKTRSEFLAK

SEQ ID NO: 10394 - protein, 227 aa, Marinomonas foliarum
  REGION 1..227: note = tr|A0A369AH76|A0A369AH76_9GAMM GTP cyclohydrolase 1; OS = Marinomonas foliarum OX=491950 GN=folE PE=3 SV=1
MEANLAEQTNFNRLELSSEATKVRDALIKSGLETPMIDNGLTSEEKYQRIKSAFEDVVTTLGLDLTDDSLAETPHRIAKMYVKEIFSGLDYGLFPKITVIENKMKVDEMVKVSDISFTSTCEHHFVTIDGLAKVAYLPKNKIIGLSKINRIVRFFAQRPQVQERLTQQILVTLQALLETDNVAVSINAVHYCVKARGVMDASSSTQTTALGGLFKRSDKTRGEFLAR

SEQ ID NO: 10395 - protein, 237 aa, unidentified
  source 1..237: note = Marinomonas fungiae
  REGION 1..237: note = tr|A0A0K6IH24|A0A0K6IH24_9GAMM GTP cyclohydrolase 1; OS = Marinomonas fungiae OX=1137284 GN=folE PE=3 SV=1
MNELARQGIDMTTAMAETSKVSNIALSDEATRVRDALMKHGLETPMIDNGLSTEEKYQRIKAAFEDVVYTLGLDLTDDSLSETPHRIAKMYVKEIFSGLDYGQFPKITVIENKMKVDEMVKVSNISFTSTCEHHFVTIDGLAKVAYLPKNKIIGLSKINRIVRFFGQRPQVQERQTQQVLVALQTLLETDNVAVSINATHYCVKARGVMDASSSTQTTALGGLFKRSDKTRSEFLAS

SEQ ID NO: 10396 - protein, 301 aa, unidentified
  source 1..301: note = Marinomonas gallaica
  REGION 1..301: note = tr|A0A1C3JRA4|A0A1C3JRA4_9GAMM GTP cyclohydrolase FolE2 OS=Marinomonas gallaica OX=1806667 GN=folE2 PE=4 SV=1
MNIASQLPDVAHDCASNIPIDRVGMSGVALPIELKVGGQTVACAATASIFANVQNDQKGLHMSRMYRTLLDLSSTPLTASTLEQCARTALAQQQEVHATELSLHVSTLVQLKRPALHSAGWGWNAYPVELALTYSDAQGMRLTQAMTVTYSSSCPASAALSRQALSSAFVDHAEAQSEPLSTAQVAQWLEQNGTLAIPHSQRSDAMITIDINSAELPVFEVIELSENALETAVQTYVKREDEQQFALRNGANPMFVEDASRRLMGALKSAQYSGHVSVTHRESLHGHDAVAHSSFTKGELV

SEQ ID NO: 10397 - protein, 102 aa, unidentified
  source 1..102: note = Marinomonas gallaica
  REGION 1..102: note = tr|A0A1C3JPT4|A0A1C3JPT4_9GAMM Putative GTP cyclohydrolase 1 type 2 OS=Marinomonas gallaica OX=1806667; GN = MGA5115_01274 PE=4 SV=1
MYSLIFYVPETHLEQVKEAVFAAGAGHLGNYDFVCWQVKGEGQFQPSLHATPFIGEAGKLEELEEYRVEMMLLDDCREAVVSALKLSHPYEEVAYHLIAIEC

SEQ ID NO: 10398 - protein, 213 aa, unidentified
  source 1..213: note = Marinomonas hwangdonensis
  REGION 1..213: note = tr|A0A3M8QAP5|A0A3M8QAP5_9GAMM GTP cyclohydrolase 1; OS = Marinomonas hwangdonensis OX=1053647 GN=folE PE=3 SV=1
MLSETASKVRDALLKSGLETPMIDNGLTSEEKYQRIKSAFEDVVSTLGLDLTDDSLAETPHRIAKMYVKEIFSGLDYTQFPKISVIENKMKVDEMVKVSDISFTSTCEHHFVTIDGMAKVAYLPKDKIIGLSKINRIVRFFAQRPQVQERLTQQILLTLQTLLETDNVAVSISAVHYCVKSRGVMDASSSTQTTALGGLFKRSDKTRGEFLAR

SEQ ID NO: 10399 - protein, 299 aa, Marinomonas mediterranea
  REGION 1..299: note = tr|F2K4Z4|F2K4Z4_MARM1 GTP cyclohydrolase I; OS = Marinomonas mediterranea (strain ATCC 700492 / JCM 21426 / NBRC 103028 / MMB-1) OX=717774 GN=Marme_3421 PE=4; SV = 1
MNNLTPLPDVASKIVSDISLDQVGMANIALPLRINVENGTQTCAANAAIFANVQNGQKGLHMSRMYESLLELSETSLSAATLASCAKHALLQQTEVEATNLSIELKTQLQIKRPALNSNGDGWNRYPVEINANYSHQDGFTLSLGIQVTYSSSCPASAALSRQALSQTFDQTFRDSQSLNHGEITSWLEKNGTLAIPHSQRSIANITVGITDGPLPISELINTCEEALGTPVQTFVKRDDEQEFALRNGANPMFVEDASRRLIQALETQGYSGKLYVSHQESLHGHDAVAQAFFSSEER

SEQ ID NO: 10400 - protein, 228 aa, Marinomonas mediterranea
  REGION 1..228: note = tr|F2JVP4|F2JVP4_MARM1 GTP cyclohydrolase 1; OS = Marinomonas mediterranea (strain ATCC 700492 / JCM 21426 / NBRC 103028 / MMB-1) OX=717774 GN=folE PE=3 SV=1
MSTAIAEEKSSLELIGLSEEAVKVRDALVKHGLETPMIENGLSTEEKYQRIKSAFEDVVYTLGLDMNDDSLAETPHRIAKMYVREIFSGLDYAKFPKITVIDNKMNVDEMVKVNNISFTSTCEHHFVTIDGFAKVAYLPKKKIIGLSKINRIVRFFGQRPQVQERLTQQILVTLQTLLETDNVAVSIEATHYCVKARGVMDASSSTQTTALGGLFKRSDKTRGEFLSN

SEQ ID NO: 10401 - protein, 227 aa, Marinomonas polaris
  REGION 1..227: note = tr|A0A1M5I8L4|A0A1M5I8L4_9GAMM GTP cyclohydrolase 1; OS = Marinomonas polaris DSM 16579 OX=1122206 GN=folE PE=3; SV = 1
MKANTAEQTNLNRLVLSNEAIKVRDALINSGLETPMIDNGLTSEEKYQRIKSAFEDVVTTLGLDLTDDSLAETPHRIAKMYVKEIFSGLDYAQFPKITVIENKMQVDEMVKVSDISFTSTCEHHFVTIDGLAKVAYLPKTKIIGLSKINRIVRFFAQRPQVQERLTQQILVTLQALLETDNVAVSISAVHYCVKARGVMDASSSTQTTALGGLFKRSDKTRGEFLAR

SEQ ID NO: 10402 - protein, 227 aa, Marinomonas pollencensis
  REGION 1..227: note = tr|A0A3E0DTS9|A0A3E0DTS9_9GAMM GTP cyclohydrolase 1; OS = Marinomonas pollencensis OX=491954 GN=folE PE=3 SV=1
MSIAVAEKTNVGSLVLSEEAIRVREALINHGLETPMIDNGLTTEEKYQRIKQSFEDVVSTLGLDLTDDSLAETPHRIAKMYVKEIFSGLDYSQFPKITVIDNKMKVDEMVKVSNISFTSTCEHHFVTIDGFAKVAYLPKNKIIGLSKINRIVRFFAQRPQVQERLTQQILVTLQVLLETDNVAVSIDATHYCVKARGVMDASSSTQTTALGGLFKRSDKTRGEFLAS

SEQ ID NO: 10403 - protein, 304 aa, Marinomonas pollencensis
  REGION 1..304: note = tr|A0A3E0DRK5|A0A3E0DRK5_9GAMM GTP cyclohydrolase FolE2 OS=Marinomonas pollencensis OX=491954 GN=folE2 PE=3; SV = 1
MNTVLPDVSISDFSANERPLEWVGMQEIDLPVTITEAHYERQLHAKADVQVNLPAAHIKGIHMSRLYRLLGDLTEGESLSPARIEALLKDMIETHQDCQTDSARLRLTFDLLVKRPALITESIAGWKSYPVHIDAKLINGNCLIQASVGVEYSSTCPCSAALSRQLVEQGFLADFPEDAPLSREEIAQWLTKNATLATPHSQRSEAEVRVDLVNHSADFGLLELINQIEKALQTPLQTAVKRADEQAFASLNGQNLMFVEDAVRRIQAQLQEVFIKPKAHVRHLESLHPHDAVAWSNPSSISVS

SEQ ID NO: 10404 - protein, 227 aa, Marinomonas posidonica
  REGION 1..227: note = tr|F6CTE8|F6CTE8_MARPP GTP cyclohydrolase 1; OS = Marinomonas posidonica (strain CECT 7376 / NCIMB 14433 / IVIA-Po-181) OX=491952 GN=folE PE=3 SV=1
MKANIAENSTVNHAFLSDEAKQVRDALIKSGLETPMIDNGLTTEEKYQRIKTAFEDVVSTLGLDLTDDSLAETPHRIAKMYVKEIFSGLDYTQFPKITVIENKMNVDEMVKVSDISFTSTCEHHFVTIDGMAKVAYLPKNKIIGLSKINRIVRFFAQRPQVQERLTQQILVTLQALLETDNVAVSISAVHYCVKARGVMDASSSTQTTALGGLFKRSDKTRGEFLAQ

SEQ ID NO: 10405 - protein, 227 aa, Marinomonas primoryensis
  REGION 1..227: note = tr|A0A2Z4PWE0|A0A2Z4PWE0_9GAMM GTP cyclohydrolase 1; OS = Marinomonas primoryensis OX=178399 GN=folE PE=3 SV=1
MNANIAVQTNLNRLVLSDEAIKVRDTLIKSGLETPMIDNGLTSEEKYQRIKNSFEEIVTTLGLDLTDDSLAETPHRIAKMYVKEIFSGLDYAQFPKITVIENKMKVDEMVKVSDISFTSTCEHHFVTIDGLAKVAYLPKTKIIGLSKINRIVRFFAQRPQVQERLTQQILVTLQALLETDNVAVSISAVHYCVKARGVMDASSSTQTTALGGLFKRSDKTRGEFLAR

SEQ ID NO: 10406 - protein, 227 aa, unidentified
  source 1..227: note = Marinomonas profundimaris
  REGION 1..227: note = tr|W1RTD6|W1RTD6_9GAMM GTP cyclohydrolase 1; OS = Marinomonas profundimaris OX=1208321 GN=folE PE=3 SV=1
MKANAAELNSVNRFEMSEEAIKVRQALIDSGLETPMIDNGLTSEEKYQRIKSAFTEVVSTLGLDLTDDSLAETPHRIAKMYVKEIFSGLDYGQFPKITVIENKMKVDEMVKVSDISFTSTCEHHFVTIDGLAKVAYLPKTKIIGLSKINRIVRFFAQRPQVQERLTQQILVTLQALLETDNVAVSISAVHYCVKARGVMDASSSTQTTALGGLFKRSDKTRSEFLAR

SEQ ID NO: 10407 - protein, 324 aa, Marinomonas rhizomae
  REGION 1..324: note = tr|A0A366IZR6|A0A366IZR6_9GAMM GTP cyclohydrolase FolE2 OS=Marinomonas rhizomae OX=491948 GN=folE2 PE=3 SV=1
MTNLLPDVSISETVVNESPLEWVGMKGIDLPITVSETNCEAHYYRELHAHADVQVNLPAGHVKGIHMSRLYRLLDTLSDGDALSPYRLESLLKAMIETHQDCYTDSARLRLKFDLLTRRPALMTEGASGWKSYPVCLDVYLSDKSFQINAQVIVQYSSTCPCSAALSRQLIEQRFLSDFVNQPALAPDTVAAWLRDNASLATPHSQRSEASVQVDVPTNQQEFGLLSLIDQIEVALGTPLQTAVKRADEQAFAALNGQNLMFVEDAARRIQAALNGKFSSPKVHVRHLESLHPHDAVAWSNAPEQQTTADLTHPSSSILMKMSS

SEQ ID NO: 10408 - protein, 227 aa, Marinomonas rhizomae
  REGION 1..227: note = tr|A0A366J8L3|A0A366J8L3_9GAMM GTP cyclohydrolase 1; OS = Marinomonas rhizomae OX=491948 GN=folE PE=3 SV=1
MKANTAEQTNLNRLVLSDEAIKVRDALINSGLETPMIDNGLTSDEKYQRIKSAFEDVVTTLGLDLTDDSLAETPHRIAKMYVKEIFSGLDYAQFPKITVIENKMQVDEMVKVSDISFTSTCEHHFVTIDGLAKVAYLPKNKIIGLSKINRIVRFFAQRPQVQERLTQQILVTLQALLETDNVAVSISAVHYCVKARGVMDASSSTQTTALGGLFKRSDKTRGEFLAR

SEQ ID NO: 10409 - protein, 228 aa, Marinomonas sp.
  REGION 1..228: note = tr|A0A501WPR1|A0A501WPR1_9GAMM GTP cyclohydrolase 1; OS = Marinomonas sp. HB171799 OX=2589817 GN=folE PE=3 SV=1
MTTVIAENTTTRITPNLSEEAAKVRAALLKHGLETPMVDNELTTEEKYQRIKASFEDIVFTLGLDLGDDSLAETPHRIAKMYVKEIFSGLDYSQFPKISVIDNKMKVDEMVKVNDISFTSTCEHHFVTIDGFAKVAYLPKNKIIGLSKINRIVRFFGQRPQVQERLTQQILITLQTLLETDNVAVSISATHYCVKARGVMDASSSTQTTALGGLFKRSDKTRGEFLAN

SEQ ID NO: 10410 - protein, 316 aa, Marinomonas sp.
  REGION 1..316: note = tr|A3YH71|A3YH71_9GAMM GTP cyclohydrolase FolE2; OS = Marinomonas sp. MED121 OX=314277 GN=folE2 PE=3 SV=1
MIDQLPDVAHTQVNSQQPKINWVGMDDIYLPIGLEEAGKQLASQACASIAVDLPGGENAAKGIHMSRLYFLLNELAQQPLKPETLKHCLEQVLASHSDLDSNVVRIELAFDLLWQRPALVSGSPAGWRAYPMVLSAQLNKDSGFSLSLQAEFQYSSTCPCSAALVRETLSNQFSQNFAGQASIPTQEVAQWLKQNGTLATPHSQRSLALITLPLNESASTFNLVALIEEVETIIATPVQTSVKRADELAFAELNGSNLIFVEDISRKLGKALREKYQAVEIQVRHLESLHAHNAFAQVLPELSQSGLRPQFKQGPK

SEQ ID NO: 10411 - protein, 102 aa, unidentified
  source 1..102: note = Marinomonas spartinae
  REGION 1..102: note = tr|A0A1A8TQD1|A0A1A8TQD1_9GAMM Putative GTP cyclohydrolase 1 type 2 OS=Marinomonas spartinae; OX = 1792290 GN=MSP8886_03746 PE=4 SV=1
MYSLIFYVPETDLDKVKQALFSVGAGALGNYDHYCWQIKGEGQFRPLEGADPHSGKVNEISHICEYRVEMLLQEDVKQSAINALLSSHPYEEVAYHIIPIQR

SEQ ID NO: 10412 - protein, 228 aa, unidentified
  source 1..228: note = Marinomonas spartinae
  REGION 1..228: note = tr|A0A1A8T7Y7|A0A1A8T7Y7_9GAMM GTP cyclohydrolase 1; OS = Marinomonas spartinae OX=1792290 GN=folE PE=3 SV=1
MKSVVAEQAKVSDLGLSEEAHKVRDALIKSGLETPMIDNGLTSEEKYQRIKYAFEDIVGTLGLDLTDDSLAETPHRIAKMYVREIFSGLDYSNFPKITVIENKMKVDEMVKVRNISFTSTCEHHFVTIDGMATVAYLPKNKIIGLSKINRIVRFFGQRPQVQERLTQQILVTLQALLETDNVAVSIDAVHYCVKARGVMDASSSTQTTALGGLFKSSDKTRGEFLSSQ

SEQ ID NO: 10413 - protein, 226 aa, Marinomonas ushuaiensis
  REGION 1..226: note = tr|X7E4B4|X7E4B4_9GAMM GTP cyclohydrolase 1; OS = Marinomonas ushuaiensis DSM 15871 OX=1122207 GN=folE; PE = 3 SV=1
MNNTAEQTNVSRLELSDEAMRVRDALISKGLETPMIDTGLTTEEKYQRIKSAFEDVVTTLGLDLTDDSLTETPHRIAKMYVKEIFSGLDYAHFPKITVIENKMKVDEMVKVSDISFTSTCEHHFVTIDGLAKVAYLPKTKIIGLSKINRIVRFFAQRPQVQERLTQQVLVTLQVLLETDNVAVSMDAVHYCVKSRGVMDASSSTQTTALGGLFKRSDKTRSEFLAR

SEQ ID NO: 10414 - protein, 233 aa, Marinoscillum furvescens
  REGION 1..233: note = tr|A0A3D9L5R3|A0A3D9L5R3_9BACT GTP cyclohydrolase 1; OS = Marinoscillum furvescens DSM 4134 OX=1122208 GN=folE; PE = 3 SV=1
MKQKETLLNTQHELNNMEDDFAEDHVGSSDSTPLRADAFEMDDELKMELISKHFKEIMQILGLDLTDDSLQGTPHRVAKMYVQEVFSGLNPANKPKVRLFENKYKYDQMLVEKDITFYSHCEHHFVPIYGKAHVAYFSSGKVIGLSKINRVVQYYAKRPQVQERLTMQIANELKEVLQTEDVAVVLDATHMCVSSRGVNDTNSMTGTAFFDGKFKDQSVKTEFLNYINSKTDL

SEQ ID NO: 10415 - protein, 220 aa, Marinoscillum sp.; identical to SEQ ID NO: 8117
  REGION 1..220: note = tr|A0A2D7TEZ9|A0A2D7TEZ9_9BACT GTP cyclohydrolase 1; OS = Marinoscillum sp. OX=2024838 GN=folE PE=3 SV=1

SEQ ID NO: 10416 - protein, 201 aa, Marinospirillum alkaliphilum
  REGION 1..201: note = tr|A0A1K1YYH6|A0A1K1YYH6_9GAMM GTP cyclohydrolase 1; OS = Marinospirillum alkaliphilum DSM 21637 OX=1122209; GN = folE PE=3 SV=1
MNALMQMQQNTTDDQPELPLDALESHYKSILSLLGEDPAREGLKDTPKRAAKAMAFLTQGYHQDLTGLVNGAVFSSDTDELVIVKDIELYSMCEHHLLPFIGKCHIGYLPQGKVLGLSKFARIVDMFARRFQIQEQLTRQIAEAVQEVTGAAGVGVIVEARHMCMMMRGVEKQNSSMRTSVMLGQLRESQNTRQEFLKLLD

SEQ ID NO: 10417 - protein, 201 aa, Marinospirillum celere
  REGION 1..201: note = tr|A0A1I1E3B0|A0A1I1E3B0_9GAMM GTP cyclohydrolase 1; OS = Marinospirillum celere OX=1122252 GN=folE PE=3 SV=1
MNALTQPNTMNQNPDSDMIHQKLTPLYREILSDLGEDPDREGLVDTPKRAAKAMEFLTKGYRQTLEELVNGAVFSSETDELVIVKDIELYSLCEHHLLPFIGKCHIGYLPQGKVLGLSKFARIVDMFSRRLQIQEQLTKQIAEAVQEVTGAAGVGVIIEARHLCMQMRGVEKQNSSMRTSVMLGQLRASQNTRQEFLKLLD

SEQ ID NO: 10418 - protein, 367 aa, unidentified
  source 1..367: note = Marinosulfonomonas sp.
  REGION 1..367: note = tr|A0A0P8Z0Q9|A0A0P8Z0Q9_9RHOB GTP cyclohydrolase FolE2 OS=Marinosulfonomonas sp. PRT-SC04 OX=1527300; GN = folE2 PE=3 SV=1
MNIQPTNDSAETDRKKAEMALATLRDWAKSVTAIEVAQLDPAIARLLPENEVSNYPALARAYPEEFTVDEAYKASLPDLQNGPESLIKGAKRHIQHVGISNFRLPIQFHSRDGGDLRLETSVTGTVSLEAGKKGINMSRIMRTFYTHAEKTFSFAVIEAALNDYKVDLDSFDARIQMRFSFPVKMMSLRSKLEGYQYYDIALELVEIAGKVKKIIHLDYVYSSTCPCSLELAEHARQMRGQLATPHSQRSVVRISAQTIPGENCLWFEDLIDICRAAVPTETQVMVKREDEQAFAELNAANPIFVEDAARLFYEGLKKDDRIGDFRIIASHQESLHSHDAVSILTEGETFVSDSLDPRLFNTLFHVG

SEQ ID NO: 10419 - protein, 371 aa, unidentified
  source 1..371: note = Marinosulfonomonas sp.
  REGION 1..371: note = tr|A0A2G2BHT7|A0A2G2BHT7_9RHOB GTP cyclohydrolase FolE2 OS=Marinosulfonomonas sp. OX=2030815 GN=folE2 PE=3; SV = 1
MNIQPPKDSTDEERNKAQAALAVLRDWATSVTAIEVAQLDPAIARLLPENEVSNYPALARAYPEEFTVDEAYKVSLPDLQNGPESLIKGAKRHIQHVGISNFRLPIRFHSRDGGDLRLETSVTGTVSLEAGKKGINMSRIMRTFYGHAEKTFSFDVIEAALNDYKADLDSFDARIQMRFSFPVKMPSLRSGLEGYQYYDIALELVETKGKVQKFIHLDYVYSSTCPCSLELSEHARQMRGQLATPHSQRSVARISAQMICDKPGRENCLWYEDLIDICREAVPTETQVMVKREDEQAFAELNAANPIFVEDAARLFYEGLQLDPRIGDFRIIASHQESLHSHDAVSILTEGETFVSDSLDPKLFNTLFHVG

SEQ ID NO: 10420 - protein, 349 aa, Marinovum algicola
  REGION 1..349: note = tr|A0A0H4KTC2|A0A0H4KTC2_9RHOB GTP cyclohydrolase FolE2 OS=Marinovum algicola DG 898 OX=988812 GN=folE2 PE=3; SV = 1
MNLPTPGLNRVPSRQEAEAAVDLLRRYTDATGATALGYPDMASIYPAEFEVDSTYKSSLPDLQNGPASLIRGANEPIQHVGISNFRLPISFHTRGGGDLTLETAVTGTVSLGADKKGINMSRIMRSFYRHSEKTFSFEVMEAALDDYKTDLESFDARIEMRFSFPVRLDSLRSGLSGYQYYDIALELIESQGQRRKILHLDYVYSSTCPCSLELSEHARRERGQLATPHSQRSVARISVEVVGETCLWFEDLIDLCRAAVPTETQVMVKREDEQAFAELNAANPIFVEDAARLFCARLQAEPRVGDFRVAASHQESLHSHDAISVLTSGPTFETASIDPRFFATLIHAG

SEQ ID NO: 10421 - protein, 215 aa, Marinovum sp.
  REGION 1..215: note = tr|A0A2E7WIM5|A0A2E7WIM5_9RHOB GTP cyclohydrolase 1; OS = Marinovum sp. OX=2024839 GN=folE PE=3 SV=1
MMTPYDTGETKDASEINDASLDRSLTEKPSRQEAEAAIDVLLRWIGENPTREGLAGTPGRVVRAWSEFCSGYDEDPAKMLARTFEEVEGYNDMVMLRNIRMESHCEHHLVPILGVAHIAYMPNRRVVGISKLARVLDGFAHRLQTQETLTAQVADCIQKILQPKGVAVLIDAQHQCMTTRGVRKPDVSMITTRFTGVFKKDEALCRRFLDQTKLG

SEQ ID NO: 10422 - protein, 363 aa, Marinovum sp.
  REGION 1..363: note = tr|A0A2E7WHP1|A0A2E7WHP1_9RHOB GTP cyclohydrolase FolE2 OS=Marinovum sp. OX=2024839 GN=folE2 PE=3 SV=1
MNIHTREADNISLQDKADAALDVLRVWSQSASQDELAAMAKRLAPLAAPAGYPDLSQDYPEEFVADPDYKSGLPDLQNGPSSLIRGAQRAIQHVGISNFRLPIQFHTRDDGDVRLETSVTGTVSLEAGKKGINMSRIMRSFYGHAERTFSFDVVEAALDDYKADLESFDARIHMRFSFPAKVDSLRSGLSGYQYYDIALELIEQHGQRRRIMHLDYVYSSTCPCSLELSEHARQTRHQLATPHSQRSVARISVELVEQNCLWFEDLIDMCRRAVPTETQVMVKREDEQAFAELNAANPIFVEDAARLFCEQLHQDGRIGDFRVIASHQESLHSHDAVSILTEGQTFAADSLDPRLFQSLFHTG

SEQ ID NO: 10423 - protein, 200 aa, unidentified
  source 1..200: note = Mariprofundus aestuarium
  REGION 1..200: note = tr|A0A2K8L508|A0A2K8L508_9PROT GTP cyclohydrolase 1; OS = Mariprofundus aestuarium OX=1921086 GN=folE PE=3 SV=1
MSDDFDLNDPNNVEGMKHVRGLLDYIGEDVNREGLQETPARVLAAMHEHFSGYKEDPRDHLEKTFEEVEGYDEVVLVSDIDVHSHCEHHMVPFVGKAHVAYIPRGRVVGLSKLARVVDGYAKRLQVQEKLTMQIANAIEEVLDPKGVAVIIQCQHFCMCHRGIHKPNSWTTTSKLTGAFMNNPSSRLELFQLIGMNKTTG

SEQ ID NO: 10424 - protein, 200 aa, unidentified
  source 1..200: note = Mariprofundus ferrinatatus
  REGION 1..200: note = tr|A0A2K8L1P0|A0A2K8L1P0_9PROT GTP cyclohydrolase 1; OS = Mariprofundus ferrinatatus OX=1921087 GN=folE PE=3 SV=1
MSEDFDLNDPINIEGMKHVRGLLEYIGEDVGREGLKETPARVLAAMHEHFSGYKEDPRDHLEKTFEEVEGYDEVVLVSDIDVHSHCEHHMVPFVGKAHVAYIPRGRVVGLSKLARVVEGYAKRLQVQEKLTMQIANAIEEVLDPKGVAVIIQCQHFCMCHRGVHKPNSWTTTSKLTGAFMNNPSSRLELFQLIGMNKSSD

SEQ ID NO: 10425 - protein, 200 aa, Mariprofundus ferrooxydans
  REGION 1..200: note = tr|Q0EX82|Q0EX82_9PROT GTP cyclohydrolase 1; OS = Mariprofundus ferrooxydans PV-1 OX=314345 GN=folE PE=3; SV = 1
MTEDFDLNDEKNIAAMKHVRGLLEYMGEDVHREGLLETPARVLAAMGEHFSGYREDPKEHLQKTFEEVEGYDEVVLVSDIDVHSHCEHHMVPFVGKAHVAYIPHGRVVGLSKLARVVDGYAKRLQVQEKLTMQIANAINEVLEPEGVAVIIQCQHFCMCHRGVQKSNSWTTTSKLTGTFLNNPSSRLELFQLIGMDKSLR

SEQ ID NO: 10426 - protein, 222 aa, unidentified
  source 1..222: note = Mariprofundus micogutta
  REGION 1..222: note = tr|A0A1L8CQ95|A0A1L8CQ95_9PROT GTP cyclohydrolase 1; OS = Mariprofundus micogutta OX=1921010 GN=folE PE=3 SV=1
MGVALLKFALWCMPETEKEERAVTDDLDLNDPKNIQGMQHVRGLLEYIGEDVGREGLQETPARVLSAMHEHFSGYREDPREHLEKTFEEVEGYDEVVLVSDIDVHSHCEHHMVPFVGKAHVAYIPRGRVVGLSKLARVVEGYAKRLQVQEKLTMQIANAIEEVLDPKGVAVIVQCQHFCMCHRGVHKPNSWTTTSKLTGAFMNNPSSRLELFQLIGMEKSAK

SEQ ID NO: 10427 - protein, 197 aa, Mariprofundus sp.
  REGION 1..197: note = tr|A0A498E2X6|A0A498E2X6_9PROT GTP cyclohydrolase 1; OS = Mariprofundus sp. EBB-1 OX=2650971 GN=folE PE=3 SV=1
MTDDFDIEDKKNIEAMGFVRGMLEYIGEDVNREGLLETPARVLAAMGEHFSGYKEDPREHLLKTFEEVEGYDEVVLVSDIEVHSHCEHHMVPFIGKAHVAYIPRDRVVGLSKLARVVNGFAKRLQVQEKLTMQIANAIEEVLDPKGVAVIIQCQHFCMCHRGVHKPDSWTTTSKLTGSFLKNPSSRLELFQLIGMKK

SEQ ID NO: 10428 - protein, 227 aa, unidentified
  source 1..227: note = Marisediminitalea aggregata
  REGION 1..227: note = tr|A0A1M5DZE5|A0A1M5DZE5_9ALTE GTP cyclohydrolase 1; OS = Marisediminitalea aggregata OX=634436 GN=folE PE=3 SV=1
MLAKEAVIVRDAVKLGISKEALMVHEALVARGLETPMLETGLSDEAKRQRIEGAMREIMETLGLDLSDDSLSETPLRIAKMYVDEIFSGLDYRKFPKITQIENKMQLGQPVHVSDVSLTSTCEHHFVTIDGTASVAYIPKDTVIGLSKINRLVGFFAQRPQVQERLTQQVLVALQTLTGTEDVAVAINATHYCVKARGIRDSLSYTKTSALGGKFLADVELRREFFS

SEQ ID NO: 10429 - protein, 188 aa, unidentified
  source 1..188: note = Marispirochaeta aestuarii
  REGION 1..188: note = tr|A0A1Y1RYL1|A0A1Y1RYL1_9SPIO GTP cyclohydrolase 1; OS = Marispirochaeta aestuarii OX=1963862 GN=folE PE=3 SV=1
MNRERVAGLIRELLIELGEDPEREGLQRTPERAAKAWEYLSSGYSRNIDEVINGAVFESEANNMIIVRDIEVYSLCEHHMLPFYGKVHIGYIARDKVLGVSKLARIADVFARRLQIQERLTRQIAREIMDSTNAEGVGVVMEAKHLCMMMRGVEKQNSVMTTSSVLGSFHNDEATRLEFLQLISKKLD

SEQ ID NO: 10430 - protein, 208 aa, Maritalea mobilis
  REGION 1..208: note = tr|A0A4R6VRE3|A0A4R6VRE3_9RHIZ GTP cyclohydrolase 1; OS = Maritalea mobilis OX=483324 GN=folE PE=3 SV=1
MDATVKPIKNDIREAKPVVRPTREEAEQAVRTLLAWAGEDVTREGLLETPKRVAKAYEEFFEGYNLDAKEVLNKTFRDVGGYDDMVLVKDIPFFSHCEHHMVPFVGKAHIAYLPTDSVVGLSKLGRVTDVFAKRFQTQENLTQQIIDAINDNLNPRGAAVMLEAEHMCMSLRGVKKHGATTLTQRFTGVFAEEPKEQDRFFHLLALQK

SEQ ID NO: 10431 - protein, 208 aa, Maritalea myrionectae
  REGION 1..208: note = tr|A0A2R4MDQ4|A0A2R4MDQ4_9RHIZ GTP cyclohydrolase 1; OS = Maritalea myrionectae OX=454601 GN=folE PE=3 SV=1
MDATIKSIRKDLPTTKSVVRPTRDEAEQAVRTLLAWAGEDVTREGLLETPKRVAKAYEEFFEGYTLDAEEVLNKTFRDVGGYDDMVLVKDIPFFSHCEHHMVPFVGKAHIAYLPTDAVVGLSKLGRVTDVFAKRFQTQENLTQQIIDAINDNLNPRGAAVMLEAEHMCMSLRGVKKHGATTLTQRFTGVFAEEPKEQDRFFHLLAMQK

SEQ ID NO: 10432 - protein, 367 aa, Maritimibacter alkaliphilus
  REGION 1..367: note = tr|A3VAA1|A3VAA1_9RHOB GTP cyclohydrolase FolE2; OS = Maritimibacter alkaliphilus HTCC2654 OX=314271 GN=folE2; PE = 3 SV=1
MNHIPSKVLAAPELDDAKAALETLRDWARGATPEEVAALDPAISRLLPGGEVSNYPALSRTYDPDFEADADYKATLPDLQNGPASLIQGERQDIQHVGISNFRLPLRYRTRDNGDLQLETSVTGTVSLEAEKKGINMSRIMRSFYAHAEKTFSFEVIEAALDDYKTDLESLDARIEMSFSFPMKVKSLRSGLEGYQYYNIALELVETKGVRRHFMHLDYVYSSTCPCSLELSEHARQTRGQLATPHSQRSVARVSVEVAPGQCCLWFEDLIELCRAAVPTETQVMVKREDEQAFAELNAANPIFVEDAARLFTEQLKADDRIGDFRVVASHQESLHSHDAVSILTEGETFRAQSLDPRLFSTLIHQG

SEQ ID NO: 10433 - protein, 367 aa, Maritimibacter sp.
  REGION 1..367: note = tr|A0A1X7NSI7|A0A1X7NSI7_9RHOB GTP cyclohydrolase FolE2 OS=Maritimibacter sp. HL-12 OX=1162418 GN=folE2 PE=3; SV = 1
MNHVTPKLRPAPGADDARQALETLRDWARGAEPSEVARLDPAIARLLPERVVSDYPDLNRNYPHDFVPDAAYKAGMPDLQNGPASLIQGEKQLIQHVGISNFRLPIRYHTRDNGDLTLETSVTGTVSLEAEKKGINMSRIMRSFYAHAEKTFSFEVIEAALDDYKTDLDSLDARIEMSFSFPMKMQSLRSGLEGYQYYQIALELVEQDGVRRKFVHLDYVYSSTCPCSLELAEHARQVRGQLATPHSQRSVARISVEVKCEKSCLWFEDLIDMARDAVPTETQVMVKREDEQAFAELNAANPIFVEDAARLFTEQLKRDERIGDFRVVASHQESLHSHDAVSILTEGETFRSQSLDPKLFSTLIHAG

SEQ ID NO: 10434 - protein, 367 aa, Maritimibacter sp.
  REGION 1..367: note = tr|A0A2D8PAT5|A0A2D8PAT5_9RHOB GTP cyclohydrolase FolE2 OS=Maritimibacter sp. OX=2003363 GN=folE2 PE=3 SV=1
MNHVTPKVLAAPDTEDAKDALRVLRDWARGATPEEVAALDPVISRLLPGGEVSNYPALSREYDADFVVDELYKASLPDLQNGPASLIQGERQDIQHVGISNFRLPLRYRTRDNGDLQLETSVTGTVSLEAEKKGINMSRIMRSFYVHADETFSFEVIERALDDYKTDLDSLDARIEMSFSFPMRVKSLRSGLEGYQYYNIALELVEAQGVRRKFMHLDYVYSSTCPCSLELSEHARQSRGQLATPHSQRSVARVSVELAPGQCCLWFEDLIDLCRAAVPTETQVMVKREDEQAFAELNAANPIFVEDAARLFTEQLKADDRIGDFRVVASHQESLHSHDAVSILTEGETFRAQSLDPRLFSTLIHQG

SEQ ID NO: 10435 - protein, 232 aa, unidentified
  source 1..232: note = Marivirga lumbricoides
  REGION 1..232: note = tr|A0A2T4DUL7|A0A2T4DUL7_9BACT GTP cyclohydrolase 1; OS = Marivirga lumbricoides OX=1046115 GN=folE PE=3 SV=1
MLNTPQNKEDLENFQSFDDMGDDHAGSSAETPLRADAFEMDDELKMELIAKHFKVIMHILGMDLTDDSLKGTPARVAKMYVKEVFSGLNPTNKPKPKLFENKYKYDQMLVEKDVTFYSHCEHHFVPIYGKAHVAYFSSGKVIGLSKINRIVQYFSKRPQVQERLTMQIAEELKRVLETESVAVVMDASHMCVSSRGVGDTNSRTGTSYFGGKFNDESTRREFLDYINSPSPK

SEQ ID NO: 10436 - protein, 231 aa, Marivirga sericea
  REGION 1..231: note = tr|A0A1X7I9C0|A0A1X7I9C0_9BACT GTP cyclohydrolase 1; OS = Marivirga sericea OX=1028 GN=folE PE=3 SV=1
MLNTPHKNKDLDNMNDFDELGDDHVASNFETPLRADAFEMDDDLKMEMIAKHFKEIMHILGMDLSDDSLKGTPNRVAKMYVKEVFSGLNPKNKPQPKLFENKYKYSQMLVEKDITFYSHCEHHFVPIYGKAHVAYISSGKVIGLSKINRIVQYFSKRPQVQERLTVQIAEELRKVMETEDVAVVMDANHMCVSSRGVGDTNSRTGTSYFGGKFNDEATRREFLDYINSPSS

SEQ ID NO: 10437 - protein, 233 aa, Marivirga tractuosa
  REGION 1..233: note = tr|E4TRD8|E4TRD8_MARTH GTP cyclohydrolase 1; OS = Marivirga tractuosa (strain ATCC 23168 / DSM 4126 / NBRC 15989 / NCIMB 1408 / VKM B-1430 / H-43) OX=643867; GN = folE PE= 3 SV=1
MSNTPQNKNRDLENINELEEFGDDHVASNFETPLRADAFEMDDDLKMEMIAKHFKEIMHILGMDLSDDSLKGTPNRVAKMYVKEVFSGLNPKNKPQPKLFENKYKYSQMLVEKDITFYSHCEHHFVPIYGKAHVAYISSGKVIGLSKINRIVQYYSKRPQVQERLTVQIAEELKEVMQTEDVAVVMDANHMCVSSRGVGDTNSRTGTSYFGGKFNDEATRREFLDYINSPNNS

SEQ ID NO: 10438 - protein, 365 aa, Marivita cryptomonadis
  REGION 1..365: note = tr|A0A1X4NXS0|A0A1X4NXS0_9RHOB GTP cyclohydrolase FolE2 OS=Marivita cryptomonadis OX=505252 GN=folE2 PE=3; SV = 1
MNIHTPEIDRKPSREEAEAALALLKQWAGKSHDAEIDLVDPVLRRLVEGKTDTYPVLSREYPKGFSVDAAYKDTLPDLQNGPSALIRGANRGIQHVGISNFRLPISYHTRDNGDLTLETSVTGTVSLDADKKGINMSRIMRSFYVHAEKTFSFNVIEAALDDYKSDLESFDARINMRLSFPMKVNSLRSGLSGYQYYDIALELVEIDGVRRKIMHLDYVYSSTCPCSLELSEHARRERGQLATPHSQRSVARISVEVKDGKCLWFEDLIDMCRRAVPTETQVMVKREDEQAFAELNAANPIFVEDAARLFAEQLQADARIGDYRVLASHQESLHSHDAVSVLTEGDLFAAQSLDPKLFSTLFHVG

SEQ ID NO: 10439 - protein, 365 aa, unidentified
  source 1..365: note = Marivita geojedonensis
  REGION 1..365: note = tr|A0A1X4N9Y0|A0A1X4N9Y0_9RHOB GTP cyclohydrolase FolE2 OS=Marivita geojedonensis OX=1123756 GN=folE2 PE=3; SV = 1
MNIHTPEIDRKPSREEAEAALALLRQWAGKSHDGEIDLVDPVLRRLVDGEADSYPVLARDYPDGFSVDGAYKASLPDLQNGPSALIRGANRGIQHVGISNFRLPISYHTRDNGDLTLETSVTGTVSLDADKKGINMSRIMRSFYEHADKTFSFDVIKAALDDYKTDLESFDARINMRLSFPMKVNSLRSGLSGFQYYDIALELVDMGGVRRSIMHLDYVYSSTCPCSLELSEHARRERGQLATPHSQRSVARISVEVKDGKCLWFEDLIDMCRRAVPTETQVMVKREDEQAFAELNAANPIFVEDAARLFAEQLQADPRIGDYRVLASHQESLHSHDAVSVLTEGDLFAAESLDPKLFSTLFHVG

SEQ ID NO: 10440 - protein, 366 aa, Marivita hallyeonensis
  REGION 1..366: note = tr|A0A1M5PAI5|A0A1M5PAI5_9RHOB GTP cyclohydrolase FolE2 OS=Marivita hallyeonensis OX=996342 GN=folE2 PE=3; SV = 1
MNIHTPEFDRKPSLDEAEQALAVLRQWANKAHDAEIDLVDPVLRKLVDGVKDDGYPVLSRDYPDGFAVDAAYKATLPDLQNGPSALIRGANRGIQHVGISNFRLPISYHTRDNGDLTLETSVTGTVSLDADKKGINMSRIMRSFYVHAEKTFSFNVIEAALDDYKSDLESFDARINMRLSFPMKMDSLRSGLSGYQYYDIALELVEIDGVRRQIMHLDYVYSSTCPCSLELSEHARRERGQLATPHSQRSVARISVEVKDGKCLWFEDLIDMCRKAVPTETQVMVKREDEQAFAELNAANPIFVEDAARLFAEQLQKDPRVGDYRVLASHQESLHSHDAVSVLTEGTLFAAESLDPKLFSTLFHVG

SEQ ID NO: 10441 - protein, 365 aa, Marivita sp.
  REGION 1..365: note = tr|A0A316KQL7|A0A316KQL7_9RHOB GTP cyclohydrolase FolE2 OS=Marivita sp. XM-24bin2 OX=2133951 GN=folE2 PE=3; SV = 1
MNIHTPEIDRKPSREEAEAALALLRQWAGKAHDGEIDQLDPVLRRLLDGAQDGYPVLSRDYPDDFVVDAAYKDTLPDLQNGPAALIRGANRGIQHVGISNFRLPISYHTRDNGDLTLETSVTGTVSLDADKKGINMSRIMRSFYVHAEKTFSFNVIEAALDDYKSDLESFDARINMRLSFPMKMDSLRSGLSGYQYYDIALELVEIDGVRRKIMHLDYVYSSTCPCSLELSEHARRERGQLATPHSQRSVARVSVELKDGKCLWFEDLIDMCRRAVPTETQVMVKREDEQAFAELNAANPIFVEDAARLFAEQLQADPRIGDYRVLASHQESLHSHDAVSVLTEGELFSAESLDPKLFSTLFHVG

SEQ ID NO: 10442 - protein, 366 aa, unidentified
  source 1..366: note = Marivivens niveibacter
  REGION 1..366: note = tr|A0A251X3W7|A0A251X3W7_9RHOB GTP cyclohydrolase FolE2 OS=Marivivens niveibacter OX=1930667 GN=folE2 PE=3; SV = 1
MNIHNQDMEREPTREEAEAALALLRRWAKDVTAEEVATLDPLVSRLIPGQEVSNYPALARAYPEDFEVDDAYKASMPDLQNGPSSLIRGAKQQIQHVGISNFRLPIRFHTRDNGDVTLETSVTGTVSLEAEKKGINMSRIMRSFYKHASDTFSFEVMETALDAYKADLESFDARIQMRFRFPMKVASLRSGLEGYQYYDIALELVEKAGVRKKIIHLDYVYSSTCPCSLELSEHARQFRGQLATPHSQRSVSRLSAVIEDGEMLWFEDLIDMARDAVPTETQVMVKREDEQAFAELNAANPIFVEDAARLFCEQLQNDPRVGDFRVIASHQESLHSHDAVSVLTEGDTFDSESLDPRMFSTLIHVG

SEQ ID NO: 10443 - protein, 199 aa, Marixanthomonas ophiurae
  REGION 1..199: note = tr|A0A3E1Q890|A0A3E1Q890_9FLAO GTP cyclohydrolase 1; OS = Marixanthomonas ophiurae OX=387659 GN=folE PE=3 SV=1
MASYKYFEEYNESVTDDLKTNFSDILSSLGEDVNREGIVKTPERAAKAMQFLTSGNCQDPAEILKSAMFAEDYHDMVIIKDIELYSLCEHHMLPFFGKAHIAYIPNGHIVGLSKIPRIVDVFARRLQVQERLTHDILECINDTLKPQGVAVVIEAAHLCMMMRGVQKQNSVTTTSGFRGQFEKIETRDEFLKLISNDLS

SEQ ID NO: 10444 - protein, 225 aa, Marixanthomonas ophiurae
  REGION 1..225: note = tr|A0A3E1QCP3|A0A3E1QCP3_9FLAO GTP cyclohydrolase 1; OS = Marixanthomonas ophiurae OX=387659 GN=folE PE=3 SV=1
MDLEKQLKDIEAMGDDHVASSTDTPLRPDAFELSDIEKIERIKKDVHNIMNTLGLDLTDDSLKGTPNRVAKMFVQEIFGGLHPDRKPKASTFDNKYKYGEMLVEKNITLYSTCEHHLLPIVGKAHIAYISNGTVVGLSKMNRIVDYYAKRPQVQERLTMQVVKELQKVLNTDDVACVIDAKHLCVNSRGIRDIDSSTVTSEFGGKFKNAETRRDFLDYINLDTEF

SEQ ID NO: 10445 - protein, 225 aa, Marixanthomonas sp.
  REGION 1..225: note = tr|A0A2U0I795|A0A2U0I795_9FLAO GTP cyclohydrolase 1; OS = Marixanthomonas sp. HN-E44 OX=2174845 GN=folE PE=3 SV=1
MDLEKQLQEIEAMGDDHVGSATGTPLRPDAFELSDIEKIERIKKDVHNIMDTLGLDLTDDSLKGTPNRVAKMFVQEIFGGLHPDRKPKASTFDNKYKYGEMLVEKNITLYSTCEHHLLPIVGKAHIAYISNGTVVGLSKMNRIVDYYAKRPQVQERLTMQVVKELQKVLNTDDVACVIDAKHLCVNSRGIRDIDSSTVTSEFGGKFKNAETRRDFLDYINLDTEF

SEQ ID NO: 10446 - protein, 199 aa, Marixanthomonas sp.
  REGION 1..199: note = tr|A0A2U0I3F9|A0A2U0I3F9_9FLAO GTP cyclohydrolase 1; OS = Marixanthomonas sp. HN-E44 OX=2174845 GN=folE PE=3 SV=1
MASYTFFEEYNENVTNDLKTHFSEILTQLGEDVDREGIAKTPERAAKAMQFLTSGNCQDPAEILKSAMFAEDYHDMVIIKDIELYSLCEHHMLPFFGKAHIAYIPDGHIVGLSKIPRVVDIFARRLQVQERLTHDILECINNTLKPQGVAVVIEAAHLCMMMRGVQKQNSVTTTSGFRGQFEKIETRDEFLKLISNDLS

SEQ ID NO: 10447 - protein, 202 aa, Marmoricola aurantiacus
  REGION 1..202: note = tr|A0A3N2CPI8|A0A3N2CPI8_9ACTN GTP cyclohydrolase 1; OS = Marmoricola aurantiacus OX=86796 GN=folE PE=3 SV=1
MGIDPVGAGQGAVAPFDHERAAAAVRELLIAVGEDPDREGLQDTPARVARAYAELTVGLHQQPEDVLTTTFDIGHDEMVLVRDIELWSMCEHHLVPFTGVAHVGYIPNANGKITGLSKLARLVDVYAKRPQVQERLTTQVADALVRILEPRGVIVVIEAEHLCMTMRGVRKAGARTLTSAVRGQMHQPATRAEAMSLILAAR

SEQ ID NO: 10448 - protein, 210 aa, unidentified
  source 1..210: note = Marmoricola ginsengisoli
  REGION 1..210: note = tr|A0A3N0CEV2|A0A3N0CEV2_9ACTN GTP cyclohydrolase 1; OS = Marmoricola ginsengisoli OX=661483 GN=folE PE=3 SV=1
MSSAAHEVTRLASRSRVTHPAPGRDLDNAEAAAAEFLRSLGIDPDDPATPDLADTPRRLALAYDELLDVPEFDFTTFANTEAYDELVVVGDIAFQSICEHHLLPFVGVAHVGYLPADRIVGLSKLARTVDHFARRPQTQERLTMQIADLLEEQLRPRGVGVVLRAEHTCMTLRGARSPGTATTTSSMRGHLREHPAARAEFLALTRPIAL

SEQ ID NO: 10449 - protein, 199 aa, unidentified
  source 1..199: note = Marmoricola ginsengisoli
  REGION 1..199: note = tr|A0A3N0CJ90|A0A3N0CJ90_9ACTN GTP cyclohydrolase 1; OS = Marmoricola ginsengisoli OX=661483 GN=folE PE=3 SV=1
MSAGSLAPINEFDHDRAAAAIKELLYAIGEDPEREGLLDTPDRVARAYKELTAGLRQTAEGVLTTTFDLGHDEMVLVRDIELWSMCEHHLVPFTGVAHVGYIPAESGKITGLSKLARLVDVYAKRPQVQERLTTQIADALVEILDARGVIVVIEAEHLCMTMRGVKKAGARTITSAVRGIMHNAATRSEAMALINAAHR

SEQ ID NO: 10450 - protein, 204 aa, unidentified
  source 1..204: note = Marmoricola pocheonensis
  REGION 1..204: note = tr|A0A3N0GXA0|A0A3N0GXA0_9ACTN GTP cyclohydrolase 1; OS = Marmoricola pocheonensis OX=661485 GN=folE PE=3 SV=1
MTDSIRPDGRGPGDIPEFDHARAEAAVRELLIAIGEDPTREGLHDTPARVARAYAELTAGLRMEAKDVLTTTFDIGHDEMVLVRDIELWSMCEHHLVPFTGVAHVGYIPAESGKITGLSKLARLVDLYAKRPQVQERLTTQIADSMVELLEARGVIVVIEAEHLCMTMRGVRKAGARTITSAVRGIMHNAATRSEAMALINASR

SEQ ID NO: 10451 - protein, 202 aa, Marmoricola scoriae
  REGION 1..202: note = tr|A0A1H1U162|A0A1H1U162_9ACTN GTP cyclohydrolase 1; OS = Marmoricola scoriae OX=642780 GN=folE PE=3 SV=1
MGVDRIGEGQRAIAPFDHDRAAAAVRELLLAIGEDPDREGLQDTPARVARAYAELTLGLHQEPEDVLTTTFDLGHDEMVLVRDIELWSMCEHHLVPFTGKAHVGYIPSDDGKITGLSKLARVVDVFAKRPQVQERLTTQVADALVRILTPRGVIVVIEAEHLCMTMRGVRKAGARTMTSAVRGMMHQPATRAEAMSLILASR

SEQ ID NO: 10452 - protein, 203 aa, unidentified
  source 1..203: note = Marmoricola solisilvae
  REGION 1..203: note = tr|A0A3N0E0C9|A0A3N0E0C9_9ACTN GTP cyclohydrolase 1; OS = Marmoricola solisilvae OX=1542737 GN=folE PE=3 SV=1
MNIGPVSTDGKPAGPFDHDRAAAAVRELLIAIGEDPDREGLRDTPARVARAYEELTGGLRKTAEDVLTTTFDLGHDEMVLVRDIELWSMCEHHLVPFTGVAHVGYIPAESGKITGLSKLARLVDVYAKRPQVQERLTTQIADSLMEILDARGVIVVIEAEHLCMTMRGVRKAGARTITSAVRGIMHNAATRSEAMALINAAHR

SEQ ID NO: 10453 - protein, 202 aa, Marmoricola sp.
  REGION 1..202: note = tr|A0A0Q6FGH9|A0A0Q6FGH9_9ACTN GTP cyclohydrolase 1; OS = Marmoricola sp. Leaf446 OX=1736379 GN=folE PE=3 SV=1
MGIDPVGAGQGAIAPFDHERAAAAVRELLIAVGEDPDREGLQDTPARVARAYAELTVGLHQQPEDVLTTTFDIGHDEMVLVRDIELWSMCEHHLVPFTGVAHVGYIPNANGKITGLSKLARLVDVYAKRPQVQERLTTQVADALVRILEPRGVIVVIEAEHLCMTMRGVRKAGARTLTSAVRGQMHQPATRAEAMSLILAAR

SEQ ID NO: 10454 - protein, 203 aa, Marmoricola sp.
  REGION 1..203: note = tr|A0A3L8P5U6|A0A3L8P5U6_9ACTN GTP cyclohydrolase 1; OS = Marmoricola sp. 4Q3S-7 OX=2478913 GN=folE PE=3 SV=1
MSSIGPVSDPGVTAQPFDAPRAEAAVRELLAAIGEDPDREGLRDTPARVARAYAELTAGLRQRAEDVLTTTFDLGHDEMVLVRDIELWSMCEHHLVPFTGVAHVGYIPSETGKITGLSKLARLVDVYAKRPQVQERLTTQVADALVEILAARGVVVVVEAEHLCMTMRGVKKAGARTITSAVRGQMRDPATRAEAMALIHSSR

SEQ ID NO: 10455 - protein, 196 aa, unidentified
  source 1..196: note = Martelella endophytica
  REGION 1..196: note = tr|A0A0D5LMX2|A0A0D5LMX2_9RHIZ GTP cyclohydrolase 1; OS = Martelella endophytica OX=1486262 GN=folE PE=3 SV=1
MRDANRKAQQRQTIMKAVNDILVALGEDPSREGLRDTPLRVAKMYQEVFSGREEDPRTHLQTVFAEEGHGDVVIVKDIPFHTMCEHHLLPFFGKAHIAYLPDGGRLTGLSKLARVVDTLARRPQLQERLTGQIADAINDALAPRGVMVLVEAEHMCMAMRGIKAHGSRTVTLVTRGIYDNDRDQRAEILGLLERQS

SEQ ID NO: 10456 - protein, 203 aa, Martelella mediterranea
  REGION 1..203: note = tr|A0A1U9YX82|A0A1U9YX82_9RHIZ GTP cyclohydrolase 1; OS = Martelella mediterranea DSM 17316 OX=1122214 GN=folE; PE = 3 SV=1
MNTIPTDIDALEAERLQREAIMKAVHDILVALGEDPTREGLSDTPLRVAKMYQEVFSGRDEDPRAHLQTVFQEDGHDDIVIVRDILFHTMCEHHLLPFFGKAHIAYLPEGGRLTGLSKLARVVDTVSRRPQLQERLTDEIADAINDALAPQGVMVMVEAEHMCMAMRGIKAHGSKTITLVTRGLFDTDRDRRAETLSLLKGLA

SEQ ID NO: 10457 - protein, 203 aa, Martelella mediterranea
  REGION 1..203: note = tr|A0A4R3NV90|A0A4R3NV90_9RHIZ GTP cyclohydrolase 1; OS = Martelella mediterranea OX=293089 GN=folE PE=3 SV=1
MGDFSTGVNSHEDEDLLKQRETIMRAVSDILVALGEDPAREGLRDTPKRVARMYQDVFSGLHEDPREHLQTVFQEDGHSEVVVVRDIIFHTMCEHHLLPFFGKVHVAYLPDGGRLTGLSKLARVVSAVSRRPQLQERLTAQIADAIEDRLKPKGIMVMVEAEHMCMAMRGIKAHGAKTVTLVTRGLYETDAEQRAEVLSLLKG

SEQ ID NO: 10458 - protein, 191 aa, Martelella sp.
  REGION 1..191: note = tr|A0A127CQ63|A0A127CQ63_9RHIZ GTP cyclohydrolase 1; OS = Martelella sp. AD-3 OX=686597 GN=folE PE=3 SV=1
MDDQRRETIMKAVSEILAALGEDPAREGLRDTPSRVAKMYMDVFSGLHEDASEHLKTVFTEDGHNEIVIVREIAFHTMCEHHLLPFFGRAHIAYLPDGGRLTGLSKLARVVETLARRPQLQERLTDQIADAIETVLRPKGVMVLAEARHMCMEMRGIKAHGANTVTLVSRGVFKTDPAQRAETLALLRGPV

SEQ ID NO: 10459 - protein, 203 aa, Martelella sp.
  REGION 1..203: note = tr|A0A2E1B7H3|A0A2E1B7H3_9RHIZ GTP cyclohydrolase 1; OS = Martelella sp. OX=1969699 GN=folE PE=3 SV=1
MNTIPTDIDALEAERLQREAIMKAVHDILVALGEDPTREGLSDTPLRVAKMYREVFSGRDEDPRAHLQTVFQEDGHDDIVIVRDILFHTMCEHHLLPFFGKAHIAYLPEGGRLTGLSKLARVVDTVSRRPQLQERLTDEIAHAINDALAPQGVMVMVEAEHMCMAMRGIKAHGSKTITLVTRGLFDTDRDRRAETLSLLKGLA

SEQ ID NO: 10460 - protein, 186 aa, Marvinbryantia formatexigens
  REGION 1..186: note = tr|C6LLD1|C6LLD1_9FIRM GTP cyclohydrolase 1; OS = Marvinbryantia formatexigens DSM 14469 OX=478749; GN = folE PE=3 SV=1
MAMDQEKIKEGVRLILEGIGEDTGREGLIETPDRIARMYTEIAGGMYEDAGKHLEKRFHVDNNDMVMEKDITFYSMCEHHMLPFWGKAHVAYVPDGCVVGLSKIARTVNVFARRLQLQEQLTAQVADAFMEHLAPQGVMVMVEAEHMCMTMRGVKKPGTKTVTVVTRGVFENNEALQNQFYRMLGR

SEQ ID NO: 10461 - protein, 187 aa, Massilia albidiflava
  REGION 1..187: note = tr|A0A411X764|A0A411X764_9BURK GTP cyclohydrolase 1; OS = Massilia albidiflava OX=321983 GN=folE PE=3 SV=1
MSKDSFSDHDWRRFLTSLGENPDRPGLAETPHRVAKAWKHWTSGYDQDPVELLKAFEDGAEEYNELIVVRNIPVYSHCEHHLAPFFGKATVGYLPNGKIVGLSKLTRLVDCFAKRLQVQERMTVQIANTLMEVLEPKAVGVVVKCRHMCMESRGIRTPGEETITSAMLGELQPNLALRTEFLALARD

SEQ ID NO: 10462 - protein, 187 aa, unidentified; identical to SEQ ID NO: 7810
  source 1..187: note = Massilia armeniaca
  REGION 1..187: note = tr|A0A2R4C3V8|A0A2R4C3V8_9BURK GTP cyclohydrolase 1; OS = Massilia armeniaca OX=2072590 GN=folE PE=3 SV=1

SEQ ID NO: 10463 - protein, 188 aa, Massilia aurea
  REGION 1..188: note = tr|A0A422QQN2|A0A422QQN2_9BURK GTP cyclohydrolase 1; OS = Massilia aurea OX=373040 GN=folE PE=3 SV=1
MSDKEAFTEHDWRRLLTSLGENPERPGLVETPARVAKAWKHWTSGYNQDPVEVLKAFEDGAEEYNELIVVRGIPVYSHCEHHLAPFFGKATVGYLPNGKIVGLSKLTRLVDIFSKRLQVQERMTMQIANALMEVLEPKAVGVVVKCRHMCMESRGIRAIGEETITSTLLGELQPNLALRTEFLALARD

SEQ ID NO: 10464 - protein, 188 aa, unidentified
  source 1..188: note = Massilia eurypsychrophila
  REGION 1..188: note = tr|A0A2G8TKY1|A0A2G8TKY1_9BURK GTP cyclohydrolase 1; OS = Massilia eurypsychrophila OX=1485217 GN=folE PE=3 SV=1
MSHHDAFSENDWRRLLSSFGEDPDRPGLAETPARVSKAWKHWTSGYAQDPVSLLKAFEDGAEQYNELIVVRGIPVYSHCEHHLAPFFGKATIGYLPNGKIVGLSKLTRLVDCFAKRLQVQERMTIQIANALMEVLEPKAVGVVIKCRHLCMESRGIRTPGEETITSAMLGELQPNLGLRTEFLALARD

SEQ ID NO: 10465 - protein, 187 aa, Massilia flava
  REGION 1..187: note = tr|A0A562PCH5|A0A562PCH5_9BURK GTP cyclohydrolase 1; OS = Massilia flava OX=871742 GN=folE PE=3 SV=1
MSKDSFSDQDWRRFLTSLGEDPDRPGLAETPHRVAKAWKHWTSGYEQDPVEILKAFEDGAEQYNELIVVRNIPVYSHCEHHLAPFFGKATVGYVPNGKIVGLSKLTRLVDCFAKRLQVQERMTVQIANTLMEVLEPKAVGVVVKCRHMCMESRGIRSPGEETITSAMLGELQPNLALRTEFLALARD

SEQ ID NO: 10466 - protein, 187 aa, unidentified
  source 1..187: note = Massilia lurida
  REGION 1..187: note = tr|A0A562QV26|A0A562QV26_9BURK GTP cyclohydrolase 1; OS = Massilia lurida OX=1036180 GN=folE PE=3 SV=1
MSKDSFSEQDWKRFLTSLGEDPDRPGLAETPHRVTKAWKHWTSGYDQDPVALLKAFEDGAEQYNELIVVRNIPVYSHCEHHLAPFFGKATIGYLPKGKIVGLSKLTRLVDCFAKRLQVQERMTVQIANTLMEVLEPKAVGVVVKCRHLCMESRGIRTPGEETITSAMLGELQPNLALRTEFLALARD

SEQ ID NO: 10467 - protein, 187 aa, Massilia lutea
  REGION 1..187: note = tr|A0A4P6KY70|A0A4P6KY70_9BURK GTP cyclohydrolase 1; OS = Massilia lutea OX=321985 GN=folE PE=3 SV=1
MSKDAFSDHDWRRFLTSLGEDPDRPGLAETPHRVAKAWKHWTSGYDQDPVELLKAFEDGAEEYNELIVVRNIPVYSHCEHHLAPFFGKATVGYVPNGKIVGLSKLTRLVDCFSKRLQVQERMTVQIANTLMEVLEPKAVGVVVKCRHMCMESRGIRTPGEETITSAMLGELQPNLALRTEFLALARD

SEQ ID NO: 10468 - protein, 189 aa, unidentified
  source 1..189: note = Massilia namucuonensis
  REGION 1..189: note = tr|A0A1I7LV75|A0A1I7LV75_9BURK GTP cyclohydrolase 1; OS = Massilia namucuonensis OX=1035707 GN=folE PE=3 SV=1
MSKEEAFSEHDWRRLLSSLGEDPNRPGLLETPHRVSKAWKHWTSGYEQDPVELLKVFEDGAEQYNELIVVKGIPVYSHCEHHLAPFFGTATVGYVPNGKIVGLSKLTRLVDCFAKRLQVQERLTQQVANALMDALDPKAVGVVVKCRHLCMESRGIRTPGEETITSAMLGELQPNLALRTEFLALARGS

SEQ ID NO: 10469 - protein, 188 aa, Massilia oculi
  REGION 1..188: note = tr|A0A2S2DJM5|A0A2S2DJM5_9BURK GTP cyclohydrolase 1; OS = Massilia oculi OX=945844 GN=folE PE=3 SV=1
MSDKEAFTEHDWRRLLTSLGENPERPGLVETPARVAKAWKHWTSGYDQDPVEVLKAFEDGAEEYNELIVVRGIPVYSHCEHHLAPFFGKATVGYLPNGKIVGLSKLTRLVDIFSKRLQVQERMTMQIANALMEVLEPKAVGVVVKCRHMCMESRGIRAIGEETITSTLLGELQPNLALRTEFLALARD

SEQ ID NO: 10470 - protein, 188 aa, unidentified
  source 1..188: note = Massilia phosphatilytica
  REGION 1..188: note = tr|A0A2S8GYB3|A0A2S8GYB3_9BURK GTP cyclohydrolase 1; OS = Massilia phosphatilytica OX=2026176 GN=folE PE=3 SV=1
MSDKEVFTENDWRRLLVSLGEDPNRSGLHETPARVAKAWKHWTSGYDQDPVEILKAFEDGAEEYNELIVVRGIPVYSHCEHHLAPFFGKATVGYLPNGKIVGLSKLTRLVDVFSKRLQVQERLTVQIANTLMEVLEPKAVGVVIKCRHMCMESRGIRTPGEETITSTLLGELQPNLALRTEFLSLARD

SEQ ID NO: 10471 - protein, 187 aa, Massilia plicata
  REGION 1..187: note = tr|A0A4P7BJA4|A0A4P7BJA4_9BURK GTP cyclohydrolase 1; OS = Massilia plicata OX=321984 GN=folE PE=3 SV=1
MSKEAFSEHDWRRLLTTLGEDPDRPGLAETPHRVAKAWKHWTSGYDQDPVALLKAFEDGAEEYNELIVVRNIPVYSHCEHHLAPFFGKATVGYLPNGKIVGLSKLTRLVDCFAKRLQVQERLTVQIANTLMEVLEPKAVGVVIKCRHMCMESRGIRTPGEETITSSMLGELQPNLGLRTEFLALARD

SEQ ID NO: 10472 - protein, 187 aa, unidentified
  source 1..187: note = Massilia psychrophila
  REGION 1..187: note = tr|A0A2G8T3I5|A0A2G8T3I5_9BURK GTP cyclohydrolase 1; OS = Massilia psychrophila OX=1603353 GN=folE PE=3 SV=1
MSQDAFSEKDWRRLIASFGEDPDRPGLVETPARVAKAWKHWTSGYQQDPVSLLKAFEDGAEQYNELIVVRGIPVYSHCEHHLAPFFGKATIGYLPNGKIVGLSKLTRLVDCFSKRLQVQERMTIQIANALMEVLEPKAVGVVIKCRHLCMESRGIRTPGEETITSAMLGELQPNLGLRTEFLALARD

SEQ ID NO: 10473 - protein, 188 aa, Massilia sp.
  REGION 1..188: note = tr|A0A0Q5HKA0|A0A0Q5HKA0_9BURK GTP cyclohydrolase 1; OS = Massilia sp. Leaf139 OX=1736272 GN=folE PE=3 SV=1
MSHNDEFTEHDWRRLLASLGEDPNRPGLHETPARVSKAWKHWTSGYGQDPVSVLKAFEDGAEQYNELIVVRGIPVYSHCEHHLAPFFGKATVGYLPNGKIVGLSKLTRLVDIFSKRLQVQERMTMQIANALMEVLEPKAVGVVVKCRHMCMESRGIRTQGEETITSCMLGELQPNLALRTEFLALARD

SEQ ID NO: 10474 - protein, 187 aa, Massilia sp.; identical to SEQ ID NO: 7810
  REGION 1..187: note = tr|A0A344JK88|A0A344JK88_9BURK GTP cyclohydrolase 1; OS = Massilia sp. YMA4 OX=1593482 GN=folE PE=3 SV=1

SEQ ID NO: 10475 - protein, 188 aa, Massilia timonae; identical to SEQ ID NO: 10463
  REGION 1..188: note = tr|A0A1S2NGW2|A0A1S2NGW2_9BURK GTP cyclohydrolase 1; OS = Massilia timonae OX=47229 GN=folE PE=3 SV=1

SEQ ID NO: 10476 - protein, 188 aa, Massilia timonae; identical to SEQ ID NO: 10463
  REGION 1..188: note = tr|K9DHY8|K9DHY8_9BURK GTP cyclohydrolase 1; OS = Massilia timonae CCUG 45783 OX=883126 GN=folE PE=3 SV=1

SEQ ID NO: 10477 - protein, 187 aa, unidentified; identical to SEQ ID NO: 10461
  source 1..187: note = Massilia umbonata
  REGION 1..187: note = tr|A0A4P8HUV6|A0A4P8HUV6_9BURK GTP cyclohydrolase 1; OS = Massilia umbonata OX=864828 GN=folE PE=3 SV=1

SEQ ID NO: 10478 - protein, 188 aa, unidentified
  source 1..188: note = Massilia yuzhufengensis
  REGION 1..188: note = tr|A0A1I1LH87|A0A1I1LH87_9BURK GTP cyclohydrolase 1; OS = Massilia yuzhufengensis OX=1164594 GN=folE PE=3 SV=1
MSDKEAFTEHDWRRLLTSLGENPDRPGLHETPARVAKAWKHWTSGYDQDPVEVLKAFEDGAEEYNELIVVRGIPVYSHCEHHLAPFFGKATVGYLPNGKIVGLSKLTRLVDIFSKRLQVQERMTIQIANALMEVLEPKAVGVVVKCRHMCMESRGIRAIGEETVTSAMLGELQPNLALRTEFLALTRD

SEQ ID NO: 10479 - protein, 235 aa, Mastigocladus laminosus
  REGION 1..235: note = tr|A0A4D9CKG5|A0A4D9CKG5_MASLA GTP cyclohydrolase 1; OS = Mastigocladus laminosus UU774 OX=1594576 GN=folE PE=3; SV = 1
MTIVSSNGSNRFQSPLVPDFTEAITTRPDRNTHDGRQPDLHPPQEEQMDEMVEAVRTLLLGVGEDPEREGLLKTPKRVAEAMRFLTSGYNQSLEEIVNGAIFDEGHSEMVLVRDINVFSLCEHHMLPFMGKAHVAYIPNQKVVGLSKLARIVEMYSRRLQVQERLTRQIAEAVQTILEPQGVAVVIEATHMCMVMRGVQKPGSWTVTSAMVGVFEEEHKTREEFFNLIRHQVAIF

SEQ ID NO: 10480 - protein, 235 aa, Mastigocladus laminosus; identical to SEQ ID NO: 8093
  REGION 1..235: note = tr|A0A370CKD5|A0A370CKD5_MASLA GTP cyclohydrolase 1; OS = Mastigocladus laminosus WC112 OX=1521402 GN=folE PE=3; SV = 1

SEQ ID NO: 10481 - protein, 231 aa, Mastigocoleus testarum
  REGION 1..231: note = tr|A0A0V7ZET0|A0A0V7ZET0_9CYAN GTP cyclohydrolase 1; OS = Mastigocoleus testarum BC008 OX=371196 GN=folE PE=3 SV=1
MTIVRSNGSNGSNISQSPLIPDLADVIKSKKEQNIPKPESPEQMERMTDAVRTLLEGVGEDPEREGLLKTPQRVAKAMQFLTSGYKQSLEDIINGAIFDEGHDEMVLVRDINLFSLCEHHMLPFMGKAHVAYIPNQKVVGLSKLARIVEMYSRRLQVQERLTRQVAEAVQEILEPKGVAVVIEATHMCMVMRGVQKPGSWTVTSAMVGVFEQEQKTREEFFNLIRHQAAFF

SEQ ID NO: 10482 - protein, 216 aa, Mastigocoleus testarum
  REGION 1..216: note = tr|A0A0V7ZG19|A0A0V7ZG19_9CYAN GTP cyclohydrolase 1; OS = Mastigocoleus testarum BC008 OX=371196 GN=folE PE=3 SV=1
MTLSFRPELNSVEQVVSSLSTQNRPTVTDEEMMQAVRTLLLGLGEDPDREGLKDTPKRVMKALQFLTKGYHESLDELLNGAVFTEDANEMVLVRDIDIFSSCEHHILPILGRAHVAYIPNGKVIGLSKIARICEMYARRLQVQERLTLQIADALQGLLKPQGVAVVVEASHMCMVMRGVQKPGSWTVTSAMRGVFAEDAKTREEFMNLIRHKANFH

SEQ ID NO: 10483 - protein, 195 aa, unidentified
  source 1..195: note = Mediterranea sp.
  REGION 1..195: note = tr|A0A1Y4HH56|A0A1Y4HH56_9BACT GTP cyclohydrolase 1; OS = Mediterranea sp. An20 OX=1965586 GN=folE PE=3 SV=1
MLGKEVITSPYLDELKEHYHRILTLLGEDPSREGLLKTPERVAKAMLTLTGGYAMDPHEVLRSAKFKEDYNQMVIVKDIDFFSLCEHHMLPFYGKAHVAYIPNGYITGLSKIARVVDIFSHRLQVQERMTLQIKECIQETLNPLGVMVVVEAKHMCMQMRGVEKQNAITTTSDFSGGFNQAKTREEFMNLIKNGR

SEQ ID NO: 10484 - protein, 183 aa, unidentified
  source 1..183: note = Mediterraneibacter butyricigenes
  REGION 1..183: note = tr|A0A391PEI6|A0A391PEI6_9FIRM GTP cyclohydrolase 1; OS = Mediterraneibacter butyricigenes OX=2316025 GN=folE; PE = 3 SV=1
MDQEKIKQGVRLILEGVGEDLNREGLVETPDRVARMYEELLAGLTMDGSEHLQKTFSVENNEMVLEKDITFYSLCEHHLLPFYGKVHIAYVPDGKVAGLSKLARTVEIFARRLQLQEQMTGQIADALMDYLKPKGVMVMVEAEHMCMTMRGIKKPGSKTVTVVKRGIFQEEKERSELFFQMLR

SEQ ID NO: 10485 - protein, 184 aa, unidentified
  source 1..184: note = Mediterraneibacter sp.
  REGION 1..184: note = tr|A0A4Q8U5D8|A0A4Q8U5D8_9FIRM GTP cyclohydrolase 1; OS = Mediterraneibacter sp. gm002 OX=2527876 GN=folE PE=3; SV = 1
MIDHEKVKEGVRLLLEGIGEDVTREGLVETPDRIARMYEEIYGGIEEDASEHLKKRFHVDNDAMVLEKDITFYSTCEHHLLPFYGKAHIAYIPNGEVVGLSKLARTVEVFARRLQLQEQLTGQIADALEKELNPKGVMVMIEAEHMCMTMRGIKKPGSQTVTIVKRGIFENNKELEDTFFRMLR

SEQ ID NO: 10486 - protein, 262 aa, Megamonas funiformis
  REGION 1..262: note = tr|H3K6H8|H3K6H8_9FIRM GTP cyclohydrolase FolE2; OS = Megamonas funiformis YIT 11815 OX=742816 GN=folE2 PE=3; SV = 1
MQDVQNRVDKRGIAIQRVGISDVYLPLQIKQEQHSQPVMARLKFTVDLPMEYKGTHMSRFQEILTKWHTNPIGQAEIGNILDEAITKLSSNSAHLSMSFKYFIEKTAPVSGKKSLLDLDCKVSAVKTASKNSMPFTLAIKIPVTSLCPCSKEISAYGAHNQRSIISVKINYDGKKTAINIKDIVSLIEAQASCPLYPLLKREDEKYVTEKAYENPKFVEDILRDCVLALRTLDDIHYFSVECENFESIHNHNAYASHVEYLK

SEQ ID NO: 10487 - protein, 261 aa, Megamonas hypermegale
  REGION 1..261: note = tr|A0A239TM23|A0A239TM23_9FIRM GTP cyclohydrolase FolE2 OS=Megamonas hypermegale OX=158847 GN=folE2 PE=3 SV=1
MQDVQNRTDKRGIAIQRVGISDVYLPLQIKQDKHSQPVLAKIKFTVDLPMEYKGTHMSRFQEILTKWQTVPIGQGEIRNILNEAIEKLGSCSAHLSISFKYFIEKIAPVSGKKSLLDLDCKFSAAKTANGKMPFVMAIKVPVTSLCPCSKEISDYGAHNQRSIISVKINYDGNKTALEIQDIVSLIEAQASCPLYPLLKREDEKYVTEKAYENPKFVEDILRDCVLALRTLSGINYFSVECENFESIHNHNAYASHIEYLK

SEQ ID NO: 10488 - protein, 262 aa, Megamonas hypermegale; identical to SEQ ID NO: 10486
  REGION 1..262: note = tr|A0A378NR83|A0A378NR83_9FIRM GTP cyclohydrolase FolE2 OS=Megamonas hypermegale OX=158847 GN=folE2 PE=3 SV=1

SEQ ID NO: 10489 - protein, 262 aa, Megamonas rupellensis; identical to SEQ ID NO: 10486
  REGION 1..262: note = tr|A0A411ZTJ9|A0A411ZTJ9_9FIRM GTP cyclohydrolase FolE2 OS=Megamonas rupellensis OX=491921 GN=folE2 PE=3 SV=1

SEQ ID NO: 10490 - protein, 262 aa, Megamonas sp.; identical to SEQ ID NO: 10486
  REGION 1..262: note = tr|A0A1H8D7N5|A0A1H8D7N5_9FIRM GTP cyclohydrolase FolE2 OS=Megamonas sp. Calf98-2 OX=1855330 GN=folE2 PE=3; SV = 1

SEQ ID NO: 10491 - protein, 200 aa, Megasphaera cerevisiae
  REGION 1..200: note = tr|A0A0J6WRV4|A0A0J6WRV4_9FIRM GTP cyclohydrolase 1; OS = Megasphaera cerevisiae DSM 20462 OX=1122219 GN=folE; PE = 3 SV=1
MTDTLKSIEPVNQKAIDAMAQFLEALGLDLKKLNMEKTPYRVAAAFGQFFSGLQENPDGEWTDPIITHTDGLVAVRNIRFQSMCEHHLLPFFGTVHIAYYPKNGKISGFGHFVNVVDILSRRPQLQERITEEICQSIVHGIAPQGVLVIVKATHLCLTMRSRLAVDTNIVTAASNGCLCRGSEPYNQAWKMLMEETLYGK

SEQ ID NO: 10492 - protein, 191 aa, Megasphaera elsdenii
  REGION 1..191: note = tr|G0VPI6|G0VPI6_MEGEL GTP cyclohydrolase 1; OS = Megasphaera elsdenii DSM 20460 OX=1064535 GN=folE PE=3; SV = 1
MEENEKAVAAMRQFLEALGLDLQALGMEKTPHRVAQAFGEFFSGLRENPDDEWQAPIATQSDGLVVVRNIRFHSMCEHHLLPFFGSVHVAYYPKNGTIAGFGHFVRAVDILARRPQLQERMTDDLCQSICRGLDPEGVLIIVKATHLCLTMRDRMAIDSNIVTTASSGCLKEGTAAYDQAWKLLMEEKKDG

SEQ ID NO: 10493 - protein, 191 aa, Megasphaera elsdenii
  REGION 1..191: note = tr|R7MWR7|R7MWR7_9FIRM GTP cyclohydrolase 1; OS = Megasphaera elsdenii CAG:570 OX=1263087 GN=folE PE=3; SV = 1
MEENEKAVAAMRQFLEALGLDLQALGMEKTPHRVAQAFGEFFSGLRENPDDEWQAPIATQSDGLVVVRNIRFHSMCEHHLLPFFGSVHVAYYPKNGTIAGFGHFVRAVDILARRPQLQERMTDDLCQSICRGLDPEGVLIIVKATHLCLTMRDRMAIDSNIVTTASSGCLKEGTAAYDQAWKLLMEEEKDG

SEQ ID NO: 10494 - protein, 200 aa, unidentified
  source 1..200: note = Megasphaera genomosp.
  REGION 1..200: note = tr|A0A2J8BCB5|A0A2J8BCB5_9FIRM GTP cyclohydrolase 1; OS = Megasphaera genomosp. type_2 OX=699193 GN=CAL30_00105; PE = 3 SV=1
MIEIRQPQIQREKAVQAMQTFLETLGLDLKVLQMEKTPNRVTDAFINFFSGLWKNPDDEWAQPIQTEVDGLVAIRNIRFQSMCEHHLLPFFGTVHIAYYPHKGKVAGFGHFVSAVETLTKRPQLQERLTQELSLSLCRGLQPEGVLVVVEATHLCMTMMHGLAGDTNIITTATAGIIQSGSDMYHQAWNLLMEGTSDDGR

SEQ ID NO: 10495 - protein, 199 aa, unidentified
  source 1..199: note = Megasphaera genomosp.
  REGION 1..199: note = tr|D3LX40|D3LX40_9FIRM GTP cyclohydrolase 1; OS = Megasphaera genomosp. type_1 str. 28L OX=699218 GN=folE; PE = 3 SV=1
MAYELQTQEQQEQAVQSMRTFLQALGLDLQALGMEKTPQRVTAAFTQFFSGLREDPDKEWGHPIQTGTDGLVAVRNIRFHSLCEHHLLPFFGTVHIAYYPQHGKVAGFGHFIRAVTILAERPQLQERLTEEICRSVYRGLQPAGVLVIVKAKQLCMTMLQAAAGDTDIVTAATAGNIVNGNAAYEQAWKLLMEDTTNAL

SEQ ID NO: 10496 - protein, 195 aa, unidentified
  source 1..195: note = Megasphaera hexanoica
  REGION 1..195: note = tr|A0A344MN46|A0A344MN46_9FIRM GTP cyclohydrolase 1; OS = Megasphaera hexanoica OX=1675036 GN=folE PE=3 SV=1
MTEQTEVNEKAVQAAGDFLQALGLDLKQLGMEKTPYRVAMAFSHFFSGLKENPENCWGELIPTQSDGLVAVRNIRFYSMCEHHLLPFFGIVHIAYYPAEGKIAGFGHFAEVVDVLARRPQLQERFTYEICKAVQDGLGARGALVIVRGTHLCLSMRNHLGGDSDIITQAGLGCLADGTDAGHQAWKLLMEGDAQE

SEQ ID NO: 10497 - protein, 189 aa, unidentified
  source 1..189: note = Megasphaera hexanoica
  REGION 1..189: note = tr|A0A344MIY5|A0A344MIY5_9FIRM GTP cyclohydrolase 1; OS = Megasphaera hexanoica OX=1675036 GN=folE PE=3 SV=1
MIDTKAIEEHVRGILIALGENPDREGLVETPKRVAKMYQEVFDGMNYTNHELAQMLDKTFAEDTTSAGSNQVVVMKDIDLFSYCEHHMALMYDMKATVAYIPKGKVIGLSKIARICDMAGRRLQLQERLGRDIADILGEITGSTDIAVLLEGRHSCVSARGIKKTDAKTRTVELRGRFKEEPALQLYLR

SEQ ID NO: 10498 - protein, 198 aa, Megasphaera micronuciformis
  REGION 1..198: note = tr|E2ZC16|E2ZC16_9FIRM GTP cyclohydrolase 1; OS = Megasphaera micronuciformis F0359 OX=706434 GN=folE; PE = 3 SV=1
MKVVTEERQVDVQAATDGIRQFLNAWGIDLEKTGMADTPMRVVEAYGEFFSGLNRTDEDLWKNPIQTDTTGIVALRNLEYYSLCEHHLLPFFGTVSIAYLPKNGKIAGFGRFADAVAVYARRPQLQERMTEELCRSIEKGLDTAGVLVMVRGRHLCLSMRNPLAGKSEIMTVAARGALEAGSSLYERALKLLEEHGDE

SEQ ID NO: 10499 - protein, 189 aa, Megasphaera micronuciformis
  REGION 1..189: note = tr|E2ZCX6|E2ZCX6_9FIRM GTP cyclohydrolase 1; OS = Megasphaera micronuciformis F0359 OX=706434 GN=folE; PE = 3 SV=1
MIDKKAIEEHIRGILVALGEDPEREGLKETPKRVADMYEEVFASIGESNDDIAVRLAKTFEDEEQTEDKDRVVVMKDIDMFSFCEHHMALMYDMKATVAYIPKGRVIGLSKIARICDAVGKRLQLQERIGRDIADIMAKATGSDDVAVILTASHACVTTRGIKNRSTRTKTVELRGRFKTDATLQVYLQ

SEQ ID NO: 10500 - protein, 194 aa, Megasphaera paucivorans
  REGION 1..194: note = tr|A0A1G9PYC5|A0A1G9PYC5_9FIRM GTP cyclohydrolase 1; OS = Megasphaera paucivorans OX=349095 GN=folE PE=3 SV=1
MIEHKINPKAIAAMTAFLEALGVDLKKLGMEKTPYRVAEAYTAFFSGLQESPDTQWGELIKTSSNGLVAVRNLRFYSICEHHLLPFFGTVQIAYYPHNGQIAGFGHFADVVSVLTRRPQLQERLTSQICDSINAGVHAEGVLVIVQATHLCLTMRNSTALDSDIITAVSSGRLKEGTEQYMEAWKLLTRKDSDE

SEQ ID NO: 10501 - protein, 191 aa, Megasphaera sp.
  REGION 1..191: note = tr|S7HRA0|S7HRA0_9FIRM GTP cyclohydrolase 1; OS = Megasphaera sp. NM10 OX=1273103 GN=folE PE=3 SV=1
MEENERAVAAMRQFLEALGLDLQALGMEKTPHRVAQAFADFFSGLKENPDDEWQDPIATQTDGLVVVRNIRFHSMCEHHLLPFFGSVHVAYYPKKGTIAGFGHFVRAVDILARRPQLQERMTDELCQSIRRGLDPEGVLIVVQATHLCLTMRDRLAIDSNIVTTASSGCLKEGTAAYDQAWKLLMEEEKDG

SEQ ID NO: 10502 - protein, 187 aa, Megasphaera sp.
  REGION 1..187: note = tr|A0A3C1CNT8|A0A3C1CNT8_9FIRM GTP cyclohydrolase 1; OS = Megasphaera sp. OX=2023260 GN=DCP59_02885 PE=3 SV=1
METENRRKAEQAVRDLLSALNIQIKQGMEETPARVIRMLEEVWAGEQYTNQDLAKMYGKTFPCTNADMVIVKDIEAFSYCEHHLALIYNMKISVAYLPEGKVIGLSKIARIVDMCCKRLQLQERIGQDITDVLSRIVGPHVCVRIEANHSCMTARGIKKPGSKTVTVAKHGAFNDPDVFSEFLEMLR

SEQ ID NO: 10503 - protein, 185 aa, unidentified
  source 1..185: note = Megasphaera stantonii
  REGION 1..185: note = tr|A0A346AZY3|A0A346AZY3_9FIRM GTP cyclohydrolase 1; OS = Megasphaera stantonii OX=2144175 GN=DKB62_07545 PE=3; SV = 1
MDREKLKQAAALILEAVGQDGRDETKETPERFAKMMEERLAYAGVSNEEIAKEFDKVFPCDDGNMVVVKDIDVFSFCEHHIALMYDMKIAIGYIPKGCVIGLSKLARIADAVCRRLQLQERIGADIYDVLRRIVKTDDIIVCIQGEHSCMTARGIKKPGSQTRTLYAGGVFDDPLRRNEFFNLIR

SEQ ID NO: 10504 - protein, 210 aa, unidentified
  source 1..210: note = Megasphaera stantonii
  REGION 1..210: note = tr|A0A346AWZ1|A0A346AWZ1_9FIRM GTP cyclohydrolase 1; OS = Megasphaera stantonii OX=2144175 GN=folE PE=3 SV=1
MTTMTSSYPVNPEAVQAMKQFLEALGLDLTALGMEKTPYRVAEAFSQFFSGLRENPDDEWAAPILSQTNGLVAVRNIRFQSMCEHHLLPFFGTAHIAYYPQDGRIAGFGHFARAVGVLARRPQLQERLTEDLCQSLCRGLQPKGVLVVVKATHLCLMMREGMAADADIVTAATSGCLQAGTKEYDQAWKLLMGDAGAGTILMKEEESWTP

SEQ ID NO: 10505 - protein, 248 aa, unidentified
  source 1..248: note = Mehylophilales bacterium
  REGION 1..248: note = tr|A0A258LJ46|A0A258LJ46_9PROT GTP cyclohydrolase I (Fragment) OS=Mehylophilales bacterium 35-46-6 OX=1970535; GN = B7Y72_03340 PE=3 SV=1
HLAIDKVGIKSIRHPVVVKDKSGGEQHTVAVFNMYVHLPQHFKGTHMSRFVEILNKNERAISVESFESILREMVSRLEAESGHVEMTFPYFVNKAAPISGVKSLLDYEVTFIGEINQGKYDITVKVLVPVTSLCPCSKKISDYGAHNQRSHVTVTALINNFIWIEDIIDLVEKQASCELYGLLKRPDEKYVTERAYDNPKFVEDMVRDVAAQLNAEKRIDAYTVESENFESIHNHSAYALIEKDKRKH

SEQ ID NO: 10506 - protein, 343 aa, Meiothermus cateniformans
  REGION 1..343: note = tr|A0A399DZR1|A0A399DZR1_9DEIN GTP cyclohydrolase FolE2 OS=Meiothermus cateniformans OX=482825 GN=folE2 PE=3; SV = 1
MLSYENKQILDTPPLKIEKNGGKKAYLFRNTDGAEPVITRHYDHQFRPDAAYKASLPDMTETVDSIEGANVAIQQVGISGFRLPLKFATPAGEALTLEARVTGTVSLQANLKGINMSRIIRTFYAHKDEVFSLDTLARVVQDYRRDLESMSARVKVAFSYPMLVPALRSGLEGYQYYSGSYEAVLEENGTLRRFVELDFVYSSACPCSAELAEHARDVRGVYAIPHSQRSKARIKVEVAPDTSLHLEDLIHHARAALKTETQVMVKREDEQAFAELNGAYVKFVEDAARLLYEQLIADRRIHDFQVACSHLESLHSHDAVSVIAKGLPGGFRADFNDFSTLLC

SEQ ID NO: 10507 - protein, 206 aa, Meiothermus granaticius
  REGION 1..206: note = tr|A0A399F4I9|A0A399F4I9_9DEIN GTP cyclohydrolase 1; OS = Meiothermus granaticius NBRC 107808 OX=1227551 GN=folE; PE = 3 SV=1
MKRMIEVEDTGIVFPSGADIERMSELAQEWLGLIGEDPGREGLLKTPERMAKAWAFLTKGYHETLEEVTNGAVFEAEGSNMVVVKSIEYYSMCEHHLLPFFGTVHIGYIPDKKILGLSKFGRITDMFARRLQVQERLSIQIAQAIWEVLEPHGVGVVVEGQHLCMMMRGVEKQHSSTISSAMLGSFRDDPRTREEFLALVRQGKVL

SEQ ID NO: 10508 - protein, 343 aa, Meiothermus hypogaeus
  REGION 1..343: note = tr|A0A511R4D4|A0A511R4D4_9DEIN GTP cyclohydrolase FolE2 OS=Meiothermus hypogaeus NBRC 106114 OX=1227553; GN = folE2 PE=3 SV=1
MLSYDNKQILDLPLPKLDKNGGKKAYLFRNTDGAEPIISRYYDHHFQPDDAYKASLPDMTETVDSVEGANVAIQQVGISGFKLPLKFATPRGEALTLEARVTGTVSLQADLKGINMSRIIRTFYSRKEEVFSLDTLAQVVQDYRRDLDSLSARVKVAFSYPMLVSALRSGLEGYQYYSGSYEALVEENGTIRRFVELDFVYSSACPCSAELAEHARDNRGAYAIPHSQRSKARIKVEVAPDTSLHLEDLIQHAREALKTETQVMVKREDEQAFAELNGAYVKFVEDAARLVYEQLIADPRILDFQVACSHQESLHSHDAVSVIARGVPGGFRADFNDFSTLLC

SEQ ID NO: 10509 - protein, 342 aa, unidentified
  source 1..342: note = Meiothermus luteus
  REGION 1..342: note = tr|A0A399EZE9|A0A399EZE9_9DEIN GTP cyclohydrolase FolE2 OS=Meiothermus luteus OX=2026184 GN=folE2 PE=3 SV=1
MLRYDDKQTLEPLPPSGQNGGRKAYLFRNTDGAEPVIPRVYDAHFRPDEAYRASLPDMTETVDAVEGANVPIPQVGIAGFRLPLRFAVPSGEPLLLEARVTGTVSLEADLKGINMSRIIRTFYARKEAIFDLDTLAQVVRDYQRELGSLSARVRVAFSYPMLVPSLRSGLEGYQYYDGRYEAAVEGSGPVRRYVELDFVYSSACPCSAELAEHARDVRGAYAIPHSQRSVAHLRVEVAEGARLHLEDLVHHAREALKTEVQVMVKREDEQAFAELNGVYVKFVEDAVRLLYARLVADPRIHDFQVACAHLESLHAHDAVAVIAKGVPGGFRPDFTDFSSLVR

SEQ ID NO: 10510 - protein, 203 aa, unidentified
  source 1..203: note = Meiothermus roseus
  REGION 1..203: note = tr|A0A399EDR1|A0A399EDR1_9DEIN GTP cyclohydrolase 1; OS = Meiothermus roseus OX=1644118 GN=folE PE=3 SV=1
MGRMIEVEDTGLSFSSDVDIDRMSLLAREWLELIGEDPTREGLLRTPERMAKAWAFLTKGYRENLEEIVGGAIFEAEGSEMVVIKGIEYYSMCEHHLLPFFGKVHVGYIPRKKILGLSKFGRITDMFARRLQVQERLAVQIAQSIWDILEPVGVGVVVEGQHLCMMMRGVEKQHSSTTSSAMLGNFREDAKTRDEFLSLVRSW

SEQ ID NO: 10511 - protein, 343 aa, Meiothermus ruber
  REGION 1..343: note = tr|A0A0S7ATI8|A0A0S7ATI8_MEIRU GTP cyclohydrolase FolE2 OS=Meiothermus ruber H328 OX=1297799 GN=folE2 PE=3; SV = 1
MLSFDNKQILDTPPLKIEKNGGKKAYLFRNTDGAEPVIARHYDHQFRPDAAYKASLPDMTETVDSVEGANVAIQQVGISGFRLPLKFATPAGEALTLEARVTGTVSLQANLKGINMSRIIRTFYAHKDEVFSLDTLAQVVHDYRRDLESMSARVKVAFNYPLLVSALRSGLEGYQYYSGSYEAVLEENGTLRRFVELDFVYSSACPCSAELAEHARDVRGVYAIPHSQRSKARIKVEVAPDTSLHLEDLIHHARAALKTETQVMVKREDEQAFAELNGAYVKFVEDAARLLYEQLIADRRIHDFQVACSHLESLHSHDAVSVIAKGVPGGFRADFNDFSTLLC

SEQ ID NO: 10512 - protein, 343 aa, Meiothermus ruber; identical to SEQ ID NO: 10511
  REGION 1..343: note = tr|M9XAK0|M9XAK0_MEIRD GTP cyclohydrolase FolE2; OS = Meiothermus ruber (strain ATCC 35948 / DSM 1279 / VKM B-1258 / 21) OX=504728 GN=folE2 PE=3 SV=1

SEQ ID NO: 10513 - protein, 201 aa, Meiothermus silvanus
  REGION 1..201: note = tr|A0A4Q4KT63|A0A4Q4KT63_9DEIN GTP cyclohydrolase 1; OS = Meiothermus silvanus OX=52022 GN=folE PE=3 SV=1
MKRMIEVDDTGLVFPCETDVERLATLSREWLEVIGEDPEREGLRKTPERVAKAWAFLTRGYCQSLEEVVNGAVFQGEGSEMVVVKGIEFYSMCEHHLLPFFGKVHIGYIPNGKILGLSKFGRITDMFARRLQVQERLAAQIADAIVEVLEPQGVGVVIEGVHLCMMMRGVEKQHSSTTTSAVRGVFRDNAKTREEFLSLIR

SEQ ID NO: 10514 - protein, 201 aa, Meiothermus silvanus
  REGION 1..201: note = tr|D7BDF2|D7BDF2_MEISD GTP cyclohydrolase 1; OS = Meiothermus silvanus (strain ATCC 700542 / DSM 9946 / VI-R2) OX=526227 GN=folE PE=3 SV=1
MKRMIEVEDTGLVFPCETDVDRLASLGREWLEIIGENPEREGLRKTPERMAKAWAFLTRGYCQNLEEIINGAIFQGEGSEMVVVKGIEFYSMCEHHLLPFFGKVHIGYIPNGKILGLSKFGRITDMFARRLQVQERLAAQIADAIVEVLEPQGVGVVIEGVHLCMMMRGVEKQHSSTTTSAVRGVFRDDPRTREEFMSLIH

SEQ ID NO: 10515 - protein, 201 aa, Meiothermus sp.; identical to SEQ ID NO: 10513
  REGION 1..201: note = tr|A0A323U2D8|A0A323U2D8_9DEIN GTP cyclohydrolase 1; OS = Meiothermus sp. Pnk-1 OX=873128 GN=folE PE=3 SV=1

SEQ ID NO: 10516 - protein, 343 aa, Meiothermus sp.
  REGION 1..343: note = tr|A0A370JZZ3|A0A370JZZ3_9DEIN GTP cyclohydrolase FolE2 OS=Meiothermus sp. QL-1 OX=2058095 GN=folE2 PE=3 SV=1
MPLLRENEILEPLPLKPSKTPTRKAYLFRNTEGAEPTIVRRYDAHFRPDAAYRASLPDMTETVDAVEGANVPIPQVGIAGFRMPLKFLTLEGEALTLEARITGTVSLEADLKGINMSRILRTFYARKDEAFGLETLAQVVRDYQRELGSLTARVKVAFNYPMRLPSLRSGLEGYQYYSASYEAAVEGDGPVRRYIELDFVYSSACPCSAELAEHARDVRGAYAIPHSQRSVARIRVEVAAEAGLHLEHLVQHARQALKTEVQVVVKREDEQAFAELNGAYVKFVEDAVRLLYQTLAADPRIHDFLVACAHLESLHAHDAVAVIAKGIPGGFRPEFSEFASLVR

SEQ ID NO: 10517 - protein, 201 aa, unidentified
  source 1..201: note = Meiothermus terrae
  REGION 1..201: note = tr|A0A399EYB1|A0A399EYB1_9DEIN GTP cyclohydrolase 1; OS = Meiothermus terrae OX=1408545 GN=folE PE=3 SV=1
MGRMIEVEDTGLSFTSDIDIDRMSALALEWLELIGEDPRREGLIKTPDRMARAWAFLTKGYRESLEEIVGGAVFEAEGSEMVVIKGIEYYSMCEHHLLPFFGKVHIGYIPRKKILGLSKFGRITDMFARRLQVQERLSVQIAQAIWDLLEPVGVGVVVEGQHMCMMMRGVEKQHSSTTSSAMLGNFREDAKTRDEFLSLLR

SEQ ID NO: 10518 - protein, 308 aa, unidentified
  source 1..308: note = Melghiribacillus thermohalophilus
  REGION 1..308: note = tr|A0A4V2V0R4|A0A4V2V0R4_9BACI GTP cyclohydrolase FolE2 OS=Melghiribacillus thermohalophilus OX=1324956; GN = folE2 PE=3 SV=1
MDKVHQKGLPAKEERHRLFGSVPPGPRTKPVEKEKMADLQNTRNNFLFDLDTVGIVNVKHPVTVTSRMNPYTQTTVGTFTMSSSIPKDSKGTNMSRFTEQMQQYHEKGLTLELDTLKTFTKELAERLKQNDAEVKVSFPWFYERKGPQSGLAGMNHANAGMKVAYDQEKGYFCEVSLEATITTLCPCSKEISEYSAHNQRGKVTMTAVLSDDFDEREIDWKEQLLIAAETNASAKIHPVLKRPDEKTVTEQAYENPRFVEDMVRLVAADLYEMPFVEKFEVSCQNEESIHLHDAYASISFDKTKDTVN

SEQ ID NO: 10519 - protein, 189 aa, unidentified
  source 1..189: note = Melghirimyces algeriensis
  REGION 1..189: note = tr|A0A521B5R3|A0A521B5R3_9BACL GTP cyclohydrolase 1; OS = Melghirimyces algeriensis OX=910412 GN=folE PE=3 SV=1
MSVNHEQIQEAVRMILQAVGEDPDREGLKDTPARVARMYEEVFSGMYEDPEEYFSTMFSEDHEELVLVKDIPFFSMCEHHLVPFFGKAHVGYIPKSGRVTGLSKLARAVEAVSRRPQLQERITYTVADSIEKTLEPHGVIVVVEAEHMCMTMRGVKKPGSKTVTSAVRGVFENDPAARAEAFSLIGIGR

SEQ ID NO: 10520 - protein, 190 aa, unidentified
  source 1..190: note = Melghirimyces profundicolus
  REGION 1..190: note = tr|A0A2T6BUZ1|A0A2T6BUZ1_9BACL GTP cyclohydrolase 1; OS = Melghirimyces profundicolus OX=1242148 GN=folE PE=3 SV=1
MEVNHEKIQKAVRMILEAVGEDPDREGLRDTPARVARMYEEVFSGMNEKPEEYFSTLFSEDHEEMVLVKDIPFFSMCEHHLVPFYGKAHVGYIPKRGRVTGLSKLARAVDAIARRPQLQERITYTVADSIEKTLQPHGVIVVVEAEHMCMTMRGVKKPGSQTVTSAVRGVFAKDPAARAEAFSLIGTGKK

SEQ ID NO: 10521 - protein, 189 aa, unidentified
  source 1..189: note = Melghirimyces thermohalophilus
  REGION 1..189: note = tr|A0A1G6LRJ9|A0A1G6LRJ9_9BACL GTP cyclohydrolase 1; OS = Melghirimyces thermohalophilus OX=1236220 GN=folE PE=3; SV = 1
MEVNHEKIEQAVRMILEAVGEDPDREGLKETPSRVARMYEEVFSGMREDPEQYFSTVFSEDHEELVLVKDIPFYSLCEHHLVPFYGKAHVGYIPKSGRVTGLSKLARAVEAVARRPQLQERITYTVADSIEKTLQPHGVIVVVEAEHMCMTMRGVKKPGSQTVTSAVRGTFAADPAARAEAFSLIGIGK

SEQ ID NO: 10522 - protein, 188 aa, unidentified
  source 1..188: note = Melioribacter roseus
  REGION 1..188: note = tr|I6YXA0|I6YXA0_MELRP GTP cyclohydrolase 1; OS = Melioribacter roseus (strain JCM 17771 / P3M-2); OX = 1191523 GN=folE PE=3 SV=1
MDRKAVENAVLTILNEIGEDPSREGLKRTPHRVAKAYEYLTQGYNKKIEDILNGAIFEEKYDEMVIVKDIDFYSMCEHHMLPFYGKVHIAYIPNGKIVGLSKLPRIVDAYARRLQVQERMTQQIADTIEEYLSPAGVAVVIEAYHMCMMMRGVEKQNSITTTSAMHGVFSEDTRTRSEFLNLIAQKRI

SEQ ID NO: 10523 - protein, 187 aa, unidentified; identical to SEQ ID NO: 9215
  source 1..187: note = Melioribacter sp.
  REGION 1..187: note = tr|A0A1G1BBT8|A0A1G1BBT8_9BACT GTP cyclohydrolase 1; OS = Melioribacter sp. GWF2_38_21 OX=1801612 GN=folE PE=3; SV = 1

SEQ ID NO: 10524 - protein, 187 aa, Melissococcus sp.
  REGION 1..187: note = tr|A0A374J9U9|A0A374J9U9_9ENTE GTP cyclohydrolase 1; OS = Melissococcus sp. OM08-11BH OX=2293110 GN=folE PE=3 SV=1
MEQDKQWQIEEAVKTILTAIGEDVDRDGLKETPKRVAKMYAEVFSSVREKEFTNYKVFPSLNEDDMVLVKDIEFYSMCEHHLLPFFGKAHVAYIPSDHKVLGLSKVARMVEFCAKRPNVQEDLTIQIANLINEKVRTKGVAVSIEAEHMCMAMRGVKARGSVTKTFHYQGVFKEDKDVKDDFLRALD

SEQ ID NO: 10525 - protein, 208 aa, Melittangium boletus
  REGION 1..208: note = tr|A0A250ID19|A0A250ID19_9DELT GTP cyclohydrolase 1; OS = Melittangium boletus DSM 14713 OX=1294270 GN=folE PE=3; SV = 1
MSSLRLQPVSSETTTDDAAEPVSADDLRFEKNIEEILGLVGEDTSREGLLETPRRVRKAWREWTEGYAMEPNRVLKSFVDGASDRDEMVLVRDIPVYSHCEHHLAPFFGVAHVCYIPTGRIVGLSKLPRLVDIFSRRLQVQERLTQQIAQALDDCLSPQGVGVIVQCRHLCMESRGIRSRKAETTTAAYRGLLKTDLSMRAEFMERTR

SEQ ID NO: 10526 - protein, 231 aa, Meridianimaribacter sp.
  REGION 1..231: note = tr|A0A4Q9RM89|A0A4Q9RM89_9FLAO GTP cyclohydrolase 1; OS = Meridianimaribacter sp. CL38 OX=2213021 GN=folE PE=3; SV = 1
MNKEKLVTPTNGHKLNGFSIEDIGDDHLFTSLETPMKKDAFKISDEEKKERISILFEEIMDVLGLDLTDDSLKGTPKRVAKMYVEEIFSGLNPANKPKIALFDNKYQYNQMLVEKDITFYSNCEHHFVPIIGKAHVAYISSGKVIGLSKLNRIVQYYAKRPQVQERLTNQIGEDLKQILNTEDVAVIIDAKHLCVSSRGIKDDTSATVTTYYGGQFNTAEKITELHNYINN

SEQ ID NO: 10527 - protein, 198 aa, Meridianimaribacter sp.
  REGION 1..198: note = tr|A0A4Q9RSI4|A0A4Q9RSI4_9FLAO GTP cyclohydrolase 1; OS = Meridianimaribacter sp. CL38 OX=2213021 GN=folE PE=3; SV = 1
MPYNKFEEYNINITDDTKNRFKDIIKDIGEDVEREGLLKTPERASKAMKFLTQGYHQDAAEILKSAMFKESYNEMVIVKDIELYSLCEHHMLPFFGKAHIAYIPNGQIVGLSKIPRIVDVFARRLQVQERLTEQILDCINDTLKPQGVAVVIEASHMCMMMRGVQKQNSVTTTSGFRGQFEKIETRNEFLKLISEKLS

SEQ ID NO: 10528 - protein, 236 aa, Merismopedia glauca
  REGION 1..236: note = tr|A0A2T1BWU0|A0A2T1BWU0_9CYAN GTP cyclohydrolase 1; OS = Merismopedia glauca CCAP 1448/3 OX=1296344 GN=folE PE=3; SV = 1
MTFSSSNSSDLSEQITNNQNSSHGTNARPDRNTINGRTAEVHPPQTSLDSEMTDAVTTILLGVGEDPEREGLLKTPKRVVEAMKFLTSGYNQSLDEIINGAIFDEGHNEMVLVRDINFFSLCEHHMLPFMGKAHVAYIPNQKVVGLSKLARIVEMYSRRLQVQERLTRQVAEALQSALEPRGVAVVMEASHMCMVMRGVQKPGSWTVTSAMMGVFQDEQKTREEFLNLIRHQPSFF

SEQ ID NO: 10529 - protein, 212 aa, Merismopedia glauca
  REGION 1..212: note = tr|A0A2T1C366|A0A2T1C366_9CYAN GTP cyclohydrolase 1; OS = Merismopedia glauca CCAP 1448/3 OX=1296344 GN=folE PE=3; SV = 1
MSLSILPDDIFNHSLATETQSPVSDREMEQAVQTLLLGLGEDPYREGLRDTPKRVVKALKFLTSGYQESLDELLNGAVFHEDANEMVLVRDIDLFSSCEHHILPILGRAHVAYIPNGKVIGLSKIARICEMYARRLQVQERLTAQIADAIQGLLKPQGVAVVVEATHMCMVMRGVQKPGSWTVTSSMQGVFADDARTRQEFMDLIRHSPSFH

SEQ ID NO: 10530 - protein, 261 aa, unidentified
  source 1..261: note = Mesoaciditoga sp.
  REGION 1..261: note = tr|A0A2N7PSM6|A0A2N7PSM6_9BACT GTP cyclohydrolase FolE2 OS=Mesoaciditoga sp. OX=2060323 GN=folE2 PE=3 SV=1
MELPDVQSEKDARNIYIDKVGVSDIIYPIVVLDKTNSYQNTVGKINMYVDLPKDFRGTHMSRFVEVLNAHMGKMTIQNMEKILDDMKSKLNAEVSHLEVEFDYFVMRQAPVSKISSYTPYRAKFISKKDKTFDFILEVIVPVHTLCPCSKEISDRGAHNQRAKADISVRMNKIVWIEDLIDVAENSASAPLFTLLKREDEKYVTESAYDNPKFVEDIVRDISLKLEKDERITWYNIRVTSYESIHPHNAYACHDQWKEFVK

SEQ ID NO: 10531 - protein, 221 aa, unidentified
  source 1..221: note = Mesocricetibacter intestinalis
  REGION 1..221: note = tr|A0A4R6VKB1|A0A4R6VKB1_9PAST GTP cyclohydrolase 1; OS = Mesocricetibacter intestinalis OX=1521930 GN=folE PE=3; SV = 1
MYIMEKISPEAEKVREALVAKGIETPMLPSAQNKDQRRAAIEAHMREVMKLIGLDLSDDSLEETPNRLAKMFVDEIFSGLDYANFPKITNIENRMKVSEMVLVNDVTLTSTCEHHFVTIDGVVSVAYYPKKWVIGLSKINRVVAFFAQRPQVQERLTEQILLAFQTILETEDVAVYMKATHFCVKCRGIKDSNSYTVTSAFGGVFLNDRETRKEFLSLLGK

SEQ ID NO: 10532 - protein, 229 aa, unidentified
  source 1..229: note = Mesoflavibacter aestuarii
  REGION 1..229: note = tr|A0A2T1N902|A0A2T1N902_9FLAO GTP cyclohydrolase 1; OS = Mesoflavibacter aestuarii OX=1266046 GN=folE PE=3 SV=1
MKNNQTLVNDHNLKDFNIDDIGDDHLYTGLETPLKANAFKISDEEKKQKIAILFEEIMDVMGLDLTDDSLKGTPQRVAKMYIDEIFSGLNPKNKPKIALFDNKYKYNQMLVEKNITFYSNCEHHFVPIIGKAHIAYISSGKVIGLSKLNRIVQYYAKRPQVQERLTNQIAEDLKAILQTEDVAVIIDAKHLCVSSRGVKDDTSSTVTAYYSGAFKQTSKIVELQNYLND

SEQ ID NO: 10533 - protein, 220 aa, unidentified
  source 1..220: note = Mesoflavibacter aestuarii
  REGION 1..220: note = tr|A0A2T1NG78|A0A2T1NG78_9FLAO GTP cyclohydrolase 1; OS = Mesoflavibacter aestuarii OX=1266046 GN=folE PE=3 SV=1
MSLDNDDYGDSHVGSASDTPLRADAFEISDSEKIESIKKDVTNILNTLGLDLTDDSLKGTPNRVAKMFVNEIFGGLNPKKKPSASVFENKYKYGEMLVEKNITVYSTCEHHLLPIVGRAHVAYISNGTVVGLSKMNRIVDFYAKRPQVQERLNIQIVKELQKVLGTEDVACVIDAKHLCVNSRGIRDIESSTVTSEFGGKFKDKETKREFLDYIKLDTTF

SEQ ID NO: 10534 - protein, 228 aa, unidentified
  source 1..228: note = Mesoflavibacter sabulilitoris
  REGION 1..228: note = tr|A0A2T1NMF0|A0A2T1NMF0_9FLAO GTP cyclohydrolase 1; OS = Mesoflavibacter sabulilitoris OX=1520893 GN=folE PE=3; SV = 1
MKIDNSVENIDNNDPIGENHIGTSHDTPLRPDAFAISDKEKIESIKKDVTNIMNTLGLDLTDDSLKGTPNRVAKMFVNEIFGGLNPDKKPNASTFDNKYQYGEMLVEKNITVYSTCEHHLLPIVGRAHVAYISNGSVVGLSKMNRIVDYYSKRPQVQERLTIQIVKELQDVLGTEDVACVIDAKHLCVNSRGIRDIESSTVTSEFGGAFKNKETKREFLDYIKLETKF

SEQ ID NO: 10535 - protein, 231 aa, unidentified
  source 1..231: note = Mesoflavibacter sabulilitoris
  REGION 1..231: note = tr|A0A2T1NHH2|A0A2T1NHH2_9FLAO GTP cyclohydrolase 1; OS = Mesoflavibacter sabulilitoris OX=1520893 GN=folE PE=3; SV = 1
MNKEKLVTPTNGHKLNGFSIEDIGDDHLFTSLETPMKKDAFKISDEEKKERISILFEEIMDVLGLDLTDDSLKGTPKRVAKMYVEEIFSGLNPANKPKIALFDNKYQYNQMLVEKDITFYSNCEHHFVPIIGKAHVAYISSGKVIGLSKLNRIVQYYAKRPQVQERLTNQIGEDLKQILNTEDVAVIIDAKHLCVSSRGVKDDTSATVTTFYSGQFTNPQKISELQNYLKQ

SEQ ID NO: 10536 - protein, 198 aa, Mesoflavibacter sp.
  REGION 1..198: note = tr|A0A2T1NJB4|A0A2T1NJB4_9FLAO GTP cyclohydrolase 1; OS = Mesoflavibacter sp. HG96 OX=2109944 GN=folE PE=3 SV=1
MPYKKFEEYNMQVTDDVKERYKSIIEELGENTERDGLLKTPERAAKAMQFLTQGYQQDAAEILKGAMFKEDYNDMVIVKDIELYSLCEHHILPFFGKAHIAYIPNGHIVGLSKLPRIVDVFARRLQVQERLTHQILDCINDTLKPEGVAVVIEASHMCMMMRGVQKQNSVTTTSGFRGAFQNIETRTEFLNLINANLS

SEQ ID NO: 10537 - protein, 231 aa, Mesoflavibacter sp.
  REGION 1..231: note = tr|A0A2T1NJZ2|A0A2T1NJZ2_9FLAO GTP cyclohydrolase 1; OS = Mesoflavibacter sp. HG96 OX=2109944 GN=folE PE=3 SV=1
MKKEKLKMTTNGHNLNGFTVEDIGDDHLFTSLETPMKKDAFKISDEEKKERISILFEEIMDVLGLDLTDDSLQGTPKRVAKMYVDEIFSGLNPANKPKIALFDNKYQYNQMLVEKDITFYSNCEHHFVPIIGKAHVAYISSGKVIGLSKLNRIVQYYAKRPQVQERLTNQIGEDLKQILNTEDVAVIIDAKHLCVSSRGVKDDTSATVTTFYSGQFNNPQKITELQNYLKQ

SEQ ID NO: 10538 - protein, 225 aa, Mesonia algae
  REGION 1..225: note = tr|A0A2W7HX95|A0A2W7HX95_9FLAO GTP cyclohydrolase 1; OS = Mesonia algae OX=213248 GN=folE PE=3 SV=1
MKIDNILDNIEEFGDNHIASSTENPIRKDAFDISDEEKIGLIEKDVNRILETLGMDLTDDSLKGTPKRVAKMFVQEIFGGLNPKRKPKASVFENKYKYGEMLVEKNITVYSTCEHHLLPIVGRAHVAYISNGTVVGLSKMNRIVDFFAKRPQVQERMTMQIVNELQEVLGTKDVACVIDAKHLCVNSRGIRDIESSTVTSEFGGKFKEPATKREFLDYINMDTDF

SEQ ID NO: 10539 - protein, 220 aa, Mesonia phycicola
  REGION 1..220: note = tr|A0A1M6C4S7|A0A1M6C4S7_9FLAO GTP cyclohydrolase 1; OS = Mesonia phycicola OX=579105 GN=folE PE=3 SV=1
MDKKQIESIGDNHISFNTKTPLLKTAFDKSDDEKVKNIEFHFSKIMTELGLDLSDDSLSGTPYRFAKMYVKELFYGLNPKNKPKLSVFENKYGYRKMLVEQNITIDSSCEHHFLPITGYAHIAYIPKNKVIGLSKINRLVDYYAHRPQVQERLSMQILLDLQDILETEDVIVMICAKHLCVSSRGIKDKNSSTTTIEYGGVFEKEDIRNNFFKIIDNANL

SEQ ID NO: 10540 - protein, 225 aa, Mesonia phycicola
  REGION 1..225: note = tr|A0A1M6G6L4|A0A1M6G6L4_9FLAO GTP cyclohydrolase 1; OS = Mesonia phycicola OX=579105 GN=folE PE=3 SV=1
MKIDKILNDIDEMGDNHIASSTENPVREDAFEMSDLEKIASIQKDFKSILETLGMDLTDDSLKGTPLRVAKMFVNETFGGLNPDKKPKASVFDNKYKYGEMLVEKNITVYSTCEHHFLPIVGRAHVAYISNGTVVGLSKMNRIVDYYAKRPQVQERLTMQIVKELQEVLGTEDVACVIDAKHLCVNSRGIRDIESSTVTSEFGGKFKEKSVKRELLDYIKLETQF

SEQ ID NO: 10541 - protein, 225 aa, Mesonia sp.
  REGION 1..225: note = tr|A0A5C8LI31|A0A5C8LI31_9FLAO GTP cyclohydrolase 1; OS = Mesonia sp. HuA40 OX=2602761 GN=folE PE=3 SV=1
MKIDNISENIDEIGDNHVSSSAKNPLRKDAFEKTDEEKIALIQQDVQNILTTLGLDLEDDSLKGTPLRVAKMFVNESFAGLHPKRKPKASVFQNNYKYGEMLVEKNITVYSTCEHHLLPIVGRAHVAYISNGTVVGLSKMNRIVDYYAKRPQVQERLTMQIVAELQNALGTEDVACVIDAKHLCVNSRGIRDIESSTVTSEFGGKFKDKSIKREFLDYINMDTEF

SEQ ID NO: 10542 - protein, 225 aa, Mesonia sp.
  REGION 1..225: note = tr|A0A2W1JVU7|A0A2W1JVU7_9FLAO GTP cyclohydrolase 1; OS = Mesonia sp. K7 OX=2218606 GN=folE PE=3 SV=1
MKIDKLFEEIEEQGDNHISSSTENPIRKDAFEKSDEEKIDLIEQDVKNMLETLGMDLTDDSLKGTPKRVAKMFVKELFDGLHPDKKPKASTFENKYKYGEMLVEKNITVYSTCEHHLLPIVGRAHVAYISNGTVVGLSKMNRIVDYYAKRPQVQERMTMQIVRELQEVLGTQDVACVIDAKHLCVNSRGIRDIESSTVTSEFGGKFKEAATKREFLDYINMDTEF

SEQ ID NO: 10543 - protein, 211 aa, Mesorhizobium albiziae
  REGION 1..211: note = tr|A0A1I4E8V1|A0A1I4E8V1_9RHIZ GTP cyclohydrolase 1; OS = Mesorhizobium albiziae OX=335020 GN=folE PE=3 SV=1
MDAVIKNFPRAEDGQALDIKRPTQAEVEAAVRTLLLWTGDNPDREGLKDTPRRVAKAYRELFGGYGQDPATELGRTFEEVAGYDDMVLVKDIKFHSHCEHHMVPIIGRAHVGYLPDGRVVGLSKIARVVDIFAHRLQTQEAMTAQIAGVIQDVLNPRGVAVMIEAEHMCMAMRGIRKQGSTTLTSTFTGSFKDNPEEQIRFVTMVRDGNRG

SEQ ID NO: 10544 - protein, 197 aa, Mesorhizobium albiziae
  REGION 1..197: note = tr|A0A5D4GSR6|A0A5D4GSR6_9RHIZ GTP cyclohydrolase 1; OS = Mesorhizobium albiziae OX=335020 GN=folE PE=3 SV=1
MEKPVTDRPSQAEVEAAVRTLLRWTGDSPDREGLVDTPKRVAKAYREMFSGYDQCPADELGRTFEEVEGYDDMVLVRDITFHSHCEHHMVPIIGKAHVAYLPDGKVVGLSKIARTVDIFAHRLQTQEAMTAQIAGVIQDVLNPRGVAVMLEAEHMCMAMRGIRKQGSTTLTTTFTGTFKDHPEEQARFMMMVRGFPA

SEQ ID NO: 10545 - protein, 212 aa, Mesorhizobium alhagi
  REGION 1..212: note = tr|H0HWG1|H0HWG1_9RHIZ GTP cyclohydrolase 1; OS = Mesorhizobium alhagi CCNWXJ12-2 OX=1107882 GN=folE PE=3; SV = 1
MDAVIKKIMPRSEYMEKPVTHRPSQAEAEAAVLTLLRWTGDDPDREGLKDTPKRVAKAFLEMFNGYDMCPAEELGRTFEEVAGYDDMVIVKDIHFHSHCEHHMVPIIGRAHVGYLPDRKVVGLSKIARVVDIFAHRLQTQEAMTAQIAAVIQEVLNPRGVAVMIDAEHMCMAMRGIRKQGSTTLTSTFTGAFKDSPEEQVRFITMVRNGLSA

SEQ ID NO: 10546 - protein, 211 aa, Mesorhizobium amorphae
  REGION 1..211: note = tr|G6Y857|G6Y857_9RHIZ GTP cyclohydrolase 1; OS = Mesorhizobium amorphae CCNWGS0123 OX=1082933 GN=folE; PE = 3 SV=1
MDAVIKKLMPSSTYMEKPVTDRPSEAEVEAAVRTLLRWTGDNPEREGLIDTPKRVTKAFLEMFNGYDMCPAEELGRTFEEVAGYDDLVIVRDINFHSHCEHHMVPIIGKAHVGYLPDGKVVGLSKIARVVDIFAHRLQTQEAMTAQIASVIQDVLNPRGVAVMIEAEHMCMAMRGIRKQGSTTLTSTFTGVFKDTPEEQVRFVTMVRGGGV

SEQ ID NO: 10547 - protein, 211 aa, Mesorhizobium amorphae
  REGION 1..211: note = tr|A0A2W4Z6U9|A0A2W4Z6U9_9RHIZ GTP cyclohydrolase 1; OS = Mesorhizobium amorphae OX=71433 GN=folE PE=3 SV=1
MDLAIKPKLSAVDTNDASPKRPSQAEAEAAVRTLILWAGENPDREGLRDTPTRVAKAYREMFNGYVQDPVAELARTFEEVAGYDDMVIVRDIGFHSHCEHHMVPIVGRAHVGYLPAGRVVGLSKIARVVDIFAHRLQTQESMTAQIASVMQDVLKPRGVAVMIEAEHMCMAMRGIRKTGSTTLTSTFTGAFRDSPQEQLRFVGMVRDGAKP

SEQ ID NO: 10548 - protein, 212 aa, Mesorhizobium australicum
  REGION 1..212: note = tr|A0A1X7P4S8|A0A1X7P4S8_9RHIZ GTP cyclohydrolase 1; OS = Mesorhizobium australicum OX=536018 GN=folE PE=3 SV=1
MDAAIKKFLPDAGNDSRPSDRPTEAEVEAAVRVLLRWTGDNPDREGLVDTPRRVMKAYREMFNGYDLSPAEELGRTFEEVAGYDDLVIVRDIQFHSHCEHHMVPIVGRAHVGYLPDGKVVGLSKIARVVDIFAHRLQTQEAMTAQVAGVIQDVLNPRGVAVIIEAEHMCMAMRGIRKQGSTTMTSTFTGSFKDSPEEQVRFVTMVRGTAGAR

SEQ ID NO: 10549 - protein, 211 aa, Mesorhizobium australicum
  REGION 1..211: note = tr|L0KL54|L0KL54_MESAW GTP cyclohydrolase 1; OS = Mesorhizobium australicum (strain HAMBI 3006 / LMG 24608 / WSM2073) OX=754035 GN=folE PE=3 SV=1
MDAVIKKLMPQSAYMEKPVTDRPSEAEVEAAVRTLLRWTGDNPDREGLIDTPKRVTKAYREMFGGYDMCPAEELGRTFEEVAGYDDLVIVKDIQFHSHCEHHMVPIIGKAHVGYLPDGKVVGLSKIARVVDIFAHRLQTQEALTAQIAGVIQDVLNPRGVAVMIEAEHMCMAMRGIRKQGSTTLTSTFTGVFKDTPEEQVRFVTMVRGGRA

SEQ ID NO: 10550 - protein, 211 aa, Mesorhizobium ciceri
  REGION 1..211: note = tr|A0A143N8V3|A0A143N8V3_9RHIZ GTP cyclohydrolase 1; OS = Mesorhizobium ciceri OX=39645 GN=folE PE=3 SV=1
MDAVIKKLMPQSAYMEKPVTDRPSEAEVEAAVRTLLRWTGDNPDREGLVDTPKRVAKAFREMFGGYDMCPADELGRTFEEVAGYDDLVIVKDITFHSHCEHHMVPIIGKAHVGYLPDGKVVGLSKIARVVDIFAHRLQTQEALTAQIAGVIQDVLNPRGVAVMIEAEHMCMAMRGIRKQGSTTLTSTFTGVFKDTPEEQVRFVTMVRGGGV

SEQ ID NO: 10551 - protein, 211 aa, Mesorhizobium ciceri; identical to SEQ ID NO: 10550
  REGION 1..211: note = tr|E8TD71|E8TD71_MESCW GTP cyclohydrolase 1; OS = Mesorhizobium ciceri biovar biserrulae (strain HAMBI 2942 / LMG 23838 / WSM1271) OX=765698 GN=folE PE=3 SV=1

SEQ ID NO: 10552 - protein, 211 aa, unidentified
  source 1..211: note = Mesorhizobium delmotii
  REGION 1..211: note = tr|A0A2P9ASK2|A0A2P9ASK2_9RHIZ GTP cyclohydrolase 1; OS = Mesorhizobium delmotii OX=1631247 GN=folE PE=3 SV=1
MDAVIKKFMPPSAYMEKPVTDRPTEAEAEAAVRTLLRWTGDNPDREGLVDTPKRVVKAYREMFGGYDKCPAEELGRTFEEVAGYDDLVLVKDITFHSHCEHHMVPIIGKAHVGYLPDGKVVGLSKIARVVDIFAQRLQTQEAMTAQIAGVIQDVLNPRGVAVMLEAEHMCMAMRGIRKEGSTTLTSTFTGVFKDTPEEQVRFVTMVRGGRG

SEQ ID NO: 10553 - protein, 212 aa, unidentified
  source 1..212: note = Mesorhizobium ephedrae
  REGION 1..212: note = tr|A0A2P7SSX1|A0A2P7SSX1_9RHIZ GTP cyclohydrolase 1; OS = Mesorhizobium ephedrae OX=2116701 GN=folE PE=3 SV=1
MDAVVKKIMPRSDYMDKPATNRPSQAEVEAAVLTLLRWTGDDPEREGLRDTPKRVAKAFLEMFNGYDMCPAEELGRTFEEVAGYDDLVIVRDIKFHSHCEHHMVPIIGRAHVGYLPDGKVVGLSKIARVVDIFAHRLQTQEALTAQIAGVIQEVLNPRGVAVMVEAEHMCMAMRGIRKQGSSTLTSTFTGVFKDNPEEQIRFLTMVRAGQGG

SEQ ID NO: 10554 - protein, 211 aa, unidentified
  source 1..211: note = Mesorhizobium erdmanii
  REGION 1..211: note = tr|A0A4Q1UV83|A0A4Q1UV83_9RHIZ GTP cyclohydrolase 1; OS = Mesorhizobium erdmanii OX=1777866 GN=folE PE=3 SV=1
MDAVIKKLMPQSAYMEKPVTDRPSEAEVEAAVRTLLRWTGDNPDREGLIDTPKRVAKAFREMFGGYDMCPAEELGRTFEEVAGYDDLVIVKDIHFHSHCEHHMVPIIGKAHVGYLPDGKVVGLSKIARVVDIFAHRLQTQEALTAQIAGVIQDVLNPRGVAVMIEAEHMCMAMRGIRKQGSTTLTSTFTGVFKDTPEEQVRFVTMVRGGGA

SEQ ID NO: 10555 - protein, 210 aa, unidentified
  source 1..210: note = Mesorhizobium hawassense
  REGION 1..210: note = tr|A0A330HDC0|A0A330HDC0_9RHIZ GTP cyclohydrolase 1; OS = Mesorhizobium hawassense OX=1209954 GN=folE PE=3 SV=1
MDAVIKKIMPPSEYMEKPVTDRPTEAEVEAAVRTLLRWTGDNPEREGLIDTPKRVTKAFREMFNGYDMCPADELGRTFEEVAGYDDLVIVRNIKFHSHCEHHMVPIIGKAHVGYLPDGKVVGLSKIARVVDIFAHRLQTQEAMTAQIAGVIQDVLNPRGVAVMLEAEHMCMAMRGIRKQDSTTLTSTFTGVFKDTPEEQVRFVTMVRAGG

SEQ ID NO: 10556 - protein, 210 aa, unidentified
  source 1..210: note = Mesorhizobium helmanticense
  REGION 1..210: note = tr|A0A2T4J0U7|A0A2T4J0U7_9RHIZ GTP cyclohydrolase 1; OS = Mesorhizobium helmanticense OX=1776423 GN=folE PE=3 SV=1
MDAVIKKLMPQSAYMEKPVTDRPSEAEVEAAVHTLLRWTGDNPDREGLIDTPKRVTKAFREMFNGYDMCPADELGRTFEEVAGYDDLVIVKDITFHSHCEHHMVPIIGKAHVGYLPDGKVVGLSKIARVVDIFAHRLQTQEAMTAQIAGVIQDVLNPRGVAVMLEAEHMCMAMRGIRKQGSTTLTSTFTGIFKDTPEEQVRFVTMVRGGA

SEQ ID NO: 10557 - protein, 211 aa, Mesorhizobium huakuii
  REGION 1..211: note = tr|A0A068D7V5|A0A068D7V5_9RHIZ GTP cyclohydrolase 1; OS = Mesorhizobium huakuii 7653R OX=763057 GN=folE PE=3 SV=1
MDAVIKKLMPQAAYMEKPVTDRPSEAEVEAAVRTLLRWTGDNPDREGLIDTPKRVAKAYREMFGGYDMCPAEELGRTFEEVAGYDDLVIVKDIQFHSHCEHHMVPIIGKAHVGYLPDGKVVGLSKIARVVDIFAHRLQTQEALTAQIAGVIQDVLNPRGVAVMIEAEHMCMAMRGIRKQGSTTLTSTFTGVFKDTPEEQVRFVTMVRGGGA

SEQ ID NO: 10558 - protein, 197 aa, unidentified
  source 1..197: note = Mesorhizobium japonicum
  REGION 1..197: note = sp|Q98LQ6|GCH1_RHILO GTP cyclohydrolase 1; OS = Mesorhizobium japonicum (strain LMG 29417 / CECT 9101 / MAFF 303099) OX=266835 GN=folE PE=3 SV=1
MEKPVTDRPSEAEVEAAVRTLLRWTGDNPDREGLIDTPKRVAKAFREMFGGYDMCPAEELGRTFEEVAGYDDLVIVKDIHFHSHCEHHMVPIIGKAHVGYLPDGKVVGLSKIARVVDIFAHRLQTQEALTAQIAGVIQDVLNPRGVAVMIEAEHMCMAMRGIRKQGSTTLTSTFTGVFKDTPEEQVRFVTMVRGGGA

SEQ ID NO: 10559 - protein, 211 aa, unidentified; identical to SEQ ID NO: 10554
  source 1..211: note = Mesorhizobium japonicum
  REGION 1..211: note = tr|A0A3M9X5L2|A0A3M9X5L2_9RHIZ GTP cyclohydrolase 1; OS = Mesorhizobium japonicum OX=2066070 GN=folE PE=3 SV=1

SEQ ID NO: 10560 - protein, 211 aa, unidentified; identical to SEQ ID NO: 10557
  source 1..211: note = Mesorhizobium jarvisii
  REGION 1..211: note = tr|A0A3A5KUP6|A0A3A5KUP6_9RHIZ GTP cyclohydrolase 1; OS = Mesorhizobium jarvisii OX=1777867 GN=folE PE=3 SV=1

SEQ ID NO: 10561 - protein, 211 aa, unidentified
  source 1..211: note = Mesorhizobium kowhaii
  REGION 1..211: note = tr|A0A2W7CQ71|A0A2W7CQ71_9RHIZ GTP cyclohydrolase 1; OS = Mesorhizobium kowhaii OX=1300272 GN=folE PE=3 SV=1
MDAVIKKLMPQSAYMEKPVTDRPSEAEVEAAVRTLLRWTGDNPDREGLVDTPMRVAKAFREMFGGYDMCPAEELGRTFEEVAGYDDLVIVKDIQFHSHCEHHMVPIIGKAHVGYLPDGKVVGLSKIARVVDIFAHRLQTQEALTAQIAGVIQDVLNPRGVAVMIEAEHMCMAMRGIRKQGSTTLTSTFTGVFKDTPEEQVRFVTMVRGGGA

SEQ ID NO: 10562 - protein, 211 aa, Mesorhizobium mediterraneum
  REGION 1..211: note = tr|A0A271L012|A0A271L012_9RHIZ GTP cyclohydrolase 1; OS = Mesorhizobium mediterraneum OX=43617 GN=folE PE=3 SV=1
MDAVIKKFMPPSAYLEKPVTDRPSEAEAEAAVRTLLRWTGDNPDREGLVDTPKRVVKAYREMFGGYDKCPAEELGRTFEEVAGYDDLVLVKDITFHSHCEHHMVPIIGKAHVGYLPDGKVVGLSKIARVVDIFAQRLQTQEAMTAQIAGVIQDVLNPRGVAVMLEAEHMCMAMRGIRKEGSTTLTSTFTGVFKDTPEEQVRFVTMVRGGRG

SEQ ID NO: 10563 - protein, 210 aa, Mesorhizobium metallidurans
  REGION 1..210: note = tr|M5ETI0|M5ETI0_9RHIZ GTP cyclohydrolase 1; OS = Mesorhizobium metallidurans STM 2683 OX=1297569 GN=folE; PE = 3 SV=1
MDAVIKKLMPQSAYMEKPVTDRPSEAEVEAAVRTLLRWTGDNPDREGLIDTPKRVTKAFREMFNGYDMCPAEELGRTFEEVAGYDDLVIVKDITFHSHCEHHMVPIIGKAHVGYLPDGKVVGLSKIARVVDIFAHRLQTQEAMTAQIAGVIQDVLNPRGVAVMLEAEHMCMAMRGIRKQDSTTLTSTFTGIFKDTPEEQVRFVTMVRGGA

SEQ ID NO: 10564 - protein, 211 aa, unidentified
  source 1..211: note = Mesorhizobium muleiense
  REGION 1..211: note = tr|A0A1G9BXK6|A0A1G9BXK6_9RHIZ GTP cyclohydrolase 1; OS = Mesorhizobium muleiense OX=1004279 GN=folE PE=3 SV=1
MDAVIKKFMPSSAYMEKPVTDRPTEAEAEAAVRTLLRWTGDNPDREGLVDTPKRVVKAYREMFGGYDKCPAEELGRTFEEVAGYDDLVLVKDITFHSHCEHHMVPIIGKAHVGYLPDGKVVGLSKIARVVDIFAQRLQTQEAMTAQIAGVIQDVLNPRGVAVMLEAEHMCMAMRGIRKEGSTTLTSTFTGVFKDTPEEQVRFVTMVRGGRG

SEQ ID NO: 10565 - protein, 212 aa, unidentified
  source 1..212: note = Mesorhizobium oceanicum
  REGION 1..212: note = tr|A0A1L3SSN4|A0A1L3SSN4_9RHIZ GTP cyclohydrolase 1; OS = Mesorhizobium oceanicum OX=1670800 GN=folE PE=3 SV=1
MDAIVKKFEDIAVAATQPEVERPSQAEVEAAVRTLLLWIGENPQREGLLETPERVAKAYTEMFSGYGRDPADELGRTFEEVAGFDDLVIEKDITFHSHCEHHMVPIIGKAHIGYLPDGKVVGLSKLARVVDIFAQRLQTQEAMTAQIAGAIQDVLNPLGVAVIIEAEHMCMAMRGIRKQGATTITSTFTGAFRDSPEEQVRFMTLLRAGGRG

SEQ ID NO: 10566 - protein, 211 aa, Mesorhizobium opportunistum
  REGION 1..211: note = tr|F7Y4S4|F7Y4S4_MESOW GTP cyclohydrolase 1; OS = Mesorhizobium opportunistum (strain LMG 24607 / HAMBI 3007 / WSM2075) OX=536019 GN=folE PE=3 SV=1
MDAVIKKLMPQSAYMEKPVTDRPSEAEVEAAVRTLLRWTGDNPDREGLVDTPKRVAKAYREMFGGYDMCPAEELGRTFEEVAGYDDLVIVKDIQFHSHCEHHMVPIIGKAHVGYLPDGKVVGLSKIARVVDIFAHRLQTQEALTAQIAGVIQDVLNPRGVAVMIEAEHMCMAMRGIRKQGSTTLTSTFTGVFKDTPEEQVRFVTMVRGGGI

SEQ ID NO: 10567 - protein, 205 aa, Mesorhizobium plurifarium
  REGION 1..205: note = tr|A0A2T3ENG1|A0A2T3ENG1_MESPL GTP cyclohydrolase 1; OS = Mesorhizobium plurifarium OX=69974 GN=folE PE=3 SV=1
MDAIVKNFPVLDDASGRPTQKEAEEAVRVLLRWAGEDPAREGLKDTPARVAKAYREIFGGYDLVAEDVLGRTFEEVSGYDDIVLEKDIPFYSHCEHHMVPIIGKAHVAYLPNGRVLGLSKIARVVDIYARRLQTQEAMTAQIAKAIDETLMPRGVAVMVEAEHLCMAMRGIKKQGATTLTTTFTGAFKSEPAEQARFMTMLRGFK

SEQ ID NO: 10568 - protein, 210 aa, Mesorhizobium plurifarium
  REGION 1..210: note = tr|A0A090G7G7|A0A090G7G7_MESPL GTP cyclohydrolase 1; OS = Mesorhizobium plurifarium OX=69974 GN=folE PE=3 SV=1
MDAVIKKIMPPSQYLDKPVTDRPSEAEVEAAVRTLLRWTGDNPDREGLVDTPKRVTKAFREMFNGYDMCPADELGRTFEEVAGYDDLVIVKDIKFHSHCEHHMVPIIGKAHVGYLPDGKVVGLSKIARVVDIFAHRLQTQEAMTAQIAGVIQDVLNPRGVAVMLEAEHMCMAMRGIRKQGSTTLTSTFTGVFKDTPEEQVRFVTMVRAGG

SEQ ID NO: 10569 - protein, 211 aa, unidentified; identical to SEQ ID NO: 10552
  source 1..211: note = Mesorhizobium prunaredense
  REGION 1..211: note = tr|A0A1R3VN00|A0A1R3VN00_9RHIZ GTP cyclohydrolase 1; OS = Mesorhizobium prunaredense OX=1631249 GN=folE PE=3 SV=1

SEQ ID NO: 10570 - protein, 211 aa, unidentified
  source 1..211: note = Mesorhizobium qingshengii
  REGION 1..211: note = tr|A0A1G5VAP0|A0A1G5VAP0_9RHIZ GTP cyclohydrolase 1; OS = Mesorhizobium qingshengii OX=1165689 GN=folE PE=3 SV=1
MDAVIKKLMPQSAYMEKPVTDRPSEAEVEAAVRTLLRWTGDNPDREGLVDTPKRVAKAYREMFGGYDMCPAEELGRTFEEVAGYDDLVIVKDISFHSHCEHHMVPIIGKAHVGYLPDGKVVGLSKIARVVDIFAHRLQTQEALTAQIAGVIQDVLNPRGVAVMIEAEHMCMAMRGIRKQGSTTLTSTFTGVFKDTPDEQVRFVTMVRGGGV

SEQ ID NO: 10571 - protein, 210 aa, unidentified
  source 1..210: note = Mesorhizobium sanjuanii
  REGION 1..210: note = tr|A0A2A6FJI5|A0A2A6FJI5_9RHIZ GTP cyclohydrolase 1; OS = Mesorhizobium sanjuanii OX=2037900 GN=folE PE=3 SV=1
MDAVIKKLMPQSAYMEKPVTDRPSEAEVEAAVRTLLRWTGDNPDREGLIDTPKRVTKAFREMFNGYDMCPAEELGRTFEEVAGYDDLVIVKDITFHSHCEHHMVPIIGKAHVGYLPDGKVVGLSKIARVVDIFAHRLQTQEAMTAQIAGVIQDVLNPRGVAVMLEAEHMCMAMRGIRKQGSTTLTSTFTGVFKDTPEEQVRFVTMVRGGA

SEQ ID NO: 10572 - protein, 221 aa, unidentified
  source 1..221: note = Mesorhizobium soli
  REGION 1..221: note = tr|A0A2P7S2C0|A0A2P7S2C0_9RHIZ GTP cyclohydrolase 1; OS = Mesorhizobium soli OX=1295366 GN=folE PE=3 SV=1
MDLHSHLLDETEESVPATARRNSVGSRKPPLGPIRPTRIDAEAAVRTLICWAGDDPARPGLLDTPARVVRAYEEWFGGYDQDPVALLERTFDEIGDYDQTVELHDLPFHSFCEHHMAAIRGKAHIAYMPVNRVVGISKLARVVEACARRLQIQERLTDDIARAIEDALQPGGVAVVLVAEHSCMNSRGVHAHGTHMVTKRMLGVFETDVDLRREFLASIDL

SEQ ID NO: 10573 - protein, 211 aa, unidentified
  source 1..211: note = Mesorhizobium soli
  REGION 1..211: note = tr|A0A2P7SBT0|A0A2P7SBT0_9RHIZ GTP cyclohydrolase 1; OS = Mesorhizobium soli OX=1295366 GN=folE PE=3 SV=1
MDAVIKKLMPKSEYLEKPVTDRPDQAEVEAAVRTLLRWTGDNPDREGLVDTPKRVAKAFLEMFNGYDMCPAEELGRTFEEVAGYDDLVLVRDIEFHSHCEHHMVPIIGRAHVGYLPDGRVVGLSKIARVVDIFAHRLQTQEAMTAQIANVIQDVLNPRGVAVMIEAEHMCMAMRGIRKQGSTTLTSTFTGVFKDSPEEQLRFMTMVRHGSK

SEQ ID NO: 10574 - protein, 211 aa, Mesorhizobium sp.; identical to SEQ ID NO: 10550
  REGION 1..211: note = tr|A0A3S2E5F7|A0A3S2E5F7_9RHIZ GTP cyclohydrolase 1; OS = Mesorhizobium sp. M7A.F.Ca.CA.001.06.1.1 OX=2496682; GN = folE PE=3 SV=1

SEQ ID NO: 10575 - protein, 211 aa, Mesorhizobium sp.; identical to SEQ ID NO: 10550
  REGION 1..211: note = tr|A0A3S2HJQ7|A0A3S2HJQ7_9RHIZ GTP cyclohydrolase 1; OS = Mesorhizobium sp. M7A.F.Ca.CA.002.03.2.1 OX=2496680; GN = folE PE=3 SV=1

SEQ ID NO: 10576 - protein, 208 aa, unidentified
  source 1..208: note = Mesorhizobium tamadayense
  REGION 1..208: note = tr|A0A3P3FUL2|A0A3P3FUL2_9RHIZ GTP cyclohydrolase 1; OS = Mesorhizobium tamadayense OX=425306 GN=folE PE=3 SV=1
MDAVIKKFMPPSSYMEKPVTDRPSEAEVEAAVRTLLRWTGDNPDREGLVDTPKRVTKAFREMFNGYDMCPAEELGRTFEEVAGYDDLVIVRDITFHSHCEHHMVPIIGKAHVGYLPDGKVVGLSKIARVVDIFAHRLQTQEAMTAQIAGVIQDVLNPRGVAVMIEAEHMCMAMRGIRKQGSTTLTSTFTGVFKDTPEEQVRFVTMVRS

SEQ ID NO: 10577 - protein, 211 aa, Mesorhizobium temperatum
  REGION 1..211: note = tr|A0A271LP22|A0A271LP22_9RHIZ GTP cyclohydrolase 1; OS = Mesorhizobium temperatum OX=241416 GN=folE PE=3 SV=1
MDAVIKKFMPPSAYMEKPVTDRPTEAEAEAAVRTLLRWTGDNPNREGLVDTPKRVVKAYREMFGGYDKCPAEELGRTFEEVAGYDDLVLVKDITFHSHCEHHMVPIIGKAHVGYLPDGKVVGLSKIARVVDIFAQRLQTQEAMTAQIAGVIQDVLNPRGVAVMLEAEHMCMAMRGIRKEGSTTLTSTFTGVFKDTPEEQVRFVTMVRGGRG

SEQ ID NO: 10578 - protein, 211 aa, Mesorhizobium tianshanense
  REGION 1..211: note = tr|A0A562PDS6|A0A562PDS6_9RHIZ GTP cyclohydrolase 1; OS = Mesorhizobium tianshanense OX=39844 GN=folE PE=3 SV=1
MDAVIKKFMPPSAYLEKPVTNRPSEAEAEAAVRTLLRWAGDNPDREGLVDTPKRVVKAYREMFGGYDKCPAEELGRTFEEVAGYDDLVLVKDISFHSHCEHHMVPIIGKAHVGYLPDGKVVGLSKIARVVDIFAQRLQTQEAMTAQIAGVIQDVLNPRGVAVMLEAEHMCMAMRGIRKEGSTTLTSTFTGVFKDTPEEQVRFVTMVRGGRG

SEQ ID NO: 10579 - protein, 211 aa, unidentified
  source 1..211: note = Mesorhizobium waimense
  REGION 1..211: note = tr|A0A3A5K7K0|A0A3A5K7K0_9RHIZ GTP cyclohydrolase 1; OS = Mesorhizobium waimense OX=1300307 GN=folE PE=3 SV=1
MDAVIKKLMPSSAYMEKPVTDRPSEAEVEAAVRTLLRWTGDNPEREGLIDTPKRVTKAFLEMFNGYDMCPAEELGRTFEEVAGYDDLVIVRDINFHSHCEHHMVPIIGKAHVGYLPDGKVVGLSKIARVVDIFAHRLQTQEAMTAQIASVIQDVLNPRGVAVMMEAEHMCMAMRGIRKQGSTTLTSTFTGVFKDTPEEQVRFVTMVRGGGV

SEQ ID NO: 10580 - protein, 211 aa, unidentified
  source 1..211: note = Mesorhizobium wenxiniae
  REGION 1..211: note = tr|A0A271KC44|A0A271KC44_9RHIZ GTP cyclohydrolase 1; OS = Mesorhizobium wenxiniae OX=2014805 GN=folE PE=3 SV=1
MDAVIKKFMPPSAYMEKPVTDRPTEAEAEAAVRTLLRWTGDNPDREGLVDTPKRVVKAYREMFGGYDKCPAEELGRTFEEVAGYDDLVLVKDITFHSHCEHHMVPIIGKAHVGYLPDGKVVGLSKIARVVDIFAQRLQTQEAMTAQIAGVIQDVLNPRGVAVMVEAEHMCMAMRGIRKEGSTTLTSTFTGVFKDTPEEQVRFVTMVRGGRG

SEQ ID NO: 10581 - protein, 270 aa, unidentified
  source 1..270: note = Mesosutterella multiformis
  REGION 1..270: note = tr|A0A388SC47|A0A388SC47_9BURK GTP cyclohydrolase FolE2 OS=Mesosutterella multiformis OX=2259133 GN=folE2; PE = 3 SV=1
MNADNSLNCALPDVQSSADGRHIPIQRVGVKSVRVPVVVASVDGPLHTVATVNMYVSLPAGQKGTHMSRFFRLLDETREPLCKPVLEDLMARMLKTLDAVSGQIEFDFPFFVRKSAPISKQSSLMSYEAGFTVTCENGETTVRERVLTPVTSLCPCSKEISRYGAHNQRSHITIDALCSEALPFEELIRYSEKNGSCELWSLLKREDEKFVTEYAYDHAKFVEDIIRDVATDLNKDARIVSYELQVENFESIHNHSAYALITHDRRTSAV

SEQ ID NO: 10582 - protein, 254 aa, unidentified
  source 1..254: note = Mesotoga infera
  REGION 1..254: note = tr|A0A117M5M5|A0A117M5M5_9BACT GTP cyclohydrolase FolE2 OS=Mesotoga infera OX=1236046 GN=folE2 PE=3 SV=1
MRDVQNDKDKRNIKINMVGIKSIEYPIVVLDRKFGTQQTVGKFDLFVDLPKDFRGTHMSRFVEVLERHHRKITPRNMESILDDMRESLKADVAHIKVEFPYFIRKNAPVSGSESFSSFGCSFNTMKDGAFDFILGVKVPVMTVCPCSKEISDRGAHNQRAEVFVSVRMNSLVWIEEIIEFVEKSSSAPIFSLLKREDEKYITEHSYDNPRFVEDLSREVVLFLQEDDRIDWYRVEVISQESIHNHEAYACIEKE

SEQ ID NO: 10583 - protein, 255 aa, unidentified
  source 1..255: note = Mesotoga infera
  REGION 1..255: note = tr|A0A3D3TNZ5|A0A3D3TNZ5_9BACT GTP cyclohydrolase FolE2 OS=Mesotoga infera OX=1236046 GN=folE2 PE=3 SV=1
MLRDVQNDKDKRNIKINMVGIKSIEYPIVVLDRKFGTQQTVGKFDLFVDLPKDFRGTHMSRFVEVLERHHRKITPRNMESILDDMRESLKADVAHIKVEFPYFIRKNAPVSGSESFSSFGCSFNTMKDGAFDFILGVKVPVMTVCPCSKEISDRGAHNQRAEVFVSVRMNSLVWIEEIIEFVEKSSSAPIFSLLKREDEKYITEHSYDNPRFVEDLSREVVLFLQEDDRIDWYRVEVISQESIHNHEAYACIEKE

SEQ ID NO: 10584 - protein, 256 aa, unidentified
  source 1..256: note = Mesotoga prima
  REGION 1..256: note = tr|I2F270|I2F270_9BACT GTP cyclohydrolase FolE2; OS = Mesotoga prima MesG1.Ag.4.2 OX=660470 GN=folE2 PE=3 SV=1
MILRDVQNEKDKRNIKINMVGIKSIEYPIVVLDRKFGTQNTVGKFDLFVDLPKDFRGTHMSRFVEVLERHHKKITPRSMESILNDMRDSLKADVAHIKVEFPYFIRKKAPISGSESFSSFKCSFIAMKDGTFDFVLGVKVPVMTVCPCSKEISDRGAHNQRAEVFVSVRMNSLVWIEEIIEYVEKSASAPIFSLLKREDEKFITEHSFDNPRFVEDLSREVVLLLQDDSRINWYRVEAISQESIHNHEAYACIEKE

SEQ ID NO: 10585 - protein, 254 aa, unidentified
  source 1..254: note = Mesotoga sp.
  REGION 1..254: note = tr|A0A421CLF4|A0A421CLF4_9BACT GTP cyclohydrolase FolE2 OS=Mesotoga sp. H07pep.5.4 OX=1463664 GN=folE2 PE=3; SV = 1
MRDVQNEKDKRNIKINMVGIKSIEYPIVVLDRKFGTQNTVGKFDLFVDLPKDFRGTHMSRFVEVLERHHKKITPRSMESILNDMRDSLKADVAHIKVEFPYFIRKKAPISGSESFSSFKCSFIAMKDGTFDFVLGVKVPVMTVCPCSKEISDRGAHNQRAEVFVSVRMNSLVWIEEIIEYVEKSASAPIFSLLKREDEKFITEHSFDNPRFVEDLSREVVLLLQDDSRINWYRVEAISQESIHNHEAYACIEKE

SEQ ID NO: 10586 - protein, 256 aa, unidentified
  source 1..256: note = Mesotoga sp.
  REGION 1..256: note = tr|A0A2T7N4G2|A0A2T7N4G2_9BACT GTP cyclohydrolase FolE2 OS=Mesotoga sp. Brook.08.105.5.1 OX=1421002 GN=folE2; PE = 3 SV=1
MILRDVQNERDKRNIRINMVGIKSIEYPIVVLDREFGTQHTVGNFDLFVDLPTDFRGTHMSRFVEVLERHHKKITPKNMESILNDIRDSLRADVAHIKVQFPYFIRKKAPISGSESFSSFGCSFSTTKDGEFDFVLGVKVPVMTVCPCSKEISDRGAHNQRAEVFVSVRMNSLVWIEEIIEYVEKSASAPIFSLLKREDEKYITEHSFDNPRFVEDLSREVVLFLQEDDRIDWYRIEVISQESIHNHEAYACIEKE

SEQ ID NO: 10587 - protein, 221 aa, unidentified; identical to SEQ ID NO: 8737
  source 1..221: note = Metakosakonia sp.
  REGION 1..221: note = tr|A0A348DAY6|A0A348DAY6_9ENTR GTP cyclohydrolase 1; OS = Metakosakonia sp. MRY16-398 OX=2487150 GN=folE PE=3 SV=1

SEQ ID NO: 10588 - protein, 201 aa, unidentified
  source 1..201: note = Metallibacterium scheffleri
  REGION 1..201: note = tr|A0A4S3KVH1|A0A4S3KVH1_9GAMM GTP cyclohydrolase 1; OS = Metallibacterium scheffleri OX=993689 GN=folE PE=3 SV=1
MHGNDEHNGVSRASAEEAVRTLLRWAGEDPAREGLIETPKRVVKAYGDWFSGYAEDPETYLARTFEEVAGYDELIVLRDIAFESHCEHHMAPIIGRAHVGYLPNGRVVGISKLARVVDAYARRFQVQEKLTAQIADCIERVLEPRGVAVVVDAQHQCMTTRGVHKRGVSMITSTMRGAFRDNPSTRLEFLRFIDIDGSKRT

SEQ ID NO: 10589 - protein, 209 aa, unidentified
  source 1..209: note = Metallibacterium scheffleri
  REGION 1..209: note = tr|A0A4S3KQV9|A0A4S3KQV9_9GAMM GTP cyclohydrolase 1; OS = Metallibacterium scheffleri OX=993689 GN=folE PE=3 SV=1
MLESDLVMSSAVSVAPAGIPEVRRPSRAEAEAAVRTLIRWAGDEPSREGLRATPARVVRAYEEWFSGYRQDPASLLKRTFEEVGGYDDLVMLRDIPLQSTCEHHMAAIRGVVHIAYLPNRRVVGISKLARLVEACGRRLQIQERLTAEIADTLAHVLQPHGVAVIIQASHDCMSSRGVRLHGVAMLTRRLLGQFAQEPQRREILSLLAG

SEQ ID NO: 10590 - protein, 183 aa, unidentified
  source 1..183: note = Unknown
  REGION 1..183: note = tr|A0A1X7MM81|A0A1X7MM81_9GAMM GTP cyclohydrolase 1; OS = methanotrophic bacterial endosymbiont of Bathymodiolus sp. OX=280772 GN=folE PE=3 SV=1
MMEEYFSKIIEAVGEDVTREGLVDTPARAAKAFKFLNNGYEKTLEEVLNGAIFEADTEDMVIVKDIELYSLCEHHLLPFVGKCHIAYLPDDHVLGLSKLARIVDMYARRLQIQERLTKQIADAVETAVHAKGVAVVIEAKHMCMMMRGVEKQNSVMTTSVMTGIFRKEISTRAEFLSLISRGN

SEQ ID NO: 10591 - protein, 180 aa, unidentified
  source 1..180: note = Unknown
  REGION 1..180: note = tr|A0A1D3RL66|A0A1D3RL66_9BACT GTP cyclohydrolase 1; OS = methanotrophic endosymbiont of Bathymodiolus azoricus (Menez Gwen) OX=343232 GN=folE PE=3 SV=1
MEEHFSKIIEAIGEDVTREGLVDTPKRAAKAFEFLNNGYNKTLEEVLNGAIFEADTEDMVIIKDIELYSLCEHHLLPFVGKCHIAYLPQGKVLGLSKLARIVDMYARRLQIQEKLTKQIADAVDTAVGAKGVAVVIEAKHMCMMMRGVEKQNSVMTTSVMTGIFRKEMSTRAEFLSLINR

SEQ ID NO: 10592 - protein, 271 aa, unidentified
  source 1..271: note = Methylacidimicrobium cyclopophantes
  REGION 1..271: note = tr|A0A5E6MLN3|A0A5E6MLN3_9BACT GTP cyclohydrolase FolE2 OS=Methylacidimicrobium cyclopophantes OX=1041766; GN = folE2 PE=3 SV=1
MNNQQTQGTLLADCQNQRDHRRIRIDRVGVKGLRHPIEVRDRSFATQSTVATMSLLVDLPHHFKGTHMSRFVEVLNAHGRLIHVKNLFSIVHALQKRLDAEVAHLVMEFPYFLEKEAPATGAVGLVDYQVRFEAAACGAQTDFVMTVVVPVTTLCPCSKAISDRGAHNQRGYVTAAIRSGEPVWIEEVIEVVEGSASSPIYSLLKRPDEKFVTEHAYDHPVFVEDLVRNVAVRLNERPEILWYRVEAENMESIHNHAAYALVEKHPGANGS

SEQ ID NO: 10593 - protein, 271 aa, unidentified
  source 1..271: note = Methylacidimicrobium tartarophylax
  REGION 1..271: note = tr|A0A5E6MCU3|A0A5E6MCU3_9BACT GTP cyclohydrolase FolE2 OS=Methylacidimicrobium tartarophylax OX=1041768; GN = folE2 PE=3 SV=1
MKNQDHGTLLADCQSEQDHRRIRIDRVGVKGLRHPIEVRDRSFATQSTVATVSLLVDLPHHFKGTHMSRFVEVLNAHGRLIHVKNLFSIVHALQKRLDAEVAHLIMEFPYFLEKRAPATGAEGLVDYQVRFEAAAYRTETDFVMTAVVPVTTLCPCSKAISDRGAHNQRGYVTASIRSSEPIWIEELIEIVESSASSPIYSLLKRPDEKFVTEQAFDHPVFVEDLVRNVAVRLNAHCDVLWYRVEAENMESIHNHAAYALVEKHSGDNGGG

SEQ ID NO: 10594 - protein, 266 aa, unidentified
  source 1..266: note = Methylacidiphilum fumariolicum
  REGION 1..266: note = tr|A0A5F0I2C4|A0A5F0I2C4_9BACT GTP cyclohydrolase FolE2 OS=Methylacidiphilum fumariolicum OX=591154 GN=folE2; PE = 3 SV=1
MKNSLSASLADCQSQQDHRKIKIHRVGVKGLRYPIEVRDKNFESQHTVATVSLLVDLPHHFKGTHMSRFVEVLNAHGRMVHVCNVFSIVHELQKKLHAETAHVIMEFPYFIEKNAPVTGSKGLVDYQVRFEAAAYLDETDFVMWVTVPVTTLCPCSKAISDRGAHNQRGYVSVAIRFVQTIWIEDIIELVEASASSPIYSLLKRPDEKYVTELAFDNPVFVEDLVRNVALRLNANQDILWYRVEAENMESIHNHAAYACVEKELET

SEQ ID NO: 10595 - protein, 273 aa, unidentified
  source 1..273: note = Methylacidiphilum fumariolicum
  REGION 1..273: note = tr|I0K1J1|I0K1J1_METFB GTP cyclohydrolase FolE2; OS = Methylacidiphilum fumariolicum (strain SolV) OX=1156937; GN = folE PE=3 SV=1
MPNVSTLMKNSLSASLADCQSQQDHRKIKIHRVGVKGLRYPIEVRDKNFESQHTVATVSLLVDLPHHFKGTHMSRFVEVLNAHGRMVHVCNVFSIVHELQKKLHAETAHVIMEFPYFIEKNAPVTGSKGLVDYQVRFEAAAYLDETDFVMWVTVPVTTLCPCSKAISDRGAHNQRGYVSVAIRFVQTIWIEDIIELVEASASSPIYSLLKRPDEKYVTELAFDNPVFVEDLVRNVALRLNANQDILWYRVEAENMESIHNHAAYACVEKELET

SEQ ID NO: 10596 - protein, 266 aa, unidentified
  source 1..266: note = Methylacidiphilum infernorum
  REGION 1..266: note = tr|B3DWY5|B3DWY5_METI4 GTP cyclohydrolase FolE2; OS = Methylacidiphilum infernorum (isolate V4) OX=481448; GN = folE2 PE=3 SV=1
MKNISVTALADCQSQKDHRKIKINRVGVKGLKYPIEVRDKNFESQHTVATVSLLVDLPHHFKGTHMSRFVEVLNAHGRMIHVSNVFAIVHELQRKLHAETAHVILEFPYFIEKKAPVTESKGLVDYWVRFEAAAYLDETDFVMWVTVPVTTLCPCSKAISDRGAHNQRGYVSVALRFIHTIWIEDVIEMVEASASSPIYSLLKRPDEKYVTEQAFDNPVFVEDLVRNVALRLNANPDIFWYRVEAENMESIHNHAAYACVEKGSES

SEQ ID NO: 10597 - protein, 266 aa, unidentified
  source 1..266: note = Methylacidiphilum kamchatkense
  REGION 1..266: note = tr|A0A0C1RKM3|A0A0C1RKM3_9BACT GTP cyclohydrolase FolE2 OS=Methylacidiphilum kamchatkense Kam1 OX=1202785; GN = folE2 PE=3 SV=1
MKNSLSASLADCQSQQDHRKIKIHRVGVKGLRYPIEVRDKNFESQHTVATVSLLVDLPHHFKGTHMSRFVEVLNAHGRMVHVCNVFSIVHELQKKLHAETAHVIMEFPYFIEKIAPVTGSKGLVDYQVRFEAAAYLDETDFVMWVTVPVTTLCPCSKAISDRGAHNQRGYVSVAIRFVQTIWIEDVIEMVEASASSPIYSLLKRPDEKYVTELAFDNPVFVEDLVRNVALRLNANQDILWYRVEAENMESIHNHAAYACVEKELET

SEQ ID NO: 10598 - protein, 266 aa, unidentified
  source 1..266: note = Methylacidiphilum sp.
  REGION 1..266: note = tr|A0A4Y8PG84|A0A4Y8PG84_9BACT GTP cyclohydrolase FolE2 OS=Methylacidiphilum sp. Yel OX=1847730 GN=folE2; PE = 3 SV=1
MKNSLSASLADCQSQRDHRKIKIHRVGVKGLRYPIEVRDKNFESQHTVATVSLLVDLPHHFKGTHMSRFVEVLNAHGRMVHVCNVFSIVHELQKKLHAETAHVIMEFPYFIEKIAPVTGSKGLVDYQVRFEAAAYLDETDFVMWVTVPVTTLCPCSKAISDRGAHNQRGYVSVAIRFVQTIWIEDVIEMVEASASSPIYSLLKRPDEKYVTELAFDNPVFVEDLVRNVALRLNANQDILWYRVEAENMESIHNHAAYACVEKELET

SEQ ID NO: 10599 - protein, 266 aa, unidentified
  source 1..266: note = Methylacidiphilum sp.
  REGION 1..266: note = tr|A0A4Y8PDL4|A0A4Y8PDL4_9BACT GTP cyclohydrolase FolE2 OS=Methylacidiphilum sp. Phi OX=1847729 GN=folE2; PE = 3 SV=1
MKNTTTISLADCQSQKDHRKIKINRVGVKGLKYPIEVRDKNFESQHTVATVSLMVDLPHHFKGTHMSRFVEVLNSHGRMVHVSNVFSIVHELQKKLHAETAHIILEFPYFIEKKAPVTGSKGLVDYWVRFEAAAYLNETDFVMWVTVPVTTLCPCSKAISERGAHNQRGYVSVALRFNHTIWIEDVIEMVESSASSPIYSLLKRPDEKYVTEQAFDNPVFVEDLVRNVALRFNANQDIFWYRIEAENMESIHNHAAYACVEKGELP

SEQ ID NO: 10600 - protein, 294 aa, Methylarcula marina
  REGION 1..294: note = tr|A0A422QTL8|A0A422QTL8_9RHOB GTP cyclohydrolase FolE2 OS=Methylarcula marina OX=72022 GN=folE2 PE=3 SV=1
MYKAGLPDLQNGPASLIVGARAPIQHVGISNFRLPIRYQTRDGGEIMLETSVTGTVSLEADRKGINMSRIMRSFYGHADHLFSVKVLEAALDDYKADLEAFDARIQMRFSYPIQVDSLRSGLSGWQYYDIAQEVIEHKGERLRVMHFDYVYSSTCPCSLELSEHARETRSRLATPHSQRSIARISLVMNGPEKIWFEDIVELCRRAVPTETQVMVKREDEQAFAELNAANPIFVEDAVRAFAKELQAEPRIGDFRIIASHQESLHSHDAVSLLVDGPTFAQSSLDPMTFAGLRA

SEQ ID NO: 10601 - protein, 297 aa, Methylibium petroleiphilum
  REGION 1..297: note = sp|A2SJ45|GCH4_METPP GTP cyclohydrolase FolE2; OS = Methylibium petroleiphilum (strain ATCC BAA-1232 / LMG 22953 / PM1) OX=420662 GN=folE2 PE=3 SV=2
MTHASALGLTQHIPDTQSERDERHLAIQRVGVKEVRYPLTVRIGEQLSPTVASWSLDVALPAEQKGTHMSRFVAWLDALSASGKPLDATALRDELAVMLDKLHAVEGRIEARFPFFIRKHAPVSGVSSLLDYQGAWIAEHRAGSGTTVWCEVVVPVKSLCPCSKEISDYGAHNQRSHVTIRAELMEPPGDRRRPPPPGGGESTRERPVVDSAVELGFEALVRFAEASASSEIWGLLKRPDEKWITERAYENPKFVEDLVRDVALRLNADARIGRYRVEVENFESIHNHSAFAVIERE

SEQ ID NO: 10602 - protein, 243 aa, Methylibium petroleiphilum
  REGION 1..243: note = tr|A2SEP6|A2SEP6_METPP GTP cyclohydrolase; OS = Methylibium petroleiphilum (strain ATCC BAA-1232 / LMG 22953 / PM1) OX=420662 GN=Mpe_A1074 PE=4 SV=1
MNAPHTLPSLRAVPDDEGVPVSVKIRERIKSQRERFHANDNIAEFIEPGELEQLLDEVAGKMRGVLDSLVIDTESDHNTQDTARRVAKMYLNEVFKGRYVHEPAVTEFPNVEHLNELMIIGPITVRSACSHHFCPIMGRVWIGVMPNEHSNLIGLSKYARLTEWIMSRPQIQEEAVTQVADLLQDKMSPDGLAIVMEADHFCMQWRGVRDLDSKMINSVMRGVFLKDANLRREFLSLVNNKKG

SEQ ID NO: 10603 - protein, 297 aa, Methylibium sp.
  REGION 1..297: note = tr|A0A0Q7D1D9|A0A0Q7D1D9_9BURK GTP cyclohydrolase FolE2 OS=Methylibium sp. Root1272 OX=1736441 GN=folE2 PE=3; SV = 1
MTHVSALGLTQHIPDTQSERDERHLAIQRVGVKDVRYPLTVRIGEQLSPTVANWSLDVALPAEQKGTHMSRFVAWLDALSASGKPLDEAALRDELAVMLDKLHAVEGRIEARFPFFIRKHAPVSGVSSLLDYQGAWIAERRAGVGTTVWCEVVVPVKSLCPCSKEISDYGAHNQRSHVTIRAELMEPPGDRRRPPPPGGGESTRERPVVDSAVELGFDALVRFAEESASSEIWGLLKRPDEKWITERAYENPKFVEDLVRDVALRLDADSRIGRYRVEVENFESIHNHSAFAVIERE

SEQ ID NO: 10604 - protein, 194 aa, Methylibium sp.
  REGION 1..194: note = tr|W7WAP3|W7WAP3_9BURK GTP cyclohydrolase 1; OS = Methylibium sp. T29-B OX=1437443 GN=folE_2 PE=4 SV=1
MNAPHTLPSLRAVPDDEGVPVSVKIRERIKSQRERFHANDNIAEFIEPGELEQLLDEVAGKMRGVLDSLVIDTESDHNTQDTARRVAKMYLNEVFKGRYVHEPAVTEFPNVEHLNELMIIGPITVRSACSHHFCPIMGRVWIGVMPNEHSNLIGLSKYARLTEWIMSRPQIQEEAVTQVADLLQDKMSPTAWRS

SEQ ID NO: 10605 - protein, 266 aa, Methylobacillus flagellatus
  REGION 1..266: note = sp|Q1GZD6|GCH4_METFK GTP cyclohydrolase FolE2; OS = Methylobacillus flagellatus (strain KT / ATCC 51484 / DSM 6875) OX=265072 GN=folE2 PE=3 SV=1
MNQPSIPPIEDVQNTPDTRQLAIDKVGIKSIRHPVKVKDKTGGVQHTVATFNMYVYLPHNFKGTHMSRFVEILNNNEREISVESFESILRAMVERLDAESGHVEMTFPYFVNKTAPVSGVQSLSDYEVTFIGEINKGKYDITVKVVVPVTSLCPCSKKISDYGAHNQRSHVTVTALINDFIWVEDIIRMVEDQASCEVYGLLKRPDEKYVTERAYDNPKFVEDIVRDVAAQLNIETRIVSYTVESENFESIHNHSAYALIEKDKRK

SEQ ID NO: 10606 - protein, 266 aa, unidentified
  source 1..266: note = Methylobacillus rhizosphaerae
  REGION 1..266: note = tr|A0A238Y2W1|A0A238Y2W1_9PROT GTP cyclohydrolase FolE2 OS=Methylobacillus rhizosphaerae OX=551994 GN=folE2; PE = 3 SV=1
MNQPSIPPIEDVQNTPDTRQLAIDKVGIKSIRHPVKVKDKTGGVQHTVANFNMYVFLPHNFKGTHMSRFVEILNNNEREISVESFESILRAMVKRLDAESGHVEMTFPYFVNKTAPVSGVQSLSDYEVTFIGEVNQGKYDITVKVVVPVTSLCPCSKKISDYGAHNQRSHVTVTALINDFIWVEDIIRLVEDQASCEVFGLLKRPDEKYVTERAYDNPKFVEDIVRDVAAQLNKEPKIVTYTVESENFESIHNHSAYALIEKDKRK

SEQ ID NO: 10607 - protein, 267 aa, Methylobacillus sp.
  REGION 1..267: note = tr|A0A1A9NNJ3|A0A1A9NNJ3_9PROT GTP cyclohydrolase FolE2 OS=Methylobacillus sp. MM3 OX=1848039 GN=folE2 PE=3; SV = 1
MNHPATLPIEDVQNTPDVRHLAIDKVGIKSIRHPVKVQDKTGGVQHTVAVFNMYVHLPHNFKGTHMSRFVEILNMNEREISIENFETILREMVKRLEAESGHIEMTFPYFVNKAAPVSGVQSLLDYEVTFIGEIKDGKYDITVKVLVPVTSLCPCSKKISDYGAHNQRSHVTVTALINDFIWVEDLIGLVEEQASCQLYGLLKRPDEKFVTERAYDNPKFVEDMVRDVAAQLNAEPRIDAYVVESENFESIHNHSAYALIERNKRQN

SEQ ID NO: 10608 - protein, 269 aa, Methylobacillus sp.
  REGION 1..269: note = tr|A0A1A9NPX4|A0A1A9NPX4_9PROT GTP cyclohydrolase FolE2 OS=Methylobacillus sp. MM3 OX=1848039 GN=folE2 PE=3; SV = 1
MNLPIDFPVTAVEDVQNTPDLRRLAIDQVGIKGIRHPIRIPDQTGAEQHTIATINMYVYLPEHFKGTHMSRFIEILNLNERALSIGNFRTILEEMAERLETNSGHIEMQFPFFVNKSAPVSGVQSLMDYEVSLIGDIRDGECAITLKLLVPVTSLCPCSKKISQYGAHNQRSHVTITARINESITLEDLIRVVEEEASSELYGLLKRPDEKFVTEYAYDNPKFVEDMVRDVAAKLSADPRIDRYSVECENFESIHNHSAYAVIHGGNQS

SEQ ID NO: 10609 - protein, 180 aa, Methylobacter sp.
  REGION 1..180: note = tr|A0A522WW33|A0A522WW33_9GAMM GTP cyclohydrolase 1; OS = Methylobacter sp. OX=2051955 GN=folE PE=3 SV=1
MEQHFAKIIEAVGEDLNREGLLDTPKRAAKAFKFLNNGYDKTLEEVLNGAIFNADTEDMVIVKDIELYSLCEHHLLPFIGKCHVGYLPQGKVMGLSKVARVIDMYARRLQIQEKLTKQIADAIELATGARGVAVVIEAKHLCMMMRGVEKQNSVMTTSVMTGIFRKEISTRSEFLNLINR

SEQ ID NO: 10610 - protein, 181 aa, Methylobacter sp.
  REGION 1..181: note = tr|A0A2P5L3P9|A0A2P5L3P9_9GAMM GTP cyclohydrolase 1; OS = Methylobacter sp. OX=2051955 GN=folE PE=3 SV=1
MESFFSKIIQDIGEDINREGLIDTPKRAAEAFRFLTNGYDKSLDVVLNDAIFTADTEDMVIVKNIELYSLCEHHLLPFIGQCHVGYLPRGKVLGLSKVARVIDMYARRLQIQEKLTKQIADAIETATGARGVAVVIEAKHLCMMMRGVEKQNSVMTTSVMTGVFRKEISTRSEFLNLINRS

SEQ ID NO: 10611 - protein, 180 aa, Methylobacter tundripaludum
  REGION 1..180: note = tr|G3J0T1|G3J0T1_METTV GTP cyclohydrolase 1; OS = Methylobacter tundripaludum (strain ATCC BAA-1195 / DSM 17260 / SV96) OX=697282 GN=folE PE=3 SV=1
MEQHFASIIEAVGEDLTREGLIDTPKRAAKAFKFLNNGYEKTLEEVLNGAIFTADTEDMVIVKDIELYSLCEHHLLPFIGKCHVGYLPKGKVMGLSKVARVIDMYARRLQIQEVLTKQIADAIELATGARGVAVVIEAKHLCMMMRGVEKQNSVMTTSVMTGIFRKEISTRSEFLNLINR

SEQ ID NO: 10612 - protein, 180 aa, Methylobacter tundripaludum
  REGION 1..180: note = tr|A0A2S6HE31|A0A2S6HE31_9GAMM GTP cyclohydrolase 1; OS = Methylobacter tundripaludum OX=173365 GN=folE PE=3 SV=1
MEEHFASIIEAVGEDLNREGLIDTPKRAAKAFKFLNNGYEKTLEEVLNGAIFTADTEDMVIVKDIELYSLCEHHLLPFIGKCHVGYLPKGKVMGLSKVARVIDMYARRLQIQEVLTKQIADAIELATGARGVAVVIEAKHLCMMMRGVEKQNSVMTTSVMTGIFRKEISTRSEFLNLINR

SEQ ID NO: 10613 - protein, 219 aa, Methylobacterium aquaticum
  REGION 1..219: note = tr|A0A0J6SNU4|A0A0J6SNU4_9RHIZ GTP cyclohydrolase 1; OS = Methylobacterium aquaticum OX=270351 GN=folE PE=3 SV=1
MDAVLKSLSVRAPEAADKRSDAPRPVRLAERPTRQEAEAAVRTLLRWAGDDPDREGLLETPQRVVKAYEQIFGGYRQDADAILDRVFEEVEGYSDIVLVRDIPFHSHCEHHMVPFMGHAHIAYYPRRGVVGLSKLARVVDTFARRLQTQETMTAQIAEVIDSVLHPRGVAVMVEAEHLCMAMRGVQKSGVSTITTQFTGVFKQDPTEQVRFLTLVRDRR

SEQ ID NO: 10614 - protein, 219 aa, Methylobacterium aquaticum
  REGION 1..219: note = tr|A0A0C6FM75|A0A0C6FM75_9RHIZ GTP cyclohydrolase 1; OS = Methylobacterium aquaticum OX=270351 GN=folE PE=3 SV=1
MDAVLKSLSVRAPEAADKRSDAPRPERVTERPTRQEAEAAVRTLLRWAGDDPEREGLIETPQRVVKAYEQIFGGYRQDADAILDRVFEEVEGYSDIVLVRDIPFHSHCEHHMVPFMGHAHIAYYPRRGVVGLSKLARVVDTFARRLQTQETMTAQIADVIDSVLHPRGVAVMVEAEHLCMAMRGVQKSGVSTITTQFTGVFKQDPTEQVRFLTLVRDRR

SEQ ID NO: 10615 - protein, 278 aa, Methylobacterium brachiatum
  REGION 1..278: note = tr|A0A3G2V8P7|A0A3G2V8P7_9RHIZ GTP cyclohydrolase 1; OS = Methylobacterium brachiatum OX=269660 GN=folE PE=3 SV=1
MYAKPDSTTMKSRVARAGDAMDAALKSLSYRGEGNGLDRGGLDGRDLGQSLTGMRNDNRPVDDGRPAPVEIAPEPASATRVPEGIETGRPSRAEAEAAVRTLLRWAGDDPNREGLRDTPARVTKAFGQLFGGYEMDAEALLARVFEEVEGYSDIVLVRDIPFYSHCEHHMVPFMGLAHIAYYPTRGVVGLSKLARVVDTFARRLQTQETMTAQIADVIESILKPRGVAVMVEAEHLCMAMRGVQKAGVSTITSQFRGVFKDDASEQVRFLTLVRGGTK

SEQ ID NO: 10616 - protein, 258 aa, Methylobacterium brachiatum
  REGION 1..258: note = tr|A0A1I3I0C1|A0A1I3I0C1_9RHIZ GTP cyclohydrolase 1; OS = Methylobacterium brachiatum OX=269660 GN=folE PE=3 SV=1
MDAALKSLSYRGEGNGLDRGGLDGRDLGQSLTGMRNDNRPVDDGRPAPVEIAPEPASATRVPDGIETGRPSRAEAEAAVRTLLRWAGDDPNREGLRDTPARVTKAFGQLFGGYEMDAEALLARVFEEVEGYSDIVLVRDIPFYSHCEHHMVPFMGLAHIAYYPTRGVVGLSKLARVVDTFARRLQTQETMTAQIADVIESILKPRGVAVMVEAEHLCMAMRGVQKAGVSTITSQFRGVFKDDASEQVRFLTLVRGGTK

SEQ ID NO: 10617 - protein, 219 aa, unidentified
  source 1..219: note = Methylobacterium currus
  REGION 1..219: note = tr|A0A2R4WVP0|A0A2R4WVP0_9RHIZ GTP cyclohydrolase 1; OS = Methylobacterium currus OX=2051553 GN=folE PE=3 SV=1
MDAVLKSLSVRAPEAADKRSDAPRPERVTERPTRQEAEAAVRTLLRWAGDDPEREGLLETPQRVVKAYEQIFGGYRQDADAILDRVFEEVEGYSDIVLVRDIAFHSHCEHHMVPFMGRAHIAYYPRRGVVGLSKLARVVDAFARRLQTQETMTAQIADTIDSVLHPRGVAVMVEAEHLCMAMRGVQKSGVSTITTQFTGVFKQDPNEQVRFLTLVRDRR

SEQ ID NO: 10618 - protein, 262 aa, unidentified
  source 1..262: note = Methylobacterium dankookense
  REGION 1..262: note = tr|A0A564FSL7|A0A564FSL7_9RHIZ GTP cyclohydrolase 1; OS = Methylobacterium dankookense OX=560405 GN=folE PE=3 SV=1
MYAKPDSTTMKSRVARAGDAMDAALKSLSYRTADDAQGLTLMRNDNARRPEPVEVAPEPASATRVPEGIALGRPSREEAEAAVRTLLRWAGDDPNREGLIDTPARVVKAYGQLFGGYEVDAEALLERVFEEVEGYSDIVLVRDIPFYSHCEHHMVPFMGLAHIAYYPTRGVVGLSKLARVVDTFARRLQTQETMTAQIADVIESILKPRGVAVLVEAEHLCMAMRGVQKAGVSTITSQFRGVFKDDPSEQVRFLTLVRGGKG

SEQ ID NO: 10619 - protein, 219 aa, unidentified
  source 1..219: note = Methylobacterium frigidaeris
  REGION 1..219: note = tr|A0A2G8MA41|A0A2G8MA41_9RHIZ GTP cyclohydrolase 1; OS = Methylobacterium frigidaeris OX=2038277 GN=folE PE=3; SV = 1
MDAVLKSLSVRAPEAADKRSDAPRPERVTERPTRQEAEAAVRTLLRWAGDDPEREGLLETPQRVVKAYEQIFGGYRQDADAILDRVFEEVEGYSDIVLVRDIAFHSHCEHHMVPFMGKAHIAYYPRRGVVGLSKLARVVDAFARRLQTQETMTAQIAETIDSVLHPRGVAVMVEAEHLCMAMRGVQKSGVSTITTQFTGVFKQDPTEQVRFLTLVRDRR

SEQ ID NO: 10620 - protein, 261 aa, unidentified
  source 1..261: note = Methylobacterium gnaphalii
  REGION 1..261: note = tr|A0A512JHS4|A0A512JHS4_9RHIZ GTP cyclohydrolase 1; OS = Methylobacterium gnaphalii OX=1010610 GN=folE PE=3 SV=1
MYAKPDSTTMKTRVARAGDAMDAALKSLSYGMSDESRRSDAAALMRNDNDAQADIAPIPESAQRVPNEIALGRPSRQEAEAAVRTLLRWAGDDPTREGLIDTPARVTKAYEQLFSGYKLDADSLLERVFEEVEGYSDVVLVRDIPFYSHCEHHMVPFMGLAHVAYYPSKGVVGLSKLARVVDVFAKRLQTQETMTAQIADTIESILKPRGCAVMIEAEHLCMAMRGVQKAGVSTITTQFRGVYKDDASEQVRFLTLVRNKP

SEQ ID NO: 10621 - protein, 280 aa, Methylobacterium gossipiicola
  REGION 1..280: note = tr|A0A1I2VYN8|A0A1I2VYN8_9RHIZ GTP cyclohydrolase 1; OS = Methylobacterium gossipiicola OX=582675 GN=folE PE=3; SV = 1
MYAKPDSNTMTTRIARAEDAMDAALKSLSYRLTETEDSRMAQKIPEAARPAAVPAPLNGLRNDNAPAPAPTAEIAPLPASAKRVPDAIATGRPSREEAEAAVRTLLRWAGDDPNREGLRDTPARVAKAYGQLFGGYEQDADALLERVFEEVEGYSDIVLVRDIPFYSHCEHHMVPFMGLAHIAYYPTKGVVGLSKLARVVDTFARRLQTQETMTAQIADVIESILKPRGIAVMVEAEHLCMAMRGVQKAGVSTITTQFRGAFRNDPNEQVRFLTLVRNKS

SEQ ID NO: 10622 - protein, 262 aa, unidentified
  source 1..262: note = Methylobacterium haplocladii
  REGION 1..262: note = tr|A0A512IUE7|A0A512IUE7_9RHIZ GTP cyclohydrolase 1; OS = Methylobacterium haplocladii OX=1176176 GN=folE PE=3; SV = 1
MYAKPDSTTMKTRVARAGDAMDAALKSLSYGMSDENRRADAVALMRNDNDARADIAPLPESAQRVPNEVALGRPSRQEAEAAVRTLLRWAGDDPTREGLIDTPARVAKAYEQLFAGYKMDADTLLERVFEEVEGYSDVVLVRDIPFYSHCEHHMVPFMGLAHVAYYPSKGVVGLSKLARVVDAFAKRLQTQETMTAQVADTIEAILKPRGCAVMIEAEHLCMAMRGVQKAGVSTITTQFRGVYKDDASEQVRFLTLVRGGKN

SEQ ID NO: 10623 - protein, 219 aa, unidentified
  source 1..219: note = Methylobacterium indicum
  REGION 1..219: note = tr|A0A0J6R7H0|A0A0J6R7H0_9RHIZ GTP cyclohydrolase 1; OS = Methylobacterium indicum OX=1775910 GN=folE PE=3 SV=1
MDAVLKSLSVRAPEAADKRSDAPRPAPVTERPTRQEAEAAVRTLLRWAGDDPDREGLIETPKRVVKAYEQIFGGYRQDADAILDRVFEEVEGYSDIVLVRDIPFHSHCEHHMVPFMGHAHIAYYPRRGVVGLSKLARVVDTFARRLQTQETMTAQIADVIDSVLHPRGVAVMVEAEHLCMAMRGVQKSGVSTITTQFTGVFKQDPTEQVRFLTLVRDRR

SEQ ID NO: 10624 - protein, 263 aa, Methylobacterium mesophilicum
  REGION 1..263: note = tr|M7YNM9|M7YNM9_9RHIZ GTP cyclohydrolase 1; OS = Methylobacterium mesophilicum SR1.6/6 OX=908290 GN=folE; PE = 3 SV=1
MKSRIARAGDAMDAALKSLSYQGDGQGFDRNGIDGQGLNGMRNDNRPADDGRAVDIAPEPASATRVPDGIETGRPSRAEAEAAVRTLLRWAGDDPAREGLLDTPARVAKAYEQLFGGYAVDAEKLLERVFEEVEGYSDIVLVRDIPFHSHCEHHMVPFMGLAHIAYYPTRGVVGLSKLARVVDTFARRLQTQETMTAQIADVIESILKPRGVAVMVEAEHLCMAMRGVQKAGVSTITSQFRGVFKDNANEQVRFLTLVRGGAK

SEQ ID NO: 10625 - protein, 202 aa, Methylobacterium nodulans
  REGION 1..202: note = tr|B8IWN6|B8IWN6_METNO GTP cyclohydrolase 1; OS = Methylobacterium nodulans (strain LMG 21967 / CNCM I-2342 / ORS 2060) OX=460265 GN=folE PE=3 SV=1
MGNIDTTAKIAAGAILQRREAMAASVRSLLVCVGEDVDREGLRDTPARVARMYEEVFSGLNEDPVLHLKTQFCDDGHEEIVVVRDIEFYSMCEHHLVPFFGKAHVAYVPQGGRLTGLSKIARCVQTIARRPQLQERLTSQIVAALEEALTPLGAMALVEAEHLCMAMRGVRSSHSFTRTLVASGCLKTDPEQRAEAFQMLKG

SEQ ID NO: 10626 - protein, 219 aa, Methylobacterium nodulans
  REGION 1..219: note = tr|B8IKC8|B8IKC8_METNO GTP cyclohydrolase 1; OS = Methylobacterium nodulans (strain LMG 21967 / CNCM I-2342 / ORS 2060) OX=460265 GN=folE PE=3 SV=1
MDAVLKSLSVRLPDAADRRSDVARPERITERPTRQEAEAAVRTLIRWAGDDPEREGLRETPQRVARAYEQIFGGYRQDPTNILDRVFEEVEGYGDIVLVRDIPFHSHCEHHMVPFIGKAHIAYYPRRGVVGLSKLARVVDAFARRLQTQETMTAQIAETIDSVLNPRGVAVMVEAEHLCMAMRGVQKAGVSTLTTQFTGVFKQDPHEQVRFLTLVRDQR

SEQ ID NO: 10627 - protein, 272 aa, Methylobacterium organophilum
  REGION 1..272: note = tr|A0A2U1EAT7|A0A2U1EAT7_METOR GTP cyclohydrolase 1; OS = Methylobacterium organophilum OX=410 GN=folE PE=3 SV=1
MYAKPDSTPMKSRIARAGDAMDAALKSLSYQGDGQGFDRNGIEGQGLNGMRNDNRPADDGRPVEVAPEPASATRVPDGIETGRPSRAEAEAAVRTLLRWAGDDPTREGLLDTPARVTKAYEQLFGGYAVDAEKLLERVFEEVEGYSDIVLVRDIPFHSHCEHHMVPFMGLAHIAYYPTRGVVGLSKLARVVDTFARRLQTQETMTAQIADVIESILKPRGVAVMVEAEHLCMAMRGVQKAGVSTITSQFRGVFKDNANEQVRFLTLVRGGAK

SEQ ID NO: 10628 - protein, 252 aa, Methylobacterium oryzae
  REGION 1..252: note = tr|A0A089NYN5|A0A089NYN5_9RHIZ GTP cyclohydrolase 1; OS = Methylobacterium oryzae CBMB20 OX=693986 GN=folE PE=3; SV = 1
MDAALKSLSYQGDGQGFGRNGSDGQGLNGMRNDNRPVDDGRPIEVAPEPASATRVPDGIETGRPSRAEAEAAVRTLLRWAGDDPTREGLLDTPARVTKAYEQLFGGYGVDAEKLLERVFEEVEGYSDIVLVRDIPFHSHCEHHMVPFMGLAHIAYYPTRGVVGLSKLARVVDTFARRLQTQETMTAQIADVIESILKPRGVAVMVEAEHLCMAMRGVQKAGVSTITSQFRGVFKDNANEQVRFLTLVRGGAK

SEQ ID NO: 10629 - protein, 279 aa, unidentified
  source 1..279: note = Methylobacterium oxalidis
  REGION 1..279: note = tr|A0A512JC68|A0A512JC68_9RHIZ GTP cyclohydrolase 1; OS = Methylobacterium oxalidis OX=944322 GN=folE PE=3 SV=1
MIPGPGRFDAMYAKPDSTPMTARVARAGDAMDAALKSLSYPTADGSLPVTVRDLNGMRNDNAPALTPVRPVEVAPQPPSAQRVPNEIALGRPSREEAEAAVRTLLRWAGDDPTREGLVDTPARVVKAYDQLFGGYRQDADALLERVFEEVEGYSDVVLVRDIPFYSHCEHHMVPFMGLAHIAYYPTKGVVGLSKLARVVDTFARRLQTQETMTAQIADVIESILKPRGVAVMVEAEHLCMAMRGVQKAGVSTITTQFKGVFKTDPNEQVRFLTLVRNKG

SEQ ID NO: 10630 - protein, 272 aa, unidentified
  source 1..272: note = Methylobacterium phyllostachyos
  REGION 1..272: note = tr|A0A1H0E4E1|A0A1H0E4E1_9RHIZ GTP cyclohydrolase 1; OS = Methylobacterium phyllostachyos OX=582672 GN=folE PE=3; SV = 1
MYAKPDSTPMKSRIARAGDAMDAALKSLSYPSSGQGFPPNGIDGQGLDGMRNDNRPVDEARPVEVAPEPASATRVPDGIETGRPSRAEAEAAVRTLLRWAGDDPTREGLLDTPARVTKAYEQLFGGYGVDAEKLLERVFEEVEGYSDIVLVRDIPFHSHCEHHMVPFMGLAHIAYYPTRGVVGLSKLARVVDTFARRLQTQETMTAQIADVIESILKPRGVAVMVEAEHLCMAMRGVQKAGVSTITSQFRGVFKDNANEQVRFLTLVRGGAK

SEQ ID NO: 10631 - protein, 219 aa, Methylobacterium platani
  REGION 1..219: note = tr|A0A179SEY8|A0A179SEY8_9RHIZ GTP cyclohydrolase 1; OS = Methylobacterium platani OX=427683 GN=folE PE=3 SV=1
MDAVLKSLSVRAPEAADKRSDAPRPERVTERPTRQEAEAAVRTLLRWAGDDPEREGLLETPQRVVKAYEQIFGGYRQDADAILDRVFEEVEGYSDIVLVRDIPFHSHCEHHMVPFMGHAHIAYYPRRGVVGLSKLARVVDAFARRLQTQETMTAQIADTIDSVLHPRGVAVMVEAEHLCMAMRGVQKSGVSTITTQFTGVFKQDPTEQVRFLTLVRDRR

SEQ ID NO: 10632 - protein, 258 aa, unidentified
  source 1..258: note = Methylobacterium pseudosasicola
  REGION 1..258: note = tr|A0A1I4HGB3|A0A1I4HGB3_9RHIZ GTP cyclohydrolase 1; OS = Methylobacterium pseudosasicola OX=582667 GN=folE PE=3; SV = 1
MDAALKSLSYRGEGNGLDRGGLDGRDLGQSLTGMRNDNRPVDDGRPAAVEVAPEPASATRVPEGIETGRPSRAEAEAAVRTLLRWAGDDPAREGLRDTPARVTKAYEQLFGGYDMDAEALLARVFEEVEGYSDIVLVRDIPFYSHCEHHMVPFMGLAHIAYYPTRGVVGLSKLARVVDTFARRLQTQETMTAQITDVIESILKPRGVAVMVEAEHLCMAMRGVQKAGVSTITSQFRGVFKDDANEQVRFLTLVRGGTK

SEQ ID NO: 10633 - protein, 272 aa, Methylobacterium radiotolerans; identical to SEQ ID NO: 10627
  REGION 1..272: note = tr|A0A3S4AGC7|A0A3S4AGC7_9RHIZ GTP cyclohydrolase 1; OS = Methylobacterium radiotolerans OX=31998 GN=folE PE=3; SV = 1

SEQ ID NO: 10634 - protein, 272 aa, Methylobacterium radiotolerans
  REGION 1..272: note = tr|B1M608|B1M608_METRJ GTP cyclohydrolase 1; OS = Methylobacterium radiotolerans (strain ATCC 27329 / DSM 1819 / JCM 2831 / NBRC 15690 / NCIMB 10815 / 0-1); OX = 426355 GN =folE PE=3 SV=1
MYAKPDSTPMKSRIARAGDAMDAALKSLSYQGDGQGFDRNGIDGQGLNGMRNDNRPADDGRPVEVAPEPTSATRVPDGIETGRPSRAEAEAAVRTLLRWAGDDPTREGLLDTPARVTKAYEQLFGGYAVDAEKLLERVFEEVEGYSDIVLVRDIPFHSHCEHHMVPFMGLAHIAYYPTRGVVGLSKLARVVDTFARRLQTQETMTAQIADVIESILKPRGVAVMVEAEHLCMAMRGVQKAGVSTITSQFRGVFKDNANEQVRFLTLVRGGAK

SEQ ID NO: 10635 - protein, 219 aa, Methylobacterium sp.
  REGION 1..219: note = sp|B0U881|GCH1_METS4 GTP cyclohydrolase 1; OS = Methylobacterium sp. (strain 4-46) OX=426117 GN=folE; PE = 3 SV=1
MDAVLKSLSVRLPDAADKRSDTGRPERVTERPTRQEAEAAVRTLIRWAGDDPEREGLRETPQRVARAYEQIFGGYRQEPTHILDRVFEEVEGYGDIVLVRDIPFHSHCEHHMVPFIGRAHIAYYPRRGVVGLSKLARVVDAFARRLQTQETMTAQIADTIDAVLNPRGVAVMVEAEHLCMAMRGVQKAGVSTLTTQFTGVFKQDPHEQVRFLTLVRDQR

SEQ ID NO: 10636 - protein, 219 aa, Methylobacterium sp.
  REGION 1..219: note = tr|A0A4Z0NQB4|A0A4Z0NQB4_9RHIZ GTP cyclohydrolase 1; OS = Methylobacterium sp. 6HR-1 OX=1141884 GN=folE PE=3 SV=1
MDAVLKSLSVRAPEAADKRSDAPRPERITERPTRQEAEAAVRTLLRWAGDDPEREGLRETPQRVAKAYEQIFGGYRQDPDAILDRVFEEVEGYSDIVLVRDIAFHSHCEHHMVPFMGKAHIAYYPRRGVVGLSKLARVVDAFARRLQTQETMTAQIADTIDSVLHPRGVAVMVEAEHLCMAMRGVQKSGVSTITTQFTGVFKQDPTEQVRFLTLVRDRR

SEQ ID NO: 10637 - protein, 219 aa, unidentified
  source 1..219: note = Methylobacterium tarhaniae
  REGION 1..219: note = tr|A0A0J6TG76|A0A0J6TG76_9RHIZ GTP cyclohydrolase 1; OS = Methylobacterium tarhaniae OX=1187852 GN=folE PE=3 SV=1
MDAVLKSLSVRAPEAADKRSDAPRPERVTERPTRQEAEAAVRTLLRWAGDDPEREGLLETPQRVVKAYEQIFGGYRQDADAILDRVFEEVEGYSDIVLVRDIAFHSHCEHHMVPFMGKAHIAYYPRRGVVGLSKLARVVDAFARRLQTQETMTAQIADTIDSVLHPRGVAVMLEAEHLCMAMRGVQKSGVSTITTQFTGVFKQDPTEQVRFLTLVRDRR

SEQ ID NO: 10638 - protein, 219 aa, Methylobacterium variabile
  REGION 1..219: note = tr|A0A0J6T2M4|A0A0J6T2M4_9RHIZ GTP cyclohydrolase 1; OS = Methylobacterium variabile OX=298794 GN=folE PE=3 SV=1
MDAVLKSLSVRAPEAADKRSDAPRPERVTERPTRQEAEAAVRTLLRWAGDDPEREGLRETPQRVVKAYEQIFGGYRQDADAILDRVFEEVEGYSDIVLVRDIAFHSHCEHHMVPFMGKAHIAYYPRRGVVGLSKLARVVDAFARRLQTQETMTAQIAETIDSVLHPRGVAVMVEAEHLCMAMRGVQKSGVSTITTQFTGVFKQDPTEQVRFLTLVRDRR

SEQ ID NO: 10639 - protein, 210 aa, unidentified
  source 1..210: note = Methylobrevis pamukkalensis
  REGION 1..210: note = tr|A0A1E3H0Y2|A0A1E3H0Y2_9RHIZ GTP cyclohydrolase 1; OS = Methylobrevis pamukkalensis OX=1439726 GN=folE PE=3 SV=1
MDVLINPAARDGEDRKATVKATRPTREEAEAAVRVLIAWAGDDPDREGLLDTPKRVAKAYGELFGGYDQNAPKMLERVFEEVGGYDDMILVRDIPFFSHCEHHMVPFIGKAHIGYYPNEGVVGLSKLARVVDAYARRLQTQENLTAQIVGAIDETLRPRGVAVMIEAEHQCMTMRGVQKHGVSTLTTQFTGVFRDDPTEQVRFMTLVRSR

SEQ ID NO: 10640 - protein, 185 aa, unidentified
  source 1..185: note = Methylocaldum marinum
  REGION 1..185: note = tr|A0A286P4E5|A0A286P4E5_9GAMM GTP cyclohydrolase 1; OS = Methylocaldum marinum OX=1432792 GN=folE PE=3 SV=1
MQNELEHLFSNIIQALGEDVNREGLVDTPKRAAAAFRFLNSGYNQRLERVLNNAIFEADTEDMVIVKDIELYSLCEHHLLPFIGKCHVAYLPKGKVIGLSKIARIVEMYARRLQIQERLTKQIADAIQTAVNPVGVAVVIEAKHLCMMMRGVEKQNSVMTTSSMLGLFRKQISTRSEFLNLINRK

SEQ ID NO: 10641 - protein, 185 aa, Methylocaldum sp.
  REGION 1..185: note = tr|A0A4R7ACG5|A0A4R7ACG5_9GAMM GTP cyclohydrolase 1; OS = Methylocaldum sp. 0917 OX=2485163 GN=folE PE=3 SV=1
MQNVMEHLFSQIIQSLGEDITREGLVDTPKRAAAAFRFLNSGYNQRLERVLNNAVFEADTEDMVIVKDIELYSLCEHHLLPFIGKCHVAYLPKGKVIGLSKIARIVEMYARRLQIQERLTKQIADAIQTAIDPAGVAVVIEAKHLCMMMRGVEKQNSVMTTSSMLGLFRKQISTRSEFLDLINRK

SEQ ID NO: 10642 - protein, 190 aa, unidentified
  source 1..190: note = Methylocapsa palsarum
  REGION 1..190: note = tr|A0A1I3YRR9|A0A1I3YRR9_9RHIZ GTP cyclohydrolase 1; OS = Methylocapsa palsarum OX=1612308 GN=folE PE=3 SV=1
MAKPTQAEAEAAVKVLIEWAGDDPGREGLLDTPARVARSYRELFAGYSAEPRDYLTRTFEEVAGYDELVVLRDIRVVSFCEHHMLPVIGRAHVGYLPRKRVVGISKLARVVHGFARRLQIQEKLTAEIAESIQDILEPQGVGVVIEAEHSCMTLRGVNTPGSTLTTSRLLGVIRDDPRTREEFLRLTRGA

SEQ ID NO: 10643 - protein, 212 aa, unidentified
  source 1..212: note = Methylocapsa palsarum
  REGION 1..212: note = tr|A0A1I4C397|A0A1I4C397_9RHIZ GTP cyclohydrolase 1; OS = Methylocapsa palsarum OX=1612308 GN=folE PE=3 SV=1
MDDVVKSLFERPQPQLDQSPPPRPSREEAEAAVEVLLRWTGDNTSREGLRDTPKRVVKAFEEFFSGYHEDAASVLERMFEEVHGYDDIVLVRDIPFTSHCEHHVVPFFGVAHIAYYPSEQGVVGLSKLARLVDVFAKRLQTQEALTAQIIGAIDLHLRPRGCAVMLEAEHMCMSMRGVRKQGAETITSQFTGVFRDDPAEQVRFLSMLRRGK

SEQ ID NO: 10644 - protein, 216 aa, unidentified
  source 1..216: note = Methyloceanibacter caenitepidi
  REGION 1..216: note = tr|A0A0A8K753|A0A0A8K753_9RHIZ GTP cyclohydrolase 1; OS = Methyloceanibacter caenitepidi OX=1384459 GN=folE PE=3; SV = 1
MATKTDTRPGRKLYAGIEIGKGPQITRPSREEAERAVRTLIAYAGDDPEREGLRDTPKRVVGAYDEFFAGYKDDPIEVLSRTFDDVGGYDDIVMLRDIELNSHCEHHMVPFIGKAHIAYFPTDRVVGLSKLARVVEVFGRRLQTQETMTAQIAETIDRVLKPKGVAVMIEAVHQCMSMRGVRKPGVATITTQFTGVFKEDPAQQARFMQLAVDRGR

SEQ ID NO: 10645 - protein, 206 aa, unidentified
  source 1..206: note = Methyloceanibacter marginalis
  REGION 1..206: note = tr|A0A1E3WA50|A0A1E3WA50_9RHIZ GTP cyclohydrolase 1; OS = Methyloceanibacter marginalis OX=1774971 GN=folE PE=3; SV = 1
MNSNVHALNRGTISKRVAAGRPERADVEAAFRTIIRWAGDDPERPGLIETPARVVRAFEEYFAGYGQDPTLILEKTFEEIEGYDEMIVLRGIRFESHCEHHLAPITGKAWVAYVPSGRVVGISKLARLVDAYAKRLQIQEKMTAQIANTIDEVLKPQGVGVILKATHHCMTTRGVHRPDTDLVTSRMLGCFRDNPLTRQEFLGMID

SEQ ID NO: 10646 - protein, 217 aa, unidentified
  source 1..217: note = Methyloceanibacter marginalis
  REGION 1..217: note = tr|A0A1E3WC71|A0A1E3WC71_9RHIZ GTP cyclohydrolase 1; OS = Methyloceanibacter marginalis OX=1774971 GN=folE PE=3; SV = 1
MDATAKDRPARQLYAGIEIGRGPQITRPSREKAEEAVRTLIAYAGDDPQREGLRDTPRRVTSAYDEFFAGYSEDPFEVLSRTFDEVAGYDDIVMLRDIELHSHCEHHMIPFIGKAHIAYFPTDRVVGLSKLARVVEVFARRLQTQETMTAQIAETIDRVLKPKGVAVMIEAVHQCMSIRGVRKPDVATITTQFTGIFKEDPAQQARFMQLATERGRS

SEQ ID NO: 10647 - protein, 217 aa, unidentified
  source 1..217: note = Methyloceanibacter methanicus
  REGION 1..217: note = tr|A0A1E3VYF2|A0A1E3VYF2_9RHIZ GTP cyclohydrolase 1; OS = Methyloceanibacter methanicus OX=1774968 GN=folE PE=3; SV = 1
MATKTDDRKGRKLYAGIEIGKGPQIARPSREEAERAVRTLIAYAGDDPEREGLRDTPKRVVGAYDEFFAGYKDDPIEVLSRTFDDVGGYDDIVMLRDIELNSHCEHHMVPFIGKAHIAYFPTDRVVGLSKLARVVEVFGRRLQTQETMTAQIAETIDRVLKPKGVAVMIEAVHQCMSMRGVRKPGVATITTQFTGVFKEDPAQQARFMQLALDRGRS

SEQ ID NO: 10648 - protein, 217 aa, unidentified
  source 1..217: note = Methyloceanibacter sp.
  REGION 1..217: note = tr|A0A353INX2|A0A353INX2_9RHIZ GTP cyclohydrolase 1; OS = Methyloceanibacter sp. OX=1965321 GN=folE PE=3 SV=1
MATKTDDRQGRKLYAGIEIGKGPQITRPSREEAERAVRTLIAYAGDDPAREGLRDTPKRVVGAYEEFFAGYNDDPIEVLSRTFDDVGGYDDIVMLRDIELNSHCEHHMVPFIGKSHIAYFPTDRVVGLSKLARVVEVFGRRLQTQETMTAQIAETIDRVLKPKGVAVMIEAVHQCMSMRGVRKPGVATITTQFTGVFKEDPAQQARFMQLALDRGRS

SEQ ID NO: 10649 - protein, 200 aa, unidentified
  source 1..200: note = Methyloceanibacter stevinii
  REGION 1..200: note = tr|A0A1E3VP87|A0A1E3VP87_9RHIZ GTP cyclohydrolase 1; OS = Methyloceanibacter stevinii OX=1774970 GN=folE PE=3 SV=1
MEIGKGPQITRPSREEAERAVRTLIAYAGDDPEREGLRDTPKRVVGAYDEFFAGYKDDPIEVLSRTFDDVGGYDDIVMLRDIELNSHCEHHMVPFIGKAHIAYFPTDRVVGLSKLARVVEVFGRRLQTQETMTAQIAETIDRVLKPKGVAVMIEAVHQCMSMRGVRKPGVATITTQFTGVFKEDPTQQARFMQLAIDRGR

SEQ ID NO: 10650 - protein, 217 aa, unidentified
  source 1..217: note = Methyloceanibacter superfactus
  REGION 1..217: note = tr|A0A1E3VMR9|A0A1E3VMR9_9RHIZ GTP cyclohydrolase 1; OS = Methyloceanibacter superfactus OX=1774969 GN=folE PE=3; SV = 1
MDATTKNPRPARLYAGMEIGRGPQITRPSREKAEEAVRTLIAYAGDDPEREGLRDTPRRVTSAYDEFFAGYRDDPIEVLSRTFDEVAGYDDIVMLRDIELNSHCEHHMIPFIGKAHIAYFPTDRVVGLSKLARVVEVFARRLQTQETMTAQIAETIDTVLKPKGVAVMIEAVHQCMSIRGVRKPNVATITTQFTGIFKEDPSQQARFMMLATERGRS

SEQ ID NO: 10651 - protein, 190 aa, Methylocella silvestris
  REGION 1..190: note = tr|B8EJC9|B8EJC9_METSB GTP cyclohydrolase 1; OS = Methylocella silvestris (strain DSM 15510 / CIP 108128 / LMG 27833 / NCIMB 13906 / BL2) OX=395965 GN=folE PE=3; SV = 1
MAKPTEADAEAAVRVLIEWAGDDPDREGLLDTPRRVARSYRELFSGYVADPRAYLERTFEEVGGYDELVVLRDIRVVSFCEHHMLPVLGRAHVGYLPTNKVVGISKLARVVHGFARRLQIQEKLTAEIADAIQDILEPQGVGVVIEAEHSCMSLRGVNTIGATLITSRLLGVIRDDPRTREEFLRLTRGT

SEQ ID NO: 10652 - protein, 213 aa, Methylocella silvestris
  REGION 1..213: note = tr|A0A2J7TJC2|A0A2J7TJC2_METSI GTP cyclohydrolase 1; OS = Methylocella silvestris OX=199596 GN=folE PE=3 SV=1
MDAVVKSLVERSEPQRDISAREARPTREEAEAAVRVLLRWAGDDPNREGLIDTPARVVKAYGELFSGYGEDATEVLSRVFEEVHGYDDLILVRDIEFSSHCEHHMVPFVGVAHIAYYPSEEGVVGLSKLARLVDVFARRLQTQEALTAQIVGAIDLHLRPRGCAVMIEAEHMCMSMRGVRKHGAQTITTQFTGVFRDDPAEQVRFLTLLRRGK

SEQ ID NO: 10653 - protein, 213 aa, Methylocella tundrae
  REGION 1..213: note = tr|A0A4U8YUC2|A0A4U8YUC2_METTU GTP cyclohydrolase 1; OS = Methylocella tundrae OX=227605 GN=folE PE=3 SV=1
MDAVVKSLVERSQPQRDNSAREPLPTREEAEAAVRVLLRWAGDDPTREGLVDTPARVVKAYEELFSGYREDPTSVLARVFEEVHGYDDIILVRDIPFSSHCEHHVVPFVGVAHIAYYPSEEGVVGLSKLARLVDVFARRLQTQEALTAQIIGAIDVHLRPRGCAIMIEAEHMCMSMRGVRKQGAQTITTQFTGVFRDDPAEQARFLTMLRHGK

SEQ ID NO: 10654 - protein, 189 aa, Methylocella tundrae
  REGION 1..189: note = tr|A0A4U8Z667|A0A4U8Z667_METTU GTP cyclohydrolase 1; OS = Methylocella tundrae OX=227605 GN=folE PE=3 SV=1
MAKPTQADAEAAVRVLIEWAGDDPDREGLLDTPGRVARSYRELFAGYATDPRTYLERTFEEVGGYDELVVMRDIPVVSFCEHHMLPVIGRAHVGYLPSNRVVGISKLARVVHGFARRLQIQEKLTAEIADAIQDILEPKGVGVVIEAEHSCMTLRGVNTLGTTLTTSRLRGIIRDDPRTREEFLRLTRA

SEQ ID NO: 10655 - protein, 185 aa, unidentified
  source 1..185: note = Methylococcaceae bacterium
  REGION 1..185: note = tr|A0A257MVE4|A0A257MVE4_9GAMM GTP cyclohydrolase 1; OS = Methylococcaceae bacterium NSM2-1 OX=1917482 GN=folE; PE = 3 SV=1
MKLKTMEEHFAGIIEGVGENLEREGLVDTPKRAAKAFKFLNNGYEKTLDEVLNGAIFTADTEDMVIVKDIELYSLCEHHLLPFIGKCHVGYLPQGKVLGLSKVARIIDMYARRLQIQEKLTKQIADAIELSIGARGVAVVIEAKHLCMMMRGVEKQNSVMTTSVMTGIFRKEISTRSEFLNLINR

SEQ ID NO: 10656 - protein, 185 aa, unidentified
  source 1..185: note = Methylococcaceae bacterium
  REGION 1..185: note = tr|A0A1Z9UIC2|A0A1Z9UIC2_9GAMM GTP cyclohydrolase 1; OS = Methylococcaceae bacterium TMED282 OX=1986758 GN=folE; PE = 3 SV=1
  VARIANT 149: note = Xaa can be any naturally occurring amino acid
MRDLFLSLLKSIGEDPERDGLLKTPDRAAKALSFLTKGSKESLEEIVNDALFESDSREMVIVKDIEIYSMCEHHMLPFFGRCHIGYIPDGKVLGLSKLARISDMFSRRLQIQEQLTHEIATAVFETVKPLGVGVVIEARHLCMMMRGVXKQNSSTVSSAMLGTFLTSDRTRSEFLQLIGPRSTSV

SEQ ID NO: 10657 - protein, 180 aa, unidentified
  source 1..180: note = Methylococcales bacterium
  REGION 1..180: note = tr|A0A3A2J371|A0A3A2J371_9GAMM GTP cyclohydrolase 1; OS = Methylococcales bacterium OX=2304002 GN=folE PE=3 SV=1
MEEHFASIISAVGEDLTREGLIDTPKRAAKAFKFLNNGYDKTLEEVLNGAIFSADTEDMVIVKDIELYSLCEHHLLPFIGKCHVGYLPQGKVLGLSKVARIIDMYARRLQIQEKLTKQIADAIEVSIGARGVAVVIEAKHLCMMMRGVEKQNSVMTTSVMTGVFRKEISTRSEFLTLINR

SEQ ID NO: 10658 - protein, 180 aa, unidentified
  source 1..180: note = Methylococcales bacterium
  REGION 1..180: note = tr|A0A418RTR3|A0A418RTR3_9GAMM GTP cyclohydrolase 1; OS = Methylococcales bacterium OX=2304002 GN=folE PE=3 SV=1
MEEHFAKIIEAVGEDLNREGLIDTPVRAAKAFKFLNNGYDKTLEEVLNGAIFTADTEDMVIVKEIELYSLCEHHLLPFIGKCHVGYLPQGKVLGLSKVARIIDMYARRLQIQEKLTKQIADAIELSIGARGVAVVIEAKHLCMMMRGVEKQNSVMTTSVMTGIFRKELSTRSEFLNLINR

SEQ ID NO: 10659 - protein, 185 aa, Methylococcus capsulatus
  REGION 1..185: note = sp|Q607T5|GCH1_METCA GTP cyclohydrolase 1; OS = Methylococcus capsulatus (strain ATCC 33009 / NCIMB 11132 / Bath) OX=243233 GN=folE PE=3 SV=1
MHSVMETLFSQLIQEIGEDVSREGLVDTPKRAASAFRFLNSGYHQSLDHVLNNAVFEADSEDMVIVKDIELYSLCEHHLLPFIGKCHVGYLPQGKVIGLSKIARIVEMYARRLQIQERLTKQIADAIQTAVNPRGVAVVVEAKHLCMMMRGVEKQNSVMTTSSMLGLFRKQSSTRAEFLDLIGRK

SEQ ID NO: 10660 - protein, 268 aa, Methylococcus capsulatus
  REGION 1..268: note = sp|Q605G6|GCH4_METCA GTP cyclohydrolase FolE2; OS = Methylococcus capsulatus (strain ATCC 33009 / NCIMB 11132 / Bath) OX=243233 GN=folE2 PE=3 SV=1
MEEEGLAIDDVQGRADLRRIDIDRVGIKGIRHPVRVRDRSLGEQHTVARFDMAVSLPHHFKGTHMSRFVEIINGHDREIDIASFEAMLAEMMQRLNAEAGRIEMRFPYFLEKRAPVTGVRSLMDYEVALIGEVSVATTTTWLGVTVPVTSLCPCSKAISERGAHNQRSHVTTAVRMRDFVWIEELIEWVEAEASSPIYGLLKRPDEKYVTEYAYDHPRFVEDLVRGVAARLDTEPRIAAYAVEVENFESIHNHSAYALIERDKRTADA

SEQ ID NO: 10661 - protein, 180 aa, Methylococcus sp.
  REGION 1..180: note = tr|A0A432RLL0|A0A432RLL0_9GAMM GTP cyclohydrolase 1; OS = Methylococcus sp. OX=39769 GN=folE PE=3 SV=1
MEKHFESILEEIGEDIGREGLVDTPKRAAEAFRFLNRGYNLSLEMVLNGAIFQADTEDMVIVKDIELYSLCEHHLLPFIGKCHVGYLPDGKVLGLSKVARIVDMYGRRLQIQEKLTKQIADAIQEAVGAKGVAVVIEAKHLCMMMRGVQKQNSVMTTSVMLGIFREHFSSRSEFLNLISR

SEQ ID NO: 10662 - protein, 180 aa, unidentified
  source 1..180: note = Methylocucumis oryzae
  REGION 1..180: note = tr|A0A0F3IKK6|A0A0F3IKK6_9GAMM GTP cyclohydrolase 1; OS = Methylocucumis oryzae OX=1632867 GN=folE PE=3 SV=1
MEEHFAKIIEAVGENLNREGLIDTPKRAAKAFKFLNNGYEKTLEDVLNGAIFTADTEDMVIIKDIELFSLCEHHLLPFIGKCHVGYLPQGKVLGLSKVARIVDMYARRLQIQEKLTKQIADAIETAINARGVAVVIEAKHLCMMMRGVEKQNSVMTTSVMTGIFRKHISTRSEFLNLINR

SEQ ID NO: 10663 - protein, 209 aa, unidentified
  source 1..209: note = Methylocystaceae bacterium
  REGION 1..209: note = tr|A0A5C9D4B3|A0A5C9D4B3_9RHIZ GTP cyclohydrolase 1; OS = Methylocystaceae bacterium OX=2052174 GN=folE PE=3 SV=1
MDDVVKTCPFSSLETVKTVERPSRDEAEAAVRTLLRWAGDDPDREGLLDTPRRVVKAYEEFFSGYRESADEVLSKVFEEVEGYDDLVLVRDIPFTSHCEHHVVPFVGKTHIAYYPAGGVVGLSKLARLVEIFARRLQTQEAMTAQIAAAIDEALAPRGVAVMVEAEHMCMSMRGVMKQGSSTVTMQFSGVFRDDPAEQARFYTLLRGAR

SEQ ID NO: 10664 - protein, 228 aa, unidentified
  source 1..228: note = Methylocystaceae bacterium
  REGION 1..228: note = tr|A0A4P5SP33|A0A4P5SP33_9RHIZ GTP cyclohydrolase 1; OS = Methylocystaceae bacterium OX=2052174 GN=folE PE=3 SV=1
MEELVKTQLEYSDGEGEMSRSASFSNRLSPQAFAEKAQTRPSREEAEAAVRTLLRWAGDNPDREGLQDTPKRVVKAYEEYFQGYRQNGEELLGRVFSEVENYSDIVLVRDINFCSHCEHHVAPFLGKAHIAYYPTYGVVGLSKLARLVDVFAHRLQTQETMTAQIAQALVTHLKPRGVAVMLEAEHMCMSMRGIRKHGSLTVTVQFSGLFEDNAEQQARFYTLLRGAR

SEQ ID NO: 10665 - protein, 211 aa, unidentified
  source 1..211: note = Methylocystis bryophila
  REGION 1..211: note = tr|A0A1W6MTZ2|A0A1W6MTZ2_9RHIZ GTP cyclohydrolase 1; OS = Methylocystis bryophila OX=655015 GN=folE PE=3 SV=1
MDDVVKTLIDKPLGALKREIEKPTREEAEAAVRVLLRWAGDDPDREGLRETPRRVVKAYEEVFSGYNQDPREVLERIFAEVEGYDDLVMVRDIPFFSHCEHHVTPFIGKAHIAYYPTGGVVGLSKLARLVDVFAKRLQTQEAMTALIANTLEQELNPRGVAVLVEAQHLCMSMRGVLKQGSETVTVQFSGAFRDNPAEQAHFYTLLRGAKG

SEQ ID NO: 10666 - protein, 210 aa, Methylocystis heyeri
  REGION 1..210: note = tr|A0A4S4MIJ9|A0A4S4MIJ9_9RHIZ GTP cyclohydrolase 1; OS = Methylocystis heyeri OX=391905 GN=folE PE=3 SV=1
MDDVVKSLISRPERVVTSANGKPSREEAEEAVRVLLRWAGDNPEREGLLETPARVVKAYEELFSGYRQDPREVLERVFAEVEGYDDLVLVRDIPFFSHCEHHMVPFVGKAHIAYYPTDGVVGLSKLARLVDVFAKRLQTQEAMTAQIASTIETELNPRGVAVLVEAEHMCMSMRGVLKQGASTVTVQFSGSFRDNPSEQAHFYTLLRGGR

SEQ ID NO: 10667 - protein, 190 aa, Methylocystis hirsuta
  REGION 1..190: note = tr|A0A3M9XPM7|A0A3M9XPM7_9RHIZ GTP cyclohydrolase 1; OS = Methylocystis hirsuta OX=369798 GN=folE PE=3 SV=1
MAKPTQADAEAAVRVLIEWAGDDPHREGLIDTPERVARSYRELFAGYEVDPRDYLKRTFDEVGGYDELVVLKDIRVVSFCEHHMLPVTGRAHVGYLPNNRVVGISKLARVVHGFARRLQIQEKLTAEIAEAIQDILEPQGVGVVIEAEHSCMTLRGVNTTGSLLTTSRLLGVIRDDPRTREEFLGMVHGK

SEQ ID NO: 10668 - protein, 209 aa, Methylocystis hirsuta
  REGION 1..209: note = tr|A0A3M9XRH9|A0A3M9XRH9_9RHIZ GTP cyclohydrolase 1; OS = Methylocystis hirsuta OX=369798 GN=folE PE=3 SV=1
MDDVVKTFSLPSLEPPPPIERPTREEAEAAVRTLLRWTGDDPDREGLRDTPRRVVKAYEEFFSGYRESADEVLSKVFEEVEGYDDLVLVRDIPFTSHCEHHVVPFVGKTHIAYYPAGGVVGLSKLARLVEIFARRLQTQEAMTAQIAAAIDEALAPRGVAVMVEAEHMCMSMRGVMKQGSSTVTMQFSGVFRDDPAEQARFYTLLRGAR

SEQ ID NO: 10669 - protein, 209 aa, Methylocystis rosea
  REGION 1..209: note = tr|A0A3G8M390|A0A3G8M390_9RHIZ GTP cyclohydrolase 1; OS = Methylocystis rosea OX=173366 GN=folE PE=3 SV=1
MDDVVKTCPFSSLETVKTVERPSRDEAEAAVRTLLRWAGDDPDREGLQDTPRRVVKAYEEFFSGYRESADEVLSKVFEEVEGYDDLVLVRDIPFTSHCEHHVVPFVGKTHIAYYPAGGVVGLSKLARLVEIFARRLQTQEAMTAQIAAAIDEALAPRGVAVMVEAEHMCMSMRGVMKQGSSTVTMQFSGVFRDDPAEQARFYTLLRGAR

SEQ ID NO: 10670 - protein, 190 aa, Methylocystis rosea
  REGION 1..190: note = tr|A0A3G8MA27|A0A3G8MA27_9RHIZ GTP cyclohydrolase 1; OS = Methylocystis rosea OX=173366 GN=folE PE=3 SV=1
MAKPTQADAEAAVRVLIEWAGDDPSREGLIDTPERVARSYRELFAGYEVDPRDYLKRTFDEVGGYDELVVLKDIRVVSFCEHHMLPVTGRAHVGYLPSNRVVGISKLARVVHGFARRLQIQEKLTAEIAEAIQDILEPQGVGVVIEAEHSCMTLRGVNTTGSLLTTSRLLGVIRDDPRTREEFLGMVHGK

SEQ ID NO: 10671 - protein, 190 aa, Methylocystis sp.
  REGION 1..190: note = tr|A0A2P5NP03|A0A2P5NP03_9RHIZ GTP cyclohydrolase 1; OS = Methylocystis sp. OX=1911079 GN=folE PE=3 SV=1
MGKPSQADAEAAVRVLIEWAGDDPEREGLLDTPARVARSYRELFSGYEIDPRDYLKRTFEEVGGYDELVVLKNIRVVSFCEHHMLPVLGRAHVGYLPTNRVVGISKLARVVHGFARRLQIQEKLTAEIAEAIQDILQPQGVGVVIEAEHNCMTLRGVNTPGSSLTTSKLLGVMRDDARTRDEFLGMVRGA

SEQ ID NO: 10672 - protein, 140 aa, Methylocystis sp.
  REGION 1..140: note = tr|I4EAF9|I4EAF9_METSZ GTP cyclohydrolase 1; OS = Methylocystis sp. (strain SC2) OX=187303 GN=folE2 PE=3; SV = 1
MIERQANKTEHLVSAHADRFRDGPGRLMGLDDNSRGVRRSKRTQAEAEAAVRVLIEWAGDNPDREGLIDTPERVARSYRELFAGYAAGPREYLKRTFEEVGGYDELVVLKDIRVVTFCEHHMLPVIGRAHVGYLPTNRVL

SEQ ID NO: 10673 - protein, 180 aa, unidentified
  source 1..180: note = Methyloglobulus morosus
  REGION 1..180: note = tr|V5BZA4|V5BZA4_9GAMM GTP cyclohydrolase 1; OS = Methyloglobulus morosus KoM1 OX=1116472 GN=folE PE=3; SV = 1
MEEQFSKIIAAIGEDLSREGLVDTPKRAAKAFKFLNNGYEKTLEEVLNDAIFTADSEDMVIVKDIELYSLCEHHLLPFIGKCHVGYLPKGKVLGLSKVARVIDMYARRLQIQERLTKQIADAIMQATGARGVAVVIEAKHLCMMMRGVEKQNSVMTTSAMLGAFRKEISTRSEFLNLINR

SEQ ID NO: 10674 - protein, 210 aa, unidentified
  source 1..210: note = Methyloligella halotolerans
  REGION 1..210: note = tr|A0A1E2S186|A0A1E2S186_9RHIZ GTP cyclohydrolase 1; OS = Methyloligella halotolerans OX=1177755 GN=folE PE=3 SV=1
MDAFVEKPKRSDDQQTEIVRPSRHEAEDAVRTLLAYAGDDPRREGLLDTPKRVVDSYDEFFSGYHESAHEVLSRTFDEVGGYDDIVMLRDIEVNSHCEHHMIPFIGKAHVAYFPTDRVVGISKLARVVDVFAHRLQTQETMTAQIAETIDDVLKPKGVAVMIEAVHQCMSLRGVKKPDVATITTQFTGIFKEDPAQQARFMTLVSSDRGR

SEQ ID NO: 10675 - protein, 185 aa, unidentified
  source 1..185: note = Methylomagnum ishizawai
  REGION 1..185: note = tr|A0A1Y6CZJ3|A0A1Y6CZJ3_9GAMM GTP cyclohydrolase 1; OS = Methylomagnum ishizawai OX=1760988 GN=folE PE=3 SV=1
MQNAAMENLFSQIIQELGEDVTREGLVDTPKRAAAAFRYLNSGYHMDLDKVLNNAIFEADTEDMVIVKDIELYSLCEHHLLPFIGKCHVAYLPRGKVVGLSKIARIVEMYARRLQIQERLTKQIATALQTAVDPKGVAVVIEAKHLCMMMRGVEKQNSVMTTSSMLGLFRKEISTRSEFLNLISR

SEQ ID NO: 10676 - protein, 180 aa, Methylomicrobium album
  REGION 1..180: note = tr|H8GQV4|H8GQV4_METAL GTP cyclohydrolase 1; OS = Methylomicrobium album BG8 OX=686340 GN=folE PE=3 SV=1
MEEYFSKIIAAVGEDLTREGLIDTPKRAAKAFKFLNNGYQKNLDEVLNNAVFTADTEDMVIVKDIELYSLCEHHLLPFIGKCHVGYLPRGKVLGLSKIARIVDMYARRLQIQEKLTKQIADAIEYAVDAKGVAVVIEAKHLCMMMRGVEKQNSVMTTSVMTGIFRKEMNTRSEFLNLINR

SEQ ID NO: 10677 - protein, 261 aa, Methylomicrobium album
  REGION 1..261: note = tr|H8GK09|H8GK09_METAL GTP cyclohydrolase FolE2; OS = Methylomicrobium album BG8 OX=686340 GN=folE2 PE=3 SV=1
MKTCTIEDIQGRTDTRRIAIDKVGIKDILHPVRVRDKSGGEQHTVARFDMYVNLPHDFKGTHMSRFVEILNSHDREISIASFSTMLQEMLARLEAESGYIDMRFPYFIEKAAPVSGVRSLLDYQVSFIGEIDAQGCRTKVKIVVPVTSLCPCSKEISERGAHNQRSHVTVTAGTREFIWLEELIALVESEASSPVYGLLKRPDEKYVTEYAYDHPKFVEDMVRDVAARLDADPRIGAYTVESENFESIHNHSAYALIERVK

SEQ ID NO: 10678 - protein, 270 aa, Methylomicrobium alcaliphilum
  REGION 1..270: note = tr|G4T2P1|G4T2P1_META2 GTP cyclohydrolase FolE2; OS = Methylomicrobium alcaliphilum (strain DSM 19304 / NCIMB 14124 / VKM B-2133 / 20Z) OX=1091494 GN=folE2 PE=3 SV=1
MNNQSNIPTSENAIVDVQGIADSRRIAIDKVGIKAIRHPIRVKDRSVGEQHTIGLFDMYVNLPHDFKGTHMSRFVEILNQHDREISVESFGLMLEEMVQRLDAQSGYIEMQFPFFIDKAAPVSGVRSLLDYQVSLIGEIAGGEVQTRIKVVVPVTSLCPCSKTISDRGAHNQRSHVTLTVLINDFIWIEELIDLAEQEASCQIYGLLKRPDEKYVTEYAYDNPKFVEDMVRDVAARLEAEPRISAYIVESENFESIHNHSAYALIERDKR

SEQ ID NO: 10679 - protein, 180 aa, Methylomicrobium alcaliphilum
  REGION 1..180: note = tr|G4T3K2|G4T3K2_META2 GTP cyclohydrolase 1; OS = Methylomicrobium alcaliphilum (strain DSM 19304 / NCIMB 14124 / VKM B-2133 / 20Z) OX=1091494 GN=folE PE=3 SV=1
MEEYFSKIIEAVGEDVTREGLIDTPKRASDAFKFLNNGYEKSLDDVLNNAIFEADTEDMVIVKDIELYSLCEHHLLPFIGKCHVGYLPQGKVLGLSKVARIIDMYARRLQIQEKLTKQIADAIEKSINARGVAVVIEAKHLCMMMRGVEKQNSVMTTSVMTGIFREEISTRSEFLNLINR

SEQ ID NO: 10680 - protein, 180 aa, Methylomicrobium buryatense
  REGION 1..180: note = tr|A0A4P9UPX1|A0A4P9UPX1_9GAMM GTP cyclohydrolase 1; OS = Methylomicrobium buryatense OX=95641 GN=folE PE=3 SV=1
MEEYFSKIIEAVGEDVTREGLVDTPKRASDAFKFLNNGYEKNLDDVLNGAIFQADTEDMVIVKDIELYSLCEHHLLPFIGKCHVGYLPQGKVLGLSKVARIIDMYARRLQIQEKLTKQIADAIEKSINARGVAVVIEAKHLCMMMRGVEKQNSVMTTSVMTGIFREEISTRSEFLNLINR

SEQ ID NO: 10681 - protein, 270 aa, Methylomicrobium buryatense
  REGION 1..270: note = tr|A0A4P9UQL3|A0A4P9UQL3_9GAMM GTP cyclohydrolase FolE2 OS=Methylomicrobium buryatense OX=95641 GN=folE2; PE = 3 SV=1
MNNQSSIPSLENSIVDVQGIADSRRIAIDKVGIKAIRHPIRVKDRSVGEQHTIGLFDMYVNLPHDFKGTHMSRFVEILNQHDREISVESFGLMLEEMVQRLDAQSGYIEMQFPFFIDKAAPVSGVRSLLDYQVSLIGEIAGSEVQTRIKVVVPVTSLCPCSKTISDRGAHNQRSHVTLTVLINDFIWIEELIDLAEQEASCQIYGLLKRPDEKYVTEYAYDNPKFVEDMVRDVAARLEAEPRISAYIVESENFESIHNHSAYALIERDKR

SEQ ID NO: 10682 - protein, 270 aa, Methylomicrobium kenyense
  REGION 1..270: note = tr|A0A543V878|A0A543V878_9GAMM GTP cyclohydrolase FolE2 OS=Methylomicrobium kenyense OX=269709 GN=folE2 PE=3; SV = 1
MNNHSNTPTSENAIVDVQGIADSRRIAIDKVGIKAIRHPIRVKDRSVGEQHTIGLFDMYVNLPHDFKGTHMSRFVEILNQHDREISVESFGLMLEEMVQRLDAQSGYIEMQFPFFIDKAAPVSGVRSLLDYQVSLIGEIAGGEVQTRIKVVVPVTSLCPCSKTISDRGAHNQRSHVTLNVLINDFIWIEELIDLVEQEASCQVYGLLKRPDEKYVTEYAYDNPKFVEDMVRDVAARLEAESRLSAYIVESENFESIHNHSAYALIERDKR

SEQ ID NO: 10683 - protein, 180 aa, Methylomicrobium kenyense
  REGION 1..180: note = tr|A0A543V5J2|A0A543V5J2_9GAMM GTP cyclohydrolase 1; OS = Methylomicrobium kenyense OX=269709 GN=folE PE=3 SV=1
MEEYFSKIIEAVGEDVTREGLVDTPKRASDAFKFLNNGYEKSLDDVLNDAIFEADTEDMVIVKDIELYSLCEHHLLPFIGKCHVGYLPQGKVLGLSKVARIIDMYARRLQIQEKLTKQIADAIEKSINARGVAVVIEAKHLCMMMRGVEKQNSVMTTSVMTGIFRDEISTRSEFLNLINR

SEQ ID NO: 10684 - protein, 181 aa, unidentified
  source 1..181: note = Methylomonas denitrificans
  REGION 1..181: note = tr|A0A126T7S6|A0A126T7S6_9GAMM GTP cyclohydrolase 1; OS = Methylomonas denitrificans OX=1538553 GN=folE PE=3 SV=1
MEEYFSKIIQAIGEDVNREGLRDTPKRAAKAFKFLNNGYEKTLEEVLNGAIFQADTEDMVIVKDIELYSLCEHHLLPFIGKCHIGYLPQGKVLGLSKLARIVDMYGRRLQIQEQLTRQIATAVETAIDARGVAVVIEAKHLCMMMRGVEKQNSVMTTSVMLGIFREEISTRSEFLNLINRK

SEQ ID NO: 10685 - protein, 266 aa, unidentified
  source 1..266: note = Methylomonas koyamae
  REGION 1..266: note = tr|A0A177NNM4|A0A177NNM4_9GAMM GTP cyclohydrolase FolE2 OS=Methylomonas koyamae OX=702114 GN=folE2 PE=3 SV=1
MTPIEDIQARADNRRIAIDKVGIKDILHPVRVQDKSVGEQRTVARFAMYVNLPHDFKGTHMSRFVEILNSHDREISIASFPAMLREMLDRLEAESGYIDMRFPYFIEKAAPVSGVRSLLDYQVGFIGEIDAAGCRTKVQVVVPVTSLCPCSKEISERGAHNQRSHVTVTVAIDSFIWVEDLIALVETEASSPIYGLLKRPDEKYVTEYAYDHPKFVEDMVRDVAARLDAEARISAYTVESENFESIHNHSAYALIERDKATTGCRD

SEQ ID NO: 10686 - protein, 181 aa, unidentified
  source 1..181: note = Methylomonas koyamae
  REGION 1..181: note = tr|A0A177P1Y2|A0A177P1Y2_9GAMM GTP cyclohydrolase 1; OS = Methylomonas koyamae OX=702114 GN=folE PE=3 SV=1
MEEYFSKIIEAIGEDVNREGLRDTPKRAAKAFKFLNNGYEKNLDDVLNGAIFQADTEDMVIVKDIELYSLCEHHLLPFIGKCHIGYLPQGKVLGLSKLARIVDMYARRLQIQEQLTRQIADAVATAIDARGVAVVIEAKHLCMMMRGVEKQNSVMTTSVMSGIFRQEISTRSEFLNLINRK

SEQ ID NO: 10687 - protein, 280 aa, unidentified
  source 1..280: note = Methylomonas lenta
  REGION 1..280: note = tr|A0A177NDB9|A0A177NDB9_9GAMM GTP cyclohydrolase FolE2 OS=Methylomonas lenta OX=980561 GN=folE2 PE=3 SV=1
MGNRQRLRPVQRGGRVNACIIEDIQGRADSRRIAIDKVGIKDILHPVRVKDKSCGEQHTVARFDMYVNLPHDFKGTHMSRFVEILNSHDREISIASFPVMLQEMLSRLEAESGYIEMRFPYFVDKAAPVSGVRSLLDYQVSFIGEIDNTGCRIKVKIVVPVTSLCPCSKEISERGAHNQRSHVTITVSASEFIWIEELITLVEAEASSPIYGLLKRPDEKYVTEYAYDHPKFVEDMVRDVAAMLDAEIRITAYMVESENFESIHNHSAYARIERIKPQPA

SEQ ID NO: 10688 - protein, 181 aa, unidentified
  source 1..181: note = Methylomonas lenta
  REGION 1..181: note = tr|A0A177N848|A0A177N848_9GAMM GTP cyclohydrolase 1; OS = Methylomonas lenta OX=980561 GN=folE PE=3 SV=1
MEEYFSKIIQAIGEDVNREGLRDTPKRAAKAFKFLNNGYEKSLDEVLNGAIFQADTEDMVIVKDIELYSLCEHHLLPFIGKCHIGYLPQGKVLGLSKLARIVDMYGRRLQIQEQLTRQIATAVQTAVNARGVAVVIEAKHLCMMMRGVEKQNSVMTTSVMTGIFREEISTRSEFLNLINRR

SEQ ID NO: 10689 - protein, 180 aa, Methylomonas methanica
  REGION 1..180: note = tr|A0A177M3V9|A0A177M3V9_METMH GTP cyclohydrolase 1; OS = Methylomonas methanica OX=421 GN=folE PE=3 SV=1
MEEYFSKIIQAIGEDVNREGLRDTPKRAAKAFKFLNNGYEKTLEEVLNGAIFQADTEDMVIVKDIELYSLCEHHLLPFIGKCHIGYLPKGKVLGLSKLARIVDMYGRRLQIQEQLTRQIAKAVETAIDARGVAVVIEAKHLCMMMRGVEKQNSVMTTSVMLGIFREEISTRSEFLNLINR

SEQ ID NO: 10690 - protein, 181 aa, Methylomonas methanica
  REGION 1..181: note = tr|F9ZVN3|F9ZVN3_METMM GTP cyclohydrolase 1; OS = Methylomonas methanica (strain MC09) OX=857087 GN=folE; PE = 3 SV=1
MEEYFSKIIQAIGEDVNREGLRDTPKRAAKAFRFLNNGYEKSLDEVLNGAIFQADTEDMVIVKDIELYSLCEHHLLPFIGKCHIGYLPQGKVLGLSKLARIVDMYGRRLQIQEQLTRQIATAVQTAINARGVAVVIEAKHLCMMMRGVEKQNSVMTTSVMTGIFREEISTRSEFLNLINRK

SEQ ID NO: 10691 - protein, 181 aa, Methylomonas sp.
  REGION 1..181: note = tr|A0A1S1Y8X2|A0A1S1Y8X2_9GAMM GTP cyclohydrolase 1; OS = Methylomonas sp. LWB OX=1905845 GN=folE PE=3 SV=1
MEEYFSKIIQAIGEDVNREGLRDTPKRAAEAFKFLNKGYQQTLEDVLNDAIFQADTEDMVIVKDIELYSLCEHHLLPFIGKCHIGYLPQGRVLGLSKLARIVDMYGRRLQIQEQLTRQIATAVETAIGARGVAVVVEAKHLCMMMRGVEKQNSVMTTSVMTGIFRQEISTRSEFLNLINRK

SEQ ID NO: 10692 - protein, 181 aa, Methylomonas sp.
  REGION 1..181: note = tr|A0A2P5MX52|A0A2P5MX52_METSP GTP cyclohydrolase 1; OS = Methylomonas sp. OX=418 GN=folE PE=3 SV=1
MEEYFSKIIEAIGEDVNREGLRDTPKRAAKAFRFLNNGYEKSLDEVLNGAIFTADTEDMVIVKDIELYSLCEHHLLPFIGKCHIGYLPKGKVLGLSKLARIVDMYGRRLQIQEQLTRQIAKAVETAIDARGVAVVIEAKHLCMMMRGVEKQNSVMTTSVMLGIFREEISTRSEFLNLINRK

SEQ ID NO: 10693 - protein, 272 aa, unidentified
  source 1..272: note = Methylomusa anaerophila
  REGION 1..272: note = tr|A0A348AQF3|A0A348AQF3_9FIRM GTP cyclohydrolase FolE2 OS=Methylomusa anaerophila OX=1930071 GN=folE2 PE=3; SV = 1
MKLKSQETKNNIKDVQNSCDERGIAIQKVGVSDVHLPFLIQTKNGSFQSVLAKIKLTVNLPQEFKGTHMSRFIEVLSDWSQKPVSAKEMEYILIDTIDRLHAQSAAIDINFKYFIEKTAPVSGFTSMLDYDCAFSGSLTRGQHLNFVLGLKVPFTSLCPCSKEISCYGAHNQRGIMRVKIKHQPGSFIWIEDLAELMEAEGSCQVYPLLKREDEKYVTEKAYENPKFVEDVLRDLVLSLRKVEGAQWFEVECENYESIHNHSAYAAHVETLK

SEQ ID NO: 10694 - protein, 270 aa, Methylophaga aminisulfidivorans
  REGION 1..270: note = tr|F5SUN8|F5SUN8_9GAMM GTP cyclohydrolase FolE2; OS = Methylophaga aminisulfidivorans MP OX=1026882 GN=folE2; PE = 3 SV=1
MSTTPASTEIKDEIEDVQNIADQRKIAIDKVGIKDIKHPVKVSDRTTGEQHTIANFNMYVNLPHQFKGTHMSRFVEILNQHEREITVKSFREMLGQMTERLDAESGYIEMNFPYFVNKEAPVSKVKSLMDYDVTFIGEITGTKTMMTVKVVVPVTSLCPCSKNISDYGAHNQRSHVTLTVRVDSFVWIEDLIDLVEKEASCEIFGLLKRPDEKFVTERAYDNPKFVEDMVRDIAARLNDDSRITAYTVESENFESIHNHSAYALITKGFD

SEQ ID NO: 10695 - protein, 262 aa, Methylophaga aminisulfidivorans
  REGION 1..262: note = tr|F5T367|F5T367_9GAMM GTP cyclohydrolase FolE2; OS = Methylophaga aminisulfidivorans MP OX=1026882 GN=folE2; PE = 3 SV=1
MNLPLTHRLEDVQNTPDKRQLIIDKVGIKSLRYPVLFQSTTETPIRVVAEFNMYVHLAADVKGTHMSRFIELLERPDAIFSLSNMPAFMTDMLELLGAKQGHVSLRFPYFISKTAPVSGVKSFMDYDITLTADYTDKLELTVKAEIPVTSLCPCSKKISDYGAHNQRSLVSVEARISEEMTLDALIQLIEEQASSQLYGLLKRPDEKYVTEFAYDNPKFVEDLVRDIAVALAQQDTVSGFRVECENFESIHNHSAYAVIDQL

SEQ ID NO: 10696 - protein, 268 aa, unidentified
  source 1..268: note = Methylophaga frappieri
  REGION 1..268: note = tr|I1YG08|I1YG08_METFJ GTP cyclohydrolase FolE2; OS = Methylophaga frappieri (strain ATCC BAA-2434 / DSM 25690 / JAM7) OX=754477 GN=folE2 PE=3 SV=1
MTEQHKPTTATEIEDVQNIKDKRHIAIDKVGIKDIRHPVVVSDRTTGEQHTVANFNMYVNLPHEFKGTHMSRFVEILNQHEREITVQSFHTMLGEMTERLDAQSGYIEMSFPYFVNKEAPVSKVRSLMDYQVSFVGEIIQGKTSMTVKVVVPVTSLCPCSKNISDYGAHNQRSHVTLTVKTDSFIWIEDLIDLVEDEASCQIYGLLKRPDEKYVTEHAYDNPKFVEDMVRDVAARLNADKRIQAYTVESENFESIHNHSAYALITNGF

SEQ ID NO: 10697 - protein, 269 aa, unidentified
  source 1..269: note = Methylophaga lonarensis
  REGION 1..269: note = tr|M7P2V4|M7P2V4_9GAMM GTP cyclohydrolase FolE2; OS = Methylophaga lonarensis MPL OX=1286106 GN=folE2 PE=3; SV = 1
MTEQTKPVAAGEIEDVQNIKDKRHIAIDKVGIKDIRHPVVVSDRTTGEQHTIANFNMYVNLPHEFKGTHMSRFVEILNQHEREITVKSFHEMLGEMTERLDAESGYIEMSFPYFVNKEAPISKVRSLMDYQVSFIGEINHQKTSMTVKVIVPVTSLCPCSKNISDYGAHNQRSHVTLTVKTDSFIWIEDLIDLVEEEASCQIYGLLKRPDEKYVTEHAYDNPKFVEDMVRDVAARLNADDRIKAYIVESENFESIHNHSAYALISKGFD

SEQ ID NO: 10698 - protein, 267 aa, unidentified
  source 1..267: note = Methylophaga lonarensis
  REGION 1..267: note = tr|M7P1X5|M7P1X5_9GAMM GTP cyclohydrolase FolE2; OS = Methylophaga lonarensis MPL OX=1286106 GN=folE2 PE=3; SV = 1
MNLPLHIQLEDVQNTPDQRCLPIDRVGIKSLRYPVLFQASATESPIRVVADFNMYVQLAHDVKGTHMSRFVELLETPDLVISPDTLSDFMQQMLALLEAQSGQLEMQFAYFMRKSAPISGVSSMMDYQVSLIANVDPEFSLTAKIAIPVTSLCPCSKKIAEYGAHNQRSLVTISVELIEQMSLPELITLVESQASSQLYGLLKRPDEKYVTEYAYDNPKFVEDLVRDVAASLNQCAAVDRYVVECENFESIHNHSAYAMLQGGRGRS

SEQ ID NO: 10699 - protein, 105 aa, Methylophaga muralis
  REGION 1..105: note = tr|A0A1E3GUS5|A0A1E3GUS5_9GAMM Putative GTP cyclohydrolase 1 type 2 OS=Methylophaga muralis OX=291169; GN = A9E74_00629 PE=4 SV=1
MYKLVFFVPESHKELVKEAIFNAGAGQFDGYEFCSWETLGTGQFRPLSGSQPFIGESGKIEQVNEYRVETICTNDTIKAAVSALKLAHPYEEPAYQYWLVNQEDF

SEQ ID NO: 10700 - protein, 252 aa, Methylophaga muralis
  REGION 1..252: note = tr|A0A1E3GQL3|A0A1E3GQL3_9GAMM Putative GTP cyclohydrolase 1 type 2 OS=Methylophaga muralis OX=291169; GN = A9E74_02031 PE=4 SV=1
MITRTELLAYLDDLLETSRFQDYCPNGLQVEGKQQIKTLVTGVTASQALLDAAVANNADAILVHHGYFWRGESSPVTGLKYQRLKTLLTHDINLIAYHLPLDAHTEFGNNVQLAKILDIEIDGRISATGDPAIALCGCLKTPQSLAEFSSYIDQQLGRKPTVIAGHDRAITTLGWCTGAAQGYIQQAAELGLDAFISGEVSEQTTHLARELGIHYIAAGHHATERYGVKALGEHIAEQFGLHHAFIDIDNPV

SEQ ID NO: 10701 - protein, 269 aa, unidentified
  source 1..269: note = Methylophaga nitratireducenticrescens
  REGION 1..269: note = tr|I1XHY9|I1XHY9_METNJ GTP cyclohydrolase FolE2; OS = Methylophaga nitratireducenticrescens OX=754476; GN = folE2 PE=3 SV=1
MTDQNKPIAAAEIEDVQNIKDKRHIAIDKVGIKDIRHPVVVSDRTTGEQHTVANFNMYVNLPHQFKGTHMSRFVEILNQHEREITVKSFHTMLGEMTERLDAESGYIEMDFPYFVNKEAPISKVRSLMDYQVSFIGEIVNKKTSMTVKVIVPVTSLCPCSKNISDYGAHNQRSHVTLTVKTDSFIWIEDLIDLVEDEASCQIYGLLKRPDEKYVTEHAYDNPKFVEDMVRDVAARLNADDRIKAYTVESENFESIHNHSAYALITKGFD

SEQ ID NO: 10702 - protein, 270 aa, Methylophaga sp.
  REGION 1..270: note = tr|A0A2E2DBL6|A0A2E2DBL6_9GAMM GTP cyclohydrolase FolE2 OS=Methylophaga sp. OX=2024840 GN=folE2 PE=3 SV=1
MSTTPASTEIKDEIEDVQNIADQRKIAIDKVGIKDIKHPVKVSDRTTGEQHTIANFNMYVNLPHQFKGTHMSRFVEILNQHEREITVKSFREMLGQMTERLDAESGYIEMNFPYFVNKEAPISKVKSLMDYDVTFIGEITGATTMMTVKVVVPVTSLCPCSKNISDYGAHNQRSHVTLTVRVESFVWIEDLIDLVEKEASCEIFGLLKRPDEKYVTERAYDNPKFVEDMVRDIAARLNQDSRITAYTVESENFESIHNHSAYALISKGFD

SEQ ID NO: 10703 - protein, 269 aa, Methylophaga sp.
  REGION 1..269: note = tr|A0A2E7XX90|A0A2E7XX90_9GAMM GTP cyclohydrolase FolE2 OS=Methylophaga sp. OX=2024840 GN=folE2 PE=3 SV=1
MTDQNKPIAAAEIEDVQNIKDKRHIAIDKVGIKDIRHPVVVSDRTTGEQHTVANFNMYVNLPHQFKGTHMSRFVEILNQHEREITVKSFHTMLGEMTERLDAESGYIEMSFPYFVNKEAPISKVRSLMDYQVSFIGEIVAKKTSMTVKVIVPVTSLCPCSKNISDYGAHNQRSHVTLTVKTDSFIWIEDLIDLVEDEASCQIYGLLKRPDEKYVTEHAYDNPKFVEDMVRDVAARLNADSRIKAYTVESENFESIHNHSAYALITQGFD

SEQ ID NO: 10704 - protein, 270 aa, Methylophaga sulfidovorans
  REGION 1..270: note = tr|A0A1I3V3Q9|A0A1I3V3Q9_9GAMM GTP cyclohydrolase FolE2 OS=Methylophaga sulfidovorans OX=45496 GN=folE2 PE=3; SV = 1
MSTTPASTEIKDEIEDVQNIADQRKIAIDKVGIKDIKHPVKVSDRTTGEQHTIANFNMYVNLPHQFKGTHMSRFVEILNQHEREITVKSFREMLGQMTERLDAESGYIEMNFPYFVNKEAPVSKVKSLMDYDVTFIGEITGTQTMMTVKVVVPVTSLCPCSKNISDYGAHNQRSHVTLTVRVDSFVWIEDLIDLVEKEASCEIFGLLKRPDEKFVTERAYDNPKFVEDMVRDIAARLNDDSRITAYTVESENFESIHNHSAYALITKGFD

SEQ ID NO: 10705 - protein, 262 aa, Methylophaga sulfidovorans
  REGION 1..262: note = tr|A0A1I3TT25|A0A1I3TT25_9GAMM GTP cyclohydrolase FolE2 OS=Methylophaga sulfidovorans OX=45496 GN=folE2 PE=3; SV = 1
MNLPLTHRLEDVQNTPDKRQLIIDKVGIKSLRYPVLFQSTTETPIRVVAEFNMYVHLAADVKGTHMSRFIELLERPDAIFSLSRMPTFMADMLELLGAKQGHVSLRFPYFISKAAPVSGVKSVMGYDITLTADYTEQLELTVKAEIPVTSLCPCSKKISDYGAHNQRSLVTVEARINENMTLDALIQLIEQQASSQLYGLLKRPDEKYVTEFAYDNPKFVEDLVRDIAVALSQQETVSGFRVECENFESIHNHSAYAVIDQL

SEQ ID NO: 10706 - protein, 269 aa, Methylophaga thiooxydans
  REGION 1..269: note = tr|A0A0A0BF51|A0A0A0BF51_9GAMM GTP cyclohydrolase FolE2 OS=Methylophaga thiooxydans OX=392484 GN=folE2 PE=3; SV = 1
MSTTPASTKNDEIEDVQNIADKRQIAIDKVGIKDIKHPVKVSDRTKGEQHTIANFNMYVNLPHHFKGTHMSRFVEILNQHENEITVKSFRKMLGEMTERLDAESGYVEMNFPYFVNKEAPISKVRSLMDYDVSFIGEITGKDTAMTVKVVVPVTSLCPCSKNISDYGAHNQRSHVTLTVRVDSFIWIEDLIDLVEKQASCEIYGLLKRPDEKYVTERAYDNPKFVEDMVRDIAAKLNEDDRINAYTVESENFESIHNHSAYALISKGFD

SEQ ID NO: 10707 - protein, 262 aa, Methylophaga thiooxydans
  REGION 1..262: note = tr|A0A0A0BIG8|A0A0A0BIG8_9GAMM GTP cyclohydrolase FolE2 OS=Methylophaga thiooxydans OX=392484 GN=folE2 PE=3; SV = 1
MNLPLNTTLEDVQNTPDKRQLAIDHVGIKSLRYPVFFESDDAGPIRVVANFNMYVRLPHHVKGTHMSRFVELLEKPGQVFSVITMKTFMQTMLTVLEADSGYVEMRFPFFLSKTAPVSGVASMMDYDVTLKAEMGEQFKLTVKAEIPVTSLCPCSKKISEYGAHNQRSLVTVEVEVDETLTLDQLIAMVEKQASSELYGLLKRPDEKYVTEYAYDNPKFVEDLVRDIAGTLDKSEAIDGFRVECENFESIHNHSAYAMIDRM

SEQ ID NO: 10708 - protein, 267 aa, unidentified
  source 1..267: note = Methylophilaceae bacterium
  REGION 1..267: note = tr|Y0KF23|Y0KF23_9PROT GTP cyclohydrolase FolE2; OS = Methylophilaceae bacterium 11 OX=1101195 GN=folE2 PE=3; SV = 1
MNLPTLQGIEDVQNTPDVRHLDINKVGIKSIRHPVIVKDRSGGEQATVAVFDMYVHLPHNFKGTHMSRFVEILNMNEHAISIESFETILREMVKRLEAESGYVEMHFPYFINKSAPISGVKSLLDYDVTFIGEIKNGEFSITVKVLVPVTSLCPCSKKISDYGAHNQRSHVTVTALLNDFMWLEDMIELVEKQASCELYGLLKRPDEKFVTERAYDNPKFVEDMVRDVAAQLNAEKRIDAYVVESENFESIHNHSAYALIEKDKRIK

SEQ ID NO: 10709 - protein, 263 aa, unidentified
  source 1..263: note = Methylophilaceae bacterium
  REGION 1..263: note = tr|A0A356CSE0|A0A356CSE0_9PROT GTP cyclohydrolase FolE2 OS=Methylophilaceae bacterium OX=2030816 GN=folE2; PE = 3 SV=1
MTTHDHTCPIEDVQSSPDLRSLDIDKVGIKSIRHPVLVKDKTGGAQHTVATFNMYVYLPHNFKGTHMSRFVEILNMNDREISVESFENILREMIKRLEAKSCDVEMTFPYFINKTAPVSGVKSLLDYEVSFMGKIVDGVFKNTIKVVVPVTSLCPCSKKISDYGAHNQRSHVTVTAEINKFIWIEELIELIEKQASSELYGLLKRPDEKFVTEKAYDNPKFVEDMVRDVAAQLKLEKRINHFVVESENFESIHNHSAYALIEG

SEQ ID NO: 10710 - protein, 262 aa, unidentified
  source 1..262: note = Methylophilales bacterium
  REGION 1..262: note = tr|A0A0H4IY92|A0A0H4IY92_9PROT GTP cyclohydrolase FolE2 OS=Methylophilales bacterium MBRS-H7 OX=1623450; GN = folE2 PE=3 SV=1
MNKIIDKIEDVQNTPDKRHLDIDKVGIKSIRHPISVKDKTGGDQSTVAMFDMYVHLPHNFKGTHMSRFVEILNENEKTISVKNFEKILRDMLERLESKAGDVEMTFPYFINKRAPVSGVESLLDYEVTFIGSIKDNQYINQIKVIIPVTSLCPCSKKISDYGAHNQRSHVTVTVETNDFVWIEDIIELVEKNASSELYGLLKRPDEKYVTEKAYDNPKFVEDMVRDIATDLNQNNKITSYTVESENFESIHNHSAYAMIQSS

SEQ ID NO: 10711 - protein, 268 aa, unidentified
  source 1..268: note = Methylophilales bacterium
  REGION 1..268: note = tr|A0A258SWK3|A0A258SWK3_9PROT GTP cyclohydrolase FolE2 OS=Methylophilales bacterium 16-45-9 OX=1970537; GN = folE2 PE=3 SV=1
MTQTKPQSPIEDVQNTVDTRHLAIDKVGIKSIRHPVVVKDKSGGEQHTVAVFNMYVHLPQHFKGTHMSRFVEILNKNERAISVESFESILREMVSRLEAESGHVEMTFPYFVNKAAPISGVKSLLDYEVTFIGEINQGKYDITVKVLVPVTSLCPCSKKISDYGAHNQRSHVTVTALINNFIWIEDIIDLVEKQASCELYGLLKRPDEKYVTERAYDNPKFVEDMVRDVAAQLNAEKRIDAYTVESENFESIHNHSAYALIEKDKRKH

SEQ ID NO: 10712 - protein, 268 aa, unidentified
  source 1..268: note = Methylophilus medardicus
  REGION 1..268: note = tr|A0A5B8CQC8|A0A5B8CQC8_9PROT GTP cyclohydrolase FolE2 OS=Methylophilus medardicus OX=2588534 GN=folE2 PE=3; SV = 1
MNQPVIPTTIEDVQNTPDVRRLDINKVGIKSIRHPVIVKDKSGGEQHTVALFDMYVHLPHNFKGTHMSRFVEILNMNEHAISIDSFETILRQMVERLEAESGYVEMRFPYFINKAAPVSGVKSLLDYEVTFIGEIKNGKFEITVQVMVPVTSLCPCSKKISDYGAHNQRSHVTVTALLNEFMWLEDLITLIEDQASCQLYGLLKRPDEKYVTERAYDNPKFVEDMVRDVAAQLNDEKRIVKYVVESENFESIHNHSAYALIERDKRVN

SEQ ID NO: 10713 - protein, 268 aa, Methylophilus methylotrophus
  REGION 1..268: note = tr|A0A5C7WI51|A0A5C7WI51_METME GTP cyclohydrolase FolE2 OS=Methylophilus methylotrophus OX=17 GN=folE2 PE=3; SV = 1
MNQPVIPTMIEDVQNTPDVRQLDINKVGIKSIRHPVIVKDKTGGEQHTVAVFDMYVHLPHNFKGTHMSRFVEILNMNEHAISIDSFETILRQMVERLEAESGYIEMRFPYFINKAAPVSGVKSLLDYEVTFIGEIKNGQFEITVKVMVPVTSLCPCSKKISDYGAHNQRSHVTVTALLNEFMWLEDLITLIEEEASCQLYGLLKRPDEKYVTERAYDNPKFVEDMVRDVAAQLNAEKRIVKYVVESENFESIHNHSAYALIERDKRVN

SEQ ID NO: 10714 - protein, 268 aa, Methylophilus rhizosphaerae
  REGION 1..268: note = tr|A0A1G9F0N3|A0A1G9F0N3_9PROT GTP cyclohydrolase FolE2 OS=Methylophilus rhizosphaerae OX=492660 GN=folE2; PE = 3 SV=1
MNQPVIPAVIEDVQNTPDVRQLDINKVGIKSIRHPVIVKDKTGGEQHTVAVFDMFVHLPHNFKGTHMSRFVEILNMNENAISIDSFETILRQMVERLEAESGYIEMHFPYFINKAAPVSGVKSLLDYEVTFIGEIKNGQFEITVQVMVPVTSLCPCSKKISDYGAHNQRSHVTVTALLNEFMWLEDLITLIEDQASCQLYGLLKRPDEKFVTERAYDNPKFVEDMVRDVAAQLNNEKRIVKYVVESENFESIHNHSAYALIERDKRIS

SEQ ID NO: 10715 - protein, 268 aa, Methylophilus sp.
  REGION 1..268: note = tr|A0A2S5N615|A0A2S5N615_9PROT GTP cyclohydrolase FolE2 OS=Methylophilus sp. OX=29541 GN=folE2 PE=3 SV=1
MNQPVIPTMIEDVQNTPDVRQLDINKVGIKSIRHPVIVKDKTGGEQHTVAVFDMYVHLPHNFKGTHMSRFVEILNMNEHAISIDSFETILRQMVERLEAESGYIEMRFPYFINKAAPVSGVKSLLDYEVTFIGEIKNGQFEITVKVMVPVTSLCPCSKKISDYGAHNQRSHVTVTALLNEFMWLEDLITLIEEQASCQLYGLLKRPDEKYVTERAYDNPKFVEDMVRDVAAQLNAEKRIVKYVVESENFESIHNHSAYALIERDKRVN

SEQ ID NO: 10716 - protein, 268 aa, Methylophilus sp.
  REGION 1..268: note = tr|A0A0Q6BEN2|A0A0Q6BEN2_9PROT GTP cyclohydrolase FolE2 OS=Methylophilus sp. Leaf416 OX=1736373 GN=folE2; PE = 3 SV=1
MNQPVIPAVIEDVQNTPDVRRLDINKVGIKSIRHPVIVKDKTGGEQHTVAVFDMYVHLPHNFKGTHMSRFVEILNMNESAISIDSFETILRQMVERLEAESGYVEMRFPYFINKAAPISGVKSLLDYEVTFIGEIKNGQFEITVQVMVPVTSLCPCSKQISNYGAHNQRSHVTVTALLNEFIWLEDLISLVEDQASCQLYGLLKRPDEKFVTERAYDNPKFVEDMVRDVAAQLNEEKRIVKYVVESENFESIHNHSAYALIERDKRIN

SEQ ID NO: 10717 - protein, 216 aa, Methylopila sp.
  REGION 1..216: note = tr|A0A2H6BFP4|A0A2H6BFP4_9RHIZ GTP cyclohydrolase 1; OS = Methylopila sp. Yamaguchi OX=1437817 GN=folE PE=3 SV=1
MDAVVQHPFARVPIPAPKGHQTTRKPTREEAEAAVRTLIAWAGDDPAREGLIDTPKRVVKAYAELFGGYAEKAADSLERVFEEVQGYDDMVVLRDIPYFSHCEHHMVPFYGKAHVAYYPSNGVVGLSKIARVIDTFARRLQTQEALTAQITEAIDEHLKPRGVAVMIEGEHMCMAMRGIQKQGVSTVTTQFTGVFRDDPAEQVRFITLVRAAHAPR

SEQ ID NO: 10718 - protein, 180 aa, unidentified
  source 1..180: note = Methyloprofundus sedimenti
  REGION 1..180: note = tr|A0A1V8M7G3|A0A1V8M7G3_9GAMM GTP cyclohydrolase 1; OS = Methyloprofundus sedimenti OX=1420851 GN=folE PE=3 SV=1
MEEYYSKIIEAIGEDVTREGLVDTPKRAAKAFRFLNNGYEKTLEEVLNGAIFEADTEDMVIVKDIELYSLCEHHLLPFVGKCHIAYLPQGHVLGLSKLARIVDMYARRLQIQERLTKQIADAVETAVQAKGVAVVVEAKHMCMMMRGVEKQNSVMTTSVMTGIFRDEMSTRAEFLSLINR

SEQ ID NO: 10719 - protein, 269 aa, unidentified
  source 1..269: note = Methylorubrum extorquens
  REGION 1..269: note = tr|C5AQF4|C5AQF4_METEA GTP cyclohydrolase 1; OS = Methylorubrum extorquens (strain ATCC 14718 / DSM 1338 / JCM 2805 / NCIMB 9133 / AM1) OX=272630 GN=folE PE=3 SV=1
MYAKPDSTTLKARLAKAGDAMDAALKSLSYGMSDDERRMSAVGLQGMRGANDPGRPDITPDIAPLPESAQRVPNEVALGRPSRQEAEAAVRTLLRWAGDDPTREGLIETPARVVKAYEQIFGGYRADADALLERVFEEVEGYSDAVLVRDIPFYSHCEHHMVPFMGLAHIAYYPTKGVVGLSKLARVVDAFARRLQTQETMTAQIADTIESILQPRGCAVMIEAEHLCMAMRGVQKAGVSTITTQFRGVYKNDASEQVRFLTFVRNQKG

SEQ ID NO: 10720 - protein, 269 aa, unidentified; identical to SEQ ID NO: 10719
  source 1..269: note = Methylorubrum extorquens
  REGION 1..269: note = tr|Q84FV8|Q84FV8_METEX GTP cyclohydrolase 1; OS = Methylorubrum extorquens OX=408 GN=folE PE=3 SV=1

SEQ ID NO: 10721 - protein, 269 aa, unidentified
  source 1..269: note = Methylorubrum populi
  REGION 1..269: note = tr|A0A177J8R1|A0A177J8R1_9RHIZ GTP cyclohydrolase 1; OS = Methylorubrum populi OX=223967 GN=folE PE=3 SV=1
MYAKPDSTTMKARVAKAGDAMDAALKSLSYGMSDDERRMSAVGLQGMRGANDPGRPESAPDIAPLPDSAQRVPNEVALGRPSRQEAEAAVRTLLRWAGDDPTREGLLDTPARVVKAYEQIFGGYRADADALLERVFEEVEGYSDAVLVRDIPFYSHCEHHMVPFMGLAHIAYYPTKGVVGLSKLARVVDAFARRLQTQETMTAQIADTIESILQPRGCAVMVEAEHLCMAMRGVQKAGVSTITTQFRGVYRTDPSEQVRFLTFVRNQKG

SEQ ID NO: 10722 - protein, 273 aa, unidentified
  source 1..273: note = Methylorubrum populi
  REGION 1..273: note = tr|A0A160PD73|A0A160PD73_9RHIZ GTP cyclohydrolase 1; OS = Methylorubrum populi OX=223967 GN=folE PE=3 SV=1
MYAKPDSTTMKARVAKAGDAMDAALKSLSYGMSDDERRMSAVGLQGMRGANDPGRPDTASDMAPDIAPLPESAQRVPNEVALGRPSRQEAEAAVRTLLRWAGDDPTREGLIETPARVVKAYEQIFGGYRMDADALLERVFEEVEGYSDAVLVRDIPFYSHCEHHMVPFMGLAHIAYYPTKGVVGLSKLARVVDAFARRLQTQETMTAQIADTIESILQPRGCAVMVEAEHLCMAMRGVQKAGVSTITTQFRGVYKSDPNEQVRFLTFVRNPKG

SEQ ID NO: 10723 - protein, 269 aa, unidentified
  source 1..269: note = Methylorubrum salsuginis
  REGION 1..269: note = tr|A0A1I4BLL1|A0A1I4BLL1_9RHIZ GTP cyclohydrolase 1; OS = Methylorubrum salsuginis OX=414703 GN=folE PE=3 SV=1
MYAKPDSTTMKARVAKAGDAMDAALKSLSYGMSNDERRTSAVGLDGMRGANDAGRPEGSANIAPLPESAQRVPNEVALGRPSRQEAEAAVRTLLRWAGDDPTREGLIDTPARVVKAYEQIFGGYKADADALLERVFEEVEGYSDVVLVRDIPFYSHCEHHMVPFMGLAHIAYYPIKGVVGLSKLARVVDAFARRLQTQETMTAQIADTIESILQPRGCAVMIEAEHLCMAMRGVQKAGVSTITTQFRGVYKDDPSEQVRFLTLVRGGKA

SEQ ID NO: 10724 - protein, 269 aa, unidentified
  source 1..269: note = Methylorubrum sp.
  REGION 1..269: note = tr|A0A4Z0EGF4|A0A4Z0EGF4_9RHIZ GTP cyclohydrolase 1; OS = Methylorubrum sp. Q1 OX=2562453 GN=folE PE=3 SV=1
MYAKPDSTTLKARVAKAGDAMDAALKSLSYGMSDDERRMSAVGLQEMRGANDPGRPDFTPDIAPLPESAQRVPNEVALGRPSRQEAEAAVRTLLRWAGDDPTREGLIETPARVVKAYEQLFGGYRADADALLERVFEEVEGYSDAVLVRDIPFYSHCEHHMVPFMGLAHIAYYPTKGVVGLSKLARVVDAFARRLQTQETMTAQIADTIESILQPRGCAVMIEAEHLCMAMRGVQKAGVSTITTQFRGVYKNDPSEQVRFLTFVRNQKG

SEQ ID NO: 10725 - protein, 269 aa, unidentified; identical to SEQ ID NO: 10719
  source 1..269: note = Methylorubrum zatmanii
  REGION 1..269: note = tr|A0A1W6RM29|A0A1W6RM29_9RHIZ GTP cyclohydrolase 1; OS = Methylorubrum zatmanii OX=29429 GN=folE PE=3 SV=1

SEQ ID NO: 10726 - protein, 209 aa, Methylosinus sp.
  REGION 1..209: note = tr|A0A177PID4|A0A177PID4_9RHIZ GTP cyclohydrolase 1; OS = Methylosinus sp. R-45379 OX=980563 GN=folE PE=3 SV=1
MDAVVKSLLDRNETAETPVERPTREEAEAAVRVLLRWAGDNPEREGLKETPRRVVKAYEEFFRGYQEDAGEELARVFEEVEGYDDLVLVRDIPFFSHCEHHVVPFVGKAHIAYYPTGGVVGLSKLARLVDVYARRLQTQEAMTAQIATAINQHLTPRGVAVLVEAEHMCMSMRGVMKQGSSTVTVQFSGVFRDDPAEQVHFYTLLRGAR

SEQ ID NO: 10727 - protein, 209 aa, Methylosinus sp.; identical to SEQ ID NO: 10726
  REGION 1..209: note = tr|A0A4R8HU29|A0A4R8HU29_9RHIZ GTP cyclohydrolase 1; OS = Methylosinus sp. sav-2 OX=2485168 GN=folE PE=3 SV=1

SEQ ID NO: 10728 - protein, 209 aa, Methylosinus sporium
  REGION 1..209: note = tr|A0A2U1SLJ3|A0A2U1SLJ3_METSR GTP cyclohydrolase 1; OS = Methylosinus sporium OX=428 GN=folE PE=3 SV=1
MDAVVKSLLDRKETAETPVQRPTREEAEAAVRVLLRWAGDNPDREGLKETPRRVVKAYEEFFRGYQEDAGEELARVFEEVEGYDDLVLVRDIPFFSHCEHHVVPFVGKAHIAYYPTGGVVGLSKLARLVDVYARRLQTQEAMTAQIATAINQHLTPRGVAVLVEAEHMCMSMRGVMKQGSSTVTVQFSGVFRDDPAEQVHFYTLLRGGR

SEQ ID NO: 10729 - protein, 209 aa, Methylosinus sporium
  REGION 1..209: note = tr|A0A549T981|A0A549T981_METSR GTP cyclohydrolase 1; OS = Methylosinus sporium OX=428 GN=folE PE=3 SV=1
MDAVVKSLLDRKETADTPVERPTREEAEAAVRVLLRWAGDNPDREGLKETPRRVVKAYEEFFRGYQEDAGEELARVFEEVEGYDDLVLVRDIPFFSHCEHHVVPFVGKAHIAYYPTGGVVGLSKLARLVDVYARRLQTQEAMTAQIATAINQHLTPRGVAVLVEAEHMCMSMRGVMKQGSSTVTVQFSGVFRDDPAEQVHFYTLLRGGR

SEQ ID NO: 10730 - protein, 209 aa, Methylosinus trichosporium
  REGION 1..209: note = tr|A0A2D2D4H1|A0A2D2D4H1_METTR GTP cyclohydrolase 1; OS = Methylosinus trichosporium OB3b OX=595536 GN=folE PE=3; SV = 1
MDAVVKPLLSRPETAEKPVERPSREEAEAAVRVLLRWAGDNPDREGLKETPRRVVKAYEEFFRGYQEDAGESLARIFEEVEGYDDLVLVRDIPFVSHCEHHIVPFVGKAHIAYYPTGGVVGLSKLARLVDTYAKRLQTQEAMTAQIATAIDQHLAPRGVAVLVEAEHMCMSMRGVLKQGSSTVTVQFSGVFRDEPAEQVHFYTLLRGGR

SEQ ID NO: 10731 - protein, 267 aa, Methylotenera mobilis
  REGION 1..267: note = tr|C6WUB4|C6WUB4_METML GTP cyclohydrolase FolE2; OS = Methylotenera mobilis (strain JLW8 / ATCC BAA-1282 / DSM 17540) OX=583345 GN=folE2 PE=3 SV=1
MDQTTHKNPIEDVQNTVDTRHLAIDKVGIKAIRHPVIVKDKTGGEQHTVAMFNMYVHLPQQFKGTHMSRFVEILNMNEHAISVESFETILREMVKRLEAESGHIEMTFPYFVNKAAPISGVKSLLDYEVTFIGEIHQDNFEITVKVLVPVTSLCPCSKKISNYGAHNQRSHVTVTALINDFIWIEDIIDLVEKQASCELYGLLKRPDEKFVTERAYDNPKFVEDMVRDVAAQLNAEKRIVAYTVESENFESIHNHSAYALIEKDKRV

SEQ ID NO: 10732 - protein, 268 aa, Methylotenera sp.
  REGION 1..268: note = tr|A0A2P5LCC6|A0A2P5LCC6_9PROT GTP cyclohydrolase FolE2 OS=Methylotenera sp. OX=2051956 GN=folE2 PE=3 SV=1
MDQTTHKTPIEDVQNTVDTRHLAIDKVGIKAIRHPVVVKDKTGGDQHTVAMFNMYVHLPQQFKGTHMSRFVEILNMNEHAISVESFETILREMVKRLEAESGHIEMTFPYFVNKAAPISGVKSLLDYEVTFIGEIHHGKFEITVKVLVPVTSLCPCSKKISSYGAHNQRSHVTVTALINDFIWIEDIIDLVEKQASCELYGLLKRPDEKYVTERAYDNPKFVEDMVRDVAAQLNAEKRIIAYTVESENFESIHNHSAYALIEKDKRQN

SEQ ID NO: 10733 - protein, 267 aa, Methylotenera sp.
  REGION 1..267: note = tr|A0A2S5L283|A0A2S5L283_9PROT GTP cyclohydrolase FolE2 OS=Methylotenera sp. OX=2051956 GN=folE2 PE=3 SV=1
MDQTKLNTPIEDVQNTVDTRHLAIDKVGIKSIRHPVIVKDKTGGEQHTVAMFNMYVHLPQQFKGTHMSRFVEILNMNEHAISVESFETILREMVKRLEAESGHIEMTFPYFVNKAAPISGVKSLLDYEVTFIGEIHQGNFEITVKVLVPVTSLCPCSKKISDYGAHNQRSHVTVTALINDFIWIEDIIDLVEKQASCELYGLLKRPDEKFVTERAYDNPKFVEDMVRDVAAQLNAEKRIVAYTVESENFESIHNHSAYALIEKDKRI

SEQ ID NO: 10734 - protein, 291 aa, Methylotenera versatilis
  REGION 1..291: note = tr|D7DIA5|D7DIA5_METV0 GTP cyclohydrolase FolE2; OS = Methylotenera versatilis (strain 301) OX=666681; GN = folE2 PE=3 SV=1
MNLPIDFSLQDVQNLADTRQLAIDKVGIRGIRHPVIVKDKAGSAQHTVAMFNMYVHLPKHFKGTHMSRFVEILNENEREISVESFKSILQEMAIRLEAKSGHIEMTFPYFINKSAPVSGVKSLLDYEVTLIGEIKNGKHDVKVKVLIPVTSLCPCSKKISAYGAHNQRSHVTITIALKEFMWLEDMIKMVEAQASSELYGLLKRPDEKYVTELAYDNPKFVEDMVRDIATVFKNDARVKSYVIECENFESIHNHSAYACISSEQAVSMEGKPAKPHETMSVSPCVSSESGY

SEQ ID NO: 10735 - protein, 267 aa, Methylotenera versatilis
  REGION 1..267: note = tr|D7DN60|D7DN60_METV0 GTP cyclohydrolase FolE2; OS = Methylotenera versatilis (strain 301) OX=666681; GN = folE2 PE=3 SV=1
MNQPIPSPIEDVQNTVDTRHIAIDKVGIKAIRHPVVVKDKSGGEQHTVAMFNMYVHLPQQFKGTHMSRFVEILNMNEHAISVESFETILREMVKRLEAESGHVEMTFPYFVNKAAPISGVKSLLDYEVTFIGEINQGKFDITVKVLVPVTSLCPCSKKISDYGAHNQRSHVTVTALINNFIWIEDIIDLVEKQASCELYGLLKRPDEKYVTERAYDNPKFVEDMVRDVAAQLSKESRIVAYTVESENFESIHNHSAYALIEHDKRKH

SEQ ID NO: 10736 - protein, 182 aa, unidentified
  source 1..182: note = Methylothermaceae bacteria
  REGION 1..182: note = tr|A0A148N4Q2|A0A148N4Q2_9GAMM GTP cyclohydrolase 1; OS = Methylothermaceae bacteria B42 OX=1798802 GN=folE PE=3; SV = 1
MEKLFADLIETIGEDISREGLVDTPKRAAAAFRYLNSGYHQSLENVLNDAIFEADTEDMVIVRNIELYSLCEHHLLPFIGKCHVGYLPRGKVIGLSKVARIVEMYARRLQIQEKLTKQIADAIQSAIHPRGVAVVIEAKHLCMMMRGVEKQNSVMTTSSMLGVFRDQFSTRSEFLNLINRPL

SEQ ID NO: 10737 - protein, 201 aa, Methyloversatilis sp.
  REGION 1..201: note = tr|A0A1B3LIQ0|A0A1B3LIQ0_9PROT GTP cyclohydrolase 1; OS = Methyloversatilis sp. RAC08 OX=1842540 GN=folE PE=3 SV=1
MNHSDTTRPSREEAEAAVRTLIQWAGDDPTREGLLDTPSRVVKSYEEFFAGYSIDPREVLSRTFEEVEGYDEVIALTGIRFESHCEHHMVPIIGKAHIAYLPDRRVVGISKLARLVEVFGKRLQIQEKMTVQIADALYEVLQPRGVAVVIEAAHECMTTRGVHKPGVAMVTSRMLGAFRDDASTRREFFNLIGRTAGGCEN

SEQ ID NO: 10738 - protein, 270 aa, Methyloversatilis universalis
  REGION 1..270: note = tr|F5RDX7|F5RDX7_METUF GTP cyclohydrolase FolE2; OS = Methyloversatilis universalis (strain ATCC BAA-1314 / JCM 13912 / FAM5) OX=1000565 GN=folE2 PE=3 SV=1
MNARDPHATPLSMPDVQNSPDRRELPIEKVGIRGIRHPISVRGRDGWVQGTVAECGLFVSLPAHLKGTHMSRFVELLHELNTPLSPASFAPLMRTMLVRLEADSGEISMRFPYFRRKTAPVSGTESLLDYEVSYTARTDADGQHSFTLRVQIPVTSLCPCSKKISQYGAHNQRSHVTIEADIEGDLAIDDLIDIAEQEASCDLYGLLKRPDEKFVTERAYENPKFVEDMVRDIAARLNAEQRVRAYVLEVENFESIHNHSAWAQIRADKR

SEQ ID NO: 10739 - protein, 203 aa, Methyloversatilis universalis
  REGION 1..203: note = tr|F5RDN6|F5RDN6_METUF GTP cyclohydrolase 1; OS = Methyloversatilis universalis (strain ATCC BAA-1314 / JCM 13912 / FAM5) OX=1000565 GN=folE PE=3 SV=1
MKSTDTARPTREEAEAAVRTLIRWTGDDPTREGLIDTPKRVVKAYEEFFAGYAEDPRDVLSRTFEEVEGYDEVIALTGIRFESHCEHHMVPIIGTAHVAYLPDRRVVGISKLARLVEVFAKRLQIQEKMTVQVADALYEVLQPRGVAVVIEAAHECMTTRGVHKPGVAMVTSRMLGAFREDARTRREFFDLIGRSGGSGSCGV

SEQ ID NO: 10740 - protein, 211 aa, Methylovirgula ligni
  REGION 1..211: note = tr|A0A3D9YUD1|A0A3D9YUD1_9RHIZ GTP cyclohydrolase 1; OS = Methylovirgula ligni OX=569860 GN=folE PE=3 SV=1
MDDVVKSLFERQPPKIITPAPDRPTREEAEAAVRTLLLWAGDDPEREGLRDTPTRVVKAYEELFSGYKNDANDVLSRVFEEVQGYDDLILVRDIPFFSHCEHHMVPFIGKAHIAYYVGEEGVVGLSKLARLVDIYARRLQTQEALTAQIIGAIDKHLRPRGAAVMLEAEHLCMSMRGVQKQGASTITNQFTGVFRDDPAEQVRFLTLVRGR

SEQ ID NO: 10741 - protein, 268 aa, unidentified
  source 1..268: note = Methylovorus glucosetrophus
  REGION 1..268: note = tr|C6X9M3|C6X9M3_METGS GTP cyclohydrolase FolE2; OS = Methylovorus glucosetrophus (strain SIP3-4) OX=582744; GN = folE2 PE=3 SV=1
MNQPVTPAIEDVQNTPDTRHLAIDKVGIKSIRHPVKVKDKTGGVQHTVAMFDMYVHLPHNFKGTHMSRFVEILNMNEREISVESFETILRAMVERLEAESGYVEMTFPYFINKAAPISGVQSLLDYEVTFIGEINKGKFDITVKVMVPVTSLCPCSKKISNYGAHNQRSHVTITALINDFIWVEDLIRIVETQASSELFGLLKRPDEKYVTEHAYDNPKFVEDMVRDVAAQLNVEKRIVKYVVESENFESIHNHSAYALIERDKRIQA

SEQ ID NO: 10742 - protein, 268 aa, Methylovorus sp.
  REGION 1..268: note = tr|A0A1A9T037|A0A1A9T037_9PROT GTP cyclohydrolase FolE2 OS=Methylovorus sp. MM2 OX=1848038 GN=folE2 PE=3 SV=1
MNQPIIPTIEDVQNTPDVRHLAIDKVGIKSIRHPVKVKDKTGGEQHTVAMFDMYVHLPHNFKGTHMSRFVEILNMNERAISIESFEGMLREMVKRLEAESGYIQMTFPYFINKAAPVSGVQSLLDYEVTFIGEIKNGKIDTTVKVLVPVTSLCPCSKKISNYGAHNQRSHVTITALINDFIWVEDLIRVVETQASSELFGLLKRPDEKYVTEHAYDNPKFVEDMVRDVAAQLNAEKRIDKYIVESENFESIHNHSAYALIENDKRKAA

SEQ ID NO: 10743 - protein, 180 aa, unidentified
  source 1..180: note = Methylovulum psychrotolerans
  REGION 1..180: note = tr|A0A1Z4BZQ5|A0A1Z4BZQ5_9GAMM GTP cyclohydrolase 1; OS = Methylovulum psychrotolerans OX=1704499 GN=folE PE=3; SV = 1
MEEHFAKIIEAVGEDLSREGLIDTPKRAAKAFKFLNNGYEKTLEEVLNGAIFSADTEDMVIVKDIELYSLCEHHLLPFIGKCHVGYLPQGKVMGLSKVARIVDMYARRLQIQEKLTKQIADAIEQATGARGVAVVIEAKHLCMMMRGVEKQNSVMTTSVMTGIFRQHISTRTEFLNLINR

SEQ ID NO: 10744 - protein, 175 aa, Methylovulum sp.
  REGION 1..175: note = tr|A0A522DWT9|A0A522DWT9_9GAMM GTP cyclohydrolase 1 (Fragment) OS=Methylovulum sp. OX=1916980 GN=folE PE=3 SV=1
AKIIEAIGENLNREGLIDTPKRAAKAFKFLNNGYEKTLEDVLNGAIFTADTEDMVIVKDIELYSLCEHHLLPFIGKCHVGYLPQGKVLGLSKVARIVDMYARRLQIQEKLTKQIADAIETATNARGVAVVIEAKHLCMMMRGVEKQNSVMTTSVMTGIFRQHISTRSEFLNLINR

SEQ ID NO: 10745 - protein, 217 aa, Micavibrio sp.
  REGION 1..217: note = tr|A0A1Z8KX31|A0A1Z8KX31_9PROT GTP cyclohydrolase 1; OS = Micavibrio sp. TMED2 OX=1986633 GN=folE PE=3 SV=1
MNQPLTDKPVAHLGDKTHAELGKASKPSRAEAEEAVRTLLLWAGENPDREGLVDTPSRVVKAYQELFQGYEQDPISVLETTFDEAGGYDEVIALTNIEFTSHCEHHMLPVIGRAHIAYLPNKQIIGLSKLARLVDIYANRLQIQERMTAQIADTLQEVLKPRGVAVVIEAHHQCMSMRGIKKSGGMMKTSRLLGAFRDMPETRREFMALIDKAGACG

SEQ ID NO: 10746 - protein, 205 aa, Micavibrio sp.
  REGION 1..205: note = tr|A0A2D6K099|A0A2D6K099_9PROT GTP cyclohydrolase 1; OS = Micavibrio sp. OX=2024841 GN=folE PE=3 SV=1
MTSKIVDMNKNLNNEARPDREEAEQAVRTLLRYIGENPDREGLVDTPARVIRAYDEFFQGYNQDAAKELSKTFEDIEGFDDIVLVKDIEFTSHCEHHMVPINGIAHVAYWPDEAVVGISKLARIVDILSSRLVSQENMTNAIANVIEETLAPKGVAVYVDADHQCMSIRGVKKRSSSTVTTAFKGKLKDDAAAQMRFLTMIQKNY

SEQ ID NO: 10747 - protein, 199 aa, unidentified
  source 1..199: note = Microbacteriaceae bacterium
  REGION 1..199: note = tr|A0A3C1DYQ8|A0A3C1DYQ8_9MICO GTP cyclohydrolase 1; OS = Microbacteriaceae bacterium OX=1873462 GN=folE PE=3 SV=1
MTRSTPEPVDAGRIEKAVLEILAAIGEDPGRPGLRSTPQRVAQAYAEFFAGLGVDPQEHLADSEEFSAASGDQGELVLLRDIEFRSICEHHLLPFSGVAHVAYVPRSRIIGLGRIPRVVETLAARPQLQERLTEEIADALQTGLDPRGVLVVLTATHGCVSDRGVRQAKSSTVTMASRGMLKEPLERAEIMAMIGAQRE

SEQ ID NO: 10748 - protein, 192 aa, unidentified
  source 1..192: note = Microbacteriaceae bacterium
  REGION 1..192: note = tr|A0A2T5X7Q1|A0A2T5X7Q1_9MICO GTP cyclohydrolase 1; OS = Microbacteriaceae bacterium MWH-Ta3 OX=207608 GN=folE; PE = 3 SV=1
MTVQHERIAAAVRDILDAIGEDVSRPGLADTPARVADAFAELYSGVGIDPVAMLIEPGSCADVDSHDTVIVRGIRFRSMCEHHLLPFHGIAHVAYVPESTVVGLGRIARLVDIVSSRPQVQERLGQEIAEALIRGVHARGTLVVLEATHECVAARGSRQESARAVTVSSSGELAIPAARDATLVLMGAPGGD

SEQ ID NO: 10749 - protein, 195 aa, Microbacterium aerolatum
  REGION 1..195: note = tr|A0A511ABD7|A0A511ABD7_9MICO GTP cyclohydrolase 1; OS = Microbacterium aerolatum OX=153731 GN=folE PE=3 SV=1
MAVDRERVERLTRELLEAIGEDPDRPGLKQTPARVAELYEEFFSGVGQDAAAPLARTISVSRGPAPETLPSGAVLLRDIRFRSVCEHHLLPFAGHAHIAYLPGEQVVGLGALVRVVETIAARPQVQERLGEQIADTIAEHLDTRGVLVVLDAVHGCVTMRGGRQTDASTLTIAARGEYTDAAARAEIVVLIGAGA

SEQ ID NO: 10750 - protein, 193 aa, Microbacterium agarici
  REGION 1..193: note = tr|A0A2A9DUK1|A0A2A9DUK1_9MICO GTP cyclohydrolase 1; OS = Microbacterium agarici OX=630514 GN=folE PE=3 SV=1
MSGVDRERIEAATRELLVAIGESVDRAGLENTPQRVAEAYAEFFHGVGEDPLELLGEGIPLDEGDSGEIVMVRDIALRSMCEHHLLPFLGTAHVAYAPHERVVGLGRIPRVVDVLAARPQVQERLGEQIADAISTGLDAAGVLVIIDAAHSCVTARGTQQARSTTVTLASRGTFSDPIQRAEVVALISRGDAS

SEQ ID NO: 10751 - protein, 196 aa, Microbacterium aurum
  REGION 1..196: note = tr|A0A1P8UBG2|A0A1P8UBG2_9MICO GTP cyclohydrolase 1; OS = Microbacterium aurum OX=36805 GN=folE PE=3 SV=1
MAVDRDRVAAAVRDILAAIGEDPDRPGLKATPQRVADAYAEFFAGVGEDAAAPLAHTISVSRGPAPDTLPSGAVLLRDIRFRSVCEHHLLPFAGRAHIAYLPGEQVVGLGALPKVVDTLASRPQVQERLGEQVADTIAGALDARGVLVVLSAHHECVTMRGGRQPDAATVTIAARGDLAEPAARAEIMMLLTGAGS

SEQ ID NO: 10752 - protein, 216 aa, Microbacterium azadirachtae
  REGION 1..216: note = tr|A0A0F0LGC8|A0A0F0LGC8_9MICO GTP cyclohydrolase 1; OS = Microbacterium azadirachtae OX=582680 GN=folE PE=3 SV=1
MAVDRDRVASLTRELLLAIGEDPERPGLKQTPARMADLYAEFFAGLGEDPGAPLAHTISVSHGPAPDTLPSGAVLLRGIRFRSVCEHHLLPFAGHAHIAYLPGEQVVGLGALVKVVEILASRPQVQERLGEQVADAIASHLDAQGVLVVMDAVHGCVTMRGGRQTEASTLTIAARGVYTDPVARAELIALIGAGARSVADPVAQPAEGHDASGTTA

SEQ ID NO: 10753 - protein, 197 aa, Microbacterium azadirachtae
  REGION 1..197: note = tr|A0A0F0LP36|A0A0F0LP36_9MICO GTP cyclohydrolase 1; OS = Microbacterium azadirachtae OX=582680 GN=folE PE=3 SV=1
MTVDRERVAALTRELLLAIGEDPERPGLKQTPARMADLYAEFFAGVGEDPAAPLAHTISVSHGPAPDTLPSGAVLLRGIRFRSVCEHHLLPFAGHAHIAYLPGEQVVGLGALVKVVEILASRPQVQERLGEQVADAIAAHLDAQGVLVVMDAVHGCVTMRGGRQTEASTLTIAARGVYTDPVARAELIALIGAGTGA

SEQ ID NO: 10754 - protein, 195 aa, Microbacterium chocolatum
  REGION 1..195: note = tr|A0A0M8MQ73|A0A0M8MQ73_9MICO GTP cyclohydrolase 1; OS = Microbacterium chocolatum OX=84292 GN=folE PE=3 SV=1
MAVDRERVSALVRDLLEAIGEDPDRPGLKHTPQRVADAYAEFFGGVGEDPAAPLAHTISVSRGPAPETLPSGAVMLRDILFRSVCEHHLLPFRGHAHIAYLPGEQVVGLGALPKVVDILAARPQVQERLGEQIADVIAAKLDARGVLVVLDAAHECLTMRGERQPDASTVTIAARGALAEPAARAEVVLLLGARP

SEQ ID NO: 10755 - protein, 195 aa, Microbacterium chocolatum
  REGION 1..195: note = tr|A0A3D9T930|A0A3D9T930_9MICO GTP cyclohydrolase 1; OS = Microbacterium chocolatum OX=84292 GN=folE PE=3 SV=1
MAVDRERVAVLVRELLEAIGEDPDRPGLRQTPTRVADSWAEFFGGVNQDAGAPLQHTISVSRGPAPDTLPSGAVMLRDIAFRSMCEHHLLPFRGRAHVAYLPGEEVVGLGALPRVIDILAARPQVQERLGEQVADTIASALDARGVLVVLDAVHECVTMRGGRQLDASTVTIAARGVYGDPVARAELVALIGARA

SEQ ID NO: 10756 - protein, 196 aa, unidentified
  source 1..196: note = Microbacterium enclense
  REGION 1..196: note = tr|A0A3S3LCE1|A0A3S3LCE1_9MICO GTP cyclohydrolase 1; OS = Microbacterium enclense OX=993073 GN=folE PE=3 SV=1
MAVDRERVAALVRELLEAIGEDPDRPGLRQTPARVADSWSEFFGGVGQDAGAPLEHTISVSRGPAPDTLPSGAVMLRDIAFRSMCEHHLLPFRGRAHVAYLPGEEVVGLGALPRVIDILAARPQVQERLGEQVADAIAGALDARGVLVVLDATHECVTMRGGRQPEASTVTIAARGVYTDPVARAELVTLIGRGHS

SEQ ID NO: 10757 - protein, 195 aa, unidentified
  source 1..195: note = Microbacterium enclense
  REGION 1..195: note = tr|A0A1G6GP97|A0A1G6GP97_9MICO GTP cyclohydrolase 1; OS = Microbacterium enclense OX=993073 GN=folE PE=3 SV=1
MAVDRERIAALVRELLEAIGEDPDRPGLRQTPTRVADSWAEFFGGVGQDAGAPLEHTISVSRGPAPDTLPSGAVMVRDIAFRSMCEHHLLPFRGRAHVAYLPGEEVVGLGALPRVIDILAARPQVQERLGEQIADAIASALDARGVLVVLDATHECVTMRGGRQPDASTVTIAARGVYTEPTARAELVALIGARA

SEQ ID NO: 10758 - protein, 217 aa, Microbacterium esteraromaticum
  REGION 1..217: note = tr|A0A1R4KER0|A0A1R4KER0_9MICO GTP cyclohydrolase 1; OS = Microbacterium esteraromaticum OX=57043 GN=folE PE=3; SV = 1
MTMTIVPESDEVVLSPTAPKRTRIEAAPRPVDLDAAERAGRLFLQALGIDADAPETPDLARTPRRFAEAYAELLTPEPFDFTTFSNAEGYDELVLIRDIPVRSLCEHHLLLFTGVAHVAYLPDERVVGLSKIPRMVDHYACRPQTQERLTVQIADALAARLQPRGIGVVIEAAHSCMTLRGARATGANTTTSALRGTLRDDARSRAEFFALAADRTR

SEQ ID NO: 10759 - protein, 217 aa, Microbacterium esteraromaticum
  REGION 1..217: note = tr|A0A2V4P5H3|A0A2V4P5H3_9MICO GTP cyclohydrolase 1; OS = Microbacterium esteraromaticum OX=57043 GN=folE PE=3; SV = 1
MTMTAVDDQRDLALARQAPRRVRIEAAPRPVDLAAAEHAAHLFLAALGIDPDAVDAPDLARTPRRLAEAYAELLSPQPFDFTTFANTEGYDELVLVRDIPVRSMCEHHLLPFTGVAHVAYLPGDRVVGLSKIPRMVDHYARRPQTQERLTVQIADALAARLQPRGIGVVIEAAHSCMTLRGARAAGSVTTTSALRGMLREDARSRAEFFALASDRAH

SEQ ID NO: 10760 - protein, 201 aa, Microbacterium foliorum
  REGION 1..201: note = tr|A0A1S7CWV4|A0A1S7CWV4_9MICO GTP cyclohydrolase 1; OS = Microbacterium foliorum OX=104336 GN=folE PE=3 SV=1
MSVDRARVERLTRELLEAIGEDPDRPGLKQTPTRLGDLYAEFFSGVGEDPAAPLAHTISVARGPAPDTLPSGAVLLRDIRFRSVCEHHLLPFVGRAHIAYLPGEQVVGLGALVRVVEILAGRPQVQERLGEQIADTIAEHLDTRGVLVVLDASHGCVTMRGGRQPEASTLTIAARGEYTEPIARAELIALIGASGSGMAHG

SEQ ID NO: 10761 - protein, 200 aa, Microbacterium foliorum
  REGION 1..200: note = tr|A0A0F0KFP7|A0A0F0KFP7_9MICO GTP cyclohydrolase 1; OS = Microbacterium foliorum OX=104336 GN=folE PE=3 SV=1
MAVDRARVERLTRELLEAIGEDPHRPGLKQTPARMGELYAEFFAGVGEDAAAPLAHTISVARGPAPDTLPSGAVLLRDIRFRSVCEHHLLPFAGRAHIAYLPGEQVVGLGALVRVVETLAARPQVQERLGEQIADTIAENLDTRGVLVVLDASHGCVTMRGGRQPEASTLTIAARGEYTDAVARTELIALIGASTGSAHA

SEQ ID NO: 10762 - protein, 195 aa, Microbacterium ginsengisoli
  REGION 1..195: note = tr|A0A0F0LV36|A0A0F0LV36_9MICO GTP cyclohydrolase 1; OS = Microbacterium ginsengisoli OX=400772 GN=folE PE=3 SV=1
MAVDRARVAALVRELLEAIGENPDRPGLRQTPERVADAYGEFFAGVDADPAAALYRTISISRGPAPDTLPSGAVMLRDIDFRSVCEHHLLPFRGRAHLAYLPGEKVVGLGALPRVVEVLSARPQVQERLGEQIADTIADGLDARGVLVVLDAVHGCVTSRGERQPDASTVTIAARGELAEPAARAELIALIGANR

SEQ ID NO: 10763 - protein, 201 aa, Microbacterium ginsengiterrae
  REGION 1..201: note = tr|A0A3R7H0E2|A0A3R7H0E2_9MICO GTP cyclohydrolase 1; OS = Microbacterium ginsengiterrae OX=546115 GN=folE PE=3; SV = 1
MTVDIERVAALTRELLEAIGEDPERPGLKQTPQRVAELYAEFFAGVGQDAAEPLARTISVSRGPAPETLASGAVILRDIRFRSVCEHHLLPFAGRAHLAYLPGEQVVGLGALVKVVETLAARPQVQERLGEQIADTIDARLDTRGVLVVLDAVHGCVTMRGGRQPEASTLTVAARGAYVEPIARAEIIALIGSATTGDDLS

SEQ ID NO: 10764 - protein, 195 aa, Microbacterium hatanonis
  REGION 1..195: note = tr|A0A5C8HWN6|A0A5C8HWN6_9MICO GTP cyclohydrolase 1; OS = Microbacterium hatanonis OX=404366 GN=folE PE=3 SV=1
MTITTPVRVDRDRAVSAVRELLLAVGEDADRLGLLRTPERVADLFLDLFSGLGVDPASALGAPVALTENEQPGELVGLTGIPFRSVCEHHLLPFEGTVDIYYAPVRHIAGLSRIATLVELAARRPQLQERLGQQIADALMAVLRPHGVAVRIEAAHGCVAHLEPSAASARAITVATVGTIPDATWRLAASTHPAS

SEQ ID NO: 10765 - protein, 216 aa, Microbacterium hatanonis
  REGION 1..216: note = tr|A0A5C8HVQ3|A0A5C8HVQ3_9MICO GTP cyclohydrolase 1; OS = Microbacterium hatanonis OX=404366 GN=folE PE=3 SV=1
MTVDRERVRSLVRELLEAIGEDPERPGLRQTPERVADAYAEFFAGVGEDAAAPLAHTISISRGPAPETVPSGAVMLRGVDFRSICEHHLLPFRGVAHLAYLPGEQVVGLGALSKVVEVLAARPQVQERLGEQIADTIAASLDARGVLVVLDASHECVTMRGAQQKNATTVTIAARGELADPAARAELIALISLRQGQGPVAQAQGSAVQAQGSVTT

SEQ ID NO: 10766 - protein, 196 aa, Microbacterium hominis
  REGION 1..196: note = tr|A0A0B4D5K7|A0A0B4D5K7_9MICO GTP cyclohydrolase 1; OS = Microbacterium hominis OX=162426 GN=folE PE=3 SV=1
MAVDRDRVAAAVRDILVAIGEDPDRPGLKATPQRVADAYAEFFSGVGQDAAEPLAHTISVSRGPAPDTLPSGAVLLRDIRFRSVCEHHLLPFAGRAHIAYLPDEQVVGLGALPKVVEVLAARPQVQERLGEQIADTIAAALDARGVLVVLAARHECVTMRGGRQPDAATITIAARGELAEASARAEIMMLVTGTPA

SEQ ID NO: 10767 - protein, 196 aa, Microbacterium hominis
  REGION 1..196: note = tr|A0A134DEP8|A0A134DEP8_9MICO GTP cyclohydrolase 1; OS = Microbacterium hominis OX=162426 GN=folE PE=3 SV=1
MAVDRDRVAAAVRDILVAIGEDPDRPGLKATPQRVAEAYADFFAGVGEDAGAPLAHTISVSRGPAPDTLPSGAVLLRDIRFRSVCEHHLLPFAGRAHIAYLPGEQVVGLGALPRVVEVLAARPQVQERLGEQIADTIAAALDARGVLVVLGAHHECVTMRGGRQPDAATVTIAARGALADPAARAEIMMLVTGTPT

SEQ ID NO: 10768 - protein, 191 aa, Microbacterium humi
  REGION 1..191: note = tr|A0A1H4ISI3|A0A1H4ISI3_9MICO GTP cyclohydrolase 1; OS = Microbacterium humi OX=640635 GN=folE PE=3 SV=1
MTLSTAVPATLPDLDAAAEHARGFLTALGVDCDAPGLQRSPLRMAKAYLEMLSSDPFSMTTFPNDEDYAELVIVRSIPVRSLCEHHLLPFTGVAHVGYLPGERILGLSKFARVVEEFTHRPQTQERLTRQIVDRLDAALDARGVGAVIEAEHSCMTLRGVRAPGATTRTSAFTGALAEPAGRADFLAALAD

SEQ ID NO: 10769 - protein, 193 aa, Microbacterium humi
  REGION 1..193: note = tr|A0A1H4MP89|A0A1H4MP89_9MICO GTP cyclohydrolase 1; OS = Microbacterium humi OX=640635 GN=folE PE=3 SV=1
MARVDRERIEAATRELIAAIGESVDRPGLEQTPQRVADAYAEFFSGVGEDPLQHLGEGMPLDPSEAGEAVLVRGIAFRSMCEHHLLPFLGTADVAYVPDEKVVGLGRIPRVVGVLAARPQVQERLGEQIAETIETGLGAKGVLVVLDAQHACVTARGTRQAGSTTVTVASRGILRNPLERAELFALLGKGPQS

SEQ ID NO: 10770 - protein, 201 aa, Microbacterium hydrocarbonoxydans
  REGION 1..201: note = tr|A0A1H4QJT9|A0A1H4QJT9_9MICO GTP cyclohydrolase 1; OS = Microbacterium hydrocarbonoxydans OX=273678 GN=folE; PE = 3 SV=1
MAVDRARVERLTRELLEAIGEDPDRPGLKQTPARMGDLYAEFFSGVGEDAGAPLAHTISVTRGPAPDTLASGAVLLRDIRFRSVCEHHLLPFAGRAHIAYLPGEQVVGLGALVRVVEILATRPQVQERLGEQIADTIAEHLDTRGVLVVLDASHGCVTMRGGRQPEASTLTIAARGEYTEPIARAELIALIGASGAGAAHG

SEQ ID NO: 10771 - protein, 211 aa, Microbacterium hydrocarbonoxydans
  REGION 1..211: note = tr|A0A0M2HRP3|A0A0M2HRP3_9MICO GTP cyclohydrolase 1; OS = Microbacterium hydrocarbonoxydans OX=273678 GN=folE; PE = 3 SV=1
MTVAVDRERVERLTHELLEAIGEDPDRPGLKQTPARMAELYSEFFSGVGADAAAPLARTISVTRGPAPDTLPSGAVLLRDILFRSVCEHHLLPFAGHAHIAYLPGEQVVGLGALVKVVEILAARPQVQERLGEQIADTIAEHLDTRGVLVVLDASHGCVTMRGGRQPEASTLTIAARGEYADAAARAELIALIGASAGSATRFSDSGGALS

SEQ ID NO: 10772 - protein, 196 aa, Microbacterium ketosireducens
  REGION 1..196: note = tr|A0A0M2HDH4|A0A0M2HDH4_9MICO GTP cyclohydrolase 1; OS = Microbacterium ketosireducens OX=92835 GN=folE PE=3 SV=1
MAVNRERVAELVRELLEAIGEDPDRPGLRQTPTRVADAYAEFFAGVGEDAAAPLAQTISVSRGPAPETLPSGAVMLRDIRFRSVCEHHLLPFRGLAHIAYLPGEQVVGLGALPKVVDVLAARPQVQERLGEQIADAIAGALDTRGVLVVLDAAHECLTMRGGRQPDATTVTVAARGELAEPAARAEIIALLTGVRP

SEQ ID NO: 10773 - protein, 196 aa, unidentified
  source 1..196: note = Microbacterium kyungheense
  REGION 1..196: note = tr|A0A543F0Z3|A0A543F0Z3_9MICO GTP cyclohydrolase 1; OS = Microbacterium kyungheense OX=1263636 GN=folE PE=3 SV=1
MSTTAQVAALHALPDEEEPDRERAIAAVADLLVALGHDPDAGDLAETPRRVADAFLELLTPEPFEMTTFANEEGYDEPVVVRGIPFVSLCRHHLLPFRGTATVGYLPGDRLVGLSKLARVVGHHARALQVQESLTMQIARTLDDALAPRGVGVVIEAEHLCMSVRGVRADSAVTTTTCFRGELAGDTALQTRFRDA

SEQ ID NO: 10774 - protein, 211 aa, Microbacterium lacticum
  REGION 1..211: note = tr|A0A4Y3UNB3|A0A4Y3UNB3_9MICO GTP cyclohydrolase 1; OS = Microbacterium lacticum OX=33885 GN=folE PE=3 SV=1
MAVDRERVAAAVREILAAIGEDPGRPGLKATPQRVADAYAEFFAGVGEDAAAPLAHTISVSRGPAPDTLPSGAVVLRDIRFRSVCEHHLLPFAGRAHIAYLPGEQVVGLGALPKVVDVLSARPQVQERLGEQIADTIAGALDARGVLVVLSAHHECVTMRGGRQPDAATVTIAARGELAEPAARAEIMLLISVGDGAESAADDSRDGGTGG

SEQ ID NO: 10775 - protein, 196 aa, Microbacterium laevaniformans
  REGION 1..196: note = tr|A0A150HF78|A0A150HF78_9MICO GTP cyclohydrolase 1; OS = Microbacterium laevaniformans OX=36807 GN=folE PE=3 SV=1
MAVDRDRVAAAVRDILVAIGEDPDRPGLKATPQRVADAYADFFSGVGQDAAEPLAHTISVSRGPAPDTLPSGAVLLRDIRFRSVCEHHLLPFAGRAHIAYLPGEQVVGLGALPKVVDVLAARPQVQERLGEQIADTIAAALDARGVLVVLAAHHECVTMRGGRQPDAATITIAARGELAEPSARAEIMMLVTGTPA

SEQ ID NO: 10776 - protein, 194 aa, unidentified
  source 1..194: note = Microbacterium lemovicicum
  REGION 1..194: note = tr|A0A3Q9IYS8|A0A3Q9IYS8_9MICO GTP cyclohydrolase 1; OS = Microbacterium lemovicicum OX=1072463 GN=folE PE=3 SV=1
MAVDRERVVALVRELLVAIGEDPDRPGLRQTPTRVADAYSEFFSGVGEDAAAPLAHTISIARGPFPDTLPSGAVMLRGIRFRSVCEHHLLPFGGHAHIAYLPGEQVVGLGSLPKVVDILASRPQVQERLGEQIADTLAASLDARGVLVVLDAVHECVTMRGGRQSDSSTVTIAARGELAEPAARGEIIALLGRS

SEQ ID NO: 10777 - protein, 202 aa, Microbacterium liquefaciens
  REGION 1..202: note = tr|A0A4Y4BD17|A0A4Y4BD17_MICLQ GTP cyclohydrolase 1; OS = Microbacterium liquefaciens OX=33918 GN=folE PE=3 SV=1
MTVDRQRVERLTRELLEAIGEDPDRPGLKQTPSRMAELYSEFFSGVGEDPAEPLARTISVSRGPAPDTLPSGAVLLRDIRFRSVCEHHLLPFAGHAHIAYLPGEQVVGLGALVRVVEILAARPQVQERLGEQIADTIAEHLDTRGVLVVLDASHGCVTMRGGRQTEASTLTIAARGEYTDAVARAELITLIGASVPLGATAR

SEQ ID NO: 10778 - protein, 198 aa, unidentified
  source 1..198: note = Microbacterium mangrovi
  REGION 1..198: note = tr|A0A0B2AAK9|A0A0B2AAK9_9MICO GTP cyclohydrolase 1; OS = Microbacterium mangrovi OX=1348253 GN=folE PE=3 SV=1
MTSTATLHAVEDDPVDRARAMSAVADLLIALGYDVADEHLADTPRRVVDALIDMTTSHPFVMTTFPNDERYDQPVVVRGIRFTSLCEHHLLPFRGEVDVAYLPGTRLVGLSKLARVVERHARRLQVQERMTVQIADDLEEALDPRGVAVVVRAEHLCMSIRGVRTPGAETRTAAVRGAFQNDPELRFALRTETSGRMP

SEQ ID NO: 10779 - protein, 195 aa, unidentified
  source 1..195: note = Microbacterium mangrovi
  REGION 1..195: note = tr|A0A0B2A4P4|A0A0B2A4P4_9MICO GTP cyclohydrolase 1; OS = Microbacterium mangrovi OX=1348253 GN=folE PE=3 SV=1
MAVDRDRIRVLVRELLIAIGEDPDRPGLRQTPTRVADAYGEFFAGVGEDAAEPLSRTISVTHGPAPDTLPSGAVMLRDIRFRSVCEHHLLPFAGHAHIAYLPGEQVVGLGALPRVVEILANRPQVQERLGEQIADTIAGALDTRGVLVVLDATHECVTMRGGRQVDASTVTIAARGELAEPFARAELIALMGSSR

SEQ ID NO: 10780 - protein, 207 aa, Microbacterium mitrae
  REGION 1..207: note = tr|A0A5C8HNB6|A0A5C8HNB6_9MICO GTP cyclohydrolase 1; OS = Microbacterium mitrae OX=664640 GN=folE PE=3 SV=1
MCLHSPTNRRSDMAVDRARIAELVRELIVAIGEDPDRPGLHGTPERVALTWQEFFSGVGEDESEPLSHTISVSHGPAPETVPSGAVILRDVHFRSMCEHHLLPFLGRAHIAYLPGDDVVGLGALPKVVEILAARPQVQERLGEQIAETIAVKLNARGSLVILDAQHQCVTARGGKQVDASTVTIAARGELAEPAARAEIIALIGRGA

SEQ ID NO: 10781 - protein, 196 aa, Microbacterium oleivorans
  REGION 1..196: note = tr|A0A4R5YM01|A0A4R5YM01_9MICO GTP cyclohydrolase 1; OS = Microbacterium oleivorans OX=273677 GN=folE PE=3 SV=1
MAVDRERVSELVRELLVAIGEDPERPGLKLTPQRVADAYAEFFAGVGEDAAEPLAHTISVSRGPAPDTLPSGAVMLRDIRFRSVCEHHLLPFAGHAHVAYLPGEQVVGLGALPKVIDILAARPQVQERLGEQIADAIAGSIDTRGVLVVLDAVHECVTMRGGRQPSASTVTVAARGRFTEPAERAEAIALLTGGRT

SEQ ID NO: 10782 - protein, 196 aa, Microbacterium oleivorans
  REGION 1..196: note = tr|A0A031FUY5|A0A031FUY5_9MICO GTP cyclohydrolase 1; OS = Microbacterium oleivorans OX=273677 GN=folE PE=3 SV=1
MAVDRKRVSELVRELLEAIGEDPERPGLKLTPQRVADAYAEFFSGVGEDAAAPLAHTISVTRGPAPDTLPSGAVMLRDIRFRSVCEHHLLPFAGYAHVAYLPGEQVVGLGALPKVIDILAARPQVQERLGEQIADTIAGSIDTRGVLVVLDAVHECVTMRGGRQPSASTVTIAARGVFTEPADRAEAIALLTGGRT

SEQ ID NO: 10783 - protein, 201 aa, Microbacterium oxydans
  REGION 1..201: note = tr|A0A3S9WH58|A0A3S9WH58_9MICO GTP cyclohydrolase 1; OS = Microbacterium oxydans OX=82380 GN=folE PE=3 SV=1
MTVDRERVERLTRELLAAIGEDPDRPGLKQTPTRMAELYTEFFSGVGEDAAEPLARTISVSRGPAPDTLPSGAVLLRDIRFRSVCEHHLLPFAGHAHIAYLPGEQVVGLGALVRVVEILAARPQVQERLGEQIADTISEHLDTRGVLVVLDAAHGCVTMRGGRQTEASTLTIAARGEYNDPVSRAELITLIGAGGFGAAHG

SEQ ID NO: 10784 - protein, 238 aa, Microbacterium oxydans
  REGION 1..238: note = tr|A0A0F0LBC1|A0A0F0LBC1_9MICO GTP cyclohydrolase 1; OS = Microbacterium oxydans OX=82380 GN=folE PE=3 SV=1
MAVDRARVERLTRELLEAIGEDPDRPGLKQTPTRMGELYSEFFSGVGADAAEPLARTISVTRGPAPDTLPSGAVLLRDIRFRSVCEHHLLPFAGRAHLAYLPGEQVVGLGALVKVVEILASRPQVQERLGEQIADTIAGHLDTRGVLVVLDASHGCVTMRGGRQPEASTLTIAARGEYTDPVARAELITLIGASTGSATQGGGAATQGAGASTGSATQWVGSATQGVGSAAQGAGAQG

SEQ ID NO: 10785 - protein, 194 aa, Microbacterium paludicola
  REGION 1..194: note = tr|A0A4Y9FVH0|A0A4Y9FVH0_9MICO GTP cyclohydrolase 1; OS = Microbacterium paludicola OX=300019 GN=folE PE=3 SV=1
MPVDRERVAALTRELLVAIGEDPDRPGLRQTPERVADAYTEFFAGVGGDPAEPLSHTISVAHGPAPDTLPSGAVMLRDVRFRSICEHHLLPFAGHAHIAYLPGEQVVGLGALPKVVEVLAARPQVQERLGEQIADTIASSLDARGVLVVLEASHQCVTMRGARQSDSSTVTIAARGELAEPAARAEIIALLGRS

SEQ ID NO: 10786 - protein, 203 aa, Microbacterium paraoxydans
  REGION 1..203: note = tr|A0A1H1UQJ3|A0A1H1UQJ3_9MICO GTP cyclohydrolase 1; OS = Microbacterium paraoxydans OX=199592 GN=folE PE=3 SV=1
MTVDKGRVERLTRELLEAIGEDPDRPGIKQTPSRMAELYAEFFAGVGEDPAEPLAHTISVTRGPAPDTLPSGAVLLRDIRFRSVCEHHLLPFAGHAHIAYLPGEQVVGLGALVRVVEILAARPQVQERLGEQIADTIAENLDARGVLVVLDASHGCVTMRGGRQTEASTLTIAARGVYTDPVARAELVTLIGMTVPGAGTSRA

SEQ ID NO: 10787 - protein, 200 aa, Microbacterium pygmaeum
  REGION 1..200: note = tr|A0A1G7U577|A0A1G7U577_9MICO GTP cyclohydrolase 1; OS = Microbacterium pygmaeum OX=370764 GN=folE PE=3 SV=1
MPVDRDRVAALVRELLAAIGEDPERPGLKLTPQRVADAYAEFFSGVGTDAAAPLAHTISVSRGPAPDTLPSGAVMLRDIRFRSVCEHHLLPFRGHAHIAYLPGEQVVGLGALPKVVDILAARPQVQERLGEQIADTIAGSLDTRGVLVVLEASHECVTMRGDQQSEASTVTIAARGELAEPAARAELIALLGASRTLGNG

SEQ ID NO: 10788 - protein, 196 aa, unidentified
  source 1..196: note = Microbacterium saccharophilum
  REGION 1..196: note = tr|A0A5C8I9A5|A0A5C8I9A5_9MICO GTP cyclohydrolase 1; OS = Microbacterium saccharophilum OX=1213358 GN=folE PE=3; SV = 1
MAVDRDRVAALVRELLEAIGEDPDRPGLKLTPQRVADAYAEFFAGVGEDAAAPLAHTISVTRGPAPDTLPSGAVMLRDVRFRSVCEHHLLPFAGHAHIAYLPGEQVVGLGALPRVVDVLSARPQVQERLGEQIADVIAASLDTRGVLVILDAVHECVTMRGGRQPDASTVTIAARGELAEPAARAEVIALLAGGAA

SEQ ID NO: 10789 - protein, 207 aa, Microbacterium saperdae
  REGION 1..207: note = tr|A0A543BC76|A0A543BC76_9MICO GTP cyclohydrolase 1; OS = Microbacterium saperdae OX=69368 GN=folE PE=3 SV=1
MTVAVDRGRVERLTRELLEAIGEDPDRPGLKQTPSRMAELYSEFFSGVGEDAAEPLARTISVTRGPAPDTLPSGAVLLRDIRFRSVCEHHLLPFAGRAHLAYLPGEQVVGLGALVRVVEILASRPQVQERLGEQIADTIAEHLDTRGVLVVLDASHGCVTMRGGRQPEASTLTIAARGDYTDPIARAELIALIGASTAAAAHARQPE

SEQ ID NO: 10790 - protein, 195 aa, unidentified
  source 1..195: note = Microbacterium sediminis
  REGION 1..195: note = tr|A0A1B9NHN3|A0A1B9NHN3_9MICO GTP cyclohydrolase 1; OS = Microbacterium sediminis OX=904291 GN=folE PE=3 SV=1
MTVDRERVAELTRELLLAIGEDPDRPGLRQTPDRVADMLAEFFSGVGEDPAAPLAHPISVAQGPAPETLPTGAVIVRDIRFRSICEHHLLPSTGRAHVAYLPGERVVGLGALPRVVEILANRPQVQERLGEQIADTLFHSLDARGVVVVLDAVHQCVTMRGGRQPDSSTVTVAARGELADPAARAEIIALIGGAS

SEQ ID NO: 10791 - protein, 207 aa, unidentified
  source 1..207: note = Microbacterium sorbitolivorans
  REGION 1..207: note = tr|A0A367Y6A9|A0A367Y6A9_9MICO GTP cyclohydrolase 1; OS = Microbacterium sorbitolivorans OX=1867410 GN=folE PE=3; SV = 1
MPQSQRADIALLDPEPVHVDGTATHDLARAELAATDFLEALGVSLDSEHLRATPGRMARAWAEMLTPRPFELTTFPNEEGYDELVTVRDVPVQSICEHHLLPFTGRATVGYLPGERIVGLSKLARIVEHFARRPQTQERLTRQVADWLQENLSPLAVGVVITAEHSCMSLRGAHVAGSNTVTSSLLGRLRTDPHSRREFLALSGVTA

SEQ ID NO: 10792 - protein, 208 aa, unidentified
  source 1..208: note = Microbacterium sorbitolivorans
  REGION 1..208: note = tr|A0A367XTJ7|A0A367XTJ7_9MICO GTP cyclohydrolase 1; OS = Microbacterium sorbitolivorans OX=1867410 GN=folE PE=3; SV = 1
MAVDTTRIAELTRELLVAIGEDPDRAGLRETPERVAGAMAELFAGIGQDPEEPLRRTIDVSRGPAPETVPTGAVLVRDITFRSVCEHHLLPFQGRAHIAYLPADAVVGLGSLARVLDICSARPQVQERLGEQVADAIEHALDARGVFVMLDAEHQCLRTRGEKRPDASTVTVAARGDLATQAARAEMAAYIIIGEQNKATTGVKGRDA

SEQ ID NO: 10793 - protein, 204 aa, Microbacterium sp.
  REGION 1..204: note = tr|A0A542FSU5|A0A542FSU5_9MICO GTP cyclohydrolase 1; OS = Microbacterium sp. SLBN-146 OX=637392 GN=folE PE=3 SV=1
MAVDRERVAALVRELLEAIGEDPARPGLRMTPERVADAYSEFFSGVGVDAAAPLAHTISVSRGPAPDTLPSGAVVLRGIRFRSVCEHHLLPFRGRAHIAYLPGEQVVGLGALPKVVDVLASRPQVQERLGEQVADTIASSLDARGVLVVLEATHECVTMRGDQQSDSSTVTIAARGELAEPAARAEIIALLVAARPAFDTGDGR

SEQ ID NO: 10794 - protein, 217 aa, Microbacterium sp.
  REGION 1..217: note = tr|A0A0U4GS70|A0A0U4GS70_9MICO GTP cyclohydrolase 1; OS = Microbacterium sp. XT11 OX=367477 GN=folE PE=3 SV=1
MSLAYAEEPAAPLDERAVVDRLRISAGHRTIDVAAAEHAARAFLRALGVEVDVLDASDLARTPHRLAAAYAELLTPEPFDFTTFANAEGYDELVLVRDIPVRSVCEHHLLPFTGVAHLAYLPADRVVGLSKLPRLVDHHARRPQTQERLTVQVADALDRHLRPRGVGVVIEAAHSCMTLRGARAGTATTTTSAVRGALRDEARSRAEFFALAGGRAH

SEQ ID NO: 10795 - protein, 199 aa, unidentified
  source 1..199: note = Microbacterium telephonicum
  REGION 1..199: note = tr|A0A498CA73|A0A498CA73_9MICO GTP cyclohydrolase 1; OS = Microbacterium telephonicum OX=1714841 GN=folE PE=3 SV=1
MAIDRDRVAAAVRELLEAIGEDPDRPGLKTTPTRVADLYAEFFAGVGQDAAAPLAHTISVTRGPAPETLPSGAVMLRDIRFRSVCEHHLLPFAGRAHIAYLPGEEVVGLGALPRVVDVLAARPQVQERLGEQIADMIAGSLDTRGVLVVLDAAHQCVTMRGGRQPDTSTVTIAARGALAEPAGRAEIIALLTSAHGGAA

SEQ ID NO: 10796 - protein, 195 aa, Microbacterium testaceum
  REGION 1..195: note = tr|A0A147EZK0|A0A147EZK0_MICTE GTP cyclohydrolase 1; OS = Microbacterium testaceum OX=2033 GN=folE PE=3 SV=1
MAVDRERVAALVREMLEAIGEDPDRPGLRQTPTRVAESWSEFFGGVGQDAAAPLQHTISVTRGPAPDTLPSGAVMLRDIAFRSMCEHHLLPFRGRAHVAYLPGEEVVGLGALPRVIDILAARPQVQERLGEQVADTVASALDARGVLVVLDAVHECVTMRGGRQLDASTVTIAARGVYTDAAARSELVALIGARA

SEQ ID NO: 10797 - protein, 195 aa, Microbacterium testaceum
  REGION 1..195: note = tr|A0A4Y3QJA3|A0A4Y3QJA3_MICTE GTP cyclohydrolase 1; OS = Microbacterium testaceum OX=2033 GN=folE PE=3 SV=1
MAVDRERVAVLVRELLEAIGEDPDRPGLRQTPTRVADSWAEFFGGVNQDAGAPLQHTISVSRGPAPDTLPSGAVMLRDIAFRSMCEHHLLPFRGRAHVAYLPGEEVVGLGALPRVIDILAARPQVQERLGEQVADAIASALDARGVLVVLDAVHECVTMRGGRQLDASTVTIAARGVYGDPAARAELVALIGARA

SEQ ID NO: 10798 - protein, 199 aa, Microbacterium trichothecenolyticum
  REGION 1..199: note = tr|A0A0M2HEN0|A0A0M2HEN0_9MICO GTP cyclohydrolase 1; OS = Microbacterium trichothecenolyticum OX=69370 GN=folE_2; PE = 3 SV=1
MSTPAHATALHALPDEAPIDRDAAMLAVGDLLAALGFDPDEGDLVETPRRVADAFIEMITPEPFEMTTFANEDAYDEPVVVRGIPFVSLCRHHLLPFRGTATVGYVPGDRLVGLSKLARVVAHHSRGLQVQEALTVQIARTLDNALEPRGVGVVVEAEHLCMSARGVRTDAALTTTTAFRGVLAADPAMQARFVGTRPV

SEQ ID NO: 10799 - protein, 196 aa, Microbacterium trichothecenolyticum
  REGION 1..196: note = tr|A0A0M2HLH1|A0A0M2HLH1_9MICO GTP cyclohydrolase 1; OS = Microbacterium trichothecenolyticum OX=69370 GN=folE_1; PE = 3 SV=1
MAVDRERVAVLVRELLEAIGEDPERPGLKQTPERVADAYTEFFAGVGTDAAAPLAHTISVSRGPAPDTLPSGAVILRDIIFRSVCEHHLLPFRGHAHLAYLPGEQVVGLGALPKVVDILSSRPQVQERLGEQIADVIAGSLDARGVLVVLDASHECVTMRGGRQPDASTVTIAARGELAEPAARAELIALIGAGRG

SEQ ID NO: 10800 - protein, 193 aa, unidentified
  source 1..193: note = Microbispora bryophytorum
  REGION 1..193: note = tr|A0A544X859|A0A544X859_9ACTN GTP cyclohydrolase 1; OS = Microbispora bryophytorum OX=1460882 GN=folE PE=3 SV=1
MGPPPGFDHDRIQKAVREILFAIGEDPDRDGLRDTPSRVARAFAEQFAGLGQRPEDALTTMFDADHDEMVLVKDIEVMSTCEHHLLPFHGVAHIGYTPNDKGRITGLSKLARLVDVYARRPQVQERMTSQIADGLMQVLEPRGVIVVIEAEHMCMTMRGVRKPGAKTITSAVRGDFRSSEATRAEAMSLILRG

SEQ ID NO: 10801 - protein, 196 aa, unidentified
  source 1..196: note = Microbispora bryophytorum
  REGION 1..196: note = tr|A0A544XPG3|A0A544XPG3_9ACTN GTP cyclohydrolase 1; OS = Microbispora bryophytorum OX=1460882 GN=folE PE=3 SV=1
MRSLRVIAEPRDGVDLAAAERAAGQFLEALGISTDSESLRETPARMAKAYAELFTPRPFDLTTFPNEEGYDELVLARAIPVRSVCEHHLLPFAGVAHVGYLPGDRILGLSKLARVVEHFARRPQVQERLTKQVADWLADRLRPAGVGVVIEAEHTCMTLRGVRAVGSTTVTSTLLGILRKDARSRQEFFALTGTRT

SEQ ID NO: 10802 - protein, 194 aa, unidentified
  source 1..194: note = Microbispora hainanensis
  REGION 1..194: note = tr|A0A544YNJ7|A0A544YNJ7_9ACTN GTP cyclohydrolase 1; OS = Microbispora hainanensis OX=568844 GN=folE PE=3 SV=1
MVGPPPGFDHDRIEKAVREILFAIGEDPDRDGLRDTPARVARAFAEQFAGLGQRPEDALTTMFDADHDEMVLVKDIEVMSTCEHHLLPFHGVAHIGYTPNEKGRITGLSKLARLVDVYARRPQVQERMTSQIADGLMQVLEPRGVIVVIEAEHMCMTMRGVRKPGAKTITSAVRGDFRSSEATRAEAMSLILRG

SEQ ID NO: 10803 - protein, 199 aa, unidentified
  source 1..199: note = Microbispora hainanensis
  REGION 1..199: note = tr|A0A544Y819|A0A544Y819_9ACTN GTP cyclohydrolase 1; OS = Microbispora hainanensis OX=568844 GN=folE PE=3 SV=1
MRSGTALRVIDEQRDGVDLAAAERAAGEFLEALGISTDSESLRDTPARMARAYAELFTPRPFDLTTFPNEEGYDELVLARSIPVRSVCEHHLLPFAGVAHVGYLPGDRILGLSKLARVVEHFARRPQVQERLTKQVADWLAERLRPRGVGVVIEAEHTCMTLRGVRAVGSTTVTSTLLGILREDARSRQEFFALTGTRP

SEQ ID NO: 10804 - protein, 199 aa, Microbispora rosea
  REGION 1..199: note = tr|A0A1N6WP14|A0A1N6WP14_9ACTN GTP cyclohydrolase 1; OS = Microbispora rosea OX=58117 GN=folE PE=3 SV=1
MRPGTTLRMIDEPRDGVDLAAAERAAREFLEALGVSADSESLRETPARMARAYAELFTPRPFDLTTFPNEEGYDELVLARSIPVRSVCEHHLLPFAGVAHVGYLPGDRILGLSKLARVVEHFARRPQVQERLTKQVADWLADRLRPAGVGVVIEAEHTCMTLRGVRAVGSTTVTSTLLGILREDARSRQEFFALTGTRP

SEQ ID NO: 10805 - protein, 264 aa, Microbispora rosea
  REGION 1..264: note = tr|A0A1N7HHY4|A0A1N7HHY4_9ACTN GTP cyclohydrolase FolE2 OS=Microbispora rosea OX=58117 GN=folE2 PE=3 SV=1
MLEDVQASPDTRGISLDEVGIEGLRYPVLVADGQGAKRETVATASMSVSLGPEVKGAHLSRFIEVLHNAREQLTPHSAAGLADDLRQHMGSPSARVHLTFPYFLEREAPVTRARAYVEYSCAVAAVSRGNGTAVTLSVEVPVTSVCPCSKAISDRGAHNQRGHITIDIKPADHPTDLWFDELISLAEGAASSPVYALLKRPDERHVTMAGYDNPVFVEDMVRNVCLALDVADRVASYRVRAVNDESIHNHAAYAAVSWTSPRGA

SEQ ID NO: 10806 - protein, 198 aa, Microbispora sp.
  REGION 1..198: note = tr|A0A544XPL0|A0A544XPL0_9ACTN GTP cyclohydrolase 1; OS = Microbispora sp. SCL1-1 OX=2592812 GN=folE PE=3 SV=1
MAEPMAGPPSGFDHDRIEKAVREILFAIGEDPDRDGLRDTPARVARAFAEQFAGLGQRPEDALTTMFDADHDEMVLVKDIEVMSTCEHHLLPFHGVAHIGYTPNEKGRITGLSKLARLVDVYARRPQVQERMTSQIADGLMQVLEPRGVIVVIEAEHMCMTMRGVRKPGAKTITSAVRGDFRSSEATRAEAMSLILRG

SEQ ID NO: 10807 - protein, 201 aa, Microbispora sp.
  REGION 1..201: note = tr|A0A5J5JVX4|A0A5J5JVX4_9ACTN GTP cyclohydrolase I FolE OS=Microbispora sp. Gxj-6 OX=2614688 GN=folE PE=4 SV=1
MTVAEPHAAGTPSGFDHGRIEKAVREILLAIGENPDRDGLRDTPARVARAYAEQFAGLGQRPEDALTTMFDADHDEMVLVKDIEVMSTCEHHLLPFQGVAHIGYTPNEKGRITGLSKLARLVDVYARRPQVQERMTSQIADGLMQVLEPRGVIVVIEAEHMCMTMRGVRKPGAKTITSAVRGDFRTSEATRAEAMSLILRG

SEQ ID NO: 10808 - protein, 201 aa, unidentified
  source 1..201: note = Microbispora tritici
  REGION 1..201: note = tr|A0A5D0NNL9|A0A5D0NNL9_9ACTN GTP cyclohydrolase 1; OS = Microbispora tritici OX=2604471 GN=folE PE=3 SV=1
MTVAEPHAAEPPSGFDHGRIEKAVREILIAIGENPDRDGLRDTPARVARAYAEQFAGLGQRPEDALTTMFDADHDEMVLVKDIEVMSTCEHHLLPFHGVAHIGYTPNEKGRITGLSKLARLVDVYARRPQVQERMTSQIADGLMQVLEPRGVIVVIEAEHMCMTMRGVRKPGAKTITSAVRGDFRTSEATRAEAMSLILRG

SEQ ID NO: 10809 - protein, 214 aa, unidentified
  source 1..214: note = Microbispora triticiradicis
  REGION 1..214: note = tr|A0A372PD54|A0A372PD54_9ACTN GTP cyclohydrolase 1; OS = Microbispora triticiradicis OX=2200763 GN=folE PE=3 SV=1
MTNAVYGSTPGQSAAVPAQPGPAAPRPVDTKRVTELIGQLLVALGEDPEREGLVDTPARVASWWSSFLTPEPCAMVTSFTETRLSAQLVVVGGMSVWSLCEHHLLPMNLEVAIGYLPDGEVIGLSKFGRIAQRYAGRLQVQERFTRQVAEEIAGVVASKDVAVAVRGTHLCMSMRGVRMEAARTTTLQVGGLFKHDPVLSQQFLTIASGQRGAV

SEQ ID NO: 10810 - protein, 201 aa, unidentified; identical to SEQ ID NO: 10808
  source 1..201: note = Microbispora triticiradicis
  REGION 1..201: note = tr|A0A372P887|A0A372P887_9ACTN GTP cyclohydrolase 1; OS = Microbispora triticiradicis OX=2200763 GN=folE PE=3 SV=1

SEQ ID NO: 10811 - protein, 179 aa, Microbulbifer agarilyticus
  REGION 1..179: note = tr|A0A1Q2M654|A0A1Q2M654_9GAMM GTP cyclohydrolase 1; OS = Microbulbifer agarilyticus OX=260552 GN=folE PE=3 SV=1
MKEHYAHIIEAIGEDLQRPGLLDTPKRAAKAMQYLTRGYQQTVEEVVNDALFPSDCSEMVLVKDIELYSMCEHHLLPFIGKAHVAYIPDGKVLGLSKVARIVDMFARRLQIQEQLTVQIAETVRQVTGAAGVGVIVEAKHMCMMMRGVEKQNSVMKTSAMLGSFRSEQATRNEFLSLIR

SEQ ID NO: 10812 - protein, 105 aa, unidentified
  source 1..105: note = Microbulbifer aggregans
  REGION 1..105: note = tr|A0A1C9W8H1|A0A1C9W8H1_9GAMM GTP cyclohydrolase 1 type 2 OS=Microbulbifer aggregans OX=1769779; GN = AUP74_02010 PE=4 SV=1
MYKLCVYIPESHLEEVKQALFGTGAGRIGDYDSCCFQVPGTGQFRPLEGSQPFIGQTGEVERVSEYRVEMVCADHLVDAALAAMREAHPYEEPAFDLWKLDDRCN

SEQ ID NO: 10813 - protein, 179 aa, unidentified
  source 1..179: note = Microbulbifer aggregans
  REGION 1..179: note = tr|A0A1C9WBT4|A0A1C9WBT4_9GAMM GTP cyclohydrolase 1; OS = Microbulbifer aggregans OX=1769779 GN=folE PE=3 SV=1
MKEHYARIIEAIGEDLQRPGLKDTPERAAKAMAYLTRGYEQTVEEVVNEALFPSDCSEMVLVKDIELYSLCEHHMLPFIGKAHVAYIPDGKVLGLSKIARIVDMFARRLQIQEQLTVQVAETIQRVTGAAGVGVIIEAKHMCMMMRGVEKQNSVMKTSAMLGSFRSQQATRTEFLSLIR

SEQ ID NO: 10814 - protein, 179 aa, Microbulbifer donghaiensis
  REGION 1..179: note = tr|A0A1M4XAS9|A0A1M4XAS9_9GAMM GTP cyclohydrolase 1; OS = Microbulbifer donghaiensis OX=494016 GN=folE PE=3 SV=1
MNEHYARIIEAIGENPQRPGLKDTPKRAAKAMQYLTRGYQQTVEEIVNDALFPSDCSEMVLVKDIELYSLCEHHLLPFIGKAHVAYIPDGKVVGLSKVARIVDMFARRLQIQEQLTVEIAETLQRVTNAAGVGVIIEAKHMCMMMRGVEKQNSVMKTSAMLGTFRSNQATRNEFLSLIR

SEQ ID NO: 10815 - protein, 180 aa, Microbulbifer marinus
  REGION 1..180: note = tr|A0A1H3WTP3|A0A1H3WTP3_9GAMM GTP cyclohydrolase 1; OS = Microbulbifer marinus OX=658218 GN=folE PE=3 SV=1
MNEHYARIIEAIGEDPQRPGLKDTPKRAAKAMQYLTRGYQQTVEEIVNDALFPSDCSEMVLVKDIELYSLCEHHLLPFIGKAHVAYIPDGKVVGLSKVARIVDMFARRLQIQEQLTVEIAETLQRVTNAAGVGVIIEAKHMCMMMRGVEKQNSVMKTSAMLGTFRSNQATRNEFLSLISQ

SEQ ID NO: 10816 - protein, 301 aa, Microbulbifer sp.
  REGION 1..301: note = tr|A0A0X3U9L6|A0A0X3U9L6_9GAMM GTP cyclohydrolase FolE2 OS=Microbulbifer sp. ZGT114 OX=1685377 GN=folE2 PE=3; SV = 1
MQYSGSLPDIAKTQIETGTYPLQWVGMEGIAAPINIATAKDQQQVVAAKANVYVSLDDAAEKGIHMSRLHAILNELSTTACDKDGLGKVLKKMVNSQAGISQGARIELAFDLLLPKPSLLSNETGYQTYPIEICGQLQSGQYDYELKLSVPYSSTCPCSAALSRQLLANAIDSAFATSSIDKQTLLTWVQAHSIATPHSQRSYAYLNLSLGDNPLPFLPPLIFGIEEAIGTPVQTMVKRSDEQEFARLNADNLMFCEDAARRIKAMLEQSTWIKDYWFKVEHQESLHAHDAVVIDRKFPAR

SEQ ID NO: 10817 - protein, 197 aa, Microbulbifer sp.
  REGION 1..197: note = tr|A0A510J0R4|A0A510J0R4_9GAMM GTP cyclohydrolase 1; OS = Microbulbifer sp. GL-2 OX=2591606 GN=folE2_2 PE=3 SV=1
MEVGFIRSLLEGVGVNDMKEHYARIIEEIGEDPQRPGLKSTPRRAAKAMKYLTSGYDQTVEDVVNNAIFPFDSSEMVLVKDIELYSLCEHHLLPFIGYSHVAYIPNGKILGISKLARIVDMFARRLQIQERLTTQIAETLQGIIGATGVGVVIEAKHTCMMMRGPQKQNSMMRTLAMLGTFRSNQATRNEFFSLLRQ

SEQ ID NO: 10818 - protein, 300 aa, Microbulbifer thermotolerans
  REGION 1..300: note = tr|A0A143HPU5|A0A143HPU5_9GAMM GTP cyclohydrolase FolE2 OS=Microbulbifer thermotolerans OX=252514 GN=folE2; PE = 3 SV=1
MHVLTTLPDIAKSQTESGNYPLQWVGMEGIAVPLSISIGNNQHQTVAAKANAYVSLDNAAEKGIHMSRLHTVLNHLSSTNCDKNALDTALERMIESQEGLSQSAKIELNFDLVLTKSSLLSQEAGFQSYPVKIIGERISGNSRYEIGLTVPYSSTCPCSAALSRQLLATAIDREFSASNIDKQSLLMWLQEKSIATPHSQRSYAYLNLKLGDNSWLPLSSFISQIEEAIGTPVQTMVKRTDEQEFARLNADNLMFCEDAARKIKTLLEQSTWITDYWFKVEHRESLHAHNAVVIDQKSPN

SEQ ID NO: 10819 - protein, 179 aa, Microbulbifer thermotolerans
  REGION 1..179: note = tr|A0A143HKX6|A0A143HKX6_9GAMM GTP cyclohydrolase 1; OS = Microbulbifer thermotolerans OX=252514 GN=folE PE=3 SV=1
MNEHYARIIEAIGEDPQRHGLRDTPERAAKAMEYLTRGYRQSVEEVVNGALFPSDCSEMVLVKDIELYSLCEHHLLPFIGKAHVAYIPDGKVLGLSKVARIVDMYARRLQIQEQLTVQIAETLRQVTGAAGVGVIIEAKHMCMMMRGVEKQNSVMKTSAMLGAFRSNQATRNEFLSLIR

SEQ ID NO: 10820 - protein, 179 aa, Microbulbifer yueqingensis
  REGION 1..179: note = tr|A0A1G8V7Q6|A0A1G8V7Q6_9GAMM GTP cyclohydrolase 1; OS = Microbulbifer yueqingensis OX=658219 GN=folE PE=3 SV=1
MNEHYAQIIEAIGEDPQRPGLRDTPKRAAKAMQYLTQGYQQSLDEIVNDAIFPSDCSEMVLVKDIELYSLCEHHLLPFIGKAHVAYIPNGKVLGLSKVARIVDMFARRLQIQEQLTVEIAETLQDVTGAAGVGVIIEAKHMCMMMRGVEKQNSVMKTSAMLGSFRSQQATRTEFLSLIR

SEQ ID NO: 10821 - protein, 194 aa, Microcella alkaliphila
  REGION 1..194: note = tr|A0A4Q7TJM1|A0A4Q7TJM1_9MICO GTP cyclohydrolase 1; OS = Microcella alkaliphila OX=279828 GN=folE PE=3 SV=1
MSPIDTARIEAAVAEIIAAIGDDPARPGLATTPKRVAASYADFFAGVGVDPVPMLEDSAEMATDPGERGELVVVRDIALRSMCEHHLLPFTGIAHVAYVPDERIIGLGRIPALIEIVSARPQLQERLGEDVAAALDAAVRPHGVLVVVDARHGCVAARGVRYADSSTVTVAARGTLAAPDQQAAVMALIGRGAA

SEQ ID NO: 10822 - protein, 194 aa, Microcella alkaliphila
  REGION 1..194: note = tr|A0A0U5BPM3|A0A0U5BPM3_9MICO GTP cyclohydrolase 1; OS = Microcella alkaliphila OX=279828 GN=folE PE=3 SV=1
MSPIDTARIEAAVAEIIAAIGDDPARPGLATTPQRVAASYADFFAGVGVDPVPMLEDSAEMATDPGERGELVVLRDIALRSMCEHHLLPFTGIAHVAYVPDERIIGLGRIPALIEIVSARPQLQERLGEDVAAALDAAVRPHGVLVVVDARHGCVAARGVRYADSSTVTVAARGTLAAPDQQAAVMALIGRGAA

SEQ ID NO: 10823 - protein, 194 aa, Microcella putealis
  REGION 1..194: note = tr|A0A4Q7LKW9|A0A4Q7LKW9_9MICO GTP cyclohydrolase 1; OS = Microcella putealis OX=337005 GN=folE PE=3 SV=1
MSPIDTARIEAAVAEIIAAIGDDPARPGLATTPQRVASAYADFFAGVGVDPVPMLEDGAEMATEPGERGELVVLRDIALRSMCEHHLLPFTGVAHVAYVPNERIIGLGRIPALVEVVSARPQLQERLGEDVAAALDAAVRPHGVLVVVDARHGCVAARGVRYADSSTVTVAARGTLAEPEQQAAVMALIGRGAA

SEQ ID NO: 10824 - protein, 194 aa, Microcella sp.
  REGION 1..194: note = tr|A0A2I0BN03|A0A2I0BN03_9MICO GTP cyclohydrolase 1; OS = Microcella sp. HL-107 OX=2035245 GN=folE PE=3 SV=1
MPPIDSRRIEAAVAELLAAIGDDTTRPGLSTTPQRVAESYAEFFAGVGVDPAPLLHDDVELQTDPGERGEIVLLRDIALRSMCEHHLLPFTGVAHVAYLPAERLTGLGSITRVVETVASRPQLQERLGEQIAATLDEGLAPHGVLVVLDARHGCVAARGTRQVDSTTVTVASRGALADPVRRAEVMALIGRGSA

SEQ ID NO: 10825 - protein, 206 aa, unidentified
  source 1..206: note = Micrococcaceae bacterium
  REGION 1..206: note = tr|A0A2A9K1E6|A0A2A9K1E6_9MICC GTP cyclohydrolase 1; OS = Micrococcaceae bacterium JKS001869 OX=1938872 GN=folE; PE = 3 SV=1
MTAHTPDDAVPGTFDPDSTAVDRPRIEAAVREILLAIGEDPDREGLTDTPARVAKAYAEFFAGLHQSPDQVLGTTFDIAHEELVLVKDIPFYSTCEHHLVPFHGAAHIGYIPSAEGRVTGLSKLARLVELYARRPQVQERLTTQVVEALMEHLAPRGAIVVVEAEHMCMSMRGVRKPGAKTVTSAVRGQLRDPSTRSEAMSLIMHG

SEQ ID NO: 10826 - protein, 192 aa, unidentified; identical to SEQ ID NO: 8648
  source 1..192: note = Micrococcaceae bacterium
  REGION 1..192: note = tr|A0A358IMR1|A0A358IMR1_9MICC GTP cyclohydrolase 1; OS = Micrococcaceae bacterium OX=1904863 GN=folE PE=3 SV=1

SEQ ID NO: 10827 - protein, 201 aa, unidentified
  source 1..201: note = Micrococcales bacterium
  REGION 1..201: note = tr|A0A1Q4A1J4|A0A1Q4A1J4_9MICO GTP cyclohydrolase 1; OS = Micrococcales bacterium 72-143 OX=1895790 GN=folE PE=3; SV = 1
MPIDSERIEAAVVELLRAIGEDPHRPGLAQTPARIAASYAELFAGLDEDPLVHLAESAAFAGEDSAGELVLVRDIAFRSTCEHHLLPFSGVAHVAYAPGERLVGLGKLARVVETLSSRPQLQERLGDQIADALERGLAPRGVLVVLDSRQECVTARGPRQAHSTTVTVASRGTLAEPAAQAGVLALVGAGAGTPASGAEAP

SEQ ID NO: 10828 - protein, 207 aa, unidentified
  source 1..207: note = Micrococcales bacterium
  REGION 1..207: note = tr|A0A2G6JUV0|A0A2G6JUV0_9MICO GTP cyclohydrolase 1; OS = Micrococcales bacterium OX=2026762 GN=folE PE=3 SV=1
MPEKRSAPARRDGGSLSGSAVDQPRIVAAVREILTAIGEDPDREGLRETPERVARAYAEMFGGMGQTAEDALTTSFDLGHDELILVKDIEVYSVCEHHLVPFHGVAHVGYLPGKDGRITGLSKLARLVDVYARRPQVQERLTSQVADSLDELLHPRGVIVVVDCEHLCMSMRGARKPGSRTVTSAMRGVLRRSAATRAEALSLIHGH

SEQ ID NO: 10829 - protein, 206 aa, unidentified
  source 1..206: note = Micrococcus aloeverae
  REGION 1..206: note = tr|A0A5F0I5R7|A0A5F0I5R7_9MICC GTP cyclohydrolase 1; OS = Micrococcus aloeverae OX=1391911 GN=folE PE=3 SV=1
MTAHTPDDAVPGTFDPDSTAVDRPRIEAAVREILLAIGEDPDREGLADTPARVAKAYAEFFAGLHQSPDQVLGTTFDIAHEELVLVKDIPFYSTCEHHLVPFHGTAHIGYIPSAEGRVTGLSKLARLVELYARRPQVQERLTTQVVEALMEHLAPRGAIVVVEAEHMCMSMRGVRKPGAKTVTSAVRGQLRDPSTRSEAMSLIMHG

SEQ ID NO: 10830 - protein, 206 aa, unidentified
  source 1..206: note = Micrococcus aloeverae
  REGION 1..206: note = tr|A0A5F0UM19|A0A5F0UM19_9MICC GTP cyclohydrolase 1; OS = Micrococcus aloeverae OX=1391911 GN=folE PE=3 SV=1
MTAHTPDDAVPGTFDPDSTAVDRPRIEAAVREILLAIGEDPDREGLADTPARVAKAYAEFFAGLHQSPDQVLGTTFDIAHEELVLVKDIPFYSTCEHHLVPFHGAAHIGYIPSAEGRVTGLSKLARLVELYARRPQVQERLTTQVVEALMEHLAPRGAIVVVEAEHMCMSMRGVRKPGAKTVTSAVRGQLRDPSTRSEAMSLIMHG

SEQ ID NO: 10831 - protein, 197 aa, Micrococcus endophyticus
  REGION 1..197: note = tr|A0A4Y8ZDX5|A0A4Y8ZDX5_9MICC GTP cyclohydrolase 1; OS = Micrococcus endophyticus OX=455343 GN=folE PE=3 SV=1
MPGTFDPDSTAIDRPRIEAAVREILLAIGEDPDREGLQDTPKRVAKAYAEFFAGLHQGPEQVLGTTFDIAHEELVLVKDIPFYSTCEHHLVPFHGTAHIGYIPSAEGRVTGLSKLARLVELYARRPQVQERLTTQVVEALMEHLAPRGAIVVVEAEHMCMSMRGVRKPGAKTVTSAVRGQLRDPSTRSEAMSLIMQG

SEQ ID NO: 10832 - protein, 212 aa, Micrococcus flavus
  REGION 1..212: note = tr|A0A4Y8WYL0|A0A4Y8WYL0_9MICC GTP cyclohydrolase 1; OS = Micrococcus flavus OX=384602 GN=folE PE=3 SV=1
MTEHLQDDDAPQPRGVPGTFDPVTDTVDRPRIEAAVREMLAAIGEDPDREGLRDTPQRVAKAYAEFFAGLHQEPAQVLGTTFDIAHEELVLVKDIPFYSMCEHHLVPFHGQAHIGYIPSTEGRVTGLSKLARLVELYARRPQVQERLTTQVVEALMEHLAAKGAIVVVQAEHMCMAMRGVRKPGAKTVTSAVRGQLRDPSTRAEAMSLIMHS

SEQ ID NO: 10833 - protein, 206 aa, Micrococcus luteus; identical to SEQ ID NO: 10830
  REGION 1..206: note = tr|C5C888|C5C888_MICLC GTP cyclohydrolase 1; OS = Micrococcus luteus (strain ATCC 4698 / DSM 20030 / JCM 1464 / NBRC 3333 / NCIMB 9278 / NCTC 2665 / VKM Ac-2230); OX = 465 515 GN=folE PE=3 SV=1

SEQ ID NO: 10834 - protein, 206 aa, Micrococcus luteus; identical to SEQ ID NO: 10829
  REGION 1..206: note = tr|A0A031I1F4|A0A031I1F4_MICLU GTP cyclohydrolase 1; OS = Micrococcus luteus OX=1270 GN=folE PE=3 SV=1

SEQ ID NO: 10835 - protein, 200 aa, Micrococcus lylae
  REGION 1..200: note = tr|A0A4Y8WZE8|A0A4Y8WZE8_9MICC GTP cyclohydrolase 1; OS = Micrococcus lylae OX=1273 GN=folE PE=3 SV=1
MTGVPGTFDPQQTTVDRPRIERAVREILEAIGEDPDREGLQDTPKRVAKAYAEFFAGLHQSADQVLGTTFDIAHDELVLVKDIPFYSTCEHHLVPFHGTAHIGYIPSAQGRVTGLSKLARLVELYARRPQVQERLTTQIVEALVEHLHPRGAIVVIQAEHMCMSMRGVRKPGAKTVTSAVRGQLRDPSTRAEAMSLILNG

SEQ ID NO: 10836 - protein, 292 aa, Micrococcus lylae; identical to SEQ ID NO: 10193
  REGION 1..292: note = tr|A0A378P1H3|A0A378P1H3_9MICC GTP cyclohydrolase FolE2 OS=Micrococcus lylae OX=1273 GN=folE2 PE=3 SV=1

SEQ ID NO: 10837 - protein, 206 aa, Micrococcus sp.; identical to SEQ ID NO: 10829
  REGION 1..206: note = tr|A0A366DDC8|A0A366DDC8_9MICC GTP cyclohydrolase 1; OS = Micrococcus sp. KT16 OX=2184005 GN=folE PE=3 SV=1

SEQ ID NO: 10838 - protein, 206 aa, Micrococcus sp.; identical to SEQ ID NO: 10829
  REGION 1..206: note = tr|A0A151D5Q8|A0A151D5Q8_9MICC GTP cyclohydrolase 1; OS = Micrococcus sp. CH7 OX=1770210 GN=folE PE=3 SV=1

SEQ ID NO: 10839 - protein, 204 aa, Micrococcus terreus
  REGION 1..204: note = tr|A0A1I7MQU7|A0A1I7MQU7_9MICC GTP cyclohydrolase 1; OS = Micrococcus terreus OX=574650 GN=folE PE=3 SV=1
MSAETPEQAESAQSTPNPVDLPRIEAAVREILEAVGEDPDREGLRDTPARVARAYAEFFSGLHRDPSEVLGTTFDLSHEELVLVKDIPFYSTCEHHLVPFHGRAHIGYIPSKQGHVTGLSKLARLVEIYARRPQVQERLTTEIVEALMSHLHPQGAIVVIQAEHMCMSMRGVRKPGAQTVTSAVRGQLRDATTRAEAMSLILNG

SEQ ID NO: 10840 - protein, 206 aa, Micrococcus yunnanensis; identical to SEQ ID NO: 10830
  REGION 1..206: note = tr|A0A4Y8PIB0|A0A4Y8PIB0_9MICC GTP cyclohydrolase 1; OS = Micrococcus yunnanensis OX=566027 GN=folE PE=3 SV=1

SEQ ID NO: 10841 - protein, 206 aa, Micrococcus yunnanensis; identical to SEQ ID NO: 10829
  REGION 1..206: note = tr|A0A4Y9H986|A0A4Y9H986_9MICC GTP cyclohydrolase 1; OS = Micrococcus yunnanensis OX=566027 GN=folE PE=3 SV=1

SEQ ID NO: 10842 - protein, 244 aa, unidentified
  source 1..244: note = Microcoleaceae bacterium
  REGION 1..244: note = tr|A0A355CDL9|A0A355CDL9_9CYAN GTP cyclohydrolase 1; OS = Microcoleaceae bacterium UBA10368 OX=2055793 GN=folE; PE = 3 SV=1
MTIASSNGSTGSKSLSTDSMKLSETADKNLPNITTRPDRNSSNGQESNVSIPSEVGQEEMMEAVRTMLLGIGENPEREGLLKTPKRVAEAMRFLTSGYSQSLEELLNGAIFDEGHNEMVLVRDISVFSMCEHHMLPFMGRIHVAYIPNQKVVGLSKLARIVEMYSRRLQVQERLTRQVAEAVQTILEPRGVAVVMEASHMCMTMRGVQKPGAWTVTSAMLGVFQEEQKTREEFLSLIRHQPAFF

SEQ ID NO: 10843 - protein, 216 aa, unidentified
  source 1..216: note = Microcoleaceae bacterium
  REGION 1..216: note = tr|A0A355CH30|A0A355CH30_9CYAN GTP cyclohydrolase 1; OS = Microcoleaceae bacterium UBA10368 OX=2055793 GN=folE; PE = 3 SV=1
MTLSTRPELTSPNGVVSSIPTQSQPPVSDEEMRQAVRTLLLGLGEDPDREGLRDTPKRVVKALQFLTGGYRQSLDELLNGAVFTENANEMVLVRDIDIFSSCEHHILPIIGKAHVAYIPNGKVIGLSKIARICEMYGRRLQVQERLTAQIADALQGLLKPQGVAVVIEATHMCMVMRGVQKPGSWTATSAMRGVFAEDARTRQEFMSLIAHKSSFH

SEQ ID NO: 10844 - protein, 212 aa, Microcoleus sp.
  REGION 1..212: note = tr|K9WG65|K9WG65_9CYAN GTP cyclohydrolase 1; OS = Microcoleus sp. PCC 7113 OX=1173027 GN=folE PE=3 SV=1
MTLSISPDDIRKQTISTQAKSPVSEEEMRQAVRTLLLGMGEDPDREGLRDTPKRVVKALKFLTSGYHQSLDELLNGAVFHEDANEMVLVRDIDLFSSCEHHILPILGRAHVAYIPNGKVIGLSKIARICEMYARRLQVQERLTAQIADAIQGLLKPQGVAVVVEATHMCMVMRGVQKPGSWTVTSSMQGVFADDAKTRQEFMDLIRHRPSFH

SEQ ID NO: 10845 - protein, 238 aa, Microcoleus sp.
  REGION 1..238: note = tr|K9WKC5|K9WKC5_9CYAN GTP cyclohydrolase 1; OS = Microcoleus sp. PCC 7113 OX=1173027 GN=folE PE=3 SV=1
MTIASSNAFNSSNSASSSNSSNPIPQVETRPDRNTHNGREPNLKPPSEELNEDMMKAVRTMLLGVGEDPEREGLLKTPKRVAEAMRFLTSGYNQSLEELVNGAIFDEGHNEMVLVRDINFFSLCEHHMLPFMGKAHVAYIPNQKVVGLSKLARVVEMYARRLQVQERLTRQIAEAVQTILEPQGVAVVMEGTHMCMAMRGVQKPGSWTATSAMVGVFQDDQKTREEFLNLIRHQPSFF

SEQ ID NO: 10846 - protein, 244 aa, Microcoleus vaginatus
  REGION 1..244: note = tr|F5UGX5|F5UGX5_9CYAN GTP cyclohydrolase 1; OS = Microcoleus vaginatus FGP-2 OX=756067 GN=folE PE=3 SV=1
MTIASSTDSNGSNPLSTDSMKLLQTAENNIPRIPTRPDRNSSHGQESNVPVPSEVGQEEMMAAVRTILLGVGEDPEREGLLKTPKRVAEAMRFLTSGYSQSLEELLNGAIFDEGHNEMVLVRDISVFSMCEHHMLPFMGRVHIAYIPNQKVVGLSKLARIAEMYSRRLQVQERLTRQIAEAVETILEPQGVAVVMEASHMCMTMRGVQKPGAWTVTSAMLGVFQDEQKTREEFLNLIRHQPAFF

SEQ ID NO: 10847 - protein, 218 aa, Microcystis aeruginosa
  REGION 1..218: note = tr|A0A552DSU6|A0A552DSU6_MICAE GTP cyclohydrolase 1; OS = Microcystis aeruginosa Ma_SC_T_19800800_S464 OX=2486257; GN = folE PE=3 SV=1
MTLAKSKAIFHNDDYNHFPEVITEPKSPVSEAEMMQAVRTLLLGLGEDPDREGLRDTPKRVVKALKFLTSGYQQSLDELLNGAVFHENANEMVLIRDIDIFSSCEHHILPIIGRAHVAYIPNGKVIGLSKIARICEMYARRLQVQERLTAQIADALQGLLQPQGVAVVIEATHMCMVMRGVEKPGSWTSTSAMRGIFADSAKTRQEFMSLIRHSPDFH

SEQ ID NO: 10848 - protein, 232 aa, Microcystis aeruginosa
  REGION 1..232: note = tr|A0A5J5LV92|A0A5J5LV92_MICAE GTP cyclohydrolase I FolE OS=Microcystis aeruginosa EAWAG127a OX=2529855; GN = folE PE=4 SV=1
MTIASSNGLNGNLTDAIQARVTTRPDRNTHNGKTAQIHPTCDENKEQMMDAVRNILISVGEDPEREGLLKTPKRVAEAMQFLTQGYQQSLETLVNGAIFDEGHNEMVLVRDIDFFSLCEHHMLPFMGRAHVAYIPNQKVVGLSKLARIVEMYSRRLQVQERLTRQIAEAIQEILDPQGVAVVMEATHMCMVMRGVQKPGSWTVTSAMLGVFQDEQKTREEYLNLIRHKPNFF

SEQ ID NO: 10849 - protein, 232 aa, Microcystis flosaquae
  REGION 1..232: note = tr|A0A552KMH6|A0A552KMH6_9CHRO GTP cyclohydrolase 1; OS = Microcystis flos-aquae Mf_QC_C_20070823_S10D OX=2486236; GN = folE PE=3 SV=1
MTIASSNGLNGNLTDAIQARVTSRPDRNTHNGKTAQIHPTSDENKEQMMDAVRNILISVGEDPEREGLLKTPKRVAEAMQFLTQGYQQSLETLVNGAIFDEGHNEMVLVRDIDFFSLCEHHMLPFMGRAHVAYIPNQKVVGLSKLARIVEMYSRRLQVQERLTRQIAEAIQEILDPQGVAVVMEATHMCMVMRGVQKPGSWTVTSAMLGVFQDEQKTREEYLNLIRHKPNFF

SEQ ID NO: 10850 - protein, 218 aa, Microcystis flosaquae
  REGION 1..218: note = tr|A0A552M4T4|A0A552M4T4_9CHRO GTP cyclohydrolase 1; OS = Microcystis flos-aquae Mf_WU_F_19750830_S460 OX=2486237; GN = folE PE=3 SV=1
MTLAKSKAIFDNDDYNHFPEVITEPKSPVSEAEMMQAVRTLLLGLGEDPDREGLRDTPKRVVKALKFLTSGYQQSLDELLNGAVFHENANEMVLIRDIDIFSSCEHHILPIIGRAHVAYIPNGKVIGLSKIARICEMYARRLQVQERLTAQIADALQGLLQPQGVAVVIEATHMCMVMRGVEKPGSWTSTSAVRGIFADSAKTRQEFMSLIRHSPDFH

SEQ ID NO: 10851 - protein, 232 aa, unidentified
  source 1..232: note = Microcystis novacekii
  REGION 1..232: note = tr|A0A552JCL2|A0A552JCL2_9CHRO GTP cyclohydrolase 1; OS = Microcystis novacekii Mn_MB_F_20050700_S1D OX=2486266; GN = folE PE=3 SV=1
MTIASSNGLNGNLTDAIQARVTTRPDRNTHNGKTAQIHPTSDENKEQMMDAVRNILISVGEDPEREGLLKTPKRVAEAMQFLTQGYQQSLETLVNGAIFDEGHNEMVLVRDIDFFSLCEHHMLPFMGRAHVAYIPNQKVVGLSKLARIVEMYSRRLQVQERLTRQIAEAIQEILEPQGVAVVMEATHMCMVMRGVQKPGSWTVTSAMLGVFQDEQKTREEYLNLIRHKPNFF

SEQ ID NO: 10852 - protein, 232 aa, unidentified
  source 1..232: note = Microcystis panniformis
  REGION 1..232: note = tr|A0A0K1S4W6|A0A0K1S4W6_9CHRO GTP cyclohydrolase 1; OS = Microcystis panniformis FACHB-1757 OX=1638788 GN=folE; PE = 3 SV=1
MTIASSNGLNGNLTDAIQARVTTRPDRNTHNGKTAQIHPTSDENKEQMMDAVRNILISVGEDPEREGLLKTPKRVAEAMQFLTQGYQQSLETLVNGAIFDEGHNEMVLVRDIDFFSLCEHHMLPFMGRAHVAYIPNQKVVGLSKLARIVEMYSRRLQVQERLTRQIAEAIQEILDPQGVAVVMEATHMCMVMRGVQKPGSWTVTSAMLGVFQDEQKTREEYLNLIRHKPNFF

SEQ ID NO: 10853 - protein, 218 aa, unidentified
  source 1..218: note = Microcystis panniformis
  REGION 1..218: note = tr|A0A552PP76|A0A552PP76_9CHRO GTP cyclohydrolase 1; OS = Microcystis panniformis Mp_MB_F_20051200_S9 OX=2486223; GN = folE PE=3 SV=1
MTLAKSKAIFDNDDYNHFPEVITEPQSPVSEAEMMQAVRTLLLGLGEDPDREGLRDTPKRVVKALKFLTSGYQQSLDELLNGAVFHEDANEMVLIRDIDIFSSCEHHILPIIGRAHVAYIPNGKVIGLSKIARICEMYARRLQVQERLTAQIADALQGLLQPQGVAVVIEATHMCMVMRGVEKSGSWTSTSAVRGIFADSAKTRQEFMSLIRHSPDFH

SEQ ID NO: 10854 - protein, 232 aa, Microcystis sp.; identical to SEQ ID NO: 10852
  REGION 1..232: note = tr|A0A552AG55|A0A552AG55_9CHRO GTP cyclohydrolase 1; OS = Microcystis sp. M_OC_Ca_00000000_C217Col OX=2486213; GN = folE PE=3 SV=1

SEQ ID NO: 10855 - protein, 218 aa, Microcystis sp.
  REGION 1..218: note = tr|A0A552CIK3|A0A552CIK3_9CHRO GTP cyclohydrolase 1; OS = Microcystis sp. Msp_OC_L_20101000_S702 OX=2486218; GN = folE PE=3 SV=1
MTLAKSKAIFDNDDYNHFPEVITEPKSPVSEAEMMQAVRTLLLGLGEDPDREGLRDTPKRVVKALKFLTSGYQQSLDELLNGAVFHEDANEMVLIRDIDIFSSCEHHILPIIGRAHVAYIPNGKVIGLSKIARICEMYARRLQVQERLTAQIADALQGLLQPQGVAVVIEATHMCMVMRGVEKPGSWTSTSAVRGIFADSAKTRQEFMSLIRHSPDFH

SEQ ID NO: 10856 - protein, 218 aa, unidentified
  source 1..218: note = Microcystis viridis
  REGION 1..218: note = tr|A0A3G9JRA9|A0A3G9JRA9_MICVR GTP cyclohydrolase 1; OS = Microcystis viridis NIES-102 OX=213615 GN=folE_2 PE=3; SV = 1
MTLAKSKAIFDNDDYNHFPEVITEPKSPVSEAEMMQAVRTLLLGLGEDPDREGLRDTPKRVVKALKFLTSGYQQSLDELLNGAVFHENANEMVLIRDIDIFSSCEHHILPIIGRAHVAYIPNGKVIGLSKIARICEMYARRLQVQERLTAQIADALQGLLQPQGVAVVIEATHMCMVMRGVEKSGSWTSTSAVRGIFADSAKTRQEFMSLIRHSPDFH

SEQ ID NO: 10857 - protein, 232 aa, unidentified
  source 1..232: note = Microcystis viridis
  REGION 1..232: note = tr|A0A552H7Q4|A0A552H7Q4_MICVR GTP cyclohydrolase 1; OS = Microcystis viridis Mv_BB_P_19951000_S68D OX=2486270; GN = folE PE=3 SV=1
MTIASSNGLNGNLTDAIQARVTTRPDRNTHNGKTAQIHPTSDENKEQMMDAVRNILISVGEDPEREGLLKTPKRVAEAMQFLTQGYQQSLETLVNGAIFDEGHSEMVLVRDIDFFSLCEHHMLPFMGRAHVAYIPNQKVVGLSKLARIVEMYSRRLQVQERLTRQIAEAIQEILDPQGVAVVMEATHMCMVMRGVQKPGSWTVTSAMLGVFQDEQKTREEYLNLIRHKPNFF

SEQ ID NO: 10858 - protein, 218 aa, unidentified
  source 1..218: note = Microcystis wesenbergii
  REGION 1..218: note = tr|A0A3E0LQ06|A0A3E0LQ06_9CHRO GTP cyclohydrolase 1; OS = Microcystis wesenbergii TW10 OX=2060474 GN=folE PE=3; SV = 1
MTLAKSKAIFDNDDYNHFPEVITEPKSPVSEFEMMQAIRTLLLGLGEDPDREGLRDTPKRVVKALKFLTSGYQQSLDELLNGAVFHEDANEMVLIRDIDIFSSCEHHILPIIGRAHVAYIPNGKVIGLSKIARICEMYARRLQVQERLTAQIADALQGLLQPQGVAVVIEATHMCMVMRGVEKPGSWTSTSAVRGIFADSAKTRQEFMSLIRHSPDFH

SEQ ID NO: 10859 - protein, 218 aa, unidentified
  source 1..218: note = Microcystis wesenbergii
  REGION 1..218: note = tr|A0A552JIJ3|A0A552JIJ3_9CHRO GTP cyclohydrolase 1; OS = Microcystis wesenbergii Mw_QC_S_20081001_S30D; OX = 2486245 GN=folE PE=3 SV=1
MTLAKSKAIFDNDDYNHFPEVITEPKSPVSETEMMQAVRTLLLGLGEDPDREGLRDTPKRVVKALKFLTSGYQQSLDELLNGAVFNEEANEMVLIRDIDIFSSCEHHILPIIGRAHVAYIPNGKVIGLSKIARICEMYARRLQVQERLTAQLADALQGLLQPQGVAVVIEATHMCMVMRGVEKPGSWTSTTAVRGIFADSAKTRQEFMSLIRHSPDFH

SEQ ID NO: 10860 - protein, 195 aa, Microlunatus phosphovorus
  REGION 1..195: note = tr|F5XFC2|F5XFC2_MICPN GTP cyclohydrolase 1; OS = Microlunatus phosphovorus (strain ATCC 700054 / DSM 10555 / JCM 9379 / NBRC 101784 / NCIMB 13414 / VKM Ac-1990 / NM-1)OX=1032480 GN=folE PE=3 SV=1
MAAGTARSYDHPRVVAAVREILAGIGEDPDRDGLRDTPERVARAYAEMFAGLSQEPEDVLTTTFDLGHDEFVLVKDMEVWSCCEHHLVPFTGVAHVGYIPSADGRITGLSKLARLVDVYAKRPQVQERLTTQVADALQRILQPRGVIVVLECEHLCMTMRGVRKPGSRTVTSAVRGQLRNAATRAEALSLIMAQR

SEQ ID NO: 10861 - protein, 213 aa, Microlunatus phosphovorus
  REGION 1..213: note = tr|F5XIE0|F5XIE0_MICPN GTP cyclohydrolase 1; OS = Microlunatus phosphovorus (strain ATCC 700054 / DSM 10555 / JCM 9379 / NBRC 101784 / NCIMB 13414 / VKM Ac-1990 / NM-1)OX=1032480 GN=folE PE=3 SV=1
MSRNGRSPGRAPGLLERNGFRPVVTNNRPAVDLAAAEQAAGLLLNALGLDLADENLAETPRRMAHALIEMTNGPNFELTTFPNDEGYDELVLVQNIAMQSVCEHHMLPFVGVAHVGYLPGSRILGLSKFARMVELHARRPQTQERLTKRIADHLQAELDPKGVGVVIEAEHTCMSLRGARNPRARTTTSAMFGRLRDEPRSRAEFLALTRSQR

SEQ ID NO: 10862 - protein, 218 aa, Microlunatus soli
  REGION 1..218: note = tr|A0A1H1SB44|A0A1H1SB44_9ACTN GTP cyclohydrolase 1; OS = Microlunatus soli OX=630515 GN=folE PE=3 SV=1
MTSITEPTDEDVLGMTPHPLGNGTSSSARGIDETKIINAVSQLLDGLGLDTTSPGLRDTPSRYARMCREIFGGLHQDPRDVLGVAFPEGYTEPVIVRDISFTSICEHHLVPFLGHAHIGYHPGPAGEVVGLSKLARLVDVVSRRPTLQERITATVTDTLEAVLAPKGVACVIEAEHFCMTMRGVRKPGSRTVTTAFRGMFATDESARSTMLSMMDIRR

SEQ ID NO: 10863 - protein, 203 aa, Microlunatus soli
  REGION 1..203: note = tr|A0A1H1SLC2|A0A1H1SLC2_9ACTN GTP cyclohydrolase 1; OS = Microlunatus soli OX=630515 GN=folE PE=3 SV=1
MQRPGTNGVLLGPGHAAPFDADRIAAGIREVLIGIGEDPDRDGLRDTPQRVARAYAELFAGLHQEPAEALATTFDLPHDELVLVKDIELWSVCEHHLLPFTGVAHVGYIPGENGRITGLSKLARLVDVYAKRPQVQERLTTQIADELVSTLQPRGVIVVLECEHQCMTMRGVRKPGSKTVTSAVRGGMRDPVTRAEAMSLITD

SEQ ID NO: 10864 - protein, 194 aa, Microlunatus sp.
  REGION 1..194: note = tr|A0A516Q540|A0A516Q540_9ACTN GTP cyclohydrolase 1; OS = Microlunatus sp. KUDC0627 OX=2596828 GN=folE PE=3 SV=1
MLGPGHSAPFDHDRIARAVRELLIGIGEDPDRDGLRDTPQRVARAYAELFAGLHQQPSEVLATTFDLDHDEMVLVKDIEVWSVCEHHLLPFTGVAHVGYIPDENGRITGLSKLARLVDVYAKRPQVQERLTTQIADELVNTLSPRGVIVVLECEHQCMTMRGVRKPGSKTITSAVRGGMRDPVTRAEAMSLITG

SEQ ID NO: 10865 - protein, 221 aa, unidentified
  source 1..221: note = Micromonospora arborensis
  REGION 1..221: note = tr|A0A318NP96|A0A318NP96_9ACTN GTP cyclohydrolase 1; OS = Micromonospora arborensis OX=2116518 GN=folE PE=3 SV=1
MAVSATEPDGDDELDYVAARLISGKLTGRPVEDAVDLGRIEKAVREILIAVGEDPDRDGLQQTPARVARAYAELFAGLRVDPAQVLSTTFEANHEELVIVRDIDVMSLCEHHLLPFRGSAHIGYIPGPDGRITGLSKLARLVEVFARRPQVQERLTSQVADLLMSKLAPRGVVVVLECEHMCMAMRGIQKSGAKTITSAVRGILQTDSKSRSEAMALIIPR

SEQ ID NO: 10866 - protein, 221 aa, unidentified
  source 1..221: note = Micromonospora arida
  REGION 1..221: note = tr|A0A3N9WTC4|A0A3N9WTC4_9ACTN GTP cyclohydrolase 1; OS = Micromonospora arida OX=2203715 GN=folE PE=3 SV=1
MAVSATEPDGDDELDYVAARLISGKLTGRPVEDAVDLGRIEKAVREILIAVGEDPDRDGLQQTPARVARAYAELFAGLRVDPAQVLSTTFEANHEELVIVRDIDVMSLCEHHLLPFRGSAHIGYIPGPDGRITGLSKLARLVEVFARRPQVQERLTSQVADLLMSKLAPRGVVVVLECEHMCMAMRGIQKSGAKTITSAVRGILQSDSKSRAEAMALIIPR

SEQ ID NO: 10867 - protein, 205 aa, Micromonospora aurantiaca
  REGION 1..205: note = tr|D9T0L8|D9T0L8_MICAI GTP cyclohydrolase 1; OS = Micromonospora aurantiaca (strain ATCC 27029 / DSM 43813 / BCRC 12538 / CBS 129.76 / JCM 10878 / NBRC 16125 / NRRL B-1 6091 / INA 9442) OX=644283 GN=folE PE=3 SV=1
MAARLISGKLTGGPVEDSVDLARIEKAVREILIAVGEDPDRDGLQQTPARVARAYAELFAGLRVDPAQVLRTTFEANHEELVLVRDIDVMSLCEHHLLPFRGSAHIGYIPGPDGRITGLSKLARLVEVFARRPQVQERLTSQIADLLMSSLAPRGVIVVLECEHMCMAMRGIQKSGAKTITSAVRGGLQNDAKSRAEAMALIMAR

SEQ ID NO: 10868 - protein, 205 aa, Micromonospora aurantiaca; identical to SEQ ID NO: 10867
  REGION 1..205: note = tr|A0A1C6TF54|A0A1C6TF54_9ACTN GTP cyclohydrolase 1; OS = Micromonospora aurantiaca OX=47850 GN=folE PE=3 SV=1

SEQ ID NO: 10869 - protein, 190 aa, Micromonospora auratinigra
  REGION 1..190: note = tr|A0A1A8ZYM8|A0A1A8ZYM8_9ACTN GTP cyclohydrolase 1; OS = Micromonospora auratinigra OX=261654 GN=folE PE=3 SV=1
MEETVDLARIEKAVREILIAVGEDPDRDGLQQTPARVARAYAELFAGLRVDPGQVLSTTFEANHEELVLVRDIDVTSLCEHHLLPFRGSAHIGYIPGPDGRITGLSKLARLVEVFARRPQVQERLTSQIADLLMSRLAPRGVVVVLECEHMCMAMRGIQKSGAKTITSAVRGTFQRDAKSRAEAMSLIIR

SEQ ID NO: 10870 - protein, 197 aa, unidentified
  source 1..197: note = Micromonospora avicenniae
  REGION 1..197: note = tr|A0A1N7FQ82|A0A1N7FQ82_9ACTN GTP cyclohydrolase 1; OS = Micromonospora avicenniae OX=1198245 GN=folE PE=3 SV=1
MTIAPAPRRVNQQPARDLVAAEQAAAQFLAALGIDLDSESLRATPRRMASAYAELLTARPFELTTFPNDEGYDELVLARSIPIRSVCEHHLLPFVGVAHVGYLPGDRILGLSKLARVVELFAHRPQVQERLTKQVADWLALELAPKGVGVVIEAEHMCMTLRGVHAAGATTVTSTLLGTLRDDARSRAEFFSLTGAQ

SEQ ID NO: 10871 - protein, 209 aa, unidentified
  source 1..209: note = Micromonospora avicenniae
  REGION 1..209: note = tr|A0A1N6R3K9|A0A1N6R3K9_9ACTN GTP cyclohydrolase 1; OS = Micromonospora avicenniae OX=1198245 GN=folE PE=3 SV=1
MLDYIAARLINGKLTGGPVEDSVDLPRIEKAVREILIAVGENPDRDGLRQTPARVARAYAELFAGLRVDPAQVLSTTFEANHQELVIVRDIDVMSLCEHHLLPFRGSAHIGYIPGPDGRITGLSKLARLVEVYARRPQVQERLTSQIADLLMNKLAPRGVIVVLECEHMCMAMRGIQKSGAQTITSAVRGTLQNDAKSRAEAMALILPR

SEQ ID NO: 10872 - protein, 196 aa, Micromonospora carbonacea
  REGION 1..196: note = tr|A0A1C4TYT7|A0A1C4TYT7_9ACTN GTP cyclohydrolase 1; OS = Micromonospora carbonacea OX=47853 GN=folE PE=3 SV=1
MTGRPVEESVDLARIEKAVREILIAVGEDPDRDGLVKTPARVARAYAELFAGLRVDPAQVLSTTFEANHEELVLVRDIDVMSLCEHHLLPFRGSAHIGYIPGPDGRITGLSKLARLVEVYARRPQVQERLTSQIADLLMSSLAPRGVVVVLECEHMCMAMRGIQKAGAKTITSAVRGVLQHDAKSRAEAMSLIIPR

SEQ ID NO: 10873 - protein, 214 aa, Micromonospora chaiyaphumensis
  REGION 1..214: note = tr|A0A1C4TWF6|A0A1C4TWF6_9ACTN GTP cyclohydrolase 1; OS = Micromonospora chaiyaphumensis OX=307119 GN=folE PE=3; SV = 1
MIAITNDRWLKSLGVRVSVSALRVQHQRPRRDPAAAERAAAEFLTALGVDLSADGLADTPGRMARAYAELLTPREFQLTTFDNDEGYDELVLARAIPIRSVCEHHLLPFVGVAHVGYLPGERILGLSKLARVVELFAHGPQVQERLTKQIADWLTGQLRPRGVGVVIEAEHLCMTLRGVQAVGSSTITSTLLGTLRDDHRSRAEFFTLTGVGPR

SEQ ID NO: 10874 - protein, 191 aa, Micromonospora chaiyaphumensis
  REGION 1..191: note = tr|A0A1C4YEP2|A0A1C4YEP2_9ACTN GTP cyclohydrolase 1; OS = Micromonospora chaiyaphumensis OX=307119 GN=folE PE=3; SV = 1
MEESVDLARIEKAVREILVAVGEDPDRDGLQQTPARVARAYAELFAGLRVDPAQVLSTTFEANHEELVLVRDIDVMSLCEHHLLPFRGSAHIGYIPGPDGRITGLSKLARLVEVFARRPQVQERLTSQIADLLMTKLAPRGVVVVLECEHMCMAMRGIQKSGAKTITSAVRGTLQNDAKSRAEAMALIIPR

SEQ ID NO: 10875 - protein, 206 aa, Micromonospora chersina
  REGION 1..206: note = tr|A0A1C6U7E3|A0A1C6U7E3_9ACTN GTP cyclohydrolase 1; OS = Micromonospora chersina OX=47854 GN=folE PE=3 SV=1
MKISWGVRVTVSALRVQHQRPRRDPAAAERAAAEFLAALGVDLSADGLADTPGRMARAYAELLTPREFQLTTFANDEGYDELVLARAIPIRSLCEHHLLPFVGVAHVGYLPGERILGLSKLARVVELFAHGPQVQERLTKQIADWLTGQLRPRGVGVVIEAEHLCMTLRGVQAVGSSTITSTLLGTLRDDHRSRAEFFTLAGVGPR

SEQ ID NO: 10876 - protein, 191 aa, Micromonospora chersina
  REGION 1..191: note = tr|A0A1C6VKX8|A0A1C6VKX8_9ACTN GTP cyclohydrolase 1; OS = Micromonospora chersina OX=47854 GN=folE PE=3 SV=1
MEESVDLARIEKAVREILVAVGEDPDRDGLQQTPARVARAYAELFAGLRVDPAQVLSTTFEANHEELVLVRDIDVMSLCEHHLLPFRGSAHIGYIPGPDGRITGLSKLARLVEVFARRPQVQERLTSQIADLLMTKLAPRGVVVVLECEHMCMAMRGIQKSGAKTITSAVRGTLQHDAKSRAEAMALIIPR

SEQ ID NO: 10877 - protein, 266 aa, Micromonospora chokoriensis
  REGION 1..266: note = tr|A0A1C4UQ04|A0A1C4UQ04_9ACTN GTP cyclohydrolase FolE2 OS=Micromonospora chokoriensis OX=356851 GN=folE2; PE = 3 SV=1
MLPDVQALPDRRGVSLDEVGIEGLRYPLLIADGQGAKRETVATIDMSVSLDAEVKGAHLSRFVEVLHTWRDEVASDSALRLVEDLRTRMGSSSARVRLTFAYFLERQAPVTGARSFSEYQCALTASVSTANPVLTLQARVPVTSVCPCSKAISDRGAHNQRGYVTIEVHPVGPGELWFDDLIDVAEASASSPVYALLKRPDERHVTMAGYDNPVFVEDMTRHVALALRDDPRVNRFRVRVVNDESIHNHAAYARLEWTDSATGGDA

SEQ ID NO: 10878 - protein, 205 aa, Micromonospora chokoriensis
  REGION 1..205: note = tr|A0A1C4VKV7|A0A1C4VKV7_9ACTN GTP cyclohydrolase 1; OS = Micromonospora chokoriensis OX=356851 GN=folE PE=3 SV=1
MAARLISGKLTGRPVEDAVDLGRIEKAVREILIAVGEDPDRDGLQQTPARVARAYAELFAGLRVDPAQVLSTTFEANHEELVIVRDIDVMSLCEHHLLPFRGSAHIGYIPGPDGRITGLSKLARLVEVFARRPQVQERLTSQVADLLMSKLEPRGVVVVLECEHMCMAMRGIQKSGAKTITSAVRGILQSDSKSRAEAMALIIPR

SEQ ID NO: 10879 - protein, 205 aa, Micromonospora citrea
  REGION 1..205: note = tr|A0A1C6V7I8|A0A1C6V7I8_9ACTN GTP cyclohydrolase 1; OS = Micromonospora citrea OX=47855 GN=folE PE=3 SV=1
MAARLISGKLTGGPVEETVDLGRIEKAVREILVAVGEDPDRDGLQQTPARVARAYAELFAGLRVDPAQVLSTTFEANHQELVLVRDIDVMSLCEHHLLPFRGSAHIGYIPGPDGRITGLSKLARLVEVFARRPQVQERLTSQIADLLMERLAPRGVVVVLECEHMCMAMRGIQKSGAQTITSAVRGTLQNDAKSRAEAMALIIPR

SEQ ID NO: 10880 - protein, 205 aa, Micromonospora coriariae
  REGION 1..205: note = tr|A0A1C4VYN1|A0A1C4VYN1_9ACTN GTP cyclohydrolase 1; OS = Micromonospora coriariae OX=285665 GN=folE PE=3 SV=1
MAARLISGKLTGRPVEDAIDLGRIEKAVREILIAVGEDPDRDGLQQTPARVARAYAELFAGLRVDPAQVLSTTFEANHEELVIVRDIDVMSLCEHHLLPFRGSAHIGYIPGPDGRITGLSKLARLVEVFARRPQVQERLTSQVADLLMSKLSPRGVVVVLECEHMCMAMRGIQKSGAKTITSAVRGILQTDSKSRAEAMALIMPR

SEQ ID NO: 10881 - protein, 198 aa, Micromonospora coriariae
  REGION 1..198: note = tr|A0A1C4Y930|A0A1C4Y930_9ACTN GTP cyclohydrolase 1; OS = Micromonospora coriariae OX=285665 GN=folE PE=3 SV=1
MSVTALRVQHERPRRDPAAAERAAAEFLTALGVDLSANGLADTPGRMARAYAELLTPREFQPTTFDNDEGYDELVLARAIPIRSVCEHHLLPFVGVAHVGYLPGERILGLSKLARVVELFAHGPQVQERLTKQIADWLISQLRPRGVGVVIEAEHLCMTLRGVQAVGSSTITSTLLGTLRDDHRSRAEFFTLAGVGPR

SEQ ID NO: 10882 - protein, 221 aa, unidentified
  source 1..221: note = Micromonospora costi
  REGION 1..221: note = tr|A0A3B0A1T7|A0A3B0A1T7_9ACTN GTP cyclohydrolase 1; OS = Micromonospora costi OX=1530042 GN=folE PE=3 SV=1
MAASATEPDGDDGLDYIAARLINGKLTGGPVEETVDLARIEKAVREILIAVGENPDRDGLQQTPARVARAYAELFAGLRVDPAQVLSTTFEANHQELVLVRDIDVMSLCEHHLLPFRGSAHIGYIPGPDGRITGLSKLARLVEVYARRPQVQERLTSQIADLLMAKLAPRGVIVVLECEHMCMAMRGIQKSGAQTITSAVRGTLQNDAKSRAEAMALILPR

SEQ ID NO: 10883 - protein, 233 aa, Micromonospora coxensis
  REGION 1..233: note = tr|A0A1C5IJP2|A0A1C5IJP2_9ACTN GTP cyclohydrolase 1; OS = Micromonospora coxensis OX=356852 GN=folE PE=3 SV=1
MNTDAAASPDPSGLAASSTEPGDEALDYVAARLISGKLTGRPVEDTMDLARIEKAVREILIAVGEDPDRDGLQQTPARVARAYAELFAGLRVDPAQVLSTTFEANHEELVLVRDIDVMSLCEHHLLPFRGSAHIGYIPGPDGRITGLSKLARLVEVFARRPQVQERLTSQIADLLMSKLQPRGVVVVLECEHMCMAMRGIQKSGAKTITSAVRGTLQHDPKSRAEAMALIIPR

SEQ ID NO: 10884 - protein, 205 aa, unidentified
  source 1..205: note = Micromonospora cremea
  REGION 1..205: note = tr|A0A1N5ZTP4|A0A1N5ZTP4_9ACTN GTP cyclohydrolase 1; OS = Micromonospora cremea OX=709881 GN=folE PE=3 SV=1
MAARLISGKLTGRPVEDAIDLGRIEKAVREILIAVGEDPDRDGLQQTPARVARAYAELFAGLRVDPAQVLSTTFEANHEELVIVRDIDVMSLCEHHLLPFRGSAHIGYIPGPDGRITGLSKLARLVEVFARRPQVQERLTSQVADLLMSKLAPRGVVVVLDCEHMCMAMRGIQKSGARTITSAVRGTLQHDPKSRAEAMALIIPR

SEQ ID NO: 10885 - protein, 197 aa, unidentified
  source 1..197: note = Micromonospora cremea
  REGION 1..197: note = tr|A0A1N5WQY2|A0A1N5WQY2_9ACTN GTP cyclohydrolase 1; OS = Micromonospora cremea OX=709881 GN=folE PE=3 SV=1
MTIAPAPRRVDQRPARDLVTAEQAAAQFLAALGIDLDSESLRATPRRMARAYAELLTARPFDLTTFPNDEGYDELVLARSIPIRSVCEHHLLPFVGVAHVGYLPGERILGLSKLARVVELFAHRPQVQERLTKQVADWLALELAPKGVGVVIEAEHMCMTLRGVRAAGATTVTSTLLGTLRDDARCRAEFFSLTGAH

SEQ ID NO: 10886 - protein, 219 aa, unidentified
  source 1..219: note = Micromonospora deserti
  REGION 1..219: note = tr|A0A2W2CH45|A0A2W2CH45_9ACTN GTP cyclohydrolase 1; OS = Micromonospora deserti OX=2070366 GN=folE PE=3 SV=1
MAVSATEPDDGLDYVAARLISGKLTGRPIEDTMDLARIEKAVREILIAVGEDPDRDGLQQTPARVARAYAELFAGLRVDPGQVLSTTFEANHEELVLVRDIDVMSLCEHHLLPFRGSAHIGYIPGPDGRITGLSKLARLVEVFARRPQVQERLTSQIADLLMSKLKPRGAVVVLECEHMCMAMRGIQKSGAKTITSAVRGTLQRDAKSRAEAMALIIPR

SEQ ID NO: 10887 - protein, 221 aa, Micromonospora eburnea
  REGION 1..221: note = tr|A0A1C6VMR1|A0A1C6VMR1_9ACTN GTP cyclohydrolase 1; OS = Micromonospora eburnea OX=227316 GN=folE PE=3 SV=1
MAASSTEPDGDEALDYVAARLISGKLTGRPVEETMDLARIEKAVREILIAVGEDPDRDGLQQTPARVARAYAELFAGLRVDPAQVLTTTFEANHEELVLVRDIDVMSLCEHHLLPFRGSAHIGYIPGPDGRITGLSKLARLVEVFARRPQVQERLTAQIADLLMNKLAPRGVVVVLECEHMCMAMRGIQKAGAKTITSAVRGTLQHDAKSRAEAMALIIPR

SEQ ID NO: 10888 - protein, 234 aa, Micromonospora echinaurantiaca
  REGION 1..234: note = tr|A0A1C5K691|A0A1C5K691_9ACTN GTP cyclohydrolase 1; OS = Micromonospora echinaurantiaca OX=47857 GN=folE PE=3; SV = 1
MSTDPAASPHDRGLAASATEPDGDDALDYVAARLISGKLTGRPVEDTMDLGRIEKAVREILIAVGEDPDRDGLQQTPSRVARAYAELFAGLRVDPAQVLSTTFEANHEELVLVRDIDVMSLCEHHLLPFRGSAHIGYIPGPDGRITGLSKLARLVEVFARRPQVQERLTSQIADLLMSKLEPRGVVVVLECEHMCMAMRGIQKSGAQTITSAVRGTLQNDAKSRAEAMALIIPR

SEQ ID NO: 10889 - protein, 218 aa, Micromonospora echinaurantiaca
  REGION 1..218: note = tr|A0A1C5I9T1|A0A1C5I9T1_9ACTN GTP cyclohydrolase 1; OS = Micromonospora echinaurantiaca OX=47857 GN=folE PE=3; SV = 1
MDLMDPASTTDGASVAEDEAGPGPLRVLRRRPGRDLAAAERAAADFLAALGVDIDADGLADTPGRMARAYAELLTPREFRLTTFDNDEGYDELVVARSIPIRSVCEHHFLPFLGVAHVGYLPGGRILGLSKLARVVELFAHGPQVQERLTRQIADWLAAQLRPKGVGVVVEAEHLCMSLRGVRAVGATTVTSTLLGTLRDDPRSRAEFFALTGVGARP

SEQ ID NO: 10890 - protein, 235 aa, Micromonospora echinofusca
  REGION 1..235: note = tr|A0A1C5GIN9|A0A1C5GIN9_9ACTN GTP cyclohydrolase 1; OS = Micromonospora echinofusca OX=47858 GN=folE PE=3 SV=1
MSTDPTASSREHRELAVSATEPDGDDTLDYVAARLISGKLTGRPIEETMDLGRIEKAVREILIAVGEDPDRDGLQQTPARVARAYAELFAGLRVDPAQVLSTTFEANHEELVLVRDIDVMSLCEHHLLPFRGSAHIGYIPGPDGRITGLSKLARLVEVFARRPQVQERLTSQIADLLMDRLAPRGVVVVLECEHMCMAMRGIQKSGAKTITSAVRGTLQRDAKSRAEAMALIIPR

SEQ ID NO: 10891 - protein, 191 aa, Micromonospora echinospora
  REGION 1..191: note = tr|A0A562DYG1|A0A562DYG1_MICEC GTP cyclohydrolase 1; OS = Micromonospora echinospora OX=1877 GN=folE PE=3 SV=1
MENAVDLGRIERAVREILIAVGEDPDRDGLLQTPARVARAYAELFAGLRVDPKQVLTTTFEANHEELVLVRDIDVMSLCEHHLLPFRGSAHIGYIPGPDGRITGLSKLARLVEVFARRPQVQERLTSQIADLLMERLNPRGVIVVLECEHMCMAMRGIQKSGAKTITSAVRGTLQRDAKSRAEAMALIIPR

SEQ ID NO: 10892 - protein, 235 aa, Micromonospora echinospora
  REGION 1..235: note = tr|A0A1C4WS16|A0A1C4WS16_MICEC GTP cyclohydrolase 1; OS = Micromonospora echinospora OX=1877 GN=folE PE=3 SV=1
MNTREPAASQDTPALAASSTEPDGDEALDYLAARLINGKLTGRPVENAVDLGRIERAVREILIAVGEDPDRDGLLQTPARVARAYAELFAGLRVDPKQVLTTTFEANHEELVLVRDIDVMSLCEHHLLPFRGSAHIGYIPGPDGRITGLSKLARLVEVFARRPQVQERLTSQIADLLMERLNPRGVIVVLECEHMCMAMRGIQKSGAKTITSAVRGTLQRDAKSRAEAMALIIPR

SEQ ID NO: 10893 - protein, 205 aa, Micromonospora endolithica
  REGION 1..205: note = tr|A0A3A9Z3X9|A0A3A9Z3X9_9ACTN GTP cyclohydrolase 1; OS = Micromonospora endolithica OX=230091 GN=folE PE=3 SV=1
MAARLISGKLSGRPVEETMDLGRIEKAVREILIAVGEDPDRDGLQQTPARVARAYAELFAGLRVDPAQVLTTTFEANHEELVLVRDIDVMSLCEHHLLPFRGSAHIGYIPGPDGRITGLSKLARLVEVFARRPQVQERLTSQIADLLMERLAPRGVIVVLQCEHMCMAMRGIQKSGAQTITSAVRGTLQHDAKSRAEAMTLIMAR

SEQ ID NO: 10894 - protein, 205 aa, unidentified
  source 1..205: note = Micromonospora fluostatini
  REGION 1..205: note = tr|A0A4R4MQQ9|A0A4R4MQQ9_9ACTN GTP cyclohydrolase 1; OS = Micromonospora fluostatini OX=1629071 GN=folE PE=3 SV=1
MAARLINGKLTGRPVEEAIDLTRIEKAVREILIAVGENPDRDGLVQTPARVARAYAELFAGLRVDPAKVLTTTFEANHEELVLVRDIDVMSLCEHHLLPFRGSAHIGYIPGPDGRITGLSKLARLVEVFARRPQVQERLTSQIADLLMESLAPRGVVVVLQCEHMCMAMRGIQKSGAQTITSAVRGSLQHDAKSRAEAMALIIPR

SEQ ID NO: 10895 - protein, 221 aa, unidentified
  source 1..221: note = Micromonospora globbae
  REGION 1..221: note = tr|A0A420EYZ3|A0A420EYZ3_9ACTN GTP cyclohydrolase 1; OS = Micromonospora globbae OX=1894969 GN=folE PE=3 SV=1
MAASATEPDGDDGLDYIAARLINGKLTGGPVEETVDLARIEKAVREILIAVGENPDRDGLQQTPARVARAYAELFAGLRVDPAQVLSTTFEANHEELVLVRDIDVMSLCEHHLLPFRGSAHIGYIPGPDGRITGLSKLARLVEVYARRPQVQERLTSQIADLLMEKLAPRGVIVVLECEHMCMAMRGIQKSGAQTITSAVRGTLQRDPKSRAEAMALILPR

SEQ ID NO: 10896 - protein, 198 aa, unidentified
  source 1..198: note = Micromonospora globbae
  REGION 1..198: note = tr|A0A420F0L4|A0A420F0L4_9ACTN GTP cyclohydrolase 1; OS = Micromonospora globbae OX=1894969 GN=folE PE=3 SV=1
MSVTALRVQHQRPRRDLAAAERAAAQFLAALGVDTSADGLADTPGRMARAYAELLTPREFQLTTFDNDEGYDELVLARAIPIRSVCEHHLLPFVGVAHVGYLPGERILGLSKLARVVELFAHGPQVQERLTKQIADWLTHHLRPRGVGVVVEAEHLCMTLRGVRAVGSSTITSTLLGTLRDDHRSRAEFFTLAGVGPR

SEQ ID NO: 10897 - protein, 195 aa, unidentified
  source 1..195: note = Micromonospora globispora
  REGION 1..195: note = tr|A0A3N9VBR6|A0A3N9VBR6_9ACTN GTP cyclohydrolase 1; OS = Micromonospora globispora OX=1450148 GN=folE PE=3 SV=1
MAPAPRRVNQQPAPDLVAAEQAAARFLAALDIDLDSESLRDTPRRMARAYAELLTARPFDLTTFPNDEGYDELVLARSIPIRSVCEHHLLPFVGVAHVGYLPGERILGLSKLARVVELFAHRPQVQERLTKQVADWLALELAPKGVGVVIEAEHLCMTLRGVRATGATTVTSTLLGTLRDDARSRAEFFSLTGAH

SEQ ID NO: 10898 - protein, 220 aa, unidentified
  source 1..220: note = Micromonospora globispora
  REGION 1..220: note = tr|A0A317K6L6|A0A317K6L6_9ACTN GTP cyclohydrolase 1; OS = Micromonospora globispora OX=1450148 GN=folE PE=3 SV=1
MAVSATEPDEDGLDYVAARLISGKLTGRPVEDAIDLGRIEKAVREILIAVGEDPDRDGLQQTPARVARAYAELFAGLRVDPAQVLSTTFEANHEELVLVRDIDVMSLCEHHLLPFRGSAHIGYIPGPDGRITGLSKLARLVEVFARRPQVQERLTSQIADLLMSKLAPRGVVVVLECEHMCMAMRGIQKSGAKTITSAVRGTLQHDAKSRAEAMSLIIPR

SEQ ID NO: 10899 - protein, 185 aa, unidentified
  source 1..185: note = Micromonospora haikouensis
  REGION 1..185: note = tr|A0A1C4VF25|A0A1C4VF25_9ACTN GTP cyclohydrolase 1; OS = Micromonospora haikouensis OX=686309 GN=folE PE=3 SV=1
MARIEKAVREILIAVGEDPDRDGLVKTPARVARAYAELFAGLRVDPAQVLSTTFEANHEELVLVRDIDVMSLCEHHLLPFRGSAHIGYIPGPDGRITGLSKLARLVEVFARRPQVQERLTSQIADLLMSSLAPRGVVVVLECEHMCMAMRGIQKSGAKTITSAVRGVLQHDAKSRAEAMALIIPR

SEQ ID NO: 10900 - protein, 266 aa, unidentified
  source 1..266: note = Micromonospora haikouensis
  REGION 1..266: note = tr|A0A1C4YJK3|A0A1C4YJK3_9ACTN GTP cyclohydrolase FolE2 OS=Micromonospora haikouensis OX=686309 GN=folE2; PE = 3 SV=1
MLPDVQALPDQRGVALDEVGIEGLRYPLLIADGQGAKREAVATIDMSVTLDAEVKGAHLSRFVEVLHAWRDEVAPDSALRLVEDLRMRMGSSSARVHLTFAYFLERQAPVTGARSFSEYQCALTASVSGANPVLTLQARVPVTSVCPCSKAISDRGAHNQRGYVTIEAHPVDPGELWFDDLIDVAEASASSPVYALLKRPDERHVTMAGYDNPVFVEDMTRHVALAMRDDPRVNRFRVRVVNDESIHNHAAYAQLEWTDSATGGDA

SEQ ID NO: 10901 - protein, 209 aa, Micromonospora halophytica
  REGION 1..209: note = tr|A0A1C5IDV2|A0A1C5IDV2_9ACTN GTP cyclohydrolase 1; OS = Micromonospora halophytica OX=47864 GN=folE PE=3 SV=1
MLDYVAARLISGRLTGRPIEDTMDLARIEKAVREILIAVGEDPDRDGLQQTPARVARAYAELFAGLRVDPAQVLSTTFEANHEELVLVRDIDVMSLCEHHLLPFRGSAHIGYIPGPDGRITGLSKLARLVEVFARRPQVQERLTSQIADLLMSKLQPRGVVVVLECEHMCMAMRGIQKSGAKTITSAVRGTLQHDAKSRAEAMALIIPR

SEQ ID NO: 10902 - protein, 205 aa, Micromonospora humi
  REGION 1..205: note = tr|A0A1C5K0G2|A0A1C5K0G2_9ACTN GTP cyclohydrolase 1; OS = Micromonospora humi OX=745366 GN=folE PE=3 SV=1
MAARLISGKLTGGPVEESVDLPRIEKAVREILIAVGEDPDRDGLQQTPARVARAYAELFAGLRVDPTQVLRTTFEANHEELVLVRDIDVMSLCEHHLLPFRGSAHIGYIPGPDGRITGLSKLARLVEVFARRPQVQERLTSQIADLLMSSLAPRGVIVVLECEHMCMAMRGIQKSGAKTITSAVRGGLQNDAKSRAEAMALIMHR

SEQ ID NO: 10903 - protein, 219 aa, unidentified
  source 1..219: note = Micromonospora inaquosa
  REGION 1..219: note = tr|A0A3N9WXX3|A0A3N9WXX3_9ACTN GTP cyclohydrolase 1; OS = Micromonospora inaquosa OX=2203716 GN=folE PE=3 SV=1
MAVSATEPDDDLDYVAARLISGKLTGRPVEDTVDLGRIEKAVREILIAVGEDPDRDGLQQTPARVARAYAELFAGLRVDPAQVLSTTFEANHEELVIVRDIDVMSLCEHHLLPFRGSAHIGYIPGPDGRITGLSKLARLVEVFARRPQVQERLTTQVADLLMSKLAPRGVVVVLECEHMCMAMRGIQKSGAKTITSAVRGILQTDSKSRAEAMALIIPR

SEQ ID NO: 10904 - protein, 212 aa, unidentified
  source 1..212: note = Micromonospora inaquosa
  REGION 1..212: note = tr|A0A3N9WP26|A0A3N9WP26_9ACTN GTP cyclohydrolase 1; OS = Micromonospora inaquosa OX=2203716 GN=folE PE=3 SV=1
MTTTAALRVGQRRPDKDLVAAELAAATFLTALGVDLTAGGLAETPARMARAYAELLSPREFAFTTFANDEGYDELVVTRDIPIRSVCEHHLLPFVGVAHVGYLPGDRIVGLSKLARVVQLFAHGPQLQERLTRQIAVWLDTHLRPGAVGVVIEAEHLCVTMRGAHAAGARSITSAFLGRLRDDARAREEFLTMAGVGSPLIARRTATPRHPR

SEQ ID NO: 10905 - protein, 233 aa, Micromonospora inositola
  REGION 1..233: note = tr|A0A1C5I2W8|A0A1C5I2W8_9ACTN GTP cyclohydrolase 1; OS = Micromonospora inositola OX=47865 GN=folE PE=3 SV=1
MNTDAAASPDKGLAASSTEPDGDEALDYVAARLISGKLTGRPVEETMDLARIEKAVREILIAVGEDPDRDGLQQTPARVARAYAELFAGLRVDPAQVLSTTFEANHEELVLVRDIDMMSLCEHHLLPFRGSAHIGYIPGPDGRITGLSKLARLVEVFARRPQVQERLTSQIADLLMSKLEPRGVIVVLECEHMCMAMRGIQKSGAKTITSAVRGVLQRDAKSRAEAMSLIIPR

SEQ ID NO: 10906 - protein, 219 aa, Micromonospora inositola
  REGION 1..219: note = tr|A0A1C5JII3|A0A1C5JII3_9ACTN GTP cyclohydrolase 1; OS = Micromonospora inositola OX=47865 GN=folE PE=3 SV=1
MDYEQRSLVKMEDRRGTVGAADVTIAPAPRRVDQQPARDLVAAEQAAARFLAALGIDLDSDSLRDTPRRMARAYDELLTARPFNLTTFHNDEGYDELVLARSIPIRSVCEHHLLPFIGVAHVGYLPGDRILGLSKLARVVELFAHRPQVQERLTKQVADWLALELAPKGVGVVIEAEHLCMTLRGVRAAGATTVTSTLLGALRDDARSRAEFFSLTGAH

SEQ ID NO: 10907 - protein, 235 aa, Micromonospora inyonensis
  REGION 1..235: note = tr|A0A1C6RCF3|A0A1C6RCF3_9ACTN GTP cyclohydrolase 1; OS = Micromonospora inyonensis OX=47866 GN=folE PE=3 SV=1
MNPREQAASQDDPALAASSTEPDGDEALDYLAARLINGKLTGLPVENAVDLGRIEKAVREILIAVGEDPDRDGLLQTPARVARAYAELFAGLRVDPKKVLTTTFEANHEELVLVRDIDVMSLCEHHLLPFRGSAHIGYIPGPDGRITGLSKLARLVEVFARRPQVQERLTSQIADLLMERLAPRGVIVVLECEHMCMAMRGIQKSGAETITSAVRGTLQRDAKSRAEAMALIIRR

SEQ ID NO: 10908 - protein, 197 aa, unidentified
  source 1..197: note = Micromonospora kangleipakensis
  REGION 1..197: note = tr|A0A4Q8BEK5|A0A4Q8BEK5_9ACTN GTP cyclohydrolase 1; OS = Micromonospora kangleipakensis OX=1077942 GN=folE PE=3; SV = 1
MTIAPAARRVDQQPARDLVAAEQAAARFLAALGIDLDSESLRDTPGRMARAYAELLTARPFDLTTFPNDEGYDELVLARSIPIRSVCEHHLLPFVGVAHVGYLPGDRILGLSKLARVVELFAHRPQVQERLTKQVADWLALELAPKGVGVVIEAEHLCMTLRGVRAVGATTVTSTLLGTLRDDARSRAEFFSLTGAH

SEQ ID NO: 10909 - protein, 220 aa, Micromonospora krabiensis
  REGION 1..220: note = tr|A0A1C3N9D3|A0A1C3N9D3_9ACTN GTP cyclohydrolase 1; OS = Micromonospora krabiensis OX=307121 GN=folE PE=3 SV=1
MAASATEPGDDALDYIAARLINGKLTGGPVEDSVDLPRIEKAVREILIAVGEDPDRDGLRQTPARVARAYAELFAGLRVDPAQVLSTTFEANHQELVLVRDIDVMSLCEHHLLPFRGSAHIGYIPGPDGRITGLSKLARLVEVYARRPQVQERLTSQIADLLMSKLAPRGVIVVLECEHMCMAMRGIQKSGAQTITSAVRGTLQNDAKSRAEAMALILPR

SEQ ID NO: 10910 - protein, 202 aa, Micromonospora lupini
  REGION 1..202: note = tr|I0L1T3|I0L1T3_9ACTN GTP cyclohydrolase 1; OS = Micromonospora lupini str. Lupac 08 OX=1150864 GN=folE; PE = 3 SV=1
MTVIETRPSAPVQMARADVAAAVAAAERMLAALGVDTQAEHLRRTAERMVLSYGEVLRPAPFEATDFVNDAKHQGFVIVRDVAFAAICAHHLLPFVGSATVGYLPGARLLGLSKLTRLVEHATRGLQVQENVTQQIADGLQQVVPDNGGMGVIVEAEHLCMTLRGAKARGASTVTSAWRGALARDVSVRSEFLSLAGRGWRP

SEQ ID NO: 10911 - protein, 208 aa, Micromonospora lupini
  REGION 1..208: note = tr|I0LDQ1|I0LDQ1_9ACTN GTP cyclohydrolase 1; OS = Micromonospora lupini str. Lupac 08 OX=1150864 GN=folE; PE = 3 SV=1
MDYVAARLISGKLTGRPVEDAVDLGRIEKAVREILIAVGEDPDRDGLQQTPARVARAYAELFAGLRVDPAQVLSTTFEANHEELVIVRDIDVMSLCEHHLLPFRGSAHIGYIPGPDGRITGLSKLARLVEVFARRPQVQERLTSQVADLLMSKLAPRGVVVVLECEHMCMAMRGIQKSGAKTITSAVRGILQSDSKSRAEAMSLIIPR

SEQ ID NO: 10912 - protein, 205 aa, Micromonospora marina
  REGION 1..205: note = tr|A0A1C4Z7Q6|A0A1C4Z7Q6_9ACTN GTP cyclohydrolase 1; OS = Micromonospora marina OX=307120 GN=folE PE=3 SV=1
MAARLISGKLTGGPVEDSVDLARIEKAVREILIAVGEDPDRDGLQQTPARVARAYAELFAGLRVDPAQVLRTTFEANHEELVLVRDIDVMSLCEHHLLPFRGSAHIGYIPGPDGRITGLSKLARLVEVFARRPQVQERLTSQIADLLMSSLAPRGVIVVLECEHMCMAMRGIQKSGAKTITSAVRGGLQNDAKSRAEAMTLIMAR

SEQ ID NO: 10913 - protein, 187 aa, Micromonospora matsumotoense
  REGION 1..187: note = tr|A0A1C4ZF65|A0A1C4ZF65_9ACTN GTP cyclohydrolase 1; OS = Micromonospora matsumotoense OX=121616 GN=folE PE=3 SV=1
MDLGRIEKAVREILIAVGEDPDRDGLQQTPARVARAYAELFAGLRVDPAQVLSTTFEANHEELVLVRDIDVMSLCEHHLLPFRGSAHIGYIPGPDGRITGLSKLARLVEVFARRPQVQERLTSQIADLLMSKLQPRGVIVILECEHMCMAMRGIQKSGAKTITSAVRGVLQHDAKSRAEAMSLIIPR

SEQ ID NO: 10914 - protein, 187 aa, Micromonospora mirobrigensis
  REGION 1..187: note = tr|A0A1C4ZQ13|A0A1C4ZQ13_9ACTN GTP cyclohydrolase 1; OS = Micromonospora mirobrigensis OX=262898 GN=folE PE=3 SV=1
MDLARIEKAVREILVAVGEDPDRDGLQQTPARVARAYAELFAGLRVDPAQVLSTTFEANHQELVLVRDIDVMSLCEHHLLPFRGSAHIGYIPGPDGRITGLSKLARLVEVFARRPQVQERLTSQIADLLMTRLAPAGVIVVLECEHMCMAMRGIQKSGAKTITSAVRGIHQEDAKSRAEAMSLILHR

SEQ ID NO: 10915 - protein, 221 aa, unidentified
  source 1..221: note = Micromonospora musae
  REGION 1..221: note = tr|A0A3A9XZQ9|A0A3A9XZQ9_9ACTN GTP cyclohydrolase 1; OS = Micromonospora musae OX=1894970 GN=folE PE=3 SV=1
MAASATEPDGDDMLDYIAARLINGKLTGGPVEESVDLARIEKAVREILIAVGEDPDRDGLRQTPARVARAYAELFAGLRVDPAQVLSTAFEANHQELVIVRDIDVMSLCEHHLLPFRGSAHIGYIPGPDGRITGLSKLARLVEVYARRPQVQERLTTQVADLLMAKLAPRGVIVVLECEHMCMAMRGIQKSGAKTITSAVRGTLQNDAKSRSEAMALILPR

SEQ ID NO: 10916 - protein, 207 aa, Micromonospora narathiwatensis
  REGION 1..207: note = tr|A0A1A8ZA75|A0A1A8ZA75_9ACTN GTP cyclohydrolase 1; OS = Micromonospora narathiwatensis OX=299146 GN=folE PE=3; SV = 1
MTTTFPDLDDPVHSVLAGVDVLDRKQVEQAVMQLLRTLGVPADSEVGRNTPRRMTDALVQMLTPQSWTFTTFPNDEGNHDLVLTRGIAFTSLCAHHLLPFSGYAHIGFYPGAKLPGLSKIARTVEMFAAQLQVQENLGQQIAGFLEAQLACDGVGVVLEAEHLCMTRRGVRAAGADTLTVATRGRLQRDHGARTEFLQLAVRSGRTA

SEQ ID NO: 10917 - protein, 233 aa, Micromonospora narathiwatensis
  REGION 1..233: note = tr|A0A1A9A8S0|A0A1A9A8S0_9ACTN GTP cyclohydrolase 1; OS = Micromonospora narathiwatensis OX=299146 GN=folE PE=3; SV = 1
MNTDAAASPDKGLAASSTEPDGDEALDYVAARLISGKLTGRPVEETMDLARIEKAVREILIAVGEDPDRDGLQQTPARVARAYAELFAGLRVDPAQVLSTTFEANHEELVLVRDIDVMSLCEHHLLPFRGSAHIGYIPGPDGRITGLSKLARLVEVFARRPQVQERLTSQIADLLMSKLAPRGVVVVLECEHMCMAMRGIQKAGAKTITSAVRGTLQHDAKSRAEAMALIIPR

SEQ ID NO: 10918 - protein, 208 aa, Micromonospora nigra
  REGION 1..208: note = tr|A0A1C6RV01|A0A1C6RV01_9ACTN GTP cyclohydrolase 1; OS = Micromonospora nigra OX=145857 GN=folE PE=3 SV=1
MDYVAARLISGRLTGRPVEDTMDLGRIEKAVREILIAVGEDPDRDGLRQTPARVARAYAELFAGLRVDPAQVLTTTFEANHEELVLVRDIDVMSLCEHHLLPFRGTAHIGYIPGPDGRITGLSKLARLVEVFARRPQVQERLTSQIADLLMDRLAPRGVVVVLDCEHMCMAMRGIQKSGAKTITSAVRGTLKHDAKSRAEAMALIIPR

SEQ ID NO: 10919 - protein, 207 aa, Micromonospora nigra
  REGION 1..207: note = tr|A0A1C6R7U5|A0A1C6R7U5_9ACTN GTP cyclohydrolase 1; OS = Micromonospora nigra OX=145857 GN=folE PE=3 SV=1
MTITLPDLDGAVHTVLPGVDVLDRKEVEQAVTQLVRALGVPMDTEVGRITPRRMADALVQMLSSQSWTFTTFPNDEGQHDLVLTRDIPFTSLCAHHLLPFSGHAHVGFYPGEKLPGLSKIARAVEMFAARLQVQETLGQQIAGFLEEQLACDGVGVVLVAEHLCMTRRGVRAAGAETLTVATRGRLQQDQGARSEFFHLAVPSGRTA

SEQ ID NO: 10920 - protein, 205 aa, unidentified
  source 1..205: note = Micromonospora noduli
  REGION 1..205: note = tr|A0A328NCU4|A0A328NCU4_9ACTN GTP cyclohydrolase 1; OS = Micromonospora noduli OX=709876 GN=folE PE=3 SV=1
MAARLISGKLTGRPVEDAVDLGRIEKAVREILIAVGEDPDRDGLQQTPARVARAYAELFAGLRVDPAQVLSTAFEANHEELVIVRDIDVMSLCEHHLLPFRGSAHIGYIPGPDGRITGLSKLARLVEVFARRPQVQERLTSQVADLLMSKLAPRGVVVVLECEHMCMAMRGIQKSGAKTITSAVRGILQTDSKSRAEAMALIIPR

SEQ ID NO: 10921 - protein, 224 aa, Micromonospora olivasterospora
  REGION 1..224: note = tr|A0A562I7W7|A0A562I7W7_MICOL GTP cyclohydrolase 1; OS = Micromonospora olivasterospora OX=1880 GN=folE PE=3 SV=1
MDGALAASSTEPDIDELDYLAARLVNGRLTGRPVEESVDLARIEKAVREILIAVGEDPDRDGLVKTPARVARAYAELFAGLRVDPAQVLSTTFEANHEELVLVRDIDVMSLCEHHLLPFRGSAHIGYIPGPDGRITGLSKLARLVEVFARRPQVQERLTSQIADLLMDRLAPRGVVVVLECEHMCMAMRGIQKAGAKTITSAVRGTLQRDPKSRAEAMALIIPR

SEQ ID NO: 10922 - protein, 199 aa, unidentified
  source 1..199: note = Micromonospora orduensis
  REGION 1..199: note = tr|A0A5C4QQ33|A0A5C4QQ33_9ACTN GTP cyclohydrolase 1; OS = Micromonospora orduensis OX=1420891 GN=folE PE=3 SV=1
MTTTAALRVGQRRPDKDLVAAELAAATFLTALGVDLTAGGLAETPARMARAYAELLSPREFAFTTFANDEGYDELVVTRDIPIRSVCEHHLLPFVGVAHVGYLPGDRIVGLSKLPRVVQLFAHGPQLQERLTRQIAVWLDTHLRPGAVGVVIEAEHLCVTMRGAHAAGARSITSAFLGRLRDDARAREEFLTMAGVGSP

SEQ ID NO: 10923 - protein, 221 aa, unidentified
  source 1..221: note = Micromonospora orduensis
  REGION 1..221: note = tr|A0A5C4QXT3|A0A5C4QXT3_9ACTN GTP cyclohydrolase 1; OS = Micromonospora orduensis OX=1420891 GN=folE PE=3 SV=1
MAVSATEPDGDDGLDYVAARLISGRLTGRPVEDAVDLGRIEKAVREILIAVGEDPDRDGLQQTPARVARAYAELFAGLRVDPAQVLSTTFEANHEELVIVRDIDVMSLCEHHLLPFRGSAHIGYIPGPDGRITGLSKLARLVEVFARRPQVQERLTSQVADLLMSKLAPRGVVVVLECEHMCMAMRGIQKSGAKTITSAVRGILQTDSKSRAEAMALIIPR

SEQ ID NO: 10924 - protein, 222 aa, Micromonospora pallida
  REGION 1..222: note = tr|A0A1C6TE94|A0A1C6TE94_9ACTN GTP cyclohydrolase 1; OS = Micromonospora pallida OX=145854 GN=folE PE=3 SV=1
MLAASATEPDGDEALDYLAARLVNGKLTGRPVEDAVDLGRIEKAVREILIAVGEDPDRDGLLQTPARVARAYAELFAGLRVDPKQVLTTTFEANHEELVIVRDIDVMSLCEHHLLPFRGSAHIGYIPGPDGRITGLSKLARLVEVFARRPQVQERLTSQIADLLMERLAPRGVIVVLECEHMCMAMRGIQKSGAKTITSAVRGTLQRDAKSRAEAMALIIPR

SEQ ID NO: 10925 - protein, 187 aa, unidentified
  source 1..187: note = Micromonospora palomenae
  REGION 1..187: note = tr|A0A561WGE3|A0A561WGE3_9ACTN GTP cyclohydrolase 1; OS = Micromonospora palomenae OX=1461247 GN=folE PE=3 SV=1
MDLGRIEKAVREILIAVGEDPDRDGLQQTPARVARAYAELFAGLRVDPAQVLSTTFEANHQELVLVRDIDVMSLCEHHLLPFRGSAHIGYIPGPDGRITGLSKLARLVEVFARRPQVQERLTSQIADLLMSKLAPRGVVVVLECEHMCMAMRGIQKSGAKTITSAVRGTLQHDAKSRAEAMALIIPR

SEQ ID NO: 10926 - protein, 199 aa, unidentified
  source 1..199: note = Micromonospora palomenae
  REGION 1..199: note = tr|A0A561WCG4|A0A561WCG4_9ACTN GTP cyclohydrolase 1; OS = Micromonospora palomenae OX=1461247 GN=folE PE=3 SV=1
MALSPLQVDRRPATKDLVAAEQAAAAFLTALGVNLDANGLAETPGRMARAYAELLTPREFRLTTFDNDEGYDELVVARAIPIRSVCEHHLLPFIGVAHVGYLPGERILGLSKLARVAELFAHGPQVQERLTKQIADWLTAHLRPRGVGVVVEAQHLCMTLRGVRAVGATTITSTLLGALRDDSRSRAEFFTLTGVGAHA

SEQ ID NO: 10927 - protein, 137 aa, Micromonospora pattaloongensis
  REGION 1..137: note = tr|A0A1H3HCC6|A0A1H3HCC6_9ACTN GTP cyclohydrolase 1; OS = Micromonospora pattaloongensis OX=405436; GN = SAMN05444365_101750 PE=3 SV=1
MLTTTFEANHEELVLVRDIEVMSLCEHHLLPFRGVAHIGYIPGTHGRITGLSKLARLVEVYARRPQVQERLTSQIADLLMERLDPRGVIAVLECEHMCMAMRGIQKAGSKTITSAVRGLFQRDAKSRAEAMTLIIHS

SEQ ID NO: 10928 - protein, 205 aa, Micromonospora peucetia
  REGION 1..205: note = tr|A0A1C6V3N3|A0A1C6V3N3_9ACTN GTP cyclohydrolase 1; OS = Micromonospora peucetia OX=47871 GN=folE PE=3 SV=1
MAARLISGRLTGRPVEETVDLGRIEKAVREILIAVGEDPDRDGLQQTPARVARAYAELFAGLRVDPAQVLSTTFEANHEELVLVRDIDVMSLCEHHLLPFRGSAHIGYIPGPDGRITGLSKLARLVEVFARRPQVQERLTSQVADLLMERLAPRGVVVVLECEHMCMAMRGIQKSGAKTITSAVRGTLQRDAKSRAEAMALIIHR

SEQ ID NO: 10929 - protein, 222 aa, Micromonospora pisi
  REGION 1..222: note = tr|A0A495JLR4|A0A495JLR4_9ACTN GTP cyclohydrolase 1; OS = Micromonospora pisi OX=589240 GN=folE PE=3 SV=1
MHDASSTEPDNDDTLDYLAARLVDGKLTGSPVEDAVDLLRIEKAVREILIAVGEDPDRDGLVKTPARVARAYAELFAGLRVDPAQVLGTTFEANHSELVLVRDIDVMSLCEHHLLPFRGMAHIGYIPGANGRITGLSKLARLVEVYARRPQVQERLTSQIADLLTEKLQPRGVVVVLECEHMCMAMRGIQKSGAKTITSAVRGSLQEDSRSRAEAMALIMHS

SEQ ID NO: 10930 - protein, 234 aa, Micromonospora purpureochromogenes
  REGION 1..234: note = tr|A0A1C4V7B3|A0A1C4V7B3_9ACTN GTP cyclohydrolase 1; OS = Micromonospora purpureochromogenes OX=47872 GN=folE; PE = 3 SV=1
MNTDAAASPENSGLAASSTEPDGDEALDYVAARLISGKLTGRPIEDTMDLGRIEKAVREILIAVGEDPDRDGLQQTPARVARAYAELFAGLRVDPAQVLSTTFEANHQELVLVRHIDVMSLCEHHLLPFRGSAHIGYIPGPDGRITGLSKLARLVEVFARRPQVQERLTSQIADLLMNKLAPRGVVVVLECEHMCMAMRGIQKSGAQTITSAVRGTLQHDAKSRAEAMALIIPR

SEQ ID NO: 10931 - protein, 217 aa, Micromonospora purpureochromogenes
  REGION 1..217: note = tr|A0A1C5A8V7|A0A1C5A8V7_9ACTN GTP cyclohydrolase 1; OS = Micromonospora purpureochromogenes OX=47872 GN=folE; PE = 3 SV=1
MGLMGRASTTHRPSMGVEVALSPLQVDRRPATRDLVAAEQAAAAFLAALGVNLDADGLAETPGRMARAYAELLTPREFRLTTFANDEGYDELVVARSIPIRSVCEHHLLPFIGVAHVGYLPGERILGLSKLARVAELFAHGPQVQERLTKQIADWLTAHLRPRGVGVVVEAQHLCMTLRGVQAVGATTITSTLLGALRDDSRSRAEFFTLTGVGARA

SEQ ID NO: 10932 - protein, 205 aa, unidentified
  source 1..205: note = Micromonospora radicis
  REGION 1..205: note = tr|A0A418MN91|A0A418MN91_9ACTN GTP cyclohydrolase 1; OS = Micromonospora radicis OX=1894971 GN=folE PE=3 SV=1
MAARLINGRLTGRPVEETMDLGRIEKAVREILIAVGEDPDRDGLQQTPARVARAYAELFAGLRVDPATVLTTTFEANHEELVLVRDIDVMSLCEHHLLPFRGSAHIGYIPGPDGRITGLSKLARLVEVFARRPQVQERLTSQVADLLMDRLAPRGVVVVLECEHMCMAMRGIQKSGAKTITSAVRGTLQRDAKSRAEAMALIIPR

SEQ ID NO: 10933 - protein, 221 aa, Micromonospora rhizosphaerae
  REGION 1..221: note = tr|A0A1C6RCQ6|A0A1C6RCQ6_9ACTN GTP cyclohydrolase 1; OS = Micromonospora rhizosphaerae OX=568872 GN=folE PE=3 SV=1
MAVSATEPDGEDGLDHVAARLISGKLTGRPIEETVDLGRIEKAVREILIAVGEDPDRDGLQQTPARVARAYAELFAGLRVDPAQVLSTTFEASHEELVLVRDIDVMSLCEHHLLPFRGSAHIGYIPGPDGRITGLSKLARLVEVFARRPQVQERLTSQIADLLMSKLAPRGVVVVLECEHMCMAMRGIQKTGAKTITSAVRGTLQYDAKSRAEAMALIIPR

SEQ ID NO: 10934 - protein, 197 aa, Micromonospora rhizosphaerae
  REGION 1..197: note = tr|A0A1C6SMH7|A0A1C6SMH7_9ACTN GTP cyclohydrolase 1; OS = Micromonospora rhizosphaerae OX=568872 GN=folE PE=3 SV=1
MTIAPARRHVDQQPAPDLVAAEQAAARFLAALDIDLDSESLRDTPRRMAKAYAELLTARPFDLTTFPNDEGYDELVLARSIPIRSVCEHHLLPFVGVAHVGYLPGDRILGLSKLARVVELFAHRPQVQERLTKQVAEWLALELAPKGVGVVIEAEHLCMTLRGVRATGATTVTSTLLGALRDDARSRAEFFSLTGAH

SEQ ID NO: 10935 - protein, 220 aa, Micromonospora rifamycinica
  REGION 1..220: note = tr|A0A109IP47|A0A109IP47_9ACTN GTP cyclohydrolase 1; OS = Micromonospora rifamycinica OX=291594 GN=folE PE=3 SV=1
MAASSTEPGDEALDYVAARLISGKLNGRPIEDTMDLGRIEKAVREILIAVGEDPDRDGLQQTPARVARAYAELFAGLRVDPAQVLSTTFEANHEELVLVRDIDVMSLCEHHLLPFRGSAHIGYIPGPDGRITGLSKLARLVEVFARRPQVQERLTAQIADLLMSKLQPRGVIVILDCEHMCMAMRGIQKSGAKTITSAVRGVLQHDAKSRAEAMSLIIPR

SEQ ID NO: 10936 - protein, 233 aa, Micromonospora rifamycinica
  REGION 1..233: note = tr|A0A1C5K223|A0A1C5K223_9ACTN GTP cyclohydrolase 1; OS = Micromonospora rifamycinica OX=291594 GN=folE PE=3 SV=1
MNTDAAASPDQSGLAASSTEPGDEALDYVAARLISGKLNGRPIEDTMDLGRIEKAVREILIAVGEDPDRDGLQQTPARVARAYAELFAGLRVDPAQVLSTTFEANHEELVLVRDIDVMSLCEHHLLPFRGSAHIGYIPGPDGRITGLSKLARLVEVFARRPQVQERLTAQIADLLMSKLQPRGVIVILDCEHMCMAMRGIQKSGAKTITSAVRGVLQHDAKSRAEAMSLIIPR

SEQ ID NO: 10937 - protein, 205 aa, Micromonospora rosaria; identical to SEQ ID NO: 10894
  REGION 1..205: note = tr|A0A136PN61|A0A136PN61_9ACTN GTP cyclohydrolase 1; OS = Micromonospora rosaria OX=47874 GN=folE PE=3 SV=1

SEQ ID NO: 10938 - protein, 199 aa, Micromonospora saelicesensis; identical to SEQ ID NO: 10922
  REGION 1..199: note = tr|A0A328NVA9|A0A328NVA9_9ACTN GTP cyclohydrolase 1; OS = Micromonospora saelicesensis OX=285676 GN=folE PE=3 SV=1

SEQ ID NO: 10939 - protein, 205 aa, Micromonospora saelicesensis
  REGION 1..205: note = tr|A0A1C4YR68|A0A1C4YR68_9ACTN GTP cyclohydrolase 1; OS = Micromonospora saelicesensis OX=285676 GN=folE PE=3 SV=1
MAARLISGKLTGRPVEDAVDLGRIEKAVREILIAVGEDPDRDGLQQTPARVARAYAELFAGLRVDPAQVLSTTFEANHEELVIVRDIDVMSLCEHHLLPFRGSAHIGYIPGPDGRITGLSKLARLVEVFARRPQVQERLTSQVADLLMSKLAPRGVVVVLECEHMCMAMRGIQKSGAKTITSAVRGILQSDSKSRAEAMALIIPR

SEQ ID NO: 10940 - protein, 191 aa, Micromonospora sagamiensis
  REGION 1..191: note = tr|A0A562W919|A0A562W919_9ACTN GTP cyclohydrolase 1; OS = Micromonospora sagamiensis OX=47875 GN=folE PE=3 SV=1
MENAVDLGRIEKAVREILIAVGEDPDRDGLLQTPARVARAYAELFAGLRVDPKKVLTTTFEANHEELVLVRDIDVMSLCEHHLLPFRGSAHIGYIPGPDGRITGLSKLARLVEVFARRPQVQERLTSQIADLLMERLAPRGVIVVLECEHMCMAMRGIQKSGAETITSAVRGTLQRDAKSRAEAMALIIRR

SEQ ID NO: 10941 - protein, 205 aa, unidentified
  source 1..205: note = Micromonospora sediminicola
  REGION 1..205: note = tr|A0A1A9B463|A0A1A9B463_9ACTN GTP cyclohydrolase 1; OS = Micromonospora sediminicola OX=946078 GN=folE PE=3 SV=1
MAARLISGKLTGGPVEQSVDLARIEKAVREILIAVGEDPDRDGLQQTPARVARAYAELFAGLRVDPAQVLRTTFEANHEELVLVRDIDVMSLCEHHLLPFRGSAHIGYIPGPDGRITGLSKLARLVEVFARRPQVQERLTSQIADLLMSSLAPRGVIVVLECEHMCMAMRGIQKSGAKTITSAVRGGLQNDAKSRAEAMALIMHR

SEQ ID NO: 10942 - protein, 233 aa, Micromonospora siamensis
  REGION 1..233: note = tr|A0A1C5GPQ0|A0A1C5GPQ0_9ACTN GTP cyclohydrolase 1; OS = Micromonospora siamensis OX=299152 GN=folE PE=3 SV=1
MNSDNAASPERSGLAASSTEPGDEALDYVAARLISGKLTGRPVEDTMDLARIEKAVREILVAVGEDPDRDGLQQTPARVARAYAELFAGLRVDPAQVLSTTFEANHQELVLVRDIDVMSLCEHHLLPFRGSAHIGYIPGPDGRITGLSKLARLVEVFARRPQVQERLTSQIADLLMTRLAPAGVIVVLECEHMCMAMRGIQKSGAKTITSAVRGIHQEDAKSRAEAMSLILHR

SEQ ID NO: 10943 - protein, 221 aa, Micromonospora sp.; identical to SEQ ID NO: 10915
  REGION 1..221: note = tr|A0A5D0SXZ7|A0A5D0SXZ7_9ACTN GTP cyclohydrolase 1; OS = Micromonospora sp. WP24 OX=2604469 GN=folE PE=3 SV=1

SEQ ID NO: 10944 - protein, 191 aa, Micromonospora sp.
  REGION 1..191: note = tr|A0A2P8ANJ0|A0A2P8ANJ0_9ACTN GTP cyclohydrolase 1; OS = Micromonospora sp. MH33 OX=1945509 GN=folE_2 PE=3 SV=1
MEESVDLARIEKAVREILVAVGEDPDRDGLQQTPARVARAYAELFAGLRVDPAQVLSTTFEANHQELVLVRDIDVMSLCEHHLLPFRGSAHIGYIPGPDGRITGLSKLARLVEVFARRPQVQERLTSQIADLLMAKLAPRGVVVVLECEHMCMAMRGIQKSGAKTITSAVRGTLQHDAKSRAEAMALIIPR

SEQ ID NO: 10945 - protein, 205 aa, unidentified
  source 1..205: note = Micromonospora taraxaci
  REGION 1..205: note = tr|A0A561VUK0|A0A561VUK0_9ACTN GTP cyclohydrolase 1; OS = Micromonospora taraxaci OX=1316803 GN=folE PE=3 SV=1
MAARLISGKLTGRPVEDAVDLGRIEKAVREILIAVGEDPDRDGLQQTPARVARAYAELFAGLRVDPAQVLSTTFEANHEELVIVRDIDVMSLCEHHLLPFRGSAHIGYIPGPDGRITGLSKLARLVEVFARRPQVQERLTSQVADLLMSKLEPRGVVVVLECEHMCMAMRGIQKSGAKTITSAVRGILQTDSKSRAEAMALIIPR

SEQ ID NO: 10946 - protein, 205 aa, Micromonospora tulbaghiae; identical to SEQ ID NO: 10867
  REGION 1..205: note = tr|A0A1C4X8Z7|A0A1C4X8Z7_9ACTN GTP cyclohydrolase 1; OS = Micromonospora tulbaghiae OX=479978 GN=folE PE=3 SV=1

SEQ ID NO: 10947 - protein, 219 aa, unidentified
  source 1..219: note = Micromonospora ureilytica
  REGION 1..219: note = tr|A0A3N9XSZ7|A0A3N9XSZ7_9ACTN GTP cyclohydrolase 1; OS = Micromonospora ureilytica OX=709868 GN=folE PE=3 SV=1
MAVSATEPDGDDELDYVAARLISGRLIGRPVEDAVDLGRIEKAVREILIAVGEDPDRDGLQQTPARVARAYAELFAGLRVDPAQVLSTTFEANHEELVIVRDIDVMSLCEHHLLPFRGSAHIGYIPGPDGRITGLSKLARLVEVFARRPQVQERLTSQVADLLMSKLAPRGVIVVLECEHMCMAMRGIQKSGAKTITSAVRGILQSDSKSRAEAMALMR

SEQ ID NO: 10948 - protein, 205 aa, unidentified
  source 1..205: note = Micromonospora violae
  REGION 1..205: note = tr|A0A4V2FPP5|A0A4V2FPP5_9ACTN GTP cyclohydrolase 1; OS = Micromonospora violae OX=1278207 GN=folE PE=3 SV=1
MAARLISGKLTGRPVEDAVDLGRIEKAVREILIAVGEDPDRDGLQQTPARVARAYAELFAGLRVDPAQVLSTTFEANHEELVIVRDIDVMSLCEHHLLPFRGSAHIGYIPGPDGRITGLSKLARLVEVFARRPQVQERLTSQVADLLMSKLAPRGVVVVLECEHMCMAMRGIQKSGAKTITSAVRGILQTDSKSRAEAMALIIPR

SEQ ID NO: 10949 - protein, 198 aa, Micromonospora viridifaciens
  REGION 1..198: note = tr|A0A1C4WYG9|A0A1C4WYG9_MICVI GTP cyclohydrolase 1; OS = Micromonospora viridifaciens OX=1881 GN=folE PE=3 SV=1
MTVTPMRVARQRPTRDLAAAERAAAAFLAALGVDLDRDGLAATPGRMARAYAELLTPREFALTTFDNDEGYDELVVARAIPIRSVCEHHLLPFVGVAHVGYLPGARILGLSKLARVVELFAHGVQVQERLTKQIAEWLTEHLQPKGVGVVVEAEHLCMTLRGVQAVGATTVTSSLLGTLRDDPRSRAEFFALTGLHTG

SEQ ID NO: 10950 - protein, 233 aa, Micromonospora viridifaciens
  REGION 1..233: note = tr|A0A1C4UNS1|A0A1C4UNS1_MICVI GTP cyclohydrolase 1; OS = Micromonospora viridifaciens OX=1881 GN=folE PE=3 SV=1
MNTDAAASPDQGLAASSTEPDGDEALDYVAARLISGKLTGRPVEETMDLARIEKAVREILIAVGEDPDRDGLQQTPARVARAYAELFAGLRVDPAQVLSTTFEANHEELVLVRDIDVMSLCEHHLLPFRGSAHIGYIPGPDGRITGLSKLARLVEVFARRPQVQERLTAQIADLLMSKLAPRGVVVVLECEHMCMAMRGIQKSGAKTITSAVRGTLQRDAKSRAEAMALIIPR

SEQ ID NO: 10951 - protein, 220 aa, unidentified
  source 1..220: note = Micromonospora wenchangensis
  REGION 1..220: note = tr|A0A246RQ64|A0A246RQ64_9ACTN GTP cyclohydrolase 1; OS = Micromonospora wenchangensis OX=1185415 GN=folE PE=3; SV = 1
MAASSTEPGDETLDYVAARLISGKLNGRPIEDTMDLGRIEKAVREILIAVGEDPDRDGLQQTPARVARAYAELFAGLRVDPSQVLSTTFEANHEELVLVRDIDVMSLCEHHLLPFRGSAHIGYIPGPDGRITGLSKLARLVEVFARRPQVQERLTSQIADLLMSRLQPRGVIVILDCEHMCMAMRGIQKSGAKTITSAVRGVLQHDAKSRAEAMSLIIPR

SEQ ID NO: 10952 - protein, 190 aa, unidentified
  source 1..190: note = Micromonospora wenchangensis
  REGION 1..190: note = tr|A0A246RLU1|A0A246RLU1_9ACTN GTP cyclohydrolase 1; OS = Micromonospora wenchangensis OX=1185415 GN=B5D80_17815; PE = 3 SV=1
MTTVERESGAQDPLEHIARQLLIEIGEDPDRDGLKETPARFARWWREFSSFQAGDVGTRFPLRTDGQIIMVSDIKVWSLCEHHLLPFSCSLTIAYRPDGDVLGLSKFARIAHRHAHRLQVQERLVQDIATEITAITGSVDIAVIGHGEHLCMSMRGVRTTAQMTSSVFRGIFQEHGPARQELVASVFPRR

SEQ ID NO: 10953 - protein, 208 aa, Micromonospora yangpuensis
  REGION 1..208: note = tr|A0A1C6VEZ6|A0A1C6VEZ6_9ACTN GTP cyclohydrolase 1; OS = Micromonospora yangpuensis OX=683228 GN=folE PE=3 SV=1
MDYIAARLVNGRLTGRPVEEAIDLARIEKAVREILVAVGEDPDRDGLVQTPARVARAYAELFAGLRVDPAQVLTTTFEANHEELVLVRDIDVMSLCEHHLLPFRGSAHIGYIPGPDGRITGLSKLARLVEVYARRPQVQERLTSQIADLLMERLAPRGVVVVLQCEHMCMAMRGIQKSGAQTITSAVRGVLQRDAKSRAEAMALIIPR

SEQ ID NO: 10954 - protein, 205 aa, unidentified; identical to SEQ ID NO: 10948
  source 1..205: note = Micromonospora zamorensis
  REGION 1..205: note = tr|A0A1C5J7Q6|A0A1C5J7Q6_9ACTN GTP cyclohydrolase 1; OS = Micromonospora zamorensis OX=709883 GN=folE PE=3 SV=1

SEQ ID NO: 10955 - protein, 219 aa, unidentified
  source 1..219: note = Micromonospora zingiberis
  REGION 1..219: note = tr|A0A4R0GSU5|A0A4R0GSU5_9ACTN GTP cyclohydrolase 1; OS = Micromonospora zingiberis OX=2053011 GN=folE PE=3 SV=1
MAASATEPDDTLDYIAARLINGRLTGRPVEEVVDLARIEKAVREILVAVGEDPDRDGLQQTPARVARAYAELFAGLRVDPGTVLTTTFEANHEELVLVRDIDVMSLCEHHLLPFRGSAHIGYIPGPDGRITGLSKLARLVEVFARRPQVQERLTSQIADLLMDKLAARGVVVVLECEHMCMAMRGIQKSGAMTITSAVRGSLQRDAKSRAEAMALIHPR

SEQ ID NO: 10956 - protein, 217 aa, unidentified
  source 1..217: note = Micromonosporaceae bacterium
  REGION 1..217: note = tr|A0A3D4WNK5|A0A3D4WNK5_9ACTN GTP cyclohydrolase 1; OS = Micromonosporaceae bacterium OX=1873464 GN=folE PE=3; SV = 1
MGESELNDKLDYLAARLVDGSLTGTPVEEAVDLKRIEAAVREILIALGEDPDREGLLKTPARVARAYAELFAGLRVDPKAIVKTTFEADHDEFVLVKDIPLLSLCEHHLLPFRGVAHVGYLPGEDGRITGLSKLARLVEVYARRPQVQERLTSQIADLLEDKLQARGVIVVLECEHMCMEMRGIRKPGSRTITSAVRGLHKTDPKTRSEALSLINAR

SEQ ID NO: 10957 - protein, 198 aa, unidentified
  source 1..198: note = Micromonosporaceae bacterium
  REGION 1..198: note = tr|A0A3D5AS09|A0A3D5AS09_9ACTN GTP cyclohydrolase 1; OS = Micromonosporaceae bacterium OX=1873464 GN=folE PE=3; SV = 1
MTIAPLRVVRRKAEQDLAAAERAAADLLAALGVELDSDSLRETPGRMARAYAELLTPRPFRPTTFPNDEGYDELVLARGIPIRSVCEHHMLPFVGVAHVGYLPGERILGLSKLARVVEFVAHGLQVQERLTKQIADWLATELSPRGVGVVIEAEHLCMTLRGVRATGSTTVTSTLLGTIREDPRSRAEFLALTGIHRA

SEQ ID NO: 10958 - protein, 187 aa, Micropruina glycogenica
  REGION 1..187: note = tr|A0A2N9JM73|A0A2N9JM73_9ACTN GTP cyclohydrolase 1; OS = Micropruina glycogenica OX=75385 GN=folEA PE=3 SV=1
MPVDQPRVAAAVRELLIAIGENPDREGLQETPYRVARAYAEMFEGLDQTASDVLSTTFDIAHDEMVLVKNIEVWSTCEHHLVPFTGLAHVGYIPAAQGRITGLSKIARLVDVFAKRPQVQERLTTQIADALMEHLEPRGVIVVIDCEHLCMTMRGVHKPGARTVTSAVRGTLRNPAIRAEAMSLIIG

SEQ ID NO: 10959 - protein, 233 aa, Microscilla marina
  REGION 1..233: note = tr|A1ZQ86|A1ZQ86_9BACT GTP cyclohydrolase 1; OS = Microscilla marina ATCC 23134 OX=313606 GN=folE PE=3; SV = 1
MNGKHKNGVHNHKNNDKMNMEEMGDEHVASSYETPLREDAFEVSDDTKIKLIEERFREIMEIMGLDLSDDSLNGTPHRVAKMYIKEIFSGLNPANKPAPTLFENVYKYNEMLVEKDITFFSNCEHHFVPIYGKAHVAYISSGKVIGLSKINRIVQYFSRRPQVQERLTIQIGKELEKMLDTGSVAVVMDAAHMCVSSRGIQDTNSTTVTSYYSGKFQEEATRNEFLKYIGMNK

SEQ ID NO: 10960 - protein, 225 aa, Microscilla marina
  REGION 1..225: note = tr|A1ZSS2|A1ZSS2_9BACT GTP cyclohydrolase 1; OS = Microscilla marina ATCC 23134 OX=313606 GN=folE PE=3; SV = 1
MIQEKLTKIDADEIGDLHITNSYDTPLREDAFLLDDKTKIRLIEEYFGKIMHTLGLDLNDDSLKGTPYRVAKMYVKEIFKGLDPDNRPDLKVFENKYQYGEMLVEKNISLYSSCEHHFLPIIGKAHVGYIANDKVIGLSKINRIVDYFARRPQVQERLSRQISEELKRVLDTEDVAIVIESKHLCVASRGIQDTESSTVTAEYGGQFKDKDVRQEFLSYVHSKLE

SEQ ID NO: 10961 - protein, 231 aa, unidentified
  source 1..231: note = Microscillaceae bacterium
  REGION 1..231: note = tr|A0A349DS34|A0A349DS34_9BACT GTP cyclohydrolase 1; OS = Microscillaceae bacterium OX=2053581 GN=folE PE=3 SV=1
MIQEKLNGLDADEIGDLHMATSYDTPLREDAFLLDDDTKIKLIEEYFGKIMHTLGLDLNDDSLRGTPGRVAKMYVQEIFKGLNPAHKPKAKVFENKYQYGEMLIEKNITLYSSCEHHFLPIIGKAHVGYIANDKVIGLSKINRIVDYFARRPQVQERLSRQIFEEMKQSLDTEDVAVVIESKHLCVASRGIQDTESSTVTAEYGGKFKDKEVRKEFLAYINQDYLGSKPMF

SEQ ID NO: 10962 - protein, 251 aa, unidentified
  source 1..251: note = Microscillaceae bacterium
  REGION 1..251: note = tr|A0A349DYG7|A0A349DYG7_9BACT GTP cyclohydrolase 1; OS = Microscillaceae bacterium OX=2053581 GN=folE PE=3 SV=1
MKQKETLLNSLRPNGNGKHNGVHNHNKNDQNKLENGKYEEMGDEHVATSYETPMRDDAFELSDDTKIKLIEERFREIMDILGLDLTDDSLNGTPHRVAKMYVKEIFSGLNPDNKPKPTLFENVYKYNEMLVEKDITFYSNCEHHFVPIYGKAHVAYISSGKVIGLSKINRIVQYYARRPQVQERLTMQIGKELEKMLDTENVAVIMDADHMCVSSRGVQDTSSSTITSYYGGKFQEENTRNEFLKYVGMQK

SEQ ID NO: 10963 - protein, 221 aa, unidentified
  source 1..221: note = Microterricola gilva
  REGION 1..221: note = tr|A0A4Q8APQ6|A0A4Q8APQ6_9MICO GTP cyclohydrolase 1; OS = Microterricola gilva OX=393267 GN=folE PE=3 SV=1
MSSQIAQLGDDSAAHSARHRPQRSPVHAVPSGEPDRELAIEAVTDLLRALGRDPESPHLADTPRRVADALVEMLTPREFEATSFANDENYRELVLVRDIPFSSLCEHHLLPFQGVAHIGYLPGERIIGLSKLARVLDYFSHELQVQERLTQQVADWLHAELGARGVGVVLEAEHQCMSARGAKAVGSSTSTSAWHGELLSDREARSEFLAACGRQGGGVTS

SEQ ID NO: 10964 - protein, 212 aa, unidentified
  source 1..212: note = Microterricola gilva
  REGION 1..212: note = tr|A0A4V2GAG2|A0A4V2GAG2_9MICO GTP cyclohydrolase 1; OS = Microterricola gilva OX=393267 GN=folE PE=3 SV=1
MSGVDRARIEAAVSEIILAIGEDPARPGLAKTPARVADAYAEFFSGLSQDPLEHLLDSVPIGEDIDGVPQTSDVVLLRGIDFRSVCEHHLLPFVGVVHIAYLPSDRVVGLGRLPAVVDTLAARPQLQERLTEEIADALNDGLAPRGVLVVLDAVHRCVVARGSRQTNSSTVTIASRGELAEPVARAELMALIGSAAPAGRPREESTSGGHRA

SEQ ID NO: 10965 - protein, 199 aa, unidentified
  source 1..199: note = Microterricola pindariensis
  REGION 1..199: note = tr|A0A2S6JUM0|A0A2S6JUM0_9MICO GTP cyclohydrolase 1; OS = Microterricola pindariensis OX=478010 GN=folE PE=3 SV=1
MSGVDRARIEAAVNEIILAIGEDPARPGLARTPARVADAYAEFFGGLTQDPLEHLRDSVPIGADVDGAPQTSDAVLLRGIDFRSVCEHHLLPFVGVVHIAYLPSDRVVGLGRLPAVVDTLSARPQLQERLTEEIADALQEGLDPRGVLVVLDAVHRCVVARGSRQASSSTVTIASRGELAEPAARAELMALIASGGHGV

SEQ ID NO: 10966 - protein, 199 aa, unidentified
  source 1..199: note = Microterricola pindariensis
  REGION 1..199: note = tr|A0A2S6JU73|A0A2S6JU73_9MICO GTP cyclohydrolase 1; OS = Microterricola pindariensis OX=478010 GN=folE PE=3 SV=1
MVHAVAARPAPDRELAIAAVAQLLQALGRDPDAPHLADTPRRVADALIEMLTPGEFTATTFENEAGYDSLVLVRDIPFTSLCEHHLLPFHGTAHIGYLPGERIIGLSKLARILEYFSHALQVQERLTQQVADWLQEELGARGVGVVLQAEHQCMAARGVRVSGTRTTTSAWHGELRSDRTARAEFLTLSGIGAALEEGN

SEQ ID NO: 10967 - protein, 221 aa, Microterricola sp.
  REGION 1..221: note = tr|A0A420BQJ1|A0A420BQJ1_9MICO GTP cyclohydrolase 1; OS = Microterricola sp. OV434 OX=2135467 GN=folE PE=3 SV=1
MSSQIAQLGEDAAAHSARSRPQRSPVHAVPPREPDRALAIEAVADLLRALGRDPESPHLAETPRRVADALLEMLTPREFEATSFPNDEDYRELVLVRDIPFSSLCEHHLLPFQGVAHIGYLPGERIIGLSKLARVLEYFSRELQVQERLTQQVADWLHAELGARGVGVVLEAEHQCMSARGARAVGSTTSTSAWHGELRSDREARSEFLAACGRQSGGTSS

SEQ ID NO: 10968 - protein, 212 aa, Microterricola sp.
  REGION 1..212: note = tr|A0A420BXK9|A0A420BXK9_9MICO GTP cyclohydrolase 1; OS = Microterricola sp. OV434 OX=2135467 GN=folE PE=3 SV=1
MSGVDRARIEAAVSEIILAIGEDPARPGLAKTPARVADAYAEFFSGLSEDPLEHLLDSVPIGEDVDGVPQTSDVVLLRGIDFRSVCEHHLLPFVGVVHIAYLPSDRIVGLGRLPAVVDTLAARPQLQERLTEEIADALNDGLTPRGVLVVLDAVHRCVVARGSRQTNSSTVTIASRGELAEPVARAELMALIGSAAPAGRPREGSSTGGHGA

SEQ ID NO: 10969 - protein, 220 aa, Microterricola viridarii
  REGION 1..220: note = tr|A0A1H1YKL1|A0A1H1YKL1_9MICO GTP cyclohydrolase 1; OS = Microterricola viridarii OX=412690 GN=folE PE=3 SV=1
MPRQNAALVTAFDDEDSPERGIVHAVAARPAPDREQAIAAVAQLLQALGRDPDAPHLADTPRRVADALIEMLTPSEFTATTFENEAGYDSLVLVCDIPFTSLCEHHLLPFHGTAHIGYLPGERIIGLSKLARILEYFSRALQVQERLTQQVADWLQEELGARGVGVVLQAEHQCMAARGVRVSGTRTTTSAWHGELRSDRAARAEFLTLSGIGAALEEGN

SEQ ID NO: 10970 - protein, 223 aa, Microterricola viridarii
  REGION 1..223: note = tr|A0A120I181|A0A120I181_9MICO GTP cyclohydrolase 1; OS = Microterricola viridarii OX=412690 GN=folE PE=3 SV=1
MPRQNAAVVTAFDDKAASPERRPVRAIAARRRPDREKAIAAVGQLLQALGRDPDSPHLADTPRRVADAFIEMLTPREFTATTFENEAGYAELVLVRDIPFTSLCEHPLLPFQGIAHIGYLPGERIIGLSKLARVLEHFSRELQVQERLTQQVADWLNEELGARGVGVVLEAEHQCMAARGARVTGSRTTTSAWHGELRSDRAARAEFLQLSGIGAASEEGTGS

SEQ ID NO: 10971 - protein, 211 aa, Microvirga aerophila
  REGION 1..211: note = tr|A0A512BWD1|A0A512BWD1_9RHIZ GTP cyclohydrolase 1; OS = Microvirga aerophila OX=670291 GN=folE PE=3 SV=1
MNDVVKSLSPRLPAAADKTAERPTREEAEAAVRTLIRWAGDDPQREGLHDTPKRVTKAFREFYSGYQDDPKEVLNKIFAEVEGYDDIVLVRDIPFYSHCEHHLVPFYGMTHIAYYPTKGVVGLSKLARLVEVYARRLQTQESMTAQIAAAMEEALEPRGVAVMIEAEHMCMSMRGVQKAGAMTLTTQFTGAFKNDPAEQVRFLTLVRHGKV

SEQ ID NO: 10972 - protein, 210 aa, Microvirga guangxiensis
  REGION 1..210: note = tr|A0A1G5LFZ0|A0A1G5LFZ0_9RHIZ GTP cyclohydrolase 1; OS = Microvirga guangxiensis OX=549386 GN=folE PE=3 SV=1
MNDVVKSLSPRLIPAADKSDDRPTREEAEAAVRTLLRWAGDDPQREGLLETPKRVAKAFKEFYSGYEDDPKDVLNKIFAEVEGYDDIVLVRDIPFYSHCEHHMVPFYGMAHIAYYPTKGVVGLSKLARLVEVYARRLQTQETMTAQIAAAIEQFLEPRGVAVMIEAEHMCMSMRGVQKAGAMTITTQFTGAFNDAAEQVRFLTLVRHGKA

SEQ ID NO: 10973 - protein, 211 aa, unidentified
  source 1..211: note = Microvirga lotononidis
  REGION 1..211: note = tr|I4Z2X8|I4Z2X8_9RHIZ GTP cyclohydrolase 1; OS = Microvirga lotononidis OX=864069 GN=folE PE=3 SV=1
MSDVVKSLSTRLTTAADKPAPSPTREEAEAAVRILLRWAGDDPSREGLQDTPKRVVKAFREFYSGYDEDPSEILDKIFAEVEGYDDIVLVRDIPFYSHCEHHMVPFFGVAHVAYYPTKGVVGLSKLARLVDAYARRLQTQETMTSQIAKAMVAALEPRGVAVMIEAEHMCMSMRGIQKAGALTLTTQFTGIFKEDPAEQVRFLTLVRNGRG

SEQ ID NO: 10974 - protein, 209 aa, unidentified
  source 1..209: note = Microvirga ossetica
  REGION 1..209: note = tr|A0A1B2EK54|A0A1B2EK54_9RHIZ GTP cyclohydrolase 1; OS = Microvirga ossetica OX=1882682 GN=folE PE=3 SV=1
MSEVVKSLPTRLTTAVDMSAAPSREEAEAAVRTLIRWTGDDPTREGLQDTPRRVAKAFKEFYSGYSEDPSEILDKIFREVEGYDNIVLVRDIPFYSHCEHHMVPFYGVAHVAYYPTKGVVGLSKLARLVDAYARRLQTQETMTSQIAKAMVEALDPRGVAVMLEAEHMCMSMRGIQKAGALTLTTQFTGVFKEDPAEQVRFLTLVRNRN

SEQ ID NO: 10975 - protein, 210 aa, Microvirga sp.
  REGION 1..210: note = tr|A0A2T7TV28|A0A2T7TV28_9RHIZ GTP cyclohydrolase 1; OS = Microvirga sp. KLBC 81 OX=1862707 GN=folE PE=3 SV=1
MNDVVKSLSPRLIPAADKPTDRPTREEAEAAVRTLIRWAGDDPQREGLQDTPKRVAKAFKEFYSGYQDDPKDVLNKIFAEVEGYDDIVLVRDIPFYSHCEHHMVPFYGMAHIAYYPTKGVVGLSKLARLVEVYARRLQTQETMTAQIASAMEQFLEPRGVAVMIEAEHMCMSMRGVQKAGAMTLTTQFTGAFNDTAEQVRFLTLVRHGKA

SEQ ID NO: 10976 - protein, 211 aa, Microvirga sp.
  REGION 1..211: note = tr|A0A086MNG5|A0A086MNG5_9RHIZ GTP cyclohydrolase 1; OS = Microvirga sp. BSC39 OX=1549810 GN=folE PE=3 SV=1
MSDAIKSLSVRLNPVADKPVAAPTREEAEAAVRTLLRWAGDDPTREGLQDTPKRVAKAFRELYSGYDQDPAEILDKVFNEVEGYDDIVLVRDIPFHSHCEHHMVPFFGVAHVAYYPTKGVVGLSKLARLVDAYARRLQTQETMTAQIASAMVKALEPRGVAVMIEAEHMCMSMRGIQKAGALTLTTQFTGVFKEDPAEQVRFLTLVRNGRG

SEQ ID NO: 10977 - protein, 211 aa, Microvirga subterranea
  REGION 1..211: note = tr|A0A370HRS4|A0A370HRS4_9RHIZ GTP cyclohydrolase 1; OS = Microvirga subterranea OX=186651 GN=folE PE=3 SV=1
MDDVVKSLSPRLSAAADKLMEKPTREEAEAAVRTLIRWAGDDPQREGLLETPKRVVKAFKEFYSGYKDNPREVLNKIFAEVEGYDDIVLVKDIPFYSHCEHHMVPFYGMAHIAYYPTKGVVGLSKLARLVEVFARRLQTQETMTAQIAAAMEEALEPRGVAVMLEAEHMCMSMRGVQKAGAMTLTTQFTGVFKDDPAEQVRFLTLVRHGKA

SEQ ID NO: 10978 - protein, 210 aa, unidentified
  source 1..210: note = Microvirga vignae
  REGION 1..210: note = tr|A0A0H1RM14|A0A0H1RM14_9RHIZ GTP cyclohydrolase 1; OS = Microvirga vignae OX=1225564 GN=folE PE=3 SV=1
MNDVVKSLSPRLISAADKPADRPTREEAEAAVRTLIRWAGDDPQREGLQDTPKRVAKAFKEFYSGYQDDPKDVLNKIFAEVEGYDDIVLVRDIPFYSHCEHHMVPFYGMAHIAYYPTKGVVGLSKLARLVEVYARRLQTQETMTAQIASAIEQYLEPRGVAVMIEAEHMCMSMRGVQKAGAMTLTTQFTGAFNDAAEQVRFLTLVRHGKA

SEQ ID NO: 10979 - protein, 265 aa, Microvirgula aerodenitrificans
  REGION 1..265: note = tr|A0A2S0PDX1|A0A2S0PDX1_9NEIS GTP cyclohydrolase FolE2 OS=Microvirgula aerodenitrificans OX=57480 GN=folE2; PE = 3 SV=1
MTSAAIPDVQSTPDTRNIAINKVGIKSIRHPVRVADRAGGVQHTIGVFNMYVHLPHNFKGTHMSRFVEILNMHEREISVENFESIVRDMCERLEAESGYLEMSFPYFIDKTAPVSGVKSLLDYDITYVGELRGGKYSFTMKALVPVTSLCPCSKKISERGAHNQRSHITITATTNAHVWIEELVAIAESQASCELYGLLKRPDEKYVTERAYDNPKFVEDLVRDVAAAVHSDPRIDAYVVESENFESIHNHSAYALIERDKRVQG

SEQ ID NO: 10980 - protein, 265 aa, Microvirgula sp.; identical to SEQ ID NO: 10979
  REGION 1..265: note = tr|A0A329B292|A0A329B292_9NEIS GTP cyclohydrolase FolE2 OS=Microvirgula sp. AG722 OX=2183901 GN=folE2 PE=3; SV = 1

SEQ ID NO: 10981 - protein, 179 aa, unidentified
  source 1..179: note = Midichloria mitochondrii
  REGION 1..179: note = tr|F7XTQ8|F7XTQ8_MIDMI GTP cyclohydrolase 1; OS = Midichloria mitochondrii (strain IricVA) OX=696127; GN = folE PE=3 SV=1
MNKKVTKNDALEAIKTILKWIGEDPTREGLMETPMRVVESYEEYFSGYKQDPKEILNVSFSEIADYKEVVVLKDIRFESFCEHHMAPIIGVVHIAYLPNKKVVGISKLARLVEVFSKRLQIQERMTAQIAHAIFNELEAKGVGVIVEAEHHCMTTRGVYNTSSKMRTQSFLGELKTVDI

SEQ ID NO: 10982 - protein, 212 aa, unidentified
  source 1..212: note = Minwuia thermotolerans
  REGION 1..212: note = tr|A0A2M9G019|A0A2M9G019_9PROT GTP cyclohydrolase 1; OS = Minwuia thermotolerans OX=2056226 GN=folE PE=3 SV=1
MDVLVNGPREDTRGREYDPATGKSRPSREEAEAAVRTLIEWAGDTPDREGLRDTPGRVVRAYEEFFAGYDEDPEEVLGRTFEEVEGYDDIVMLRDVRLETHCEHHMVPIIGKAHVAYFPAGRVVGISKLARVIDIYAKRLQTQETMTAQIAATLEKVLQPRGVAILIDAAHQCMTTRGVKKPGVSCITTRFTGIFREDRDMERRFLDLCRGV

SEQ ID NO: 10983 - protein, 199 aa, Mitsuokella jalaludinii
  REGION 1..199: note = tr|A0A173X920|A0A173X920_9FIRM GTP cyclohydrolase 1; OS = Mitsuokella jalaludinii OX=187979 GN=folE PE=3 SV=1
MREQNEKAVQAMRAFLKALGLDLEQCGMEQTPERVARLYGDLFDGLGKDPASIWGERFASETKGIVAVRHIPFYSVCEHHLLPFFGEVSLAYLPHDGQVAGFSKFVKLVECFAHRPQLQERMTAQLADAIADGLDAEGVLVVVEAEQLCMTMRDGMARGTKTVTSECLGAFRTDAVLCQQAWMVLGGKQDDSTAEIHLS

SEQ ID NO: 10984 - protein, 262 aa, Mitsuokella jalaludinii
  REGION 1..262: note = tr|A0A173XY31|A0A173XY31_9FIRM GTP cyclohydrolase FolE2 OS=Mitsuokella jalaludinii OX=187979 GN=folE2 PE=3; SV = 1
MRDVQNQADARGIAIQRVGIKDAQLPFLIKTKDGGFQQVLARILFTVALPMEYKGTHMSRFLEILMPWSKKPLAEPEMEAMLEEALERLDAQSAEVELSFKYFIDKEAPVSGRKSVLDLDCFFRGTKARGDKMAFTLGVDVPFTSLCPCSKEISKYGAHNQRSVCRTAVRFQEGTECIFIEDLAALIEKQGSSPIYPLLKREDEKYVTEAAYENPKFVEDILRDTVLALRSLPGIAWFSIECENYESIHNHNAFAAHEETVV

SEQ ID NO: 10985 - protein, 234 aa, Mitsuokella multacida
  REGION 1..234: note = tr|A0A356UMM3|A0A356UMM3_9FIRM GTP cyclohydrolase 1; OS = Mitsuokella multacida OX=52226 GN=folE PE=3 SV=1
MAVVFFCGFFRWKICNDGLIIKNNDESSGNERADDMRETNEKAVQAMRAFLEALGLDLEQCGMERTPERVADLYADLFDGLGRNPSEIWGERFPSETKGIVAVRHIPFYSVCEHHLLPFFGEVSLAYLPHDGEVAGFSKFVKLVECYAHRPQLQERMTAQLAAAIAEGLCADGVLVVVEAEQLCMTMREGMARGTQTVTSECLGAFRTDAALCEQAWMVLGGKKDDSNTEIRIS

SEQ ID NO: 10986 - protein, 262 aa, Mitsuokella multacida
  REGION 1..262: note = tr|C9KJ41|C9KJ41_9FIRM GTP cyclohydrolase FolE2; OS = Mitsuokella multacida DSM 20544 OX=500635 GN=folE2 PE=3; SV = 1
MRDVQNQADARGIAIQRVGIKDAHLPFLIKTKDGGFQQVLARILFTVALPMEYKGTHMSRFLEILMPWSKKPLAEPEMEAMLEEALERLDAQSAEVELSFKYFIDKEAPVSRRKSVLDLDCFFRGTKVRGEKMAFTLGVDVPFTSLCPCSKEISEYGAHNQRSVCRTAVRFREGQECIFIEDLAALIEKQGSSPIYPLLKREDEKYVTEAAYENPKFVEDILRDTVLALRSLPGIAWFSIECENYESIHNHNAFAAHEETVV

SEQ ID NO: 10987 - protein, 264 aa, Mitsuokella sp.
  REGION 1..264: note = tr|A0A412L1Z2|A0A412L1Z2_9FIRM GTP cyclohydrolase FolE2 OS=Mitsuokella sp. AF21-1AC OX=2292235 GN=folE2 PE=3; SV = 1
MRDVQNQTDARGIAIQRVGIKDAHLPFLIKTKDGGFQQVLARIRFTVSLPMEYKGTHMSRFLEILMPWSTKPLAEPEMEAMLEEALERLDAQSAEVELAFKYFIDKYAPVSGRRSILDLDCRFKGTKRRGEAMVFELGVDVPFTSLCPCSKEISAYGAHNQRSVCRVEVRFQPGEECIFIEDLAKLVEAQGSSPIYPLLKREDEKYVTEAAYENPKFVEDILRDTVLALRKLPGIAWFSLACENYESIHNHNAFAAHEEYVARP

SEQ ID NO: 10988 - protein, 194 aa, Mitsuokella sp.
  REGION 1..194: note = tr|U2TD49|U2TD49_9FIRM GTP cyclohydrolase 1; OS = Mitsuokella sp. oral taxon 131 str. W9106 OX=1321781; GN = folE PE=3 SV=1
MDKKRSAREQKAARAAQDFLTALGVDTAVRGMEATPMRVAKLYATLFDGLGTDPNTLWGEVFETCARGLVAVRHIPFCSMCEHHLVPFFGAVSIAYLPGRGRVAGFSKFAEVVTCLSHRPQLQERLTAEIAEAVHTGLGAHGVLVVCEAEQLCMMLRSTHARGTRTVTSEMRGDEPLDSFAAQAWQMLGGAKKA

SEQ ID NO: 10989 - protein, 221 aa, unidentified
  source 1..221: note = Mixta gaviniae
  REGION 1..221: note = tr|A0A1X1DK12|A0A1X1DK12_9GAMM GTP cyclohydrolase 1; OS = Mixta gaviniae OX=665914 GN=folE PE=3 SV=1
MATLSHEAALVHDALVARGLETPLRAPVREMDDETRKRLIAGHMTEIMQLLNLDLEDDSLMETPHRIAKMYVNEIFSGLDYANFPKITLIDNKMKVDEMVTVRDITLTSTCEHHFVIIDGKATVAYIPKDKVIGLSKINRIVQFFAQRPQVQERLTQQVLIALQTLLGTNNVAVSIDAVHYCVKARGIRDANSATTTTSLGGLFKSSQNTRQEFLRAVRHN

SEQ ID NO: 10990 - protein, 221 aa, unidentified
  source 1..221: note = Mixta sp.
  REGION 1..221: note = tr|A0A506VAB1|A0A506VAB1_9GAMM GTP cyclohydrolase 1; OS = Mixta sp. BIT-26 OX=2562439 GN=folE PE=3 SV=1
MVTLSHEAALVHEALLARGLETPLRAPARKMDDETRKRLIAGHMTEIMQLLNLDLDDDSLMETPHRIAKMYVDEIFSGLDYANFPKITLIDNKMKVDEMVTVRDITLTSTCEHHFVIIDGKATVAYIPKDKVIGLSKINRIVQFFAQRPQVQERLTQQVLIALQTLLGTNNVAVSIDAVHYCVKARGIRDANSATTTTSLGGLFKSSQNTRQEFLRAVRHN

SEQ ID NO: 10991 - protein, 221 aa, unidentified
  source 1..221: note = Mixta theicola
  REGION 1..221: note = tr|A0A2K1QAL2|A0A2K1QAL2_9GAMM GTP cyclohydrolase 1; OS = Mixta theicola OX=1458355 GN=folE PE=3 SV=1
MSTLSHEAALVHEALVARGLETPLRAPVREMDDETRKRLIAGHMTEIMQLLNLDLEDDSLMETPHRIAKMYVNEIFSGLDYANFPKITLIENKMKVDEMVTVRDITLTSTCEHHFVIIDGQATVAYIPKDKVIGLSKINRIVQFFAQRPQVQERLTQQILIALQTLLGTNNVAVSIDAVHYCVKARGIRDANSATTTTSLGGLFKSSQNTRQEFLRAVRHN

SEQ ID NO: 10992 - protein, 329 aa, unidentified
  source 1..329: note = Mizugakiibacter sediminis
  REGION 1..329: note = tr|A0A0K8QMB6|A0A0K8QMB6_9GAMM GTP cyclohydrolase FolE2 OS=Mizugakiibacter sediminis OX=1475481 GN=folE2; PE = 3 SV=1
MRETTMSTDLNTQRAMPDVAVEARPGVAGRLEWVGMDEVQMPVRLATADGGVVQSAARVAAYVNLARPEARGIHMSRLYLHLDRTLDAEPLTPALLRRMLRGFLDSHADLSDRAMVRIAFEHLVRRPALVSDHRGWKAYPVTITATLQRGRFEVELATAVLYSSTCPASAALARQLIQDGFAQAFPAAQALDREAVLAWLGSEHGIRATPHSQRSAAEVRVRLNPGFDFPLIDLIDRIEDALQTPVQAAVKRVDEQRFALLNGGNLMFCEDAARRLQQALDADERIADFWVRASHYESLHPHDAVAIATKGVEGGYGPADHALAPLGAR

SEQ ID NO: 10993 - protein, 201 aa, unidentified
  source 1..201: note = Mizugakiibacter sediminis
  REGION 1..201: note = tr|A0A0K8QS29|A0A0K8QS29_9GAMM GTP cyclohydrolase 1; OS = Mizugakiibacter sediminis OX=1475481 GN=folE PE=3 SV=1
MAKNKKVAPAAVTREAAEEAVRTLLRWAGEDPAREGLLDTPGRVVDAYRDWFSGYAIDPAEYLGRTFEEVAGYDEMIVLRDIHFESFCEHHMAPIIGRAHVGYLPTDKVVGISKLARVVDAYARRFQVQEKLTAQIAHCIDKVLQPRGVAVVIDAQHQCMTTRGVHKRGVSMITSQMLGAFRDDARTRAEFLRFIDIDNHA

SEQ ID NO: 10994 - protein, 194 aa, Mobilicoccus pelagius
  REGION 1..194: note = tr|H5US78|H5US78_9MICO GTP cyclohydrolase 1; OS = Mobilicoccus pelagius NBRC 104925 OX=1089455 GN=folE; PE = 3 SV=1
MPVQPPVDLERVERAVREILLAVGEDPDREGLRETPARVARSYVELFAGLRADPADILGTTFDIEHEEMVLVRDIELYSTCEHHLVPFHGVAHVGYIPGRNGQVTGLSKIARLVDVYARRPQVQERLTTQIADALVEHLEPRGVIVVLDCEHLCMSMRGVRKPGARTTTSAVRGQLRAPATRAEAMSLILGGGR

SEQ ID NO: 10995 - protein, 184 aa, unidentified
  source 1..184: note = Mobilisporobacter senegalensis
  REGION 1..184: note = tr|A0A3N1XN93|A0A3N1XN93_9FIRM GTP cyclohydrolase 1; OS = Mobilisporobacter senegalensis OX=1329262 GN=folE PE=3; SV = 1
MIDEKKIEQAVRLFLEGIGEDADREGLAETPRRISTMCSELFAGLGQDAGEHLARTFQADNNEMVLERDITFYSVCEHHFLPFYGKAHIAYIPDGKVVGISKLARTVEVYARRPQIQEQMTAQIADDIMKNLKPKGVMVMIEAEHMCMTMRGVKKPGTTTVTHVCRGEFENNESLKNTFFHFIR

SEQ ID NO: 10996 - protein, 191 aa, Mobiluncus curtisii
  REGION 1..191: note = tr|D6ZIY7|D6ZIY7_MOBCV GTP cyclohydrolase 1; OS = Mobiluncus curtisii (strain ATCC 43063 / DSM 2711 / V125) OX=548479 GN=folE PE=3 SV=1
MNASYNPDGVTQAVRDLLVAVGEDPDREGLRDTPERMARSFAEMLQGYREDPKKHLERMFPVEHNDLVLVKDIPFNSMCEHHLLPFVGLAHVGYIPQGKRVTGLSKLARLVDGYAHRLQVQERLTQQIADALWDVLQPQGVIVVLQAEHMCMTIRGVKKPGARTTTSAVRGVMEQSSTTRAEAMSLILSAD

SEQ ID NO: 10997 - protein, 191 aa, Mobiluncus curtisii
  REGION 1..191: note = tr|E6M0W0|E6M0W0_9ACTO GTP cyclohydrolase 1; OS = Mobiluncus curtisii ATCC 51333 OX=887326 GN=folE PE=3; SV = 1
MNASYNPDGVTQAVRDLLVAVGEDPDREGLRDTPERMARSFAEMLQGYQEDPKKHLERMFPVEHNDLVLVKDIPFNSMCEHHLLPFVGRAHVGYIPQGKRVTGLSKLARLVDGYAHRLQVQERLTQQIADALWDVLQPQGVIVVLQAEHMCMAIRGVKKPGARTTTSAVRGVMEQSSTTRAEAMSLILSAD

SEQ ID NO: 10998 - protein, 191 aa, unidentified; identical to SEQ ID NO: 10996
  source 1..191: note = Mobiluncus holmesii
  REGION 1..191: note = tr|E6M1N2|E6M1N2_9ACTO GTP cyclohydrolase 1; OS = Mobiluncus holmesii ATCC 35242 OX=887899 GN=folE PE=3; SV = 1

SEQ ID NO: 10999 - protein, 192 aa, Mobiluncus mulieris
  REGION 1..192: note = tr|E1MF84|E1MF84_9ACTO GTP cyclohydrolase 1; OS = Mobiluncus mulieris FB024-16 OX=866770 GN=folE PE=3 SV=1
MTVRKYDAAKVEQAVRDLLAAVGEDPQREGLIETPARLGRSFAELLEGYREDPKEHLRRLFPVDHNDLILVKDIPFNSTCEHHLLPFFGHAHVGYIPKGKRVTGLSKLARLVDGYAHRLQVQERLTEQISQALWEVLDPLGVIVVLQAEHMCMTVRGVKKPGARTTTSAVRGVMQSSQVTRSEAMSLILSRD

SEQ ID NO: 11000 - protein, 192 aa, Mobiluncus mulieris; identical to SEQ ID NO: 10999
  REGION 1..192: note = tr|A0A2J9KP38|A0A2J9KP38_9ACTO GTP cyclohydrolase 1; OS = Mobiluncus mulieris OX=2052 GN=folE PE=3 SV=1

SEQ ID NO: 11001 - protein, 195 aa, unidentified
  source 1..195: note = Modestobacter caceresii
  REGION 1..195: note = tr|A0A098YAC8|A0A098YAC8_9ACTN GTP cyclohydrolase 1; OS = Modestobacter caceresii OX=1522368 GN=folE PE=3 SV=1
MADLAEGRVDAARIETAVREILLAIGEDPDRPGLVDTPARVARAYGETFAGLSQDPYDVLATTFDEDHDELVLVKDIPMYSTCEHHLVPFHGRAHVGYIPGADGRVTGLSKLARLVEVYARRPQVQERMTRQVADSLFEVLKPQGVIVVVEAEHLCMAMRGVRKPGATTITSAVRGIFRESPATRSEAMSLILGR

SEQ ID NO: 11002 - protein, 223 aa, Modestobacter marinus
  REGION 1..223: note = tr|I4ES17|I4ES17_9ACTN GTP cyclohydrolase 1; OS = Modestobacter marinus OX=477641 GN=folE PE=3 SV=1
MSAAPGGARESAAGQVDGAGLDPRTGDPVADLPEGRFDAGRIEAAVREILAAIGEDPDRPGLQDTPARVARAYAESFAGLAQDPADALATTFDEGHEELVLVKDIAMYSTCEHHLVPFHGVAHVGYIPGYDGRVTGLSKLARLVEVYARRPQVQERMTRQIADSLYDVLKPRGVIVVIEAEHLCMAMRGVRKPGTRTMTSAVRGIFRENAATRSEAMSLILGR

SEQ ID NO: 11003 - protein, 199 aa, Modestobacter multiseptatus
  REGION 1..199: note = tr|A0A543C7E5|A0A543C7E5_9ACTN GTP cyclohydrolase 1; OS = Modestobacter multiseptatus OX=88139 GN=folE PE=3 SV=1
MTRADSGKPTGVDQARAAAAVRELLLAVGEDPDRPGLQDTPDRVARAYAETFAGLAMDPAEVLSVTFEEDHDELVLVKDIPMYSTCEHHLVPFHGMAHVGYIPGADGRVTGLSKLARLVDVFARRPQVQERMTRQIADSLYEGLKPQGVIVVVEAEHLCMAMRGVRKPGAITMTSAVRGIFRDNPATRAEAMSLALGRS

SEQ ID NO: 11004 - protein, 219 aa, unidentified
  source 1..219: note = Modestobacter roseus
  REGION 1..219: note = tr|A0A562IYD6|A0A562IYD6_9ACTN GTP cyclohydrolase 1; OS = Modestobacter roseus OX=1181884 GN=folE PE=3 SV=1
MSGRVTGGGHEVDGVGQDQVTGDVVGDLRPGRIDSARAEAAVRELLLAIGEDPDRPGLVDTPARVARAYAEVFAGLDQDPYDVLATTFDEDHDELVLVKDIPMYSTCEHHLVPFHGVAHVGYIPGPDGRVTGLSKLARLVDVYARRPQVQERMTRQVADALFDVLKPQGVIVVVQAEHLCMSMRGIRKPGSSTTTSAVRGVFRDSAATRSEAMSLILQR

SEQ ID NO: 11005 - protein, 199 aa, Modestobacter sp.
  REGION 1..199: note = tr|A0A1H3DWH3|A0A1H3DWH3_9ACTN GTP cyclohydrolase 1; OS = Modestobacter sp. DSM 44400 OX=1550230 GN=folE PE=3 SV=1
MTAGTSGGRFEVDQARAEAAVRELLLAVGEDPDRPGLQDTPARVARAYAETFAGLGQDADEILSTTFDEDHDELVLVKDIPMYSTCEHHLVPFHGMAHVGYIPGADGRVTGLSKLARLVDVYARRPQVQERMTRQIADSLFEGLKPRGVIVVIEAEHLCMAMRGIRKPGSRTMTSAVRGMFRDNPATRAEAMSLILGRS

SEQ ID NO: 11006 - protein, 192 aa, Modestobacter sp.
  REGION 1..192: note = tr|A0A1S8C6G6|A0A1S8C6G6_9ACTN GTP cyclohydrolase 1; OS = Modestobacter sp. VKM Ac-2676 OX=1678130 GN=folE PE=3; SV = 1
MRPGRIDSARAEAAVRELLLAIGEDPDRPGLVDTPARVARAYAEVFAGLDQDPQEVLATTFDEDHDELVLVKDIPMYSTCEHHLVPFHGVAHVGYIPGADGRVTGLSKLARLVDVYARRPQVQERLTRQVADALYDALKPQGVIVVVQAEHLCMSMRGIRKPGSSTTTSAVRGVFRDSAATRSEAMSLILQR

SEQ ID NO: 11007 - protein, 195 aa, Modestobacter versicolor
  REGION 1..195: note = tr|A0A323V6U7|A0A323V6U7_9ACTN GTP cyclohydrolase 1; OS = Modestobacter versicolor OX=429133 GN=folE PE=3 SV=1
MADLPEGRVDTGRIEAAVRELLAAIGEDPDRPGLTDTPARVGRAYAEMFAGLAQDPYEVLATTFDEDHDELVLVKDIPMYSTCEHHLVPFHGVAHVGYIPGTDGRVTGLSKLARLVEVYARRPQVQERLTRQVADALYEVLKPQGVIVVVQAEHLCMAMRGIRKPGATTVTSAVRGIFRDSAATRSEAMSLILGR

SEQ ID NO: 11008 - protein, 219 aa, Moellerella wisconsensis
  REGION 1..219: note = tr|A0A0N0I9I2|A0A0N0I9I2_9GAMM GTP cyclohydrolase 1; OS = Moellerella wisconsensis ATCC 35017 OX=1354267 GN=folE; PE = 3 SV=1
MSSLSKEAELVHAALEARGLETPLRIQSIPREERKSLIEGHMTEIMQLLNLDLTDDSLADTPRRIAKMYVDEIFSGLDYANFPKITLIENKMKVDEMVTVRDITMTSTCEHHFVTIDGKATVAYIPKDKVIGLSKINRIVQFFAQRPQVQERLTQQILTALQTLLGTNNVAVSIDAVHYCVKARGIRDATSSTTTTSLGGLFKSSQNTRQEFLRAVRHL

SEQ ID NO: 11009 - protein, 219 aa, Moellerella wisconsensis; identical to SEQ ID NO: 11008
  REGION 1..219: note = tr|A0A485A209|A0A485A209_9GAMM GTP cyclohydrolase 1; OS = Moellerella wisconsensis OX=158849 GN=folE PE=3 SV=1

SEQ ID NO: 11010 - protein, 185 aa, Mogibacterium diversum
  REGION 1..185: note = tr|A0A2S0L3A5|A0A2S0L3A5_9FIRM GTP cyclohydrolase 1; OS = Mogibacterium diversum OX=114527 GN=folE PE=3 SV=1
MDREKIMEGVKLILDGIGEDVTREGLLETPERVAKMYEELAGGYTDSASTHLAKRFDVENNDIVLEKDIEFYSLCEHHMLPFYGRVAIAYIPNGEVIGLSKMARTVEVFAKRLQLQERMTAQIADAFMEELNPKGVMVMIEAEHMCMTMRGIKKPGTKTVTVMARGSFENDECLQNTFFRMLEHR

SEQ ID NO: 11011 - protein, 186 aa, Mogibacterium pumilum
  REGION 1..186: note = tr|A0A223AU92|A0A223AU92_9FIRM GTP cyclohydrolase 1; OS = Mogibacterium pumilum OX=86332 GN=folE PE=3 SV=1
MMDREKIMEGVKLILEGIGEDVEREGLLETPERVAKMYEELAGGYTDSASTHLAKRFDVENNDIVLEKDIEFYSLCEHHMLPFYGRVAIAYIPDDEVIGLSKMARTVEVFAKRLQLQERMTVQIADAFMEELSPKGVMVLIEAEHMCMTMRGIKKPGTKTVTVMARGSFENDECLQNTFFRMLEHR

SEQ ID NO: 11012 - protein, 185 aa, Mogibacterium sp.
  REGION 1..185: note = tr|J4VXZ8|J4VXZ8_9FIRM GTP cyclohydrolase 1; OS = Mogibacterium sp. CM50 OX=936375 GN=folE PE=3 SV=1
MDKDKIIEGVKLILEGIGEDPVREGLIETPERVAKMYEELVCGYNDSAGTHLEKRFAVENNDIVMEKDIEFYSLCEHHILPFYGRAAIAYIPNGEVIGLSKMARTVEVFAKRLQLQERLTAQIADAFMNELKPKGVMVLIEAEHMCMTMRGIKKPGTKTVTSIARGAFDGNEQLQNKFFRMLERR

SEQ ID NO: 11013 - protein, 185 aa, Mogibacterium timidum; identical to SEQ ID NO: 11012
  REGION 1..185: note = tr|X8ISX2|X8ISX2_9FIRM GTP cyclohydrolase 1; OS = Mogibacterium timidum ATCC 33093 OX=1401079 GN=folE; PE = 3 SV=1

SEQ ID NO: 11014 - protein, 225 aa, unidentified
  source 1..225: note = Moheibacter sediminis
  REGION 1..225: note = tr|A0A1W2C9I0|A0A1W2C9I0_9FLAO GTP cyclohydrolase 1; OS = Moheibacter sediminis OX=1434700 GN=folE PE=3 SV=1
MSDNNIHDEIGDEHFSSHHDTPMRSDAFELSPEEKIAKIEEHFTTIMHTLGLDLTDDSLKGTPKRVAKMFVNETFGGLHPDRKPKMSTFENKYKYNQMLVEKDITVYSTCEHHFLPIVGKAHVGYISNGKVIGLSKMNRIVDYFAKRPQVQERLTMQIVKAMQDALGTEDVACVIDAKHLCVNSRGIRDIDSSTVTAELGGIFKTDPTTRREFLHYIGVHTKFNV

SEQ ID NO: 11015 - protein, 207 aa, unidentified
  source 1..207: note = Monaibacterium marinum
  REGION 1..207: note = tr|A0A2C9CVQ7|A0A2C9CVQ7_9RHOB GTP cyclohydrolase 1; OS = Monaibacterium marinum OX=1690039 GN=folE PE=3 SV=1
MNAHDSKIENASPQRPTREEAEEAVRTLLRWAGDDPAREGLLETPKRVTKAYGDWFRGYSEDPTEMLQRTFEEVEGYDEMVVLRDIRFESYCEHHMAPIIGKAHVGYIPNGRVVGISKLARVVDAFAKRLQVQEKMNAQIAQALMTTLEPQGVAVVLEGEHHCMSTRGVHKPGVSMVTSTMFGVFRDDPATRKEFLSVIGNPTNRMG

SEQ ID NO: 11016 - protein, 231 aa, unidentified
  source 1..231: note = Mongoliibacter ruber
  REGION 1..231: note = tr|A0A2T0WEC2|A0A2T0WEC2_9BACT GTP cyclohydrolase 1; OS = Mongoliibacter ruber OX=1750599 GN=folE PE=3 SV=1
MKQKETLLNTMGINYSHDIDEIGDEHIGTSHDTPLREDAFEMDDELKMELIEKHFKEIMHVLGLDLTDDSLKGTPKRVAKMYIKEVFSGLNPKNKPDVKLFENKYKYKEMLVEKDITFFSNCEHHFVPIYGKAHVAYISNGNVIGLSKINRIVQYFAKRPQVQERLTMQIGNELKEILGTDDIAVVIDAHHMCVSSRGIQDVSSSTVTSYYGGKFETDENTRAEFMKYISL

SEQ ID NO: 11017 - protein, 197 aa, unidentified
  source 1..197: note = Monoglobus pectinilyticus
  REGION 1..197: note = tr|A0A2K9P5G2|A0A2K9P5G2_9FIRM GTP cyclohydrolase 1; OS = Monoglobus pectinilyticus OX=1981510 GN=folE PE=3 SV=1
MAENKKIDTKAIEEHIRGILTALGDDPNREGLADTPKRVAKMYAEVFDGMNYTNHEIAQMFNKTFEDDPDSYHNSNDIVVVKNIEVFSFCEHHMALMYDMNVSVAYIPNGRVIGLSKIARIADMVAKRLQLQERIGSDIAEIMQEITGSDDVAVIIEASHSCMTARGIQKPSAKTRTRTMRGKFESDTSLVTQLMGE

SEQ ID NO: 11018 - protein, 240 aa, unidentified
  source 1..240: note = Moorea bouillonii
  REGION 1..240: note = tr|A0A1U7NBM6|A0A1U7NBM6_9CYAN GTP cyclohydrolase 1; OS = Moorea bouillonii PNG OX=568701 GN=folE PE=3 SV=1
MTIASSNGFNRVESVSTAKSINGNEKHQLETRPERNTQNGHQPNLQAPLEELNQEMINAVTTILLGVGEDPQREGLLKTPKRVAEAMRFLTSGYNQSLEAIVNGAIFDEGHNEMVLVRDINFFSLCEHHMLPFMGKAHVAYIPNQKVVGLSKIARVVEMYARRLQVQERLTRQIAEAIQAVLDPKGVAVVMEATHMCMVMRGVQKPGSWTATSAMVGIFQEDQKTREEFLNLIRHQPNFF

SEQ ID NO: 11019 - protein, 218 aa, unidentified
  source 1..218: note = Moorea bouillonii
  REGION 1..218: note = tr|A0A1U7N214|A0A1U7N214_9CYAN GTP cyclohydrolase 1; OS = Moorea bouillonii PNG OX=568701 GN=folE PE=3 SV=1
MTLGKFEPNQIEKINRKLPKLNTTQQPLVSEEEMRQAVRTLLLGLGEDPDREGLKDTPKRVVKALKFLTSGYNQSLDELLNGAVFHENTNEMVLVRDIDLFSSCEHHILPILGHAHVAYIPDGKVIGLSKIARICEMYGRRLQVQERLTAQIADALQGLLKPKGVAVVVEASHMCMVMRGVQKPGSWTATSAVRGVFANDPKTRQEFMSLIHHNPSMH

SEQ ID NO: 11020 - protein, 240 aa, unidentified
  source 1..240: note = Moorea producens
  REGION 1..240: note = tr|A0A1D8TP28|A0A1D8TP28_9CYAN GTP cyclohydrolase 1; OS = Moorea producens PAL-8-15-08-1 OX=1458985 GN=folE PE=3; SV = 1
MTIASSNGFNRVESVSTAKSINGNEKHQLETRPERNTQNGHQPNLQPPLEELNQEMINAVTTILLDVGEDPQREGLLKTPKRVAEAMRFLTSGYNQSLEAIVNGAIFDEGHNEMVLVRDINFFSLCEHHMLPFMGKAHVAYIPNQKVVGLSKIARVVEMYARRLQVQERLTRQIAEAIQAVLDPKGVAVVMEATHMCMVMRGVQKPGSWTATSAMVGIFQEDQKTREEFLNLIRHQPNFF

SEQ ID NO: 11021 - protein, 218 aa, unidentified
  source 1..218: note = Moorea producens
  REGION 1..218: note = tr|A0A1D9G0R7|A0A1D9G0R7_9CYAN GTP cyclohydrolase 1; OS = Moorea producens JHB OX=1454205 GN=folE PE=3 SV=1
MTLGKSEPNQIDKINRKLPKLNTTHQPLVSEEEMRQAVRTLLLGLGEDPDREGLKDTPKRVVKALKFLTSGYHQSLDELLNGAVFHENTNEMVLVRDIDLFSSCEHHILPILGHAHVAYIPDGKVIGLSKIARICEMYGRRLQVQERLTAQIADALQGLLKPKGVAVVVEASHMCMVMRGVQKPGSWTATSAVRGVFADDPKTRQEFMSLIHYNRSMH

SEQ ID NO: 11022 - protein, 185 aa, Moorella glycerini
  REGION 1..185: note = tr|A0A0C7N4N3|A0A0C7N4N3_9THEO GTP cyclohydrolase 1; OS = Moorella glycerini OX=55779 GN=folE PE=3 SV=1
MDKEKIRQAVRMLIEAVGEDPEREGLRETPRRIADMYAEIFAGIDRDPGEELTVVFDEHHEEMVLVKDIPLYSVCEHHFLPFLGKAHVAYIPRGKITGLSKLARVVDIAARRPQVQERLTSQIADIIMEKLDPYGVVVVIEAEHLCMSMRGVKKPGHLTITSAVRGLFRRDQAARAEAMALIRGK

SEQ ID NO: 11023 - protein, 185 aa, Moorella humiferrea
  REGION 1..185: note = tr|A0A2T0AWI6|A0A2T0AWI6_9THEO GTP cyclohydrolase 1; OS = Moorella humiferrea OX=676965 GN=folE PE=3 SV=1
MDKEKIRQAVRMIIEAVGEDPEREGLRETPRRIADMYAEIFAGINRDPGEELTVVFDEHHEEMVLVKDIPLYSVCEHHFLPFVGKAHVAYIPRGKITGLSKLARVVDIASRRPQVQERLTSQIADIIMEKLDPYGVVVVIEAEHLCMSMRGIKKPGHITITSAVRGLFRRDQAARAEAMSLIRGK

SEQ ID NO: 11024 - protein, 185 aa, Moorella mulderi; identical to SEQ ID NO: 11022
  REGION 1..185: note = tr|A0A151ATZ2|A0A151ATZ2_9THEO GTP cyclohydrolase 1; OS = Moorella mulderi DSM 14980 OX=1122241 GN=folE PE=3 SV=1

SEQ ID NO: 11025 - protein, 186 aa, Moorella sp.
  REGION 1..186: note = tr|A0A101EBX9|A0A101EBX9_9THEO GTP cyclohydrolase 1; OS = Moorella sp. 60_41 OX=1635264 GN=folE PE=3 SV=1
MFDTAKIERAVRMLLEAIGEDPEREGLKDTPRRVARMYQEIFAGLEQDPADAFSVLYTEKHEELVLVKDIPFYSMCEHHLLPFFGKVHLGYIPRRGRVVGLSKLVRGIETFAKRPQLQERMTKQIADAIMEHVGALGVIVVIEAEHMCMTMRGVKKPGSLTITSAVRGVLHDDEALRSEALSLLRG

SEQ ID NO: 11026 - protein, 185 aa, Moorella sp.
  REGION 1..185: note = tr|A0A4P6B5C6|A0A4P6B5C6_9THEO GTP cyclohydrolase 1; OS = Moorella sp. E306M OX=2572683 GN=folE PE=3 SV=1
MDKEKIRQAVRMLIEAVGEDPEREGLRETPRRIADMYAEIFAGINRDPGEELTVVFDEHHEEMVLVKDIPLYSICEHHFLPFLGKAHVAYIPRGKITGLSKLARVVDIAARRPQVQERLTSQIADIIMEKLDPYGVVVVIEAEHLCMSMRGVKKPGHLTITSAVRGLFRRDQAARAEAMALIRGK

SEQ ID NO: 11027 - protein, 185 aa, Moorella thermoacetica
  REGION 1..185: note = tr|Q2RLE7|Q2RLE7_MOOTA GTP cyclohydrolase 1; OS = Moorella thermoacetica (strain ATCC 39073 / JCM 9320); OX = 264732 GN=folE PE=3 SV=1
MDKEKIRQAVRMIIEAVGEDPDREGLRETPRRIADMYEEIFAGINRDPGEELTVVFDEHHEEMVLVKDIPLYSICEHHFLPFLGRAHVAYIPRGKITGLSKLARVVDIAARRPQVQERLTSQIADIIMEKLNPYGVVVVIEAEHLCMSMRGIKKPGSLTITSAVRGLFRRDQAARAEAMSLIQGR

SEQ ID NO: 11028 - protein, 185 aa, Moorella thermoacetica
  REGION 1..185: note = tr|A0A1J5NUD7|A0A1J5NUD7_MOOTH GTP cyclohydrolase 1; OS = Moorella thermoacetica OX=1525 GN=folE PE=3 SV=1
MDKEKIRQAVRMIIEAVGEDPDREGLRETPRRIADMYEEIFAGIDRDPGNELTVVFDENHEEIVLVKNIPLYSICEHHFLPFLGRAHVAYIPRGKITGLSKLARVVDTAARRPQVQERLTTQIADIIMEKLNPYGVVVIIEAEHLCMSMRGIKKPGSLTITSAVRGVFRRDQAARSEAMSLIRGR

SEQ ID NO: 11029 - protein, 184 aa, Moraxella atlantae
  REGION 1..184: note = tr|A0A1B8QL76|A0A1B8QL76_9GAMM GTP cyclohydrolase 1; OS = Moraxella atlantae OX=34059 GN=folE PE=3 SV=1
MIDPTIYSQLLTAMGEDIQRAGLIDTPTRAAKAMEFLTQGYTQTLDEVTNQALFPTDNNALILVKNIEFYSMCEHHLLPFYGVAHVGYVPNGRVLGLSKMARIVDMFARRLQIQENLTQQIAQAVMDVTGAQGAAVVMDAAHMCMMMRGVMRQQARTRSVALLGTIKTDPQARQEFLAALPSVD

SEQ ID NO: 11030 - protein, 184 aa, Moraxella atlantae
  REGION 1..184: note = tr|A0A1B8QCC7|A0A1B8QCC7_9GAMM GTP cyclohydrolase 1; OS = Moraxella atlantae OX=34059 GN=folE PE=3 SV=1
MIDPTIYSQLLTAMGEDIQRAGLIDTPTRAAKAMEFLTQGYTQTLDEVTNQALFPTDNNELILVKNIEFYSMCEHHLLPFYGVAHVGYVPNGRVLGLSKMARIVDMFARRLQIQENLTQQIAQAVMDVTGAQGAAVVMDAAHMCMMMRGVMRQQARTRSVALLGTIKTDPQARQEFLAALPSVD

SEQ ID NO: 11031 - protein, 205 aa, Moraxella bovis
  REGION 1..205: note = tr|A0A1T0A6E9|A0A1T0A6E9_MORBO GTP cyclohydrolase 1; OS = Moraxella bovis OX=476 GN=folE PE=3 SV=1
MCQHCNSHATSAFSFDVEATAQNYANIISASGENLSREGLLDTPMRAAKAFRDLTAGYHQDLHTVANDAIFASDNADLVLVQNIEFYSLCEHHILPFFGVAHIGYLPNGKVLGLSKLARIVDMYAKRLQIQENLTKQVAQAIHELTDCRGVAVVMDASHMCMMMRGVGKQQSTTRTTCMLGVYETDNQARNEFLSAIPKRVPAFG

SEQ ID NO: 11032 - protein, 205 aa, Moraxella bovis
  REGION 1..205: note = tr|A0A378PSN5|A0A378PSN5_MORBO GTP cyclohydrolase 1; OS = Moraxella bovis OX=476 GN=folE PE=3 SV=1
MCQHCNSHATSAFSFDVEATAQNYANIISASGENLSREGLLDTPMRAAKAFRDLTAGYHQDLHTVANDAIFASDNADLVLVQNIEFYSLCEHHILPFFGVAHIGYLPNGKVLGLSKLARIVDMYAKRLQIQENLTKQVAQAIHELTDCRGVAVVMDASHMCMMMRGVGKQQSTTRTTCMLGVYETDNQVRNEFLSAIPKRVPAFG

SEQ ID NO: 11033 - protein, 201 aa, Moraxella bovoculi
  REGION 1..201: note = tr|A0A0U2B9E4|A0A0U2B9E4_9GAMM GTP cyclohydrolase 1; OS = Moraxella bovoculi OX=386891 GN=folE PE=3 SV=1
MSNSDNSNFTPDYDKIASHYASIIEGCGEDLSREGLLDTPMRAAKAFGYLTRGYHQSLEVVANDAIFPSDNPELVLVQNIEFYSLCEHHLLPFYGVAHVGYLPEGKVLGLSKVARIVDMYARRLQIQENLTKQIATAIEELTGCRGVAVVMDASHMCMMMRGVGKQQSTTRTMSMLGEFTTNNTARAEFLDAIPRRTPAFG

SEQ ID NO: 11034 - protein, 201 aa, Moraxella bovoculi
  REGION 1..201: note = tr|A0A3F3AKQ3|A0A3F3AKQ3_9GAMM GTP cyclohydrolase 1; OS = Moraxella bovoculi OX=386891 GN=folE PE=3 SV=1
MSNSDNSNFTPDYDKIASHYASIIEGCGEDLSREGLLDTPMRAAKAFGYLTRGYHQSLEVVANDAIFPSDNPELVLVQNIEFYSLCEHHLLPFYGVAHVGYLPEGKVLGLSKVARIVDMYARRLQIQENLTKQIATAIEELTGCRGVAVVMDASHMCMMMRGVGKQQSTTRTMSMLGELTTNNTARAEFLDAIPRRTPAFG

SEQ ID NO: 11035 - protein, 201 aa, Moraxella canis
  REGION 1..201: note = tr|A0A1S9ZJ08|A0A1S9ZJ08_9GAMM GTP cyclohydrolase 1; OS = Moraxella canis OX=90239 GN=folE PE=3 SV=1
MSNSDTVNFIHDYETLSKHYAQIISSAGEDLTRDGLIDTPMRAAKAFGYLTRGYHQDLATVANNAVFDSDNPELVLVQNIEFYSLCEHHLLPFYGVAHVGYLPDGKVLGLSKVARIVDMYARRLQIQENLTKQVASAIEELTGCRGVAVIMDASHMCMMMRGVGKQQSTTRTTSMLGEFTSNHDARREFLDAIPRRAPAFG

SEQ ID NO: 11036 - protein, 205 aa, Moraxella caprae; identical to SEQ ID NO: 11031
  REGION 1..205: note = tr|A0A378R018|A0A378R018_9GAMM GTP cyclohydrolase 1; OS = Moraxella caprae OX=90240 GN=folE PE=3 SV=1

SEQ ID NO: 11037 - protein, 201 aa, Moraxella catarrhalis
  REGION 1..201: note = tr|A0A3A9MR60|A0A3A9MR60_MORCA GTP cyclohydrolase 1; OS = Moraxella catarrhalis OX=480 GN=folE PE=3 SV=1
MSNSDTVNFIHDYEILSKHYAQIISSAGEDLTRDGLIDTPMRAAKAFGYLTRGYHQDLATVANNAVFDSDNPELVLVQNIEFYSLCEHHLLPFYGVAHVGYLPDGKVLGLSKVARIIDMYARRLQIQENLTKQVASAIEELTGCRGVAVIMDACHMCMMMRGVGKQQSTTRTTSMLGEFTTNHDARREFLDAVPRRMPAFG

SEQ ID NO: 11038 - protein, 171 aa, Moraxella catarrhalis
  REGION 1..171: note = tr|A0A198UDM5|A0A198UDM5_MORCA GTP cyclohydrolase 1; OS = Moraxella catarrhalis OX=480 GN=folE PE=3 SV=1
MTRDGLIDTPMRAAKAFGYLTRGYHQDLATVANNAVFDSDNPELVLVQNIEFYSLCEHHLLPFYGVAHVGYLPDGKVLGLSKVARIIDMYARRLQIQENLTKQVASAIEELTGCRGVAVIMDACHMCMMMRGVGKQQSTTRTTSMLGEFTTNHDARREFLDAVPRRMPAFG

SEQ ID NO: 11039 - protein, 201 aa, Moraxella caviae
  REGION 1..201: note = tr|A0A1S9ZY04|A0A1S9ZY04_9GAMM GTP cyclohydrolase 1; OS = Moraxella caviae OX=34060 GN=folE PE=3 SV=1
MSNSDHTTFTPDYPAIAQHYADIIAGAGEDLSREGLLDTPMRAAKAFGYLTRGYHQQLDVVANDAIFPSDNGELVLVQNIEFYSLCEHHLLPFFGVAHVGYLPEGKVLGLSKVARIVDMYARRLQIQENLTKQVAEAISELTGCRGVAVVMDASHMCMMMRGVGKQQSTTRTMSMLGEFSSNAAVRSEFLSAVPRRTPAFG

SEQ ID NO: 11040 - protein, 217 aa, Moraxella cuniculi
  REGION 1..217: note = tr|A0A3S4UKZ3|A0A3S4UKZ3_9GAMM GTP cyclohydrolase 1; OS = Moraxella cuniculi OX=34061 GN=folE PE=3 SV=1
MLSYSFFVILFYFVKAMSNSDTANFIPDYNAVAEHYAQIIAKAGEDLTRDGLLDTPMRAAKAFGYLTRGYHQDLATVANDAIFDSDNPELVLVQNIEFYSLCEHHLLPFYGVAHVGYLPNGKVLGLSKVARIVDMYARRLQIQENLTKQIATAIESLTGCRGVAVVMDASHMCMMMRGVGKQQSTTRTTSMLGEFAQNTQARQEFLEALPRRKPAFG

SEQ ID NO: 11041 - protein, 217 aa, Moraxella cuniculi
  REGION 1..217: note = tr|A0A1N7FM19|A0A1N7FM19_9GAMM GTP cyclohydrolase 1; OS = Moraxella cuniculi DSM 21768 OX=1122245 GN=folE PE=3; SV = 1
MLSYSFFVILFYFVKAMSNSDTANFIPDYNAVAEHYAQIIAKAGEDLTRDGLLDTPMRAAKAFGYLTRGYHQDLATVANDAIFDSDNPELVLVQNIEFYSLCEHHLLPFYGVAHVGYLPNGKVLGLSKVARIVDMYARRLQIQENLTKQIATAIESLTGCRGVAVIMDASHMCMMMRGVGKQQSTTRTTSMLGEFAQNTQARQEFLEALPRRKPAFG

SEQ ID NO: 11042 - protein, 205 aa, Moraxella equi
  REGION 1..205: note = tr|A0A378QR49|A0A378QR49_9GAMM GTP cyclohydrolase 1; OS = Moraxella equi OX=60442 GN=folE PE=3 SV=1
MCQHCNSHATSAFSFDVEATAQNYANIISASGENLSREGLLDTPMRAAKAFKDLTAGYHQDLHTVANDAIFASDNADLVLVQNIEFYSLCEHHILPFFGVAHIGYLPNGKVLGLSKLARIVDMYAKRLQIQENLTKQVAQAIHELTDCRGVAVVMDASHMCMMMRGVGKQQSTTRTTCMLGVYETDNQARNEFLSAIPKRVPAFG

SEQ ID NO: 11043 - protein, 205 aa, Moraxella lacunata
  REGION 1..205: note = tr|A0A378QHZ7|A0A378QHZ7_MORLA GTP cyclohydrolase 1; OS = Moraxella lacunata OX=477 GN=folE PE=3 SV=1
MCQHCDSHATPAFSFDVEATAQNYANIILASGENLSREGLLDTPMRAAKAFGDLTAGYHQDLHTVANNAVFASDNADLVLVQNIEFYSLCEHHILPFFGVAHIGYLPNGKVLGLSKLARIVDMYAKRLQIQENLTKQVAQAIHELTDCRGVAVVMDASHMCMMMRGVGKQQSTTRTTCMLGVYETDNQARNEFLSTIPKRAPAFG

SEQ ID NO: 11044 - protein, 205 aa, Moraxella lacunata
  REGION 1..205: note = tr|A0A1B8PX01|A0A1B8PX01_MORLA GTP cyclohydrolase 1; OS = Moraxella lacunata OX=477 GN=folE PE=3 SV=1
MCQHCDSHATPAFSFDVEATAQNYANIISASGENLSREGLLDTPMRAAKAFRDLTAGYHQDLHTVANNAIFASDNADLVLVQNIEFYSLCEHHILPFFGVAHIGYLPNGKVLGLSKLARIVDMYAKRLQIQENLTKQVAQAIHELTNCRGVAVVMDASHMCMMMRGVGKQQSTTRTTCMLGVYETDNQARNEFLSTIPKRVPAFG

SEQ ID NO: 11045 - protein, 191 aa, Moraxella lincolnii
  REGION 1..191: note = tr|A0A1T0CHW8|A0A1T0CHW8_9GAMM GTP cyclohydrolase 1; OS = Moraxella lincolnii OX=90241 GN=folE PE=3 SV=1
MTHTEHPNAFLYSQLIESTSEDLSRAGLIDTPVRAAKAFDYLTQGYNQTLTEVSNNAIFPTDNDELVLVQNIEFYSMCEHHLLPFYGVAHVGYLPNGKVLGLSKVARIIDMYARRLQIQENLTKQVAEAINELTDCRGVAVVMDASHMCMMMRGVSKQNSTTRTHAMLGDFVTDKAARQEFLAVVPTQQAI

SEQ ID NO: 11046 - protein, 230 aa, unidentified
  source 1..230: note = Moraxella macacae
  REGION 1..230: note = tr|L2F684|L2F684_9GAMM GTP cyclohydrolase 1; OS = Moraxella macacae 0408225 OX=1230338 GN=folE PE=3 SV=1
MLNINKLQKNTLQKTNNLYNNAILFCLVFRMSNNTQCNQCCDFTFDVDDTAQHYAKIISNAGEDLNRAGLIDTPMRASKAFAFLTQGYHQDLTQITNGAIFPTDNNELILVKNIEFYSMCEHHLLPFYGVAHVAYLPDDKVIGLSKMARIVDMYARRLQIQENLTKQVAQAVMDMTQAKGCAVVMDAVHMCMMMRGVNKQQSSTRSISMLGEFKDNKDARNEFLMAIPKP

SEQ ID NO: 11047 - protein, 171 aa, Moraxella nonliquefaciens
  REGION 1..171: note = tr|A0A1B8QSG0|A0A1B8QSG0_MORNO GTP cyclohydrolase 1; OS = Moraxella nonliquefaciens OX=478 GN=folE PE=3 SV=1
MHREGLLDTPMRAAKAFGDLTAGYHQDLHTVANGAIFASDNPDLVLVQNIEFYSLCEHHILPFFGVAHIGYLPDGKVLGLSKLARIVDMYAKRLQIQENLTKQIAQAIHELTDCRGVAVVMDASHMCMMMRGVGKQQSTTRTTCMLGVYETDSQARMEFLSTIPKRVPAFG

SEQ ID NO: 11048 - protein, 171 aa, Moraxella nonliquefaciens
  REGION 1..171: note = tr|A0A1B8PJD5|A0A1B8PJD5_MORNO GTP cyclohydrolase 1; OS = Moraxella nonliquefaciens OX=478 GN=folE PE=3 SV=1
MHREGLLDTPMRAAKAFGDLTAGYHQDLHTVANGAIFASDNPDLVLVQNIEFYSLCEHHILPFFGVAHIGYLPDGKVLGLSKLARIVDMYAKRLQIQENLTKQIAQAIHELTDCRGVAVVMDASHMCMMMRGVGKQQSTTRTTCMLGVYETDSQSRMEFLSTIPKRVPAFG

SEQ ID NO: 11049 - protein, 245 aa, Moraxella osloensis
  REGION 1..245: note = tr|A0A378Q9K9|A0A378Q9K9_9GAMM GTP cyclohydrolase 1; OS = Moraxella osloensis OX=34062 GN=folE PE=3 SV=1
MHYNSSKLGVNSSKKPKQSKFSDFHGVCDKNRFTNSGKALSYAYFLNLNVIMTMPANFDEIIQQNSDAYRTLIASTGEELTREGLLNTPERAAKAFSFLTQGYHQDLVEITNNAIFPTDNNELVMVKNIEFYSMCEHHMLPFYGVAHVAYLPDGKVIGLSKMARIVDMYARRLQIQENLTRQIAQAVMDMTGAKGAAVVMDAAHMCMMMRGVMKQKSDTRSMSLLGEFRHNTEARQALLMAIPSA

SEQ ID NO: 11050 - protein, 192 aa, Moraxella osloensis
  REGION 1..192: note = tr|A0A1B8Q108|A0A1B8Q108_9GAMM GTP cyclohydrolase 1; OS = Moraxella osloensis OX=34062 GN=folE PE=3 SV=1
MPANFDEIIQQNSDAYRTLIASTGEELTREGLLNTPERAAKAFSFLTQGYHQDLVEITNNAIFPTDNNELVMVKNIEFYSMCEHHMLPFYGVAHVAYLPDGKVIGLSKMARIVDMYARRLQIQENLTRQIAQAVMDMTGAKGAAVVMDAAHMCMMMRGVMKQKSDTRSMSLLGEFKHNTEARQALLMAIPSA

SEQ ID NO: 11051 - protein, 201 aa, Moraxella ovis
  REGION 1..201: note = tr|A0A378PKH2|A0A378PKH2_9GAMM GTP cyclohydrolase 1; OS = Moraxella ovis OX=29433 GN=folE PE=3 SV=1
MSNSDNSNFTPDYDKIASYYASIIEGCGEDLSREGLLDTPMRAAKAFGYLTRGYHQSLEVVANDAIFPSDNPELVLVQNIEFYSLCEHHLLPFHGVAHVGYLPEGKVLGLSKVARIVDMYARRLQIQENLTKQIATAIEELTGCRGVAVVMDASHMCMMMRGVGKQQSTTRTMSMLGEFTTNNTARAEFLDAIPRRRPAFG

SEQ ID NO: 11052 - protein, 201 aa, Moraxella pluranimalium
  REGION 1..201: note = tr|A0A1T0CUX1|A0A1T0CUX1_9GAMM GTP cyclohydrolase 1; OS = Moraxella pluranimalium OX=470453 GN=folE PE=3 SV=1
MSNSDTVNFTPDFEVLSEHYAKIISASGEDLSRDGLLDTPMRAAKAFGYLTRGYHQDLATVANDAVFDSDNPELVLVQNIEFYSLCEHHLLPFYGVAHVGYLPNGKVLGLSKVARIVDMYARRLQIQENLTKQVATAIEELTGCRGVAVVMDASHMCMMMRGVGKQQSTTRTTSMLGEFVSNHDARREFLDAVPRRSPAFG

SEQ ID NO: 11053 - protein, 201 aa, Moraxella porci
  REGION 1..201: note = tr|A0A1T0CWV5|A0A1T0CWV5_9GAMM GTP cyclohydrolase 1; OS = Moraxella porci DSM 25326 OX=573983 GN=folE PE=3 SV=1
MSNSDTLNFTPDYDALAAHYADIIAASGEDLSRDGLLDTPMRAAKAFGYLTRGYHQDLVTVANDAVFDSDNPELVLVQNIEFYSLCEHHLLPFYGVAHVGYLPNGKVLGLSKVARIVDMYARRLQIQENLTKQIATAIEELTGCRGVAVVMDASHMCMMMRGVGKQQSTTRTTSMLGEFVSNHDARREFLDAIPRRSPAFG

SEQ ID NO: 11054 - protein, 198 aa, Moraxella sp.
  REGION 1..198: note = tr|A0A496NI42|A0A496NI42_MORSP GTP cyclohydrolase 1; OS = Moraxella sp. OX=479 GN=folE PE=3 SV=1
MSNSPVFTPNYDKTAQQYTQIIQDCGEDLTREGLVDTPMRASKAFYYLTRGYHQSLDVVANNAIFPSDNPEMVLIQNIEFYSLCEHHLLPFYGVAHVGYLPDGKVLGLSKVARIVDMYARRLQIQENLTKQIAEAIQELTNCRGVAVVMDASHMCMMMRGVGKQQSTTRTLSTLGDMTTDKQAKTEFLAAIPKRPPAF

SEQ ID NO: 11055 - protein, 201 aa, Moraxella sp.; identical to SEQ ID NO: 11053
  REGION 1..201: note = tr|A0A2K0XWQ9|A0A2K0XWQ9_9GAMM GTP cyclohydrolase 1; OS = Moraxella sp. RCAD0137 OX=1775913 GN=folE PE=3 SV=1

SEQ ID NO: 11056 - protein, 227 aa, unidentified
  source 1..227: note = Moraxellaceae bacterium
  REGION 1..227: note = tr|A0A345P510|A0A345P510_9GAMM GTP cyclohydrolase 1; OS = Moraxellaceae bacterium HYN0046 OX=2283318 GN=folE PE=3; SV = 1
MTLPLRQPSVHLYAGNQTAEELLAEQELAEQQGAESTQESTLLALQQSYATLISGVGEDLTRPGLVDTPIRAAKALSFLTKGYAQTLEDVTNGAIFPSNNHEMVMVKGIEFFSMCEHHLLPFMGHTHVAYLPEGKVLGLSKMARIVDMYARRLQIQENLTQEIAQAVMDATGARGVAVVMDAQHMCMMMRGVQKQDSSTRSVAMIGQFTTDNQARNEFLRALPASRF

SEQ ID NO: 11057 - protein, 192 aa, unidentified
  source 1..192: note = Moraxellaceae bacterium
  REGION 1..192: note = tr|A0A354HA85|A0A354HA85_9GAMM GTP cyclohydrolase 1; OS = Moraxellaceae bacterium OX=1889775 GN=folE PE=3 SV=1
MPANFDEIIQRNSDAYRTLIASTGEDLTREGLLNTPERAAKAFSFLTQGYHQDLVEITNNAIFPTDNNELVMVKNIEFYSMCEHHMLPFYGIAHVAYLPDGKVIGLSKMARIVDMYARRLQIQENLTRQIAQAVMDMTGAKGAAVVMDAAHMCMMMRGVMKQKSDTRSMSLLGEFKHNTEARQALLMAIPSA

SEQ ID NO: 11058 - protein, 219 aa, Morganella morganii
  REGION 1..219: note = tr|M7CYF7|M7CYF7_MORMO GTP cyclohydrolase 1; OS = Morganella morganii SC01 OX=1239989 GN=folE PE=3 SV=1
MSSLSREAELVHAALIARGLETPLREQTLPPETRKVQIEAHMTEIMKLLNLDLSDDSLADTPKRIAKMYVDEIFSGLDYHNFPKITLIENKMKVDEMVTVRDITLTSTCEHHFVTIDGKATVAYIPKDTVIGLSKINRIVQFFAQRPQVQERLTQQILLALQTLLGTTNVAVSIDAVHYCVKARGIRDATSTTTTTSLGGLFKSSQNTRQEFLRAARHI

SEQ ID NO: 11059 - protein, 219 aa, Morganella morganii; identical to SEQ ID NO: 11058
  REGION 1..219: note = tr|J7TRM1|J7TRM1_MORMO GTP cyclohydrolase 1; OS = Morganella morganii subsp. morganii KT OX=1124991; GN = folE PE=3 SV=1

SEQ ID NO: 11060 - protein, 219 aa, Morganella psychrotolerans
  REGION 1..219: note = tr|A0A1B8H5B6|A0A1B8H5B6_9GAMM GTP cyclohydrolase 1; OS = Morganella psychrotolerans OX=368603 GN=folE PE=3 SV=1
MSSLSREAELVHAALIARGLETPLREQTLAPETRKVQIEAHMTEVMKLLNLDLSDDSLSDTPKRIAKMYVDEIFSGLDYHNFPKITLIENKMKVDEMVTVRDITLTSTCEHHFVTIDGKATVAYIPKDTVIGLSKINRIVQFFAQRPQVQERLTQQILLALQTLLGTTNVAVSIDAVHYCVKARGIRDATSTTTTTSLGGLFKSSQNTRQEFLRAARHI

SEQ ID NO: 11061 - protein, 219 aa, Morganella psychrotolerans
  REGION 1..219: note = tr|A0A1B8HJ83|A0A1B8HJ83_9GAMM GTP cyclohydrolase 1; OS = Morganella psychrotolerans OX=368603 GN=folE PE=3 SV=1
MSSLSLEAELVHAALIARGLETPLREQTLAPETRKVQIEAHMTEVMKLLNLDLSDDSLSDTPKRIAKMYVDEIFSGLDYHNFPKITLIENKMKVDEMVTVRDITLTSTCEHHFVTIDGKATVAYIPKDTVIGLSKINRIVQFFAQRPQVQERLTQQILLALQTLLGTTNVAVSIDAVHYCVKARGIRDATSTTTTTSLGGLFKSSQNTRQEFLRAARHI

SEQ ID NO: 11062 - protein, 219 aa, Morganella sp.; identical to SEQ ID NO: 11061
  REGION 1..219: note = tr|A0A3D3HM32|A0A3D3HM32_9GAMM GTP cyclohydrolase 1; OS = Morganella sp. (in: Bacteria) OX=1912315 GN=folE PE=3; SV = 1

SEQ ID NO: 11063 - protein, 216 aa, Moritella marina
  REGION 1..216: note = tr|A0A5J6WJ17|A0A5J6WJ17_MORMI GTP cyclohydrolase I FolE OS=Moritella marina ATCC 15381 OX=1202962 GN=folE; PE = 4 SV=1
MTCLSKEALLVRSVLEERGLETPMIGTGLSSAEKKDRIESHFTEILKLLELDLTDDSLAETPHRIAKMYVNEIFSGLDYSSFPKITLIDNKMQVDEMVKVSDITLTSTCEHHFVTIDGKATIAYIPRSKVIGLSKINRIVQFFSRRPQVQERLTQQILVALQTLLDSQDVAVSITATHYCVKARGVMDATSETTTTSLGGIFKSRPETRAEFLHCR

SEQ ID NO: 11064 - protein, 216 aa, Moritella sp.
  REGION 1..216: note = tr|A0A2G2C5I3|A0A2G2C5I3_9GAMM GTP cyclohydrolase 1; OS = Moritella sp. OX=78556 GN=folE PE=3 SV=1
MTCLSKEALLVRSVLEERGLETPMIGTGLSSTEKKERIESHFTEILKLLELDLSDDSLAETPHRIAKMYVNEIFSGLDYASFPKITLIDNKMQVDEMVKVSNITLTSTCEHHFITIDGKATIAYIPRSKIIGLSKINRIVQFFSRRPQVQERLTQQILVALQTLLDSQDVAVSITATHYCVKARGVMDATSETTTTSLGGIFKSRPETRAEFLHCR

SEQ ID NO: 11065 - protein, 338 aa, Moritella sp.
  REGION 1..338: note = tr|A6FHH2|A6FHH2_9GAMM GTP cyclohydrolase FolE2; OS = Moritella sp. PE36 OX=58051 GN=folE2 PE=3 SV=1
MQFVIVVTQTHLPISYAKHCNIMTLLQLLDFTWKLMFNPELLPDITSYHSVNEPLALQWVGMEDIAVPFSIALSDGKLLPVAGKADLLVSLDQPDAKGIHMSRLYLHLNEQLANKKLDKTCLSHLLELMVSSQKGISKNAKIKLKFDVILEKSALLSNEMGYQSYPVTLSAQRIHNEVSYVLELSIPYSSTCPCSASLSQQLYGAAINEHFSAATIDKQDLLQWVESKAGSVATPHSQRSYAYLKLILDNQYLLDIQSLIFKFEKLIATPVQTAVKREDEQEFARLNAENLMFCEDAARRIKGELERMKFVTDYWFKVEHQESLHAHNAVVIDQKQRM

SEQ ID NO: 11066 - protein, 216 aa, Moritella viscosa
  REGION 1..216: note = tr|A0A090ICG5|A0A090ICG5_9GAMM GTP cyclohydrolase 1; OS = Moritella viscosa OX=80854 GN=folE PE=3 SV=1
MTCLSKEALLVRSVLEERGLETPMIGTGLTSSEKKERIESHFTEILKLLELDLSDDSLVETPHRIAKMYVNEIFSGLDYASFPKITLIDNKMQVDEMVKVSDITLTSTCEHHFVTIDGKATIAYIPRSKVIGLSKINRIVQFFSRRPQVQERLTQQILVALQTLLDSQDVAVSITATHYCVKARGVMDATSETTTTSLGGIFKSRPETRAEFLHCR

SEQ ID NO: 11067 - protein, 216 aa, Moritella yayanosii
  REGION 1..216: note = tr|A0A330LRN8|A0A330LRN8_9GAMM GTP cyclohydrolase 1; OS = Moritella yayanosii OX=69539 GN=folE PE=3 SV=1
MTCLSKEALLVRSVLEERGLETPMIGTGLSSTEKKERIESHFTEILTLLELDLSDDSLAETPHRIAKMYVNEIFSGLDYATFPKITLIDNKMQVDEMVKVSNITLTSTCEHHFITIDGKATIAYIPRSKIIGLSKINRIVQFFSRRPQVQERLTQQILVALQTLLDSQDVAVSITATHYCVKARGVMDATSETTTTSLGGIFKSRPETRAEFLHCR

SEQ ID NO: 11068 - protein, 282 aa, Morococcus cerebrosus
  REGION 1..282: note = tr|A0A0C1E2A5|A0A0C1E2A5_9NEIS GTP cyclohydrolase FolE2 OS=Morococcus cerebrosus OX=1056807 GN=folE2 PE=3; SV = 1
MQNGRHESVSNDTHPNNPTIKDKQRMNAIADVQSSRDLRNLPINQVGIKDLRFPITLNTAEGSQSTVAHLTMTVFLPADQKGTHMSRFVALMEQQTEALDFDRLHKLTAEMVALLNSHSGKISVSFPFFRKKSAPVSGIQSLLDYDVTLTGEIKNGAYSHNLKVMVPVTSLCPCSKEISQYGAHNQRSHVTVSLTANAEVGIEEIIDCVEAQASCQLYGLLKRPDEKYVTEKAYENPKFVEDMVRDVATALIADGRIESFIVESENFESIHNHSAYAYIAYP

SEQ ID NO: 11069 - protein, 219 aa, Motilibacter peucedani
  REGION 1..219: note = tr|A0A420XPU3|A0A420XPU3_9ACTN GTP cyclohydrolase 1; OS = Motilibacter peucedani OX=598650 GN=folE PE=3 SV=1
MSTGVDGTGATAAEAVQAAATGPSYDGTPTRPPYDEERAQRAVRELLLALGEDPDRDGIRETPARVARAYRELFAGLWQQPEDVLTTTFDLGHDEMVLVKDITLVSACEHHLLPFYGVAHVGYIPAEDGRITGLSKIARLVEVFARRLQVQERLTTQVADAMTEVLRPRGVIVVIEAEHSCMTTRGVRKPGSKTVTSAVRGQLRDPATRAEAMSLILSR

SEQ ID NO: 11070 - protein, 216 aa, unidentified
  source 1..216: note = Motilibacter rhizosphaerae
  REGION 1..216: note = tr|A0A4Q7NAA0|A0A4Q7NAA0_9ACTN GTP cyclohydrolase 1; OS = Motilibacter rhizosphaerae OX=598652 GN=folE PE=3 SV=1
MAEQAGAVVDEDGPLEQSDVTRSERAGRPAYDEERARAAVRELLLALGEDPDRDGIRDTPARVARAYRELFAGLWMEPEDVLTTTFDLGHDEMVLVKDIPMVSACEHHMLPFYGVAHVGYIPGPEGRITGLSKLARLVEVYARRLQVQERLTTQVADSLERILGPRGVIVVVEAEHTCMSTRGIRKPGAKTVTSAVRGQLRDPATRAEAMSLILGR

SEQ ID NO: 11071 - protein, 223 aa, unidentified
  source 1..223: note = Motilimonas sp.
  REGION 1..223: note = tr|A0A418YG65|A0A418YG65_9GAMM GTP cyclohydrolase 1; OS = Motilimonas sp. PLHSC7-2 OX=2303987 GN=folE PE=3 SV=1
MAQGTEVANPNPAANIVRQALIARGLETPVVENGLDNTQKRQQIEQHFEQIMQVLGLDLSDDSLMDTPRRIGKMYVDEIFSGLDYAQFPKITVIENKMKLDEMVKVADICLTSTCEHHFVTIDGSATVAYIPKTKIIGLSKINRIVGFFARRPQVQERLTQQVLCALQALLETDNVAVSIDAVHYCVKARGVQDESSHTRTTALGGNFKSKPETRQEFLQGLK

SEQ ID NO: 11072 - protein, 184 aa, unidentified
  source 1..184: note = Motilimonas sp.
  REGION 1..184: note = tr|A0A418YE91|A0A418YE91_9GAMM GTP cyclohydrolase 1; OS = Motilimonas sp. PLHSC7-2 OX=2303987 GN=folE PE=3 SV=1
MSETLAQQYLNIIREIGEDEHREGLLDTPMRAAKAMQFLTQGYQQQLDEVINDAVFSSESDDMVLVKGIELYSMCEHHMLPFIGTCHIAYIPNGKVLGLSKFARIVDMYSRRLQIQENLTREVAQAVLTATDALGVGVIIEAKHMCMMMRGVEKQHSNMRTSVMLGSFRENPKTRAEFLDLLRN

SEQ ID NO: 11073 - protein, 305 aa, unidentified
  source 1..305: note = Motiliproteus coralliicola
  REGION 1..305: note = tr|A0A369WN45|A0A369WN45_9GAMM GTP cyclohydrolase FolE2 OS=Motiliproteus coralliicola OX=2283196 GN=folE2; PE = 3 SV=1
MLNPKPLPDVASQHSASHSLALQWVGMEQIALPIRLDLADSHSLNLSAKADLYVSLDRPDVKGIHMSRLYLEMNRFLANQSLTHESLAQLLALMVESQQGISQNARITLSFDLLLQRNSLKSQQQGYQSYPAVINAERINDQLKLELELTIPYSSTCPCSASLSRQLYSEAVDRQFSGTSIDKQALLQWIQSEAGSIATPHSQRSYAYLQLQLADGAFPDFTILIDRIEEALGTPVQTAVKRSDEQDFARLNAENLMFCEDAARRVKTCLENQAQISDYWFKVEHQESLHAHNAVVIDQKFTTEN

SEQ ID NO: 11074 - protein, 179 aa, unidentified
  source 1..179: note = Motiliproteus coralliicola
  REGION 1..179: note = tr|A0A369WTS0|A0A369WTS0_9GAMM GTP cyclohydrolase 1; OS = Motiliproteus coralliicola OX=2283196 GN=folE PE=3 SV=1
MKDAFANIIEACGEDLQRDGLQDTPERAAKAFKYLTRGYQQTLDEVVNGALFESDNSEMVLVKDIELYSLCEHHLLPFIGKAHVAYIPSGKVIGLSKIARIVDMYARRLQIQENMTKQIADSIMEVTGAAGVGVVIEAKHMCMMMRGVEKQNGVMKTSMMTGLFRSNQATRSEFLSLIN

SEQ ID NO: 11075 - protein, 179 aa, unidentified
  source 1..179: note = Motiliproteus sp.
  REGION 1..179: note = tr|A0A1R1MFZ5|A0A1R1MFZ5_9GAMM GTP cyclohydrolase 1; OS = Motiliproteus sp. MSK22-1 OX=1897630 GN=folE PE=3 SV=1
MKEAFASIIEAVGEDLERDGLQDTPERAAKAFNYLTRGYQQTLDEVVNNALFDSDNSEMVLVKDIELYSLCEHHMLPFIGKCHVAYIPSGKVLGLSKIARIVDMYARRLQIQENMTKQIADSIMEVTGAAGVGVIIEAQHMCMMMRGVEKQNGVMKTSMMLGLFRNNPSTRAEFLSLVS

SEQ ID NO: 11076 - protein, 212 aa, unidentified
  source 1..212: note = Mucilaginibacter auburnensis
  REGION 1..212: note = tr|A0A2H9VPG8|A0A2H9VPG8_9SPHI GTP cyclohydrolase 1; OS = Mucilaginibacter auburnensis OX=1457233 GN=folE PE=3; SV = 1
MSDINNIPDRDDDIYGYEKIDRYNPELIASLSGHYKEILKQLGEHPEREGLLKTPERVAKAMLYLTQGYDLDARQILNSALFKEEYSQMVVVKDIEVYSMCEHHMLPFFGKAHIAYIPNGYVVGLSKIPRVVDVYSRRLQVQERLTNEIRDCIQETLKPIGVGVVIECRHLCMCMRGVQKQNSVTTTSAFTGGFLQEKTRAEFLNLISQKLS

SEQ ID NO: 11077 - protein, 213 aa, Mucilaginibacter frigoritolerans
  REGION 1..213: note = tr|A0A562TUG0|A0A562TUG0_9SPHI GTP cyclohydrolase 1; OS = Mucilaginibacter frigoritolerans OX=652788 GN=folE PE=3; SV = 1
MINENHVTDPDDDDIEGYTKIDRYNESLISNLSAHYKDVLGLIGENPEREGLLKTPERISKALLYLTQGYELDAKSILTSAMFKEDYSQMVLVKDIEVYSMCEHHMLPFFGKAHVAYIPNGHVVGLSKIPRVVDVFARRLQVQERLTNEIRDCIQDTLNPMGVGVVIECRHLCMSMRGVQKQNSVTTTSAFTGGFLSEKTRTEFLNLISARLS

SEQ ID NO: 11078 - protein, 212 aa, unidentified
  source 1..212: note = Mucilaginibacter ginsenosidivorans
  REGION 1..212: note = tr|A0A5B8USA6|A0A5B8USA6_9SPHI GTP cyclohydrolase 1; OS = Mucilaginibacter ginsenosidivorans OX=398053 GN=folE; PE = 3 SV=1
MNKTDAYPDRDEGIDGYKKIDRYNTGLIDNLSGLYHNVLEQIGEDPNREGLLKTPERMAKAMLFLTQGYDLNAEEILKSAMFKEEYSQMVVVKDIEVYSMCEHHMLPFFGKAHIAYIPNGHVVGLSKIPRVVDVFARRLQVQERLTNEIRDCIQETLNPLGVGVVIECRHLCMSMRGVQKQNSVTTTSAFTGEFLKEKTRTEFLNLITAKLG

SEQ ID NO: 11079 - protein, 229 aa, unidentified
  source 1..229: note = Mucilaginibacter ginsenosidivorans
  REGION 1..229: note = tr|A0A5B8UU61|A0A5B8UU61_9SPHI GTP cyclohydrolase 1; OS = Mucilaginibacter ginsenosidivorans OX=398053 GN=folE; PE = 3 SV=1
MKQNETSLNIAGNNYTAEADLGDEHIGTSWDTPLREDAFDMDDEEKILLIAYHFKEIMQVLGLDLTDDSLKGTPMRVGEMYVREIFSGLNPENKPGMALFENKYGYNQMLVEKNIALYSNCEHHFVPIIGKAHVAYISSGKVIGLSKLNRIVRYYAQRPQVQERLTRQIAEELKTILGTEDVAVVIDAVHLCVSSRGVKDTSSSTLTAEYSGAFLDAQKRDEFLKYLNT

SEQ ID NO: 11080 - protein, 212 aa, unidentified
  source 1..212: note = Mucilaginibacter ginsenosidivorax
  REGION 1..212: note = tr|A0A5B8VZK0|A0A5B8VZK0_9SPHI GTP cyclohydrolase 1; OS = Mucilaginibacter ginsenosidivorax OX=862126 GN=folE; PE = 3 SV=1
MIDKNHIPDRDDDIDGYTKIDRYNPQLIENLSAHYLDVLKQIGENPQREGLLKTPERIAKAMLFLTHGYDLDAKSILNSAMFKEEYSQMVIVKDIEVYSMCEHHMLPFFGKAHIAYIPNGYVVGLSKIPRVVDAFARRLQVQERLTNEIRDCIQETLNPVGVGIVIECRHLCMSMRGVQKQNSVTTTSAFTGEFLKEKTRTEFLNLISSKLS

SEQ ID NO: 11081 - protein, 213 aa, Mucilaginibacter gossypii
  REGION 1..213: note = tr|A0A1G8MHE1|A0A1G8MHE1_9SPHI GTP cyclohydrolase 1; OS = Mucilaginibacter gossypii OX=551996 GN=folE PE=3 SV=1
MSDSQFSQDTDDDDFGGYIKIDRYNQDRIDSLKDNYRDVLKQLGEDAAREGLLKTPERVAKAMLYLTHGYELNAEEILNSAKFKEDYSQMVVVKDIEVYSMCEHHMLPFFGKAHVAYIPNGHVVGLSKIPRVVDVFARRLQVQERLTNEIRDCIQQTLNPVGVGVVIECRHLCMSMRGVQKQNSVTTTSAFTGEFLKEKTRTEFLNLISSKLS

SEQ ID NO: 11082 - protein, 226 aa, Mucilaginibacter gossypii
  REGION 1..226: note = tr|A0A5C1IDN0|A0A5C1IDN0_9SPHI GTP cyclohydrolase 1; OS = Mucilaginibacter gossypii OX=551996 GN=folE PE=3 SV=1
MIKDETVNDLTLAQVVTDLEQDHYNAAFDTPLRPDAFELDDDTKMEHIAKHFAAIMETLGMDLEDDSLRDTPKRVAKMYVKEIFSGLNPANKPKPTLFKNPFNYNQMLVERNIAVFSNCEHHFVPIVGKAHVAYISNGQVIGLSKLNRIVQYCSQRPQVQERLTMQIANMLKEALGTEDVAVIIDAHHHCVSSRGIRDAGSTTLTAEYSGQFLNIETKNEFLKYIG

SEQ ID NO: 11083 - protein, 213 aa, Mucilaginibacter gossypiicola
  REGION 1..213: note = tr|A0A1H8QLM8|A0A1H8QLM8_9SPHI GTP cyclohydrolase 1; OS = Mucilaginibacter gossypiicola OX=551995 GN=folE PE=3; SV = 1
MSDSQFSQDTDDDDFGGYIKIDRYNHDRIDSLKDNYQNVLKQIGEDPEREGLLKTPERVAKAMLYLTHGYELNAEEILNSAKFKEDYSQMVVVKDIEVYSMCEHHMLPFFGKAHVAYIPNGHVVGLSKIPRVVDVFARRLQVQERLTNEIRDCIQQTLNPIGVGVVIECRHLCMSMRGVQKQNSVTTTSAFTGEFLKEKTRTEFLNLISSKLS

SEQ ID NO: 11084 - protein, 227 aa, Mucilaginibacter gossypiicola
  REGION 1..227: note = tr|A0A1H8UA55|A0A1H8UA55_9SPHI GTP cyclohydrolase 1; OS = Mucilaginibacter gossypiicola OX=551995 GN=folE PE=3; SV = 1
MLKNEILNDLTLARVVTDLEQDHYHAAFDTPLRPDAFELDDDTKMELIAKHFTTIMETLGMDMEDDSLKDTPKRVAKMYVKEIFSGLNPANKPKPTLFKNPFNYNQMLVERNIAVFSNCEHHFVPIVGKAHVAYISNGQVIGLSKLNRIVQYCSQRPQVQERLTMQIANMLKEALGTEDVAVIIDAHHHCVSSRGIRDAGSTTLTAEYSGQFLNIETKNEFLRYIGS

SEQ ID NO: 11085 - protein, 227 aa, unidentified
  source 1..227: note = Mucilaginibacter gotjawali
  REGION 1..227: note = tr|A0A0X8X535|A0A0X8X535_9SPHI GTP cyclohydrolase 1; OS = Mucilaginibacter gotjawali OX=1550579 GN=folE_2 PE=3; SV = 1
MINNETLNDRTIEQVVSDLEQEHHSSAFNTPLRPDAFEMDDETKIDHIARHFRSIMEVLGMDLDDDSLKDTPKRVAKMYVKEIFSGLNPANKPQPTLFSNPFKYKQMLVERNIAVFSNCEHHFVPIVGKAHVAYISNGQVIGLSKLNRIVQYCSQRPQVQERLTIQIANMLKEALGTGDVAVIIDAHHHCVSSRGIRDAGSTTVTAEYGGQFLNAETKNEFLKYIGS

SEQ ID NO: 11086 - protein, 213 aa, unidentified
  source 1..213: note = Mucilaginibacter gotjawali
  REGION 1..213: note = tr|A0A120MXU9|A0A120MXU9_9SPHI GTP cyclohydrolase 1; OS = Mucilaginibacter gotjawali OX=1550579 GN=folE_1 PE=3; SV = 1
MINENFIKDTDDDDVEGYIKIDRYNPELISSLSTHYHEILKELGENPEREGLLKTPERIAKAMLYLTQGYDLDAKAIMASAVFKEDYSQMVIVKDIEVYSMCEHHMLPFFGKAHVAYIPNGHVVGLSKIPRIVDVFARRLQVQERLTNDIRDCIQDALDPLGVGVVIECRHLCMSMRGVQKQNSVTTTSAFTGEFLKEKTRTEFLNLISAKLG

SEQ ID NO: 11087 - protein, 213 aa, Mucilaginibacter gracilis
  REGION 1..213: note = tr|A0A495IWZ7|A0A495IWZ7_9SPHI GTP cyclohydrolase 1; OS = Mucilaginibacter gracilis OX=423350 GN=folE PE=3 SV=1
MSKENYDRYDDEEDVDGYVKIDRYNPELIQNISTHYKDILTQLGEDPNREGLLKTPERVAKALLYLTHGYDLNPKDILESAKFTEEYSQMVVVKDIEVYSMCEHHMLPFFGKAHIAYIPNGQVVGLSKIPRVVDAFARRLQVQERLTNQIRDCIQETLNPIGVGVVMECRHLCMCMRGVQKQNSVTTTSAFTGEFIKEKTRAEFLHLISSKLS

SEQ ID NO: 11088 - protein, 219 aa, Mucilaginibacter gracilis
  REGION 1..219: note = tr|A0A495J4P0|A0A495J4P0_9SPHI GTP cyclohydrolase 1; OS = Mucilaginibacter gracilis OX=423350 GN=folE PE=3 SV=1
MLNNNTLDNLTIEQEHYSSSFDTPLRADAFAMDDDTKIELIAKHFKSIMQVLGLDLDDDSLKDTPTRVAKMYVKEIFSGLNPANKPVPTLFKNPFQYKQMLVERNIAVFSNCEHHFVPIVGKAHIAYISNGEVIGLSKLNRIVQYCSQRPQVQERLTMQIANMLKEALGTDDVAVIIDAHHHCVSSRGIRDANSSTLTAEYCGQFLIAETKNEFLKYIG

SEQ ID NO: 11089 - protein, 214 aa, Mucilaginibacter lappiensis
  REGION 1..214: note = tr|A0A1N6ZTJ4|A0A1N6ZTJ4_9SPHI GTP cyclohydrolase 1; OS = Mucilaginibacter lappiensis OX=354630 GN=folE PE=3 SV=1
MIDKEHLPHRDDDDDLDGYTKVDRYNPSLIQNLSGHYHDVLKQIGENPEREGLLKTPERMAKAMLYLTHGYDLDAKEIMNSAMFKEEYSQMVIVKDIEVYSMCEHHMLPFFGKAHIAYIPNGYVVGLSKIPRIVDVFARRLQVQERLTNEIRDCIQDTLNPIGVGVVIECRHLCMSMRGVQKQNSVTTTSAFTGEFLKEKTRTEFLNLISAKLG

SEQ ID NO: 11090 - protein, 214 aa, Mucilaginibacter mallensis
  REGION 1..214: note = tr|A0A1H2BX87|A0A1H2BX87_9SPHI GTP cyclohydrolase 1; OS = Mucilaginibacter mallensis OX=652787 GN=folE PE=3 SV=1
MTDNHSIPDRDDDDDIEGYVKIDRYNPELITNLSTHYHDVLKQIGENPEREGLLKSPERIAKAMLFLTHGYDLDAQAILNSAKFKEDYSQMVVVKDIEVYSMCEHHMLPFFGKAHIAYIPNGHVVGLSKIPRVVDAFARRLQVQERLTNEIRDCIQDTLQPLGVGVVIECRHLCMSMRGVQKQNSVTTTSAFTGEFLEDRTRTEFLNLIAAKLS

SEQ ID NO: 11091 - protein, 227 aa, Mucilaginibacter oryzae
  REGION 1..227: note = tr|A0A316HM10|A0A316HM10_9SPHI GTP cyclohydrolase 1; OS = Mucilaginibacter oryzae OX=468058 GN=folE PE=3 SV=1
MLKNEAENNLTLEQIVPDLDDNHYNYSLNTPLRPDAFEMDDDTKVELISRHFTAIMETLGMDLTDDSLKDTPRRVAKMYVKEIFSGLNPANKPRPTLFKNPFNYNQMLVERNIAVFSNCEHHFVPIVGKAHVGYISNGQVIGLSKLNRIVQYCCQRPQVQERLTIQIASMLKEALGTEDVAVIVDAHHHCVSSRGIRDAGSTTLTAEYSGRFLNAETKTEFLKYIGS

SEQ ID NO: 11092 - protein, 213 aa, Mucilaginibacter oryzae
  REGION 1..213: note = tr|A0A316HK79|A0A316HK79_9SPHI GTP cyclohydrolase 1; OS = Mucilaginibacter oryzae OX=468058 GN=folE PE=3 SV=1
MSDSQFSQDTDDDDFGGYIKIDRYNQERIDSLKTDYHNVLTQIGEDPGREGLLKTPERVAKAMLYLTHGYELNAEEILNSAKFKEDYSQMVVVKDIEVYSMCEHHMLPFFGKAHVAYIPNGHVVGLSKIPRVVDVFARRLQVQERLTNQIRDCIQQTLNPIGVGVVIECRHLCMSMRGVQKQNSVTTTSAFTGEFLKEKTRTEFLNLISSKLS

SEQ ID NO: 11093 - protein, 212 aa, Mucilaginibacter paludis
  REGION 1..212: note = tr|H1YIP4|H1YIP4_9SPHI GTP cyclohydrolase 1; OS = Mucilaginibacter paludis DSM 18603 OX=714943 GN=folE; PE = 3 SV=1
MSNIPYDYDDDEEIDGYVKIDRYNPELIQNISTHYTDILKQLGEDPEREGLVKTPERVAKALLYLTHGYDLNPQEILESAKFKEDYSQMVVVKDIEVYSMCEHHMLPFFGKAHIAYIPNGHVVGLSKIPRVVDAFARRLQVQERLTNQIRDCIHETLQPIGVAVVIECRHLCMCMRGVQKQNSVTTTSAFTGEFIKEKTRAEFLQLISSKLS

SEQ ID NO: 11094 - protein, 227 aa, Mucilaginibacter paludis
  REGION 1..227: note = tr|H1YAJ9|H1YAJ9_9SPHI GTP cyclohydrolase 1; OS = Mucilaginibacter paludis DSM 18603 OX=714943 GN=folE; PE = 3 SV=1
MINNNTVNEITIEHDVMHLEQDHYSSALDTPMRANAFDMDDDTKIDLIAQHFAGIMEVLGMDLGDDSLKDTPQRVAKMYVKEIFSGLNPANKPKPTLFKNPYQYNQMLVERNIAVFSNCEHHFVPIVGKAHVGYISNGQVIGLSKLNRIVQYCSQRPQVQERLTMQIANMLKEALGTEDVAVVVDAHHHCVSSRGIKDAGSTTLTAEYGGQFLNPETKNEFLKYIGS

SEQ ID NO: 11095 - protein, 215 aa, unidentified
  source 1..215: note = Mucilaginibacter pedocola
  REGION 1..215: note = tr|A0A1S9P6R2|A0A1S9P6R2_9SPHI GTP cyclohydrolase 1; OS = Mucilaginibacter pedocola OX=1792845 GN=folE PE=3 SV=1
MLTEDTITENERSIAFDTPLRTDAFELDDDAKMKLIEHHFAGIMQALGLDLADDSLRDTPRRVAKMYVKEIFSGLDPANKPVPALFKNPFQYGQMLVERNIAVFSNCEHHFVPITGKAHVAYISNGQVIGLSKLNRIVQYCSQSPQLQERLTIQIAMMLKEALETDDVAVIIDAHHHCVSSRGVKDTDSMTLTAEYSGKFLEPETKKEFLSYINL

SEQ ID NO: 11096 - protein, 212 aa, unidentified
  source 1..212: note = Mucilaginibacter pedocola
  REGION 1..212: note = tr|A0A1S9P9L2|A0A1S9P9L2_9SPHI GTP cyclohydrolase 1; OS = Mucilaginibacter pedocola OX=1792845 GN=folE PE=3 SV=1
MDNDNNIPDRDAGINGYQKVDRYNPELIKHLSDNYLDVLKHIGEDPTRDGLLKTPERMAKAMLYLTHGYDLDAKAILDSAMFKEDYSQMVIVKDIEVYSMCEHHMLPFFGKAHVAYIPNGYVVGLSKIPRVVDVFSRRLQVQERLTNEIRDCIQQTLNPIGVGVVIECRHLCMSMRGVQKQNSVTTTSAFTGEFLKEKTRTEFLNLISSRLS

SEQ ID NO: 11097 - protein, 212 aa, unidentified
  source 1..212: note = Mucilaginibacter phyllosphaerae
  REGION 1..212: note = tr|A0A4Y8ADE9|A0A4Y8ADE9_9SPHI GTP cyclohydrolase 1; OS = Mucilaginibacter phyllosphaerae OX=1812349 GN=folE PE=3; SV = 1
MINDDNIPDRDAGINGYQKIDRYNPQLIQNLSASYLDVLKQIGEDPGREGLLKTPERIAKAMLYLTHGYDLDAKEILNSAMFKEEYSQMVIVKDIEVYSMCEHHMLPFFGKAHIAYIPNGYVVGLSKIPRIVDVFARRLQVQERLTNEIRDCIQDTLNPIGVGVVIECRHLCMSMRGVQKQNSATTTSAFTGEFLKEKTRTEFLNLISSKLS

SEQ ID NO: 11098 - protein, 212 aa, unidentified
  source 1..212: note = Mucilaginibacter pineti
  REGION 1..212: note = tr|A0A1G7DK63|A0A1G7DK63_9SPHI GTP cyclohydrolase 1; OS = Mucilaginibacter pineti OX=1391627 GN=folE PE=3 SV=1
MSNHNHIPDRDDDIDGYTKIDRYNPELIDNLSAHYLDVLKQIGENPEREGLLKTPERIAKAMLYLTHGYDLNAKEILGSAMFKEDYSQMVIVKDIEVYSMCEHHMLPFFGKAHIAYIPNGYVVGLSKIPRIVDVFARRLQVQERLTNEIRDCIQETLNPIGVGVVIECRHLCMSMRGVQKQNSVTTTSAFTGEFLKEKTRTEFLNLISAKLS

SEQ ID NO: 11099 - protein, 213 aa, unidentified
  source 1..213: note = Mucilaginibacter polytrichastri
  REGION 1..213: note = tr|A0A1Q6A3M3|A0A1Q6A3M3_9SPHI GTP cyclohydrolase 1; OS = Mucilaginibacter polytrichastri OX=1302689 GN=folE PE=3; SV = 1
MDHDDDNLPDRDAGIEGYQKIDRYNPQLIESLSGHYHEVLKQIGENPEREGLLKTPERVAKALMYLTHGYDLDAKEILKSAMFKEEYSQMVVVKDIEVYSMCEHHMLPFFGKAHIAYIPNGHVVGLSKIPRIVDVFARRLQVQERLTNEIRDCIQETLNPIGVGVVIECRHLCMSMRGVQKQNSVTTTSAFTGAFLMDKTRTEFLNLISSKLS

SEQ ID NO: 11100 - protein, 217 aa, unidentified
  source 1..217: note = Mucilaginibacter polytrichastri
  REGION 1..217: note = tr|A0A1Q5ZX05|A0A1Q5ZX05_9SPHI GTP cyclohydrolase 1; OS = Mucilaginibacter polytrichastri OX=1302689 GN=folE PE=3; SV = 1
MTFEQVVTDLEHEHYNSAFDTPLRPDAFEMDDDTKMKLIAEHFTGIMQVLGMDLDDDSLRDTPKRVAKMYVKEIFSGLNPANKPKPTLFKNPFQYKQMLVERNIAVFSNCEHHFVPIVGKAHVAYISNGQVIGLSKLNRIVQYCSQRPQVQERLTMQIANMLKEVLGTEDVAVIIDAHHHCVSSRGIRDAGSTTLTAEYSGQFLIAETKNEFFKYIG

SEQ ID NO: 11101 - protein, 212 aa, unidentified
  source 1..212: note = Mucilaginibacter psychrotolerans
  REGION 1..212: note = tr|A0A4Y8SN01|A0A4Y8SN01_9SPHI GTP cyclohydrolase 1; OS = Mucilaginibacter psychrotolerans OX=1524096 GN=folE; PE = 3 SV=1
MNNDTHIPDRDDDISGYQKIDRYNHGLIEKLSANYLDVLKHIGENPEREGLLKTPERMAKAMLYLTHGYDLNATEILNSAMFKEDYSQMVIVKDIEVYSMCEHHMLPFFGKAHIAYIPNGYVVGLSKIPRVVDAFARRLQVQERLTNEIRDCIQQTLNPIGVGVVIECRHLCMSMRGVQKQNSVTTTSAFTGEFLKEKTRTEFLNLISSKLS

SEQ ID NO: 11102 - protein, 226 aa, unidentified
  source 1..226: note = Mucilaginibacter psychrotolerans
  REGION 1..226: note = tr|A0A4Y8SB08|A0A4Y8SB08_9SPHI GTP cyclohydrolase 1; OS = Mucilaginibacter psychrotolerans OX=1524096 GN=folE; PE = 3 SV=1
MIKNNANNALTLEQVVTELEQDHYNSAFDTPLRPDAFELDDDTKIERITKHFTAIMETLGMDLEDDSLKDTPKRVAKMYVKEIFSGLNPANKPKPTLFKNPFNYNQMLVERNIAVFSNCEHHFVPIVGKAHVAYISNGQVIGLSKLNRIVQYCSQRPQVQERLTMQIANMLKEALGTDDVAVVIDAHHHCVSSRGIRDAGSTTLTAEYSGQFLNAETKNEFLKYIS

SEQ ID NO: 11103 - protein, 227 aa, unidentified
  source 1..227: note = Mucilaginibacter rubeus
  REGION 1..227: note = tr|A0A5C1I3P8|A0A5C1I3P8_9SPHI GTP cyclohydrolase 1; OS = Mucilaginibacter rubeus OX=2027860 GN=folE PE=3 SV=1
MIKNEILNDLTLARVVTDLEQDHYNAAFDTPLRPDAFELDDDTKMELIAKHFTAIMETLGMDMEDDSLKDTPKRVAKMYVKEIFSGLNPANKPKPTLFKNPFNYNQMLVERNIAVFSNCEHHFVPIVGKAHVAYISNGQVIGLSKLNRIVQYCSQRPQVQERLTMQIANMLKEALDSENVAVIIDAHHHCVSSRGIRDAGSTTLTAEYSGQFLNMETKNEFLKYIGS

SEQ ID NO: 11104 - protein, 226 aa, unidentified; identical to SEQ ID NO: 11082
  source 1..226: note = Mucilaginibacter rubeus
  REGION 1..226: note = tr|A0A364WI82|A0A364WI82_9SPHI GTP cyclohydrolase 1; OS = Mucilaginibacter rubeus OX=2027860 GN=folE PE=3 SV=1

SEQ ID NO: 11105 - protein, 214 aa, Mucilaginibacter sp.
  REGION 1..214: note = tr|A0A556MUN1|A0A556MUN1_9SPHI GTP cyclohydrolase 1; OS = Mucilaginibacter sp. MAH-19 OX=2597670 GN=folE PE=3 SV=1
MIYDDDDNIPDRNEDINGYEKVDRYNPQLIENLSGHYKEVLKQLGENPEREGLLKTPERIAKAMLYLTHGYDLNPKEILNSALFKEEYSQMVVVKDIEVYSMCEHHMLPFFGKAHIAYIPNGHVVGLSKIPRVVDAYARRLQVQERLTNEIRDCIQDALQPVGVGVVIECRHLCMCMRGVQKQNSVTTTSAFSGGFYHEKTRAEFLHLISSKLS

SEQ ID NO: 11106 - protein, 212 aa, Mucilaginibacter sp.
  REGION 1..212: note = tr|A0A1C2GFP8|A0A1C2GFP8_9SPHI GTP cyclohydrolase 1; OS = Mucilaginibacter sp. PPCGB 2223 OX=1886027 GN=folE PE=3; SV = 1
MSNHDHHHLAGEELDGYVKIDRYNPDLISSISSHYQEILKHVGEDPQREGLLKTPERVAKALLYLTHGYDLNPTEILNSAMFTEDYSQMVVVKDIEIYSMCEHHMLPFFGKAHIAYIPNGHVVGLSKIPRVVDAFARRLQVQERLTNEIRDCIQGTLKPLGVAVVMECRHLCMSMRGVQKQNSVTTTSAFTGEFLKDKTRAEFLHLISSKLS

SEQ ID NO: 11107 - protein, 212 aa, unidentified
  source 1..212: note = Mucilaginibacter yixingensis
  REGION 1..212: note = tr|A0A2T5JEE2|A0A2T5JEE2_9SPHI GTP cyclohydrolase 1; OS = Mucilaginibacter yixingensis OX=1295612 GN=folE PE=3; SV = 1
MNNQGPFNDDDEDIDGYVKIDRYNPELIKSISGHYEHILKALGEDPSREGILKTPERVAKALLYLTHGYDQDAKAVLTSAMFKEDYSQMVVVKDIEVYSMCEHHMLPFFGKAHVAYIPNGHVVGLSKIPRVVDIFARRLQVQERLTNDIRDSIQETLNPIGVGVVIECRHLCMCMRGVQKQNSVTTTSAFTGAFLAEKTRTEFLNLISSRLS

SEQ ID NO: 11108 - protein, 189 aa, unidentified
  source 1..189: note = Mucinivorans hirudinis
  REGION 1..189: note = tr|A0A060R884|A0A060R884_9BACT GTP cyclohydrolase 1; OS = Mucinivorans hirudinis OX=1433126 GN=folE PE=3 SV=1
MDKQEQIAAHYKAILELLGEDSEREGLLKTPERVARAMEFMTKGYAEEPIEILNSARFREEYKQMVLVKDIEIYSLCEHHLLPFYGRAHVAYIPNGYITGLSKIARVVECFARRLQVQERMTVQIRDSIQQALNPLGVAVVVEAAHMCMQIRGVQKQNSATTTSAFTGVFLKEQKTREEFMHLIANRLR

SEQ ID NO: 11109 - protein, 257 aa, Mucispirillum schaedleri
  REGION 1..257: note = tr|V2QFS3|V2QFS3_9BACT GTP cyclohydrolase FolE2; OS = Mucispirillum schaedleri ASF457 OX=1379858 GN=folE2; PE = 3 SV=1
MLEDIQNSKDTRNIDINQVGIKDIIYPISLKDRNKGIQNTIAKITMSVMLPHQYKGTHMSRFVEILNKYKDNIDIHNVGSILQDMRERLSSDSSFISLSFPYFMEKTAPVSKMTSLMDYNCEFSGSCSEKGLDFVLKVKVPVQSLCPCSKEISEYGAHNQRSIASISVRFNKTVWIEDLIEIAESSASSSIYSLLKREDEKYITEYAYDNPAFVEDIVRNITEKLMNDSRIIWFEVECENMESIHNHNAWARIERWK

SEQ ID NO: 11110 - protein, 191 aa, unidentified
  source 1..191: note = Mumia flava
  REGION 1..191: note = tr|A0A0B2BVQ6|A0A0B2BVQ6_9ACTN GTP cyclohydrolase 1; OS = Mumia flava OX=1348852 GN=folE PE=3 SV=1
MALGEFDAVRAEAAVRELLAAIGDDPERDGLRDTPARVARAYREIFAGMRQDPDEALSRTFAVDHDEMILVKDIELWSMCEHHLVPFTGVAHVGYIPATDGRVVGLSKLARLVDVYARRPQVQERLTTQIADALSNALNPVGVIVQLEAEHLCMTMRGVRKPGAKTITSAVRGQLRDPATRAEAMALIKGQ

SEQ ID NO: 11111 - protein, 196 aa, unidentified
  source 1..196: note = Mumia sp.
  REGION 1..196: note = tr|A0A5C4MG28|A0A5C4MG28_9ACTN GTP cyclohydrolase 1; OS = Mumia sp. 527 OX=2585212 GN=folE PE=3 SV=1
MAHSAGVLPQFDTPRAEAAVRELLAAIGEDPDRDGLRDTPERVARAYKEIFAGMRRDPKEALSRTFQVDHDEMILVKDIELWSMCEHHLVPFTGVAHVGYIPAQDGRVVGLSKLARLVDVYARRPQVQERLTTQIADALTETLNPLGAIVQIEAEHLCMTMRGVRKPGAKTVTSAVRGQLRDPATRAEAMSLITGR

SEQ ID NO: 11112 - protein, 218 aa, unidentified
  source 1..218: note = Muribacter muris
  REGION 1..218: note = tr|A0A0J5P7E1|A0A0J5P7E1_9PAST GTP cyclohydrolase 1; OS = Muribacter muris OX=67855 GN=folE PE=3 SV=1
MSDISPEARSVRDALITKGIETPIINHQKDKDSRRAEIQQHMRAVLELLGLDLRDDSLEETPHRLAKMFVDEIFSGLDYQTFPKITKIKNQMKVSEMVLVDDITLTSTCEHHFVTIDGKVAVAYYPKNWVIGLSKINRVVQFFAQRPQVQERFTEQILTAFQTILETEDVAVYVKATHFCVKCRGVKDTNSQTITSAYGGIFLQDRDTRKEFLTLINK

SEQ ID NO: 11113 - protein, 190 aa, unidentified
  source 1..190: note = Muribaculaceae bacterium
  REGION 1..190: note = tr|A0A4S4G4L3|A0A4S4G4L3_9BACT GTP cyclohydrolase 1; OS = Muribaculaceae bacterium OX=2498093 GN=folE PE=3 SV=1
MTPEETIEELSRHYRAIIELIGEDASREGLVKTPMRAAKALYYATSGYREDAKALMREAVFEHCGSQIVMVKDIEFYSFCEHHILPFFGKVSVGYIPDGEIIGLSKLARVVNVFARRLQVQERLTKEICKAVSESISTKGVMVVCEAEHLCMKMRGVEKQDSSTVTTDYIGAFEKDSSLRHEFYQLLASK

SEQ ID NO: 11114 - protein, 194 aa, unidentified
  source 1..194: note = Muribaculaceae bacterium
  REGION 1..194: note = tr|A0A3N2N7P6|A0A3N2N7P6_9BACT GTP cyclohydrolase 1; OS = Muribaculaceae bacterium Isolate-114 (HZI) OX=2486475; GN = folE PE=3 SV=1
MGRIENHKEDLVNQIAEHYSAILKLVGEDPEREGLRKTPVRAAKAILDITSGYRSEPLTIARQAIFEHAGSQMVIVKDVEFYSMCEHHILPFFGRVSIGYIPKGSMIGLSKLARIVDSFARRLQVQERLTSQICNLLDEAMPTDGVIVCCTGEHLCMKMRGVEKQDSATTTFDYSGRFAEEPTLREEFMRLLNC

SEQ ID NO: 11115 - protein, 197 aa, unidentified
  source 1..197: note = Muribaculum intestinale
  REGION 1..197: note = tr|A0A1B1S8P2|A0A1B1S8P2_9BACT GTP cyclohydrolase 1; OS = Muribaculum intestinale OX=1796646 GN=folE PE=3 SV=1
MNTTQKAMQNQDIVIEELARHYRAIIELIGENPDREGLRKTPLRAAKALYYATQGYRQDASAVMKQAVFEYAGSRMIIVRDIEFYSFCEHHILPFFGKISVGYIPDGNMIGLSKLARVVNVYARRLQVQERLTAEVTKVISNTLGAKGVIVVCRAEHLCMKMRGVEKQDSSTTTIDYDGVFAEDTTLRQEFLSLIQN

SEQ ID NO: 11116 - protein, 190 aa, unidentified
  source 1..190: note = Muribaculum intestinale
  REGION 1..190: note = tr|A0A4S2G3D2|A0A4S2G3D2_9BACT GTP cyclohydrolase 1; OS = Muribaculum intestinale OX=1796646 GN=folE PE=3 SV=1
MQNQDIVIEELARHYRAIIELIGENPDREGLRKTPLRAAKALYYATQGYRQDASAVMKQAVFEYAGSRMIIVRDIEFYSFCEHHILPFFGKISVGYIPDGNMIGLSKLARVVNVYARRLQVQERLTAEVTKVISNTLGAKGVIVVCRAEHLCMKMRGVEKQDSSTTTIDYDGVFAEDTTLRQEFLSLIQN

SEQ ID NO: 11117 - protein, 191 aa, unidentified
  source 1..191: note = Muribaculum sp.
  REGION 1..191: note = tr|A0A4P7W571|A0A4P7W571_9BACT GTP cyclohydrolase 1; OS = Muribaculum sp. H5 OX=2530393 GN=folE PE=3 SV=1
MRELSEETIKEIAGHYEAIIRLLGEDITREGLLKTPMRAAKAMAYVTRGYRQDADEIINEAIFTHEGSKMVLVKDIEFYSLCEHHILPFFGKVSIGYIPNGKTIGLSKLARLVDFYARRLQVQERLTAQICNLIMEKLNAKGVIVVCTGDHLCMKMRGVEKQNSATTTIETSGIFDESPALRDEFFKALAH

SEQ ID NO: 11118 - protein, 190 aa, unidentified
  source 1..190: note = Muribaculum sp.
  REGION 1..190: note = tr|A0A4S2AYF3|A0A4S2AYF3_9BACT GTP cyclohydrolase 1; OS = Muribaculum sp. NM65_B17 OX=2516961 GN=folE PE=3 SV=1
MDKEQVISALAEHYRAIIELIGENPDREGLVKTPVRAAKALYYATQGYRESADEVMRSAIFDYSGSQIIIVKDIEFYSFCEHHILPFFGKVSIGYLPNGNMIGLSKLARVVNIYARRLQVQERFTAEVCREVYDTLSAHGVMVVCNAEHLCMKMRGVEKQDSSTTTMEYMGRFAEDASLRAEFLSLLKSM

SEQ ID NO: 11119 - protein, 226 aa, unidentified
  source 1..226: note = Muricauda antarctica
  REGION 1..226: note = tr|A0A1M6RIZ7|A0A1M6RIZ7_9FLAO GTP cyclohydrolase 1; OS = Muricauda antarctica OX=1055723 GN=folE PE=3 SV=1
MKLEQALEEQYEERGNDHVGSSSDTPMRKDAFVLSDEEKIERIQKNVREIMLTLGLDLDDDSLKGTPKRVAKMYVKEIFGGLHPDRRPTSSTFDNKYKYGEMLVEKNIVVYSTCEHHLLPIVGRAHIAYISNGTVVGLSKMNRIVDYYAKRPQVQERLNIQIVKEMQKVLGTEDVACVIDAKHLCVNSRGIRDIESSTVTAEYGGKFKDEAVRREFLDYINLDTEF

SEQ ID NO: 11120 - protein, 217 aa, unidentified
  source 1..217: note = Muricauda antarctica
  REGION 1..217: note = tr|A0A1M6X6Q9|A0A1M6X6Q9_9FLAO GTP cyclohydrolase 1; OS = Muricauda antarctica OX=1055723 GN=folE PE=3 SV=1
MKDSKRNQTGVGTMAGVNGASCNGETCQHQRNKDRMTEIAHHFGRIMEVLGLDLDDPSLKDTPARVAKMFLNEAFIGLDEAQFPEVSFFDNTYNFDEMVVVNDISLYSYCEHHFVPFFGKVNVAYFPNKKVIGLSKINRIVDFIGRKPQVQEKLTREIAETLSALLDTEHVAVYVEANHLCVASRGIKDHNSHTKTGSYLGKFKNEWTKKEFMSTFQ

SEQ ID NO: 11121 - protein, 256 aa, Muricauda lutaonensis
  REGION 1..256: note = tr|A0A0D5YR12|A0A0D5YR12_9FLAO GTP cyclohydrolase 1; OS = Muricauda lutaonensis OX=516051 GN=folE PE=3 SV=1
MLNNNLCCQTIEMRCHSPINVYLCFLCIGNMKVREPLEEQYDNLGDDHLGSSEETPLRKDAFLLDDDEKIERIEKNIREIMLTLGLDLDDDSLNGTPKRVAKMYVKEIFAGLHPKRRPKSSTFDNKYKYGEMLVEKNITVYSTCEHHLLPIVGKAHIAYISNGTVVGLSKMNRIVDYFAKRPQVQERMNIQIVKELQKVLGTEDVACVIDAKHLCVNSRGIRDVDSSTVTAEYGGKFKEEGVRREFLDYINLETEF

SEQ ID NO: 11122 - protein, 199 aa, Muricauda lutaonensis
  REGION 1..199: note = tr|A0A0D5YWF3|A0A0D5YWF3_9FLAO GTP cyclohydrolase 1; OS = Muricauda lutaonensis OX=516051 GN=folE PE=3 SV=1
MAPYQNLEEYNIKITNEVKERFSKIIDEIGEDVNREGLVKTPERAAKAMLFLTQGYRQDAAAILKSAMFKESYNEMVIVKDIEIYSLCEHHMLPFFGKAHIAYIPNGHIVGLSKLPRIVDVFARRLQVQERLTEQILDCINDTLKPQGVAVVIEAAHMCMMMRGVQKQNSVTTTSGFRGSFKNEETRNEFLKLISSDLS

SEQ ID NO: 11123 - protein, 226 aa, Muricauda lutimaris
  REGION 1..226: note = tr|A0A3A1N4P8|A0A3A1N4P8_9FLAO GTP cyclohydrolase 1; OS = Muricauda lutimaris OX=475082 GN=folE PE=3 SV=1
MKLEQALEEQHEERGNDHVGSSTDTPMREDAFVLSDEEKIERIQKSVREIMLTLGLDLDDDSLKGTPKRVAKMYVQEIFGGLHPDRKPKSSTFDNKYKYGEMLVEKNIVVYSTCEHHLLPIVGRAHIAYISNGTVVGLSKMNRVVDYFAKRPQVQERLNIQIVKELQKVLGTEDVACVIDAKHLCVNSRGIRDIDSSTVTAEYGGKFKDEATRREFLDYINLDTEF

SEQ ID NO: 11124 - protein, 199 aa, Muricauda lutimaris
  REGION 1..199: note = tr|A0A3A1N3Z9|A0A3A1N3Z9_9FLAO GTP cyclohydrolase 1; OS = Muricauda lutimaris OX=475082 GN=folE PE=3 SV=1
MAPYRNLEEYNIEITNEVKDHFSKIVDDIGEDVTREGLLKTPERAAKAMLFLTQGYKQDAEEILKGAMFEESYDDMVIIKDIELYSLCEHHMLPFFGKAHVAYIPNGHIVGLSKIPRVVDVFARRLQVQERLTHDILECINRTLKPKGVAVVIEASHMCMMMRGVQKQNSVTTTSGFRGQFEKIETRNEFLKLISADLS

SEQ ID NO: 11125 - protein, 199 aa, Muricauda olearia
  REGION 1..199: note = tr|A0A444VKH4|A0A444VKH4_9FLAO GTP cyclohydrolase 1; OS = Muricauda olearia OX=552546 GN=folE PE=3 SV=1
MAPYRNLEEYNIEITNEVKDHFAKIMGDIGEDISRDGLVKTPERAAKAMLFLTQGYKQDATEILKSAMFAESYDDMVIIKDIEVYSLCEHHMLPFFGKAHIAYIPNGHIVGLSKIPRVVDVFARRLQVQERLTHDILECINTTLKPKGVAVVIEAAHMCMMMRGVQKQNSVTTTSGFRGQFEKQETRNEFLKLISSDLS

SEQ ID NO: 11126 - protein, 226 aa, Muricauda olearia
  REGION 1..226: note = tr|A0A444VRF8|A0A444VRF8_9FLAO GTP cyclohydrolase 1; OS = Muricauda olearia OX=552546 GN=folE PE=3 SV=1
MKIEQALEEQYEDRGNDHVGSSTETPMREDAFVLSDEEKIERIQKSVREIMLTLGLDLDDDSLAGTPKRVAKMYVKEIFGGLHPKRKPESSTFENKYKYGEMLVEKNIVLYSTCEHHLLPIVGRAHIAYISNGTVVGLSKMNRIVDYYAKRPQVQERLNIQIVKEMQRVLGTEDVACVIDAKHLCVNSRGIRDIESSTVTSEYGGKFKDEAVRREFLDYINLDTDF

SEQ ID NO: 11127 - protein, 221 aa, unidentified
  source 1..221: note = Muricauda pacifica
  REGION 1..221: note = tr|A0A2T0MIR1|A0A2T0MIR1_9FLAO GTP cyclohydrolase 1; OS = Muricauda pacifica OX=1080225 GN=folE PE=3 SV=1
MDKSQIELLGDNHIATSVKTPMRADAFDRSDDEKIENIQSHFYKIMEELGLDLTDESLSGTPYRFAKMYVKELFYGLNPNNKPKISTFPNTYGYQRMLVEQDITIDSSCEHHFLPIVGKAHVAYIPKDKVVGLSKINRLVDYYSHRPQVQERLCLQILTDLQETLETEDVIVMVHAKHLCVSSRGIKDKESFTTTLEYGGKFKDDKLRQEFYGLLENNFKE

SEQ ID NO: 11128 - protein, 234 aa, unidentified
  source 1..234: note = Muricauda pacifica
  REGION 1..234: note = tr|A0A2T0MC20|A0A2T0MC20_9FLAO GTP cyclohydrolase 1; OS = Muricauda pacifica OX=1080225 GN=folE PE=3 SV=1
MKDQDLLLEDYLESTDLLNSYTHDEIGDDHLYTGVKTPMKPDAFELSDDEKKEQIADLFGQIMDVMGLDLTDDSLKGTPMRVAKMYIDEIYSGLNPANKPKVALFDNKYQYNQMLVEKDITFYSNCEHHFVPIIGRAHVAYISSGKVIGLSKLNRIVQYFAKRPQVQERLTNQIALELQAILGTEDVAVIIDAKHLCVSSRGIKDDTSATVTSFYGGKFNTPEKIQELYNYINN

SEQ ID NO: 11129 - protein, 215 aa, Muricauda ruestringensis
  REGION 1..215: note = tr|G2PQP5|G2PQP5_MURRD GTP cyclohydrolase 1; OS = Muricauda ruestringensis (strain DSM 13258 / CIP 107369 / LMG 19739 / B1) OX=886377 GN=folE PE=3 SV=1
MKPADQSRTSTVTQVNGTLCNGENGQRLKKNDKIAEIAHHFGRIMEVLGLDLDDPSLKDTPARVAKMFVNEAFVGLDETQFPEVSFFDNTYNFDEMVVVNDISLYSYCEHHFVPFFGKVNVAYFPNKKVIGLSKINRIVDFIGRKPQVQEKLTREIAETLSVLLDTEHVAVYVEANHLCVASRGIKDHNSHTKTGSYLGKFKNEWTKKEFVSTFQ

SEQ ID NO: 11130 - protein, 199 aa, Muricauda ruestringensis
  REGION 1..199: note = tr|G2PKN6|G2PKN6_MURRD GTP cyclohydrolase 1; OS = Muricauda ruestringensis (strain DSM 13258 / CIP 107369 / LMG 19739 / B1) OX=886377 GN=folE PE=3 SV=1
MAPYRNLEEYNIEITNEVKEHFSKIVEDIGEDVTREGLLKTPERAAKAMLFLTQGYKQNAEEILKGAMFAEDYDDMVIIKDIELYSLCEHHMLPFFGKAHVAYIPNGHIVGLSKIPRIVDVFARRLQVQERLTHDILECINKTLKPKGVAVVIEAAHMCMMMRGVQKQNSVTTTSGFRGQFEKIETRNEFLKLISSDLS

SEQ ID NO: 11131 - protein, 226 aa, Muricauda sp.
  REGION 1..226: note = tr|A0A418NA88|A0A418NA88_9FLAO GTP cyclohydrolase 1; OS = Muricauda sp. NH166 OX=2306997 GN=folE PE=3 SV=1
MKLERALEEQYEERGNDHVGSSTETPMREDAFVLSDEEKIERIQKSVREIMLTLGLDLDDDSLKGTPKRVAKMYVKEIFGGLHPDRRPTSSTFENKYKYGEMLVEKNIVLYSTCEHHLLPIVGRAHIAYISNGTVVGLSKMNRIVDYYAKRPQVQERLNIQIVKEMQKVLGTEDVACVIDAKHLCVNSRGIRDIDSSTVTAEYGGKFKDEAVRREFLDYINLETEF

SEQ ID NO: 11132 - protein, 199 aa, Muricauda sp.
  REGION 1..199: note = tr|A0A2E3VMW0|A0A2E3VMW0_9FLAO GTP cyclohydrolase 1; OS = Muricauda sp. OX=192149 GN=folE PE=3 SV=1
MAPYRNLEEYNIEITNEVKDHFSKIMDDIGEDVTREGLIKTPERAAKAMLFLTQGYKQDAEKILKGAMFAEEYDDMVIIKDIELYSLCEHHMLPFFGKAHVAYIPNGHIVGLSKIPRVIDVFARRLQVQERLTHDILECINKTLKPKGVAVVIEASHMCMMMRGVQKQNSVTTTSGFRGQFEKIETRNEFLKLISADLS

SEQ ID NO: 11133 - protein, 226 aa, unidentified; identical to SEQ ID NO: 11119
  source 1..226: note = Muricauda taeanensis
  REGION 1..226: note = tr|A0A3A1NYP0|A0A3A1NYP0_9FLAO GTP cyclohydrolase 1; OS = Muricauda taeanensis OX=1005926 GN=folE PE=3 SV=1

SEQ ID NO: 11134 - protein, 199 aa, unidentified
  source 1..199: note = Muricauda taeanensis
  REGION 1..199: note = tr|A0A3A1NP59|A0A3A1NP59_9FLAO GTP cyclohydrolase 1; OS = Muricauda taeanensis OX=1005926 GN=folE PE=3 SV=1
MAPYRYLEEYSIEITNEVKEHFSKIMDDLGEDVTREGLLKTPERAAKAMLFLTQGYKQDATEILKGAMFAEKYDDMVIIKDIEVYSLCEHHMLPFFGKAHVAYIPNGHIVGLSKIPRVVDVFARRLQVQERLTHDILECINSTLKPKGVAVVIEASHMCMMMRGVQKQNSVTTTSGFRGQFEKIETRNEFLKLISANLS

SEQ ID NO: 11135 - protein, 199 aa, unidentified
  source 1..199: note = Muricauda zhangzhouensis
  REGION 1..199: note = tr|A0A1H2SQR5|A0A1H2SQR5_9FLAO GTP cyclohydrolase 1; OS = Muricauda zhangzhouensis OX=1073328 GN=folE PE=3 SV=1
MAPYRQLEEYNMEITNEVKEHFANIMNDIGEDVEREGLIKTPERAAKAMLYLTQGYKQNAEEILRGAMFAESYDDMVIIKDIELYSLCEHHMLPFFGKAHVAYIPNGHIVGLSKIPRVVDVFARRLQVQERLTHDILECINNTLKPKGVAVVIEAAHMCMMMRGVQKQNSVTTTSGFRGQFEKIETRNEFLKLISADLS

SEQ ID NO: 11136 - protein, 226 aa, unidentified
  source 1..226: note = Muricauda zhangzhouensis
  REGION 1..226: note = tr|A0A1H2QIM9|A0A1H2QIM9_9FLAO GTP cyclohydrolase 1; OS = Muricauda zhangzhouensis OX=1073328 GN=folE PE=3 SV=1
MKLEQALEEQYEERGNDHVGSSTETPMRKDAFVLSDDEKIERIQKSVREIMLTLGLDLDDDSLNGTPKRVAKMFVKEIFGGLHPDRKPNSSTFSNKYKYGEMLVEKNIVLYSTCEHHLLPIVGRAHIAYISNGTVVGLSKMNRVVDYYAKRPQVQERLNIQIVKELQEVLGTEDVACVIDAKHLCVNSRGIRDIESSTVTAEYGGKFKDEAVRREFLDYINLDTEF

SEQ ID NO: 11137 - protein, 184 aa, unidentified
  source 1..184: note = Muricomes intestini
  REGION 1..184: note = tr|A0A4R3K8H4|A0A4R3K8H4_9FIRM GTP cyclohydrolase 1; OS = Muricomes intestini OX=1796634 GN=folE PE=3 SV=1
MIDQGKVKQAVRLLLEGIGEDSGREGLKDTPERIARMYEEIYGGMEESAEEHLKKTFHVDNNEMVVEKNITFYSICEHHLLPFYGKAHIAYIPDGKVVGLSKLARTVEMFARRLQLQEQLTAQIADALMESLNPKGVCVMLEAEHMCMTMRGIKKPGSQTVTVVKRGGFSNNPELINLFFQMIK

SEQ ID NO: 11138 - protein, 226 aa, Muriicola sp.
  REGION 1..226: note = tr|A0A411EB40|A0A411EB40_9FLAO GTP cyclohydrolase 1; OS = Muriicola sp. MMS17-SY002 OX=2507538 GN=folE PE=3 SV=1
MKIKSSLEDHFESVGEDHISSAEDTPIRPDAFVLSDEEKIERIEDSVRDIMLTLGLDLDDDSLNGTPRRVAKMYVQEVFSGLHPKRKPKASTFKNKYKYGEMLVEKNITVYSTCEHHMLPIVGKAHIAYISAGTVVGLSKMNRIVDYFAKRPQVQERMNIQIVRELQKVLGTEDVACVIDAKHLCVNSRGIRDVDSSTVTAEYGGRFKDEAVRKEFLEYINLDTTF

SEQ ID NO: 11139 - protein, 199 aa, Muriicola sp.
  REGION 1..199: note = tr|A0A411EDB6|A0A411EDB6_9FLAO GTP cyclohydrolase 1; OS = Muriicola sp. MMS17-SY002 OX=2507538 GN=folE PE=3 SV=1
MAPYQNLEEYNLSITNEVKERYEKIIDEIGEDVKREGLAKTPERAAKAMLFLTQGYKQDAVKILKSAMFAEEYDEMVIIKDIEVYSLCEHHMLPFYGKAHIAYIPNGHIVGLSKIPRVVDVFARRLQVQERLTHDILECINKTLQPKGVAVVIEASHMCMMMRGVQKQNSVTTTSGFRGQFEKIETRNEFLKLISSRLS

SEQ ID NO: 11140 - protein, 198 aa, Murinocardiopsis flavida
  REGION 1..198: note = tr|A0A2P8D110|A0A2P8D110_9ACTN GTP cyclohydrolase 1; OS = Murinocardiopsis flavida OX=645275 GN=folE PE=3 SV=1
MSGSRAEPGAGVDLARVEKAVREILSAIGEDPDRDGLRETPARVARAYSEQFAGLGQDPRDVLTTVFEAGHEEMVLVKDIELYSTCEHHLVPFYGVAHVGYIPNAKGQITGLSKFARLVDLYARRPQVQERLTTQIADAVMDHLEPRGVIVVIEAEHLCMTMRGVRKPGAKTVTSAVRGDFRDRDRTRAEAMSLILGH

SEQ ID NO: 11141 - protein, 207 aa, Myceligenerans xiligouense
  REGION 1..207: note = tr|A0A3N4YG24|A0A3N4YG24_9MICO GTP cyclohydrolase 1; OS = Myceligenerans xiligouense OX=253184 GN=folE PE=3 SV=1
MSSGPISPAATVGRPAADVPPYDAARVEAAVRELLIAVGEDPDREGLQDTPARVARAYAETFSGLRQEPEDVLTTTFDLGHEEMVLVKDIEVYSTCEHHLVPFHGVAHVGYIPNEDGCITGLSKLARLVEVYARRPQVQERMTSQIADSLMKILKPRGVIVVVECEHLCMSMRGVRKPGSRTVTSAVRGQMRDAVTRAEAMSLIIGK

SEQ ID NO: 11142 - protein, 199 aa, Mycetocola lacteus
  REGION 1..199: note = tr|A0A3L7AUS7|A0A3L7AUS7_9MICO GTP cyclohydrolase 1; OS = Mycetocola lacteus OX=76637 GN=folE PE=3 SV=1
MAVDRERVMRAVSELIEAIGEDPARPGMQDTPRRVAEAYAEYFSGIGVDARALLNNTVPLDSAADEHETSGPGEIVLLRDIEFRSICEHHLLPFIGVAHVAYLPGEKVVGLGALPRVVDTLASRPQLQERLTDEIADTLFTGLDARGALVVMEAKHGCVSARGPRQVASSTVTMASRGELSDPLRRGEVFALIGGTHER

SEQ ID NO: 11143 - protein, 189 aa, unidentified
  source 1..189: note = Mycetocola manganoxydans
  REGION 1..189: note = tr|A0A3L6ZNQ9|A0A3L6ZNQ9_9MICO GTP cyclohydrolase 1; OS = Mycetocola manganoxydans OX=699879 GN=folE PE=3 SV=1
MDPERIRRAVTELLLAIGENPARAGLARTPQRVAEAYGEFFHGLAEDPLDLLADAIPLGSDGPGEAVVVRDITFRSICEHHLLPFLGVAHIAYLPDAKVVGLGALPKVVDVLASRPQIQERLTEEIADAIHRGLGARGVLVVLDAVHGCVTTRGSRQEQSSTLTVASRGELSEPARRAEIISLLARPGS

SEQ ID NO: 11144 - protein, 192 aa, unidentified
  source 1..192: note = Mycetocola miduiensis
  REGION 1..192: note = tr|A0A1I5B966|A0A1I5B966_9MICO GTP cyclohydrolase 1; OS = Mycetocola miduiensis OX=995034 GN=folE PE=3 SV=1
MDSKRIQRAVTELLLAIGEDPARAGLVRTPERVAEAYEEFFGGLTEDPLALLADAVPVDDNGPGEAVVVRDITFRSICEHHLLPFLGVAHVAYLPRNRIVGLGRIPRVVDTLASRPQLQERLTEEIANTLEHGLDARGVLVVLDAVHGCVSARGSRQEAASTLTLASRGELADPVRRAEIISLLGRGGPVDD

SEQ ID NO: 11145 - protein, 210 aa, Mycetocola reblochoni
  REGION 1..210: note = tr|A0A3L6ZM44|A0A3L6ZM44_9MICO GTP cyclohydrolase 1; OS = Mycetocola reblochoni OX=331618 GN=folE PE=3 SV=1
MAVDAERVRAAVAELIAAIGEDPSRPGLEDTPRRVAESYAEFFAGVDQDPAQALANTIAVGEHDGATVVMRDIALRSVCEHHLLPFLGTAHIAYAPAERVVGLGSLPRVVGVLAARPQVQERLTEQIAAAIDEALDPRGVLVVIEAAHGCVTMRGPRQIGSTTVTLAARGSFAAPAEQAAALALIGRPTPATGSGLGPHPLTVPVAETGP

SEQ ID NO: 11146 - protein, 210 aa, Mycetocola reblochoni; identical to SEQ ID NO: 11145
  REGION 1..210: note = tr|A0A1R4I7J4|A0A1R4I7J4_9MICO GTP cyclohydrolase 1; OS = Mycetocola reblochoni REB411 OX=1255698 GN=folE PE=3; SV = 1

SEQ ID NO: 11147 - protein, 196 aa, Mycetocola sp.
  REGION 1..196: note = tr|A0A2U1TG15|A0A2U1TG15_9MICO GTP cyclohydrolase 1; OS = Mycetocola sp. 622 OX=2173166 GN=folE PE=3 SV=1
MAGVDKPRVEAAVIELLAAIGEDAQRPGLERTPARVAEAYSEFFSGIGEDPLEHLRESVPVGDDGNGEVVLLRDIAFRSICEHHLLPFLGKAHVAYLPGERVVGLGRLPLVVDTLASRPQLQERLTEQIADALERGLEARGVLVVLDAVHGCVAARGVRQANSSTVTVASRGALAEPARRAELFALIGHGAADAHA

SEQ ID NO: 11148 - protein, 199 aa, Mycetocola tolaasinivorans
  REGION 1..199: note = tr|A0A3L6ZV24|A0A3L6ZV24_9MICO GTP cyclohydrolase 1; OS = Mycetocola tolaasinivorans OX=76635 GN=folE PE=3 SV=1
MAVDRERIMRAVSELIEAIGEDPARPGMLDTPRRVAEAYAEYFSGIGVDARALLSNTVPLDSADGEHETSGPGEIVLLRDIEFRSICEHHLLPFIGVAHVAYLPGETVVGLGALPRVVDTLASRPQLQERLTDEIADTLFTGLAARGALVVMEAKHGCVSARGPRQVASSTVTMASRGELSDPLRRGEVFALIGGTHDR

SEQ ID NO: 11149 - protein, 197 aa, unidentified
  source 1..197: note = Mycetocola zhadangensis
  REGION 1..197: note = tr|A0A3L7J7W5|A0A3L7J7W5_9MICO GTP cyclohydrolase 1; OS = Mycetocola zhadangensis OX=1164595 GN=folE PE=3 SV=1
MAGVDKPRIEAAVVELLAAIGEDSSREGLARTPARVAEAYAEFFAGLDENPLEHLRESVPVGDAGNGEVVLLRDIAFRSICEHHLLPFLGTAHVAYLPSDRVVGLGRLPLVVNTLASRPQLQERLTEQIADALEQGLRARGVLVVLDAVHGCVTARGPRQAASSTVTVASRGELTEPARRAEIFAMIGSSTTDDSRA

SEQ ID NO: 11150 - protein, 282 aa, unidentified
  source 1..282: note = Mycoavidus cysteinexigens
  REGION 1..282: note = tr|A0A2Z6EUS3|A0A2Z6EUS3_9BURK GTP cyclohydrolase FolE2 OS=Mycoavidus cysteinexigens OX=1553431 GN=folE2; PE = 3 SV=1
MNGLNSVAVMSDVQGSIDTRQIPIQRVGIKAVRHPLTVRSATGASQPTVGLFDLDVYLPSNQKGTHMSRFIALLGESTADAVTGDAIVLDLAGFQVMLMKMLTKLESTAGRIEVTFPYFMNKTAPISGVKSLLDYEVSFIGEAQGERSRIFMKVLVPVMSLCPCSKEISLYGAHNQRSHLIIKAELQDDQLPVEDLIRIAEESASCELWGLLKRPDEKFVTERAYDNPKFVEDLVRDVASRLNQDDRVVAYVLEAENFESIHNHSAYALVEHDKRQSGLKSV

SEQ ID NO: 11151 - protein, 202 aa, unidentified
  source 1..202: note = Mycobacteriaceae bacterium
  REGION 1..202: note = tr|A0A1A0Q3F2|A0A1A0Q3F2_9MYCO GTP cyclohydrolase 1; OS = Mycobacteriaceae bacterium 1482268.1 OX=1834080 GN=folE; PE = 3 SV=1
MALPHSDFATTTERLFDQPRAEAAIRELLIAVGEDPDRHGLEATPARVARAYKEMFAGLYTDPDSVLDTTFDEQHDELVLVKQIPLYSTCEHHLVAFHGVAHVGYIPGEDGRVTGLSKIARLVDLYAKRPQVQERLTVQVADAVMRKLEPRGVIVVLECEHLCMSMRGVRKPGALTTTSAVRGQFKTDKASRSEALELILRK

SEQ ID NO: 11152 - protein, 202 aa, unidentified
  source 1..202: note = Mycobacterium ahvazicum
  REGION 1..202: note = tr|A0A2K4YHQ7|A0A2K4YHQ7_9MYCO GTP cyclohydrolase 1; OS = Mycobacterium ahvazicum OX=1964395 GN=folE PE=3 SV=1
MVLPDTRAALDRVRAFDQARAEAAVRELLYAIGEDPDRDGLRDTPARVARAYREIFSGLYTDPSDVLNTMFDEDHDELVIVKEIPLYSTCEHHLVSFHGVAHVGYIPGQDGRVTGLSKIARLVDLYAKRPQVQERLTSQIADALVNRLDPRGVIVVVEAEHLCMAMRGVRKPGAITTTSAVRGQFKTDAASRAEALDLILRK

SEQ ID NO: 11153 - protein, 210 aa, unidentified
  source 1..210: note = Mycobacterium alsense
  REGION 1..210: note = tr|A0A1A2HVS0|A0A1A2HVS0_9MYCO GTP cyclohydrolase 1; OS = Mycobacterium alsense OX=324058 GN=folE PE=3 SV=1
MALPDLGADLGPDTHIASARIRNFDQQRAEAAIRELLYAIGEDPDRNGLQDTPARVARAYREMFAGLYTDPDTVLNTMFDEDHDEMVIVKEIPLYSTCEHHLVSFHGAAHVGYIPGHDGRVTGLSKIARLVDLYAKRPQVQERLTSQIADALVSKLDPRGVIVVVEAEHLCMAMRGVRKPGAVTTTSAVRGLFKTSAASRAEALDLILRK

SEQ ID NO: 11154 - protein, 207 aa, unidentified
  source 1..207: note = Mycobacterium alsense
  REGION 1..207: note = tr|A0A1A3D6G6|A0A1A3D6G6_9MYCO GTP cyclohydrolase 1; OS = Mycobacterium alsense OX=324058 GN=folE PE=3 SV=1
MTTLDHRNHRATPPSLLQLADRPVRDLAAAEQAAGAFLQALGIPLNGESMRATPARMARAYAELFTAEPFEATTFPNDERYDELVVARDIPLRSVCEHHLLPFTGTACVGYLPGERILGLSKLARVVEHFACRPQVQERLTKQVADWLTDHLQPRAVGVVIRAEHTCMTLRGVNATGSTSVTSTLLGTLRTDPGSRHEFFALAGFGR

SEQ ID NO: 11155 - protein, 202 aa, unidentified
  source 1..202: note = Mycobacterium angelicum
  REGION 1..202: note = tr|A0A1W9Z917|A0A1W9Z917_9MYCO GTP cyclohydrolase 1; OS = Mycobacterium angelicum OX=470074 GN=folE PE=3 SV=1
MTQLDSRDAAHQVRVFDQPRAEAAIRELLVAVGEDPDRSGLRDTPARVARAYREIFAGLYTDPATVLSTMFDEDHNELVIVKEIPMYSTCEHHLVSFHGVAHVGYIPNEDGRVTGLSKIARLVDLYAKRPQVQERLTSQIADALVERLDPRGVIVVVEAEHLCMAMRGVRKPGAITTTSAVRGQFKHDAASRAEALDLILRK

SEQ ID NO: 11156 - protein, 204 aa, unidentified
  source 1..204: note = Mycobacterium aquaticum
  REGION 1..204: note = tr|A0A1X0ATB8|A0A1X0ATB8_9MYCO GTP cyclohydrolase 1; OS = Mycobacterium aquaticum OX=1927124 GN=folE PE=3 SV=1
MTKPATRSPSTNNNHRVFDQPRAEAAVRELLIAIGEDPDRQGLVDTPARVARAYKELMAGLYTDPDAVLNTTFDEQHDELVLVKEIPMYSTCEHHLVSFHGVAHVGYIPGEDGRVTGLSKIARLVDLYSKRPQVQERLTAQIADALMRKLSPRGTIVVIEAEHLCMAMRGVRKPGAITTTSAVRGQFKTDKASRAEALELILRK

SEQ ID NO: 11157 - protein, 204 aa, Mycobacterium arosiense
  REGION 1..204: note = tr|A0A1W9Z5V1|A0A1W9Z5V1_9MYCO GTP cyclohydrolase 1; OS = Mycobacterium arosiense ATCC BAA-1401 = DSM 45069; OX = 1265311 GN=folE PE=3 SV=1
MALRGLGPNTAMPATGAFDQERAEAAVRELLHAIGEDPDRDGLRETPARVARAYREMFAGLYTDPDSVLNTMFDEDHDELVLVKEIPLYSTCEHHLVAFHGVAHVGYIPGNDGRVTGLSKIARLVDLYSKRPQVQERLTSQIADALVKKLNPRGVIVVVEAEHLCMAMRGVRKPGAVTTTSAVRGLFKTNAASRAEALDLILRK

SEQ ID NO: 11158 - protein, 200 aa, Mycobacterium asiaticum
  REGION 1..200: note = tr|A0A1A3NI01|A0A1A3NI01_MYCAS GTP cyclohydrolase 1; OS = Mycobacterium asiaticum OX=1790 GN=folE PE=3 SV=1
MTQLDSRDTFVRPFDQDRAEAAVRELLIALGEDPDRNGLRDTPARVVRAYREIFAGLYTDPASVLDTMFDEDHNELVLIKEIPMYSTCEHHLVSFHGVAHVGYIPGEDGRVTGLSKIARLVDLYAKRPQVQERLTSQIADALVRRLNPRGVMVVIEAEHLCMAMRGVRKPGAITTTSAVRGQFKSDPASRAEALDLILRK

SEQ ID NO: 11159 - protein, 200 aa, Mycobacterium asiaticum
  REGION 1..200: note = tr|A0A1A3CVM8|A0A1A3CVM8_MYCAS GTP cyclohydrolase 1; OS = Mycobacterium asiaticum OX=1790 GN=folE PE=3 SV=1
MTQLDARGTRVHVFDQQRAEAAVRELLIALGEDPDREGLRETPARVARAYKEVFAGLYTDPASVLNTMFDEDHNELVIVKEIPLYSTCEHHLVSFHGVAHVGYIPGADGRVTGLSKIARLVDLFAKRPQVQERLTSQIADALVQRLNPLGVIVVIEAEHLCMAMRGVRKPGAVTTTSAVRGQFKTDAASRAEALDLILRK

SEQ ID NO: 11160 - protein, 202 aa, unidentified
  source 1..202: note = Mycobacterium attenuatum
  REGION 1..202: note = tr|A0A498QCT3|A0A498QCT3_9MYCO GTP cyclohydrolase 1; OS = Mycobacterium attenuatum OX=2341086 GN=folE_2 PE=3 SV=1
MTQLDSRPKPSIPGVFDQSRAEAAVRELLYAVGENPEREGLRETPARVARAYREIFAGLYTDPDAVLNAMFDEDHDELVLVKQIPLYSTCEHHLVSFHGVAHVGYIPGTDGRVTGLSKIARLVDLYAKRPQVQERLTSQIADALVKKLEPRGVIVVVEAEHLCMAMRGVRKPGAVTTTSAVRGAFKTNAASRAEALDLILRK

SEQ ID NO: 11161 - protein, 240 aa, unidentified
  source 1..240: note = Mycobacterium attenuatum
  REGION 1..240: note = tr|A0A498Q6Y4|A0A498Q6Y4_9MYCO GTP cyclohydrolase 1; OS = Mycobacterium attenuatum OX=2341086 GN=folE_1 PE=4 SV=1
MTAIPSTPRQARYQIPTLWAMTNDEVVPGDAVYPKDIGDQSADSPPWWDTNADVELQRAVQQLLAALGVDEGEHTADTPARVARAWREMLWGYHEVPEDHLDTDFPAPDDPGLIVMHGISFASTCAHHLLPFSGTATIAYRPHPGQRIVGLSKLARLVHGYAARLQVQERIGHQATAGMMRKLNPSGAMCVITARHDCMRLRGVREPAAEATTESRKGMWLDREIALVHRLHASGRPGAG

SEQ ID NO: 11162 - protein, 204 aa, Mycobacterium avium
  REGION 1..204: note = sp|A0QA85|GCH1_MYCA1 GTP cyclohydrolase 1; OS = Mycobacterium avium (strain 104) OX=243243 GN=folE PE=3; SV = 1
MAGNGSAPDTATHQVRQFDQARAEAAVRELLFAIGENPDRHGLAETPARVARAYREMFAGLYTDPDSVLNTMFDEEHDELVLVKEIPLYSTCEHHLVSFHGVAHVGYIPGNDGRVTGLSKIARLVDLYAKRPQVQERLTSQIADALVKKLNPRGVIVVVEAEHLCMAMRGVRKPGAVTTTSAVRGLFKTNAASRAEALDLILRK

SEQ ID NO: 11163 - protein, 137 aa, Mycobacterium avium
  REGION 1..137: note = tr|X8B1W8|X8B1W8_MYCAV GTP cyclohydrolase 1; OS = Mycobacterium avium subsp. avium 2285 (R) OX=1299330; GN = folE PE=3 SV=1
MLNTMFDEEHDELVLVKEIPLYSTCEHHLVSFHGVAHVGYIPGNDGRVTGLSKIARLVDLYAKRPQVQERLTSQIADALVKKLNPRGVIVVVEAEHLCMAMRGVRKPGAVTTTSAVRGLFKTNAASRAEALDLILRK

SEQ ID NO: 11164 - protein, 199 aa, unidentified
  source 1..199: note = Mycobacterium basiliense
  REGION 1..199: note = tr|A0A3S4BLL6|A0A3S4BLL6_9MYCO GTP cyclohydrolase 1; OS = Mycobacterium basiliense OX=2094119 GN=folE_1 PE=3 SV=1
MTQLDSATEPRVFDQERVEAAVRELLSAIGEDPNRGGLRDTPARVARAYREIFAGLYTDPDTVLSAMFDEEHDELVLVKEIPLYSTCEHHLVSFHGVAHVGYIPGRDGRVTGLSKIARLVDLYAKRPQVQERLTSQIADALVKRLEPRGVIVVVEAEHLCMAMRGVRKPGAITTTSAVRGQFKTDAASRAEALDLILRK

SEQ ID NO: 11165 - protein, 169 aa, unidentified
  source 1..169: note = Mycobacterium basiliense
  REGION 1..169: note = tr|A0A3S4DWV1|A0A3S4DWV1_9MYCO GTP cyclohydrolase 1; OS = Mycobacterium basiliense OX=2094119 GN=folE_2 PE=4 SV=1
MHHIRALHGTGYPRADASQPPSSITTGAATRALGDAELVVVRPVPFRSLCADHLLPFQGVVHIGHIDSENHLSTPELTRIVAACTRSIQTQQPMTIRIGLWLHHQLVPRGVGVLVKANYACAAAARGDAHLGRPATTMAFCGSMRHSADERQEFVALARRERHKGAAGQ

SEQ ID NO: 11166 - protein, 204 aa, Mycobacterium bohemicum
  REGION 1..204: note = tr|A0A1X1QYS7|A0A1X1QYS7_9MYCO GTP cyclohydrolase 1; OS = Mycobacterium bohemicum OX=56425 GN=folE PE=3 SV=1
MALPSWEPDTATPPARVFDQDRAEAAVRELLEAIGEDPNRDGLRETPARVARAYREVFAGLYTDPDAVLNTMFDEQHDELVLVKEIPLYSTCEHHLVSFHGVAHVGYIPGTDGRVTGLSKIARLVDLYAKRPQVQERLTSQIADALVKKLDPRGVIVVIEAEHLCMAMRGVRKPGATTTTSAVRGQFKTSAASRAEALDLILRK

SEQ ID NO: 11167 - protein, 204 aa, Mycobacterium bohemicum; identical to SEQ ID NO: 11166
  REGION 1..204: note = tr|A0A0U0W827|A0A0U0W827_9MYCO GTP cyclohydrolase 1; OS = Mycobacterium bohemicum DSM 44277 OX=1236609 GN=folE; PE = 3 SV=1

SEQ ID NO: 11168 - protein, 204 aa, Mycobacterium bouchedurhonense; identical to SEQ ID NO: 11162
  REGION 1..204: note = tr|A0A1X0BJ77|A0A1X0BJ77_9MYCO GTP cyclohydrolase 1; OS = Mycobacterium bouchedurhonense OX=701041 GN=folE PE=3; SV = 1

SEQ ID NO: 11169 - protein, 202 aa, Mycobacterium bovis
  REGION 1..202: note = sp|P64208|GCH1_MYCBO GTP cyclohydrolase 1; OS = Mycobacterium bovis (strain ATCC BAA-935 / AF2122/97); OX = 233413 GN=folE PE=3 SV=1
MSQLDSRSASARIRVFDQQRAEAAVRELLYAIGEDPDRDGLVATPSRVARSYREMFAGLYTDPDSVLNTMFDEDHDELVLVKEIPMYSTCEHHLVAFHGVAHVGYIPGDDGRVTGLSKIARLVDLYAKRPQVQERLTSQIADALMKKLDPRGVIVVIEAEHLCMAMRGVRKPGSVTTTSAVRGLFKTNAASRAEALDLILRK

SEQ ID NO: 11170 - protein, 202 aa, Mycobacterium bovis; identical to SEQ ID NO: 11169
  REGION 1..202: note = tr|A0A4U7MMT5|A0A4U7MMT5_MYCBI GTP cyclohydrolase 1; OS = Mycobacterium bovis OX=1765 GN=folE PE=3 SV=1

SEQ ID NO: 11171 - protein, 202 aa, Mycobacterium branderi
  REGION 1..202: note = tr|A0A1X0BBH9|A0A1X0BBH9_9MYCO GTP cyclohydrolase 1; OS = Mycobacterium branderi OX=43348 GN=folE PE=3 SV=1
MAQPNSRVANLRRPVFDQARAEAAIRELLYAIGEDPNRHGLEDTPARVARTYREMFAGLYTDPDTVLDTTFDEQHDELVMIKEIPLYSTCEHHLVSFHGVAHVGYIPGDDGRVTGLSKIARLVDLYAKRPQVQERLTAQIADALMRKLDPRGVIVVIEAEHLCMAMRGVRKPGAVTTTSAVRGLFKTSQASRAEALELILRK

SEQ ID NO: 11172 - protein, 202 aa, unidentified; identical to SEQ ID NO: 11169
  source 1..202: note = Mycobacterium canettii
  REGION 1..202: note = tr|G0TJP2|G0TJP2_MYCCP GTP cyclohydrolase 1; OS = Mycobacterium canettii (strain CIPT 140010059); OX = 1048245 GN=folE PE=3 SV=1

SEQ ID NO: 11173 - protein, 195 aa, Mycobacterium celatum
  REGION 1..195: note = tr|A0A1X1RWZ6|A0A1X1RWZ6_MYCCE GTP cyclohydrolase 1; OS = Mycobacterium celatum OX=28045 GN=folE PE=3 SV=1
MTNLRKPVFDQARAEAAIRELLYAIGEDPDRHGLEDTPARVARTYREMFAGLYTDPDSVLNTTFDEQHDELVLIKDIPLYSTCEHHLVAFHGVAHVGYIPGDDGRVTGLSKIARLVDLYAKRPQVQERLTAQIADALMRKLDPRGVIVVIEAEHLCMSMRGVRKPGAVTTTSAVRGQFKSNQASRAEALELILRK

SEQ ID NO: 11174 - protein, 204 aa, Mycobacterium chimaera
  REGION 1..204: note = tr|A0A249BXI4|A0A249BXI4_9MYCO GTP cyclohydrolase 1; OS = Mycobacterium chimaera OX=222805 GN=folE PE=3 SV=1
MALSGLEPDTAMSKMRVFDQDRAEAAVRELLCAIGEDPDRHGLRETPARVARAYREMFAGLYTDPDSVLNTMFDEDHDELVLVKEIPLYSTCEHHLVSFHGVAHVGYIPGNDGRVTGLSKIARLVDLYAKRPQVQERLTSQIADALVKKLNPRGVIVVVEAEHLCMAMRGVRKPGATTTTSAVRGIFKTNAASRAEALDLILRK

SEQ ID NO: 11175 - protein, 200 aa, Mycobacterium chimaera
  REGION 1..200: note = tr|A0A220Y5P0|A0A220Y5P0_9MYCO GTP cyclohydrolase 1; OS = Mycobacterium chimaera OX=222805 GN=folE PE=3 SV=1
MALPDTAMSKMRVFDQDRAEAAVRELLCAIGEDPDRHGLRETPARVARAYREMFAGLYTDPDSVLNTMFDEDHDELVLVKEIPLYSTCEHHLVSFHGVAHVGYIPGNDGRVTGLSKIARLVDLYAKRPQVQERLTSQIADALVKKLNPRGVIVVVEAEHLCMAMRGVRKPGATTTTSAVRGIFKTNAASRAEALDLILRK

SEQ ID NO: 11176 - protein, 202 aa, Mycobacterium chubuense
  REGION 1..202: note = tr|I4BQ65|I4BQ65_MYCCN GTP cyclohydrolase 1; OS = Mycobacterium chubuense (strain NBB4) OX=710421 GN=folE; PE = 3 SV=1
MTRSHNHSATITTPEFDQARAEAAVRELLIAVGEDPDRHGLVDTPARVARAYREIFAGLYTDPDDVLNTTFDEQHDELVLVKDIPMYSTCEHHLVSFHGVAHVGYIPGHDGRVTGLSKLARVVDLYAKRPQVQERLTGQIADALMRKLDPRGAIVVIEAEHLCMAMRGIRKPGATTTTSAVRGQFKTDKASRAEALDLILRK

SEQ ID NO: 11177 - protein, 200 aa, Mycobacterium colombiense
  REGION 1..200: note = tr|J4TI31|J4TI31_9MYCO GTP cyclohydrolase 1; OS = Mycobacterium colombiense CECT 3035 OX=1041522 GN=folE; PE = 3 SV=1
MALPHTAMPTTRAFDQERAEAAVRELLHAIGEDPDRDGLRETPARVARAYREMFAGLYTDPDSVLNTMFDEDHDELVLVKEIPLYSTCEHHLVAFHGVAHVGYIPGNDGRVTGLSKIARLVDLYSKRPQVQERLTSQIADALVKKLNPRGVIVVVEAEHLCMAMRGVRKPGAVTTTSAVRGLFKTNAASRAEALDLILRK

SEQ ID NO: 11178 - protein, 200 aa, Mycobacterium colombiense
  REGION 1..200: note = tr|A0A1A2S3F5|A0A1A2S3F5_9MYCO GTP cyclohydrolase 1; OS = Mycobacterium colombiense OX=339268 GN=folE PE=3 SV=1
MALPDTAMPRTRVFDQERAEAAVRELLHAIGEDPDRNGLRETPARVARAYREMFAGLYTDPDSVLNTMFDEDHDELVLVKEIPLYSTCEHHLVAFHGVAHVGYIPGNDGRVTGLSKIARLVDLYSKRPQVQERLTSQIADALVKKLNPRGVIVVVEAEHLCMAMRGVRKPGAVTTTSAVRGLFKTNAASRAEALDLILRK

SEQ ID NO: 11179 - protein, 206 aa, Mycobacterium conspicuum
  REGION 1..206: note = tr|A0A1X1SYI4|A0A1X1SYI4_9MYCO GTP cyclohydrolase 1; OS = Mycobacterium conspicuum OX=44010 GN=folE PE=3 SV=1
MALPDLEADSRTPTARVHTFNQERAEAAIRELLFAIGEDPDRDGLRDTPARVARAYREMFAGLYTEPESVLNTMFDEDHDEMVIVKEIPLYSTCEHHLVSFHGVAHVGYIPGKDGRVTGLSKIARLVDLYAKRPQVQERLTSQIADALVSKLDPRGVIVVVEAEHLCMAMRGVRKPGAVTTTSAVRGQFKTSAASRAEALDLILRK

SEQ ID NO: 11180 - protein, 202 aa, unidentified
  source 1..202: note = Mycobacterium decipiens
  REGION 1..202: note = tr|A0A1X2LUH1|A0A1X2LUH1_9MYCO GTP cyclohydrolase 1; OS = Mycobacterium decipiens OX=1430326 GN=folE PE=3 SV=1
MSQLDSRTSSRRVCVFDQERAEAAVRELLYAIGEDPDRDGLVATPTRVARAYREMFAGLYTDPDSVLNTMFDEDHDELVLVKEIPMYSTCEHHLVAFHGVAHVGYIPGDDGRVTGLSKIARLVDLYAKRPQVQERLTSQVADALMQKLDPQGVIVVIEAEHLCMAMRGVRKPGSVTTTSAVRGLFKTNAASRAEALDLILRK

SEQ ID NO: 11181 - protein, 204 aa, unidentified
  source 1..204: note = Mycobacterium dioxanotrophicus
  REGION 1..204: note = tr|A0A1Y0BYA6|A0A1Y0BYA6_9MYCO GTP cyclohydrolase 1; OS = Mycobacterium dioxanotrophicus OX=482462 GN=folE PE=3; SV = 1
MTKPATRSPSTNNNHRVFDQPRAEAAVRELLIAIGEDPDRQGLVDTPARVARAYKELMAGLYTDPDAVLNTTFDEQHDELVLVKAIPMYSTCEHHLVSFHGVAHVGYIPGEDGRVTGLSKIARLVDLYSKRPQVQERLTAQIADALMRKLAPRGTIVVIEAEHLCMAMRGVRKPGAITTTSAVRGQFKTDKASRAEALELILRK

SEQ ID NO: 11182 - protein, 202 aa, unidentified
  source 1..202: note = Mycobacterium eburneum
  REGION 1..202: note = tr|A0A4R5Q1F6|A0A4R5Q1F6_9MYCO GTP cyclohydrolase 1; OS = Mycobacterium eburneum OX=2035343 GN=folE PE=3 SV=1
MAQPNSRPIAPAGPTFDQDRAEAAIRELLCAVGEDPDRQGLAETPARVARAYREMFGGLYTDPDAVLETTFDEQHDELVLVKEIPLYSVCEHHLVAFHGVAHVGYIPGDDGRVTGLSKIARVVDLYAKRPQVQERLTGQIADAMTRKLDPRGVIVVIEAEHLCMSMRGVRKPGAVTTTSAVRGLFKTDARSRSEALDLILRK

SEQ ID NO: 11183 - protein, 204 aa, Mycobacterium europaeum
  REGION 1..204: note = tr|A0A0U1CZ04|A0A0U1CZ04_9MYCO GTP cyclohydrolase 1; OS = Mycobacterium europaeum OX=761804 GN=folE PE=3 SV=1
MALTGLGPDTATSPTRMFDQARAEAAVRELLLAIGEDPDRHGLRDTPARVARAYQEMFAGLYTDPDSVLNTMFDEEHDELVLVKEIPLYSTCEHHLVSFHGVAHVGYIPGADGRVTGLSKIARLVDLYAKRPQVQERLTSQIADALMNKLNPRGVIVVIEAEHLCMAMRGVRKPGAVTTTSAVRGLFKTNAASRAEALDLILRK

SEQ ID NO: 11184 - protein, 202 aa, Mycobacterium florentinum
  REGION 1..202: note = tr|A0A1X1U2R3|A0A1X1U2R3_9MYCO GTP cyclohydrolase 1; OS = Mycobacterium florentinum OX=292462 GN=folE PE=3 SV=1
MVLPDTRTASNGARAFDQARAEAAVRELLYAIGEDPEREGLRDTPARVARAYREIFSGLYTDPSDVLNTMFDEEHDELVIVKEIPLYSTCEHHLVSFHGVAHVGYIPGKDGRVTGLSKIARLVDLYAKRPQVQERLTSQIADALVNRLDPRGVIVVVEAEHLCMAMRGVRKPGAITTTSAVRGQFKTDAASRAEALDLILRK

SEQ ID NO: 11185 - protein, 205 aa, unidentified
  source 1..205: note = Mycobacterium fragae
  REGION 1..205: note = tr|A0A1X1UNS0|A0A1X1UNS0_9MYCO GTP cyclohydrolase 1; OS = Mycobacterium fragae OX=1260918 GN=folE PE=3 SV=1
MASTARPNSRTVTLRTPVFDQARAEAAIRELLYAIGEDPDRHGLEDTPARVARTYREMFAGLYTDPDSVLDTTFDEQHDELVMIKDIPLYSTCEHHLVAFHGVAHVGYIPGHDGRVTGLSKIARLVDLYAKRPQVQERLTAQIADALMRKLDPRGVIVVVEAEHLCMSMRGVRKPGAVTTTSAVRGQFKSDSASRAEALELILRK

SEQ ID NO: 11186 - protein, 202 aa, Mycobacterium gastri
  REGION 1..202: note = tr|A0A1X1VTP1|A0A1X1VTP1_MYCGS GTP cyclohydrolase 1; OS = Mycobacterium gastri OX=1777 GN=folE PE=3 SV=1
MTQLDSRPTSSHPRAFDQPRAEAAVRELLCAIGEDPDRDGLRDTPARVARAYREIFAGLYTEPETVLNAMFDEDHDELVLVKQIPMYSTCEHHLVSFHGVAHVGYIPGEDGRVTGLSKIARLVDLYAKRPQVQERLTSQIADAMVKRLEPRGVIVVIEAEHLCMAMRGVRKPGAVTTTSAVRGLFKTNAASRAEALDLILHK

SEQ ID NO: 11187 - protein, 202 aa, Mycobacterium goodii
  REGION 1..202: note = tr|A0A0K0X3Z8|A0A0K0X3Z8_MYCGD GTP cyclohydrolase 1; OS = Mycobacterium goodii OX=134601 GN=folE PE=3 SV=1
MTQSLRGHHNNVRRVFDQQRAEAAVRELLIAIGEDPEREGLLDTPARVARAYKELMAGLHTDPDAVLNTTFDEGHDELVLVKQIPMYSTCEHHLVSFHGVAHVGYIPGVDGRVTGLSKIARLVDLYSKRPQVQERLTAQIADALMRKLDPRGVIVVIEAEHLCMAMRGVRKPGAVTTTSAVRGQFKTDKASRAEALELILRK

SEQ ID NO: 11188 - protein, 203 aa, Mycobacterium goodii
  REGION 1..203: note = tr|A0A2M9FK32|A0A2M9FK32_MYCGD GTP cyclohydrolase 1; OS = Mycobacterium goodii OX=134601 GN=folE PE=3 SV=1
MTQSLRGHHNNAVRRVFDQPRAEAAVRELLIAIGEDPEREGLVDTPARVARAYKELMAGLHTDPDAVLNTTFDEGHDELVLVKQIPMYSTCEHHLVSFHGVAHVGYIPGVDGRVTGLSKIARLVDLYSKRPQVQERLTAQIADAIMRKLDPRGVIVVVEAEHLCMAMRGVRKPGAVTTTSAVRGQFKTDKASRAEALELILRK

SEQ ID NO: 11189 - protein, 200 aa, Mycobacterium gordonae
  REGION 1..200: note = tr|A0A1A6BN74|A0A1A6BN74_MYCGO GTP cyclohydrolase 1; OS = Mycobacterium gordonae OX=1778 GN=folE PE=3 SV=1
MTQLESRETGARPFDQERAEAAVRELLIALGEDPDRHGLRDTPARVVRAYREIFAGLYTEPTSVLNAMFDENHDELVLVKGIPMYSTCEHHLVAFHGVAHVGYIPGVDGRVTGLSKIARLVDLYAKRPQVQERLTSQIADALVNKLDPRGVIVVVEAEHLCMAMRGVRKPGATTTTSAVRGQFKTDAASRAEALDLILRK

SEQ ID NO: 11190 - protein, 200 aa, Mycobacterium gordonae
  REGION 1..200: note = tr|A0A0Q2UHM4|A0A0Q2UHM4_MYCGO GTP cyclohydrolase 1; OS = Mycobacterium gordonae OX=1778 GN=folE PE=3 SV=1
MTQLESRETGARPFDQARAEAAVRELLIALGEDPDRHGLRDTPARVVRAYREIFAGLYTEPTSVLNAMFDENHDELVLVKGIPMYSTCEHHLVAFHGVAHVGYIPGVDGRVTGLSKIARLVDLYAKRPQVQERLTSQIADALVQKLDPRGVIVVIEAEHLCMAMRGVRKPGATTTTSAVRGQFKSDAASRAEALDLILRK

SEQ ID NO: 11191 - protein, 203 aa, unidentified
  source 1..203: note = Mycobacterium grossiae
  REGION 1..203: note = tr|A0A1E8Q5R3|A0A1E8Q5R3_9MYCO GTP cyclohydrolase 1; OS = Mycobacterium grossiae OX=1552759 GN=folE PE=3 SV=1
MTRSEIDPILRDDIPEFDQERAEAAVRELLIAVGEDPDRHGLIDTPARVARAYKEIFAGLYTDPDDVLNTTFDEQHDELVLVKDIPMYSTCEHHLVSFHGVAHVGYIPGIDGRVTGLSKLARVVDLYAKRPQVQERLTAQIADALMRKLNPRGVIVVIEAEHLCMAMRGIRKPGASTTTSAVRGQFKTDKASRAEALDLILRT

SEQ ID NO: 11192 - protein, 210 aa, Mycobacterium haemophilum
  REGION 1..210: note = tr|A0A0I9YJW9|A0A0I9YJW9_9MYCO GTP cyclohydrolase 1; OS = Mycobacterium haemophilum OX=29311 GN=folE PE=3 SV=1
MALPDLGPDLGPESTAAVPRIRVFDQQRAEAAIRELLYAIGEDPDREGLADTPARVARAYREMFSGLYTDPQTVLNTMFDEEHNELVIVKEIPMYSTCEHHLVSFHGVAHVGYIPGVDGRVTGLSKIARLVDLYAKRPQVQERLTSQIADALVSKLDPRGVIVVIEAEHLCMAMRGVRKPGAITTTSAVRGQFKTDAASRAEALDLILRK

SEQ ID NO: 11193 - protein, 202 aa, Mycobacterium heckeshornense
  REGION 1..202: note = tr|A0A2G8BFI2|A0A2G8BFI2_9MYCO GTP cyclohydrolase 1; OS = Mycobacterium heckeshornense OX=110505 GN=folE PE=3 SV=1
MAQPNPRTRTLRMPVFDQARVEAAVRELLYAIGEDPDRHGLEDTPARVARTYREMFAGLYTDPDTVLNTTFDEQHDELVMVKDIPLYSTCEHHLVAFHGVAHVGYIPGDDGRVTGLSKIARLVDLYARRPQVQERLTGQIADALMRKLDPRGVIVVVEAEHLCMAMRGVRKPGAVTTTSAVRGQFKTDAASRAEALELILRK

SEQ ID NO: 11194 - protein, 206 aa, Mycobacterium heidelbergense
  REGION 1..206: note = tr|A0A1X0DQ65|A0A1X0DQ65_9MYCO GTP cyclohydrolase 1; OS = Mycobacterium heidelbergense OX=53376 GN=folE PE=3 SV=1
MALPDLGPDTRRAPGRIRVFDQQRAEAAIRELLHAIGEDPDRDGLQDTPARVARAYREMFAGLYTDPDTVLNTMFDEDHDEMVIVKEIPLYSTCEHHLVSFHGVAHVGYIPGKDGRVTGLSKIARLVDLYAKRPQVQERLTSQIADALVKKLDPRGVIVVVEAEHLCMAMRGVRKPGAVTTTSAVRGQFKTSAASRAEALDLILRK

SEQ ID NO: 11195 - protein, 200 aa, unidentified; identical to SEQ ID NO: 11175
  source 1..200: note = Mycobacterium indicus
  REGION 1..200: note = tr|J9W6D0|J9W6D0_MYCIP GTP cyclohydrolase 1; OS = Mycobacterium indicus pranii (strain DSM 45239 / MTCC 9506) OX=1232724 GN=folE PE=3 SV=1

SEQ ID NO: 11196 - protein, 202 aa, unidentified
  source 1..202: note = Mycobacterium innocens
  REGION 1..202: note = tr|A0A498QI51|A0A498QI51_9MYCO GTP cyclohydrolase 1; OS = Mycobacterium innocens OX=2341083 GN=folE_2 PE=3 SV=1
MTQLDSRPTSSLPRAFDQPRAEAAVRELLYAIGEDPDRSGLRDTPARVARAYKEIFAGLYTDPETVLNAMFDEDHDELVLVKLIPLYSTCEHHLVSFHGVAHVGYIPGEDGRVTGLSKIARLVDLYAKRPQVQERLTSQIADALVKKLEPRGVIVVVEAEHLCMAMRGVRKPGAITTTSAVRGQFKTNAASRAEALDLILRK

SEQ ID NO: 11197 - protein, 244 aa, unidentified
  source 1..244: note = Mycobacterium innocens
  REGION 1..244: note = tr|A0A498Q2L9|A0A498Q2L9_9MYCO GTP cyclohydrolase 1; OS = Mycobacterium innocens OX=2341083 GN=folE_1 PE=4 SV=1
MTAIPSAPRQARHQMPPFCSSGWAMTNDEVAHGAAAYPADIGYQPTDSPAWWDNNADVAVEGAVRQLLSALGVDEGEHTAETPARVARAWREMLWGYNEVPEGHLDTDFPAPDDPGLIVMHGISFASTCAHHLLPFSGTATIAYRPHPGQRIVGLSKLARLVHGYAARLQVQERIGHQATAGMMRKLNPSGAMCVITARHDCMRLRGVREPAAEATTESRKGMWLDREIALVHRLHAGGRSGAC

SEQ ID NO: 11198 - protein, 201 aa, Mycobacterium interjectum
  REGION 1..201: note = tr|A0A1X1WHY2|A0A1X1WHY2_9MYCO GTP cyclohydrolase 1; OS = Mycobacterium interjectum OX=33895 GN=folE PE=3 SV=1
MGPDNRHTTPRIRAFDQQRAEAAIRELLYAIGEDPDRNGLQDTPARVARAYREMFAGLYTDPDSVLNTMFDEDHDEMVIVKEIPLYSTCEHHLVSFHGVAHVGYIPGKDGRVTGLSKIARLVDLYAKRPQIQERLTSQIADALVNKLDPRGVIVVVEAEHLCMAMRGVRKPGAVTTTSAVRGMFKTSPASRAEALDLILRK

SEQ ID NO: 11199 - protein, 202 aa, Mycobacterium intermedium
  REGION 1..202: note = tr|A0A1E3SEI7|A0A1E3SEI7_9MYCO GTP cyclohydrolase 1; OS = Mycobacterium intermedium OX=28445 GN=folE PE=3 SV=1
MTQLDSRYTSEGMPVFDQVRAEAAVRDLLAAIGEDPDREGLRETPARVARAYREMFAGLYTDPSAVLTTMFDEQHDELVIVKEIPMYSTCEHHLVSFHGVAHVGYIPGSDGRVTGLSKIARLVDLYAKRPQVQERLTSQIADALMDRLDPRGVIVVVEAEHLCMAMRGVRKPGATTTTSAVRGQFKRDAASRAEALDLILRK

SEQ ID NO: 11200 - protein, 200 aa, Mycobacterium intracellulare; identical to SEQ ID NO: 11175
  REGION 1..200: note = tr|X8CLU5|X8CLU5_MYCIT GTP cyclohydrolase 1; OS = Mycobacterium intracellulare 1956 OX=1299331 GN=folE; PE = 3 SV=1

SEQ ID NO: 11201 - protein, 200 aa, Mycobacterium intracellulare; identical to SEQ ID NO: 11175
  REGION 1..200: note = tr|A0A1A2R0C2|A0A1A2R0C2_MYCIT GTP cyclohydrolase 1; OS = Mycobacterium intracellulare OX=1767 GN=folE PE=3 SV=1

SEQ ID NO: 11202 - protein, 247 aa, Mycobacterium kansasii
  REGION 1..247: note = tr|X7YQN3|X7YQN3_MYCKA GTP cyclohydrolase 1 domain protein OS=Mycobacterium kansasii 662 OX=1299326; GN = I545_6057 PE=4 SV=1
MGGMTAIPSAPRQARYQMPPFCSSGWAMTNDEVAQGAAAYPADIGYQTTDSPAWWDNNADVAVERAVRQLLSALGVDEGEHTAETPARVARAWREMLWGYNEVPEDHLDTDFPAPDDPGLIIMHGISFASTCAHHLLPFSGTATIAYRPHPGQRIVGLSKLARLVHGYAARLQVQENIGHQATAGIMRKLNPSGAMSVITARHDCMRLRGVREPAAEATTESRKGMWPDREIALVHRLHAGGRPGAC

SEQ ID NO: 11203 - protein, 202 aa, Mycobacterium kansasii; identical to SEQ ID NO: 11196
  REGION 1..202: note = tr|A0A164GBN1|A0A164GBN1_MYCKA GTP cyclohydrolase 1; OS = Mycobacterium kansasii OX=1768 GN=folE PE=3 SV=1

SEQ ID NO: 11204 - protein, 202 aa, Mycobacterium kubicae
  REGION 1..202: note = tr|A0A1X1XHN9|A0A1X1XHN9_9MYCO GTP cyclohydrolase 1; OS = Mycobacterium kubicae OX=120959 GN=folE PE=3 SV=1
MTQVESRDATTRARVFDQPRAEAAVRELLYAIGEDPDRNGLRDTPARVARAYREIFAGLYTDPESVLNAMFDEDHNEMVIVKDIPMFSTCEHHLVSFHGVAHVGYIPNADGRVTGLSKIARLVDLYAKRPQVQERLTSQIADALMKKLEPRGVIVIIEAEHLCMAMRGVRKPGALTTTSAVRGQLQRDSASRAEALDLILRK

SEQ ID NO: 11205 - protein, 205 aa, Mycobacterium kyorinense
  REGION 1..205: note = tr|A0A1A2Z2K8|A0A1A2Z2K8_9MYCO GTP cyclohydrolase 1; OS = Mycobacterium kyorinense OX=487514 GN=folE PE=3 SV=1
MAFTAQPSSRIANLHAPKFDQPRAEAAIRELLCAIGEDPDRHGLEDTPARVARSYQEMFAGLYTDPDSVLDTTFDEQHDELVMIKEIPLYSTCEHHLVAFHGVAHVGYIPGSDGRVTGLSKIARLVDLYAKRPQVQERLTAQIADALMRKLDPRGAIVVIEAEHLCMSMRGVRKPGAITTTSAVRGLFKTNQASRAEALELILRK

SEQ ID NO: 11206 - protein, 202 aa, Mycobacterium kyorinense
  REGION 1..202: note = tr|A0A1X1YDG1|A0A1X1YDG1_9MYCO GTP cyclohydrolase 1; OS = Mycobacterium kyorinense OX=487514 GN=folE PE=3 SV=1
MAQPNSRIANMRMPVFDQARAEAAIRELLYAIGEDPDRHGLEDTPARVARTYREMFAGLYTDPDSVLNTTFDEQHDELVMVKEIPLYSTCEHHLVSFHGVAHVGYIPGDDGRVTGLSKIARLVDLYAKRPQVQERLTAQIADALMRKLDPRGVIVVIEAEHLCMAMRGVRKPGAVTTTSAVRGLFKTSQASRAEALELILRK

SEQ ID NO: 11207 - protein, 202 aa, Mycobacterium lacus
  REGION 1..202: note = tr|A0A1X1YSY4|A0A1X1YSY4_9MYCO GTP cyclohydrolase 1; OS = Mycobacterium lacus OX=169765 GN=folE PE=3 SV=1
MSQLDSREVVPSVRVFDQPRAEAAIRELLLAIGEDPERGGLRETPARVARAYREIFAGLYTDPDTVLNTMFDEEHDELVLVKAIPLYSTCEHHLVSFHGVAHVGYIPGNDGRVTGLSKIARLVDLYAKRPQVQERLTSQIADALVKKLDPRGVIVVIEAEHLCMAMRGVRKPGAITTTSAVRGQFKTNPASRAEALDLILRK

SEQ ID NO: 11208 - protein, 202 aa, unidentified
  source 1..202: note = Mycobacterium lehmannii
  REGION 1..202: note = tr|A0A101A1B6|A0A101A1B6_9MYCO GTP cyclohydrolase 1; OS = Mycobacterium lehmannii OX=2048550 GN=folE PE=3 SV=1
MAQSQHNSVTFSPANFDQPRAEAAVRELLLAVGEDPDRHGLESTPARVARAYKELFAGLYIDPDSVLDTTFDEQHDELVLVKQIPMYSTCEHHLVSFHGVAHVGYIPGEDGRVTGLSKIARLVDLYAKRPQVQERLTGQIADAMMRKLDPRGVIVVVEAEHLCMAMRGVRKPGAVTTTSAVRGQFKVDAASRAEALDLILRK

SEQ ID NO: 11209 - protein, 202 aa, Mycobacterium lentiflavum
  REGION 1..202: note = tr|A0A0E4CQS5|A0A0E4CQS5_9MYCO GTP cyclohydrolase 1; OS = Mycobacterium lentiflavum OX=141349 GN=folE PE=3 SV=1
MVLPDTRAALDRVRAFDQARAEAAVRELLYAIGEDPDRDGLRDTPARVARAYREIFSGLYTDPSDVLNTMFDEEHDELVIVKEIPLYSTCEHHLVSFHGVAHVGYIPGQDGRVTGLSKIARLVDLYAKRPQVQERLTSQIADALVNRLGPRGVIVVVEAEHLCMAMRGVRKPGAITTTSAVRGQFKTDAASRAEALDLILRK

SEQ ID NO: 11210 - protein, 205 aa, Mycobacterium leprae
  REGION 1..205: note = sp|B8ZU42|GCH1_MYCLB GTP cyclohydrolase 1; OS = Mycobacterium leprae (strain Br4923) OX=561304 GN=folE; PE = 3 SV=1
MALLDLGLESTAVPRIRVFDQQRAEAAIRELLYAIGEDPDREGLADTPARVARACRELFSGLYTDPQTVLNTMFDEEHNELVIVKEIPMYSTCEHHLVSFHGVAHIGYLPGADGRVTGLSKIARLVDLYAKRPQVQERLTSQIADALVSKLDPRGVIIVVEAEHLCMAMRGVRKPGAITTTSAVRGQFKTDAASRAEALGLILRK

SEQ ID NO: 11211 - protein, 205 aa, Mycobacterium leprae; identical to SEQ ID NO: 11210
  REGION 1..205: note = tr|A0A197SEV6|A0A197SEV6_MYCLR GTP cyclohydrolase 1; OS = Mycobacterium leprae 3125609 OX=1297123 GN=folE PE=3; SV = 1

SEQ ID NO: 11212 - protein, 205 aa, Mycobacterium lepraemurium
  REGION 1..205: note = tr|A0A250BN56|A0A250BN56_MYCLP GTP cyclohydrolase 1; OS = Mycobacterium lepraemurium OX=64667 GN=folE PE=3 SV=1
MMAGNGSAPDTATHQVRQFDQARAEAAVRELLFAIGEDPDRHGLAETPARVARAYREMFAGLYTDPDSVLNTMFDEEHDELVLVKEIPLYSTCEHHLVSFHGVAHVGYIPGNDGRVTGLSKIARLVDLYAKRPQVQERLTSQIADALVEKLNPRGVIVVVEAEHLCMAMRGVRKPGAVTTTSAVRGLFKTNAASRAEALDLILRK

SEQ ID NO: 11213 - protein, 205 aa, unidentified
  source 1..205: note = Mycobacterium lepromatosis
  REGION 1..205: note = tr|A0A0F4ES41|A0A0F4ES41_9MYCO GTP cyclohydrolase 1; OS = Mycobacterium lepromatosis OX=480418 GN=folE PE=3 SV=1
MALLDLGLEGTVVPPIRVFDQPRAEAAIRELLYAIGEDPDREGLADTPARVARSYRELFSGLYTDPETVLNTMFDEVHNELVIVKEIPMYSTCEHHLVSFHGVAHVGYIPGTDGRVTGLSKIARLVDLYAKRPQVQERLTGQIADALVRKLDPRGVIIVVEAEHLCMAMRGVRKPGAITTTSAVRGQFKTDAASRAEALNLILRK

SEQ ID NO: 11214 - protein, 242 aa, unidentified
  source 1..242: note = Mycobacterium liflandii
  REGION 1..242: note = tr|L7V468|L7V468_MYCL1 GTP cyclohydrolase I FolE_1; OS = Mycobacterium liflandii (strain 128FXT) OX=459424; GN = folE_1 PE=4 SV=1
MPSAPHQGRYQMPPLRPSAWQMTNDGVAYGAASYHPNSGYPHSGRRPMNSPAWYDNNPDLAVECAVQQLLDALGVDDGEHTAGTPARVARAWREMLWGYHEVPEDQLATDFPAPDDPGLIVMHGISFSSTCAHHLLPFTGTATIAYRPHPGQRIVGLSKLARLVDGYAARLQVQERIGQQAVDGIMRRLNPSGAMCIITARHDCMRLRGVRDPAAEATTEARKGIWSDHEMALIHRLHGGAR

SEQ ID NO: 11215 - protein, 948 aa, unidentified
  source 1..948: note = Mycobacterium liflandii
  REGION 1..948: note = tr|L7VHC7|L7VHC7_MYCL1 Multifunctional fusion protein OS=Mycobacterium liflandii (strain 128FXT); OX = 459424 GN=ftsH PE=3 SV=1
MNRKNVIRTVTAVAVVVVLGWSFFYFSDDTRGYKPVDTSVAMSQINADNVKSAQIDDREQQLRLVLKKSSSDTDGSDKVITKYPTGYAVDLFNALTAKNAKVSTVVNQGSILGELLVYVLPLLLLVGLFVMFSRMQGGARMGFGFGKSRAKQLSKDMPKTTFADVAGVDEAVEELYEIKDFLQNPSRYQALGAKIPKGVLLYGPPGTGKTLLARAVAGEAGVPFFTISGSDFVEMFVGVGASRVRDLFEQAKQNSPCIIFVDEIDAVGRQRGAGLGGGHDEREQTLNQLLVEMDGFGDRAGVILIAATNRPDILDPALLRPGRFDRQIPVTNPDLAGRRAVLRVHSKGKPIADGADLDGLAKRTVGMTGADLANVINEAALLTARENGTVITGPALEEAVDRVIGGPRRKGRIISEHEKKITAYHEGGHTLAAWAMPDIDPVYKVTILARGRTGGHAVAVPEEDKGLRTRSEMIAQLVFAMGGRAAEELVFREPTTGAVSDIEQATKVARAMVTEYGMSARLGAVKYGTEHGDPFLGRSMGTQSDYSHEVAREIDEEVRKLIEAAHTEAWEILTEYRDVLDTLAGQLLEKETLHRPELESIFSDVEKRPRLTMFDDFGGRIPSDKPPIKTPGELAIERGEPWPQPMPEPAFKQAIAQATQAARSASEGTGRGPNGSRGADANPGSHPDYGAPAGWRAPGWPPPSERPQPSGYSPDQPSDTDESSEQQDRDVSRSNPRPTADERRVAMTQLDSRTEATTTRAFDQPRAEAAVRELLLAIGEDPDRGGLRDTPARVARAYREIFAGLYTDPDAVLNTMFDEDHDELVLIKEIPLYSTCEHHLVSFHGVAHVGYIPGRDGRVTGLSKIARLVDLYAKRPQVQERLTSQIADALVKRLGPRGVIVVVEAEHLCMAMRGVRKPGAVTTTSAVRGQFKTDAASRAEALDLILRK

SEQ ID NO: 11216 - protein, 204 aa, Mycobacterium malmoense
  REGION 1..204: note = tr|A0A1B9DE82|A0A1B9DE82_MYCMA GTP cyclohydrolase 1; OS = Mycobacterium malmoense OX=1780 GN=folE PE=3 SV=1
MALTGLGPDTASPALRVFDQARAEAAVRELLYAIGEDPDRHGLRETPARVARAYQEMFAGLYTDPDSVLNTMFDEEHDELVLVKEIPLYSTCEHHLVSFHGVAHVGYIPGADGRVTGLSKIARLVDLYAKRPQVQERLTSQIADALMNKLNPRGVIVVIEAEHLCMAMRGVRKPGAVTTTSAVRGLFKTNAASRSEALDLILRK

SEQ ID NO: 11217 - protein, 206 aa, Mycobacterium malmoense
  REGION 1..206: note = tr|A0A1S2WEL8|A0A1S2WEL8_MYCMA GTP cyclohydrolase 1; OS = Mycobacterium malmoense OX=1780 GN=folE PE=3 SV=1
MALPDLGPDTRNAPGRIRVFDQQRAEAAIRELLFAIGEDPDRDGLQGTPARVARAYREMFAGLYTDPDTVLNTMFDEEHDELVIVKEIPLYSTCEHHLVSFHGVAHVGYIPGTDGRVTGLSKIARLVDLYAKRPQVQERLTSQVADALVKKLDPRGVIVVVEAEHLCMAMRGVRKPGAVTTTSAVRGLLKTNAASRAEALDLILRK

SEQ ID NO: 11218 - protein, 200 aa, Mycobacterium mantenii
  REGION 1..200: note = tr|A0A1X0FCS4|A0A1X0FCS4_9MYCO GTP cyclohydrolase 1; OS = Mycobacterium mantenii OX=560555 GN=folE PE=3 SV=1
MALPDTAMTTTRLFDQDRAEAAVRELLHAIGEDPDRDGLRETPARVARAYREMFAGLYTDPDSVLNTMFDEDHDELVLVKEIPLYSTCEHHLVSFHGVAHVGYIPGNDGRVTGLSKIARLVDLYSKRPQVQERLTSQIADALVKKLNPRGVIVVVEAEHLCMAMRGVRKPGAVTTTSAVRGLFKTNAASRAEALDLILHK

SEQ ID NO: 11219 - protein, 200 aa, Mycobacterium mantenii
  REGION 1..200: note = tr|A0A1A2TNG7|A0A1A2TNG7_9MYCO GTP cyclohydrolase 1; OS = Mycobacterium mantenii OX=560555 GN=folE PE=3 SV=1
MALPDTAMTTTRLFDQDRAEAAVRELLHAIGEDPDRDGLRETPARVARAYREMFAGLYTDPDSVLNTMFDEDHDELVLVKEIPLYSTCEHHLVSFHGVAHVGYIPGNDGRVTGLSKIARLVDLYSKRPQVQERLTSQIADALVKKLNPRGVIVVVEAEHLCMAMRGVRKPGAVTTTSAVRGLFKTNAASRAEALDLILRK

SEQ ID NO: 11220 - protein, 202 aa, Mycobacterium marinum
  REGION 1..202: note = sp|B2HJ53|GCH1_MYCMM GTP cyclohydrolase 1; OS = Mycobacterium marinum (strain ATCC BAA-535 / M); OX = 216594 GN=folE PE=3 SV=1
MTQLDSRTEATTTRAFDQPRAEAAVRELLLAIGEDPDRGGLRDTPARVARAYREIFAGLYTDPDAVLNTMFDEDHDELVLIKEIPLYSTCEHHLVSFHGVAHVGYIPGRDGRVTGLSKIARLVDLYAKRPQVQERLTSQIADALVKRLGPRGVIVVVEAEHLCMAMRGVRKPGAVTTTSAVRGQFKTDAASRAEALDLILRK

SEQ ID NO: 11221 - protein, 202 aa, Mycobacterium marinum
  REGION 1..202: note = tr|A0A2Z5YPB3|A0A2Z5YPB3_MYCMR GTP cyclohydrolase 1; OS = Mycobacterium marinum OX=1781 GN=folE PE=3 SV=1
MTQLDSRTEATTTRAFDQPRAEAAVRELLLAIGEDPDRGGLRDTPARVARAYREIFAGLYTDPDAVLNTMFDEDHDELVLIKQIPLYSTCEHHLVSFHGVAHVGYIPGRDGRVTGLSKIARLVDLYAKRPQVQERLTSQIADALVKRLGPRGVIVVVEAEHLCMAMRGVRKPGAVTTTSAVRGQFKTDAASRAEALDLILRK

SEQ ID NO: 11222 - protein, 200 aa, Mycobacterium marseillense
  REGION 1..200: note = tr|A0A1A3JCN8|A0A1A3JCN8_9MYCO GTP cyclohydrolase 1; OS = Mycobacterium marseillense OX=701042 GN=folE PE=3 SV=1
MALPDTAMSQMRVFDQDRAEAAVRELLCAIGEDPDRHGLRETPARVARAYREMFAGLYTDPDSVLNTMFDEDHDELVLVKEIPLYSTCEHHLVSFHGVAHVGYIPGNDGRVTGLSKIARLVDLYAKRPQVQERLTSQIADALVKKLNPRGVIVVVEAEHLCMAMRGVRKPGATTTTSAVRGIFKTNAASRAEALDLILRK

SEQ ID NO: 11223 - protein, 202 aa, Mycobacterium montefiorense
  REGION 1..202: note = tr|A0A2R5H5L9|A0A2R5H5L9_9MYCO GTP cyclohydrolase 1; OS = Mycobacterium montefiorense OX=154654 GN=folE PE=3 SV=1
MALPDTRIELDRVRAFDQPRAEAAVRELLYAIGEDPDRDGLRDTPARVARAYREIFSGLYTDPDAVLNTMFDEEHDELVIVKEIPLYSTCEHHLVSFHGVAHVGYIPGEEGRVTGLSKIARLVDLYAKRPQVQERLTSQIADALVNRLAPRGVIVVVEAEHLCMAMRGVRKPGATTTTSAVRGQFKTDAASRAEALDLILRK

SEQ ID NO: 11224 - protein, 204 aa, Mycobacterium nebraskense
  REGION 1..204: note = tr|A0A0F5MWP8|A0A0F5MWP8_9MYCO GTP cyclohydrolase 1; OS = Mycobacterium nebraskense OX=244292 GN=folE PE=3 SV=1
MALTGLGPDTATPPIRVFDQARAEAAVRELLYAIGEDPDRHGLRETPARVARAYQEMFAGLYTDPDSVLNTMFDEEHDELVLVKEIPLYSTCEHHLVSFHGVAHVGYIPGADGRVTGLSKIARLVDLYAKRPQVQERLTSQIADALMNKLNPRGVIVVIEAEHLCMAMRGVRKPGATTTTSAVRGQFKSNAASRAEALDLILRK

SEQ ID NO: 11225 - protein, 192 aa, Mycobacterium nonchromogenicum
  REGION 1..192: note = tr|A0A1X1Z9Z0|A0A1X1Z9Z0_MYCNO GTP cyclohydrolase 1; OS = Mycobacterium nonchromogenicum OX=1782 GN=folE PE=3 SV=1
MTSAIFDQARAEAAVRELLIAVGEDPDRAGLLDTPARVARAYREMFAGLYTDPDAVLETTFDEEHEELVIVKEIPLYSTCEHHLVAFHGVAHVGYIPGYDGRITGLSKLARVVDLYAKRPQVQERLTAQVADALMRKLNPRGVIVVVEAEHLCMAMRGVRKPGAITTTSAVRGQFKTDSTSRAEALELIRHR

SEQ ID NO: 11226 - protein, 202 aa, Mycobacterium noviomagense
  REGION 1..202: note = tr|A0A1X0GH94|A0A1X0GH94_9MYCO GTP cyclohydrolase 1; OS = Mycobacterium noviomagense OX=459858 GN=folE PE=3 SV=1
MAQPNPRTRALRMAVFDQARAEAAIRELLCAIGEDPDRHGLEDTPARVARTYREMFAGLYTDPDSVLNTTFDEQHDELVMVKEIPLYSTCEHHLVAFHGVAHVGYIPGDDGRVTGLSKIARLVDLYARRPQVQERLTGQIADALMRKLDPRGVIVVVEAEHLCMAMRGVRKPGAITTTSAVRGQFKTDAASRAEALELILRK

SEQ ID NO: 11227 - protein, 202 aa, unidentified; identical to SEQ ID NO: 11169
  source 1..202: note = Mycobacterium orygis
  REGION 1..202: note = tr|A0A501P7D7|A0A501P7D7_9MYCO GTP cyclohydrolase 1; OS = Mycobacterium orygis OX=1305738 GN=folE PE=3 SV=1

SEQ ID NO: 11228 - protein, 206 aa, Mycobacterium palustre
  REGION 1..206: note = tr|A0A1X1ZFT7|A0A1X1ZFT7_9MYCO GTP cyclohydrolase 1; OS = Mycobacterium palustre OX=153971 GN=folE PE=3 SV=1
MALPDLGPDTRHATPRIRVFDQQRAENAIRELLFAIGEDPDRDGLQDTPARVARAYREMFAGLYTEPDSVLNTMFDEDHDEMVIVKEIPLYSTCEHHLVSFHGVAHVGYIPGVDGRVTGLSKIARLVDLYARRPQVQERLTSQIADALVNKLDPRGVIVVVEAEHLCMAMRGVRKPGAITTTSAVRGMFKTSPASRAEALDLILRK

SEQ ID NO: 11229 - protein, 210 aa, unidentified
  source 1..210: note = Mycobacterium paraense
  REGION 1..210: note = tr|A0A1X2ARZ1|A0A1X2ARZ1_9MYCO GTP cyclohydrolase 1; OS = Mycobacterium paraense OX=767916 GN=folE PE=3 SV=1
MALPDLEPDLGPDTRHTTPRIRSFDQQRAEAAIRELLYAIGEDPDRNGLQDTPARVARAYREMFAGLYTDPDTVLNTMFDEDHDEMVIVKEIPLYSTCEHHLVSFHGVAHVGYIPGKDGRVTGLSKIARLVDLYAKRPQVQERLTSQIADALVSKLDPRGVIVVVEAEHLCMAMRGVRKPGAVTTTSAVRGMFKTSPASRAEALDLILRK

SEQ ID NO: 11230 - protein, 204 aa, Mycobacterium paraffinicum
  REGION 1..204: note = tr|A0A1Q4I125|A0A1Q4I125_9MYCO GTP cyclohydrolase 1; OS = Mycobacterium paraffinicum OX=53378 GN=folE PE=3 SV=1
MAVTGFGPDTASASTRVFDQDRAEAAVRELLYAIGEDPDRHGLRETPARVARAYREMFAGLYTDPDSVLNTMFDEEHDELVLVKEIPLYSTCEHHLVSFHGVAHVGYIPGADGRVTGLSKIARLVDLYAKRPQVQERLTSQIADALMKKLNPRGVIVVIEAEHLCMAMRGVRKPGATTTTSAVRGQFKSNAASRAEALDLILRK

SEQ ID NO: 11231 - protein, 200 aa, unidentified
  source 1..200: note = Mycobacterium paragordonae
  REGION 1..200: note = tr|A0A386UCY9|A0A386UCY9_9MYCO GTP cyclohydrolase 1; OS = Mycobacterium paragordonae OX=1389713 GN=folE PE=3 SV=1
MTQLESRETGARPFDQARAEAAVRELLIALGEDPDRHGLRDTPARVVRAYKEIFAGLYTEPTSVLNAMFDENHDELVLVKGIPMYSTCEHHLVAFHGVAHVGYIPGVDGRVTGLSKIARLVDLYAKRPQVQERLTSQIADALVQKLDPRGVIVVIEAEHLCMAMRGVRKPGATTTTSAVRGQFKSDAASRAEALDLILRK

SEQ ID NO: 11232 - protein, 200 aa, unidentified; identical to SEQ ID NO: 11175
  source 1..200: note = Mycobacterium paraintracellulare
  REGION 1..200: note = tr|A0A1X2KYL2|A0A1X2KYL2_9MYCO GTP cyclohydrolase 1; OS = Mycobacterium paraintracellulare OX=1138383 GN=folE; PE = 3 SV=1

SEQ ID NO: 11233 - protein, 204 aa, Mycobacterium parascrofulaceum; identical to SEQ ID NO: 11216
  REGION 1..204: note = tr|D5P8P7|D5P8P7_9MYCO GTP cyclohydrolase 1; OS = Mycobacterium parascrofulaceum ATCC BAA-614 OX=525368; GN = folE PE=3 SV=1

SEQ ID NO: 11234 - protein, 204 aa, Mycobacterium paraseoulense
  REGION 1..204: note = tr|A0A1X0I2L0|A0A1X0I2L0_9MYCO GTP cyclohydrolase 1; OS = Mycobacterium paraseoulense OX=590652 GN=folE PE=3 SV=1
MSVTGVGPDTASPSIRVFDQARAEAAVRELLHAIGEDPDRHGLRDTPARVARAYREIFAGLYTDPDSVLNTMFDEDHDELVLVKEIPLYSTCEHHLVSFHGVAHVGYIPGNDGRVTGLSKIARLVDLYAKRPQVQERLTSQIADALMNKLDPRGVIVVIEAEHLCMAMRGVRKPGAVTTTSAVRGQFKTNAASRAEALDLILRK

SEQ ID NO: 11235 - protein, 200 aa, Mycobacterium parmense
  REGION 1..200: note = tr|A0A1X2BH13|A0A1X2BH13_9MYCO GTP cyclohydrolase 1; OS = Mycobacterium parmense OX=185642 GN=folE PE=3 SV=1
MALPDIVDPETRVFDQPRAEAAVRELLYAIGEDPDRHGLKETPARVARAYREIFAGLYTDPAAVLNTMFDEEHDELVLVKEIPLYSTCEHHLVSFHGVAHVGYIPGSDGRVTGLSKIARLVDLYAKRPQVQERLTSQIADALVSKLDPRGVIVVIEAEHLCMAMRGVRKPGAVTTTSAVRGQFKTSAASRAEALDLILRK

SEQ ID NO: 11236 - protein, 244 aa, unidentified
  source 1..244: note = Mycobacterium persicum
  REGION 1..244: note = tr|A0A498PFX6|A0A498PFX6_9MYCO GTP cyclohydrolase 1; OS = Mycobacterium persicum OX=1487726 GN=folE_1 PE=4 SV=1
MTAIPSAPRQARYQMPPVCSSGWAMTNDEVAHGAAAYPADIDYQTTDSPPWWDNNADAAVEGAVRQLLSALGVDEGEHTAETPARVARAWREMLWGYNEVPEDHLDTDFPAPDDPGLIVLHGISFASTCAHHLLPFSGTATIAYRPHPGQRIVGLSKLARLVHGYAARLQVQENIGHQATAGIMRKLNPSGAMSVITARHDCMRLRGVREPAAEATTESRKGMWLDREIALVHRLHAGGRPGAC

SEQ ID NO: 11237 - protein, 202 aa, unidentified
  source 1..202: note = Mycobacterium persicum
  REGION 1..202: note = tr|A0A1X0L8C0|A0A1X0L8C0_9MYCO GTP cyclohydrolase 1; OS = Mycobacterium persicum OX=1487726 GN=folE_2 PE=3 SV=1
MTQLDSRPTSSLPRAFDQPRAEAAVRELLCAIGEDPDRGGLRDTPARVARAYKEIFAGLYTDPDAVLNAMFDEDHDELVLVKQIPMYSTCEHHLVSFHGVAHVGYIPGEDGRVTGLSKIARLVDLYAKRPQVQERLTSQIADALVKKLEPRGVIVVVEAEHLCMAMRGVRKPGAVTTTSAVRGLFKTNAASRAEALDLILRK

SEQ ID NO: 11238 - protein, 202 aa, unidentified
  source 1..202: note = Mycobacterium pseudokansasii
  REGION 1..202: note = tr|A0A498QZ34|A0A498QZ34_9MYCO GTP cyclohydrolase 1; OS = Mycobacterium pseudokansasii OX=2341080 GN=folE_2 PE=3; SV = 1
MTQLDSRPKPSIPGVFDQSRAEAAVRELLYAVGEDPEREGLRETPARVARAYKEIFAGLYSDPDAVLNAMFDEDHDELVLVKQIPLYSTCEHHLVSFHGVAHVGYIPGEDGRVTGLSKIARLVDLYAKRPQLQERLTSQIADALVKKLEPRGVIVVVEAEHLCMAMRGVRKPGAITTTSAVRGQFKTNAASRAEALDLILHK

SEQ ID NO: 11239 - protein, 244 aa, unidentified
  source 1..244: note = Mycobacterium pseudokansasii
  REGION 1..244: note = tr|A0A498QQ16|A0A498QQ16_9MYCO GTP cyclohydrolase 1; OS = Mycobacterium pseudokansasii OX=2341080 GN=folE_1 PE=4; SV = 1
MTAIPSAPRQARYQMPPFCSSGWAMTNDEVAHGAAAYPADIGYQTTDSPAWWDNNADMAVEGAVRQLLSALGVDEGEHTAETPARVARAWREMLWGYNEVPEDHLDTDFPAPDDPGLIVLHGISFASTCAHHLLPFSGTATIAYRPHPGQRIVGLSKLARLVHGYAARLQVQERIGHQATAGIMRKLNPSGAMSVITARHDCMRLRGVREPAAEATTESRKGRWLDREIALVHRLHAGGRPGAC

SEQ ID NO: 11240 - protein, 221 aa, Mycobacterium pseudoshottsii
  REGION 1..221: note = tr|A0A2Z5TG63|A0A2Z5TG63_9MYCO GTP cyclohydrolase 1; OS = Mycobacterium pseudoshottsii JCM 15466 OX=1136880; GN = folE_2 PE=4 SV=1
MTNDGVAYGAASYHPNSGYPHSGRRPMNSPAWYDNNPDLAVECAVQQLLDALGVDDGEHTAGTPARVARAWREMLWGYHEVPEDQLATDFPAPDDPGLIVMHGISFSSTCAHHLLPFTGTATIAYRPHPGQRIVGLSKLARLVDGYAARLQVQERIGQQAVDGIMRRLNPSGAMCIITARHDCMRLRGVRDPAAEATTEARKGIWSDHEMALIHRLHGGAR

SEQ ID NO: 11241 - protein, 202 aa, Mycobacterium pseudoshottsii; identical to SEQ ID NO: 11220
  REGION 1..202: note = tr|A0A124BWR1|A0A124BWR1_9MYCO GTP cyclohydrolase 1; OS = Mycobacterium pseudoshottsii JCM 15466 OX=1136880; GN = folE_1 PE=3 SV=1

SEQ ID NO: 11242 - protein, 202 aa, Mycobacterium riyadhense
  REGION 1..202: note = tr|A0A1X2C394|A0A1X2C394_9MYCO GTP cyclohydrolase 1; OS = Mycobacterium riyadhense OX=486698 GN=folE PE=3 SV=1
MTQLDSRDAADQVRVFNQPRAEAAIRELLLAIGEDPDRDGLRETPARVARAYREIFAGLYIDPSTVLSTMFDEDHNELVIVKAIPLYSTCEHHLVSFHGVAHVGYIPNVDGRVTGLSKIARLVDLYAKRPQVQERLTSQIADALVERLEPRGVIVVVEAEHLCMAMRGVRKPGAITTTSAVRGQFKTDAASRAEALDLILRK

SEQ ID NO: 11243 - protein, 201 aa, Mycobacterium saskatchewanense
  REGION 1..201: note = tr|A0A1X2C960|A0A1X2C960_9MYCO GTP cyclohydrolase 1; OS = Mycobacterium saskatchewanense OX=220927 GN=folE PE=3; SV = 1
MALSPDTVTPPVRVFDQARAEAAVRELLYAVGEDPDRHGLQETPARVARAYREMFAGLYTDPDTVLNTMFDEQHDELVLVKEIPLYSTCEHHLVAFHGVAHVGYIPGNDGRVTGLSKIARLVDLYAKRPQVQERLTSQIADALMNKLDPRGVIVVIEAEHLCMAMRGVRKPGATTTTSAVRGQFKSSAASRAEALDLILRK

SEQ ID NO: 11244 - protein, 204 aa, Mycobacterium scrofulaceum
  REGION 1..204: note = tr|A0A1A2UCE5|A0A1A2UCE5_MYCSC GTP cyclohydrolase 1; OS = Mycobacterium scrofulaceum OX=1783 GN=folE PE=3 SV=1
MAVTGLGPDTATPSTRVFDQDRAEAAVRELLYAVGEDPDRHGLRETPARVARAYREMFAGLYTDPDSVLNTMFDEEHDELVLVKEIPLYSTCEHHLVSFHGVAHVGYIPGADGRVTGLSKIARLVDLYAKRPQVQERLTSQIADALMKKLNPRGVIVVIEAEHLCMAMRGVRKPGATTTTSAVRGQFKSNAASRAEALDLILRK

SEQ ID NO: 11245 - protein, 204 aa, Mycobacterium scrofulaceum
  REGION 1..204: note = tr|A0A1X0KJG4|A0A1X0KJG4_MYCSC GTP cyclohydrolase 1; OS = Mycobacterium scrofulaceum OX=1783 GN=folE PE=3 SV=1
MALTGLGPDTASPPIRVFDQARAEAAVRELLYAIGEDPDRHGLRETPARVARAYQEMFAGLYTDPDSVLNTMFDEEHDELVLVKEIPLYSTCEHHLVSFHGVAHVGYIPGADGRVTGLSKIARLVDLYAKRPQVQERLTSQIADALMNKLSPRGVIVVIEAEHLCMAMRGVRKPGAVTTTSAVRGLFKTNAASRSEALDLILRK

SEQ ID NO: 11246 - protein, 202 aa, Mycobacterium sherrisii
  REGION 1..202: note = tr|A0A1E3SU76|A0A1E3SU76_9MYCO GTP cyclohydrolase 1; OS = Mycobacterium sherrisii OX=243061 GN=folE PE=3 SV=1
MVMPDTRTAPHRVRAFDQPRAEAAVRELLYAIGEDPDRDGLRDTPARVARAYREMFSGLYTEPDAVLNTMFDEDHDELVIVKEIPLYSTCEHHLVSFHGVAHVGYIPGPDGRVTGLSKIARLVDLYAKRPQVQERLTSQIADALVNRLAPRGVIVVVEAEHLCMAMRGVRKPGAITTTSAVRGQFKTDAASRAEALDLILRK

SEQ ID NO: 11247 - protein, 202 aa, unidentified
  source 1..202: note = Mycobacterium shigaense
  REGION 1..202: note = tr|A0A1Z4EP59|A0A1Z4EP59_9MYCO GTP cyclohydrolase 1; OS = Mycobacterium shigaense OX=722731 GN=folE PE=3 SV=1
MALPVTPNPVGRIHTFDQQRAEDAIRELLHAIGEDPDRDGLRDTPARVARAYREMFAGLYTDPDTVLNTMFDEDHDEMVIVKEIPLYSTCEHHLVSFHGVAHVGYIPGRDGRVTGLSKIARLVDLYAKRPQVQERLTSQIADALVNKLDPRGVIVVVEAEHLCLAMRGVRKPGAVTTTSAVRGQFKTSAASRAEALDLILRK

SEQ ID NO: 11248 - protein, 205 aa, Mycobacterium shimoidei
  REGION 1..205: note = tr|A0A1E3TJK3|A0A1E3TJK3_MYCSH GTP cyclohydrolase 1; OS = Mycobacterium shimoidei OX=29313 GN=folE PE=3 SV=1
MTSTAQPDPRFRSLRKPTFDQERAEAAIRELLYAVGEDPDRHGLEDTPARVARTYQEMFAGLYTDPDSVLDTTFDEQHDELVMVKEIPLYSTCEHHLVSFHGVAHVGYIPGHDGRVTGLSKIARLVDLYAKRPQVQERLTAQIADALMRKLDPRGVIVVVEAEHLCMSMRGVRKPGAITTTSAVRGQFKTNQASRAEALELILRK

SEQ ID NO: 11249 - protein, 202 aa, Mycobacterium shinjukuense
  REGION 1..202: note = tr|A0A1X0JR85|A0A1X0JR85_9MYCO GTP cyclohydrolase 1; OS = Mycobacterium shinjukuense OX=398694 GN=folE PE=3 SV=1
MSQLDSRIEHARVRVFDQRRAEAAVRELLYAVGEDPDRDGLRETPARVARAYREIFAGLYTDPDTVLNTMFDEEHDELVLVKAIPLYSTCEHHLVSFHGVAHVGYIPNHDGRVTGLSKIARLVDLYAKRPQVQERLTSQIADALVKKLDPRGVIVVIEAEHLCMAMRGVRKPGAITTTSAVRGQFKTSAASRAEALDLILRK

SEQ ID NO: 11250 - protein, 202 aa, Mycobacterium simiae
  REGION 1..202: note = tr|A0A5B1BL74|A0A5B1BL74_MYCSI GTP cyclohydrolase 1; OS = Mycobacterium simiae OX=1784 GN=folE PE=3 SV=1
MTQLDSHPNRAITRVFDQPRAEAAVRELLCAIGEDPDRDGLRDTPARVARAYGEIFAGLYTDPDAVLNTLFDEDHDELVLVKQIPMYSTCEHHLVSFHGVAHVGYIPGEEGRVTGLSKIARLVDLYAKRPQVQERLTSQIADALEKKLEPRGVIVVVEAEHLCMAMRGVRKPGAVTTTSAVRGLFKTNAASRAEALDLILRK

SEQ ID NO: 11251 - protein, 202 aa, Mycobacterium simiae
  REGION 1..202: note = tr|A0A1X0XPW8|A0A1X0XPW8_MYCSI GTP cyclohydrolase 1; OS = Mycobacterium simiae OX=1784 GN=folE PE=3 SV=1
MVMPDTRTALHRVRAFDQPRAEAAVRELLYAIGEDPDRDGLRDTPARVARAYREMFSGLYTEPDAVLNTMFDEDHDELVIVKEIPLYSTCEHHLVSFHGVAHVGYIPGPDGRVTGLSKIARLVDLYAKRPQVQERLTSQIADALVKRLAPRGVIVVVEAEHLCMAMRGVRKPGAITTTSAVRGQFKTDAASRAEALDLILRK

SEQ ID NO: 11252 - protein, 202 aa, Mycobacterium sp.
  REGION 1..202: note = tr|A0A1A1XW13|A0A1A1XW13_9MYCO GTP cyclohydrolase 1; OS = Mycobacterium sp. ACS4331 OX=1834121 GN=folE PE=3 SV=1
MVLPNSRVATVDRPVFDQARAEAAVRELLYAIGEDPDRHGLIETPARVARAYQEMFAGLYLDPDEVLNTTFDEQHDELVLVKDIPMYSTCEHHLVAFHGVAHVGYIPGVDGRVTGLSKLARVVDLYAKRPQVQERLTAQIADALMRKLDPRGVIVVVEAEHLCMAMRGIRKPGATTTTSAVRGQFKSDKASRAEALELILRK

SEQ ID NO: 11253 - protein, 204 aa, Mycobacterium sp.
  REGION 1..204: note = tr|A0A1A2NH91|A0A1A2NH91_9MYCO GTP cyclohydrolase 1; OS = Mycobacterium sp. E1747 OX=1834128 GN=folE PE=3 SV=1
MAVTGFGPDTATPSTRVFDQERAEAAVRELLYAIGEDPDRHGLRETPARVARAYQEMFAGLYTDPDSVLNTMFDEEHDELVLVKEIPLYSTCEHHLVSFHGVAHVGYIPGADGRVTGLSKIARLVDLYAKRPQVQERLTSQIADALMNKLNPRGVIVVIEAEHLCMAMRGVRKPGAVTTTSAVRGQFKSNAASRAEALDLILRK

SEQ ID NO: 11254 - protein, 204 aa, unidentified
  source 1..204: note = [Mycobacterium] stephanolepidis
  REGION 1..204: note = tr|A0A1Z4ES98|A0A1Z4ES98_9MYCO GTP cyclohydrolase 1; OS = [Mycobacterium] stephanolepidis OX=1520670 GN=folE PE=3; SV = 1
MNSPETAERNGQPAGHVFDQARAEAAVRELLLAVGEDPDRHGLVDTPARVARAYKEIFAGLYTDPDTVLNTTFDEQHDELVLVKSIPMYSTCEHHLVSFHGVAHVGYIPGKHGRVTGLSKIARLVDLYAKRPQVQERLTAQIADALVRKLEPRGVIVVVEAEHLCMAMRGVRKPGATTTTSAVRGQFKSDAASRAEVLDLMMRA

SEQ ID NO: 11255 - protein, 205 aa, unidentified
  source 1..205: note = Mycobacterium syngnathidarum
  REGION 1..205: note = tr|A0A1Q9WIA7|A0A1Q9WIA7_9MYCO GTP cyclohydrolase 1; OS = Mycobacterium syngnathidarum OX=1908205 GN=folE PE=3; SV = 1
MSQSLREHHNNTDTAARVFDQPRAEAAVRELLIAIGEDPERQGLLDTPARVARAYKELMAGLYTDPDAVLNTTFDEEHDELVLVKEIPMYSTCEHHLVSFHGVAHVGYIPGVDGRVTGLSKIARLVDLYSKRPQVQERLTAQIADALMRKLDPRGAIVVIEAEHLCMAMRGVRKPGAVTTTSAVRGQFKTDKASRAEALELILRK

SEQ ID NO: 11256 - protein, 202 aa, Mycobacterium szulgai; identical to SEQ ID NO: 11155
  REGION 1..202: note = tr|A0A1X2EYN6|A0A1X2EYN6_MYCSZ GTP cyclohydrolase 1; OS = Mycobacterium szulgai OX=1787 GN=folE PE=3 SV=1

SEQ ID NO: 11257 - protein, 202 aa, unidentified
  source 1..202: note = Mycobacterium talmoniae
  REGION 1..202: note = tr|A0A1S1NL85|A0A1S1NL85_9MYCO GTP cyclohydrolase 1; OS = Mycobacterium talmoniae OX=1858794 GN=folE PE=3 SV=1
MAQPNSRPIAPAGPTFDQDRAEAAIRELLCAVGEDPDRQGLAETPARVARAYREMFGGLYTDPDAVLETTFDEQHDELVLVKEIPLYSVCEHHLVAFHGVAHVGYIPGDDGRVTGLSKIARVVDLYAKRPQVQERLTGQIADAMTRKLDPRGVIVVIEAEHLCMSMRGVRKPGAITTTSAVRGLFKTDARSRSEALDLILRK

SEQ ID NO: 11258 - protein, 202 aa, unidentified; identical to SEQ ID NO: 11182
  source 1..202: note = Mycobacterium talmoniae
  REGION 1..202: note = tr|A0A2S8BRZ3|A0A2S8BRZ3_9MYCO GTP cyclohydrolase 1; OS = Mycobacterium talmoniae OX=1858794 GN=folE PE=3 SV=1

SEQ ID NO: 11259 - protein, 202 aa, Mycobacterium triplex
  REGION 1..202: note = tr|A0A024K5E4|A0A024K5E4_9MYCO GTP cyclohydrolase 1; OS = Mycobacterium triplex OX=47839 GN=folE PE=3 SV=1
MVLPDTRAALDGVRAFDQARAEAAVRELLYAIGEDPDREGLRDTPARVARAYREIFSGLYTDPSAVLNTMFDEEHDELVIVKEIPLYSTCEHHLVAFHGVAHVGYIPGTDGRVTGLSKIARLVDLYAKRPQVQERLTSQIADALVSRLDPRGVIVVVEAEHLCMAMRGVRKPGAITTTSAVRRQFKTDAASRAEALDLILRK

SEQ ID NO: 11260 - protein, 200 aa, unidentified; identical to SEQ ID NO: 11177
  source 1..200: note = Mycobacterium [tuberculosis]
  REGION 1..200: note = tr|A0A051TSD3|A0A051TSD3_9MYCO GTP cyclohydrolase 1; OS = Mycobacterium [tuberculosis] TKK-01-0051 OX=1324261; GN = folE PE=3 SV=1

SEQ ID NO: 11261 - protein, 202 aa, Mycobacterium tuberculosis; identical to SEQ ID NO: 11169
  REGION 1..202: note = sp|A5U8T4|GCH1_MYCTA GTP cyclohydrolase 1; OS = Mycobacterium tuberculosis (strain ATCC 25177 / H37Ra); OX = 419947 GN=folE PE=3 SV=1

SEQ ID NO: 11262 - protein, 202 aa, Mycobacterium tuberculosis; identical to SEQ ID NO: 11169
  REGION 1..202: note = tr|A0A045GMW7|A0A045GMW7_MYCTX GTP cyclohydrolase 1; OS = Mycobacterium tuberculosis OX=1773 GN=folE PE=3 SV=1

SEQ ID NO: 11263 - protein, 205 aa, unidentified
  source 1..205: note = Mycobacterium uberis
  REGION 1..205: note = tr|A0A3E1HLS1|A0A3E1HLS1_9MYCO GTP cyclohydrolase 1; OS = Mycobacterium uberis OX=2162698 GN=folE PE=3 SV=1
MALTDLGSESIAVPCIRVFDKQRAEAAIRELLYAIGEDPDREGLAGTPARVASAYREMFSGLYTDPQTVLNTMFDEEHNELVIVKEIPMYSTCEHHLVSFHGVAHVGYIPGEDGRVTGLSKIARLVDLYAKRPQVQERLTSQIADALMSKLDPRGVIVVVEAEHLCMAMRGVRKPGAVTTTSAVRGQFKTDAASRAEVLDLILRK

SEQ ID NO: 11264 - protein, 202 aa, Mycobacterium ulcerans
  REGION 1..202: note = sp|A0PV57|GCH1_MYCUA GTP cyclohydrolase 1; OS = Mycobacterium ulcerans (strain Agy99) OX=362242 GN=folE; PE = 3 SV=1
MTQLDSRTEATTTRAFDQPRAEAAVRELLLAIGEDPDRGGLRDTPARVARAYREIFAGLYTDPDAVLNTMFDEDHDELVLIKEIPLYSTCEHHLVSFHGVAHVGYIPGRDGRVTGLSKIARLVDLYAKRPQVQERLTSQIADALVKRLGPRGVLVVVEAEHLCMAMRGVRKPGAVTTTSAVRGQFKTDAASRAEALDLILRK

SEQ ID NO: 11265 - protein, 40 aa, Mycobacterium ulcerans
  REGION 1..40: note = tr|X8F0X9|X8F0X9_MYCUL GTP cyclohydrolase 1 domain protein OS=Mycobacterium ulcerans str. Harvey OX=1299332; GN = folE PE=4 SV=1
MHGDARVRKPGAVTTTSAVRGQFKTDAASRAEALDLILRK

SEQ ID NO: 11266 - protein, 202 aa, Mycobacterium xenopi; identical to SEQ ID NO: 11193
  REGION 1..202: note = tr|A0A2X1S8G3|A0A2X1S8G3_MYCXE GTP cyclohydrolase 1; OS = Mycobacterium xenopi OX=1789 GN=folE PE=3 SV=1

SEQ ID NO: 11267 - protein, 58 aa, Mycobacterium xenopi
  REGION 1..58: note = tr|X8A047|X8A047_MYCXE GTP cyclohydrolase 1; OS = Mycobacterium xenopi 3993 OX=1299333 GN=I552_0068 PE=4; SV = 1
MRKLDPRGVIVVVEAEHLCMAMRGVRKPGAVTTTSAVRGQFKTDAASRAEALELILRK

SEQ ID NO: 11268 - protein, 204 aa, unidentified
  source 1..204: note = Mycobacteroides abscessus
  REGION 1..204: note = sp|B1MGU9|GCH1_MYCA9 GTP cyclohydrolase 1; OS = Mycobacteroides abscessus (strain ATCC 19977 / DSM 44196 / CIP 104536 / JCM 13569 / NCTC 13031 / TMC 1543); OX = 561007 GN= folE PE=3 SV=1
MNSPETAEYNGHPTGHVFDQARAEAAVRELLYAVGEDPDRHGLADTPARVARAYREIFAGLYTDPDTVLNTTFDEQHDELVLVKSIPMYSTCEHHLVSFHGVAHVGYIPGQHGRVTGLSKIARLVDLYAKRPQVQERLTAQIADALVRKLEPRGVIVVVEAEHLCMAMRGVRKPGATTTTSAVRGQFKRDAASRAEVLDLMMRT

SEQ ID NO: 11269 - protein, 204 aa, unidentified
  source 1..204: note = Mycobacteroides abscessus
  REGION 1..204: note = tr|A0A1M9YHQ8|A0A1M9YHQ8_9MYCO GTP cyclohydrolase 1; OS = Mycobacteroides abscessus subsp. bolletii OX=319705; GN = folE PE=3 SV=1
MNSPETAEYNGHPTGHVFDQARAEAAVRELLYAVGEDPDRHGLADTPARVARAYKEIFAGLYTDPDTVLNTTFDEQHDELVLVKSIPMYSTCEHHLVSFHGVAHVGYIPGQHGRVTGLSKIARLVDLYAKRPQVQERLTAQIADALVRKLEPRGVIVVVEAEHLCMAMRGVRKPGATTTTSAVRGQFKRDAASRAEVLDLMMRT

SEQ ID NO: 11270 - protein, 207 aa, unidentified
  source 1..207: note = Mycobacteroides chelonae
  REGION 1..207: note = tr|A0A448GMX9|A0A448GMX9_MYCCH GTP cyclohydrolase 1; OS = Mycobacteroides chelonae OX=1774 GN=folE_2 PE=3 SV=1
MLQSPEVSHAAHGQLPRGRTFDQAGVEAAIFDLLVALGEDPYRDGLRDTPARVARAYKETFAGLYSDPDEVLTTMFDEHHDELVLVKQIPMYSTCEHHLVSFHGVAHVGYLPGVDGRVTGLSKIARLVDLYARRPQVQERLTGQIAEALMNKLNPRGVIVVIEAEHLCMAMRGVRKPGALTTTSAVRGQFQTDPTSRAEALRLLLQR

SEQ ID NO: 11271 - protein, 204 aa, unidentified; identical to SEQ ID NO: 11254
  source 1..204: note = Mycobacteroides chelonae
  REGION 1..204: note = tr|A0A0E3TNK1|A0A0E3TNK1_MYCCH GTP cyclohydrolase 1; OS = Mycobacteroides chelonae OX=1774 GN=folE PE=3 SV=1

SEQ ID NO: 11272 - protein, 204 aa, unidentified
  source 1..204: note = Mycobacteroides franklinii
  REGION 1..204: note = tr|A0A4R5P4D1|A0A4R5P4D1_9MYCO GTP cyclohydrolase 1; OS = Mycobacteroides franklinii OX=948102 GN=folE PE=3 SV=1
MNSPETAERNGHPTGHVFDQARAEAAVRELLYAVGEDPDRNGLVDTPARVARAYQEIFAGLYTDPDTVLNTTFDEQHDELVLVKSIPMYSTCEHHLVSFHGVAHVGYIPGEHGRVTGLSKIARLVDLYAKRPQVQERLTAQIADALVRKLEPRGVIVVVEAEHLCMAMRGVRKPGATTTTSAVRGQFKSDAASRAEVLDLMMRA

SEQ ID NO: 11273 - protein, 204 aa, unidentified
  source 1..204: note = Mycobacteroides franklinii
  REGION 1..204: note = tr|A0A1S1L785|A0A1S1L785_9MYCO GTP cyclohydrolase 1; OS = Mycobacteroides franklinii OX=948102 GN=folE PE=3 SV=1
MNSPETAERNGHPTVHVFDQARAEAAVRELLYAVGEDPDRNGLVDTPARVARAYQEIFAGLYTDPDTVLNTTFDEQHDELVLVKSIPMYSTCEHHLVSFHGVAHVGYIPGEHGRVTGLSKIARLVDLYAKRPQVQERLTAQIADALVRKLEPRGVIVVVEAEHLCMAMRGVRKPGATTTTSAVRGQFKSDAASRAEVLDLMMRA

SEQ ID NO: 11274 - protein, 204 aa, unidentified
  source 1..204: note = Mycobacteroides immunogenum
  REGION 1..204: note = tr|A0A0N1CDW7|A0A0N1CDW7_9MYCO GTP cyclohydrolase 1; OS = Mycobacteroides immunogenum OX=83262 GN=folE PE=3 SV=1
MNSPETAEYNGHPTGHVFDQARAEAAVRELLYAVGEDPDRQGLADTPARVARAYREIFAGLYTDPDTVLNTTFDEQHDELVLVKSIPMYSTCEHHLVSFHGVAHVGYIPGEHGRVTGLSKIARLVDLYAKRPQVQERLTAQIADALVRKLEPRGVIVVVEAEHLCMAMRGVRKPGATTTTSAVRGQFKRDAASRSEVLDLMMRA

SEQ ID NO: 11275 - protein, 190 aa, unidentified
  source 1..190: note = Mycobacteroides salmoniphilum
  REGION 1..190: note = tr|A0A4R8SPZ9|A0A4R8SPZ9_9MYCO GTP cyclohydrolase 1; OS = Mycobacteroides salmoniphilum OX=404941 GN=folE_2 PE=4; SV = 1
MIDVEKVKSAVTDLLLATGVGNDEHTEDTPGRVARAWAESLAGYDEDPAVHLRRRFPAPSDPGLVIVAGIRLVSTCAHHLLPITGVATVAYRPVTGSEVVGLSKLARVVHGYARRLQVQERIGYQVTTAVQEELSPVGAACFITAAHGCMEIRGVKEPASVTTTHAMSGQWVPGHPDVVAVLAEHAQIRR

SEQ ID NO: 11276 - protein, 190 aa, unidentified
  source 1..190: note = Mycobacteroides salmoniphilum
  REGION 1..190: note = tr|A0A4R8SA28|A0A4R8SA28_9MYCO GTP cyclohydrolase 1; OS = Mycobacteroides salmoniphilum OX=404941 GN=folE_2 PE=4; SV = 1
MIDVEKVKSAITDLLLATGVGNDEHTEDTPGRVARAWAESLAGYDEDPAAHLRRRFPAPSDPGLVIVAGIRLVSTCAHHLLPITGVATVAYRPCTGSEVVGLSKLARVVHGYARRLQVQERIGYQVTTAVQEELSPVGAACFITAAHGCMEVRGVKEPASVTTTHAMSGQWVPGHPDVVAVLAEHAQVRR

SEQ ID NO: 11277 - protein, 204 aa, unidentified
  source 1..204: note = Mycobacteroides saopaulense
  REGION 1..204: note = tr|A0A1S4VFI5|A0A1S4VFI5_9MYCO GTP cyclohydrolase 1; OS = Mycobacteroides saopaulense OX=1578165 GN=folE PE=3 SV=1
MNSPETAEYNGQQTGHVFDQARAEAAVRELLYAVGEDPDRHGLVDTPARVARAYKEIFAGLYTDPDTVLNTTFDEQHDELVLVKSIPMYSTCEHHLVSFHGVAHVGYIPGEHGRVTGLSKIARLVDLYAKRPQVQERLTAQIADALVRKLEPRGAIVVIEAEHLCMAMRGVRKPGATTTTSAVRGQFKRDAASRAEVLDLMMRA

SEQ ID NO: 11278 - protein, 204 aa, unidentified
  source 1..204: note = Mycobacteroides sp.
  REGION 1..204: note = tr|A0A0R3H5N3|A0A0R3H5N3_9MYCO GTP cyclohydrolase 1; OS = Mycobacteroides sp. H054 OX=1720567 GN=folE PE=3 SV=1
MNSPETAERNGQPAGHVFDQARAEAAVRELLLAVGEDPDRHGLVDTPARVARAYKEIFAGLYTDPDTVLNTTFDEQHDELVLVKSIPMYSTCEHHLVSFHGVAHVGYIPGKHGRVTGLSKIARLVDLYAKRPQVQERLTAQIADALVRKLEPRGVIVVVEAEHLCMAMRGVRKPGATTTTSAVRGQFKTDAASRAEVLDLMMRA

SEQ ID NO: 11279 - protein, 204 aa, unidentified; identical to SEQ ID NO: 11278
  source 1..204: note = Mycobacteroides sp.
  REGION 1..204: note = tr|A0A0R3EK55|A0A0R3EK55_9MYCO GTP cyclohydrolase 1; OS = Mycobacteroides sp. H092 OX=1720573 GN=folE PE=3 SV=1

SEQ ID NO: 11280 - protein, 204 aa, unidentified
  source 1..204: note = Mycolicibacillus koreensis
  REGION 1..204: note = tr|A0A1X2LI09|A0A1X2LI09_9MYCO GTP cyclohydrolase 1; OS = Mycolicibacillus koreensis OX=1069220 GN=folE PE=3 SV=1
MVDVELGADSLTLDGPVFDQARAEAAVRELLYAVGEDPERCGLKDTPARVARAYREMFAGLYTDPDEVLDTTFDEQHNELVLVKEIPMYSMCEHHLVSFHGVANVGYIPGADGRVTGLSKIARVVDLYARRPQVQERLTGQIADAMMNRLQPRGVIVVVEAEHMCMSMRGIRKPGAITTTSAVRGQFKTDTAARAEALDLMLRK

SEQ ID NO: 11281 - protein, 227 aa, unidentified
  source 1..227: note = Mycolicibacillus koreensis
  REGION 1..227: note = tr|A0A1E3T6Y4|A0A1E3T6Y4_9MYCO GTP cyclohydrolase 1; OS = Mycolicibacillus koreensis OX=1069220 GN=folE PE=3 SV=1
MINNGHHQVTALVPSRPTKPASRTYPYIGTALTPDAQITAIENSFRDIMVALGLDIHDDSLTRTPHRFAKMLVNEVFDGLDRRRFPEITTQDNKFGYSEPLCEANISIISTCEHHFVPIIGRCHIAYIPAGRLIGLSKLNRIARHLARRPQVQERLTIQIAETLAELVETDDVAVTVDAEHLCVKMRGIEDVNAVTRTTELKGAFQQSDVRKEYFAAIPRLSDLKSI

SEQ ID NO: 11282 - protein, 203 aa, unidentified
  source 1..203: note = Mycolicibacillus trivialis
  REGION 1..203: note = tr|A0A1X2EIG2|A0A1X2EIG2_9MYCO GTP cyclohydrolase 1; OS = Mycolicibacillus trivialis OX=1798 GN=folE PE=3 SV=1
MDAQFDARPAPSERPVFDQARAEAAVRELLLAIGEDPERCGLRDTPARVARAYQEMFAGLYTDPDDVLNTTFDEQHDELVMVKDIPMYSMCEHHLVSFRGSAHVGYIPGEDGRVTGLSKIARVVDLYARRPQVQERLTAQIADAMMNRLKPRGVIVVVEAEHMCMSMRGVRKPGAVTTTSAVRGQFKTDTALRAEALNLILHK

SEQ ID NO: 11283 - protein, 192 aa, unidentified
  source 1..192: note = Mycolicibacter algericus
  REGION 1..192: note = tr|A0A1W9YDS9|A0A1W9YDS9_9MYCO GTP cyclohydrolase 1; OS = Mycolicibacter algericus DSM 45454 OX=723879 GN=folE; PE = 3 SV=1
MTSTGFDQARAEAAVRELLYAVGEDPDRAGLVDTPARVARAYQEMFAGLYTDPDTVLETTFDEQHDEMVLVKEIPLYSTCEHHLVSFHGVAHVGYIPGDDGRITGLSKLARVVDLYAKRPQVQERLTGQVADALMRKLNPRGVIVVVEAEHLCMAMRGVRKPGAITTTSAVRGQFKSDSASRAEALELIRRK

SEQ ID NO: 11284 - protein, 192 aa, unidentified
  source 1..192: note = Mycolicibacter arupensis
  REGION 1..192: note = tr|A0A0F5MSU5|A0A0F5MSU5_9MYCO GTP cyclohydrolase 1; OS = Mycolicibacter arupensis OX=342002 GN=folE PE=3 SV=1
MTSAIFDQARAEAAVRELLLAVGEDPDRPGLVDTPARVARAYKEIFAGLYTDPDTVLETTFDEQHEELVIVREIPMYSTCEHHLVSFHGVAHVGYIPGYDGRITGLSKLARVVDLYAKRPQVQERLTAQVADALMRKLDPRGVIVVVEAEHLCMAMRGVRKPGAVTTTSAVRGQFKSDSTLRAEALELIRRR

SEQ ID NO: 11285 - protein, 192 aa, unidentified
  source 1..192: note = Mycolicibacter engbaekii
  REGION 1..192: note = tr|A0A1X1TPZ1|A0A1X1TPZ1_9MYCO GTP cyclohydrolase 1; OS = Mycolicibacter engbaekii OX=188915 GN=folE PE=3 SV=1
MSSAIFDQARAEAAVRELLFAVGEDPDRAGLLDTPARVARAYREMFGGLYTDPDEVLETTFDEQHEELVIVKEIPLYSTCEHHLVAFHGVAHVGYIPGDDGRITGLSKLARLVDLYAKRPQVQERLTAQVADAMMRKLDPRGVIVVVEAEHLCMAMRGVRKPGAITTTSAVRGQFKSDSTSRAEALELILRK

SEQ ID NO: 11286 - protein, 192 aa, unidentified
  source 1..192: note = Mycolicibacter heraklionensis
  REGION 1..192: note = tr|A0A0I9TBM1|A0A0I9TBM1_9MYCO GTP cyclohydrolase 1; OS = Mycolicibacter heraklionensis OX=512402 GN=folE PE=3; SV = 1
MTSAIFDQARAEAAVRELLFAVGEDPDRPGLMDTPARVARAYHEMFAGLYTDPDAVLETTFDEQHEELVIVKEIPLYSTCEHHLVAFHGVAHVGYIPGYDGRITGLSKLARVVDLYAKRPQVQERLTAQVADALMRKLNPRGVIVVVEAEHLCMAMRGVRKPGAITTTSAVRGQFKTDSTSRAEALELIRRK

SEQ ID NO: 11287 - protein, 192 aa, unidentified; identical to SEQ ID NO: 11225
  source 1..192: note = Mycolicibacter heraklionensis
  REGION 1..192: note = tr|A0A1A2W2A0|A0A1A2W2A0_9MYCO GTP cyclohydrolase 1; OS = Mycolicibacter heraklionensis OX=512402 GN=folE PE=3; SV = 1

SEQ ID NO: 11288 - protein, 192 aa, unidentified
  source 1..192: note = Mycolicibacter hiberniae
  REGION 1..192: note = tr|A0A1X1VT35|A0A1X1VT35_9MYCO GTP cyclohydrolase 1; OS = Mycolicibacter hiberniae OX=29314 GN=folE PE=3 SV=1
MSSAIFDQARAEAAVRELLFAVGEDPDRAGLLDTPARVARAYREMFAGLYTDPDEVLETTFDEQHEELVIVKEIPLYSTCEHHLVAFHGVAHVGYIPGHDGRITGLSKLARVVDLYAKRPQVQERLTAQVADALMRKLDPRGVIVVVEAEHLCMAMRGVRKPGAITTTSAVRGQFKSDSTSRAEALELILRK

SEQ ID NO: 11289 - protein, 192 aa, unidentified
  source 1..192: note = Mycolicibacter kumamotonensis
  REGION 1..192: note = tr|A0A1B8SIB2|A0A1B8SIB2_9MYCO GTP cyclohydrolase 1; OS = Mycolicibacter kumamotonensis OX=354243 GN=folE PE=3; SV = 1
MASTVFDQARAEAAVRELLYAVGEDPDRPGLLDTPARVARAYQEMFAGLYTDPDTVLETTFDEQHDELVLVKEIPLYSTCEHHLVSFHGVAHIGYIPGADGRITGLSKLARVVDLYAKRPQVQERLTGQVADALMRKLDPRGVIVVVEAEHLCMAMRGVRKPGAITTTSAVRGQFKSDSASRAEALELIRRK

SEQ ID NO: 11290 - protein, 202 aa, unidentified
  source 1..202: note = Mycolicibacter kumamotonensis
  REGION 1..202: note = tr|A0A1B8SFT9|A0A1B8SFT9_9MYCO GTP cyclohydrolase 1; OS = Mycolicibacter kumamotonensis OX=354243 GN=folE PE=3; SV = 1
MSVAAYADLRVVDRPVPDLAAAEQAAAAFLQALGISTDDESLQDTPRRMARAYAEMFTPKPFEATTFPNDEGYDELVLVRDIPLRSVCEHHLLPFTGTACVGYLPGDRILGLSKLARVVDYFACRPQVQERLTKQVADWLTDHLQPRAVGVVIRAEHTCMTLRGVHATGSTTVTSTLLGTLRTDARSRQEFFSLIGIGGVTG

SEQ ID NO: 11291 - protein, 200 aa, unidentified
  source 1..200: note = Mycolicibacter longobardus
  REGION 1..200: note = tr|A0A1X1Y9Y0|A0A1X1Y9Y0_9MYCO GTP cyclohydrolase 1; OS = Mycolicibacter longobardus OX=1108812 GN=folE PE=3 SV=1
MTEKVGSVMTPAVFDQARAEAAVRELLFAVGEDPDRAGLLDTPARVARAYKEMFAGLYTDPDTVLETTFDEEHEELVIVKEIPLYSTCEHHLVSFHGVAHVGYIPGYDGRITGLSKLARVVDLYAKRPQVQERLTGQVADALMRKLNPRGVIVVVEAEHLCMAMRGVRKPGAVTTTSAVRGQFKTDSASRAEALELILRK

SEQ ID NO: 11292 - protein, 200 aa, unidentified
  source 1..200: note = Mycolicibacter minnesotensis
  REGION 1..200: note = tr|A0A1X0FFI7|A0A1X0FFI7_9MYCO GTP cyclohydrolase 1; OS = Mycolicibacter minnesotensis OX=1118379 GN=folE PE=3; SV = 1
MTEKAGSTLTSAIFDQARAEAAVRELLLAVGEDPDRPGLVDTPGRVARAYKEIFAGLYTDPDTVLETTFDEQHEELVIVREIPMYSTCEHHLVSFHGVAHVGYIPGYDGRITGLSKLARVVDLYAKRPQVQERLTAQVADALMRKLNPRGVIVVVEAEHLCMAMRGVRKPGAVTTTSAVRGQFKSDSTLRAEALELIRRR

SEQ ID NO: 11293 - protein, 201 aa, unidentified
  source 1..201: note = Mycolicibacter senuensis
  REGION 1..201: note = tr|A0A329KK93|A0A329KK93_9MYCO GTP cyclohydrolase 1; OS = Mycolicibacter senuensis OX=386913 GN=folE PE=3 SV=1
MSVAVYADLRAADRPVPDLEAAERAAAALLHALGISTAGEALRDTPRRMARAYAEMFTPTPFEATTFPNEEGYDELVLVRDIGFRSVCEHHLLPFTGTACVGYLPGDRLLGLSKLARVVEYFACRPQVQERLTKQVADWLTDHLQPRAVGVVIRAEHTCMTLRGVHAGGSTTVTSTLSGTLRSDDRSRREFFSLAGVGGTG

SEQ ID NO: 11294 - protein, 192 aa, unidentified; identical to SEQ ID NO: 11283
  source 1..192: note = Mycolicibacter senuensis
  REGION 1..192: note = tr|A0A329K6C2|A0A329K6C2_9MYCO GTP cyclohydrolase 1; OS = Mycolicibacter senuensis OX=386913 GN=folE PE=3 SV=1

SEQ ID NO: 11295 - protein, 192 aa, unidentified
  source 1..192: note = Mycolicibacter sinensis
  REGION 1..192: note = tr|A0A1A2DWL4|A0A1A2DWL4_MYCSD GTP cyclohydrolase 1; OS = Mycolicibacter sinensis (strain JDM601) OX=875328; GN = folE PE=3 SV=1
MVSTVFDQARAEAAVRELLYAVGEDPDRPGLLDTPARVARAYQEMFAGLYTDPDAVLETTFDEQHDELVLVKEIPLYSTCEHHLVSFHGVAHVGYIPGDDGRITGLSKLARVVDLYAKRPQVQERLTGQVADALMRKLDPRGVIVVVEAEHLCMAMRGVRKPGAITTTSAVRGQFKSDSASRAEALELIRRR

SEQ ID NO: 11296 - protein, 201 aa, unidentified
  source 1..201: note = Mycolicibacter sinensis
  REGION 1..201: note = tr|F5YW49|F5YW49_MYCSD GTP cyclohydrolase 1; OS = Mycolicibacter sinensis (strain JDM601) OX=875328; GN = folE PE=3 SV=1
MSVAVYAELRAADRPVPDLEAAERAAAALLHALGISTAGEALRNTPRRMARAYAEMFTPTPFEATTFPNEEEYEELVLVRDIGFRSVCEHHLLPFTGTACVGYLPGDRLLGLSKLARVVDYFACRPQVQERLTKQVADWLTDHLQPRAVGVVIRAEHTCMTLRGVHAGGSTTVTSTLSGTLRSDDRSRREFFSLAGIGSTG

SEQ ID NO: 11297 - protein, 201 aa, unidentified
  source 1..201: note = Mycolicibacter terrae
  REGION 1..201: note = tr|A0A1X2E1B4|A0A1X2E1B4_9MYCO GTP cyclohydrolase 1; OS = Mycolicibacter terrae OX=1788 GN=folE_1 PE=3 SV=1
MSVAAYADLRVVDRPVPNLDAAEQAAAAFLHALGISTADEGLQNTPRRVARAYAEMFTPKPFEATTFPNDEGYDELVLVRDIPLRTVCEHHLLPFTGTACVGYLPGDRILGLSKLARVVDYFASRPQVQERLTKQVADWLTDHLQPRAVGVVIRAEHTCMTLRGVHATGSTTVTSTLLGTLRTDARSRQEFFSLIGIGGTG

SEQ ID NO: 11298 - protein, 192 aa, unidentified
  source 1..192: note = Mycolicibacter terrae
  REGION 1..192: note = tr|A0A1X2DR66|A0A1X2DR66_9MYCO GTP cyclohydrolase 1; OS = Mycolicibacter terrae OX=1788 GN=folE_2 PE=3 SV=1
MTSTVFDQARAEAAVRELLYAVGEDPDRPGLLDTPARVARAYQEMFAGLYTDPDTVLETTFDEQHDELVLVKEIPLYSTCEHHLVSFHGVAHVGYIPGDDGRITGLSKLARVVDLYAKRPQVQERLTGQVADALMRKLDPRGVIVVVEAEHLCMAMRGVRKPGAITTTSAVRGQFKSDSASRAEALELIRRR

SEQ ID NO: 11299 - protein, 192 aa, unidentified
  source 1..192: note = Mycolicibacter virginiensis
  REGION 1..192: note = tr|A0A2S8C5N0|A0A2S8C5N0_9MYCO GTP cyclohydrolase 1; OS = Mycolicibacter virginiensis OX=1795032 GN=folE PE=3 SV=1
MTSAIFDQARAEAAVRELLFAVGEDPDRQGLLDTPARVARAYREMFAGLYTDPDEVLETTFDEQHEELVIVKEIPLYSTCEHHLVAFHGVAHVGYIPGYDGRITGLSKLARVVDLYAKRPQVQERLTAQVADALMRKLNPRGVIVVVEAEHLCMAMRGVRKPGAITTTSAVRGQFKTDSTSRAEALELIRRK

SEQ ID NO: 11300 - protein, 202 aa, unidentified
  source 1..202: note = Mycolicibacterium agri
  REGION 1..202: note = tr|A0A2A7NGU4|A0A2A7NGU4_MYCAG GTP cyclohydrolase 1; OS = Mycolicibacterium agri OX=36811 GN=folE PE=3 SV=1
MTRPHNNSATFTTPVFDQPRAEAAIRELLIAVGEDPDRHGLEETPARVARAYREMFAGLYTNPDTVLNTTFDEQHDELVLVKEIPLYSTCEHHLVAFHGVAHVGYIPGQDGRVTGLSKIARLVDLYAKRPQVQERLTAQIADAMTRKLEPRGVIVVVECEHLCMSMRGVRKPGAVTTTSAVRGQFKTDKASRSEALELILRK

SEQ ID NO: 11301 - protein, 200 aa, unidentified
  source 1..200: note = Mycolicibacterium aichiense
  REGION 1..200: note = tr|A0A378RE74|A0A378RE74_9MYCO GTP cyclohydrolase 1; OS = Mycolicibacterium aichiense OX=1799 GN=folE PE=3 SV=1
MPQPDVSTLEMPVFDQSRAEAAVRELLLAVGEDPDRHGLQDTPARVARAFQEMFAGLYTDPDMVLDTTFDEQHDELVLVKDIPMYSTCEHHLVAFHGVAHVGYIPGEDGRVTGLSKLARVVDLYAKRPQVQERLTTQIADAVMRKLKPRGVIVVIEAEHLCMAMRGVRKPGASTTTSAVRGQFKSDHASRSEALDLILRK

SEQ ID NO: 11302 - protein, 206 aa, unidentified
  source 1..206: note = Mycolicibacterium aromaticivorans
  REGION 1..206: note = tr|A0A064CFN9|A0A064CFN9_9MYCO GTP cyclohydrolase 1; OS = Mycolicibacterium aromaticivorans JS19b1 = JCM 16368; OX = 1440774 GN=folE PE=3 SV=1
MTNGASMAQPNASTLETPVFDQTRAEAAVRELLLAVGEDPDRHGLQDTPARVARAFQEMFSGLYTDPDAVLDTTFDEQHDELVLVKDIPMYSTCEHHLVAFHGVAHVGYIPGEDGRVTGLSKLARVVDLYAKRPQVQERLTTQIADAVMRKLKPRGVIVVIEAEHLCMAMRGVRKPGASTTTSAVRGQFKSDHASRSEALDLILRK

SEQ ID NO: 11303 - protein, 203 aa, unidentified
  source 1..203: note = Mycolicibacterium aurum
  REGION 1..203: note = tr|A0A3S4U1Q7|A0A3S4U1Q7_MYCAU GTP cyclohydrolase 1; OS = Mycolicibacterium aurum OX=1791 GN=folE PE=3 SV=1
MTRSPSNHSTTLTDEDFDQARAEAAVRELLIAVGEDPDRHGLADTPARVARAYREMFAGLYTDPDTVLNTTFDEQHDELVLVKEIPMYSTCEHHLVAFHGVAHVGYIPGVDGRVTGLSKIARLVDLYAKRPQVQERLTAQIADALMRKLDPRGAIVVIEAEHLCMAMRGVRKPGATTTTSAVRGQFKHDNASRAEALDLILRR

SEQ ID NO: 11304 - protein, 202 aa, unidentified
  source 1..202: note = Mycolicibacterium austroafricanum
  REGION 1..202: note = tr|A0A2S8LJV3|A0A2S8LJV3_MYCAO GTP cyclohydrolase 1; OS = Mycolicibacterium austroafricanum OX=39687 GN=folE PE=3; SV = 1
MTRSHNHSATITTARFDQARAEAAVRELLIAVGEDPDREGLRDTPARVARAYQEIFAGLYTDPDEVLKTMFDEQHDEMVLVKDIPMYSTCEHHLVSFHGVAHVGYIPGVDGRVTGLSKLARVVDLYAKRPQVQERLTGQIADALMRRLDPRGVIVVIEAEHLCMAMRGIRKPGAVTTTSAVRGQFKTDKASRAEALDLILRK

SEQ ID NO: 11305 - protein, 205 aa, unidentified
  source 1..205: note = Mycolicibacterium bacteremicum
  REGION 1..205: note = tr|A0A1W9YXK3|A0A1W9YXK3_9MYCO GTP cyclohydrolase 1; OS = Mycolicibacterium bacteremicum OX=564198 GN=folE PE=3; SV = 1
MTTSGKNGESTSGFIQADFDQARAEAAVRELLLAVGEDPDRHGLVDTPARVARAFKEIFAGLYTDPDTVLNTTFDEQHDELVLVKQIPMYSTCEHHLVSFHGVAHVGYIPGQDGRVTGLSKIARLVDLYAKRPQVQERLTAQVADALMRKLDPRGVIVVMEAEHLCMAMRGIRKPGAVTTTSAVRGQFKTDKASRAEALELILRR

SEQ ID NO: 11306 - protein, 205 aa, unidentified
  source 1..205: note = Mycolicibacterium boenickei
  REGION 1..205: note = tr|A0A2A7PAY0|A0A2A7PAY0_9MYCO GTP cyclohydrolase 1; OS = Mycolicibacterium boenickei OX=146017 GN=folE PE=3 SV=1
MSQTLREHHNNTDTTTRVFDQPRAEAAVRELLIAIGEDPDRQGLLDTPARVARAYKELMAGLYTDPDAVLNTTFDEEHDELVLVKEIPLYSTCEHHLVSFHGVAHVGYIPGVDGRVTGLSKIARLVDLYSKRPQVQERLTAQIADALMRKLDPRGAIVVIEAEHLCMAMRGVRKPGAVTTTSAVRGQFKTDKASRAEALELILRK

SEQ ID NO: 11307 - protein, 204 aa, unidentified; identical to SEQ ID NO: 11156
  source 1..204: note = Mycolicibacterium brisbanense
  REGION 1..204: note = tr|A0A100VX78|A0A100VX78_9MYCO GTP cyclohydrolase 1; OS = Mycolicibacterium brisbanense OX=146020 GN=folE PE=3; SV = 1

SEQ ID NO: 11308 - protein, 193 aa, unidentified
  source 1..193: note = Mycolicibacterium brumae
  REGION 1..193: note = tr|A0A2G5P6L2|A0A2G5P6L2_9MYCO GTP cyclohydrolase 1; OS = Mycolicibacterium brumae OX=85968 GN=folE PE=3 SV=1
MAEFPEFDQERAEAAVRELLLAVGEDPERCGLRDTPARVARSFKEIFGGLYTDPDTVLETTFDEQHDELVLVKQIPMYSTCEHHLVAFHGVAHVGYIPGHDGRVTGLSKLARVVDLYAKRPQVQERLTGQIADAVMRKLDPRGVIVVIEAEHLCMAMRGVRKPGAITTTSAVRGQFKTDKASRAEALDLILRK

SEQ ID NO: 11309 - protein, 199 aa, unidentified
  source 1..199: note = Mycolicibacterium canariasense
  REGION 1..199: note = tr|A0A100WB17|A0A100WB17_9MYCO GTP cyclohydrolase 1; OS = Mycolicibacterium canariasense OX=228230 GN=folE PE=3; SV = 1
MTASQANAALRDFDQPRAEAAVRELLLAVGEDPDRHGLVDTPARVARAYREIFAGLYTDPDAVLNTTFDEQHDELVLVKEIPMYSTCEHHLVSFHGVAHVGYIPGLDGRVTGLSKIARLVDLYAKRPQVQERLTAQIADALMRKLDPRGAIVVIEAEHLCMAMRGVRKPGAVTTTSAVRGQFKTDKASRSEALELILRK

SEQ ID NO: 11310 - protein, 200 aa, unidentified
  source 1..200: note = Mycolicibacterium celeriflavum
  REGION 1..200: note = tr|A0A1X0C261|A0A1X0C261_9MYCO GTP cyclohydrolase 1; OS = Mycolicibacterium celeriflavum OX=1249101 GN=folE PE=3; SV = 1
MHSSAALQLVHPSPERDLAAAEAAATAFLSALGISLDSESLAGTPGRMARAYAELFTPRSFDLTTFPNDERYDELVISRNLPVRSVCEHHMLPFVGIAHIGYLPGERIIGLSKLARVAEHFACRPQCQERLTKQIADWLDNELQPRGVGVVIEAEHSCMTLRGVHAAGSATITSTLLGALREDLRSRQEFFALAGTHARP

SEQ ID NO: 11311 - protein, 202 aa, unidentified
  source 1..202: note = Mycolicibacterium celeriflavum
  REGION 1..202: note = tr|A0A1X0BSB3|A0A1X0BSB3_9MYCO GTP cyclohydrolase 1; OS = Mycolicibacterium celeriflavum OX=1249101 GN=folE PE=3; SV = 1
MAQSRHNSVTFSPAKFDQPRAEAAVRELLLAVGEDPDRHGLESTPTRVARAYKELFAGLYIDPDSVLDTTFDEQHDELVLVKQIPMYSTCEHHLVSFHGVAHVGYIPGNDGRVTGLSKIARLVDLYAKRPQVQERLTGQIADAMMRKLDPRGVIVVVEAEHLCMAMRGVRKPGAVTTTSAVRGQFKVDAASRAEALDLILRG

SEQ ID NO: 11312 - protein, 202 aa, unidentified
  source 1..202: note = Mycolicibacterium chitae
  REGION 1..202: note = tr|A0A448HY24|A0A448HY24_MYCCI GTP cyclohydrolase 1; OS = Mycolicibacterium chitae OX=1792 GN=folE PE=3 SV=1
MAQPHSRTATVDVPVFDQERAEAAVRELLYAIGEDPDRHGLVDTPARVARAFQEMFAGLYLDPDEVLNTTFDEQHDELVLVKDIPMYSTCEHHLVAFHGVAHVGYIPGNDGRVTGLSKLARLVDLYAKRPQVQERLTAQVADALMRKLDPRGVIVVMEAEHLCMAMRGIRKPGAITTTSAVRGQFKTDNASRAEALELILRK

SEQ ID NO: 11313 - protein, 202 aa, unidentified
  source 1..202: note = Mycolicibacterium chlorophenolicum
  REGION 1..202: note = tr|A0A0J6WLS2|A0A0J6WLS2_9MYCO GTP cyclohydrolase 1; OS = Mycolicibacterium chlorophenolicum OX=37916 GN=folE; PE = 3 SV=1
MTRSQDGSATITTPEFDQARAEAAVRELLIAVGEDPDRHGLVDTPARVARAYKEIFAGLHTNPDEVLNTTFDEQHDELVLVKDIPMYSTCEHHLVSFHGVAHVGYIPGRDGRVTGLSKLARVVDLYAKRPQVQERLTTQIADALMRKLDPRGAIVVVEAEHLCMAMRGIRKPGARTTTSAVRGQFKTDKASRAEALELILRK

SEQ ID NO: 11314 - protein, 202 aa, unidentified
  source 1..202: note = Mycolicibacterium chubuense
  REGION 1..202: note = tr|A0A0J6Z5A1|A0A0J6Z5A1_MYCCU GTP cyclohydrolase 1; OS = Mycolicibacterium chubuense OX=1800 GN=folE PE=3 SV=1
MTRSRDGSATITTPEFDQARAEAAVRELLIAVGEDPDRHGLVDTPARVARAYKEIFAGLHTDPDEVLNTTFDEQHDELVLVKDIPMYSTCEHHLVSFHGVAHVGYIPGRDGRVTGLSKLARVVDLYAKRPQVQERLTTQIADALMRKLDPRGAIVVVEAEHLCMAMRGIRKPGARTTTSAVRGQFKTDKASRAEALELILRK

SEQ ID NO: 11315 - protein, 205 aa, unidentified
  source 1..205: note = Mycolicibacterium conceptionense
  REGION 1..205: note = tr|A0A0J8UEX0|A0A0J8UEX0_9MYCO GTP cyclohydrolase 1; OS = Mycolicibacterium conceptionense OX=451644 GN=folE PE=3; SV = 1
MSQSLREHHNNTDTARRVFDQPRAEAAVRELLIAIGEDPDRQGLLDTPARVARAYKELMAGLYTDPDAVLNTTFDEEHDELVLVKEIPMYSTCEHHLVSFHGVAHVGYIPGVDGRVTGLSKIARLVDLYSKRPQVQERLTAQIADALMRKLDPRGAIVVIEAEHLCMAMRGVRKPGAVTTTSAVRGQFKTDKASRAEALELILRK

SEQ ID NO: 11316 - protein, 202 aa, unidentified
  source 1..202: note = Mycolicibacterium confluentis
  REGION 1..202: note = tr|A0A1X1SHU7|A0A1X1SHU7_9MYCO GTP cyclohydrolase 1; OS = Mycolicibacterium confluentis OX=28047 GN=folE PE=3 SV=1
MVLPNSRTATVDHPVFDQARAEAAVRELLYAIGEDPDRHGLIETPARVARAFEEMFAGLYLDPDEVLNTTFDEQHDELVLVKDIPMYSTCEHHLVAFHGVAHVGYIPGVDGRVTGLSKLARVVDLYAKRPQVQERLTAQIADALMRKLDPRGVIVVVEAEHLCMAMRGIRKPGATTTTSAVRGQFKSDKASRAEALELILRK

SEQ ID NO: 11317 - protein, 199 aa, unidentified
  source 1..199: note = Mycolicibacterium cosmeticum
  REGION 1..199: note = tr|W9APB4|W9APB4_9MYCO GTP cyclohydrolase 1; OS = Mycolicibacterium cosmeticum OX=258533 GN=folE PE=3 SV=1
MTASQANAALRDFDQPRAEAAVRELLLAVGEDPDRHGLVDTPARVARAYREIFAGLYTDPDAVLNTTFDEQHDELVLVKEIPMYSTCEHHLVSFHGVAHVGYIPGLDGRVTGLSKIARLVDLYAKRPQVQERLTAQIADALMRKLDPRGVIVVVEAEHLCMAMRGVRKPGAVTTTSAVRGQFKTDKASRSEALELILRK

SEQ ID NO: 11318 - protein, 205 aa, unidentified
  source 1..205: note = Mycolicibacterium diernhoferi
  REGION 1..205: note = tr|A0A1Q4HE96|A0A1Q4HE96_9MYCO GTP cyclohydrolase 1; OS = Mycolicibacterium diernhoferi OX=1801 GN=folE PE=3 SV=1
MTTSGNNLAETTAFTPVNFDQARAEAAVRELLIAVGEDPDRHGLVDTPARVARAYKEIFGGLYTDPDAVLNTTFDEQHDELVLVKEIPMYSTCEHHLVSFHGVAHVGYIPGLDGRVTGLSKIARLVDLYAKRPQVQERLTAQIADALMRKLDPRGVIVVVEAEHLCMAMRGVRKPGAITTTSAVRGQFKTDKASRSEALELILRR

SEQ ID NO: 11319 - protein, 201 aa, unidentified
  source 1..201: note = Mycolicibacterium doricum
  REGION 1..201: note = tr|A0A1X1TJ36|A0A1X1TJ36_9MYCO GTP cyclohydrolase 1; OS = Mycolicibacterium doricum OX=126673 GN=folE PE=3 SV=1
MTRAYGSATVKIAEFDQPRAEAAVRELLISVGEDPDRPGLVDTPARVARAYREMFAGLYTDPDDVLNTTFDEQHDEMVLVKDIPMYSTCEHHLVAFHGVAHVGYIPGVDGRVTGLSKLARVVDLYAKRPQVQERLTGQVADALMRKLDPRGVIVVMEAEHLCMAMRGVRKPGATTTTSAVRGQFKTDKASRAEALDLILRK

SEQ ID NO: 11320 - protein, 202 aa, unidentified
  source 1..202: note = Mycolicibacterium duvalii
  REGION 1..202: note = tr|A0A2A7N174|A0A2A7N174_9MYCO GTP cyclohydrolase 1; OS = Mycolicibacterium duvalii OX=39688 GN=folE PE=3 SV=1
MTRSHNNSATITLATFDQARAEAAVRELLIAVGEDPDREGLVDTPARVARAYREIFAGLYTDPDDVLKTMFDEQHDELVLVKDIPMYSTCEHHLVSFHGVAHVGYIPGEDGRVTGLSKLARVVDLYAKRPQVQERLTAQVADALMRRLDPRGVIVVIEAEHLCMAMRGIRKPGAVTTTSAVRGQFKTDKASRAEALDLILRK

SEQ ID NO: 11321 - protein, 207 aa, unidentified
  source 1..207: note = Mycolicibacterium elephantis
  REGION 1..207: note = tr|A0A439DW81|A0A439DW81_9MYCO GTP cyclohydrolase 1; OS = Mycolicibacterium elephantis DSM 44368 OX=1335622; GN = folE PE=3 SV=1
MTRSHRNSVTTSPGTFSPAKFDQTRVEAAVRELLIAVGEDPDRHGLEATPARVARAYRELFAGLYTDPDTVLDTTFDEQHDELVLVKQIPLYSTCEHHLVSFHGAAHVGYIPGADGRVTGLSKIARLVDLYAKRPQVQERLTGQIADALMRKLDPRGVIVVIEAEHLCMAMRGVRKPGAITTTSAVRGQFKHDAASRAEALDLILRK

SEQ ID NO: 11322 - protein, 207 aa, unidentified
  source 1..207: note = Mycolicibacterium elephantis
  REGION 1..207: note = tr|A0A0M2ZI45|A0A0M2ZI45_9MYCO GTP cyclohydrolase 1; OS = Mycolicibacterium elephantis OX=81858 GN=folE PE=3 SV=1
MTRSHRNWVTISPGTFSPAKFDQSRAEAAVRELLIAVGEDPDRHGLEETPARVARAYRELFAGLYTDPDTVLDTTFDEQHDELVLVKQIPLYSTCEHHLVSFHGAAHVGYIPGADGRVTGLSKIARLVDLYAKRPQVQERLTGQIADALMRKLDPRGVIVVIEAEHLCMAMRGVRKPGAITTTSAVRGQFKHDAASRAEALDLILRK

SEQ ID NO: 11323 - protein, 206 aa, unidentified
  source 1..206: note = Mycolicibacterium fallax
  REGION 1..206: note = tr|A0A1X1RFD2|A0A1X1RFD2_MYCFA GTP cyclohydrolase 1; OS = Mycolicibacterium fallax OX=1793 GN=folE PE=3 SV=1
MTTQAHPAPRQAGAEDYPVFDQPRAEAAVRELLLAIGEDPDRQGLRDTPARVARSFREIFAGLYSDPDAVLDTTFDEQHDELVLVKQIPMYSTCEHHLVSFHGFAHVGYIPGVDGRVTGLSKIARVVDMYAKRPQVQERLTGQIADAVMRKLDPRGVIVVVEAEHLCMAMRGVRKPGAVTTTSAVRGQFKTDKASRAEALELILRK

SEQ ID NO: 11324 - protein, 207 aa, unidentified
  source 1..207: note = Mycolicibacterium flavescens
  REGION 1..207: note = tr|A0A448HKZ9|A0A448HKZ9_MYCFV GTP cyclohydrolase 1; OS = Mycolicibacterium flavescens OX=1776 GN=folE_1 PE=3 SV=1
MLQTPEAPQTGNGQRPPARVFDQAAVEAAIFDLLVAIGEDPHRDGLRDTPARVARAYQETFAGLYSDPDDVLTTMFDEHHGELVLIKQIPMYSTCEHHLVSFHGVAHVGYLPGEDGRVTGLSKIARLVDLYARRPQVQERLTGQIAEAVMNKLHPRGVIVVIEAEHLCMAMRGVRKPGAVTTTSAVRGQFQTDPASRAEALHLLLRR

SEQ ID NO: 11325 - protein, 204 aa, unidentified
  source 1..204: note = Mycolicibacterium flavescens
  REGION 1..204: note = tr|A0A1E3REQ5|A0A1E3REQ5_MYCFV GTP cyclohydrolase 1; OS = Mycolicibacterium flavescens OX=1776 GN=folE PE=3 SV=1
MTQHTAVNDQVHFNPAKFDQPRAEAAVRELLIAVGEDPDRHGLEATPARVARAYKELFAGLYTDPDSVLDTTFDEQHDELVLVKQIPMYSTCEHHLVSFHGFAHVGYIPGVDGRVTGLSKIARLVDLYAKRPQVQERLTGQIADAMMRKLNPRGAIVVIEAEHLCMAMRGIRKQGAITTTSAVRGQFKTDKASRAEALDLILRK

SEQ ID NO: 11326 - protein, 205 aa, unidentified
  source 1..205: note = Mycolicibacterium fortuitum
  REGION 1..205: note = tr|A0A117IG17|A0A117IG17_MYCFO GTP cyclohydrolase 1; OS = Mycolicibacterium fortuitum subsp. acetamidolyticum; OX = 144550 GN=folE PE=3 SV=1
MSQSLREHHNNADTATRVFDQPRAEAAVRELLIAIGEDPDRQGLLDTPARVARAYKELMAGLYTDPDAVLNTTFDEEHDELVLVKEIPLYSTCEHHLVSFHGVAHVGYIPGVDGRVTGLSKIARLVDLYSKRPQVQERLTAQIADALMRKLDPRGAIVVIEAEHLCMAMRGVRKPGAVTTTSAVRGQFKTDKASRAEALELILRK

SEQ ID NO: 11327 - protein, 205 aa, unidentified; identical to SEQ ID NO: 11326
  source 1..205: note = Mycolicibacterium fortuitum
  REGION 1..205: note = tr|A0A0N9YCY5|A0A0N9YCY5_MYCFO GTP cyclohydrolase 1; OS = Mycolicibacterium fortuitum OX=1766 GN=folE PE=3 SV=1

SEQ ID NO: 11328 - protein, 202 aa, unidentified
  source 1..202: note = Mycolicibacterium gilvum
  REGION 1..202: note = sp|A4T5P2|GCH1_MYCGI GTP cyclohydrolase 1; OS = Mycolicibacterium gilvum (strain PYR-GCK) OX=350054; GN = folE PE=3 SV=1
MTRSHNHSATLTTPDFDQARAEAAVRELLIAVGEDPDREGLLDTPARVARSYREIFAGLYTDPDEVLTTMFDEQHDEMVLVKDIPMYSTCEHHLVSFHGVAHVGYIPGVDGRVTGLSKLARVVDLYAKRPQVQERLTSQIADALMRKLDPRGAIVVIEAEHLCMAMRGIRKPGAVTTTSAVRGQFKTDKASRAEALDLILRK

SEQ ID NO: 11329 - protein, 202 aa, unidentified
  source 1..202: note = Mycolicibacterium gilvum
  REGION 1..202: note = tr|E6THN3|E6THN3_MYCSR GTP cyclohydrolase 1; OS = Mycolicibacterium gilvum (strain DSM 45189 / LMG 24558 / Spyr1) OX=278137 GN=folE PE=3 SV=1
MTRSHNHSATLTTPDFDQARAEAAVRELLIAVGEDPDREGLRDTPARVARSYREIFAGLYTDPDEVLTTMFDEQHDEMVLVKDIPMYSTCEHHLVSFHGVAHVGYIPGVDGRVTGLSKLARVVDLYAKRPQVQERLTAQIADALMRKLDPRGAIVVIEAEHLCMAMRGIRKPGAVTTTSAVRGQFKTDKASRAEALDLILRK

SEQ ID NO: 11330 - protein, 188 aa, unidentified
  source 1..188: note = Mycolicibacterium hassiacum
  REGION 1..188: note = tr|K5B7J9|K5B7J9_MYCHD GTP cyclohydrolase 1; OS = Mycolicibacterium hassiacum (strain DSM 44199 / CIP 105218 / JCM 12690 / 3849) OX=1122247 GN=folE PE=3 SV=1
MFDQARVEAAIRELLIGVGEDPDRHGLEDTPARVARAYKEVFAGLYTDPDEVLNTTFDEQHDELVLVKDIPMYSTCEHHLVAFHGVAHVGYIPGEDGRVTGLSKIARLVDLYAKRPQVQERLTAQIADALMRKLNPRGVIVVVEAEHLCMSMRGVRKPGAVTTTSAVRGQFKSDKASRAEALELILRK

SEQ ID NO: 11331 - protein, 191 aa, unidentified
  source 1..191: note = Mycolicibacterium hodleri
  REGION 1..191: note = tr|A0A544VVG6|A0A544VVG6_9MYCO GTP cyclohydrolase 1; OS = Mycolicibacterium hodleri OX=49897 GN=folE PE=3 SV=1
MPATFDQERAENAVRELLYAVGEDPERHGLLDTPARVARAYREMFAGLYSNPDDVLNTTFDEQHDELVLVKDIPMYSTCEHHLVSFHGVAHVGYIPGVDGRVTGLSKLARVVDMYAKRPQVQERLTGQVADALMRKLDPRGVIVVIEAQHLCMAMRGIRKPGASTTTSAVRGQFKTDNASRSEALDLILRK

SEQ ID NO: 11332 - protein, 201 aa, unidentified
  source 1..201: note = Mycolicibacterium hodleri
  REGION 1..201: note = tr|A0A502E118|A0A502E118_9MYCO GTP cyclohydrolase 1; OS = Mycolicibacterium hodleri OX=49897 GN=folE PE=3 SV=1
MSLPIDPHVFVPANFDQDRAEKAVRELLYAIGEDPQRPGLLDTPARVARAYKEMFAGLYTDPDDVLNTTFDEQHDELVLVKSIPMYSTCEHHLVAFHGVAHVGYIPGADGRVTGLSKLARVVDLYAKRPQVQERLTGQVADAVMRKLDPRGVIVVIEAEHLCMAMRGVRKPGATTTTSAVRGQFKTDSTLRAEALDLILRK

SEQ ID NO: 11333 - protein, 207 aa, unidentified
  source 1..207: note = Mycolicibacterium holsaticum
  REGION 1..207: note = tr|A0A1E3RTE3|A0A1E3RTE3_9MYCO GTP cyclohydrolase 1; OS = Mycolicibacterium holsaticum OX=152142 GN=folE PE=3 SV=1
MTRSHNNSTTISPGRFSPATFDQARAEAAVRELLVAVGEDPDRNGLQDTPARVARAYQELFAGLYTDPDTVLDTTFDEQHDELVLVKQIPLYSTCEHHLVSFHGAAHVGYIPGADGRVTGLSKIARLVDLYAKRPQVQERLTAQIADALMRKLNPRGAIVVIEAEHLCMAMRGVRKPGAITTTSAVRGQFKCDAASRAEALDLILRK

SEQ ID NO: 11334 - protein, 198 aa, unidentified
  source 1..198: note = Mycolicibacterium holsaticum
  REGION 1..198: note = tr|A0A1E3R6I0|A0A1E3R6I0_9MYCO GTP cyclohydrolase 1; OS = Mycolicibacterium holsaticum OX=152142 GN=folE PE=3 SV=1
MHSNAALQLVPPSPDRDVAAAEIAAAAFLRALGISLESEGLRDTPARMARGYAELLTPRTFDLTTFPNDEGYDELVMCRNLPIRSVCEHHMLPFTGTAHIGYLPGDRIIGLSKLARIAEHFACRPQLQERLTKQIAECLVEHLQPRGVGVVIEAEHSCMTLRGVHATGSATITSTLLGALRDDARSRQEFFALADVNA

SEQ ID NO: 11335 - protein, 199 aa, unidentified
  source 1..199: note = Mycolicibacterium insubricum
  REGION 1..199: note = tr|A0A1X0CT65|A0A1X0CT65_9MYCO GTP cyclohydrolase 1; OS = Mycolicibacterium insubricum OX=444597 GN=folE PE=3 SV=1
MTTQEVAVAPGVFDQARAEAAVRELLLAVGEDPDRPGLLETPARVARSYREIFAGLYTDPDAVLDTTFDEDHDELVLVKSIPMYSTCEHHLVSFHGVAHVGYIPGADGRVTGLSKIARVVDLYAKRPQVQERLTCQIADAVMRKLDPRGVIVVIEAEHLCMAMRGVRKPGAITTTSAVRGQFKTDKASRAEALELILRK

SEQ ID NO: 11336 - protein, 202 aa, unidentified
  source 1..202: note = Mycolicibacterium iranicum
  REGION 1..202: note = tr|A0A178M3H9|A0A178M3H9_9MYCO GTP cyclohydrolase 1; OS = Mycolicibacterium iranicum OX=912594 GN=folE PE=3 SV=1
MTRSHNNSATLTTPDFDQARAEAAVRELLIAVGEDPDRHGLVDTPARVARAYREMFAGLYTDPDDVLNTTFDEQHDELVLVRDIPMYSTCEHHLVSFHGIAHVGYIPGADGRVTGLSKLARVVDLYAKRPQVQERLTSQIADALMRKLDPRGAIVVIEAEHLCMAMRGIRKPGARTTTSAVRGQFKTDKASRAEALDLILRK

SEQ ID NO: 11337 - protein, 202 aa, unidentified
  source 1..202: note = Mycolicibacterium iranicum
  REGION 1..202: note = tr|A0A1X1WMI5|A0A1X1WMI5_9MYCO GTP cyclohydrolase 1; OS = Mycolicibacterium iranicum OX=912594 GN=folE PE=3 SV=1
MTRSHNNSATLTTPDFDQARAEAAVRELLIAVGEDPDRHGLVDTPARVARAYREMFAGLYTDPDDVLNTTFDEQHDEMVLVRDIPMYSTCEHHLVSFHGVAHVGYIPGADGRVTGLSKLARVVDLYAKRPQVQERLTSQIADALMRKLDPRGAIVVIEAEHLCMAMRGIRKPGARTTTSAVRGQFKTDKASRAEALDLILRK

SEQ ID NO: 11338 - protein, 201 aa, unidentified
  source 1..201: note = Mycolicibacterium litorale
  REGION 1..201: note = tr|A0A4R8J0M8|A0A4R8J0M8_9MYCO GTP cyclohydrolase 1; OS = Mycolicibacterium litorale OX=758802 GN=folE PE=3 SV=1
MTRSHNSTTVNIADFDQQRAEAAVRELLIAVGEDPDRHGLIDTPARVARAYREMFAGLYVDPDDVLNTTFDEQHDEMVLVKDIPMYSTCEHHLVAFHGVAHVGYIPGVDGRVTGLSKLARVVDLYAKRPQVQERLTAQVADALMRKLDPRGVIVVMEAEHLCMAMRGIRKPGATTTTSAVRGQFKTDKASRAEALDLILRK

SEQ ID NO: 11339 - protein, 200 aa, unidentified
  source 1..200: note = Mycolicibacterium litorale
  REGION 1..200: note = tr|A0A1U9PMV4|A0A1U9PMV4_9MYCO GTP cyclohydrolase 1; OS = Mycolicibacterium litorale OX=758802 GN=folE PE=3 SV=1
MAQPTSITLVTPEFDQARAEAAVRELLLAVGEDPDRHGLQDTPARVARAFREMFAGLYTDPDAVLETTFDEQHDELVLVKDIPMYSTCEHHLVAFHGVAHVGYIPGEDGRVTGLSKLARVVDLYAKRPQVQERLTTQVADAVMRKLKPRGVIVVIEAEHLCMAMRGVRKPGATTTTSAVRGQFKTDKASRAEALELILRK

SEQ ID NO: 11340 - protein, 202 aa, unidentified
  source 1..202: note = Mycolicibacterium llatzerense
  REGION 1..202: note = tr|A0A0D1L720|A0A0D1L720_9MYCO GTP cyclohydrolase 1; OS = Mycolicibacterium llatzerense OX=280871 GN=folE PE=3; SV = 1
MTRSQIHSARLTAPKFDHDRAEAAVRELLLAVGEDPDRDGLRDTPGRVARAFEEIFGGLYTDPDSVLNTTFDEGHDELVLVKDIPMYSTCEHHLVSFHGVAHVGYIPGEDGRVTGLSKIARLVDLYAKRPQVQERLTGQIADALMRKLNPQGAIVVIEAEHLCMAMRGVRKPGAVTTTSAVRGQFKTCASSRAEALDLILRK

SEQ ID NO: 11341 - protein, 203 aa, unidentified
  source 1..203: note = Mycolicibacterium mageritense
  REGION 1..203: note = tr|A0A5C7YTD8|A0A5C7YTD8_9MYCO GTP cyclohydrolase 1; OS = Mycolicibacterium mageritense OX=53462 GN=folE PE=3 SV=1
MTSLREHNDTARDTPVFDQPRAEAAVRELLLAIGEDPDRQGLLDTPARVARAYKELMAGLYTDPDAVLNTTFDEQHDELVLVKQIPMYSTCEHHLVSFHGVAHVGYIPGVDGRVTGLSKIARLVDLYSKRPQVQERLTAQIADALMRKLDPRGVIVVVEAEHLCMAMRGVRKPGAITTTSAVRGQFKTDKASRAEALELILRK

SEQ ID NO: 11342 - protein, 203 aa, unidentified; identical to SEQ ID NO: 11341
  source 1..203: note = Mycolicibacterium mageritense
  REGION 1..203: note = tr|X5KXJ9|X5KXJ9_9MYCO GTP cyclohydrolase 1; OS = Mycolicibacterium mageritense DSM 44476 = CIP 104973; OX = 1209984 GN=folE PE=3 SV=1

SEQ ID NO: 11343 - protein, 201 aa, unidentified
  source 1..201: note = Mycolicibacterium monacense
  REGION 1..201: note = tr|A0A1X0H617|A0A1X0H617_9MYCO GTP cyclohydrolase 1; OS = Mycolicibacterium monacense DSM 44395 OX=1226751; GN = folE PE=3 SV=1
MTRSYDSALVKIADFDQPRAEAAVRELLIAIGEDPDRHGLVDTPARVARAYREMFAGLYTDPDDVLNTTFDEQHDEMVLVKDIPMYSTCEHHLVAFHGVAHVGYIPGVDGRVTGLSKLARVVDLYAKRPQVQERLTAQVADALMRKLDPRGVIVVMEAEHLCMAMRGIRKPGATTTTSAVRGQFKTDKASRAEALDLILRK

SEQ ID NO: 11344 - protein, 204 aa, unidentified
  source 1..204: note = Mycolicibacterium moriokaense
  REGION 1..204: note = tr|A0A318HFG8|A0A318HFG8_9MYCO GTP cyclohydrolase 1; OS = Mycolicibacterium moriokaense OX=39691 GN=folE PE=3 SV=1
MTIARPHNNSATFTSPVFDQPRAEAAVRELLIAIGEDPDRHGLEDTPARVARAYKEMFAGLYTNPDTVLDTTFDEQHDELVLVKQIPLYSTCEHHLVAFHGVAHVGYIPGKDGRVTGLSKIARLVDLYAKRPQVQERLTAQIADALMRKLDPRGVIVVVEAEHLCMSMRGVRKPGATTTTSAVRGQFKADASSRSEALDLILRK

SEQ ID NO: 11345 - protein, 202 aa, unidentified
  source 1..202: note = Mycolicibacterium moriokaense
  REGION 1..202: note = tr|A0A370CVN8|A0A370CVN8_9MYCO GTP cyclohydrolase 1; OS = Mycolicibacterium moriokaense OX=39691 GN=folE PE=3 SV=1
MTRPHNNSATISTPDFDQPRAEAAIRELLIAVGEDPDRHGLEDTPARVARAYKEMFAGLYTDPDDVLNTTFDEQHDEMVLVKDIPMYSTCEHHLVAFHGVAHVGYIPGEDGRVTGLSKLARVVDLYAKRPQVQERLTAQVADALMRKLQPRGAIVVIEAEHLCMSMRGIRKPGAVTTTSAVRGQFKTDKASRSEALDLILRK

SEQ ID NO: 11346 - protein, 202 aa, unidentified
  source 1..202: note = Mycolicibacterium mucogenicum
  REGION 1..202: note = tr|A0A1A3HGV7|A0A1A3HGV7_9MYCO GTP cyclohydrolase 1; OS = Mycolicibacterium mucogenicum OX=56689 GN=folE PE=3 SV=1
MTRSQIHSARLTPPKFDHDRAEAAVRELLLAVGEDPDRDGLRDTPGRVARAFEEIFGGLYTDPDSVLDTTFDEGHDELVLVKDIPMYSTCEHHLVSFHGVAHVGYIPGEDGRVTGLSKIARLVDLYAKRPQVQERLTGQIADALMRKLNPQGAIVVIEAEHLCMAMRGVRKPGAVTTTSAVRGQFKTCASSRAEALDLILRK

SEQ ID NO: 11347 - protein, 196 aa, unidentified
  source 1..196: note = Mycolicibacterium mucogenicum
  REGION 1..196: note = tr|A0A495CS58|A0A495CS58_9MYCO GTP cyclohydrolase 1; OS = Mycolicibacterium mucogenicum 261Sha1.1M5 OX=1415782; GN = folE PE=3 SV=1
MSAGVDRDRVARAVRELLSAIGADPESDELRATPGRVADSYAEFFAGVGVDPQQFLSDAVPVDGETGELVLMRDIALRSICEHHLLPFRGRAHVAYQPRDRVVGLSALPRVVDALAARPQVQERLGEQIAQAIADGLDAKGVLVVLEASHGCVADRGVRETEAEAVTIAARGSLSDAAARSEIMALIAPGSPRASL

SEQ ID NO: 11348 - protein, 205 aa, unidentified
  source 1..205: note = Mycolicibacterium neoaurum
  REGION 1..205: note = tr|V5XGQ5|V5XGQ5_MYCNE GTP cyclohydrolase 1; OS = Mycolicibacterium neoaurum VKM Ac-1815D OX=700508; GN = folE PE=3 SV=1
MTTSGKNGESTSGFVQAEFDQPRAEAAVRELLLAVGEDPDRHGLVDTPARVARAYKEIFAGLYTDPDAVLNTTFDEQHDELVLVKQIPMYSTCEHHLVSFHGVAHVGYIPGRDGRVTGLSKIARLVDLYAKRPQVQERLTAQVADALMRKLDPRGVIVVMEAEHLCMAMRGIRKPGAVTTTSAVRGQFKTDHASRAEALDLILRR

SEQ ID NO: 11349 - protein, 205 aa, unidentified
  source 1..205: note = Mycolicibacterium neoaurum
  REGION 1..205: note = tr|A0A024QXG9|A0A024QXG9_MYCNE GTP cyclohydrolase 1; OS = Mycolicibacterium neoaurum OX=1795 GN=folE PE=3 SV=1
MTTSGKNGESTSGFVQAEFDQPRAEAAVRELLLAVGEDPDRHGLIDTPARVARAYKEIFAGLYTDPDAVLNTTFDEQHDELVLVKQIPMYSTCEHHLVSFHGVAHVGYIPGRDGRVTGLSKIARLVDLYAKRPQVQERLTAQVADALMRKLDPRGVIVVMEAEHLCMAMRGIRKPGAVTTTSAVRGQFKTDKASRAEALDLILRR

SEQ ID NO: 11350 - protein, 205 aa, unidentified
  source 1..205: note = Mycolicibacterium neworleansense
  REGION 1..205: note = tr|A0A0H5S975|A0A0H5S975_9MYCO GTP cyclohydrolase 1; OS = Mycolicibacterium neworleansense OX=146018 GN=folE PE=3; SV = 1
MSQSLREHHNNTDTATRVFDQPRAEAAVRELLIAIGEDPDRQGLMDTPARVARAYKELMAGLYTDPDAVLNTTFDEEHDELVLVKEIPMYSTCEHHLVSFHGVAHVGYIPGVDGRVTGLSKIARLVDLYSKRPQVQERLTAQIADALMRKLDPRGAIVVIEAEHLCMAMRGVRKPGAVTTTSAVRGQFKTDKASRAEALELILRK

SEQ ID NO: 11351 - protein, 207 aa, unidentified
  source 1..207: note = Mycolicibacterium novocastrense
  REGION 1..207: note = tr|A0A100X2Z4|A0A100X2Z4_9MYCO GTP cyclohydrolase 1; OS = Mycolicibacterium novocastrense OX=59813 GN=folE PE=3; SV = 1
MLQTPEAPQTGNGQLPRARVFDQEAVEAAIFDLLVAIGEDPHRDGLRDTPARVARAYQETFAGLYADPDDVLTTMFDEHHGELVLIKQIPMYSTCEHHLVSFHGVAHVGYLPGEDGRVTGLSKIARLVDLYARRPQVQERLTGQIAEAVMNKLHPRGVIVVVEAEHLCMAMRGVRKPGAVTTTSAVRGQFQTDPASRAEALHLLLRR

SEQ ID NO: 11352 - protein, 202 aa, unidentified
  source 1..202: note = Mycolicibacterium novocastrense
  REGION 1..202: note = tr|A0A124E755|A0A124E755_9MYCO GTP cyclohydrolase 1; OS = Mycolicibacterium novocastrense OX=59813 GN=folE PE=3; SV = 1
MAQSQHNSVTFRPANFDQPRAEAAVRELLLAVGEDPDRHGLESTPARVARAYKELFAGLYIDPDSVLDTTFDEQHDELVLVKQIPMYSTCEHHLVSFHGVAHVGYIPGQDGRVTGLSKIARLVDLYAKRPQVQERLTGQIADAMMRKLDPRGVIVVVEAEHLCMAMRGVRKPGAVTTTSAVRGQFKVDAASRAEALDLILRK

SEQ ID NO: 11353 - protein, 202 aa, unidentified
  source 1..202: note = Mycolicibacterium obuense
  REGION 1..202: note = tr|A0A0J6WJ93|A0A0J6WJ93_9MYCO GTP cyclohydrolase 1; OS = Mycolicibacterium obuense OX=1807 GN=folE PE=3 SV=1
MTRSQEISATLTTPEFDQARAEAAVRELLLAVGEDPDRHGLLDTPARVARAYREMFAGLYTDPDDVLNTTFDEQHDELVLVKDIPMYSTCEHHLVSFHGVAHVGYIPGKDGRVTGLSKLARVVDLYAKRPQVQERLTCQVADALMRKLDPRGAIVVIEAEHLCMAMRGIRKPGARTTTSAVRGVFKTNTASRAEALDLILRK

SEQ ID NO: 11354 - protein, 202 aa, unidentified
  source 1..202: note = Mycolicibacterium obuense
  REGION 1..202: note = tr|A0A0M2JWD2|A0A0M2JWD2_9MYCO GTP cyclohydrolase 1; OS = Mycolicibacterium obuense OX=1807 GN=folE PE=3 SV=1
MTRSQEISATLTTPEFDQARAEAAVRELLLAVGEDPDRHGLLDTPARVARAYREIFAGLYTDPDDVLNTTFDEQHDELVLVKDIPMYSTCEHHLVSFHGVAHVGYIPGKDGRVTGLSKLARVVDLYAKRPQVQERLTCQVADALMRKLDPRGAIVVIEAEHLCMAMRGIRKPGARTTTSAVRGVFKTNTASRAEALDLILRK

SEQ ID NO: 11355 - protein, 202 aa, unidentified
  source 1..202: note = Mycolicibacterium parafortuitum
  REGION 1..202: note = tr|A0A375YBX1|A0A375YBX1_MYCPF GTP cyclohydrolase 1; OS = Mycolicibacterium parafortuitum OX=39692 GN=folE PE=3; SV = 1
MTRSHNHTATLTARDFDQARAEAAVRELLIAVGEDPDREGLLDTPARVARSYREIFAGLYTDPDDVLTTMFDEQHDEMVLVKDIPMYSTCEHHLVSFHGVAHVGYIPGVDGRVTGLSKLARVVDLYAKRPQVQERLTAQIADALMRKLNPRGAIVVIEAEHLCMAMRGIRKPGAVTTTSAVRGQFKTDKASRAEALDLILRK

SEQ ID NO: 11356 - protein, 204 aa, unidentified
  source 1..204: note = Mycolicibacterium paratuberculosis
  REGION 1..204: note = sp|Q743Z2|GCH1_MYCPA GTP cyclohydrolase 1; OS = Mycolicibacterium paratuberculosis (strain ATCC BAA-968 / K-10) OX=262316 GN=folE PE=3 SV=1
MAGNGSAPDTATHQVRQFDQARAEAAVRELLFAIGEDPDRHGLAETPARVARAYREMFAGLYTDPDSVLNTMFDEEHDELVLVKEIPLYSTCEHHLVSFHGVAHVGYIPGNDGRVTGLSKIARLVDLYAKRPQVQERLTSQIADALVKKLNPRGVIVVVEAEHLCMAMRGVRKPGAVTTTSAVRGLFKTNAASRAEALDLILRK

SEQ ID NO: 11357 - protein, 205 aa, unidentified
  source 1..205: note = Mycolicibacterium peregrinum
  REGION 1..205: note = tr|A0A1A0W084|A0A1A0W084_MYCPR GTP cyclohydrolase 1; OS = Mycolicibacterium peregrinum OX=43304 GN=folE PE=3 SV=1
MSQSLREHHNNTDTATRVFDQPRAEAAVRELLIAIGEDPDRQGLLDTPARVARAYKELMAGLYTDPDAVLNTTFDEEHDELVLVKQIPLYSTCEHHLVSFHGVAHVGYIPGVDGRVTGLSKIARLVDLYSKRPQVQERLTAQIADALMRKLDPRGAIVVIEAEHLCMAMRGVRKPGAVTTTSAVRGQFKTDKASRAEALELILRK

SEQ ID NO: 11358 - protein, 205 aa, unidentified
  source 1..205: note = Mycolicibacterium peregrinum
  REGION 1..205: note = tr|A0A1A0QK85|A0A1A0QK85_MYCPR GTP cyclohydrolase 1; OS = Mycolicibacterium peregrinum OX=43304 GN=folE PE=3 SV=1
MSQSLREHHNNTDTATRVFDQPRAEAAVRELLIAIGEDPDRQGLLDTPARVARAYKELMAGLYTDPDAVLNTTFDEEHDELVLVKQIPMYSTCEHHLVSFHGVAHVGYIPGVDGRVTGLSKIARLVDLYSKRPQVQERLTAQIADALMRKLDPRGAIVVIEAEHLCMAMRGVRKPGAVTTTSAVRGQFKTDKASRAEALELILRK

SEQ ID NO: 11359 - protein, 207 aa, unidentified; identical to SEQ ID NO: 11270
  source 1..207: note = Mycolicibacterium phlei
  REGION 1..207: note = tr|A0A139VLL6|A0A139VLL6_MYCPH GTP cyclohydrolase 1; OS = Mycolicibacterium phlei DSM 43239 = CCUG 21000; OX = 1226750 GN=folE PE=3 SV=1

SEQ ID NO: 11360 - protein, 202 aa, unidentified
  source 1..202: note = Mycolicibacterium phlei
  REGION 1..202: note = tr|A0A139VMQ8|A0A139VMQ8_MYCPH GTP cyclohydrolase 1; OS = Mycolicibacterium phlei DSM 43239 = CCUG 21000; OX = 1226750 GN=folE PE=3 SV=1
MAQSQRNSVTFHPAKFDQARAEAAVRELLIAVGEDPDRHGLEDTPARVARAYQELFAGLYTDPDSVLDTTFDEQHDELVLVKQIPMYSTCEHHLVSFHGVAHVAYIPGQDGRVTGLSKIARLVDLYAKRPQVQERLTGQIADAMMRKLDPRGVIVVIEAEHLCMAMRGVRKPGAITTTSAVRGQFKVDAASRAEALELILRK

SEQ ID NO: 11361 - protein, 205 aa, unidentified
  source 1..205: note = Mycolicibacterium porcinum
  REGION 1..205: note = tr|A0A1Q8XXH4|A0A1Q8XXH4_9MYCO GTP cyclohydrolase 1; OS = Mycolicibacterium porcinum OX=39693 GN=folE PE=3 SV=1
MSQSLREHHNNTDTATRVFDQPRAEAAVRELLIAIGEDPDRQGLLDTPARVARAYKELMAGLYTDPDAVLNTTFDEEHDELVLVKEIPLYSTCEHHLVSFHGVAHVGYIPGVDGRVTGLSKIARLVDLYSKRPQVQERLTAQIADALMRKLDPRGAIVVIEAEHLCMAMRGVRKPGAVTTTSAVRGQFKTDKASRAEALELILRK

SEQ ID NO: 11362 - protein, 205 aa, unidentified; identical to SEQ ID NO: 11326
  source 1..205: note = Mycolicibacterium porcinum
  REGION 1..205: note = tr|A0A393Y542|A0A393Y542_9MYCO GTP cyclohydrolase 1; OS = Mycolicibacterium porcinum OX=39693 GN=folE PE=3 SV=1

SEQ ID NO: 11363 - protein, 206 aa, unidentified
  source 1..206: note = Mycolicibacterium rhodesiae
  REGION 1..206: note = tr|A0A1X0IQJ8|A0A1X0IQJ8_MYCRH GTP cyclohydrolase 1; OS = Mycolicibacterium rhodesiae OX=36814 GN=folE PE=3 SV=1
MTNGASMPQPDASTLEAPVFDQCRAEAAVRELLLAVGEDPDRHGLQDTPARVARAFQEMFSGLYTDPDAVLDTTFDEQHDELVLVKDIPMYSTCEHHLVAFHGVAHVGYIPGEDGRVTGLSKLARVVDLYAKRPQVQERLTTQIADAVMRKLKPRGVIVVIEAEHLCMAMRGVRKPGASTTTSAVRGQFKSDHASRSEALDLILRK

SEQ ID NO: 11364 - protein, 200 aa, unidentified
  source 1..200: note = Mycolicibacterium rhodesiae
  REGION 1..200: note = tr|G4HRD5|G4HRD5_MYCRH GTP cyclohydrolase 1; OS = Mycolicibacterium rhodesiae JS60 OX=931627 GN=folE PE=3; SV = 1
MPQPNAVMLDAPVFDQPRAEAAVRELLLAVGEDPDRHGLVETPARVARAFQEMFAGLYTDPDAVLETTFDEQHDELVLVKQIPMYSTCEHHLVAFHGVAHVGYIPGEDGRVTGLSKLARVVDLYAKRPQVQERLTGQIADAIMRKLKPRGVIVVVEAEHLCMAMRGVRKPGAVTTTSAVRGQFKTDTASRAEALELILRR

SEQ ID NO: 11365 - protein, 206 aa, unidentified
  source 1..206: note = Mycolicibacterium rutilum
  REGION 1..206: note = tr|A0A1H6JM47|A0A1H6JM47_9MYCO GTP cyclohydrolase 1; OS = Mycolicibacterium rutilum OX=370526 GN=folE PE=3 SV=1
MQSQHAAVSDEAVTFNPAKFDQPRAEAAVRELLIAVGEDPDRHGLEATPARVARAYKEVFAGLYTDPDSVLNTTFDEQHDELVLVKQIPMYSTCEHHLVSFHGVAHVGYIPGVDGRVTGLSKIARLVDLYAKRPQVQERLTGQIADALMRKLDPRGAIVVIEAEHLCMAMRGIRKPGAVTTTSAVRGQFKTDKASRAEALDLILRK

SEQ ID NO: 11366 - protein, 205 aa, unidentified; identical to SEQ ID NO: 11315
  source 1..205: note = Mycolicibacterium senegalense
  REGION 1..205: note = tr|A0A378W9R9|A0A378W9R9_9MYCO GTP cyclohydrolase 1; OS = Mycolicibacterium senegalense OX=1796 GN=folE PE=3 SV=1

SEQ ID NO: 11367 - protein, 205 aa, unidentified
  source 1..205: note = Mycolicibacterium setense
  REGION 1..205: note = tr|A0A0B2Y3V6|A0A0B2Y3V6_9MYCO GTP cyclohydrolase 1; OS = Mycolicibacterium setense OX=431269 GN=folE PE=3 SV=1
MSQSLREHHNNTETVTRVFDQPRAEAAVRELLIAIGEDPDRQGLVDTPARVARAYKELMAGLYTDPDAVLNTTFDEEHDELVLVKQIPLYSTCEHHLVSFHGVAHVGYIPGVDGRVTGLSKIARLVDLYSKRPQVQERLTAQIADALMRKLDPRGAIVVIEAEHLCMAMRGVRKPGAVTTTSAVRGQFKTDKASRAEALELILRK

SEQ ID NO: 11368 - protein, 203 aa, unidentified
  source 1..203: note = Mycolicibacterium smegmatis
  REGION 1..203: note = tr|I7FU46|I7FU46_MYCS2 GTP cyclohydrolase 1; OS = Mycolicibacterium smegmatis (strain ATCC 700084 / mc(2)155) OX=246196 GN=folE PE=3 SV=1
MTQSLRGHQNNNVRRVFDQPRAEAAVRELLIAIGEDPEREGLVDTPARVARAYKELMAGLHTDPDSVLNTTFDEGHDELVLVKQIPMYSTCEHHLVSFHGVAHVGYIPGVDGRVTGLSKIARLVDLYSKRPQVQERLTAQIADALMRKLDPRGVIVVVEAEHLCMAMRGVRKPGAVTTTSAVRGQFKTDKASRAEALELILRK

SEQ ID NO: 11369 - protein, 203 aa, unidentified; identical to SEQ ID NO: 11368
  source 1..203: note = Mycolicibacterium smegmatis
  REGION 1..203: note = tr|A0A0D6J110|A0A0D6J110_MYCSM GTP cyclohydrolase 1; OS = Mycolicibacterium smegmatis OX=1772 GN=folE PE=3 SV=1

SEQ ID NO: 11370 - protein, 202 aa, unidentified
  source 1..202: note = Mycolicibacterium sp.
  REGION 1..202: note = tr|A0A391PAU7|A0A391PAU7_9MYCO GTP cyclohydrolase 1; OS = Mycolicibacterium sp. NCC-Tsukiji OX=2185272 GN=folE; PE = 3 SV=1
MTRSQIHSARLTPPKFDHDRAEAAVRELLLAVGEDPDRDGLRDTPGRVARAFEEIFGGLYTDPDSVLDTTFDEGHDELVLVKDIPMYSTCEHHLVSFHGVAHVGYIPGEDGRVTGLSKIARLVDLYAKRPQVQERLTGQIADALMRKLNPQGAIVVVEAEHLCMAMRGVRKPGAVTTTSAVRGQFKTCASSRAEALDLILRK

SEQ ID NO: 11371 - protein, 200 aa, unidentified
  source 1..200: note = Mycolicibacterium sp.
  REGION 1..200: note = tr|A0A5A7YPT5|A0A5A7YPT5_9MYCO GTP cyclohydrolase 1; OS = Mycolicibacterium sp. P1-5 OX=2024617 GN=folE PE=3 SV=1
MPQPNSSTLETPVFDQSRAEAAVRELLLAVGEDPDRQGLQDTPARVARAFEEMFAGLYTDPDDVLSTTFDEQHDELVLVKQIPMYSTCEHHLVSFHGVAHVGYIPGEDGRVTGLSKLARVVDLYAKRPQVQERLTGQIADAIMRKLKPRGVIVVIEAEHLCMAMRGVRKPGAITTTSAVRGQFKTDNASRSEALDLILRK

SEQ ID NO: 11372 - protein, 200 aa, unidentified
  source 1..200: note = Mycolicibacterium sphagni
  REGION 1..200: note = tr|A0A255DJQ7|A0A255DJQ7_9MYCO GTP cyclohydrolase 1; OS = Mycolicibacterium sphagni OX=1786 GN=folE PE=3 SV=1
MSQPNSVARDVPVFDQPRAEAAVRELLLAVGEDPDRHGLVDTPARVARAFQEMFAGLYTDPDAVLETTFDEQHDELVLVKQIPMYSTCEHHLVAFHGMAHVGYIPGVDGRITGLSKLARVVDLYAKRPQVQERLTGQVADAIMRKLKPRGVIVVIEAEHLCMAMRGVRKPGAITTTSAVRGQFKTDKASRAEALELILRK

SEQ ID NO: 11373 - protein, 204 aa, unidentified
  source 1..204: note = Mycolicibacterium thermoresistibile
  REGION 1..204: note = tr|A0A117IN76|A0A117IN76_MYCTH GTP cyclohydrolase 1; OS = Mycolicibacterium thermoresistibile OX=1797 GN=folE; PE = 3 SV=1
MTRAHHNSATLTTKTPVFDQPRAEAAIRELLLAVGEDPDRDGLRDTPARVARAYKEVFAGLYTDPDAVLDTTFDEQHDELVLVRQIPLYSTCEHHLVSFHGFAHVGYIPGDDGRVTGLSKIARLVDLYAKRPQVQERLTAQIADALMRKLNPRGAIVVVEAEHLCMAMRGVRKPGALTTTSAVRGQFKTDNASRAEALELILRK

SEQ ID NO: 11374 - protein, 204 aa, unidentified; identical to SEQ ID NO: 11373
  source 1..204: note = Mycolicibacterium thermoresistibile
  REGION 1..204: note = tr|G7CF22|G7CF22_MYCT3 GTP cyclohydrolase 1; OS = Mycolicibacterium thermoresistibile (strain ATCC 19527 / DSM 44167 / CIP 105390 / JCM 6362 / NCTC 10409 / 316); OX = 1078 020 GN=folE PE=3 SV=1

SEQ ID NO: 11375 - protein, 195 aa, unidentified
  source 1..195: note = Mycolicibacterium tokaiense
  REGION 1..195: note = tr|A0A378TH50|A0A378TH50_9MYCO GTP cyclohydrolase 1; OS = Mycolicibacterium tokaiense OX=39695 GN=folE PE=3 SV=1
MTTQSRPVFDQVRAEKAVRELLYAVGEDPDRHGLIDTPARVARAYQEMFAGLYTDPDDVLNTTFDEQHDELVLVKDIPMYSTCEHHLVSFHGVAHVGYIPGKDGRVTGLSKLARVVDLYAKRPQVQERLTGQVADALMRKLDPRGVIVVMEAEHLCMAMRGIRKPGASTTTSAVRGQFKTDKASRAEALELILRK

SEQ ID NO: 11376 - protein, 202 aa, unidentified
  source 1..202: note = Mycolicibacterium tusciae
  REGION 1..202: note = tr|A0A1X0JPM7|A0A1X0JPM7_9MYCO GTP cyclohydrolase 1; OS = Mycolicibacterium tusciae OX=75922 GN=folE PE=3 SV=1
MTQSQNNSVKFKPVEFDQPRAEAAVRELLIAVGEDPDRHGLEDTPARVARAYRELFAGLYTDPDTVLDTTFDEQHDEMVLVKQIPMYSTCEHHLVSFHGVAHVGYIPGEDGRVTGLSKIARLVDLYAKRPQVQERLTAQIADALMRKLNPRGAIVVVEAEHLCMAMRGVRKPGAITTTSAVRGQFKTDSASRSEALDLILRK

SEQ ID NO: 11377 - protein, 202 aa, unidentified
  source 1..202: note = Mycolicibacterium vaccae
  REGION 1..202: note = tr|K0V6R4|K0V6R4_MYCVA GTP cyclohydrolase 1; OS = Mycolicibacterium vaccae ATCC 25954 OX=1194972 GN=folE; PE = 3 SV=1
MTRSPHHTATITTPAFDQARAEAAVRELLIAVGENPDREGLRDTPARVARAYQEIFAGLYVDPDEVLKTMFDEQHDELVLVKDIPMYSTCEHHLVSFHGVAHVGYIPGEDGRVTGLSKLARVVDLYAKRPQVQERLTAQIADALMRRLKPRGAIVVIEAEHLCMAMRGIRKPGAVTTTSAVRGQFKTDKASRAEALELILRK

SEQ ID NO: 11378 - protein, 202 aa, unidentified; identical to SEQ ID NO: 11304
  source 1..202: note = Mycolicibacterium vanbaalenii
  REGION 1..202: note = sp|A1TG42|GCH1_MYCVP GTP cyclohydrolase 1; OS = Mycolicibacterium vanbaalenii (strain DSM 7251 / JCM 13017 / NRRL B-24157 / PYR-1) OX=350058 GN=folE PE=3 SV=1

SEQ ID NO: 11379 - protein, 200 aa, unidentified
  source 1..200: note = Mycolicibacterium vulneris
  REGION 1..200: note = tr|A0A1X2KYF4|A0A1X2KYF4_9MYCO GTP cyclohydrolase 1; OS = Mycolicibacterium vulneris OX=547163 GN=folE PE=3 SV=1
MALPHTAMPTTRVFDQERAEAAVRELLHAIGEDPDRNGLRETPARVARAYREMFAGLYTDPDSVLNTMFEEDHDELVLVKEIPLYSTCEHHLVAFHGVAHVGYIPGNDGRVTGLSKIARLVDLYSKRPQVQERLTSQIADALVKKLNPRGVIVVVEAEHLCMAMRGVRKPGAITTTSAVRGLFKTNAASRAEALDLILRK

SEQ ID NO: 11380 - protein, 205 aa, unidentified; identical to SEQ ID NO: 11326
  source 1..205: note = Mycolicibacterium vulneris
  REGION 1..205: note = tr|X5LFK7|X5LFK7_9MYCO GTP cyclohydrolase 1; OS = Mycolicibacterium vulneris OX=547163 GN=folE PE=3 SV=1

SEQ ID NO: 11381 - protein, 207 aa, unidentified
  source 1..207: note = Mycolicibacterium wolinskyi
  REGION 1..207: note = tr|A0A1X2FHT8|A0A1X2FHT8_9MYCO GTP cyclohydrolase 1; OS = Mycolicibacterium wolinskyi OX=59750 GN=folE PE=3 SV=1
MTSVREHNTATNNAAKDHRVFDQPRAEAAVRELLIAIGEDPDRQGLVDTPARVARAYKELMAGLYTDPDAVLNTTFDEGHDELVLVKEIPLYSTCEHHLVSFHGVAHVGYIPGVDGRVTGLSKIARLVDLYSKRPQVQERLTAQIADALMRKLDPRGAIVVVEAEHLCMAMRGVRKPGAVTTTSAVRGQFKTDKASRAEALELILRK

SEQ ID NO: 11382 - protein, 207 aa, unidentified
  source 1..207: note = Mycolicibacterium wolinskyi
  REGION 1..207: note = tr|A0A132PLR7|A0A132PLR7_9MYCO GTP cyclohydrolase 1; OS = Mycolicibacterium wolinskyi OX=59750 GN=folE PE=3 SV=1
MTSVREHNTATNNAAKDHPVFDQPRAEAAVRELLIAIGEDPDRQGLVDTPARVARAYKELMAGLYTDPDAVLNTTFDEGHDELVLVKEIPLYSTCEHHLVSFHGVAHVGYIPGVDGRVTGLSKIARLVDLYSKRPQVQERLTAQIADALMRKLDPRGAIVVVEAEHLCMAMRGVRKPGAVTTTSAVRGQFKTDKASRAEALELILRK

SEQ ID NO: 11383 - protein, 205 aa, Mycoplana dimorpha
  REGION 1..205: note = tr|A0A2T5B7K3|A0A2T5B7K3_MYCDI GTP cyclohydrolase 1; OS = Mycoplana dimorpha OX=28320 GN=folE PE=3 SV=1
MDAVIKNFPIGDDKSGRPSQKEAEDAVRVLLRWAGDDPEREGLLDTPARVAKAYRELFSGYDQDPEDVLGRTFEEVAGYDDIVLVKDIPFYSHCEHHMVPIIGRAHVAYLPNGRVLGLSKIARVVEIFGRRLQTQETMTAQIASSIDETLRPRGVAVMIEAEHMCMAMRGIQKQGSTTLTTTFTGAFKTEPAEQVRFMTMIRGRG

SEQ ID NO: 11384 - protein, 258 aa, Mycoplasma capricolum
  REGION 1..258: note = tr|A0A078MWN1|A0A078MWN1_MYCCC GTP cyclohydrolase 1 type 2 OS=Mycoplasma capricolum subsp. capripneumoniae; OX = 40480 GN=MCCPILRI181_00593 PE=4 SV=1
MLLDNIISYLNQLFNPKKASNWDHVGFQFEYKKLNNINISKVLVCLDLTNDCLEFAISNQIQLIITRHPFIFNELKLEKKNPNKKQMIKKLNKHKILVFSIHTNYDSSIKQNILEILNKKLKINSFKKYGKDKESNLFYLDQKISVNDLINDLKEVFSLNQIRLNSNISLDTKIKDFYLTSGSGASTMIENMLKDCTFITGEVKWDQWIYANSNNVNLIEIGHYAENHFIDDLKNKLQIKFKDIKIFSYDIKNQFIEK

SEQ ID NO: 11385 - protein, 263 aa, Mycoplasma sp.
  REGION 1..263: note = tr|A0A0L1IJ60|A0A0L1IJ60_9MOLU NIF3 family protein; OS = Mycoplasma sp. HU2014 OX=1664275 GN=AB668_03195 PE=4; SV = 1
MLLVNITKYLDKKFNPKKASDWDNVGFQIFNKKPLDANFNVNKVLICLDLTNDCLEYAIKNNVNLIISRHPFIFAELKQEKQNPIKKEMIKKLTKHNIVVFSIHTNYDASSNQNLTEIINKEIEIKKYKKYGYENESNIFYFKKEIKIEDLIKSVSKIFNSESIRFNSNTDLNSKTNQMYITTGSGASTMIYNSLKKCVFITGEVKWNEWIYANDNNVCLVELGHYMENYFVDDIKNKLANKFNDLEILTYDINNQFITRKKV

SEQ ID NO: 11386 - protein, 209 aa, unidentified
  source 1..209: note = Myroides guanonis
  REGION 1..209: note = tr|A0A1I3M5C6|A0A1I3M5C6_9FLAO GTP cyclohydrolase 1; OS = Myroides guanonis OX=1150112 GN=folE PE=3 SV=1
MKKVMDFEGTDTVAELKQKVDFSDEEKVNRISGLFSEIMETLGLDLSDDSLKNTPNRVAKMYVKEAFSGLNPKNKPAISLFDNKYGYRQTLVEKDITLYSHCEHHFVPIIGKVHVAYVPYDSVIGLSKINRLVDYFAKRPQVQERLSVQIGEGLIEALGHQDVAVYIEANHLCVASRGIRDTNSYTVTEFFSGVFEDERMQQRFLESIK

SEQ ID NO: 11387 - protein, 223 aa, unidentified
  source 1..223: note = Myroides guanonis
  REGION 1..223: note = tr|A0A1I3LED1|A0A1I3LED1_9FLAO GTP cyclohydrolase 1; OS = Myroides guanonis OX=1150112 GN=folE PE=3 SV=1
MNQEDLLHEDIGDNHIASSEFTPLRKDAFDIADDEKIALIRKDVENILTTLGMDLTDDSMKGTPNRVAKMFVKEIFGGLNPSKKPSASTFENNYKYGEMLVEKNIVVYSTCEHHLLPIIGRAHVAYISNGKVVGLSKMNRIVDYYAKRPQVQERLTIQIVRELQRVLNTDDVACVIDAKHLCVNSRGIRDIESSTVTSEFGGKFKEEKVRRELLDYIKLNTEF

SEQ ID NO: 11388 - protein, 223 aa, unidentified
  source 1..223: note = Myroides indicus
  REGION 1..223: note = tr|A0A4R7EPL3|A0A4R7EPL3_9FLAO GTP cyclohydrolase 1; OS = Myroides indicus OX=1323422 GN=folE PE=3 SV=1
MSITEKFHDELGDNHIATSDATPMRSDAFDRTDDEKIELIKKDVENILNTLGLDLTDDSLKGTPNRVAKMFVKEVFGGLNPAKKPSSSTFENKYKYGEMLVEKNIVIYSTCEHHLLPIIGRAHIAYISNGTVVGLSKMNRIAEYYSKRPQVQERLTIQIVNELKRVLNTEDVACIIDAKHLCVNSRGIKDIESSTVTAEFGGRFKEENVRKEFLEYIKLETKF

SEQ ID NO: 11389 - protein, 223 aa, Myroides marinus
  REGION 1..223: note = tr|A0A161SAY1|A0A161SAY1_9FLAO GTP cyclohydrolase 1; OS = Myroides marinus OX=703342 GN=folE PE=3 SV=1
MNTDEKFHDEMGDNHIASSDATPLRSDAFDRTDDEKIELIKKDVENILNTLGLDLTDDSLKGTPNRVAKMFVKEMFGGLNPSKKPSASTFDNKYKYNEMLVEKNIVVYSTCEHHLLPIVGRAHVAYISNGTVVGLSKMNRIVDFYAKRPQVQERLTIQIVNELKRVLNTEDVACIIDAKHLCVNSRGIRDIESSTVTAEFGGKFQDENVRKEFLNYIQLETKF

SEQ ID NO: 11390 - protein, 223 aa, Myroides odoratimimus
  REGION 1..223: note = tr|A0A0E1Z590|A0A0E1Z590_9FLAO GTP cyclohydrolase 1; OS = Myroides odoratimimus CCUG 10230 OX=883150 GN=folE PE=3; SV = 1
MNTDEKFHDEMGDNHIASSDATPLRSDAFDRTDDEKIELIKKDVENILNTLGLDLTDDSLKGTPNRVAKMFVKEMFGGLNPAKKPSASTFDNKYKYNEMLVEKNIVVYSTCEHHLLPIVGRAHVAYISNGTVVGLSKMNRIVDFYAKRPQVQERLTIQIVNELKRVLNTEDVACIIDAKHLCVNSRGIRDIESSTVTAEFGGKFQDENVRKEFLNYIQLETKF

SEQ ID NO: 11391 - protein, 223 aa, Myroides odoratimimus; identical to SEQ ID NO: 11390
  REGION 1..223: note = tr|A0A0S7EIM1|A0A0S7EIM1_9FLAO GTP cyclohydrolase 1; OS = Myroides odoratimimus OX=76832 GN=folE PE=3 SV=1

SEQ ID NO: 11392 - protein, 223 aa, Myroides odoratus
  REGION 1..223: note = tr|A0A378RLF6|A0A378RLF6_MYROD GTP cyclohydrolase 1; OS = Myroides odoratus OX=256 GN=folE PE=3 SV=1
MSLDEKFHDDMGDNHIASSDATPLRSDAFDRTDEEKIELIKKDVENILNTLGLDLTDDSLKGTPNRVAKMFVKEIFGGLNPAKKPSSSTFDNKYKYNEMLVEKNIVVYSTCEHHLLPIVGRAHVAYISNGTVVGLSKMNRIVDFYAKRPQVQERLTIQIVNELKRVLNTEDVACVMDAKHLCVNSRGIKDIESSTVTAEFGGRFKEESVRKEFLDYIKLDTTF

SEQ ID NO: 11393 - protein, 223 aa, Myroides odoratus
  REGION 1..223: note = tr|H1Z4S5|H1Z4S5_MYROD GTP cyclohydrolase 1; OS = Myroides odoratus DSM 2801 OX=929704 GN=folE PE=3 SV=1
MSLDEKFHDDMGDNHIASSDATPLRSDAFDRTDEEKIELIKKDVENILNTLGLDLTDDSLKGTPNRVAKMFVKEIFGGLNPAKKPSSSTFDNKYKYNEMLVEKNIVVYSTCEHHLLPIVGRAHVAYISNGTVVGLSKMNRIVDFYAKRPQVQERLTIQIVNELKRVLNTEDVACVMDAKHLCVNSRGIKDIESSTVTAEFGGRFKEESVRKEFLDYIKLDTQF

SEQ ID NO: 11394 - protein, 223 aa, Myroides phaeus
  REGION 1..223: note = tr|A0A1G8FPB7|A0A1G8FPB7_9FLAO GTP cyclohydrolase 1; OS = Myroides phaeus OX=702745 GN=folE PE=3 SV=1
MSQDEKFHDDMGDNHIASSDATPLRSDAFDRTDDEKIESIKKDVENILNTLGLDLTDDSLKGTPNRVAKMFVKEIFGGLNPERKPKSSTFDNKYKYNEMLVEKNIVVYSTCEHHLLPIVGRAHVAYISNGTVVGLSKMNRIVEFYSKRPQVQERLTIQIVNELKRVLNTEDVACIIDAKHLCVNSRGIKDIESSTVTAEFGGRFKEESVRKEFIEFIKLETKF

SEQ ID NO: 11395 - protein, 223 aa, Myroides profundi; identical to SEQ ID NO: 11390
  REGION 1..223: note = tr|A0A0B5RWL6|A0A0B5RWL6_9FLAO GTP cyclohydrolase 1; OS = Myroides profundi OX=480520 GN=folE PE=3 SV=1

SEQ ID NO: 11396 - protein, 188 aa, unidentified
  source 1..188: note = Myxococcaceae bacterium
  REGION 1..188: note = tr|A0A3N5HDP9|A0A3N5HDP9_9DELT GTP cyclohydrolase I FolE OS=Myxococcaceae bacterium OX=2484252 GN=folE PE=4; SV = 1
MRRAVRSFLEASGLSPDDPELRETPARVAEAWARHFLDGYGRDPDTVLAERIPVPEGSRGELVVVTGLRFHSMCPHHLLPVEGRAHLAYVPGDHVVGFGRLAALLDTWAHRLILQEHLARGVARSLARGLESPGAACILEAHQACLRVRGEEQRDAVTHAEAYEGVLRKDGMLRRELWARIAAAGAAW

SEQ ID NO: 11397 - protein, 55 aa, unidentified
  source 1..55: note = Myxococcaceae bacterium
  REGION 1..55: note = tr|A0A3N5H7N4|A0A3N5H7N4_9DELT GTP cyclohydrolase I FolE (Fragment) OS=Myxococcaceae bacterium OX=2484252; GN = EHM78_26985 PE=4 SV=1
AEGVGVAIEAQHLCMMMRGVEKQNSMMTTSAMLGTFRDSAATRTEFLTLIGRRRP

SEQ ID NO: 11398 - protein, 199 aa, unidentified
  source 1..199: note = Myxococcales bacterium
  REGION 1..199: note = tr|A0A0S8F2I9|A0A0S8F2I9_9DELT GTP cyclohydrolase 1; OS = Myxococcales bacterium SG8_38_1 OX=1703408 GN=folE PE=3; SV = 1
MSEKPRDQEAEECVRKLLAYIGDDPTREGLVDTPKRVLGAIGEHFRGYHEDPVEHLSRTFTEVEGYDELVLVSDIEIYSHCEHHVVPFVGKAHVAYIPNGKVVGLSKIARVVDTFGKRLQVQEKLTAQIANAIDETLTPQGTAVILQCQHFCMCYRGVRKPGSWTTTSRLTGCFLKDEAARMELLTLIGMPRSIGGAGG

SEQ ID NO: 11399 - protein, 261 aa, unidentified
  source 1..261: note = Myxococcales bacterium
  REGION 1..261: note = tr|A0A2D5EVG2|A0A2D5EVG2_9DELT GTP cyclohydrolase FolE2 OS=Myxococcales bacterium OX=2026763 GN=folE2 PE=3; SV = 1
MEDVQSHPDPRGIPLERVGVSGVRFPGVVAGQATSVTASMSVSIAAEHRGAHMSRFLLALEPHREALGLERMPALLRELRERMDAEAAEVDLRFPVFRRKAAPVSGESGWMDYEGRLVGRVDAEGLVVRAGAVVAVASLCPCSKAISDYGAHMQRGHVHLDVTPRRGESGAFAPLPFDDLVAVAERHASAPLYPVLKRPDERHVTMQAYDTPAFVEDMARGIAADLREDPRVEAFTVRVVNQESIHQHDAFAETSWSRSGR

SEQ ID NO: 11400 - protein, 185 aa, Myxococcus fulvus
  REGION 1..185: note = tr|F8CK20|F8CK20_MYXFH GTP cyclohydrolase I; OS = Myxococcus fulvus (strain ATCC BAA-855 / HW-1); OX = 483219 GN=folE PE=4 SV=1
MARAVADFLRAAGLNLQDVHLSETPARVAEAWTSEFLDGYGRTPEQALGEAFPVPPGSSGELVVVTDLRFHSMCPHHLLPLTGRAHVAYVPGKQVVGFGRLSALVDCFAHRLILQEDLAREVARSLARVLGSPATACIIEAEQACLRLRGDKQRDAVTHAEAYEGALRRDGPLRRELWARLGARR

SEQ ID NO: 11401 - protein, 219 aa, unidentified
  source 1..219: note = Naasia sp.
  REGION 1..219: note = tr|A0A4S4FJ54|A0A4S4FJ54_9MICO GTP cyclohydrolase 1; OS = Naasia sp. YIM 131853 OX=2565933 GN=folE PE=3 SV=1
MTDNPGGVPTNGTPPGPDLERVAAAVRELLAALGEDVDRPELGATPVRSAQSWAELLSGRDADPVAPLIPLPGEESFSGQAVALRNIAFRSVCEHHLLPFDGVIHLMYRPSGAVAGLGSFIRTIEALSSRLQLQERLTEQIADAIEAALAPEGILVVAHARHGCVSDRGVRDVGARTMTIASRGSYSGSAEASAAALLLLPTPSDPPTSPADPSTPPGI

SEQ ID NO: 11402 - protein, 202 aa, unidentified
  source 1..202: note = Naasia sp.
  REGION 1..202: note = tr|A0A4S4FLA8|A0A4S4FLA8_9MICO GTP cyclohydrolase 1; OS = Naasia sp. YIM 131853 OX=2565933 GN=folE PE=3 SV=1
MDADRVRDAVRELMLALGEDPAEPRLVATPARSATAWVELLSGSDEDPVAPMSGIAAEEGFGEQVIALRDIAFRSVCEHHLLPFDGVAHLMYRSSGPVSGLGSFIRSIDVLSSRLQLQERLTDQIADAIVEAIAPIGLVVVLVARHGCVSDRGARSIAARTTTIASRGSFSGREEAAAASLLLAPHSPGTPINTTSRSKEDA

SEQ ID NO: 11403 - protein, 220 aa, Nakamurella multipartita
  REGION 1..220: note = tr|C8XA95|C8XA95_NAKMY GTP cyclohydrolase 1; OS = Nakamurella multipartita (strain ATCC 700099 / DSM 44233 / CIP 104796 / JCM 9543 / NBRC 105858 / Y-104); OX = 479431 GN=f olE PE=3 SV=1
MTAGPATDAGRAPAAATDGSPGANGGPGPARAPFDQARAEAAVRELLLAVGEDPDRDGLLQTPARVARAYAEQFAGLFTDPSEVLQTSFDENHNEMILMRDIDLYSTCEHHLVPFFGQAHVGYIPGPDGRVTGLSKLARLVDGYAKRPQVQERLTTQIADALVHRLRPAGAIVVIEAEHLCMAMRGIRKPGAVTTTSAVRGIFQSQARTRAEAMSLITGR

SEQ ID NO: 11404 - protein, 226 aa, Nakamurella multipartita
  REGION 1..226: note = tr|C8XFH8|C8XFH8_NAKMY GTP cyclohydrolase 1; OS = Nakamurella multipartita (strain ATCC 700099 / DSM 44233 / CIP 104796 / JCM 9543 / NBRC 105858 / Y-104); OX = 479431 GN=f olE PE=3 SV=1
MTAALPQSPSARPRPGPPEPVNRRHHHPLRVVHPTAPVDLAAAERAAAAFLAALGVDVATENRRDTPGRMARAYAEMFTPRPFDLTTFPNDDGYDEMVLARAIPVQSVCEHHLLPFVGVAHVGYLPGDRILGLSKLARVVELFARQPQVQERLTQQVADWLQTTLEPRGVGVVIEAEHLCMTMRGVHADGVTTVTSAVQGHLRQDAAARAEFFALALPRPTNRRRP

SEQ ID NO: 11405 - protein, 230 aa, unidentified
  source 1..230: note = Nakamurella panacisegetis
  REGION 1..230: note = tr|A0A1H0NNK6|A0A1H0NNK6_9ACTN GTP cyclohydrolase 1; OS = Nakamurella panacisegetis OX=1090615 GN=folE PE=3 SV=1
MTNATRADGSPERSVSPLVDDGSRADGVSSPVLLDGAPPVRPVFDHVRAEAAIRELLIAVGEDVDRDGLRETPARVARAFAEQFSGLYVDPDQVLETVFAENHSEMVLIRDIPMYSTCEHHLVPFFGHAHVGYIPGRAGQVTGLSKLARVVEGYSKRPQVQERLTTQIADALVRKLQPAGVIVVIEAEHLCMAMRGIRKPGAITTTSAVRGLFQSQASTRAEAMSLITGR

SEQ ID NO: 11406 - protein, 217 aa, unidentified
  source 1..217: note = Nakamurella panacisegetis
  REGION 1..217: note = tr|A0A1H0RL05|A0A1H0RL05_9ACTN GTP cyclohydrolase 1; OS = Nakamurella panacisegetis OX=1090615 GN=folE PE=3 SV=1
MTSAQLDVAATGGGRRVPLRVVHPPAHVDLAAAERAATDFLTALGVDLATEGRRDTARRMAQAYSELFRPRPFDLTTFPNDENYDELVVVRDVPVHSVCEHHVLPFVGVAHLAYLPGAHILGLSKLARVVELFARRPQVQERLTQQVADWLFVNLNPRGVGVIIEAEHLCMTIRGVQAAGTRTTTSALRGQLREDAASRAEFFALAVPRPSSGGRHG

SEQ ID NO: 11407 - protein, 185 aa, unidentified
  source 1..185: note = Nakamurella silvestris
  REGION 1..185: note = tr|A0A399VES1|A0A399VES1_9ACTN GTP cyclohydrolase 1; OS = Nakamurella silvestris OX=1645681 GN=folE PE=3 SV=1
MPRARAAVRELLLALGEDPDRSGLLETPDRVARAYAEQFSGLYGSPDSVLDTVFDEGHAELILVKDIEFYSTCEHHLVPFFGKAHVGYIPGAQGRITGLSKLARLVDGYAKRPQVQERLTTQIADAMVRRLDPAGTIVVLEAEHLCMAMRGVRKPGARTTTSAVRGIFQSSHRTRAEAMSLIVGR

SEQ ID NO: 11408 - protein, 192 aa, Nakamurella sp.
  REGION 1..192: note = tr|A0A3G8ZZ81|A0A3G8ZZ81_9ACTN GTP cyclohydrolase 1; OS = Nakamurella sp. s14-144 OX=1902245 GN=folE PE=3 SV=1
MAKRPYDSERAEAAIRELLLAVGEDPDREGLLNTPGRVSRAFAEQFSGLHTNPDDVLDTVFDENHAEMILIRDITFYSTCEHHLVPFLGKAHVGYIPGPDGRVTGLSKVARLVDGYSRRPQVQERLTTQIADAMVRRLVPAGVIVVMEAEHLCMAMRGVRKPGAVTSTSAVRGIFQTSQPTRAEAMSLITGR

SEQ ID NO: 11409 - protein, 203 aa, Nakamurella sp.
  REGION 1..203: note = tr|A0A4U6QEA0|A0A4U6QEA0_9ACTN GTP cyclohydrolase 1; OS = Nakamurella sp. N5BH11 OX=2576308 GN=folE PE=3 SV=1
MTATQQAPAAASGAQVVDLPRAASAVRELLLAMGEDPDRAGLLDTPMRVAKAFAEQFSGLHTDPDEVLATVFDEQHSEMILMRDIEMYSTCEHHLVPFFGRAHVGYIPGPDGRVTGLSKLARLVDGYARRPQVQERLTTQIADALVRRLRPAGAIVVIEAEHLCMAMRGVRKPGATTTTSAVRGIFQSRDRTRAEAMSLITGR

SEQ ID NO: 11410 - protein, 200 aa, Nannocystis exedens
  REGION 1..200: note = tr|A0A1I2EQX4|A0A1I2EQX4_9DELT GTP cyclohydrolase 1; OS = Nannocystis exedens OX=54 GN=folE PE=3 SV=1
MTDPHDRPPAEAVLPPMMDAVATLLRGVGEDPARDGLERTPERVAKALRFLTSGYDQSLETILNGAIFDVGHDEMVLVRDIDLFSLCEHHMLPFIGRAHIGYIPDRKVVGLSKLARVVEMFARRLQVQERLTRQVAEAVQEVLQPHGVGVVIEASHMCMIMRGVQKPNSWTVTSSMVGVFQDNLNTRQEFLNLIRHKVVF

SEQ ID NO: 11411 - protein, 192 aa, Natranaerobius trueperi
  REGION 1..192: note = tr|A0A226BVJ9|A0A226BVJ9_9FIRM GTP cyclohydrolase 1; OS = Natranaerobius trueperi OX=759412 GN=folE PE=3 SV=1
MNIERIENLVYQLLQEIGEDPERSGLKETPARVAKMYQEIFEGTNYTNKQIAEMADKTFDEDIYDENCKDMVIVEDIPCFSWCEHHMALMNLQISVAYLPVGKVVGLSKIVRIAEMVSKRLQLQERIGSDIADIMTMITGSEDVAVVIKGIHSCMTARGVKKPGTVTKTSTLRGKFEIESDLRNELINLLPD

SEQ ID NO: 11412 - protein, 188 aa, Natranaerovirga hydrolytica
  REGION 1..188: note = tr|A0A4V2Q0C7|A0A4V2Q0C7_9FIRM GTP cyclohydrolase 1; OS = Natranaerovirga hydrolytica OX=680378 GN=folE PE=3 SV=1
MDKQKIENAVRDILEAIGEDPNREGLLDTPKRIAKMYEEIFSGLHTDPKEHLEIYFEEENHEELVLVKDIPFHSVCEHHLVPFYGKAHVGYIPKNGKLTGLSKLARVVDSVAKRPQLQERLTSTIADAIQEKLNPYGVIVVVEAEHMCMTMRGVKKPGSKTLTSAVRGVFQNDGKVRAEAISLINFER

SEQ ID NO: 11413 - protein, 188 aa, Natranaerovirga pectinivora
  REGION 1..188: note = tr|A0A4R3MM09|A0A4R3MM09_9FIRM GTP cyclohydrolase 1; OS = Natranaerovirga pectinivora OX=682400 GN=folE PE=3 SV=1
MDRQKIENAVRDILAAIGEDPNREGLLDTPKRIAKMYEEIFSGLNEDPKEHLEIYFEEENHEELVLVKDIPFYSVCEHHLVPFHGIAHVGYIPKNGKLTGLSKLARVVETVARRPQLQERLTSTIADAIEEKLSPYGVIVVVEAEHMCMTMRGVKKSGSKTLTSAVRGVFQKDGKVRAEAISLINFGR

SEQ ID NO: 11414 - protein, 187 aa, Natribacillus halophilus
  REGION 1..187: note = tr|A0A1G8JDN7|A0A1G8JDN7_9BACI GTP cyclohydrolase 1; OS = Natribacillus halophilus OX=549003 GN=folE PE=3 SV=1
MNTFDHDKLEAAVRQLLEAIGENPDREGITETPARVARMYEEIFSGLNDEPEEHLRTIFGEEHEELVLVKDIPFYSMCEHHLLPFFGKAHIGYIPKNGRVTGLSKLARAVETVARRPQLQERITSEVANALVKTLEPHGVMVVVEAEHMCMTMRGIKKPGSTTVTSAVRGALEKDPASRSEVLALIN

SEQ ID NO: 11415 - protein, 188 aa, Natronincola ferrireducens
  REGION 1..188: note = tr|A0A1G9DVQ0|A0A1G9DVQ0_9CLOT GTP cyclohydrolase 1; OS = Natronincola ferrireducens OX=393762 GN=folE PE=3 SV=1
MDKEKIQRAVRDILEAIGEDPDREGLIDTPKRIAKMYEEIFAGLEMDPKEHLDIYFQDEKHEELVLVKDIPFYSVCEHHLVPFYGKAHVGYIPKNGKLTGLSKLARVVDTVAKRPQLQERLTSKIADTIVDKLDPYGVIVVVEAEHMCMTMRGIKKSGSKTVTSVVRGIFKKDAKARAEAMSLIQFGS

SEQ ID NO: 11416 - protein, 188 aa, Natronincola peptidivorans
  REGION 1..188: note = tr|A0A1I0DMD3|A0A1I0DMD3_9CLOT GTP cyclohydrolase 1; OS = Natronincola peptidivorans OX=426128 GN=folE PE=3 SV=1
MDKEKIEKAVRDILEAVGENPDREGLKDTPKRIAKMYEEIFSGLEVDPEEHLDIYFQEEKHEELVLVKDISFHSMCEHHLVPFFGKVHVGYIPKNGKLTGLSKLARVVDTVARRPQLQERLTATIADTMVKKLQPHGVIVVVEAEHMCMTMRGVKKPGSKTVTSVVRGIFQKDAKARSEAMSLIQFGS

SEQ ID NO: 11417 - protein, 207 aa, Natronoflexus pectinivorans
  REGION 1..207: note = tr|A0A4R2GHT7|A0A4R2GHT7_9BACT GTP cyclohydrolase 1; OS = Natronoflexus pectinivorans OX=682526 GN=folE PE=3 SV=1
MEFTLNGDNGYIKKESYDDETTQRLSEIYKESLELLGEDTSREGLEKTPLRVAKAMQFLTQGYNMSPEDIIRSAMFREDYQQMVVVKDIELYSLCEHHLLPFFGKAHVAYIPRHHITGLSKVARVVEAFARRLQVQERLTTQIKECIDSTLNPLGVAVVIEAQHMCMQMRGVQKQHSVTTTSDFTGAFLKNMATRGEFFNIIGSKLH

SEQ ID NO: 11418 - protein, 192 aa, unidentified
  source 1..192: note = Natronospirillum operossus
  REGION 1..192: note = tr|A0A4Z0WBU6|A0A4Z0WBU6_9BACT GTP cyclohydrolase 1; OS = Natronospirillum operossus OX=2562806 GN=folE PE=3 SV=1
MTKPLSEHYEAILRGLGEDPERGGLVGTPDRAAKAMQFLTEGYQQDLQTIVNGAVFESDNDEMVVVQNIEFYSLCEHHMLPFIGKAHIAYLPTGRVLGLSKFARIVDMFARRLQIQESLTRQVALAVEEVTQATGVGVIMEAKHMCMMMRGVQKQNSSMMTSVMLGSFRENQATRAEFLNLARGSSGFFDRG

SEQ ID NO: 11419 - protein, 310 aa, unidentified
  source 1..310: note = Natronospirillum operossus
  REGION 1..310: note = tr|A0A4Z0WJP3|A0A4Z0WJP3_9BACT GTP cyclohydrolase FolE2 OS=Natronospirillum operossus OX=2562806 GN=folE2; PE = 3 SV=1
MNRLMPDVAEAGQPVQSGALDWVGMNGISLPLHLKDAQSLAPLSVQAKMGSFVSLDDPNAKGIHMSRLYLAQQDMAVKEGITPQDFSAVLEQFIDSHEGLSERAHLTADFELVTLRPSLKSGKQGYKAYPGAVRCIWHDGSPQMELEINVPYSSTCPCSAALSRQLIQDGFREQFGAEGQVSVEDVMAFLGTEEGISATPHSQRSNAQVKIKVDPTLSAFPFLSMIDAIEAALNTPVQTAVKREDEQEFARLNAANLMFCEDAARRVTAILNQQPWARDFWLRVDHYESLHAHDAVAINSKGIKGGYQPI

SEQ ID NO: 11420 - protein, 217 aa, unidentified
  source 1..217: note = Naumannella halotolerans
  REGION 1..217: note = tr|A0A4R7J0V6|A0A4R7J0V6_9ACTN GTP cyclohydrolase 1; OS = Naumannella halotolerans OX=993414 GN=folE PE=3 SV=1
MTAAGRLTRLTRRGPPGRRKYSARVSAEFDHDRVKAAVRELLFGIGEDPDRDGLRDTPDRVARAYAEMFSGLRTDPAEALSTTFDLGHDELVLVTDIELWSVCEHHLLPFTGVAHVGYIPAPDGRITGLSKLARLVDVYAKRPQVQERLTTEVANALVHGLQPRGVIVVMEAEHLCMTMRGVRKPGAQTITSAVRGQLRDPTTRAEALALIRGRRGG

SEQ ID NO: 11421 - protein, 192 aa, Nautilia profundicola
  REGION 1..192: note = tr|B9L6X5|B9L6X5_NAUPA GTP cyclohydrolase 1; OS = Nautilia profundicola (strain ATCC BAA-1463 / DSM 18972 / AmH) OX=598659 GN=folE PE=3 SV=1
MSVDLEKLELAAKMILEAIGEDVDRDGLVKTPRRVAKSFEYICSGYFKDPKEVLNDALFESTNNEMVVVRNIEFYSMCEHHILPFFGRVHVAYIPDKKVVGLSKIPRMVNVFARRLQIQEQLTEQIADAIMEVVQPKGVGVVIHARHMCMEMRGVETKHSYTSSSALRGIFLEEKTREEFFNIINAPIQTHF

SEQ ID NO: 11422 - protein, 192 aa, Nautilia sp.
  REGION 1..192: note = tr|A0A3T0L4F8|A0A3T0L4F8_9PROT GTP cyclohydrolase 1; OS = Nautilia sp. PV-1 OX=2579250 GN=folE PE=3 SV=1
MSVDLEKLELAAKMILEAIGEDVNREGLVKTPKRVAKSFEYICGGYFKDPKEVLNDALFESTNNEMVVVRNIEFYSMCEHHILPFFGRVHVAYIPDKKVVGLSKIPRMVNVFARRLQIQEQLTEQIADAIMEVVQPKGVGVVIHARHMCMEMRGVETKHSYTSSSALRGIFLEEKTREEFFNIINAPVQTHF

SEQ ID NO: 11423 - protein, 310 aa, unidentified; identical to SEQ ID NO: 5185
  source 1..310: note = Negativibacillus sp.
  REGION 1..310: note = tr|A0A3A8XHL2|A0A3A8XHL2_9FIRM GTP cyclohydrolase FolE2 OS=Negativibacillus sp. 1xD8-3 OX=2320085 GN=folE2; PE = 3 SV=1

SEQ ID NO: 11424 - protein, 196 aa, Negativicoccus succinicivorans
  REGION 1..196: note = tr|W1U650|W1U650_9FIRM GTP cyclohydrolase 1; OS = Negativicoccus succinicivorans DORA_17_25 OX=1403945; GN = folE PE=3 SV=1
MNEKAARAYRAFLEAYGLDLQALGMEKTPARVAELYEALLAGVGQGTKPIWGEVFKSDYHGLLTVTGLHFYSLCEHHMLPFFGTADIIYDPRDGMVAGLSKMEKLVQMLSRRPQLQERLTEEIARAVMDDLRAQGVFVRVRAAHLCMTMKGDSSPDTKITTVRGLGTLAPGGQNEARVLALLGGTDGGTTDVCTEE

SEQ ID NO: 11425 - protein, 257 aa, Neisseria animalis
  REGION 1..257: note = tr|A0A3N3EGX9|A0A3N3EGX9_NEIAN GTP cyclohydrolase FolE2 OS=Neisseria animalis OX=492 GN=folE2 PE=3 SV=1
MNAIADVQSTRDLRNLPINQVGIKDLRFPIILSSDEGEQATVARLTMTVRLPAEQKGTHMSRFVALMEQETEAMSFGHLQKLTRDMAALLESESGKITVSFPFFRKKTAPISAIQSLMDYDVTLIGELENGKYRHSIKVLVPVTSLCPCSKEISQYGAHNQRSHVTVTLTVNEEVGIEEIIDCVENQASCQLYGLLKRPDEKHVTEKAYENPKFVEDMVRDVATALMADKRIESFTVESENFESIHNHSAYAYIAYP

SEQ ID NO: 11426 - protein, 257 aa, Neisseria animaloris
  REGION 1..257: note = tr|A0A448U9P7|A0A448U9P7_9NEIS GTP cyclohydrolase FolE2 OS=Neisseria animaloris OX=326522 GN=folE2 PE=3 SV=1
MNAIADVQSSPDLRNMPINQVGIKDLRLPITLDTAEGSQNTVARLTMTVFLPADQKGTHMSRFVALMESQTEALCFNRLKILTEEMVALLDSHSGKISVSFPFFRKKAAPVSGIQSLLDYDVTLTGEIKNGAYSHTLKVLVPVTSLCPCSKEISQYGAHNQRSHVTVTITCGSEVGIEEVIDCVESQASCQLYGLLKRPDEKYVTEKAYENPKFVEDMVRDVATRLIADSRVCGFVVESENFESIHNHSAYAYISYP

SEQ ID NO: 11427 - protein, 257 aa, unidentified
  source 1..257: note = Neisseria arctica
  REGION 1..257: note = tr|A0A0J0YRC8|A0A0J0YRC8_9NEIS GTP cyclohydrolase FolE2 OS=Neisseria arctica OX=1470200 GN=folE2 PE=3 SV=1
MNAIADVQSSPDLRNMPINQVGIKDLRFPISITTAEGTQQTVGRLTMTVFLPADQKGTHMSRFVALMEEQTEPLSFTRLKALTEEMLQRLDSHSGKISVSFPFFRQKSAPISGIKSLLDYDVTLTGEIENGQYRHTLKVLVPVTSLCPCSKEISQYGAHNQRSHVTVTLSCSSEVGIEELIDCVEAQASCQLYGLLKRPDEKFVTEQAYENPKFVEDMVRDVATALSADKRICGYIVESENFESIHNHSAYAYIAYP

SEQ ID NO: 11428 - protein, 257 aa, Neisseria bacilliformis
  REGION 1..257: note = tr|F2BFB9|F2BFB9_9NEIS GTP cyclohydrolase FolE2; OS = Neisseria bacilliformis ATCC BAA-1200 OX=888742; GN = folE2 PE=3 SV=1
MSAIADVQSSKDLRNLPINQVGIKDLRFPIQTATASGIQSTVARLTMTVRLPADQKGTHMSRFVALMESRQRPLDYGELQNLTQQMLELLGAEAGRISVSFPFFRSKSAPVSGIRSLLDYDVTISGEVSGGAYAYGLKVLVPVTSLCPCSKEISQYGAHNQRSHVTVSLICTEDVPPEDIIDIVEAQASCQLYGLLKRPDEKYVTERAYENPKFVEDMVRDVAVALRSDKRIASFTVESENFESIHNHSAYACISYP

SEQ ID NO: 11429 - protein, 259 aa, Neisseria canis
  REGION 1..259: note = tr|A0A1X3CXN1|A0A1X3CXN1_9NEIS GTP cyclohydrolase FolE2 OS=Neisseria canis OX=493 GN=folE2 PE=3 SV=1
MNAIIADVQSSKDLRNTPINQVGIKDLRFPILLNTAEGVQHTIARLTMTVYLPADQKGTHMSRFVALMEQQTEALGFERLKTLTEEMAKLLDSDSGRISVSFPFFRKKTAPVSGIQSLLDYDVTLTGEVKGGAYCHSLKVLVPVTSLCPCSKEISEYGAHNQRSHVTVSLRCGGGEVGIEEVIDCVEEQASCQLYGLLKRPDEKFVTERAYENPKFVEDMVRDVAAALRSDKRITGFIVESENFESIHNHSAYACIVYP

SEQ ID NO: 11430 - protein, 298 aa, Neisseria cinerea
  REGION 1..298: note = tr|A0A2X3Z713|A0A2X3Z713_NEICI GTP cyclohydrolase FolE2 OS=Neisseria cinerea OX=483 GN=folE2 PE=3 SV=1
MQLLKASDIISHLQIDGIFPGGNAIPCTHLNNYMNIKEKQLMNTIADVQSSRDLRNLPINQVGIKDLRFPITLQTAEGIQSTVARLTMTVYLPAEQKGTHMSRFVALMEQHAEALDFAQLHRLTAEMVALLDSHSGKISVSFPFFRKKTAPVSGIQSLLDYDVCLTGEIKDGAYGHSMKVMIPVTSLCPCSKEISQYGAHNQRSHVTVSLTADAEVGIEEVIDYVETQASCQLYGLLKRPDEKYVTEKAYENPKFVEDMVRDVATALIADKRIKSFVVESENFESIHNHSAYAYIAYP

SEQ ID NO: 11431 - protein, 298 aa, Neisseria cinerea; identical to SEQ ID NO: 11430
  REGION 1..298: note = tr|D0W4T9|D0W4T9_NEICI GTP cyclohydrolase FolE2; OS = Neisseria cinerea ATCC 14685 OX=546262 GN=folE2 PE=3; SV = 1

SEQ ID NO: 11432 - protein, 257 aa, Neisseria dentiae
  REGION 1..257: note = tr|A0A1X3D5M9|A0A1X3D5M9_9NEIS GTP cyclohydrolase FolE2 OS=Neisseria dentiae OX=194197 GN=folE2 PE=3 SV=1
MNAIADVQSTRDLRNLPINQVGIKDLRFPITLNTAEGTQATVARLTMTVFLPADQKGTHMSRFVALMERQTKALGFERLKTLTEEMVSLLDSHSGKISVSFPFFRKKSAPVSGIQSLLDYDVTLTGEIKNGEYSHTLKVLVPVTSLCPCSKEISQYGAHNQRSHVTVTITCGSEVGIEEVIDCVESQASCQLYGLLKRPDEKFVTEQAYENPKFVEDMVRDVATRLIADGRICGFVVESENFESIHNHSAYAYIAYP

SEQ ID NO: 11433 - protein, 257 aa, unidentified
  source 1..257: note = Neisseria dumasiana
  REGION 1..257: note = tr|A0A1X3DLY2|A0A1X3DLY2_9NEIS GTP cyclohydrolase FolE2 OS=Neisseria dumasiana OX=1931275 GN=folE2 PE=3 SV=1
MNAIADVQSTRDLRNLPINQVGIKDLRFPITLNTAEGTQATVARLTMTVYLPADQKGTHMSRFVALMERQTEALSFERLKHLVEEMVSLLDSHSGKISVSFPFFRKKTAPISGIQSLLDYDVTLTGEIKNGEYSHTLKVLVPVTSLCPCSKEISQYGAHNQRSHVTVTLTCSSEIGIEEVIDCVESQASCQLYGLLKRPDEKYVTEQAYENPKFVEDMVRDVATRLIADGRVCGFVVESENFESIHNHSAYAYIAYP

SEQ ID NO: 11434 - protein, 257 aa, Neisseria elongata
  REGION 1..257: note = tr|D4DS02|D4DS02_NEIEG GTP cyclohydrolase FolE2; OS = Neisseria elongata subsp. glycolytica ATCC 29315; OX = 546263 GN=folE PE=3 SV=1
MNAIADVQSSKDLRNMPINQVGIKDLRFPLQITTASGTQSTVARLTMTVRLPAEQKGTHMSRFVALMEDRRRELDYGELKDLTQRMLDLLDSDAGKISIAFPFFRQKTAPVSGIRSLLDYDVTLCGEVAGGGYRHSLKVLVPVTSLCPCSKEISQYGAHNQRSHVTVSLVCRENVSVEEVIDIVENQASCQLYGLLKRPDEKYVTERAYENPKFVEDMVRDVAVALRGDDRIESFTVESENFESIHNHSAYAYIAYP

SEQ ID NO: 11435 - protein, 257 aa, Neisseria elongata
  REGION 1..257: note = tr|A0A378U2T0|A0A378U2T0_NEIEL GTP cyclohydrolase FolE2 OS=Neisseria elongata OX=495 GN=folE2 PE=3 SV=1
MNAIADVQSSKDLRNMPINQVGIKDLRFPLQITTASGTQSTVARLTMTVRLPAEQKGTHMSRFVALMEDRRRELDYGELKDLTQRMLELLDSDAGKISIAFPFFRQKTAPVSGIRSLLDYDVTLCGEVAGGGYRHSLKVLVPVTSLCPCSKEISQYGAHNQRSHVTVSLVCRENVSVEEVIDIVENQASCQLYGLLKRPDEKYVTERAYENPKFVEDMVRDVAVALRGDDRIESFTVESENFESIHNHSAYAYIAYP

SEQ ID NO: 11436 - protein, 257 aa, Neisseria flavescens
  REGION 1..257: note = tr|A0A154UAM5|A0A154UAM5_NEIFL GTP cyclohydrolase FolE2 OS=Neisseria flavescens OX=484 GN=folE2 PE=3 SV=1
MNAIADVQSSRDLRNLPINQVGIKDLRFPISLKSKEGAQSTVARLTMTVFLPADQKGTHMSRFVALMEKQTDALDFDTLHKLTADMVALLDSHSGKISVSFPFFRKKSAPVSGIQSLLDYDVTLTGEIKNGTYSHSLKVMVPVTSLCPCSKEISQYGAHNQRSHVTVSLIANSDVGIEEIIDYVEAQASCQLYGLLKRPDEKYVTEKAYENPKFVEDMVRDVATALIADKRIQSFVVESENFESIHNHSAYAYIAYP

SEQ ID NO: 11437 - protein, 257 aa, Neisseria flavescens
  REGION 1..257: note = tr|A0A154TNZ3|A0A154TNZ3_NEIFL GTP cyclohydrolase FolE2 OS=Neisseria flavescens OX=484 GN=folE2 PE=3 SV=1
MNAIADVQSSRDLRNLPINQVGIKDLRFPISLKSKEGEQSTVARLTMTVFLPADQKGTHMSRFVALMEKQTDALDFDTLHKLTADMVALLDSHSGKISVSFPFFRKKSAPVSGIQSLLDYDVTLTGEIKNGTYSHSLKVMVPVTSLCPCSKEISQYGAHNQRSHVTVSLIANADVGIEEIIDYVEAQASCQLYGLLKRPDEKYVTEKAYENPKFVEDMVRDVATVLIADKRIESFVVESENFESIHNHSAYAYIAYP

SEQ ID NO: 11438 - protein, 257 aa, Neisseria gonorrhoeae
  REGION 1..257: note = sp|Q5F9K6|GCH4_NEIG1 GTP cyclohydrolase FolE2; OS = Neisseria gonorrhoeae (strain ATCC 700825 / FA 1090); OX = 242231 GN=folE2 PE=1 SV=1
MNAIADVQSSRDLRNLPINQVGIKDLRFPITLKTAEGTQSTVARLTMTVYLPAEQKGTHMSRFVALMEQHTEVLDFAQLHRLTAEMVALLDSRAGKISVSFPFFRKKTAPVSGIRSLLDYDVSLTGEMKDGAYGHSMKVMIPVTSLCPCSKEISQYGAHNQRSHVTVSLTSDAEVGIEEVIDYVETQASCQLYGLLKRPDEKYVTEKAYENPKFVEDMVRDVATSLIADKRIKSFVVESENFESIHNHSAYAYIAYP

SEQ ID NO: 11439 - protein, 290 aa, Neisseria gonorrhoeae
  REGION 1..290: note = tr|D6H9A0|D6H9A0_NEIGO GTP cyclohydrolase FolE2; OS = Neisseria gonorrhoeae DGI2 OX=528348 GN=folE2 PE=3 SV=1
MQAGGRQRFFRRHLPAIQYTHLNNYLNIKDKQRMNAIADVQSSRDLRNLPINQVGIKDLRFPITLKTAEGTQSTVARLTMTVYLPAEQKGTHMSRFVALMEQHTEVLDFAQLHRLTAEMVALLDSRAGKISVSFPFFRKKTAPVSGIRSLLDYDVSLTGEMKDGAYGHSMKVMIPVTSLCPCSKEISQYGAHNQRSHVTVSLTSDAEVGIEEVIDYVETQASCQLYGLLKRPDEKYVTEKAYENPKFVEDMVRDVATSLIADKRIKSFVVESENFESIHNHSAYAYIAYP

SEQ ID NO: 11440 - protein, 257 aa, Neisseria iguanae
  REGION 1..257: note = tr|A0A2P7TYN4|A0A2P7TYN4_9NEIS GTP cyclohydrolase FolE2 OS=Neisseria iguanae OX=90242 GN=folE2 PE=3 SV=1
MNAIADVQSTRDLRNLPINQVGIKDLRFPITLRTAEGEQTTIARLAMTVYLPAEQKGTHMSRFVALMEKQTEALSFERLQQLTREMVELLDSHSGKINVSFPFFRKKTAPVSGIQSLLDYDVTLTGEINNSNYTYSLKVMVPVTSLCPCSKEISQYGAHNQRSHVTVSLAANTEVSIEEVIDYVESQASCQLYGLLKRPDEKFVTEHAYENPKFVEDMVRDVATSLIADTRVESFVVESENFESIHNHSAYAFIAYP

SEQ ID NO: 11441 - protein, 257 aa, Neisseria lactamica
  REGION 1..257: note = tr|E4ZE56|E4ZE56_NEIL0 GTP cyclohydrolase FolE2; OS = Neisseria lactamica (strain 020-06) OX=489653 GN=folE2; PE = 3 SV=1
MSAIADVQSSRDLRNLPINQVGIKDLRFPITLQTAEGTQSTVARLTMTVYLPAEQKGTHMSRFVALMEQHTEAWDFAQLHRLTAEMVALLDSRAGKISVSFPFFRKKTAPVSSIQSLLDYDVCLTGEIKDGAYGHSMKVMIPVTSLCPCSKEISQYGAHNQRSHVTVSLTADAEVGIEEVIDYVEAQASCQLYGLLKRPDEKYVTEKAYENPKFVEDMVRDVATSLIADKRIKSFVVESENFESIHNHSAYAYIAYP

SEQ ID NO: 11442 - protein, 298 aa, Neisseria lactamica
  REGION 1..298: note = tr|D0W6Y6|D0W6Y6_NEILA GTP cyclohydrolase FolE2; OS = Neisseria lactamica ATCC 23970 OX=546265 GN=folE2 PE=3; SV = 1
MQPLKASDIISHLQIDGIFPGGNAIPCTHLNNYMNIKEKQRMSAIADVQSSRDLRNLPINQVGIKDLRFPITMQTAEGTQSTVARLTMTVYLPAEQKGTHMSRFVALMEQHTEALDFAQLHRLTAEMVALLDSHSGKISVSFPFFRKKTAPVSGIQSLLDYDVCLTGEIKDGAYGHSMKVMIPVTSLCPCSKEISQYGAHNQRSHVTVSLTADAEVGIEEVIDYVEAQASCQLYGLLKRPDEKYVTEKAYENPKFVEDMVRDVATSLIADKRIKSFVVESENFESIHNHSAYAYIAYP

SEQ ID NO: 11443 - protein, 277 aa, Neisseria macacae
  REGION 1..277: note = tr|F9EVH1|F9EVH1_9NEIS GTP cyclohydrolase FolE2; OS = Neisseria macacae ATCC 33926 OX=997348 GN=folE2 PE=3; SV = 1
MNPFPNDTHPNNPTIKDKQRMNAIADVQSSRDLRNLPINQVGIKDLRFPITLNTAESSQSTVARLTMTVFLPADQKGTHMSRFVALMEQQTEALDFDRLHKLTAEMVALLNSHSGKISVSFPFFRKKSAPVSGIQSLLDYDVTLTGEIKNGAYSHNLKVMVPVTSLCPCSKEISQYGAHNQRSHVTVSLTANAEVGIEEIIDCVEAQASCQLYGLLKRPDEKYVTEKAYENPKFVEDMVRDVATALIADGRIESFIVESENFESIHNHSAYAYIAYP

SEQ ID NO: 11444 - protein, 298 aa, Neisseria meningitidis
  REGION 1..298: note = sp|A1KT61|GCH4_NEIMF GTP cyclohydrolase FolE2; OS = Neisseria meningitidis serogroup C / serotype 2a (strain ATCC 700532 / DSM 15464 / FAM18) OX=272831; GN = folE2 PE=3 SV =3
MQLLKASDIISHLQIDGIFPGGNAIPCTHLNNYMNIKEKQLMNTIADVQSSRDLRNLPINQVGIKDLRFPITLQTAEGIQSTIARLTMTVYLPAEQKGTHMSRFVALMEQHAEALDFAQLRKLTTEMVALLDSRAGKISVSFPFFRKKTAPVSGIRSLLDYDVCLTGEIKDGAYGHSMKVMIPVTSLCPCSKEISQYGAHNQRSHVTVSLTADAEVGIEEVIDYVEAQASCQLYGLLKRPDEKYVTEKAYENPKFVEDMVRDVATSLIADKRIKSFVVESENFESIHNHSAYAYIAYP

SEQ ID NO: 11445 - protein, 257 aa, Neisseria meningitidis
  REGION 1..257: note = tr|A0A425AQA0|A0A425AQA0_NEIME GTP cyclohydrolase FolE2 OS=Neisseria meningitidis OX=487 GN=folE2 PE=3 SV=1
MNTIADVQSSRDLRNLPINQVGIKDLRFPITLQTAEGIQSTIARLTMTVYLPAEQKGTHMSRFVALMEQHAEALDFAQLHRLTTEMVALLDSRAGKISVSFPFFRKKTAPVSGIRSLLDYDVCLTGEIKDGAYGHSMKVMIPVTSLCPCSKEISQYGAHNQRSHVTVSLTADAEVGIEEVIDYVEAQASCQLYGLLKRPDEKYVTEKAYENPKFVEDMVRDVATSLIADKRIKSFVVESENFESIHNHSAYAYIAYP

SEQ ID NO: 11446 - protein, 277 aa, Neisseria mucosa
  REGION 1..277: note = tr|A0A2R4AUM1|A0A2R4AUM1_NEIMU GTP cyclohydrolase FolE2 OS=Neisseria mucosa OX=488 GN=folE2 PE=3 SV=1
MNPFPNDTHPNNPTIKDKQRMNAIADVQSSRDLRNLPINQVGIKDLRFPITLNTAEGSQSTVARLTMTVFLPADQKGTHMSRFVALMEQQTEALDFDRLHKLTAEMVALLNSHSGKISVSFPFFRKKSAPVSGIQSLLDYDVTLTGEIKNGAYSHNLKVMVPVTSLCPCSKEISQYGAHNQRSHVTISLTANAEVGIEEIIDCVEAQASCQLYGLLKRPDEKYVTEKAYENPKFVEDMVRDVATALIADGRIESFIVESENFESIHNHSAYAYIAYP

SEQ ID NO: 11447 - protein, 277 aa, Neisseria mucosa
  REGION 1..277: note = tr|D2ZVN4|D2ZVN4_NEIMU GTP cyclohydrolase FolE2; OS = Neisseria mucosa ATCC 25996 OX=546266 GN=folE2 PE=3 SV=1
MNPFPNDTHPSNPTIKDKQRMNAIADVQSSRDLRNLPINQVGIKDLRFPITLNTAEGSQSTVARLTMTVFLPADQKGTHMSRFVALMEQQTEALDFDRLHKLTAEMVALLDSHSGKISVSFPFFRKKSAPISGIQSLLDYDVTLTGEIKNGTYSHNLKVMVPVTSLCPCSKEISQYGAHNQRSHVTVSLTANAEVGIEEIIDCVEAQASCQLYGLLKRPDEKYVTEKAYENPKFVEDMVRDVATALIADGRIESFIVESENFESIHNHSAYAYIAYP

SEQ ID NO: 11448 - protein, 257 aa, Neisseria perflava
  REGION 1..257: note = tr|A0A2I1QYH8|A0A2I1QYH8_NEIPE GTP cyclohydrolase FolE2 OS=Neisseria perflava OX=33053 GN=folE2 PE=3 SV=1
MNAIADVQSSRDLRNLPINQVGIKDLRFPISLKSKEGEQSTVARLTMTVFLPADQKGTHMSRFVALMEKQTDALDFDTLHKLTADMVALLDSHSGKISVSFPFFRKKSAPVSDIQSLLDYDVTLTGEIKNGTYSHNLKVMVPVTSLCPCSKEISQYGAHNQRSHVTVSLIANADVAIEEIIDYVEAQASCQLYGLLKRPDEKYVTEKAYENPKFVEDMVRDVATALIADKRIESFVVESENFESIHNHSAYAYIAYP

SEQ ID NO: 11449 - protein, 298 aa, Neisseria polysaccharea
  REGION 1..298: note = tr|E2PEL1|E2PEL1_NEIPO GTP cyclohydrolase FolE2; OS = Neisseria polysaccharea ATCC 43768 OX=546267 GN=folE2; PE = 3 SV=1
MQPLKASDIISHLQIDGIFPGGNAIPCTHLNNYMNIKEKQRMSAIADVQSSRDLRNLPINQVGIKDLRFPITLKTAEGTQSTVARLTMTVYLPAEQKGTHMSRFVALMEQHTEALDFAQLHRLTAEMVALLDSHSGKISVSFPFFRKKTAPVSGIQSLLDYDVCLTGEIKDGAYGHSMKVMIPVTSLCPCSKEISQYGAHNQRSHVTVSLTADAEVGIEEVIDYVEAQASCQLYGLLKRPDEKYVTEKAYENPKFVEDMVRDVATSLIADKRIKSFVVESENFESIHNHSAYAYIAYP

SEQ ID NO: 11450 - protein, 260 aa, Neisseria shayeganii
  REGION 1..260: note = tr|G4CGS8|G4CGS8_9NEIS GTP cyclohydrolase FolE2; OS = Neisseria shayeganii 871 OX=1032488 GN=folE2 PE=3 SV=1
MNAIADVQSSPDSRNMPINQVGIKDLRLPLRIRSQDGEQNTVARLTMTVALPASQKGTHMSRFVALMEEQAGVLDFVRLRELTADMLALLDAQAGRISITFPFFRQKSAPVSGITSLLDYDVTLTGESENGIYTHTLKVLVPVTSLCPCSKEISQYGAHNQRSHVTVTLRCREQAVEAEEVIDLVENQASCQLYGLLKRPDEKYVTERAYENPKFVEDMVRDIAVALKNDPRILSFTVESENFESIHNHSAYALIQSDTL

SEQ ID NO: 11451 - protein, 277 aa, Neisseria sicca
  REGION 1..277: note = tr|C6M7C9|C6M7C9_NEISI GTP cyclohydrolase FolE2; OS = Neisseria sicca ATCC 29256 OX=547045 GN=folE2 PE=3 SV=1
MNPFPNDTHPNNPTIKDKQRMNAIADVQSSRDLRNLPINQVGIKDLRFPITLNTAEGSQSTVARLTMTVFLPADQKGTHMSRFVALMEQQTEALDFDRLHKLTAEMVALLNSHSGKISVSFPFFRKKSAPVSGIQSLLDYDVTLTGEIKNGAYSHNLKVMVPVTSLCPCSKEISQYGAHNQRSHVTVSLTANAEVGIEEIIDCVEAQASCQLYGLLKRPDEKYVTEKAYENPKFVEDMVRDVATALIADGRIESFIVESENFESIHNHSAYAYIAYP

SEQ ID NO: 11452 - protein, 277 aa, Neisseria sicca
  REGION 1..277: note = tr|I2NXD8|I2NXD8_NEISI GTP cyclohydrolase FolE2; OS = Neisseria sicca VK64 OX=1095748 GN=folE2 PE=3 SV=1
MNPFPNDTHPNNPTIKDKQRMNAIADVQSSRDLRNLPINQVGIKDLRFPITLNTAEGSQSTVARLTMTVFLPADQKGTHMSRFVALMEQQTEALDFDRLHKLTAEMVALLDSHSGKISVSFPFFRKKSAPVSGIQSLLDYDVTLTGEIKNGAYSHNLKVMVPVTSLCPCSKEISQYGAHNQRSHVTVSLTANAEVGIEEIIDCVEAQASCQLYGLLKRPDEKYVTEKAYENPKFVEDMVRDVATALIADGRIESFIVESENFESIHNHSAYAYIAYP

SEQ ID NO: 11453 - protein, 257 aa, Neisseria sp.; identical to SEQ ID NO: 11435
  REGION 1..257: note = tr|A0A1F1SKZ6|A0A1F1SKZ6_9NEIS GTP cyclohydrolase FolE2 OS=Neisseria sp. HMSC31F04 OX=1581075 GN=folE2 PE=3; SV = 1

SEQ ID NO: 11454 - protein, 257 aa, Neisseria sp.
  REGION 1..257: note = tr|A0A2H9WZP4|A0A2H9WZP4_9NEIS GTP cyclohydrolase FolE2 OS=Neisseria sp. N95_16 OX=2024408 GN=folE2 PE=3 SV=1
MNAIADVQSTRDLRNLPINQVGIKDLRFPITLRTAEGEQATVARLTMTVYLPAEQKGTHMSRFVALMEQQTEALSFERLQQLTREMVELLDSHSGKISVSFPFFRKKTAPVSGIQSLLDYDVTLTGEIKNGAYSHSLKVMVPVTSLCPCSKEISQYGAHNQRSHVTVSLVANAEVGIEEVIDCVEAQASCQLYGLLKRPDEKFVTEQAYENPKFVEDMVRDVATSLIADARVESFVVESENFESIHNHSAYAVIAYP

SEQ ID NO: 11455 - protein, 257 aa, Neisseria subflava
  REGION 1..257: note = tr|A0A4D7WCV3|A0A4D7WCV3_NEISU GTP cyclohydrolase FolE2 OS=Neisseria subflava OX=28449 GN=folE2 PE=3 SV=1
MNAIADVQSSRDLRNLPINQVGIKDLRFPISLKSKEGEQSTVARLTMTVFLPADQKGTHMSRFVALMEKQTDALDFDTLHKLTADMVALLDSHSGKISVSFPFFRKKSAPVSGIQSLLDYDVTLTGEIKNGTYSHSLKVMVPVTSLCPCSKEISQYGAHNQRSHVTVSLIANADVGIEEIIDYVEAQASCQLYGLLKRPDEKYVTEKAYENPKFVEDMVRDVATALIADKRIESFVVESENFESIHNHSAYAYIAYP

SEQ ID NO: 11456 - protein, 257 aa, Neisseria subflava
  REGION 1..257: note = tr|D3A4U6|D3A4U6_NEISU GTP cyclohydrolase FolE2; OS = Neisseria subflava NJ9703 OX=546268 GN=folE2 PE=3 SV=1
MNAIADVQSSRDLRNLPINQVGIKDLRFPISLKSKEGEQSTVARLTMTVFLPADQKGTHMSRFVALMEKQTDALDFDTLHKLTADMVALLDSHSGKISVTFPFFRKKSAPVSGIQSLLDYDVTLTGEIKNGTYSHSLKVMVPVTSLCPCSKEISQYGAHNQRSHVTVSLIANADVGIEEIIDYVEAQASCQLYGLLKRPDEKYVTEKAYENPKFVEDMVRDVATVLIADKRIESFVVESENFESIHNHSAYAYIAYP

SEQ ID NO: 11457 - protein, 259 aa, Neisseria wadsworthii
  REGION 1..259: note = tr|G4CNL9|G4CNL9_9NEIS GTP cyclohydrolase FolE2; OS = Neisseria wadsworthii 9715 OX=1030841 GN=folE2 PE=3 SV=1
MNAIIADVQSSKDLRNTPINQVGIKDLRFPILLNTAEGTQHTIARLTMTVYLPADQKGTHMSRFVALMEQQTEALGFQRLKTLTEEMVKLLDSDSGRISVSFPFFRKKTAPVSGIQSLLDYDVTLTGEVKGGAYCHSLKVLVPVTSLCPCSKEISEYGAHNQRSHVTVSLECGGGEVGIEEVIDCVEEQASCQLYGLLKRPDEKFVTERAYENPKFVEDMVRDVAAALRSDKRITGFTVESENFESIHNHSAYACIMYP

SEQ ID NO: 11458 - protein, 258 aa, Neisseria weaveri
  REGION 1..258: note = tr|A0A3S5F9U1|A0A3S5F9U1_9NEIS GTP cyclohydrolase FolE2 OS=Neisseria weaveri OX=28091 GN=folE2 PE=3 SV=1
MNAAIADVQSTPDLRNMPINQVGIKDLRFPITLNTEEGTQATVARLTMTVFLPADQKGTHMSRFVALMEKQTEALSFSRLKTLTEEMTALLDSHSGKISVSFPFFRKKTAPISGIQSLLDYDVTLTGEIKNGAYSHTLKVLVPVTSLCPCSKEISQYGAHNQRSHVTVTLTCSEEVGIEEVIDCVEAQASCQLYGLLKRPDEKFVTEKAYENPKFVEDMVRDVATALRAESRICGFVVESENFESIHNHSAYAYIAYP

SEQ ID NO: 11459 - protein, 257 aa, Neisseria zoodegmatis
  REGION 1..257: note = tr|A0A378WI75|A0A378WI75_9NEIS GTP cyclohydrolase FolE2 OS=Neisseria zoodegmatis OX=326523 GN=folE2 PE=3 SV=1
MNAIADVQSTRDLRNLPINQVGIKDLRFPITLNTAEGTQATVARLTMTVYLPADQKGTHMSRFVALMERQTEALSFERLKQLVEEMVSLLDSPSGKISVSFPFFRKKTAPISGIQSLLDYDVTLTGEVKDSEYSHTLKVLVPVTSLCPCSKEISQYGAHNQRSHVTVTLTCSSEVGIEEVIDCVESQASCQLYGLLKRPDEKYVTEQAYENPKFVEDMVRDVATRLIADGRVCGFVVESENFESIHNHSAYAYIAYP

SEQ ID NO: 11460 - protein, 257 aa, Neisseria zoodegmatis
  REGION 1..257: note = tr|A0A1X3CSN8|A0A1X3CSN8_9NEIS GTP cyclohydrolase FolE2 OS=Neisseria zoodegmatis OX=326523 GN=folE2 PE=3 SV=1
MNAIADVQSTRDLRNLPINQVGIKDLRFPITLNTAEGTQATVARLTMTVYLPADQKGTHMSRFVALMERQTEALSFGRLKQLVEEMVSLLDSHSGKISVSFPFFRKKTAPISGIQSLLDYDVTLTGEVKDGEYSHTLKVLVPVTSLCPCSKEISQYGAHNQRSHVTVTLTCSSEVGIEEVIDCVESQASCQLYGLLKRPDEKYVTEQAYENPKFVEDMVRDVATRLIADGRVCGFVVESENFESIHNHSAYAYIAYP

SEQ ID NO: 11461 - protein, 225 aa, unidentified
  source 1..225: note = Neisseriaceae bacterium
  REGION 1..225: note = tr|A0A2I7N715|A0A2I7N715_9NEIS GTP cyclohydrolase 1; OS = Neisseriaceae bacterium DSM 100970 OX=2052837; GN = CUN60_07950 PE=3 SV=1
MKNTCYQSDYALGLEIQKILLDAGIENPVNTDKIRVWNDPAHMEQLTGKLAMFFDELGIYRDSNDCNHTANRLIDYWCQQLFYGLDYNRFPEVNPMSNEFAYHNPLIAEDIQFTSTCEHHLVPIHGVAVIAYKPDKIVVGLNKLNAIVDFFTHRPQLQERLTRQIFITLKYILQTEDIAVLIRARHDCICSNGITDFTSFHSSFELGGIFSSDTSFKQHLLDKLK

SEQ ID NO: 11462 - protein, 266 aa, unidentified
  source 1..266: note = Neisseriaceae bacterium
  REGION 1..266: note = tr|A0A3S0DEF4|A0A3S0DEF4_9NEIS GTP cyclohydrolase FolE2 OS=Neisseriaceae bacterium OX=2014784 GN=folE2 PE=3; SV = 1
MNAPYDLQLPDVQSQQLEHGLAIDEVGVKDVRYPIRIRTANGEVQHSIAFFDMYVSLPPSDKGTHMSRFIEMLETFDDSFSLENFQQWLARMVQRLEAEQGMVSASFPYFISKQAPVSGVSSLMDYEVKLVGQFHHLRGHQLQINVQVPVTSLCPCSKQISAYGAHNQRSHISIRANARTGLNIESLIQIAEQSASCELWGLLKRPDEKFVTERAYENPKFVEDLVRDIAHRLMDDPRVGSFEVSSENFESIHNHSAFARIRHAKP

SEQ ID NO: 11463 - protein, 230 aa, unidentified
  source 1..230: note = Neisseriales bacterium
  REGION 1..230: note = tr|A0A5C8B3P6|A0A5C8B3P6_9NEIS GTP cyclohydrolase 1; OS = Neisseriales bacterium OX=2053582 GN=E6Q33_05145 PE=3; SV = 1
MKNNQYQTNYELGKEVQKRLIEFGIENPVNHQLIKQWSNEEHLDSLAKKLIPFLENLGIYSNDEDSSHTANRLVDYWCNQLFYGLDYNYFPQINPMPNEFTYHNPLIAENIKFTSTCEHHLVPIHGVAIIAYKPDSILVGLNKLNSVLDFFAHRPQLQERLVKQIFISLQYLLKTENIAILIKARHDCICSNGVCDYSSSHSSFEFGGVFDSDLSFKQHLLNKLDRIEAF

SEQ ID NO: 11464 - protein, 218 aa, unidentified
  source 1..218: note = Neisseriales bacterium
  REGION 1..218: note = tr|A0A5C8AXN8|A0A5C8AXN8_9NEIS GTP cyclohydrolase 1; OS = Neisseriales bacterium OX=2053582 GN=folE PE=3 SV=1
MKSYEKDPTLGSKVAQHLKTLGIDNPVNGNIDNNLVQQSIATLLSGLGIPLDDESIAKTPERVSRFFINELFYGLNYANFPKMTFNHNKYGYSEPVIAKNISFKSTCEHHLVTISGEAFVAYIPGNQVVGLSKLNRVVDFFARRPQVQERATLQIFRALQFLLETKDVAVLIKATHHCITMRGVSDHNVENITYQFGGQFSNSEMKRNFLELIKDNQA

SEQ ID NO: 11465 - protein, 218 aa, Neoasaia chiangmaiensis
  REGION 1..218: note = tr|A0A511TJ62|A0A511TJ62_9PROT GTP cyclohydrolase 1; OS = Neoasaia chiangmaiensis OX=320497 GN=folE PE=3 SV=1
MSKPTADLVTLDAARHKGAGGERPIAPIERPANAHERIAGAVREILLALGEDPQREGLLDTPQRVARMYLDVLGGLHEDPRDHLHTQFVADHHEGTVIVRDIGFHSMCEHHLLPFFGRAHVAYLPDGGRLTGLSKLARTVNVLARRPQLQERLTDQIAAAITDVLDPKAVMVMVEAEHMCMAMRGIRSVGSRTVTTVARGVWQRDVAARAEILSLLKG

SEQ ID NO: 11466 - protein, 194 aa, Neoasaia chiangmaiensis
  REGION 1..194: note = tr|A0A1U9KUV6|A0A1U9KUV6_9PROT GTP cyclohydrolase 1; OS = Neoasaia chiangmaiensis OX=320497 GN=folE PE=3 SV=1
MAPIERPANAHERIAGAVREILLALGEDPQREGLLDTPQRVARMYLDVLGGLHEDPRDHLHTQFVADHHEGTVIVRDIGFHSMCEHHLLPFFGRAHVAYLPDGGRLTGLSKLARTVNVLARRPQLQERLTDQIAAAITDVLDPKAVMVMVEAEHMCMAMRGIRSVGSRTVTTVARGVWQRDVAARAEILSLLKG

SEQ ID NO: 11467 - protein, 234 aa, Neochlamydia sp.
  REGION 1..234: note = tr|A0A0C1K275|A0A0C1K275_9BACT GTP cyclohydrolase 1; OS = Neochlamydia sp. TUME1 OX=1478174 GN=folE PE=3 SV=1
MAKKAPKKQLSLRASAPLHIRTCYPSPILESIDDKTDEEKIKLIAEKYTEILQILGLDLSDDSLQDTPQRIARMYVKEIFSGLKDDNFPEVSFFENKYKPSKSENANIILVKVNFTSFCEHHFVPMRGYAYVAYIPHKKLIGLSKIPRIVRFFAKRPQVQERLAAQIVDSLAHLLETENVAISIIAEHYCVIARGIENEHSHTVTNILRGNFQNNEVVRREFFESIRIYNNTPV

SEQ ID NO: 11468 - protein, 234 aa, Neochlamydia sp.
  REGION 1..234: note = tr|A0A3T1CDI9|A0A3T1CDI9_9BACT GTP cyclohydrolase 1; OS = Neochlamydia sp. S13 OX=1353976 GN=folE PE=3 SV=1
MAKKAPKKQLSLRASAPLHIRTCYPSPILESVDDKTDEEKIKLIAEKYTEILQILGLDLSDDSLQDTPQRIARMYVKEIFSGLKDDNFPEVSFFENKYEPSKSENANIILVKVNFTSFCEHHFVPMRGYAYVAYIPHKKLIGLSKIPRIVRFFAKRPQVQERLAAQIVDSLAHLLETENVAISIIAEHYCVIARGIENEHSHTVTNILRGNFQNNEVVRREFFESIRIYNNTPV

SEQ ID NO: 11469 - protein, 213 aa, Neokomagataea sp.
  REGION 1..213: note = tr|A0A506UKI4|A0A506UKI4_9PROT GTP cyclohydrolase 1; OS = Neokomagataea sp. Jb2 OX=2558904 GN=folE PE=3 SV=1
MNDSSTPPASSDHATETRPDGARLQPAKARARLEDSIRNLLEAVGEDPDREGLRETPERVARLYLDLFSGLYEDPRRHLEKQFSTDGHSGPVIVKDIPFQSTCEHHLLPVRGKAAVAYLPDGGRLTGLSKLARLVEGYARRPQLQERLTDQIVAALVEVLRPRAVLVMLEAEHMCMTLRGVRAPGSLTVTLGAHGLWAEDLAARGEILGLMKS

SEQ ID NO: 11470 - protein, 212 aa, Neokomagataea tanensis
  REGION 1..212: note = tr|A0A4Y6V8Z4|A0A4Y6V8Z4_9PROT GTP cyclohydrolase 1; OS = Neokomagataea tanensis OX=661191 GN=folE PE=3 SV=1
MTDPKPVDSLSVQEDLRPLDALCCPEDAKSRIAGAVRTILDALGEDTSREGLRDTPRRVAEMYLEVFGGLYEDPREHLKTQFSADRHKGAVIVKDIRFHSMCEHHLLPVVGRAHVAYLPDGGRLTGLSKLARVVEGFARRPQLQERLTDQIAQGLEDILRPAAVLVVLEAEHMCMSMRGVRAPGSSTVTTVARGVWADDHAARQEILSLLRG

SEQ ID NO: 11471 - protein, 195 aa, unidentified
  source 1..195: note = Neomicrococcus aestuarii
  REGION 1..195: note = tr|A0A1L2ZRL2|A0A1L2ZRL2_9MICC GTP cyclohydrolase 1; OS = Neomicrococcus aestuarii OX=556325 GN=folE PE=3 SV=1
MRGQYIAPQIDQERIAKAVREILEAIGEDPDRDGLQETPKRVAKAYAEIFAGLHMDPKEILSKSFDIDHEEMVLVKDIPFYSTCEHHLVPFHGRAHVGYIPGNDGRVTGLSKLARLVDMYARRPQVQERLTTQIVEAIESLLEPRGAIVVVECEHLCMSMRGVRKPGAMTVTSAVRGQLRQPATRAEAMSLILGK

SEQ ID NO: 11472 - protein, 204 aa, unidentified
  source 1..204: note = Neorhizobium alkalisoli
  REGION 1..204: note = tr|A0A561Q7K7|A0A561Q7K7_9RHIZ GTP cyclohydrolase 1; OS = Neorhizobium alkalisoli OX=528178 GN=folE PE=3 SV=1
MDAIVKNFPASSQKQPQPTQQEVEEAVRVLLRWTGDDPEREGLLDTPKRVANAYRELFGGYAETTEEILGRTFEEVSGYDDIVLVRDIPFFSHCEHHMLPIIGKAHVAYLPQGRVLGLSKIARVVEVFGRRLQTQENLTAQIASAIDETLKPRGVAVMIEARHMCMEMRGVQKQGSHTLTTTFTGEFKANAAEQARFFTLARNP

SEQ ID NO: 11473 - protein, 204 aa, unidentified
  source 1..204: note = Neorhizobium galegae
  REGION 1..204: note = tr|A0A068SP86|A0A068SP86_RHIGA GTP cyclohydrolase 1; OS = Neorhizobium galegae bv. orientalis str. HAMBI 540; OX = 1028800 GN=folE PE=3 SV=1
MDAIVKNFPASKEKQVRPSQQEAEEAVRVLLRWAGDDPAREGLLDTPKRVAASYSELFSGYEQSPEDVLGRTFEEVSGYDDIVLVRDIPFFSHCEHHMLPIIGKAHVAYLPNGRVLGLSKIARVVEIFGRRLQTQENMTAQIANAIEETLKPRGVAVMIEAEHLCMEMRGVQKQGSHTMTTTFTGEFKANAAEQARFFTLARNR

SEQ ID NO: 11474 - protein, 204 aa, unidentified
  source 1..204: note = Neorhizobium galegae
  REGION 1..204: note = tr|A0A0T7FJS7|A0A0T7FJS7_RHIGA GTP cyclohydrolase 1; OS = Neorhizobium galegae bv. officinalis OX=323656 GN=folE; PE = 3 SV=1
MDAIVKNFPASKEKQVRPSQQEAEEAVRVLLRWAGDDPAREGLLDTPKRVAASYRELFAGYEQSPEDVLGRTFEEVSGYDDIVLVRDIPFFSHCEHHMLPIIGKAHVAYLPNGRVLGLSKIARVVEIFGRRLQTQENLTAQIANAIDETLKPRGVAIMIEAEHLCMEMRGVQKQGSHTMTTTFTGEFKANAAEQARFFTLARNR

SEQ ID NO: 11475 - protein, 208 aa, unidentified
  source 1..208: note = Neorhizobium sp.
  REGION 1..208: note = tr|A0A386DX98|A0A386DX98_9RHIZ GTP cyclohydrolase 1; OS = Neorhizobium sp. NCHU2750 OX=1825976 GN=folE PE=3 SV=1
MDAIVKNFPASSQEQGQKSARPSQQEAEEAVRVLLRWAGDDPAREGLLDTPSRVAKAYGELFAGYDQSPEDVLGRTFEEMSGFDDIVLVREIPFFSHCEHHMLPIKGMATVAYLPNGPVLGLSKIARVVEIFGRRLQTQENLTAQIANAIQNTLKPRGVAVLIEAEHMCMEMRGVQKQGSRTLTTTFTGEFKTNATEQARFFTLARNR

SEQ ID NO: 11476 - protein, 204 aa, unidentified
  source 1..204: note = Neorhizobium sp.
  REGION 1..204: note = tr|A0A4R3WXB6|A0A4R3WXB6_9RHIZ GTP cyclohydrolase 1; OS = Neorhizobium sp. S3-V5DH OX=2485166 GN=folE PE=3 SV=1
MDAIVKNFPASKEKLVRPSQQEAEEAVRVLLRWAGDDPAREGLIDTPKRVAAAYRELFGGYEQSAEEVLGRTFEEVSGYDDIVLVRDIPFFSHCEHHMLPIKGKAHVGYLPNGRVLGLSKIARVVEIFGRRLQTQENLTAQIAHAIEETLKPRGVAVMIEAEHMCMEMRGVQKQGSQTITTTFTGEIKTNAAEQARFFTFVRNR

SEQ ID NO: 11477 - protein, 180 aa, Neorickettsia helminthoeca
  REGION 1..180: note = tr|X5H4N3|X5H4N3_9RICK GTP cyclohydrolase 1; OS = Neorickettsia helminthoeca str. Oregon OX=1286528; GN = NHE_0568 PE=3 SV=1
MRKLSEDDIRGFIAAIGDDPDRRELKDTPRLLLEILTKCFAGYAHNSLDSLITPMESCCTESLVVLKDIPFFSFCEHHILPISGNISVGYVPDAFITSIGSIKRLVHACTRRLQMQERICTQIATALDRVLSPKGVIVYATARHMCMMHNDGIFDASAKTGVFLDNQRTEIQEFFCVIKK

SEQ ID NO: 11478 - protein, 180 aa, Neorickettsia sennetsu
  REGION 1..180: note = tr|Q2GDH9|Q2GDH9_NEOSM GTP cyclohydrolase I; OS = Neorickettsia sennetsu (strain ATCC VR-367 / Miyayama); OX = 222891 GN=folE PE=4 SV=1
MQKLSEGDIQDFFGVGVGETDRLGARGASHSFLKMFANYFSGYACSDFSSLVAKMENPDGGESLLVLKRTPFLSFCEHHVLPISGYISIGYIPDKSITSLGSLGRLVSACTKRLQLQERICAQIALAIEESLSPKGVIVYASAKHACVAHNTSVFESVAKRGAFAANTKGEVQEFFSILK

SEQ ID NO: 11479 - protein, 236 aa, unidentified
  source 1..236: note = Neosynechococcus sphagnicola
  REGION 1..236: note = tr|A0A098TK13|A0A098TK13_9CYAN GTP cyclohydrolase 1; OS = Neosynechococcus sphagnicola sy1 OX=1497020 GN=folE; PE = 3 SV=1
MTIAPTNGSNRPDPSLVQNAIPTTPRPDRNTLNGGEPNLQPPCDEHENQEQMMAAVRNILLGVGEDPDREGLLKTPKRVAEAMQFLTSGYKQSLEELVNNAIFDEGHNEMVLVRDINAFSLCEHHMLPFMGKVHVAYIPNQKVVGLSKLARIVEMYARRLQVQERLTRQVAEAIQEVLEPKGVAVVMEAVHMCMVMRGVQKPGSWTVTSAMVGVFQDDQKTREEFLNLIRHQASFF

SEQ ID NO: 11480 - protein, 311 aa, Neptuniibacter caesariensis
  REGION 1..311: note = tr|A0A2G6JAN2|A0A2G6JAN2_NEPCE GTP cyclohydrolase FolE2 OS=Neptuniibacter caesariensis OX=207954 GN=folE2; PE = 3 SV=1
MTNLPDVTSNQNPEIHGSLDWVGMNGITVPLQFDDYKLGVNNIEARVNTYVNLTNPKVKGIHMSRLYLALSNFFENQTLNVPALTDFLSHLLDSHHDISTQVFLNFEFDFLIKRDALKSDNSGWKNYSTTLRATLKDGDVIIELATRVPYSSTCPCSAALSRQLLQQAFTADFADRESFDLEDVEKWLLSEKGSFATPHSQRSQATAWVKLDKNMGAFPLTDLIDLVEGALKTPVQTAVKRADEQEFARLNGHNLMFCEDAARRVKQALQTQTQYTDFWLKVEHFESLHAHDAVALASKGIEGGYSPADYS

SEQ ID NO: 11481 - protein, 311 aa, Neptuniibacter sp.
  REGION 1..311: note = tr|A0A136H9H2|A0A136H9H2_9GAMM GTP cyclohydrolase FolE2 OS=Neptuniibacter sp. Phe_28 OX=1795871 GN=folE2; PE = 3 SV=1
MTNLPDVTSNQNPEIHGSLDWVGMNGITVPLQFEDSKLGINNIEARVNTYVNLVNPKVKGIHMSRLYLALSNFFENQTLNVPALTEFLSHLLDSHHDISTQVFLNFEFDFLIKRDALKSDNSGWKNYSTTLRATLKDNEVVLELATRVPYSSTCPCSAALSRQLLQQAFSTDFADKGSLNIEDVEKWLLSEKGSFATPHSQRSQATAWIKLNKEMGAFPLTDLIDLIEDALKTPVQTAVKRADEQEFARLNGHNLMFCEDAARRLKQALNAQTQYADFWLKVEHYESLHAHDAVALASKGVEGGYSPANYT

SEQ ID NO: 11482 - protein, 212 aa, Neptuniibacter sp.
  REGION 1..212: note = tr|A0A136H4H8|A0A136H4H8_9GAMM GTP cyclohydrolase 1; OS = Neptuniibacter sp. Phe_28 OX=1795871 GN=folE PE=3 SV=1
MISAEASAVRDQLIEKGLETPTIDNGMNQEQRYEKIKGLMSDVVSTLGMNLEDDSLLETPHRIAKMYVYEIFSGLDYENFPKITMIENKMDLEEMVKVRNISVLSSCEHHFVTIDGTAKVAYIPNEKIIGLSKINRLVRFFSQRPQVQERLTKQILIALQTLLDTDNVAVSINATHYCVKSRGVMDVNSETETTALGGIFKSNPRTRAEFLT

SEQ ID NO: 11483 - protein, 212 aa, Neptunomonas antarctica
  REGION 1..212: note = tr|A0A1N7IWK3|A0A1N7IWK3_9GAMM GTP cyclohydrolase 1; OS = Neptunomonas antarctica OX=619304 GN=folE PE=3 SV=1
MISNEARAVRNQLIEKGLETPLTENNLNNEQKYERIKGLMAEVLATLGLDLNDDSLTETPHRIAKMYTYEIFSGLDYANFPAMSLIENKMQVEEMIKVRDISLISSCEHHFVTIDGTAKVAYIPGKKIIGLSKINRLVRFFSQRPQVQERLTQQILIALQTLLETDNVAITIQATHYCVKSRGVMDVNSSTETTALGGIFKTNDRTRAEFLL

SEQ ID NO: 11484 - protein, 179 aa, Neptunomonas antarctica
  REGION 1..179: note = tr|A0A1N7K9H0|A0A1N7K9H0_9GAMM GTP cyclohydrolase 1; OS = Neptunomonas antarctica OX=619304 GN=folE PE=3 SV=1
MEKAYATIIEQVGEDLSREGLVDTPARAAKAMAYLTRGYKQNLEEVVNNALFPSDNSEMVLVKNIELYSLCEHHLLPFIGKAHVAYIPDGKVIGLSKIARIVDMYARRLQIQENMTKEIAEAIMSVTGAKGVGVVIEAKHMCMMMRGVEKQNGSMTTSMMLGTFRSKPETRSEFLSLLS

SEQ ID NO: 11485 - protein, 180 aa, unidentified
  source 1..180: note = Neptunomonas qingdaonensis
  REGION 1..180: note = tr|A0A1I2TCZ0|A0A1I2TCZ0_9GAMM GTP cyclohydrolase 1; OS = Neptunomonas qingdaonensis OX=1045558 GN=folE PE=3 SV=1
MMEKAYATIIEQVGEDLNREGLLDTPARAAKAMAYLTRGYHQNLEEVVNNALFPSDNSEMVLVKDIELYSLCEHHLLPFIGKAHVAYIPDGKVIGLSKIARIVDMYARRLQIQENMTKEIAEAIMSMTGAKGVGVVIEAKHMCMMMRGVEKQNGSMKTSMMLGTFRSKPETRAEFLSLLC

SEQ ID NO: 11486 - protein, 212 aa, unidentified
  source 1..212: note = Neptunomonas qingdaonensis
  REGION 1..212: note = tr|A0A1I2PUB1|A0A1I2PUB1_9GAMM GTP cyclohydrolase 1; OS = Neptunomonas qingdaonensis OX=1045558 GN=folE PE=3 SV=1
MISPEATAVRDQLIEKGLETPTIDTNMSQQQRYERIKGLMTEVLSTLGLNLEDDSLQETPHRIAKMYVYEVFSGLDYENFPDIAMIDNKMGVEEMIKVRDISVLSSCEHHFVTIDGSAKVAYIPNKKIIGLSKINRLVRFFSQRPQVQERLTQQILIALQILLETDNVAISINATHYCVKSRGVMDVNSQTETTALGGIFKSNERTRAEFLN

SEQ ID NO: 11487 - protein, 318 aa, Neptunomonas sp.
  REGION 1..318: note = tr|A0A437Q5D3|A0A437Q5D3_9GAMM GTP cyclohydrolase FolE2 OS=Neptunomonas sp. HPM-16 OX=1815562 GN=folE2 PE=3; SV = 1
MTVKRSNALPDITNTPAPDHSPLDWVGMTEVAVPFSLQDEAHSTTECEALASLFVNICRSDIKGIHMSRLYLLLAEFAEQNAFSPQAMQQFLHDKLATHKEISDQSSLTLAFDYLHKRPALLSQYQGWKAYPAVIKGTLEQETACHEVQLTIPYSSTCPCSASLSRQLLEEAFRHDFADQTQISADQIAQWLRSERGSVATPHSQRSYAYLVLKLAPNVSSHYPLLELIDLVEQSLGTPVQTAVKREDEQAFARLNGANLMFCEDAARRIKRALEQHSAISDFWVKVEHQESLHAHNAVAIATKGCAGGYRSVTTSPL

SEQ ID NO: 11488 - protein, 179 aa, Neptunomonas sp.
  REGION 1..179: note = tr|A0A437Q8U3|A0A437Q8U3_9GAMM GTP cyclohydrolase 1; OS = Neptunomonas sp. HPM-16 OX=1815562 GN=folE PE=3 SV=1
MEKAYATIIEQVGEDLTREGLVDTPARAAKAMAYLTRGYEQTLEDVVNGALFPSDNSEMVIVKDIELYSLCEHHMLPFIGKAHVAYIPDGQVVGLSKIARIVDMYARRLQIQENMTKQIAEAIEQVTGAKGVGVVIEAKHMCMMMRGVEKQNSSMKTSMMLGSFRSNSETRSEFLSLIR

SEQ ID NO: 11489 - protein, 366 aa, Nereida ignava
  REGION 1..366: note = tr|A0A0U1NJD6|A0A0U1NJD6_9RHOB GTP cyclohydrolase FolE2 OS=Nereida ignava OX=282199 GN=folE2 PE=3 SV=1
MNFHTPDMDREPTREEAEAALAVLRRWAGGATDVERSDLDPAVARLTVDAPADYPDLSRQYPAEFEVDAAYKASLPDLQNGPTSLIRGAKRQIQHVGISNFRLPIRFRTRDNGDLTLETSVTGTVSLDAEKKGINMSRIMRTFYQSADETFSFDVIDRTLDAYKTDLESFDARIQMRFSFPMKVTSLRSGLSGYQYYDIALELVEQAGARKKIVHLDYVYSSTCPCSLELSEHARQTRGQLATPHSQRSVARISVALENDAQVLWFEDLIEMARRAVPTETQVMVKREDEQAFAELNAANPIFVEDAARLFCEQLQADPRVGDFRVIASHQESLHSHDAVSVLFEGDTFASDSIDPKLFATLFHVG

SEQ ID NO: 11490 - protein, 209 aa, Nesiotobacter exalbescens
  REGION 1..209: note = tr|A0A1U7JKE9|A0A1U7JKE9_9RHOB GTP cyclohydrolase 1; OS = Nesiotobacter exalbescens OX=197461 GN=folE PE=3 SV=1
MDAVLRTVAQETSDERRAASRPSREEAEAAARVLLEWAGDNPEREGLVETPKRMVKAFEDLFAGYREDPREHLERTFEEVGGYNDIVLLRDIDFYSFCEHHVLPFKGKAHIAYYPSNKVIGLSKLARVVEIYARRLQTQENLTAEIIGAIDTYLAPRGIAVMLEAEHQCMAMRGIQKAGVSTITNQFTGIFKEDPAEQARFMTLIRTTS

SEQ ID NO: 11491 - protein, 201 aa, unidentified
  source 1..201: note = Nesterenkonia aurantiaca
  REGION 1..201: note = tr|A0A4R7G7U7|A0A4R7G7U7_9MICC GTP cyclohydrolase 1; OS = Nesterenkonia aurantiaca OX=1436010 GN=folE PE=3 SV=1
MPEHPGPPLTEPVDLPRIEAAVREILLAVGEDPEREGLKGTPARVARAYEEAFLGLREDPAELMSTTFDIGHEELVLVRDVPFYSTCEHHLVPFFGHAHIGYIPSPEGRVTGLSKLARLVDIFAKRPQVQEQLTTQVVDALVQHLTPGGAMVVVEAEHLCMSMRGVSKPGARTITSAVRGQLRDPATRAEAMSLMLHGRPR

SEQ ID NO: 11492 - protein, 207 aa, Nesterenkonia jeotgali
  REGION 1..207: note = tr|A0A0W8IIQ9|A0A0W8IIQ9_9MICC GTP cyclohydrolase 1; OS = Nesterenkonia jeotgali OX=317018 GN=folE PE=3 SV=1
MPDPRSGSDPAASATPGAVDLPRIEAAVREILLAVGEDPQREGLRGTPARVARAYEEAFQGLREDPAELMSTTFDIGHEELVLVRDVPFYSTCEHHLVPFFGHAHIGYIPSPEGKVTGLSKLARLVDIFAKRPQVQEQLTTQVVDALVEHLAPGGAIVVVEAEHLCMSMRGVSKPGARTITSAVRGQLRDAATRAEAMSLMLHGRPQ

SEQ ID NO: 11493 - protein, 206 aa, Nesterenkonia sandarakina
  REGION 1..206: note = tr|A0A2T0YQS8|A0A2T0YQS8_9MICC GTP cyclohydrolase 1; OS = Nesterenkonia sandarakina OX=272918 GN=folE PE=3 SV=1
MPERPAPAGAPAPLEGSVDLPRIEAAVREILLAVGEDPERDGLQGTPSRVARAYEEAFQGLREDPAELMSTTFDIGHEELVLVRDVPFYSMCEHHLVPFFGHAHIGYIPSPEGKVTGLSKLARLVDIFAKRPQVQEQLTTQVVDALVEHLAPGGAMVVVEAEHLCMSMRGVSKPGARTITSAVRGQLRDAATRAEAMSLMLHGRPH

SEQ ID NO: 11494 - protein, 204 aa, Nesterenkonia sp.
  REGION 1..204: note = tr|A0A3A4FBM8|A0A3A4FBM8_9MICC GTP cyclohydrolase 1; OS = Nesterenkonia sp. M8 OX=2174932 GN=folE PE=3 SV=1
MQRTSCRREGVVDEVSDVVDLPRIEAAVREILLAIGENPEREGLKQTPARVARAYAEAFKGLHEEPADLLGTTFDIGHQELVLVRDVAFYSMCEHHLVPFYGKAHVGYIPAEEGKVTGLSKLARLVDIFAKRPQVQEQLTTQIADALMEHLQPEGVIVVIESEHLCMSMRGVSKPGAKTVTSAVRGALRNAATRAEAMSLILRN

SEQ ID NO: 11495 - protein, 204 aa, Nesterenkonia sp.
  REGION 1..204: note = tr|A0A1X3P4J0|A0A1X3P4J0_9MICC GTP cyclohydrolase 1; OS = Nesterenkonia sp. PF2B19 OX=1881858 GN=folE PE=3 SV=1
MSSTITTPGSPELPQDAPVDLPRIEAAVREILVAVGEDPERDGLKDTPGRVARAYQEAFRGLHEDPAELLATTFDIGHEELVLVRDIPFYSMCEHHLVPFFGHAHIGYIPSADGKVTGLSKLARLVDIFAKRPQVQENLTTEVVEALMAHLEPLGAIVVVECEHLCMSMRGVSKPGAKTITSAVRGQLRDAATRSEAMSLILHR

SEQ ID NO: 11496 - protein, 212 aa, unidentified
  source 1..212: note = Nevskiales bacterium
  REGION 1..212: note = tr|A0A2F0A1B0|A0A2F0A1B0_9GAMM GTP cyclohydrolase 1; OS = Nevskiales bacterium OX=2026766 GN=folE PE=3 SV=1
MDTSVTTAKAAVDTTSDAVTRPTREEAEAAVRTLIAWTGDNPNREGLLDTPGRVVRAYEEFYAGYKEDPREILSRTFEEVDGYDDMVMLRDIRLESHCEHHMVPIIGRVHIAYLPVSRVVGISKLARVIEIYARRLQTQETMTAQIANVLEEVLKPAGVAVLVDAAHQCMTTRGIRKPGVFTITSRFTGRFKEDMRLHDRFMQMIRPTPNDM

SEQ ID NO: 11497 - protein, 198 aa, unidentified
  source 1..198: note = Niabella drilacis
  REGION 1..198: note = tr|A0A1G7BMQ9|A0A1G7BMQ9_9BACT GTP cyclohydrolase 1; OS = Niabella drilacis OX=1285928 GN=folE PE=3 SV=1
MAYKKEDKYNEPVTQALIQHYQQVIAQLGEDPQREGLLKTPERVAKAMQVLTQGYQMDAHEIINSAKFHEDVSEMIIVKDIELYSLCEHHMLPFFGRAHVAYIPNGWITGLSKIARVVDVYSHRLQVQERLTVQIMNAIKETLNPLGVAVVIEAKHLCMMMRGVQKQNSETTTSAFDGEFQKNSTRSEFLKLISARLS

SEQ ID NO: 11498 - protein, 220 aa, unidentified
  source 1..220: note = Niabella drilacis
  REGION 1..220: note = tr|A0A1G6ZTT0|A0A1G6ZTT0_9BACT GTP cyclohydrolase 1; OS = Niabella drilacis OX=1285928 GN=folE PE=3 SV=1
MENDPVNGLLHQEPGDLLLNPPLREDAFEQSDQEKIDEIAYHFGRIMHVLGLDLNDDSLNKTPGRVAKMYVKELFSGLNPTSKPEISLFENRYGYDRMLVEKDITLYSCCEHHFVPIIGKVHVAYIPGTRVIGLSKINRLVQYYARRPQVQERLTVQIADGLKAVLQHNDVAVMVEATHLCVAARGIKDIQSSTVTAHYSGRFQNETTRAGFLSLIRSGK

SEQ ID NO: 11499 - protein, 198 aa, unidentified
  source 1..198: note = Niabella ginsenosidivorans
  REGION 1..198: note = tr|A0A1A9HXS0|A0A1A9HXS0_9BACT GTP cyclohydrolase 1; OS = Niabella ginsenosidivorans OX=1176587 GN=folE PE=3 SV=1
MAYKNEDRYDESVTQKLIENYKSIITNLGEDAEREGLLKTPERVAKAMQVLTKGYHSDAHKIINSAKFHEDVSEMIIVKDIELYSLCEHHMLPFFGRAHVAYIPNGWITGLSKIARVVDVFSHRLQVQERLTVQIMNAIKETLNPLGVAVVIEAKHLCMMMRGVQKQNSVTTTSAFYGEFEKNPTRSEFLKLISAHLS

SEQ ID NO: 11500 - protein, 221 aa, Niabella soli
  REGION 1..221: note = tr|W0EZB3|W0EZB3_9BACT GTP cyclohydrolase 1; OS = Niabella soli DSM 19437 OX=929713 GN=folE PE=3 SV=1
MNTDHLIQETNDVLPGKTLAESPVRANAFELSTDEKIRRIKYHFAKIMDTLGLDLEDDSLKDTPGRVAKMYVNELFSGLNPDNKPRISLFENKYGYKKMLVEKDITFYSSCEHHFVPIIGRAHVAYIPGKQVVGLSKINRLVHYYARRPQVQERLTIQIAEALKEILRHNDVAVVIEAEHLCVASRGIKDTAATTVTASYSGQFENETIKQELLAYIYSKK

SEQ ID NO: 11501 - protein, 198 aa, Niabella soli
  REGION 1..198: note = tr|W0F5J8|W0F5J8_9BACT GTP cyclohydrolase 1; OS = Niabella soli DSM 19437 OX=929713 GN=folE PE=3 SV=1
MAYKRTEQYDETVTNALIGNYQSVIAHLGEDPEREGLLKTPERVAKAMQVLTQGYYMDAHAIINSAKFHEEVSEMIIVKDIELYSLCEHHMLPFFGKAHVAYIPNGWITGLSKIARVVDVFSHRLQVQERLTVQIMNAIKETLNPLGVAVVIEAKHLCMMMRGVQKQNSETTTSAFFGEFEKDSTRSEFMKLISARLS

SEQ ID NO: 11502 - protein, 269 aa, Niabella sp.
  REGION 1..269: note = tr|A0A5C7W823|A0A5C7W823_9BACT GTP cyclohydrolase FolE2 OS=Niabella sp. OX=1962976 GN=folE2 PE=3 SV=1
MNHFTNFSVMPDVQASSDSREIAIQRVGVKNVRHPIILETLSGTQASIAHYDLDVLLEADKKGTHMSRFIELLEAQKTPLSLRSFRQMLTAMLDKLNAQAGRIVLSCPYFIKKTAPVSGVQSLLDYQISFSGEVKQHEGQTDCALWLKVEVPVTSLCPCSKEISRYGAHNQRSFIIIQAELIDDVAIEELIRIAEEESSCELWGLLKRSDEKYVTERAYENPKFVEDLVRGVAVRLDADKRIRHYVVEAENFESIHNHSAYALIDSRAR

SEQ ID NO: 11503 - protein, 198 aa, Niastella koreensis
  REGION 1..198: note = tr|G8T9X6|G8T9X6_NIAKG GTP cyclohydrolase 1; OS = Niastella koreensis (strain DSM 17620 / KACC 11465 / GR20-10) OX=700598 GN=folE PE=3 SV=1
MGFKKIEQYDEKIMPGLIHHYSESLKLLGEDPQREGLEKTPERVAKAMQYMMQGYDQDARAILNSAKFKEPVSEMILVKDIELYSMCEHHMLPFFGKAHIAYIPNGYITGLSKLARVVDVYARRLQVQERLTTQILDAIKETLNPLGVAVVIEAKHLCMMMRGVQKQNSVTTTSAFWGEFEKNETRSEFTKLISSRLH

SEQ ID NO: 11504 - protein, 198 aa, Niastella populi
  REGION 1..198: note = tr|A0A1V9FGM2|A0A1V9FGM2_9BACT GTP cyclohydrolase 1; OS = Niastella populi OX=550983 GN=folE PE=3 SV=1
MAYKKIDQYEDKIMPGLIHHYRETLSLLGEDPEREGLVKTPERVAKAMQYMTQGYEMDARAILNSAKFKENVSEMILVKDIELYSLCEHHILPFFGKAHIAYIPNGYITGLSKLARVVDVYARRLQVQERLTTQILDAIKETLQPLGVAVVIEASHLCMMMRGVQKQNSVTTTSAFWGEFEKNETRSEFTKLISSRLH

SEQ ID NO: 11505 - protein, 198 aa, Niastella sp.
  REGION 1..198: note = tr|A0A4R2VQW1|A0A4R2VQW1_9BACT GTP cyclohydrolase 1; OS = Niastella sp. CF465 OX=2135684 GN=folE PE=3 SV=1
MAYKKVDQYDEKIMPELMHHYRETLSLLGEDPNREGLVKTPERMAKAMQYLTQGYEMDAKAILDSAKFKESVSEMILVKDIELYSMCEHHLLPFFGKAHIAYIPNGYITGLSKLARVVDVYARRLQVQERLTTQILDAIKETLQPLGVAVVIEASHLCMMMRGVQKQNSVTTTSAFWGEFEKNETRAEFTKLISSHLH

SEQ ID NO: 11506 - protein, 218 aa, Niastella sp.
  REGION 1..218: note = tr|A0A1E4E7U6|A0A1E4E7U6_9BACT GTP cyclohydrolase 1; OS = Niastella sp. SCN 39-18 OX=1660119 GN=folE PE=3 SV=1
MDITDFTPAVKKEFTPNGKIINAVFTDNKMDISSQEKSIEYHFSKIMEALGLNLHEDGLKDTARRVAKMYVQEIFKGLNPANEPGITLFENKFKYNEMVVEKNIPVFSYCEHHFVPFIGKAHIAYISKGKVIGLSKLNRIVDFYARRPQIQERLTAQIADHIKKVLQTEDVAVILKASHLCIASRGVAQQGCETITNSLHGSFINTVNKQEFFTLINL

SEQ ID NO: 11507 - protein, 198 aa, unidentified
  source 1..198: note = Niastella vici
  REGION 1..198: note = tr|A0A1V9FUQ8|A0A1V9FUQ8_9BACT GTP cyclohydrolase 1; OS = Niastella vici OX=1703345 GN=folE PE=3 SV=1
MAYKKIEHYEDKLMPGLTHHYREALALLGEDPEREGLLKTPERVAKAMQYMTQGYDMDARAILNSAKFKENVSEMILVKDIELYSLCEHHLLPFFGKAHIAYIPNGYITGLSKLARVVDVYARRLQVQERLTTQILDAIKETLQPLGVAVVIEASHLCMMMRGVQKQNSVTTTSAFWGEFEKNETRSEFTKLISSRLH

SEQ ID NO: 11508 - protein, 198 aa, Niastella yeongjuensis
  REGION 1..198: note = tr|A0A1V9EZ29|A0A1V9EZ29_9BACT GTP cyclohydrolase 1; OS = Niastella yeongjuensis OX=354355 GN=folE PE=3 SV=1
MAFKKIEQYDEKIMPGLIHHYSESLKLLGEDPEREGLVKTPERVAKAMQYMMQGYDQDARAILNSAKFKESVSEMILVKDIELYSMCEHHMLPFFGKAHIAYIPNGYITGLSKLARVVDVYARRLQVQERLTTQILDAIKETLNPLGVAVVIEAKHLCMMMRGVQKQNSVTTTSAFWGEFEKNETRSEFTKLITSRLH

SEQ ID NO: 11509 - protein, 325 aa, unidentified
  source 1..325: note = Nibricoccus aquaticus
  REGION 1..325: note = tr|A0A290QJ38|A0A290QJ38_9BACT GTP cyclohydrolase FolE2 OS=Nibricoccus aquaticus OX=2576891 GN=folE2 PE=3; SV = 1
MKKKPMYLHRSADGAEPKIARAFDATFKADAAYRATLPDMMEAAQDSIQGAHVPIQQVGVHNFRLPLKFRTKKKDVITLEASVTGTVSLEAELKGINMSRIVRSFYEHKDEVFTGEWMGKILRAYLKKVESKNARLKIRFSYPMLRPSLRSGLDGYQFYNVAFEGVMTGAGEYRRFIHFDFVYSSACPCSAELSEHARDKRGAYTVPHSQRSKARVIVEEVEGAKIWIEDIHALCERALKTETQVMVKREDEQAFAELNGAHLKFVEDAARLLYGEFNREKRVKDFLIACSHLESLHSHDAVSVVCKGVKDGFKADFMDFGSLLC

SEQ ID NO: 11510 - protein, 219 aa, Nicoletella semolina
  REGION 1..219: note = tr|A0A4R2N499|A0A4R2N499_9PAST GTP cyclohydrolase 1; OS = Nicoletella semolina OX=271160 GN=folE PE=3 SV=1
MSIISPEAQNVRTALLAKGIETPTVTLSKDKNSRRAEIQQHLRAVLELLGLDLRDDSLEETPHRLAKMYVDEIFSGLDYSTFPKITKIKNQMKVSEMVLVDEITLTSTCEHHFVTIDGNVSVAYYPKDWVIGLSKINRIVQFFAQRPQVQERFTEQILTAFQTILETEDVAIYVKATHFCVKCRGVKDTNSKTITSAFGGVFLQDRDTRKEFLSLINKL

SEQ ID NO: 11511 - protein, 214 aa, Nisaea sp.; identical to SEQ ID NO: 6180
  REGION 1..214: note = tr|A0A2D7JQM1|A0A2D7JQM1_9PROT GTP cyclohydrolase 1; OS = Nisaea sp. OX=2024842 GN=folE PE=3 SV=1
  VARIANT 64: note = Xaa can be any naturally occurring amino acid

SEQ ID NO: 11512 - protein, 194 aa, Nisaea sp.
  REGION 1..194: note = tr|A0A2D7Z1J5|A0A2D7Z1J5_9PROT GTP cyclohydrolase 1; OS = Nisaea sp. OX=2024842 GN=folE PE=3 SV=1
MERQNVPKPSRQTAESAVRTLIEWAGDDPEREGLIDTPKRVVDAYEEFFAGYEADPDAVLGRTFEEVSGYDDMVLLRDIAVESHCEHHMVAILGHAHLAYIPDGKVVGISKLARVVEIFARRLQTQETMTAQIVECIERVLRPRGVAIVVDAKHQCMTTRGIKKPNVATLTSRFTGAFADDARLEARFFEMIKG

SEQ ID NO: 11513 - protein, 220 aa, unidentified
  source 1..220: note = Nissabacter sp.
  REGION 1..220: note = tr|A0A4P8SEC5|A0A4P8SEC5_9GAMM GTP cyclohydrolase 1; OS = Nissabacter sp. SGAir0207 OX=2126321 GN=folE PE=3 SV=1
MATLSKEAALVHEALMARGLETPLRPEPMLDRETRTRHIQEHMTSIMQLLNLDLNDDSLAETPNRIAKMYVDEIFSGLDYSNFPKITIIENKMRVDEMVTVRDITLTSTCEHHFVTIDGKATVAYIPKDGVIGLSKINRIVQFFSQRPQVQERLTQQILVALQTLLGTNNVAVSIDAVHYCVKARGIRDATSATTTTSLGGLFKSSQNTRQEFLRAVRHV

SEQ ID NO: 11514 - protein, 193 aa, Nitratifractor salsuginis
  REGION 1..193: note = tr|E6WXW1|E6WXW1_NITSE GTP cyclohydrolase 1; OS = Nitratifractor salsuginis (strain DSM 16511 / JCM 12458 / E9I37-1) OX=749222 GN=folE PE=3 SV=1
MSDKSKKIEAAVRTILENLGEDPDREGLLKTPHRVAKALEFLTEGYHKDPEEILKKALFTSSNDEMVLVRDIEFYSLCEHHMLPIIGRAHVAYIPDGKVVGLSKIPRVVNLFARRLQIQEQLTEQIADAISDTIHPKGVAVVIHARHMCMEMRGVEKINSTTVTSALRGLFKKDIRTRNEFYDLINANVPSNF

SEQ ID NO: 11515 - protein, 221 aa, Nitratireductor aquibiodomus
  REGION 1..221: note = tr|I5C0F5|I5C0F5_9RHIZ GTP cyclohydrolase 1; OS = Nitratireductor aquibiodomus RA22 OX=1189611 GN=folE; PE = 3 SV=1
MDAVIKNFPPHTEKGEKIAEKKSYMDKPVTDRPSREEVENAVRTLLRWTGDDIAREGLIETPQRVAKAYREMFSGYDQCPAEELGRTFEEVQGYNDMVLIKDISFHSHCEHHMVPIIGKAHVAYLPDGKVVGLSKIARVVDIFARRLQTQEAMTAQIAHVIQDVLKPRGVAVLVEAEHMCMAMRGIRKQGSVTLTTTFTGVYREDLQEQARFMTMLRDKHG

SEQ ID NO: 11516 - protein, 215 aa, Nitratireductor basaltis
  REGION 1..215: note = tr|A0A084UBB3|A0A084UBB3_9RHIZ GTP cyclohydrolase 1; OS = Nitratireductor basaltis OX=472175 GN=folE PE=3 SV=1
MDAILKNQKHADTSAKAAADSASTSHAARPDRAEVEEAVLTLLRWVGEDPKREGLIETPARVAKAYAEMFSGYEQDAAEELGRTFEEVAGYDDIVLMRDLSFHSHCEHHMVPIIGKAHVAYLPDGKVVGLSKIARVVDIYARRLQTQEAMTAQIAGVIQDVLQPRGVAVMVEAEHMCMAMRGIRKQGSTTITTRFTGEFRNNNEEQQRFLSLIRG

SEQ ID NO: 11517 - protein, 221 aa, Nitratireductor indicus
  REGION 1..221: note = tr|K2N0K0|K2N0K0_9RHIZ GTP cyclohydrolase 1; OS = Nitratireductor indicus C115 OX=1231190 GN=folE PE=3; SV = 1
MDAVIKNFPPHTDKGGKDAESKSFMDKPFTDRPSQEEVEAAVRTLLRWTGDDISREGLIETPQRVAKAYREMFSGYDQCPAEELGRTFEEVQGYNDMVLIKDISFHSHCEHHMVPIIGKAHVAYLPDGKVVGLSKIARVVDIFARRLQTQESMTAQIAGVIQEVLQPRGVAVLIEAEHMCMAMRGIRKQGSTTLTTTFTGAYKQDLQEQARFMTMLRDIRN

SEQ ID NO: 11518 - protein, 221 aa, Nitratireductor pacificus
  REGION 1..221: note = tr|K2MQW3|K2MQW3_9RHIZ GTP cyclohydrolase 1; OS = Nitratireductor pacificus pht-3B OX=391937 GN=folE PE=3; SV = 1
MDAVIKNFPPHADQGTDAAGKKHSMHKPLTDRPSQQEVEAAVTTLLRWTGDDIAREGLIETPARVAKAFREMFSGYDQSPEDELGRTFEEVQGYDDMVLIKDMSFHSHCEHHMVPIIGKAHVAYLPDGKVVGLSKIARVVDIFARRLQTQEAMTAQIATVIQDVLKPRGVAVLIEAEHMCMAMRGIRKQGSTTLTTTFTGVFKTDFQEQARFMTMLRDKHG

SEQ ID NO: 11519 - protein, 221 aa, Nitratireductor sp.; identical to SEQ ID NO: 11515
  REGION 1..221: note = tr|A0A1H4IY43|A0A1H4IY43_9RHIZ GTP cyclohydrolase 1; OS = Nitratireductor sp. ES.061 OX=1855335 GN=folE PE=3 SV=1

SEQ ID NO: 11520 - protein, 224 aa, Nitratireductor sp.
  REGION 1..224: note = tr|A0A2P8NCN1|A0A2P8NCN1_9RHIZ GTP cyclohydrolase 1; OS = Nitratireductor sp. StC3 OX=2126741 GN=folE PE=3 SV=1
MNITADHLQRPTRATTLPEDRDHAAAKAQPRRSDTPVPTRSETEAAVAALIRWAGDDPARPGLVDTPARVARAFEDWFGGYGLVPDNILGTTFDEIGGYADPVELRDIPFFSWCEHHMAPIRGKAHIAYLPDQRVVGISKLARLVDAFARRLQIQERMTDQIAAAIQRVLQPAGVAVVIEAQHDCMRSRGIRACGTSLMTKAMSGAYRENAALRGEFLASLQSR

SEQ ID NO: 11521 - protein, 192 aa, Nitratiruptor sp.
  REGION 1..192: note = tr|A6Q1B9|A6Q1B9_NITSB GTP cyclohydrolase 1; OS = Nitratiruptor sp. (strain SB155-2) OX=387092 GN=folE; PE = 3 SV=1
MDRQKEFENHVKAILQLLGEDPQREGLIKTPQRVYKAFLHLTEGYHKDPKEVLGEALFESSNDEMVLVRDIEFYSLCEHHLLPIIGRAHVAYIPNGKVVGLSKIPRMVNVFARRLQIQEQMTEQIADALMQTIEPKGVGVVLQARHMCMEMRGVEKICSTTVSSALRGIFKTNQKTREEFFSLINAPQTTRF

SEQ ID NO: 11522 - protein, 192 aa, Nitratiruptor tergarcus
  REGION 1..192: note = tr|A0A1W1WRA7|A0A1W1WRA7_9PROT GTP cyclohydrolase 1; OS = Nitratiruptor tergarcus DSM 16512 OX=1069081 GN=folE; PE = 3 SV=1
MDRKEEFVKAVKTILEIIGEDPKREGLLKTPERVYKAFLHLTEGYHKDPKEVLGEALFTSTNDEMVLVRDIEFYSLCEHHLLPIIGRAHVAYIPDGKVVGLSKIPRMVNVYARRLQIQEQMTEQIADALMETVKPKGVGVVVQARHMCMEMRGVEKICSTTVSSALRGIFKENIKTREEFFSLINAPQNRRF

SEQ ID NO: 11523 - protein, 315 aa, Nitrincola lacisaponensis
  REGION 1..315: note = tr|A0A063Y2E1|A0A063Y2E1_9GAMM GTP cyclohydrolase FolE2 OS=Nitrincola lacisaponensis OX=267850 GN=folE2 PE=3; SV = 1
MNARAEMPDVAAHTAPVTRETLDWVGMSHITLPLNVAQPDGRLQPVIAHLDIHVDIVNPEVKGIHMSRLYLLLNRFAAEQTLTPAAMETLLTEVCDSHEGISESAILRLTFDYPLNRPALKSDYSGWKPYPTTIEAIKRNNEFSLELSVSVPYSSTCPCSAALSRQLLQEAFRDDFANEEQISRERVETWLRSERGSVATPHSQRSYARIRARINPVDHTLLPLLDLIDRTEQALKTPVQTAVKREDEQEFARLNGANMMFCEDAARRLKSAFNQAEQYLDFWIRVEHHESLHDHDAVAIVSKGIPGGYTPLLQR

SEQ ID NO: 11524 - protein, 212 aa, Nitrincola lacisaponensis
  REGION 1..212: note = tr|A0A063Y2V0|A0A063Y2V0_9GAMM GTP cyclohydrolase 1; OS = Nitrincola lacisaponensis OX=267850 GN=folE PE=3 SV=1
MISAEAARVKQVLIERGLETPLIEHHLSADKKYQKIKQAMTEVVETLGLDLTDDSLAETPHRIAKMYVYEIFSGLDYANFPAMSLIENKMQVDEMVKVSDIDLTSTCEHHFITIDGSAKVAYIPGQKIIGLSKINRLVRFFAQRPQVQERLTQQVLIALQTLLETENVAVSIEATHYCVKSRGVMDVNSRTSTTALGGVFKSNIHTRAEFLK

SEQ ID NO: 11525 - protein, 298 aa, unidentified
  source 1..298: note = Nitrincola nitratireducens
  REGION 1..298: note = tr|W9V324|W9V324_9GAMM GTP cyclohydrolase FolE2; OS = Nitrincola nitratireducens OX=1229521 GN=folE2 PE=3 SV=1
MNAPLPDVSLTDIAPTLRPLQWVGMQSIDIPVTLEEVGYRRELHARADVQVNLPTPHIKGIHMSRLYQLLDKLSHGMALSPARLHELLEAMIDSHHDCHTQSARLRLNVDLLVRRPALVTQGLSGWKSYPLRIDAELIDGTFHCQLRVRVDYSSTCPCSAALSRQLIANAFLQEFGRTAQVEPSVVASWLQQFASLATPHSQRSEAEVTVSLPSDAEMLGALKLIECIEHAVGTPVQTAVKRADEQEFAALNGQNLMFVEDAARRIEAALFAYTEPQVHVRHLESLHPHDAVAWTMPA

SEQ ID NO: 11526 - protein, 212 aa, unidentified
  source 1..212: note = Nitrincola nitratireducens
  REGION 1..212: note = tr|W9VN08|W9VN08_9GAMM GTP cyclohydrolase 1; OS = Nitrincola nitratireducens OX=1229521 GN=folE PE=3 SV=1
MISKEAALVQKALFDRGLETPMLDTGMSPEQKYERLKGLMTEVVATLGLDLSDDSLAETPHRIAKMYVQEIFSGLDYQNFPKITVIDNKMKLDEMVRVSDISLTSTCEHHFITIDGTATVAYLPATKIIGLSKINRIVRFFAQRPQVQERLTQQLLVALQALLETDNVAVSIKATHYCVKSRGVQDVNSSTSTTALGGIFKTNLHTRAEFLR

SEQ ID NO: 11527 - protein, 319 aa, Nitrincola sp.
  REGION 1..319: note = tr|A0A099PBT6|A0A099PBT6_9GAMM GTP cyclohydrolase FolE2 OS=Nitrincola sp. A-D6 OX=1545442 GN=folE2 PE=3 SV=1
MRAAMNARIEMPDVATHTTAVSRETLDWVGMSHITLPLNVCQPGGQLQPVIAHLDIHVDIVNPEVKGIHMSRLYLLLNEFAAQEALTPASMQKLLQRVCESHRGISEAAILKLSFEYPLQRPALKSDYTGWKPYPSSIEAIQKGNEFSLELSVSVPYSSTCPCSAALSRQLLQEAFRDDFSGEEQVSREQVEHWLRSERGSVATPHSQRSYARLRVKIDPMAHDILPLLDLIDRTEQALQTPVQTAVKREDEQEFARLNGANMMFCEDAARRLKTTFNQVDAYQDFWIRVEHHESLHDHDAVAVVSKGVPGGYTPLLQR

SEQ ID NO: 11528 - protein, 308 aa, Nitrincola sp.
  REGION 1..308: note = tr|A0A5A9W2B6|A0A5A9W2B6_9GAMM GTP cyclohydrolase FolE2 OS=Nitrincola sp. MEB193 OX=1708751 GN=folE2 PE=3; SV = 1
MPDIAATARPITRETLDWVGMSQISLPLRVQQAPGQTQAVVAHLDIHVDVANPEVKGIHMSRLYLLLNRFAEEETLTGHSLNALLDAICASHEGISESAIVQLRFDYPLNRPALKSEFSGWKPYPTIIQASRLQQDKCLEISVTVPYSSTCPCSAALSRQLLQQAFRDDFASSDQISREQVEAWLRSERGSVATPHSQRSYARTWVKLDVQTSLLPIVGLIDAIEAALKTPVQTAVKREDEQEFARLNGENMMFCEDAARRLKSALNQDSTYQDFWVRVEHHESLHDHDAVAVVSKGIAGGYTPLLQR

SEQ ID NO: 11529 - protein, 212 aa, unidentified; identical to SEQ ID NO: 11526
  source 1..212: note = Nitrincola tibetensis
  REGION 1..212: note = tr|A0A364NQC8|A0A364NQC8_9GAMM GTP cyclohydrolase 1; OS = Nitrincola tibetensis OX=2219697 GN=folE PE=3 SV=1

SEQ ID NO: 11530 - protein, 298 aa, unidentified
  source 1..298: note = Nitrincola tibetensis
  REGION 1..298: note = tr|A0A364NQS6|A0A364NQS6_9GAMM GTP cyclohydrolase FolE2 OS=Nitrincola tibetensis OX=2219697 GN=folE2 PE=3; SV = 1
MNALLPDVSLTDTAPALRPLQWVGMQNIDIPVTLEEIGYRRELHARADVQVNLPAPHIKGIHMSRLYQLLDKLSHGVALSPANLRELLEAMIASHHDCHTQSARLRLNVDLLVRRPALVTQGLSGWKSYPLRLDAELIDGTFHCQLRVTVNYSSTCPCSAALSRQLIAQTFLQEFGSTAQVESSAVTSWLQQFASLATPHSQRSEAEVKVSLPPDAEMLGALKLIERIEHAVGTPLQTAVKRADEQEFAALNGQNLMFVEDAARRIESALFDYTKPQVHVRHLESLHPHDAVAWTMPA

SEQ ID NO: 11531 - protein, 226 aa, Nitritalea halalkaliphila
  REGION 1..226: note = tr|I5BY47|I5BY47_9BACT GTP cyclohydrolase 1; OS = Nitritalea halalkaliphila LW7 OX=1189621 GN=folE PE=3; SV = 1
MLNTTGSKPMQDIDEMGDEHIGTSTETPLRADAFEMDDELKMELIAKHFKEIMHILGLDLSDDSLRGTPQRVAKMYVQEVFSGLDPKNKPDIKLFENKYRYSEMLVEKDITFFSNCEHHFVPIYGKAHVAYISNGKVIGLSKINRIVQYFAKRPQVQERLTMQIGNELKEMLGTEDIAVVIDAHHMCVSSRGIKDVNSATVTSYYSGQFEQEEKRAEFMKYITLGK

SEQ ID NO: 11532 - protein, 234 aa, Nitrobacter hamburgensis
  REGION 1..234: note = tr|Q1QMS3|Q1QMS3_NITHX GTP cyclohydrolase 1; OS = Nitrobacter hamburgensis (strain DSM 10229 / NCIMB 13809 / X14) OX=323097 GN=folE PE=3 SV=1
MDALIKPLRGSKPSEVKSNNAKAAGFSPAKLDPSEFMDAAVQPDQSRPSRHEAEYAVRTLLSYIGENPDREGLLDTPRRVIEAYDEIYQGYHQCPAEVLNRTFGETAGYDDFVLVRDIAFTSQCEHHMMPFYGKAHIAYTPVERVVGLSKLARLTDIFARRLQTQEHMTAQIAAAVDEVLKPRGVAVMIEAEHTCMSVRGVAKHGALTLTSRFTGVFRDNPAEQARFLSMVRGS

SEQ ID NO: 11533 - protein, 232 aa, Nitrobacter sp.
  REGION 1..232: note = tr|A3WVN6|A3WVN6_9BRAD GTP cyclohydrolase 1; OS = Nitrobacter sp. Nb-311A OX=314253 GN=folE PE=3 SV=1
MDALIKQLRGSKPSDVKSNSAKPAGFSPAQLDPSEFLAAVQPNRQRPSRHEAEDAVRTLLSYIGENPEREGLLDTPRRVIESYDEIYQGYHQCPAEVLNRTFGETAGYDDFVLVRDIEFTSQCEHHMMPFYGKAHIAYTPVERVVGLSKLARLTDIFARRLQTQEHMTAQIAAAVDEVLKPRGVAVMIEAEHTCMSVRGVAKHGAMTFTSRFTGVFRDNPAEQARFLSMVRP

SEQ ID NO: 11534 - protein, 236 aa, Nitrobacter sp.
  REGION 1..236: note = tr|A0A1Q3K8Q3|A0A1Q3K8Q3_9BRAD GTP cyclohydrolase 1; OS = Nitrobacter sp. 62-13 OX=1895797 GN=folE PE=3 SV=1
MDALIKPLRGAKPVEAKSSNTKPAGFAPAELDPSEFLAAAAQPDRSRPSRHEAEYAVRTLLSYIGENPDREGLLDTPRRVVEAYDEIYQGYHQCPAEVLNRTFGETAGYDDFVLVRDIAFTSQCEHHMMPFYGKAHIAYTPVERVVGLSKLARLTDIFARRLQTQEHMTAQIAAAVDEVLKPRGVAVMIEAEHTCMSVRGVAKHGAMTFTSRFTGVFRDNPAEQARFLSMVRGGGR

SEQ ID NO: 11535 - protein, 232 aa, Nitrobacter vulgaris
  REGION 1..232: note = tr|A0A1V4HZD0|A0A1V4HZD0_NITVU GTP cyclohydrolase 1; OS = Nitrobacter vulgaris OX=29421 GN=folE PE=3 SV=1
MDALIKPLRGSKPSDVKSNNVKPAGFSPAQLDPSEFLAAVQPNRQRPSRHEAEGAIRTLLSYIGENPDREGLLDTPRRVIESYDEIYQGYHQCPAEVLNRTFGETAGYDDFVLVRDIQFTSQCEHHMMPFYGKAHIAYTPVERVVGLSKLARLTDIFARRLQTQEHMTAQIAAAVDEVLKPRGVAVMIEAEHTCMSVRGVAKHGAMTFTSRYTGVFRDNPTEQARFLSMVRG

SEQ ID NO: 11536 - protein, 241 aa, Nitrobacter winogradskyi
  REGION 1..241: note = tr|Q3ST01|Q3ST01_NITWN GTP cyclohydrolase 1; OS = Nitrobacter winogradskyi (strain ATCC 25391 / DSM 10237 / CIP 104748 / NCIMB 11846 / Nb-255) OX=323098 GN=folE; PE = 3 SV =1
MDALIKPLRSGKPSDINKASDIKSSNAKPAGFSPAQLDPSEFMAAVQPNRQRPSRHEAEDAVRTLLAYIGENPDREGLLDTPRRVIESYDEIYQGYHQCPAEVLNRTFGETAGYDDFVLVRDIQFTSQCEHHMMPFYGKAHIAYTPVERVVGLSKLARLTDIFARRLQTQEHMTAQIAAAVDEVLKPRGVAVMIEAEHTCMSVRGVAKHGAMTVTSRFTGVFRDDPAEQARFLSMVRGQPR

SEQ ID NO: 11537 - protein, 241 aa, Nitrobacter winogradskyi
  REGION 1..241: note = tr|A0A4Y3W983|A0A4Y3W983_NITWI GTP cyclohydrolase 1; OS = Nitrobacter winogradskyi OX=913 GN=folE PE=3 SV=1
MDALIKPLRSGKPSDINKASDIKSSNAKPAGFSPAQLDPSEFMAAVQPNRQRPSRHEAEDAVRTLLAYIGENPDREGLLDTPRRVIESYDEIYQGYHQCPAEVLNRTFGETAGYDDFVLVRDIQFTSQCEHHMMPFYGKAHIAYTPVERVVGLSKLARLTDIFARRLQTQEHMTAQIAAAVDEVLKPRGVAVMIEAEHTCMSVRGVAKHGAMTVTSRFTGLFRDDPAEQARFLSMVRGQQR

SEQ ID NO: 11538 - protein, 277 aa, Nitrococcus mobilis
  REGION 1..277: note = tr|A4BSY0|A4BSY0_9GAMM GTP cyclohydrolase FolE2; OS = Nitrococcus mobilis Nb-231 OX=314278 GN=folE2 PE=3 SV=1
MAEATKGALALPIEDVQGRQDTRRIPINKVGIKDIRHPVRVRARNGEEQHTVATFNMYVDLPHHFKGTHMSRFVEILEGHNREITIASFKAMLREVAQRLKAASGHIEMRFPFFICKRAPVSGVESLLDYEVAFIGETQGDHTELTLEVLVPVTSLCPCSKSISEQGAHNQRSRVTIRARTGGFIWLEELIQIAEESASCELYGLLKRPDEKYVTERAYNNPKFVEDIVREVAGRLEADDRILAYSVASENFESIHNHSAYALIERDKQLAAGERHS

SEQ ID NO: 11539 - protein, 190 aa, unidentified
  source 1..190: note = Nitrolancea hollandica
  REGION 1..190: note = tr|I4EDP4|I4EDP4_9CHLR GTP cyclohydrolase 1; OS = Nitrolancea hollandica Lb OX=1129897 GN=folE PE=3 SV=1
MSENGVDRVKLEAAVLAILEAIGEDPTRPDLRRTPERAARMFEEMFGGLLINPEAFLEETLRQEHQELIVLRDISVHSMCEHHLVPMTGIAHIGYIPNGRIVGFDRLAKVVDAYARRPQVQERLTQQIADLIHAMLQPTGVAIHMELEHMCMTIRGIRETQSRVITTAYRGVFREDPALRAEFNSMIAPA

SEQ ID NO: 11540 - protein, 271 aa, unidentified
  source 1..271: note = Nitrosococcus halophilus
  REGION 1..271: note = tr|D5BXV1|D5BXV1_NITHN GTP cyclohydrolase FolE2; OS = Nitrosococcus halophilus (strain Nc4) OX=472759; GN = folE2 PE=3 SV=1
MNPIAPAVERPIEDVQAKADKRQIAINKVGIKDIRHPVRVRDRSGGEQHTVANFNMYVDLPHHFKGTHMSRFVEILNQHEHEITVQSFKEMLQEMAHRLQAESGHIEMSFPYFVTKEAPISKVQSLMDYQVTFIGEIKGNKPQMTVKVVVPVTSLCPCSKQISDYGAHNQRSHVTITVRVERFVWIEDIIDWVEEEASCEIYGLLKRPDEKYVTERAYDNPKFVEDMVRDIAARLNQDDRISAYMVESENFESIHNHSAYAMIERDKQLNP

SEQ ID NO: 11541 - protein, 213 aa, unidentified
  source 1..213: note = Nitrosococcus halophilus
  REGION 1..213: note = tr|D5C0X6|D5C0X6_NITHN GTP cyclohydrolase 1; OS = Nitrosococcus halophilus (strain Nc4) OX=472759 GN=folE; PE = 3 SV=1
MDKKLTKAVKEGHYIGSLDVEPGEHYDREFEASVKKILTRLGEDPDREGLKRTPQRVAKALDFLTSGYNMTVEEVVRDALFEDECEEMVIVKDVEFYSLCEHHVLPFFGRAHVGYLPRGRIVGLSKIARVIDVFARRLQVQERLTTQIATGLMSVLNARGVGVVLEACHFCMVMRGVQKQNSQTVTSAMLGTFRQDPRTRAEFMELIRRSSGG

SEQ ID NO: 11542 - protein, 267 aa, Nitrosococcus oceani
  REGION 1..267: note = sp|Q3J9J7|GCH4_NITOC GTP cyclohydrolase FolE2; OS = Nitrosococcus oceani (strain ATCC 19707 / BCRC 17464 / NCIMB 11848 / C-107) OX=323261 GN=folE2 PE=3 SV=1
MNPIVPAVERPIEDVQAKADERQIAINKVGIKDIRHPVRVSDRNGGEQHTVANFNMYVDLPHHFKGTHMSRFVEILNQHEHEITVRSFREMLREMNHRLQAESGHIEMVFPYFVTKQAPVSKVQSLMDYQVTFIGEIKGDKPQITVKVVVPVTSLCPCSKQISDYGAHNQRSHVTVAVRIEGFIWLEDIIDLVEEEASCEIYGLLKRPDEKYVTERAYDNPKFVEDMVRDVAARLNQDDRVSAYRVESENFESIHNHSAYAMIEREK

SEQ ID NO: 11543 - protein, 213 aa, Nitrosococcus oceani
  REGION 1..213: note = tr|A0A0E2Z7P0|A0A0E2Z7P0_9GAMM GTP cyclohydrolase 1; OS = Nitrosococcus oceani C-27 OX=314279 GN=folE PE=3 SV=1
MDTKLTKVVREGRYIGSLDVKPGEHYDPEFEASVEEILTRLGEDPKREGLKRTPQRVAKALDFLTSGYHMTVEEVVKDALFEDECEEMVIVKDVEFYSLCEHHMLPFFGRAHVGYLPKGRIVGLSKIARVIDVFARRLQVQERLTTQIASGLMAVLNARGVGVVLEACHFCMVMRGVQKQNSQTVTSAMLGTFREDSRTRAEFMELIRRSSVS

SEQ ID NO: 11544 - protein, 271 aa, unidentified
  source 1..271: note = Nitrosococcus wardiae
  REGION 1..271: note = tr|A0A4P7BXY9|A0A4P7BXY9_9GAMM GTP cyclohydrolase FolE2 OS=Nitrosococcus wardiae OX=1814290 GN=folE2 PE=3; SV = 1
MNPIVPAVECSIEDVQAKADKRKIAINKVGIKDIRHPVRVRDRSGGEQHTVANFNMYVDLPHHFKGTHMSRFVEILNQHEHEITVQSFKEMLQEMTHRLQAESGHIEMNFPYFVTKEAPISKVQSLMDYQVTFIGEIKGNKPQMTVKVVVPVTSLCPCSKQISDYGAHNQRSHVTITVQVERFVWIEDIIDWVEEEASCEIYGLLKRPDEKYVTERAYDNPKFVEDMVRDIAARLNQDDRISAYMVESENFESIHNHSAYAMIERDKQLNP

SEQ ID NO: 11545 - protein, 213 aa, unidentified
  source 1..213: note = Nitrosococcus wardiae
  REGION 1..213: note = tr|A0A4V1AWA0|A0A4V1AWA0_9GAMM GTP cyclohydrolase 1; OS = Nitrosococcus wardiae OX=1814290 GN=folE PE=3 SV=1
MDKKLTKVVKEGHYIGSLDVAPGEHYDREFEASMKKILIRLGEDPDREGLKRTPQRVAKALDFLTSGYNMTVEEVVKDALFEDECEEMVIVKDVEFYSLCEHHMLPFFGRAHVGYLPRGRIVGLSKIARVIDVFARRLQVQERLTTQIATGLMSVLNARGVGVVLEACHFCMVMRGVQKQNSQTVTSAMLGTFRQDSRTRAEFMELIRRYSGG

SEQ ID NO: 11546 - protein, 213 aa, unidentified
  source 1..213: note = Nitrosococcus watsoni
  REGION 1..213: note = tr|D8K6P0|D8K6P0_NITWC GTP cyclohydrolase 1; OS = Nitrosococcus watsoni (strain C-113) OX=105559 GN=folE; PE = 3 SV=1
MDTKLTKVVREGHYIGSLDVGPGEHYDPEFEASVEEILTRLGEDPKREGLKRTPQRVAKALDFLTSGYHMTVEEVVKDALFEDECEEMVIVKDVEFYSLCEHHMLPFFGRAHVGYLPKGRIVGLSKIARVIDVFARRLQVQERLTTQIASGLMSVLNARGVGVVLEACHFCMVMRGVQKQNSQTVTSAMLGTFREDSRTRAEFMDLIRRSSVS

SEQ ID NO: 11547 - protein, 271 aa, unidentified
  source 1..271: note = Nitrosococcus watsoni
  REGION 1..271: note = tr|D8K522|D8K522_NITWC GTP cyclohydrolase FolE2; OS = Nitrosococcus watsoni (strain C-113) OX=105559 GN=folE2; PE = 3 SV=1
MNPIVPAVDHPIEDVQAKTDKRQIAINKVGIKDIRHPVRVSDRSGGEQHTVASFNMYVDLPHHFKGTHMSRFVEILNQHEHEITVRSFREMLREMSHRLQAESGHIEMGFPYFVTKQAPISKVQSLMDYQVTFLGEIKEDKPQITVKVVVPVTSLCPCSKQISDYGAHNQRSHVTVAVRIEGFIWLEDIIDLVEEEASCEIYGLLKRPDEKYVTERAYDNPKFVEDMVRDVAARLNQDDRISAYRVESENFESIHNHSAYAMIEREKQLST

SEQ ID NO: 11548 - protein, 267 aa, unidentified
  source 1..267: note = Nitrosomonadaceae bacterium
  REGION 1..267: note = tr|A0A2E6UT10|A0A2E6UT10_9PROT GTP cyclohydrolase FolE2 OS=Nitrosomonadaceae bacterium OX=2026767 GN=folE2; PE = 3 SV=1
MNKRADSLIADVQSTPDTRHIEIDRVGIKAIRHPIKVADKTGGVQHTVAMFNMYVNLPHNFKGTHMSRFVEILNSHDREISVESFEKILRTMLERLETQSGHIEMTFPYFINKFAPVSKVKSLLDYDVTFIGEIKNGCYEFTIKVVVPVTSLCPCSKKISDYGAHNQRSHISISARTNSFVWIEDIIQIAEEKASCELYGLLKRPDEKYVTEKAYNNPKFVEDLVRDVAIELNKDSRIDAYTVESENFESIHNHSAYALIEQNKMKS

SEQ ID NO: 11549 - protein, 267 aa, unidentified
  source 1..267: note = Nitrosomonadaceae bacterium
  REGION 1..267: note = tr|A0A4P5UEI9|A0A4P5UEI9_9PROT GTP cyclohydrolase FolE2 OS=Nitrosomonadaceae bacterium OX=2026767 GN=folE2; PE = 3 SV=1
MHKEADLPIADVQSTPDTRHIAIDRVGIKAIRHPVKVADKDGGVQHTVAVFNMYVGLPHNFKGTHMSRFVEILNDHEREISVESFESILWAMVKRLESESGHIEMTFPYFINKAAPVSGVQSLLDYEVTFIGEIKNGRYEFNMKVVVPVTSLCPCSKKISDYGAHNQRSHISISVRTNCFVWIEDMVRMAESYASCELYGLLKRPDEKYVTEKAYDNPKFVEDLVRDVASSLNKDSRIDAYTVESENFESIHNHSAYALIERDKTES

SEQ ID NO: 11550 - protein, 267 aa, unidentified
  source 1..267: note = Nitrosomonadales bacterium
  REGION 1..267: note = tr|A0A524MC23|A0A524MC23_9PROT GTP cyclohydrolase FolE2 OS=Nitrosomonadales bacterium OX=2026761 GN=folE2; PE = 3 SV=1
MNKQVDFPIADVQNTPDTRHIAIDRVGIKAIRHPVKVADKDGGVQHTVAVFNMYVNLPHNFKGTHMSRFVEILNSHEREISVESFENILRTMVKKLGTDSGHIEMTFPYFINKSAPVSGVRSLLDYEVTFIGEIKNGCYEFTMKVVVPVASLCPCSKKISDYGAHNQRSHISISVRTNSFVWIEDIIRIAEDKASCELYGLLKRPDEKYVTEKAYDNPKFVEDLVRDVAVELNKDARIDAYMVESENFESIHNHSAYALIEQNKMIS

SEQ ID NO: 11551 - protein, 191 aa, unidentified
  source 1..191: note = Nitrosomonadales bacterium
  REGION 1..191: note = tr|A0A1E4GI55|A0A1E4GI55_9PROT GTP cyclohydrolase 1; OS = Nitrosomonadales bacterium SCN 54-20 OX=1660164 GN=folE; PE = 3 SV=1
MDSSDSEFGIDDWQRLLRALGEDPSRQGLRETPGRVTRAWAHWTRGYKQDPAAILKTFADGGESYDELIVVRQIPVYSHCEHHLAPFFGHATIGYLPSGHIVGLSKLTRLVNCFAARLQVQERLTQQVAQSLLEHLQPKAVGVILRCRHMCMESRGIAVAGEETVTSAMLGDLKTNAAQRAEFMALAEPHE

SEQ ID NO: 11552 - protein, 269 aa, Nitrosomonas aestuarii
  REGION 1..269: note = tr|A0A1I4A7K5|A0A1I4A7K5_9PROT GTP cyclohydrolase FolE2 OS=Nitrosomonas aestuarii OX=52441 GN=folE2 PE=3 SV=1
MNKEIDLPIADVQSTFDTRRIAIDRVGIKAIRHPVVVADKDDGVQHTVAMFNMYVNLPHKFKGTHMSRFVEILNGHEREISVESFKTILQEMVNKLESDSGHIEMTFPYFIDKAAPISGVKSLLDYEVTFIGEIKNGEYNFTIKVVVPITSLCPCSKKISDYGAHNQRSHVTIAARTNSFVWIEDLIKIAEDKASCELYGLLKRPDEKYVTEKAYDNPKFVEDIVRDVADTLNKDNRIDAYVVESENFESIHNHSAYALIEHEKRTVDI

SEQ ID NO: 11553 - protein, 271 aa, Nitrosomonas communis
  REGION 1..271: note = tr|A0A1I4PH10|A0A1I4PH10_9PROT GTP cyclohydrolase FolE2 OS=Nitrosomonas communis OX=44574 GN=folE2 PE=3 SV=1
MNKQTDFSIADVQSSLDTRRIAIDRVGIKAIRHPVKVADKDGGVQHTVAVFNMYVNLPHNFKGTHMSRFVEILNSHEREISVESFEDILRAMVTRLESDSGHIEMTFPYFVNKSAPISGVQSLLDYEVTFVGEIKQNHYEFTMKVIVPVTSLCPCSKKISEYGAHNQRSHVTVSVRTNSFVWIEDIIKIAEENASCELYGLLKRPDEKYVTERAYDNPKFVEDLVRDIAEVLNSDDRIDAYVVESENFESIHNHSAYALIEQDKCNELPHT

SEQ ID NO: 11554 - protein, 271 aa, Nitrosomonas communis
  REGION 1..271: note = tr|A0A0F7KJW2|A0A0F7KJW2_9PROT GTP cyclohydrolase FolE2 OS=Nitrosomonas communis OX=44574 GN=folE2 PE=3 SV=1
MNKQTDFSIADVQSSLDTRRIAIDRVGIKAIRHPVKVADKDGGVQHTVAVFNMYVNLPHNFKGTHMSRFVEILNSHEREISVESFEGILRAMVTRLESDSGHIEMTFPYFVNKSAPISGVQSLLDYEVTFIGEIKQNHYAFTMKVIVPVTSLCPCSKKISEYGAHNQRSHVTVSVRTNSFVWIEDMIKVAEENASCELYGLLKRPDEKYVTERAYDNPKFVEDLVRDIAEVLNSDDRIDAYVVESENFESIHNHSAYALIERDKCNELPHT

SEQ ID NO: 11555 - protein, 270 aa, unidentified
  source 1..270: note = Nitrosomonas cryotolerans
  REGION 1..270: note = tr|A0A1N6HAW2|A0A1N6HAW2_9PROT GTP cyclohydrolase FolE2 OS=Nitrosomonas cryotolerans ATCC 49181 OX=1131553; GN = folE2 PE=3 SV=1
MNKQIDLPIADVQSSPDKRRIAIDRVGIKAIRHPIMVADKDGGVQHTVAVFNMYVNLPHNFKGTHMSRFVEILNSHEREISVKSFEKILREMVEKLESDSGHIEMTFPYFVNKSAPVSGVKSLLDYEVTFVGEIKDNDYTFTMKVVVAVTSLCPCSKKISDYGAHNQRSHVTIAVRTNSFVWIEDVIKIAEDKASCELYGLLKRPDEKYVTEKAYDNPKFVEDIVRDVAEVLNQDSRIDAYTVESENFESIHNHSAYALIERDKKSMPVI

SEQ ID NO: 11556 - protein, 268 aa, Nitrosomonas europaea
  REGION 1..268: note = sp|Q82VD1|GCH4_NITEU GTP cyclohydrolase FolE2; OS = Nitrosomonas europaea (strain ATCC 19718 / CIP 103999 / KCTC 2705 / NBRC 14298) OX=228410 GN=folE2 PE=1 SV=1
MNKQIDLPIADVQGSLDTRHIAIDRVGIKAIRHPVVVADKGGGSQHTVAQFNMYVNLPHNFKGTHMSRFVEILNSHEREISVESFEEILRSMVSRLESDSGHIEMAFPYFINKSAPVSGVKSLLDYEVTFIGEIKHGNQYSFTMKVIVPVTSLCPCSKKISDYGAHNQRSHVTISVRTNSFIWIEDIIRIAEEQASCELYGLLKRPDEKYVTERAYNNPKFVEDIVRDVAEVLNHDDRIDAYIVESENFESIHNHSAYALIERDKRIR

SEQ ID NO: 11557 - protein, 268 aa, Nitrosomonas europaea; identical to SEQ ID NO: 11556
  REGION 1..268: note = tr|A0A1I0C6N7|A0A1I0C6N7_NITER GTP cyclohydrolase FolE2 OS=Nitrosomonas europaea OX=915 GN=folE2 PE=3 SV=1

SEQ ID NO: 11558 - protein, 267 aa, Nitrosomonas eutropha
  REGION 1..267: note = sp|Q0AFY5|GCH4_NITEC GTP cyclohydrolase FolE2; OS = Nitrosomonas eutropha (strain DSM 101675 / C91); OX = 335283 GN=folE2 PE=3 SV=1
MKKHTDQPIADVQGSPDTRHIAIDRVGIKAIRHPVLVADKDGGSQHTVAQFNMYVNLPHNFKGTHMSRFVEILNSHEREISVESFEEILRSMVSRLESDSGHIEMTFPYFVNKSAPISGVKSLLDYEVTFIGEIKHGDQYGFTMKVIVPVTSLCPCSKKISDYGAHNQRSHVTISVHTNSFVWIEDVIRIAEEQASCELFGLLKRPDEKYVTEKAYNNPKFVEDIVRDVAEILNHDDRIDAYVVESENFESIHNHSAYALIERDKRK

SEQ ID NO: 11559 - protein, 267 aa, Nitrosomonas eutropha; identical to SEQ ID NO: 11558
  REGION 1..267: note = tr|A0A1G4V3N2|A0A1G4V3N2_9PROT GTP cyclohydrolase FolE2 OS=Nitrosomonas eutropha OX=916 GN=folE2 PE=3 SV=1

SEQ ID NO: 11560 - protein, 271 aa, Nitrosomonas halophila
  REGION 1..271: note = tr|A0A1H3I9Y9|A0A1H3I9Y9_9PROT GTP cyclohydrolase FolE2 OS=Nitrosomonas halophila OX=44576 GN=folE2 PE=3 SV=1
MNKQVDLPIADVQSSEDTRRIAIDRVGIKAIRHPVRVADKDDGIQHTVAQFNMYVNLPHNFKGTHMSRFVEILNGYEREISVESFESILRAMVERLESDSGHIEMTFPYFVNKSAPISGVKSLLDYEVTFIGEIRHDGQYEFTMKVVVPVTSLCPCSKKISDYGAHNQRSHVTIAVRTNSFVWIEDIIKIAEEQASCELYGLLKRPDEKHVTERAYDNPKFVEDLVRDVAEILNRDARIDAYVVESENFESIHNHSAYALIERDKRKPLKN

SEQ ID NO: 11561 - protein, 270 aa, Nitrosomonas marina
  REGION 1..270: note = tr|A0A1I0ARA2|A0A1I0ARA2_9PROT GTP cyclohydrolase FolE2 OS=Nitrosomonas marina OX=917 GN=folE2 PE=3 SV=1
MNKEIDLPIADVQSTHDTRRIAIDRVGIKAIRHPVVVADKDDGVQHTVAMFNMYVNLPHKFKGTHMSRFVEILNSHEREISVESFKTILQEMVEKLESDSGHIEMTFPYFVDKAAPVSGVRSLLDYEVTFIGEIKNKAYAFTIKVVVPITSLCPCSKKISDYGAHNQRSHVTISARTNSFVWIEDLIKIAEDNASCELYGLLKRPDEKYVTEKAYDNPKFVEDIVRDIADTLNKDERIDAYIVESENFESIHNHSAYALIEHDKKTAVRI

SEQ ID NO: 11562 - protein, 270 aa, Nitrosomonas marina
  REGION 1..270: note = tr|A0A1H8EAY9|A0A1H8EAY9_9PROT GTP cyclohydrolase FolE2 OS=Nitrosomonas marina OX=917 GN=folE2 PE=3 SV=1
MNKEIDLPIADVQSTHDTRRIAIDRVGIKAIRHPVVVADKDDGVQHTVAMFNMYVNLPHKFKGTHMSRFVEILNSHEREISVESFKTILQEMVERLESDSGHIEMTFPYFVDKAAPVSGVRSLLDYEVTFIGEIKNNAYAFTIKVVVPITSLCPCSKKISDYGAHNQRSHVTISARTNSFVWIEDLIKIAEDNASCELYGLLKRPDEKYVTEKAYDNPKFVEDIVRDIADTLNKDKRIDAYIVESENFESIHNHSAYALIDHDKKTAVHI

SEQ ID NO: 11563 - protein, 269 aa, unidentified
  source 1..269: note = Nitrosomonas mobilis
  REGION 1..269: note = tr|A0A1G5SJG3|A0A1G5SJG3_9PROT GTP cyclohydrolase FolE2 OS=Nitrosomonas mobilis OX=51642 GN=folE PE=3 SV=1
MNKQIDLPIADVQNSADTRRIAIDRVGIKAIRHPVKVGDKDGGVQHTVALFNMYVDLPHNFKGTHMSRFVEILNSQEREISVESFESILRAMVARLESTSGRIEMTFPYFVNKAAPVSGVQSLMDYEVMFIGEIGQPSGQYTFTMKVVVPVTSLCPCSKKISDYGAHNQRSHVSIAVKTNSFVWIEDIIRIAEENASCELFGLLKRPDEKYVTEKAYDNPKFVEDLVRDVAEVLNRDNRIDAYVVESENFESIHNHSAYAMIERDKQKS

SEQ ID NO: 11564 - protein, 248 aa, unidentified
  source 1..248: note = Nitrosomonas mobilis
  REGION 1..248: note = tr|A0A1G5SH66|A0A1G5SH66_9PROT Putative GTP cyclohydrolase 1 type 2 OS=Nitrosomonas mobilis OX=51642; GN = NSMM_520017 PE=4 SV=1
MHQKALEDYLNTILEVTRFRDYCPNGLQVEGRTQIQTIVTGVTASQALIAHAIELRADAIIVHHGYFWRGEDACLRGIKRQRIAALIKHDINLYAYHLPLDAHIALGNNAQLAKKLNIAIEGSFGEQAIALHGSFETPTTLRELNTNLTQLLTRQPLIIGDPSKSIRRIAWCSGAAQHTFEEAISLEVDAYLTGEISEQSVHTARETGVAFISAGHHATERYGIQALGEHIAKQFDLCHYFIDVENPV

SEQ ID NO: 11565 - protein, 271 aa, Nitrosomonas nitrosa
  REGION 1..271: note = tr|A0A3D0FB67|A0A3D0FB67_9PROT GTP cyclohydrolase FolE2 OS=Nitrosomonas nitrosa OX=52442 GN=folE2 PE=3 SV=1
MNKQTDLPIADVQSTLDTRRIAIDRVGIKAIRHPVRVADKDGGVQHTVAVFNMYVNLPHNFKGTHMSRFVEILNSHEREISVESFEDILRAMVTRLESESGHIEMTFPYFVNKSAPISGVQSLLDYEVTFAGEIKKSQYEFTMKVVVPVTSLCPCSKKISDYGAHNQRSHVTVSVRTNSFVWIEDIIRIAEDQASCELYGLLKRPDEKFVTERAYDNPKFVEDIVRDVAEVLNKDDRIDAYVVESENFESIHNHSAYALIERDKRKAAPHS

SEQ ID NO: 11566 - protein, 271 aa, Nitrosomonas nitrosa
  REGION 1..271: note = tr|A0A1I4NZA0|A0A1I4NZA0_9PROT GTP cyclohydrolase FolE2 OS=Nitrosomonas nitrosa OX=52442 GN=folE2 PE=3 SV=1
MNKQTDLPIADVQSTLDTRRIAIDRVGIKAIRHPVRVADKDGGVQHTVAVFNMYVNLPHNFKGTHMSRFVEILNSHEREISVESFEDILRAMVTRLESESGHIEMTFPYFVNKSAPISGVQSLLDYEVTFAGEIKKSQYEFTMKVVVPVTSLCPCSKKISDYGAHNQRSHVTVSVRTSSFVWIEDIIRIAEDQASCELYGLLKRPDEKFVTERAYDNPKFVEDIVRDVAEVLNKDDRIDAYVVESENFESIHNHSAYALIERDKRKAAPHS

SEQ ID NO: 11567 - protein, 273 aa, Nitrosomonas oligotropha
  REGION 1..273: note = tr|A0A1H8LSI1|A0A1H8LSI1_9PROT GTP cyclohydrolase FolE2 OS=Nitrosomonas oligotropha OX=42354 GN=folE2 PE=3; SV = 1
MNKQIDLPIADVQSSPDTRRIAIDRVGIKAIRHPVVVADKSDGVQHTIAVFNMYVNLPHNFKGTHMSRFVEILNSHEREISVESFQVILREMIQKLETDSGHIEMSFPYFINKSAPVSQVKSLLDYEVTFIGEIRDGEYLFTMKVIIPVTSLCPCSKKISDYGAHNQRSHVTISVRTNSFVWIEDVIRIAETNASCELYGLLKRPDEKYVTEKAYDNPKFVEDIVRDIAEVLNRDERIDAYVVESENFESIHNHSAYALIKNDKTQSSGISLE

SEQ ID NO: 11568 - protein, 273 aa, Nitrosomonas oligotropha
  REGION 1..273: note = tr|A0A2T5HYF9|A0A2T5HYF9_9PROT GTP cyclohydrolase FolE2 OS=Nitrosomonas oligotropha OX=42354 GN=folE2 PE=3; SV = 1
MNKQIDLPIADVQSSPDTRRIAIDRVGIKAIRHPVVVADKSDGVQHTIAVFNMYVNLPHNFKGTHMSRFVEILNSHEREISVESFQTILREMIQKLETDSGHIEMSFPYFINKSAPVSQVKSLLDYEVTFIGEIKDGEYLFTMKVIIPVTSLCPCSKKISDYGAHNQRSHVTISVRTNSFVWIEDVIRIAETNASCELYGLLKRPDEKYVTEKAYDNPKFVEDIVRDIAEVLNRDERIDAYVVESENFESIHNHSAYALIKNDKTQSSGISLE

SEQ ID NO: 11569 - protein, 269 aa, Nitrosomonas sp.
  REGION 1..269: note = tr|A0A5C7VHG0|A0A5C7VHG0_9PROT GTP cyclohydrolase FolE2 OS=Nitrosomonas sp. OX=42353 GN=folE2 PE=3 SV=1
MNKQIDMPIADVQSSLDTRQIAIDRVGIKAIRHPVRVADKGGGVQHTVAMFNMYVNLPHNFKGTHMSRFVEILNSHEREISVESFEDILRAMVTRLESDSGHIEMTFPYFVNKSAPISGVQSLLDYEVTFIGEVKQGEYRFTMKVVVPVTSLCPCSKKISDYGAHNQRSHVTVAVRTNSFVWIEDVIKIAEEQASCELYGLLKRPDEKYVTERAYDNPKFVEDIVRDVAEVLNHDDRIDAYVVESENFESIHNHSAYALIERDKHRKQI

SEQ ID NO: 11570 - protein, 271 aa, Nitrosomonas sp.
  REGION 1..271: note = tr|A0A1H3LW17|A0A1H3LW17_9PROT GTP cyclohydrolase FolE2 OS=Nitrosomonas sp. Nm33 OX=133724 GN=folE2 PE=3 SV=1
MNKQTDLPIADVQSSLDTRRIAIDRVGIKAIRHPVKVADKDGGVQHTVAVFNMYVNLPHNFKGTHMSRFVEILNSHEREISVESFEDILRAMVIRLESDSGHIEMTFPYFVNKSAPISGVQSLLDYEVTFIGEIKQNHYEFTMKVVVPVTSLCPCSKKISDYGAHNQRSHVTVSVRTNNFVWIEDIIKIAEDNASCELYGLLKRPDEKYVTEKAYDNPKFVEDIVRDVAEVLNRDDRIDAYVVESENFESIHNHSAYALIERDKRNVLPHT

SEQ ID NO: 11571 - protein, 267 aa, unidentified
  source 1..267: note = Nitrosomonas stercoris
  REGION 1..267: note = tr|A0A4Y1YSJ9|A0A4Y1YSJ9_9PROT GTP cyclohydrolase FolE2 OS=Nitrosomonas stercoris OX=1444684 GN=folE2 PE=3; SV = 1
MKKDTNQPIADVQGSPDTRHIAIDRVGIKAIRHPVVVADKGGGSQHTVAQFNMYVNLPHNFKGTHMSRFVEILNSHEREISVESFEEILRSMVSRLESDSGHIEMAFPYFVRKSAPISGVKSLLDYEVTFIGEIKQGDQYSFTMKVVVPVTSLCPCSKKIADYGAHNQRSHVTISVRTNSFVWIEDVIRIAEEQASCELFGLLKRPDEKYVTEKAYNNPKFVEDIVRDVAEVLNQDERIDAYIVESENFESIHNHSAYALIERDKRK

SEQ ID NO: 11572 - protein, 268 aa, Nitrosomonas ureae
  REGION 1..268: note = tr|A0A286A2X3|A0A286A2X3_9PROT GTP cyclohydrolase FolE2 OS=Nitrosomonas ureae OX=44577 GN=folE2 PE=3 SV=1
MNKHIDMPIADVQSSLDTRRIAIDRVGIKAIRHPVVVADKDDGVQHTVAVFNMYVNLPHNFKGTHMSRFVEILNSHEREISVESFQIILQEMITKLETDSGHIEMTFPYFINKSAPVSQVKSLLDYEVTFIGEIKNGEYLFTMKVIVPVTSLCPCSKKISNYGAHNQRSHVTISVRTNSFVWIEDIIQIAENNASCELYGLLKRPDEKYVTEKAYDNPKFVEDIVRDIAEVLNHDERIDAYVVESENFESIHNHSAYALIENDKKQRG

SEQ ID NO: 11573 - protein, 268 aa, Nitrosomonas ureae
  REGION 1..268: note = tr|A0A1H9CEB8|A0A1H9CEB8_9PROT GTP cyclohydrolase FolE2 OS=Nitrosomonas ureae OX=44577 GN=folE2 PE=3 SV=1
MNKHIDMPIADVQSSLDTRRIAIDRVGIKAIRHPVVVADKDDGVQHTVAVFNMYVNLPHNFKGTHMSRFVEILNSHEREISVESFQIILQEMITKLETDSGHIEMTFPYFINKSAPVSQVKSLLDYEVTFIGEMKNGEYLFTMKVIVPVTSLCPCSKKISNYGAHNQRSHVTISVRTNSFVWIEDIIQIAENNASCELYGLLKRPDEKYVTEKAYDNPKFVEDIVRDIAEVLNHDGRIDAYVVESENFESIHNHSAYALIENDKKQRG

SEQ ID NO: 11574 - protein, 277 aa, Nitrosospira briensis
  REGION 1..277: note = tr|A0A1I5BLX2|A0A1I5BLX2_9PROT GTP cyclohydrolase FolE2 OS=Nitrosospira briensis OX=35799 GN=folE2 PE=3 SV=1
MNAPIQEVNTSMNEVNLHMVDVQGASDTRLIAINRAGIKGIRHPVTIADKGSGIQHTVATFNMYVNLPHHLKGVHMSRFVEVLNGYDRAISAEGFESLLRIMITRLEAESGGIEMSFPYFMTKAAPVSRIKSLLDYEVSFVGRIENGSYQFTMKAVVPVTSLCPCSKQVSDYGAHNQRSHMSVSVRTSGLVWIAELIRMAEDQASCELYGLLKRSDEKHVTEKAYDNPKFVEDVVRDTAAVLNRDARIEAYVVESENFESIHNHSAYAMIERDKLES

SEQ ID NO: 11575 - protein, 191 aa, Nitrosospira briensis
  REGION 1..191: note = tr|A0A1I5C600|A0A1I5C600_9PROT GTP cyclohydrolase 1; OS = Nitrosospira briensis OX=35799 GN=folE PE=3 SV=1
MNSSDNSEFGVADWQRLLRSIGEDPSRQGLRETPGRVTRAWAHWTRGYQQDPATILKTFADGGESYDELIVVRQIPVYSHCEHHLAPFFGHATIGYLPSGHIVGLSKLTRLVNCFAARLQVQERLTQQIAQSLIEHLQPKAVGVIVRCRHMCMESRGIAVAGEETVTSAMLGDLKENAAQRAEFLALAEQP

SEQ ID NO: 11576 - protein, 256 aa, unidentified
  source 1..256: note = Nitrosospira lacus
  REGION 1..256: note = tr|A0A1W6SKR0|A0A1W6SKR0_9PROT GTP cyclohydrolase 1; OS = Nitrosospira lacus OX=1288494 GN=folE PE=3 SV=1
MDVDVLQNASFLSRRDWRILHIPLPQLIICVTLLPAPGDPITGMGADVSKCSVDTLDNLHLNKGKVTMTTPRDSEFGVADWQRLLRSIGEDPERQGLTDTPNRVARAWAHWMRGYKQDPATILKTFADGGECYDELIVVRQIPVYSHCEHHLAPFFGHATVGYLPSGHIVGLSKLTRLVNCFAARLQVQERLTQQIAQSLLEHLQPKAVGVIIRCRHMCMESRGIAVVGEETVTSAMLGDLKTNAAQRAEFLALAE

SEQ ID NO: 11577 - protein, 266 aa, unidentified
  source 1..266: note = Nitrosospira lacus
  REGION 1..266: note = tr|A0A1W6SL72|A0A1W6SL72_9PROT GTP cyclohydrolase FolE2 OS=Nitrosospira lacus OX=1288494 GN=folE2 PE=3 SV=1
MNDMNFLIADVQGVLDTRRIAINRAGIKAVRHPVTIKDKDGSKQHTVALFNMYVNLPHNMKGAHMSRFVEILNSHEREISVESFENILRAMVEKLESESGGIEMTFPYFINKAAPVSRITSLLDYEVTFIGEISEGSYKFTMKVIVPVTSLCPCSKEISAYGAHNQRSHMSISICINSFVWIEELIKIAEGQASCELYGVLKRTDEKYVTEKAYDNPKFVEDAVRDVAVVLDRDARIDAYVVESENFESIHNHSAYALIERNKMKN

SEQ ID NO: 11578 - protein, 263 aa, Nitrosospira multiformis
  REGION 1..263: note = sp|Q2YCH6|GCH4_NITMU GTP cyclohydrolase FolE2; OS = Nitrosospira multiformis (strain ATCC 25196 / NCIMB 11849 / C 71) OX=323848 GN=folE2 PE=3 SV=1
MNKMLIADVQSVADTRRIAIDKAGIRAIRHPVRIMDKAGVQHTVAVFNMYVNLAHHLKGVHMSRFVEMLNEHDSVISVETFEKLLISMVKKLEAESGDIEMRFPYFIGKTAPVSGIKSLMDYDVTFIGQTRNGESRFTLKVVVPVTSLCPCSKEVSDDGAHNQRSHISISIRANHFVWIEDLIRIAEDQASCELYGLLKRSDEKYVTEKAYGNPKFVEDAVRDIASVLDRDERIDAYTVEAENFESIHNHSAYALIECDKLKN

SEQ ID NO: 11579 - protein, 191 aa, Nitrosospira multiformis
  REGION 1..191: note = tr|A0A1I7IS69|A0A1I7IS69_9PROT GTP cyclohydrolase 1; OS = Nitrosospira multiformis OX=1231 GN=folE PE=3 SV=1
MDSSDSEFGIGDWQRLLRSLGEDPSRQGLRETPGRVARAWTHWTRGYKQDPATILKTFADGGESYDELIVVRQIPVYSHCEHHLAPFFGHATIGYLPSGHIVGLSKLTRLVNCFAARLQVQERLTQQIAQSLIEHLQPKAVGVIIRCRHMCMESRGIAVAGEETVTSAMLGDLKTNAAQRAEFMALAEPHE

SEQ ID NO: 11580 - protein, 190 aa, Nitrosospira sp.
  REGION 1..190: note = tr|A0A2T5WX15|A0A2T5WX15_9PROT GTP cyclohydrolase 1; OS = Nitrosospira sp. Nsp37 OX=2135783 GN=folE PE=3 SV=1
MSSSDSEFGIADWQRLLRSIGEDPTRQGLRETPGRVARAWAHWTRGYHQDPATILKTFADGGESYDELIVVRQIPVYSHCEHHLAPFFGHATIGYLPRGHIVGLSKLTRLVNCFAARLQVQERLTQQIAQSLIEHLQPKAVGVIVRCRHMCMESRGIAVAGEETVTSAMLGDLKENAAQRAEFMALAEAP

SEQ ID NO: 11581 - protein, 281 aa, Nitrosospira sp.
  REGION 1..281: note = tr|A0A495EMX3|A0A495EMX3_9PROT GTP cyclohydrolase FolE2 OS=Nitrosospira sp. Nsp44 OX=1945879 GN=folE2 PE=3; SV = 1
MASNACQAAFPDHGMNDVNIPIADVQGALDSRRIAINKAGIKSIRHPVKIIDKGRRAQHVVATFDMHASLSHQLKGVHMSRFVEILNDSTRLISVKSFESVVDAVVRKLETESGGVEMTFPYFMSKAAPITGISSLMDYQVTFTGEIHEGAYHFTLKVVVPVTSLCPCSKQVSAYGAHNQRSHMSISVCPSSSIWIEDLIRLAEDQASSEVYGLLKRADEKYVTEKAYDNPKFVEDVVRDVAAALNRDVRIDAYVVESENFESIHNHSAYAVIERNKLQNP

SEQ ID NO: 11582 - protein, 190 aa, unidentified
  source 1..190: note = Nitrosovibrio sp.
  REGION 1..190: note = tr|A0A497X8N7|A0A497X8N7_9PROT GTP cyclohydrolase 1; OS = Nitrosovibrio sp. Nv12 OX=2135773 GN=folE PE=3 SV=1
MSSNDSEFGIADWQRLLRSIGEDPTRQGLRETPGRVARAWAHWTRGYHQDPATILKTFADGGESYDELIVVRQIPVYSHCEHHLAPFFGHATIGYLPSGHIVGLSKLTRLVNCFAARLQVQERLTQQIAQSLIEHLQPKAVGVIIRCRHMCMESRGIAVAGEETVTSAMLGDLKENAAQRAEFLALAEAP

SEQ ID NO: 11583 - protein, 267 aa, unidentified
  source 1..267: note = Nitrosovibrio sp.
  REGION 1..267: note = tr|A0A1K1NC15|A0A1K1NC15_9PROT GTP cyclohydrolase FolE2 OS=Nitrosovibrio sp. Nv17 OX=1855339 GN=folE2 PE=3; SV = 1
MTDTSVSISDVQGASDARRIAIDEVGIRALRHPVTIVDRHGGRQHTVAVCSLHVGLPHSRKGAHMSRFVEVLAAHGDDVSVVSFEHILRTVMVRLEADSGGVEIVFPYFVEKVAPVSRLKSLLDYEVTFAGEIRNGKYTFTMKAVVPTTSLCPCSKEISAYGAHNQRSHVSISIQGNRPVWVEELIDLAESQASCGLYGLLKRADEKYVTEKAYDNPKFVEDTVRDIAAVLDQDERVDRYTVESENFESIHNHSAYARIERDKSKSA

SEQ ID NO: 11584 - protein, 192 aa, unidentified
  source 1..192: note = Nitrosovibrio tenuis
  REGION 1..192: note = tr|A0A1H7GC19|A0A1H7GC19_9PROT GTP cyclohydrolase 1; OS = Nitrosovibrio tenuis OX=1233 GN=folE PE=3 SV=1
MDASNDPEFGIADWQRLLRSIGEDPSRQGLAETPGRVSRAWAHWTRGYKQDPATILKTFADGGESYDELIVVRQIPVYSHCEHHLAPFFGHATVGYLPSGHIVGLSKLTRLVNCFAARLQVQERLTAQIAQSLLEHLQPKAVGVIIRCRHMCMESRGIAVAGEETVTSAMLGNLKTNPAQRAEFLALAERPD

SEQ ID NO: 11585 - protein, 268 aa, unidentified
  source 1..268: note = Nitrosovibrio tenuis
  REGION 1..268: note = tr|A0A1H7RS69|A0A1H7RS69_9PROT GTP cyclohydrolase FolE2 OS=Nitrosovibrio tenuis OX=1233 GN=folE2 PE=3 SV=1
MNEANSSIADVQSVLDTRSIAINRAGIRAIRHPVRIADRSDEIQHTIATFNMHVHLSHQFKGVHMSRFVEILNSHKQELSVQSFERMVRAMVNKLETESGDIEMTFPYFVRKAAPISHVESLLDYEVTFIGQIRNGSYKFFMKVVVPVTSLCPCSKQISAYGAHNQRSHMSISIHTNSFIWIEDLIRMAEDQASCELYSLLKRSDEKYVTEKAYDNPKFVEDVVRDVAAILNQDVRIDAYVVESENFESIHNHSAYALIERNKVEELS

SEQ ID NO: 11586 - protein, 187 aa, Nitrospina gracilis
  REGION 1..187: note = tr|M1Z1T4|M1Z1T4_NITG3 GTP cyclohydrolase 1; OS = Nitrospina gracilis (strain 3/211) OX=1266370 GN=folE; PE = 3 SV=1
MKELIEKLLLELGEDPSREGLKNTPERVSRSLKFLTGGYWVNIDELVNDALFTDANTDEMVIVKDIDMFSLCEHHMLPFFGKAHVAYLPDGKIIGLSKIPRVVDAFSRRLQVQERLTTQIADCIQRVLKPKGVAVVIEALHLCMSMRGVEKQNSYTTTSSMLGYFKTNPSTRGEFLSLINGSQRYRT

SEQ ID NO: 11587 - protein, 204 aa, Nitrospina sp.
  REGION 1..204: note = tr|A0A3C8C698|A0A3C8C698_9BACT GTP cyclohydrolase 1; OS = Nitrospina sp. OX=2024844 GN=folE PE=3 SV=1
MRSNFLSPNAILSFTGELNLKDLIKQILLQIGEDPSREGLQNTPERVEKSLKFLTSGYWVNIKELVNGALFNEDYDEMVIVKDIDLFSMCEHHMLPFIGKCHVAYLPKGKIIGISKVPRIVDAFSRRLQVQERLTKQIADSLNEILQPIGVGVVIEALHLCMCMRGVAKQNSYTTTSAMLGSFKADARTRSEFLSLIPPQGTRR

SEQ ID NO: 11588 - protein, 184 aa, Nitrospina sp.
  REGION 1..184: note = tr|A0A523NPQ1|A0A523NPQ1_9BACT GTP cyclohydrolase 1; OS = Nitrospina sp. OX=2024844 GN=folE PE=3 SV=1
MKDLIEKLLVELGEDPSRKGLQNTPERVAKSMKFLTSGYWVNIEELVNDALYEDPNTDEMVIVKDIDVFSLCEHHLLPFFGKCHVAYLPDGKIIGLSKIPRIVETFGRRLQVQERLTTQIANCLQEILKPKGVAVVIDALHLCMSMRGVEKQNACTITSSMLGFFKSNPSTRSEFLSLIAGRRG

SEQ ID NO: 11589 - protein, 203 aa, unidentified
  source 1..203: note = Nitrospinae bacterium
  REGION 1..203: note = tr|A0A2H0MK33|A0A2H0MK33_9BACT GTP cyclohydrolase 1; OS = Nitrospinae bacterium CG11_big_fil_rev_8_21_14_0_20_56_8 OX=1974049 GN=folE PE=3; SV = 1
MSLNYLNPTKTLSFIEDHNVKELIKELLKGLGEDPAREGLQSTPERVERSLKFLTSGYWVNIEELVNDALYSEDNNEMVIVRDIDLYSLCEHHLLPFFGKCHVAYVPQGKIIGLSKIPRIIDAFSRRLQVQERMTTQIAECVNSILQPHGVAVVIEALHLCMSMRGVEKQNSYTTTSSMLGCFKEDARTRSEFLSLIRPQRPC

SEQ ID NO: 11590 - protein, 181 aa, unidentified
  source 1..181: note = Nitrospinae bacterium
  REGION 1..181: note = tr|A0A351RU54|A0A351RU54_9BACT GTP cyclohydrolase 1; OS = Nitrospinae bacterium OX=2026769 GN=folE PE=3 SV=1
MKNIIKELLINLGEDPERDGLKRTPERVEKSLGFLTEGYGKDIKKIVEKAVFEEKCDEMVILKDIDIFSMCEHHLLPFYGKCHVAYIPDGRIIGLSKIPRIIEVFSRRLQVQERLTNQIAECLTDALKPKGVAVVIEALHLCMCMRGVEKQNAITITSSMLGVFKRDSRTRMEFMGFIKGR

SEQ ID NO: 11591 - protein, 187 aa, unidentified
  source 1..187: note = Nitrospira bacterium
  REGION 1..187: note = tr|A0A0S8ATT1|A0A0S8ATT1_9BACT GTP cyclohydrolase 1; OS = Nitrospira bacterium SG8_35_4 OX=1704025 GN=folE PE=3; SV = 1
MNKNKIEKGVKLILEGIGEDIDRPGIKDTPKRIAELYEEIFSGLQTPTEEILKPIEGETHDEMVLLKDIPFYSVCEHHLLPFIGKAHVAYIPSGGKIVGLSKLAKAVEFFAKRPQVQERLTTQLADLIMKNLKPRGAMVIIDAEHLCLSMRGEKKPNARTVTSAVRGIFRTKESTRLEFLALLKRSD

SEQ ID NO: 11592 - protein, 187 aa, unidentified
  source 1..187: note = Nitrospira bacterium
  REGION 1..187: note = tr|A0A2N1UK47|A0A2N1UK47_9BACT GTP cyclohydrolase 1; OS = Nitrospira bacterium HGW-Nitrospira-1 OX=2013825; GN = folE PE=3 SV=1
MNLKKIEKGVRMILEGIGEDTERPGIKDTPSRVAKMYQEIFSGIETPTEEILKHLEGESHDEMVLLKDIPFYSVCEHHLLPFIGKAHVAYIPGAGKIAGIGELARALEIFAKRPQVQERLTAQLADVIMEKLKPKGAMVVIDAEHLCLSMRGIKKPGARTVTSAVRGIFRTKESTRQELLELIKKRD

SEQ ID NO: 11593 - protein, 211 aa, unidentified
  source 1..211: note = Nitrospira defluvii
  REGION 1..211: note = tr|D8PJ02|D8PJ02_9BACT GTP cyclohydrolase 1; OS = Nitrospira defluvii OX=330214 GN=folE PE=3 SV=1
MAKVVSGARARRSRVSAAPTDQDPIEGLMTNLLLELGEDPDRNGLLNTPKRVAKAMRFMTQGYRQDIDHLLNGALFPIEYDEMVIVKDIDFFSMCEHHLLPFFGKCHVGYLPNKKVVGLSKIPRVVDAFSRRLQVQERLTLQIAETLKKKLNAHGVAVVMEARHLCMMMRGVEKQNTVAVSSSMLGVFRTQQQTREEFLKLIRGSSVRDGN

SEQ ID NO: 11594 - protein, 213 aa, unidentified
  source 1..213: note = Nitrospira japonica
  REGION 1..213: note = tr|A0A1W1I0S2|A0A1W1I0S2_9BACT GTP cyclohydrolase 1; OS = Nitrospira japonica OX=1325564 GN=folE PE=3 SV=1
MAKLRRRTLQRIEDLPPVKRPADEGHIQSLVAQLLKALGETPSRNGLLKTPERVAKALQFMTRGYHQNIDHLLNGALFPIEYDEMVIVKDIDFFSMCEHHMLPFFGKCHVGYLPNKKVVGLSKIPRVVDAFSRRLQVQERLTTQIAETLKQKLNAHGVGVVMEAQHLCMMMRGVEKQNTIAVTSSMLGAFRTQQQTRAEFLKLISRNGVGDLG

SEQ ID NO: 11595 - protein, 214 aa, unidentified
  source 1..214: note = Nitrospira lenta
  REGION 1..214: note = tr|A0A330L888|A0A330L888_9BACT GTP cyclohydrolase 1; OS = Nitrospira lenta OX=1436998 GN=folE PE=3 SV=1
MAKQAASRRRKPVEDMSGTGRPADLGVLQALVTETLLALGENPGRNGLLKTPERVAKALAFMTQGYHRDIDQLLNGALFPIEYDEMVIVKDIDFYSMCEHHLLPFYGKVHVGYLPNKKVVGLSKIPRIVDTFARRLQVQERLTVQIAETLKTKLNAHGVGVVVEARHLCMMMRGVEKQNTVAVSSSMLGAFRTQQQTRLEFLKLIRRSGVGTSD

SEQ ID NO: 11596 - protein, 216 aa, Nitrospira moscoviensis
  REGION 1..216: note = tr|A0A0K2GHX1|A0A0K2GHX1_NITMO GTP cyclohydrolase 1; OS = Nitrospira moscoviensis OX=42253 GN=folE PE=3 SV=1
MAKSRRRTLQRLNRIEVLPPISPPADPEHVRSLITDLLKSLGETPQRHGLLKTPERVAKALQFMTRGYHQDIDHLLNGALFPIEYDEMVIVKDIDFFSMCEHHMLPFFGKCHVGYLPNKKVVGLSKIPRVVDAFSRRFQVQERLTVQIAETLQNKLNAHGVGVVVEARHLCMMMRGVEKQNTIAVTSSMLGAFRTQQQTRLEFLKLIRHRSVGDSD

SEQ ID NO: 11597 - protein, 202 aa, Nitrospira sp.
  REGION 1..202: note = tr|A0A1W9GDK2|A0A1W9GDK2_9BACT GTP cyclohydrolase 1; OS = Nitrospira sp. SG-bin1 OX=1827376 GN=folE PE=3 SV=1
MEDTGGTGKPADLRVLQSLVTEMLLALGEKPGRNGLLKTPERVAKALAFMTQGYQRDIDHLLNGALFPIEYDEMVIVKDIDFFSMCEHHLLPFFGRVHVGYLPNKKVVGLSKIPRIVDTFARRLQVQERLTVQIAETLSTKLNAHGVGVVVEARHLCMMMRGVEKQNTVAVTSSMLGAFRSQSQTRVEFLKLIRRGNVGDSD

SEQ ID NO: 11598 - protein, 202 aa, Nitrospira sp.
  REGION 1..202: note = tr|A0A354BHN5|A0A354BHN5_9BACT GTP cyclohydrolase 1; OS = Nitrospira sp. OX=70125 GN=folE PE=3 SV=1
MEDVNGSGQAPDLPVLQSLVTEMLLALGEKPSRNGLLKTPERVAKALAFMTQGYQRDIDHLLNGALFPIEYDEMVIVKDIDFFSMCEHHLLPFFGRVHVGYLPNKKVVGLSKIPRIVDMFARRLQVQERLTVQIAETLSTKLNAHGVGVVIEARHLCMMMRGVEKQNTVAVTSSMLGAFRSQSQTREEFLKLIRRGSVGDPE

SEQ ID NO: 11599 - protein, 187 aa, unidentified
  source 1..187: note = Nitrospiraceae bacterium
  REGION 1..187: note = tr|A0A419FVS6|A0A419FVS6_9BACT GTP cyclohydrolase 1; OS = Nitrospiraceae bacterium OX=2026770 GN=folE PE=3 SV=1
MDRKKIEKGVRLILEGIGEDPERAGLKDTPLRIVKLYEEIFAGLETPTEELLKPIEGESHDEMVLLKDIPFYSVCEHHLLPFIGKAHVAYIPSGGKIVGLSELAKAVEMFAKRPQVQERLTTQLADTIMDKLKPKGAMVIIDAEHLCLSMRGIKKPNARTITSAVRGIFRTKESTRMELLELIKRRD

SEQ ID NO: 11600 - protein, 215 aa, unidentified
  source 1..215: note = Nitrospiraceae bacterium
  REGION 1..215: note = tr|A0A3N5HS99|A0A3N5HS99_9BACT GTP cyclohydrolase 1; OS = Nitrospiraceae bacterium OX=2026770 GN=folE PE=3 SV=1
MAKQGINRRGRQAVEEVNGNSRPADLAVLQSLVTEMLLALGEKPGRNGLLKTPERVAKALAFMTQGYHRNIDHLLNGALFPIEYDEMVIVKDIDFFSMCEHHLLPFYGRVHVGYLPNKKVVGLSKIPRIVDVFARRLQVQERLTVQIAETLKSKLNAHGVGVVVEARHLCMMMRGVEKQNTVAVSSSMLGAFRSQPQTRLEFLKLIHRGSVGDSD

SEQ ID NO: 11601 - protein, 183 aa, unidentified
  source 1..183: note = Nitrospirae bacterium
  REGION 1..183: note = tr|A0A1G1EVX2|A0A1G1EVX2_9BACT GTP cyclohydrolase 1; OS = Nitrospirae bacterium GWB2_47_37 OX=1801692 GN=folE; PE = 3 SV=1
MDKKKIEEGVRLILDGIGEDKQRPGLKDTPKRVAEMFAEIFAGLETPGEDLLKPIEGESHDEMVLLKDIPFYSVCEHHLLPFIGRAHIAYIPSGSIVGLSELAKALEHLAKRPQVQERLTSQLADMIMDRIKPRGCMVVIDAEHLCMSMRGIKKPGSRTATSAVRGIFRSKQSTREEMLSLIK

SEQ ID NO: 11602 - protein, 215 aa, unidentified
  source 1..215: note = Nitrospirae bacterium
  REGION 1..215: note = tr|A0A388QJ86|A0A388QJ86_9BACT GTP cyclohydrolase 1; OS = Nitrospirae bacterium OX=2026887 GN=folE PE=3 SV=1
MAKQVVKRRGQRQVEDVNGSGKPVDLDVLQSLVTEMLLALGEKPGRNGLVKTPERVAKALAFMTQGYQRDIDHLLNDALFPIEYDEMVIVKDLDFFSMCEHHLLPFYGKVHVGYLPNKKVVGLSKIPRIVDTFARRLQVQERLTLQIAETLKAKLNAHGVGVVVEARHLCMMMRGVEKQNTIAVTSSMLGAFRSQPQTRLEFLKLIRRGSVGDSD

SEQ ID NO: 11603 - protein, 222 aa, unidentified
  source 1..222: note = Nitrospirillum amazonense
  REGION 1..222: note = tr|A0A560JWY0|A0A560JWY0_9PROT GTP cyclohydrolase 1; OS = Nitrospirillum amazonense OX=28077 GN=folE PE=3 SV=1
MTHAKNTPADKIVAGPVHGRRTVVAQGRPSREEAEEAVRTLLRWAGDDPTREGLLGTPDRVVRSYEEFFAGYASDPMELLARTFEETDGYDEMVVLRDIRFESYCEHHMVPIIGVAHVAYLPRSRVVGISKLARVVEVYAKRLQIQEKMTSQIANTIDEVLQPLGVAVVIEASHQCMTTRGVHKPGVSMVTSRMLGAFRSDPSTRREFLAMIGNPSPAGSMF

SEQ ID NO: 11604 - protein, 222 aa, unidentified
  source 1..222: note = Nitrospirillum amazonense
  REGION 1..222: note = tr|A0A560FAV7|A0A560FAV7_9PROT GTP cyclohydrolase 1; OS = Nitrospirillum amazonense OX=28077 GN=folE PE=3 SV=1
MTHAKNTPADKIVAGPVHGRRTVVAQGRPSREEAEEAVRTLLRWAGDDPTREGLLGTPDRVVRSYEEFFAGYASDPMELLARTFEETDGYDEMVVLRDIRFESYCEHHMVPIIGVAHVAYLPRSRVVGISKLARVVEVYAKRLQIQEKMTSQIANTIDEVLQPLGVAVVIEASHQCMTTRGVHKPGVSMVTSRMLGAFRNDPSTRREFLAMIGNPSPAGSMF

SEQ ID NO: 11605 - protein, 214 aa, unidentified
  source 1..214: note = Niveispirillum cyanobacteriorum
  REGION 1..214: note = tr|A0A2K9NHN2|A0A2K9NHN2_9PROT GTP cyclohydrolase 1; OS = Niveispirillum cyanobacteriorum OX=1612173 GN=folE PE=3; SV = 1
MPGPVHGRRAGPAATNPNLVRPSKAEAEAAVRTLIRWAGDDPDREGLVGTPDRVVRSYEEFFAGYEVDPVDLLARTFEETDGYDEMVVLRNIRLESYCEHHMVPIIGKVHIAYLPRNRVVGISKLARVAEVYSKRLQIQEKMTAQIANTVDEVLEPLGVAVVIEATHQCMTTRGIHKPGVTMVTSRMLGAFREDEKTRREFLAMIGNPASSGEG

SEQ ID NO: 11606 - protein, 225 aa, unidentified
  source 1..225: note = Niveispirillum lacus
  REGION 1..225: note = tr|A0A255Z6E0|A0A255Z6E0_9PROT GTP cyclohydrolase 1; OS = Niveispirillum lacus OX=1981099 GN=folE PE=3 SV=1
MTAPKKTTDKVVPGPVHARRAGPAATNPNLIRPSKAEAEAAVRTLIRWAGDDPDREGLVGTPDRVVRSYEEFFAGYDVDPVDLLARTFEETDGYDEMVVLRNIRLESYCEHHMVPIIGKVHIAYLPRNRVVGISKLARVAEVYSKRLQIQEKMTAQIANTIDEVLEPLGVAVVIEATHQCMTTRGIHKPGVTMVTSRMLGAFREDDKTRREFLAMIGNPASSGEG

SEQ ID NO: 11607 - protein, 223 aa, Nocardia africana
  REGION 1..223: note = tr|A0A378WLR5|A0A378WLR5_9NOCA GTP cyclohydrolase 1; OS = Nocardia africana OX=134964 GN=folE PE=3 SV=1
MSANNSAPAGSDSASGAGAAVVAEAPAPVALGTGRTFDQKRAEAAVRELLVAVGEDPDRPGLIDTPARVARAYLEMFAGLYVEPDSVLNTTFDEGHQELVLVRDIPMYSTCEHHLVSFHGVAHVGYIPGPQGRVTGLSKLARLVDLYAKRPQVQERLTSQIADAVMRKLDPRGAIVVVEAEHLCMAMRGIRKPGASTTTSAVRGLLQTNAASRAEALDLILRK

SEQ ID NO: 11608 - protein, 217 aa, Nocardia alba
  REGION 1..217: note = tr|A0A4R1G3A0|A0A4R1G3A0_9NOCA GTP cyclohydrolase 1; OS = Nocardia alba OX=225051 GN=folE PE=3 SV=1
MSANKQDLDPTGELGASSPSELTALATGLPFDQARAESAVRELLLAVGEDPDRPGLVDTPARVARAYREIFAGLYTEPDAVLATTFDEGHQELVLVRDIPMFSTCEHHLVSFHGVAHVGYIPGSHGRVTGLSKLARVVDLYAKRPQVQERLTSQIADAVMRRLDPRGAIVVVEAEHLCMAMRGIRKPGASTTTSAVRGQLQTDAASRAEALDLILRK

SEQ ID NO: 11609 - protein, 227 aa, unidentified
  source 1..227: note = Nocardia amikacinitolerans
  REGION 1..227: note = tr|A0A285LVJ1|A0A285LVJ1_9NOCA GTP cyclohydrolase 1; OS = Nocardia amikacinitolerans OX=756689 GN=folE PE=3 SV=1
MSANHHAVGSALNGRDEVERNGAMPASTLPELVALETGRPFDQDRAEAAVRELLIAIGEDPDRPGLIETPARVARAYRETFAGLYQEPDAVLNTTFDEGHQELVLVRDIPMYSTCEHHLVSFHGVAHVGYIPGEHGRVTGLSKLARLVDLYAKRPQVQERLTSQIVDAIMRKLEPRGAIVVVEAEHLCMAMRGIRKPGASTTTSAVRGLLQTNAASRAEALELILRR

SEQ ID NO: 11610 - protein, 224 aa, Nocardia asteroides
  REGION 1..224: note = tr|U5EBG6|U5EBG6_NOCAS GTP cyclohydrolase 1; OS = Nocardia asteroides NBRC 15531 OX=1110697 GN=folE PE=3; SV = 1
MTANKKVAEPAGNGSIADGELGATSPQDLTALATGRRFDQDRAEAAVRELLIAVGEDPDRPGLLDTPARVARAYREMFAGLYTEPDEVLATTFDEGHQELVLVRDIPMFSTCEHHLVSFHGVAHVGYIPGTHGRVTGLSKLARVVDLYAKRPQVQERLTSQIADAVMRRLDPRGAIVVIEAEHLCMAMRGIRKPGASTTTSAVRGLLQTNAASRAEALDLILRK

SEQ ID NO: 11611 - protein, 197 aa, unidentified
  source 1..197: note = Nocardia bhagyanarayanae
  REGION 1..197: note = tr|A0A543FDR8|A0A543FDR8_9NOCA GTP cyclohydrolase 1; OS = Nocardia bhagyanarayanae OX=1215925 GN=folE PE=3 SV=1
MTRAALRVVHDHTTLDLDAAELAARDFLLALGVDLDADHLHATPGRMARAYAELFTSRPFDLTTFPNDEGYDELVLARRIPLRSVCEHHLLPFVGIAHVGYLPGQRILGLSKLARIVEHFSRRPQVQERLTKQIADWLAEHLQPKGVGVVIEAEHTCMTLRGVQAAGATTVTSTLLGSLREDPRSRQEFFALTGIAP

SEQ ID NO: 11612 - protein, 227 aa, unidentified
  source 1..227: note = Nocardia bhagyanarayanae
  REGION 1..227: note = tr|A0A543F608|A0A543F608_9NOCA GTP cyclohydrolase 1; OS = Nocardia bhagyanarayanae OX=1215925 GN=folE PE=3 SV=1
MSANHHAVGSALNGRDEVERNGSMPASTRPELVALETGRPFDQDRAEAAVRELLIAIGEDPDRPGLIETPARVARAYRETFAGLYQEPDAVLNTTFDEGHQELVLVRDIPMYSTCEHHLVSFHGVAHVGYIPGEHGRVTGLSKLARLVDLYAKRPQVQERLTSQIVDAVMRKLEPRGAIVVVEAEHLCMAMRGIRKPGASTTTSAVRGLLQTNAASRAEALELILRR

SEQ ID NO: 11613 - protein, 227 aa, Nocardia brasiliensis
  REGION 1..227: note = tr|A0A379A743|A0A379A743_9NOCA GTP cyclohydrolase 1; OS = Nocardia brasiliensis OX=37326 GN=folE PE=3 SV=1
MSANNHLGGHALADPDGAAENGSANGVTGPELVALATGKSFDQARAEAAVRELLLAVGEDPDRPGLIDTPARVARAYREMFAGLYVEPDAVLNTTFDEGHQELVLVRDIPLYSTCEHHLVSFHGVAHVGYIPGKHGRVTGLSKLARVVDLYAKRPQVQERLTSQIADAVMRKLDPRGAIVVVEAEHLCMAMRGIRKPGASTTTSAVRGLLQSSPSSRAEALDLILRK

SEQ ID NO: 11614 - protein, 227 aa, Nocardia brasiliensis
  REGION 1..227: note = tr|K0ELT8|K0ELT8_9NOCA GTP cyclohydrolase 1; OS = Nocardia brasiliensis ATCC 700358 OX=1133849 GN=folE; PE = 3 SV=1
MSANNHLGGHALADPDGAAETGSANGVTGPELVALETGRPFDQARAEAAVRELLIAVGEDPDRPGLVDTPARVARAYREMFAGLYVEPDAVLNTTFDEGHQELVLVRDIPLYSTCEHHLVSFHGVAHVGYIPGKHGRVTGLSKLARVVDLYAKRPQVQERLTSQIADAVMRKLDPRGAIVVVEAEHLCMAMRGIRKPGASTTTSAVRGLLQSSPSSRAEALDLILRK

SEQ ID NO: 11615 - protein, 223 aa, Nocardia cerradoensis
  REGION 1..223: note = tr|A0A231H6C9|A0A231H6C9_9NOCA GTP cyclohydrolase 1; OS = Nocardia cerradoensis OX=85688 GN=folE PE=3 SV=1
MSANNSAPAGSDSASGAGAAVVAEAPAPIALGTGRTFDQKRAEAAVRELLVAVGEDPDRPGLIDTPARVARAYLEMFAGLYVEPDSVLNTTFDEGHQELVLVRDIPMYSTCEHHLVSFHGVAHVGYIPGPQGRVTGLSKLARLVDLYAKRPQVQERLTSQIADAVMRKLDPRGAIVVVEAEHLCMAMRGIRKPGASTTTSAVRGLLQTNASSRAEALDLILRK

SEQ ID NO: 11616 - protein, 227 aa, Nocardia cyriacigeorgica
  REGION 1..227: note = tr|H6RAY8|H6RAY8_NOCCG GTP cyclohydrolase 1; OS = Nocardia cyriacigeorgica (strain GUH-2) OX=1127134; GN = folE PE=3 SV=1
MSANDHSNGQAPTVPNRAVLDDPGPELSDSELIALHTGKPFDQARAEAAIRELLIAVGEDPDRPGLVDTPARVARAYREMFAGLYLEPDAVLNTTFDEEHQELVLVRDIPLYSTCEHHLVSFHGVAHVGYIPGTHGRVTGLSKLARLVDLYAKRPQVQERLTSQIADAVMRKLDPRGAIVVVEAEHLCMAMRGIRKPGASTTTSAVRGLLQTNAASRAEALDLILRK

SEQ ID NO: 11617 - protein, 209 aa, Nocardia cyriacigeorgica
  REGION 1..209: note = tr|A0A2L2JYS3|A0A2L2JYS3_9NOCA GTP cyclohydrolase 1; OS = Nocardia cyriacigeorgica OX=135487 GN=folE PE=3 SV=1
MLDDPGPELSDSELIALHTGKPFDQPRAEAAIRELLIAVGEDPDRPGLIDTPARVARAYREMFAGLYLEPDAVLNTTFDEEHQELVLVRDIPLYSTCEHHLVSFHGVAHVGYIPGTHGRVTGLSKLARLVDLYAKRPQVQERLTSQIADAVMRKLDPRGAIVVVEAEHLCMAMRGIRKPGASTTTSAVRGLLQTNAASRAEALDLILRK

SEQ ID NO: 11618 - protein, 216 aa, unidentified
  source 1..216: note = Nocardia donostiensis
  REGION 1..216: note = tr|A0A1W0BPB5|A0A1W0BPB5_9NOCA GTP cyclohydrolase 1; OS = Nocardia donostiensis OX=1538463 GN=folE PE=3 SV=1
MTPAIPDIAAELGEGETSEGLVAQHTGKPFDRVRAEAAVRELLIAVGEDPDRPGLIDTPARVARAYQEMFAGLYVEPDRVLDTTFDEGHQELVLVRDIPLYSTCEHHLVSFHGVAHVGYIPGQSGRVTGLSKLARLVDLYAKRPQVQERLTSQIADAVMRKLEPRGAIVVVEAEHLCMAMRGIRKPGASTTTSAVRGLLQTSAASRSEALELILRK

SEQ ID NO: 11619 - protein, 203 aa, Nocardia farcinica
  REGION 1..203: note = tr|A0A1C2B408|A0A1C2B408_NOCFR GTP cyclohydrolase 1; OS = Nocardia farcinica OX=37329 GN=folE PE=3 SV=1
MSISERRDAVLEGPRSDFDQARAEAAVRELLLAVGEDPDREGLIRTPTRVANAYREMFAGLYTEPDEVLATTFDEDHDELVLVKDIPMYSTCEHHLVSFHGVAHVGYIPGTSGRVTGLSKLARLVDLYAKRPQVQERLTSQIADAMMRRLEPRGVIVVIEAEHLCMAMRGIRKPGATTTTSAVRGIFKTSAVSRGEALDLIAR

SEQ ID NO: 11620 - protein, 228 aa, Nocardia farcinica
  REGION 1..228: note = tr|Q5Z2V0|Q5Z2V0_NOCFA GTP cyclohydrolase 1; OS = Nocardia farcinica (strain IFM 10152) OX=247156 GN=folE; PE = 3 SV=1
MSANHNAVDQVPNGLDRAAFDDDAQPAVAEPPLHALATGRPFDQPRAEAAIRELLIAVGEDPDRPGLIDTPARVARAYREMFAGLYVEPDRVLDTTFDEGHQELVLVRDIPMYSTCEHHLVSFHGVAHVGYIPGPAGRVTGLSKLARLVDLYAKRPQVQERLTSQIADAVMRKLEPRGAIVVVEAEHLCMAMRGIRKPGASTTTSAVRGLLQTNAASRAEALDLILRK

SEQ ID NO: 11621 - protein, 231 aa, Nocardia fluminea
  REGION 1..231: note = tr|A0A2N3V9K8|A0A2N3V9K8_9NOCA GTP cyclohydrolase 1; OS = Nocardia fluminea OX=134984 GN=folE PE=3 SV=1
MLGASRKYHGGAEKLSANKQELDPAGELGATSPSVLTALATGMPFDQVRAENAVRELLIAVGEDPDRPGLLDTPARVARAYREMFAGLYTEPDAVLATTFDEGHQELVLVRDIPMFSTCEHHLVSFHGVAHVGYIPGSHGRVTGLSKLARVVDLYAKRPQVQERLTSQIADAVMRRLDPRGAIVVIEAEHLCMAMRGIRKPGASTTTSAVRGQLQTDSASRAEALDLILRK

SEQ ID NO: 11622 - protein, 226 aa, Nocardia ignorata
  REGION 1..226: note = tr|A0A4R6PM81|A0A4R6PM81_9NOCA GTP cyclohydrolase 1; OS = Nocardia ignorata OX=145285 GN=folE PE=3 SV=1
MSANRKVAEPAGNGSGFDPAGELGETSPAELTALATGRPFDQQRAENAVRELLLAVGEDPDRPGLLDTPARVARAYREMFAGLYTEPDEVLATTFDEGHQELVLVRDIPMFSTCEHHLVSFHGVAHVGYIPGPHGRVTGLSKLARVVDLYAKRPQVQERLTSQVADAVMRRLDPRGAIVVIEAEHLCMAMRGIRKPGASTTTSAVRGLLQTNAASRSEALDLILRK

SEQ ID NO: 11623 - protein, 227 aa, Nocardia iowensis
  REGION 1..227: note = tr|Q8GLS8|Q8GLS8_NOCIO GTP cyclohydrolase 1; OS = Nocardia iowensis OX=204891 GN=gch PE=3 SV=1
MSANNHVGGHALADSDGTAENGSGNGMTRPELIALETGRAFDQDRAEAAVRELLLAVGENPDRPGLIDTPARVARAYREMFAGLYVEPEDVLNTTFDEGHQELVLVRDIPLYSTCEHHLVSFHGVAHVGYIPGKHGRVTGLSKLARLVDLYAKRPQVQERLTSQVADAVMRKLDPRGAIVVVEAEHLCMAMRGIRKPGASTTTSAVRGLLQSSPSSRSEALDLILRK

SEQ ID NO: 11624 - protein, 222 aa, Nocardia mexicana
  REGION 1..222: note = tr|A0A370GZ80|A0A370GZ80_9NOCA GTP cyclohydrolase 1; OS = Nocardia mexicana OX=279262 GN=folE PE=3 SV=1
MSVNNRAVAESDASSVVAEDFESAVSPVALDTGRPFDQDRAEAAVRELLLAVGENPDRPGLADTPARVARAYREMFAGLYTEPDSVLNTTFDEGHQELVLVRDIPLYSTCEHHLVSFHGVAHVGYIPGPHGRVTGLSKLARLVDLYAKRPQVQERLTSQIADAVMRKLDPRGAIVVVEAEHLCMAMRGIRKPGASTTTSAVRGLLQTSASSRAEALDLILRK

SEQ ID NO: 11625 - protein, 226 aa, Nocardia neocaledoniensis
  REGION 1..226: note = tr|A0A317N2V7|A0A317N2V7_9NOCA GTP cyclohydrolase 1; OS = Nocardia neocaledoniensis OX=236511 GN=folE PE=3 SV=1
MSADKNLAEQARNGRLADPAGELGANSPAELTALATGRPFDQARAEAAVRELLLAVGEDPDRPGLLDTPARVARAYREMFAGLYTEPDEVLATTFDEGHQELVLVRDIPMFSTCEHHLVSFHGVAHVGYIPGTHGRVTGLSKLARVVDLYAKRPQVQERLTSQIADAVMRRLDPRGAIVVVEAEHLCMAMRGIRKPGASTTTSAVRGLLQTNAASRAEALDLILRK

SEQ ID NO: 11626 - protein, 227 aa, Nocardia ninae
  REGION 1..227: note = tr|A0A511M9Q7|A0A511M9Q7_9NOCA GTP cyclohydrolase 1; OS = Nocardia ninae NBRC 108245 OX=1210091 GN=folE PE=3 SV=1
MSANNHLGGHVLADSDGFDEDGSGNGVTRPELIALETGRPFDQDRAEAAIRELLLAVGENPDRPGLIDTPARVARAYREMFAGLYVEPDAVLNTTFDEGHQELVLVRDIPMYSTCEHHLVSFHGVAHVGYIPGKHGRVTGLSKLARLVDLYAKRPQVQERLTSQVADAVMRKLDPRGAIVVIEAEHLCMAMRGIRKPGASTTTSAVRGLLQSSPSSRSEALDLILRK

SEQ ID NO: 11627 - protein, 220 aa, Nocardia nova
  REGION 1..220: note = tr|W5TDC7|W5TDC7_9NOCA GTP cyclohydrolase 1; OS = Nocardia nova SH22a OX=1415166 GN=folE1 PE=3 SV=1
MSANNGASAGSDTASLDAAVVEAPPIALSTGRPFDQERAEAAVRELLIAVGEDPDRPGLLDTPARVARAYRETFAGLYTEPDSVLNTTFDEGHQELVLVRDIPMYSTCEHHLVSFHGVAHVGYIPGPQGRVTGLSKLARLVDLYAKRPQVQERLTSQIADAVMRKLDPRGAIVVIEAEHLCMAMRGIRKPGASTTTSAVRGLLQTNASSRAEALDLILRK

SEQ ID NO: 11628 - protein, 198 aa, Nocardia nova
  REGION 1..198: note = tr|W5TGG8|W5TGG8_9NOCA GTP cyclohydrolase 1; OS = Nocardia nova SH22a OX=1415166 GN=folE2 PE=3 SV=1
MTRSTLHVARTASSVIDLPAAEDAARAFLTALGMDLTSDHLQATPRRMASAYAELFTPRSFALTTFPNEEGYDELVLARRIPLRSVCEHHLLPFVGVAHVGYLPGERILGLSKLARVVEHFSSRPQVQERLTKQIADWLTEQLQPRGVGVVIEAEHSCMTLRGVHAIGTSTVTSTLLGALREDARSRQEFLSLTAVTS

SEQ ID NO: 11629 - protein, 206 aa, Nocardia otitidiscaviarum
  REGION 1..206: note = tr|A0A378YEC9|A0A378YEC9_9NOCA GTP cyclohydrolase 1; OS = Nocardia otitidiscaviarum OX=1823 GN=folE PE=3 SV=1
MSANNRVVSGPIALDTGRPFDQERAEAAVRELLIAVGEDPNRPGLIDTPGRVARAYREMFAGLYTEPDAVLNTTFDEGHQELVLVRDIPMYSTCEHHLVSFHGVAHVGYIPGPHGRVTGLSKLARLVDLYAKRPQVQERLTSQIVDAVMRKLDPRGAIVVVEAEHLCMAMRGIRKPGASTTTSAVRGLLQSSPSSRAEALDLILRK

SEQ ID NO: 11630 - protein, 211 aa, Nocardia pseudobrasiliensis
  REGION 1..211: note = tr|A0A370I5Q6|A0A370I5Q6_9NOCA GTP cyclohydrolase 1; OS = Nocardia pseudobrasiliensis OX=45979 GN=folE PE=3 SV=1
MSANNRVVTEPDIDAQVAIETGRPFDQGRAEAAVRELLLAVGENPDRPGLRDTPARVARAYREIFAGLFTEPDSVLNTTFDEGHQELVLVRDIPMYSTCEHHLVSFHGVAHVGYIPGTHGRVTGLSKLARLVDLYAKRPQVQERLTSQIVDAVMRKLDPRGAIVVIEAEHLCMAMRGIRKPGASTTTSAVRGILQSSASSRAEALDLILRK

SEQ ID NO: 11631 - protein, 221 aa, Nocardia puris
  REGION 1..221: note = tr|A0A366DBC6|A0A366DBC6_9NOCA GTP cyclohydrolase 1; OS = Nocardia puris OX=208602 GN=folE PE=3 SV=1
MSANNHVVGSALTEVARDGQPARPELVALGTGRAFDQARAEAAVRELLIAVGEDPDRPGLIDTPSRVARAYREVFAGLYVEPDRVLDTTFDEGHQELVLVRDIPMYSTCEHHLVSFHGVAHVGYIPGPSGRVTGLSKLARLVDLYAKRPQVQERLTSQVADAVMRKLEPRGAIVVVEAEHLCMAMRGIRKPGASTTTSAVRGLLQSNAASRAEALDLILRK

SEQ ID NO: 11632 - protein, 195 aa, Nocardia seriolae
  REGION 1..195: note = tr|A0A3F2UPL6|A0A3F2UPL6_9NOCA GTP cyclohydrolase 1; OS = Nocardia seriolae OX=37332 GN=folE PE=3 SV=1
MALETGRPFDQDRAEAAVRELLIAVGEDPDRPGLADTPGRVARAYREMFAGLFTDPAEVLNTTFDEGHQELVLVRDIPMYSTCEHHLVAFHGVAHVGYIPGQHGRVTGLSKLARLVDLYAKRPQVQERLTSQIADAVMAKLDPRGAIVVIEAEHLCMAMRGIRKPGASTTTSAVRGTLQSNASTRAEALDLILRK

SEQ ID NO: 11633 - protein, 211 aa, Nocardia seriolae
  REGION 1..211: note = tr|A0A0B8NE02|A0A0B8NE02_9NOCA GTP cyclohydrolase 1; OS = Nocardia seriolae OX=37332 GN=gch1 PE=3 SV=1
MSATNTTANNRVGSGPIALETGRPFDQDRAEAAVRELLIAVGEDPDRPGLADTPGRVARAYREMFAGLFTDPAEVLNTTFDEGHQELVLVRDIPMYSTCEHHLVAFHGVAHVGYIPGQHGRVTGLSKLARLVDLYAKRPQVQERLTSQIADAVMAKLDPRGAIVVIEAEHLCMAMRGIRKPGASTTTSAVRGTLQSNASTRAEALDLILRK

SEQ ID NO: 11634 - protein, 203 aa, Nocardia sp.
  REGION 1..203: note = tr|A0A2T2ZN39|A0A2T2ZN39_9NOCA GTP cyclohydrolase 1; OS = Nocardia sp. MDA0666 OX=2135448 GN=folE PE=3 SV=1
MVAEAPAPIALGTGRTFDQKRAEAAVRELLVAVGEDPERPGLIDTPARVARAYLEMFAGLYVEPDSVLNTTFDEGHQELVLVRDIPMYSTCEHHLVSFHGVAHVGYIPGPQGRVTGLSKLARLVDLYAKRPQVQERLTSQIADAVMRKLDPRGAIVVVEAEHLCMAMRGIRKPGASTTTSAVRGLLQTNASSRAEALDLILRK

SEQ ID NO: 11635 - protein, 218 aa, Nocardia sp.
  REGION 1..218: note = tr|A0A3A4KFJ9|A0A3A4KFJ9_9NOCA GTP cyclohydrolase 1; OS = Nocardia sp. YIM PH 21724 OX=2340916 GN=folE PE=3 SV=1
MSASKHVGDPALNGSDGAAQEALVALHTAAPFDQARAESAIRELLLAVGEDPDRPGLLETPARVARAYREMFAGLYVEPDSVLDTTFDEGHQELVLVRDIPMYSTCEHHLVSFHGVAHVGYIPGPHGRVTGLSKLARLVDLYAKRPQVQERLTSQIADAVMRKLEPRGAIVVIEAEHLCMAMRGIRKPGASTTTSAVRGLLQSSAVSRSEALDLILRR

SEQ ID NO: 11636 - protein, 223 aa, Nocardia tenerifensis
  REGION 1..223: note = tr|A0A318K0M4|A0A318K0M4_9NOCA GTP cyclohydrolase 1; OS = Nocardia tenerifensis OX=228006 GN=folE PE=3 SV=1
MSANNHIGAQALADSDGVDEIGSGVTELVALETGRSFDQARAEAAVRELLLAVGEDPDRPGLLDTPARVARAYREMFAGLYVEPDSVLNTTFDEGHQELVLVRDIPMYSTCEHHLVSFHGVAHVGYIPGKHGRVTGLSKLARLVDLYAKRPQVQERLTSQIADAVMRKLDPRGAIVVVEAEHLCMAMRGIRKPGASTTTSAVRGLLQSSPSSRSEALDLILRK

SEQ ID NO: 11637 - protein, 211 aa, Nocardia terpenica
  REGION 1..211: note = tr|A0A164HPZ8|A0A164HPZ8_9NOCA GTP cyclohydrolase 1; OS = Nocardia terpenica OX=455432 GN=folE PE=3 SV=1
MEVSRVSANNRVVPGPVALDTGRSFDQPRAEAAIRELLIAVGEDPDRPGLAETPSRVARAYREMFAGLFTEPDAVLDTTFEEGHQEMVLVRDIPMYSTCEHHLVSFHGVAHVGYIPGSHGRVTGLSKLARLVDLYAKRPQVQERLTSQVADAVMRKLDPRGAIVVIEAEHLCMAMRGIRKPGASTTTSAVRGILQSSASTRAEALDLILRK

SEQ ID NO: 11638 - protein, 206 aa, Nocardia terpenica
  REGION 1..206: note = tr|A0A291RDX7|A0A291RDX7_9NOCA GTP cyclohydrolase 1; OS = Nocardia terpenica OX=455432 GN=folE PE=3 SV=1
MSANNRVVPGPVALDTGRSFDQSRAEAAIRELLIAVGEDPDRPGLAETPARVARAYREMFAGLFTEPDAVLDTTFEEGHQEMVLVRDIPMYSTCEHHLVSFHGVAHVGYIPGSHGRVTGLSKLARLVDLYAKRPQVQERLTSQVADAVMRKLDPRGAIVVIEAEHLCMAMRGIRKPGASTTTSAVRGILQSSASTRAEALDLILRK

SEQ ID NO: 11639 - protein, 201 aa, unidentified
  source 1..201: note = Nocardia vulneris
  REGION 1..201: note = tr|A0A0C1AVS2|A0A0C1AVS2_9NOCA GTP cyclohydrolase 1; OS = Nocardia vulneris OX=1141657 GN=folE PE=3 SV=1
MTGPELVALETGKPFDQARAEAAVRELLIAVGEDPDRPGLVDTPARVARAYREMFAGLYVEPDAVLNTTFDEGHQELVLVRDIPLYSTCEHHLVSFHGVAHVGYIPGKHGRVTGLSKLARVVDLYAKRPQVQERLTSQIADAVMRKLDPRGAIVVVEAEHLCMAMRGIRKPGASTTTSAVRGLLQSSPSSRAEALDLILRK

SEQ ID NO: 11640 - protein, 212 aa, unidentified
  source 1..212: note = Nocardioidaceae bacterium
  REGION 1..212: note = tr|E9UND6|E9UND6_9ACTN GTP cyclohydrolase 1; OS = Nocardioidaceae bacterium Broad-1 OX=408672 GN=folE; PE = 3 SV=1
MSETFDDVAPVHVPERDVADVPPFDQKRAEAAVRELLYAIGEDPDREGLLETPARVARAYQEVTRGLHQEPKDVLTTTFDLGHDEMVLVRDIELWSMCEHHLVPFTGVAHVGYIPAESGKITGLSKLARLVDVYAKRPQVQERLTTQVADALTEILEARGVIVVIEAEHLCMTMRGVKKAGARTITSAVRGTMRSNATTRAEAMALIRGGTR

SEQ ID NO: 11641 - protein, 222 aa, unidentified
  source 1..222: note = Nocardioides albertanoniae
  REGION 1..222: note = tr|A0A543A1W9|A0A543A1W9_9ACTN GTP cyclohydrolase 1; OS = Nocardioides albertanoniae OX=1175486 GN=folE PE=3 SV=1
MSDVDEKSDGVSARNTQVTPVHTPERDVADVPAFDQQRAEAAVRELLFAIGEDPDREGLLDTPARVARAYRELTQGLHQAPEDVLTTTFDLGHDEMVLVRDIELWSMCEHHLVPFTGVAHVGYIPAATGKITGLSKLARLVDVYAKRPQVQERLTTQVADALMDILEARGVIVVIEAEHLCMTMRGVRKAGARTITSAVRGTMRSNATTRAEAMALIRGGTR

SEQ ID NO: 11642 - protein, 201 aa, unidentified
  source 1..201: note = Nocardioides albidus
  REGION 1..201: note = tr|A0A5C4VS28|A0A5C4VS28_9ACTN GTP cyclohydrolase 1; OS = Nocardioides albidus OX=1517589 GN=folE PE=3 SV=1
MTVLEDRWRPRIVTEAPSVDRAAAQVAAVDLLSALGLDLSVEHLVDTPRRMVDALVELTSPPEFELTTFPNDDEYDELVLVEDIPVQSLCEHHMLPFVGVAHVGYLPGGRILGLSKFARMVDHHARRPQTQERLTKRIADHLQRALEPRGVGVVIDAQHTCMSLRGARATGSRTLTSALFGQLRDDARSRAEFLDLTRGRR

SEQ ID NO: 11643 - protein, 208 aa, unidentified
  source 1..208: note = Nocardioides albidus
  REGION 1..208: note = tr|A0A5C4VK43|A0A5C4VK43_9ACTN GTP cyclohydrolase 1; OS = Nocardioides albidus OX=1517589 GN=folE PE=3 SV=1
MIDPVSAPDRGPQDIPPFDQPRAEAAVRELLAAIGEDPDREGLRDTPARVARAYAELTAGLRMVPEDVLTTTFDLGHDEMVLVRDIELWSMCEHHLVPFTGVAHVGYIPAETGKITGLSKLARLVDVYAKRPQVQERLTTQVADSLMELLDARGVIVVIEAEHLCMTMRGVRKAGARTITSAVRGTMLSDPATRAEAMALIHSSRGRG

SEQ ID NO: 11644 - protein, 206 aa, Nocardioides alpinus
  REGION 1..206: note = tr|A0A1I1AS46|A0A1I1AS46_9ACTN GTP cyclohydrolase 1; OS = Nocardioides alpinus OX=748909 GN=folE PE=3 SV=1
MTDPVSTPERAPEDIPAFDHPRAEAAIRELLAAMGEDPDREGLLDTPARVARAYAELTQGIRQTAHDVLTTTFDLGHNEMVLVRDIELWSMCEHHLVPFTGVAHVGYIPARTGKITGLSKLARLVDVYAKRPQVQERLTTQVADSLMEILEARGVIVVIEAEHLCMTMRGVKKAGARTITSAVRGSFLKNQATRAEAMALIHSGTR

SEQ ID NO: 11645 - protein, 218 aa, unidentified
  source 1..218: note = Nocardioides bacterium
  REGION 1..218: note = tr|A0A3D0RU99|A0A3D0RU99_9ACTN GTP cyclohydrolase 1; OS = Nocardioides bacterium OX=1565122 GN=folE PE=3 SV=1
MTSTATNATNQATRPAVEQVAARRWRPRVTHTRPEIDSAAAEQAAADLLTALGLDLTDENLAETPRRMARALIEMTSGSDFELTTFPNDEEYDELVLVRDIPLRSVCEHHMLPFVGVAHVGYLPGDRILGLSKFARMVDLHARRPQTQERLTKRIADHLQDEMQPRGVGVVIEAEHTCMSLRGARAAGARTTTSALFGRLRDDPRSRAEFLALTRRTP

SEQ ID NO: 11646 - protein, 205 aa, unidentified
  source 1..205: note = Nocardioides bacterium
  REGION 1..205: note = tr|A0A4S5APC8|A0A4S5APC8_9ACTN GTP cyclohydrolase 1; OS = Nocardioides bacterium OX=1565122 GN=folE PE=3 SV=1
MADPIFTPQREPEDVPPYDHERAEAAVRELLIAIGEDPEREGLQQTPARVARAYAELTAGMRMRPEDVLTTTFDIGHDEMVLVRDIELWSMCEHHLVPFTGVAHVGYIPAESGKITGLSKLARLVDLYAKRPQVQERLTTQIADSLMELLEARGVIVVIEAEHLCMTMRGVRKAGARTITSAVRGLMHRSATRSEAMALIHSPRH

SEQ ID NO: 11647 - protein, 204 aa, unidentified
  source 1..204: note = Nocardioides baekrokdamisoli
  REGION 1..204: note = tr|A0A3G9J2W7|A0A3G9J2W7_9ACTN GTP cyclohydrolase 1; OS = Nocardioides baekrokdamisoli OX=1804624 GN=folE PE=3; SV = 1
MADPISLSEPAERPAFDQARAEAAVRELLIAIGEDPDREGLLETPARVARAYEELTSGLRQKPDDVLTTVFDIGHDELVLVRDIELWSMCEHHLVPFTGVAHVGYIPAESGKITGLSKLARLVDVYAKRPQVQERLTTQVADALMEILEARGVIVVIEAEHLCMTMRGVRKAGARTITSAVRGSMRSNASTRAEAMSLIRGGTR

SEQ ID NO: 11648 - protein, 206 aa, Nocardioides caeni
  REGION 1..206: note = tr|A0A4S8NDC9|A0A4S8NDC9_9ACTN GTP cyclohydrolase 1; OS = Nocardioides caeni OX=574700 GN=folE PE=3 SV=1
MPDPISLPDRGASDAPEFDHGRAEAAVRELLAAIGEDPEREGLRDTPARVARAYAELTAGLRMRPEDVLTTTFDLGHDEMVLVRDIELWSMCEHHLVPFTGVAHVGYIPAESGKITGLSKLARLVDVYAKRPQVQERLTTQVADSLVEILEARGVIVVIEAEHLCMTMRGVRKAGARTITSAVRGSFLTDQATRAEAMALIHSPRG

SEQ ID NO: 11649 - protein, 202 aa, unidentified
  source 1..202: note = Nocardioides currus
  REGION 1..202: note = tr|A0A2R7Z2A8|A0A2R7Z2A8_9ACTN GTP cyclohydrolase 1; OS = Nocardioides currus OX=2133958 GN=folE PE=3 SV=1
MTDPISLEERDVPDFDHDRAEAAVRELLAAIGEDPDREGLRDTPARVARAYAELTQGLRQRPEDVLTTTFDLGHDEMVLVRDIELWSMCEHHLVPFTGVAHVGYIPAATGKITGLSKLARLVDVYAKRPQVQERLTTQVADALMDILDARGVIVVIEAEHLCMTMRGVRKAGARTITSAVRGTMLTKQATRAEAMALINSRR

SEQ ID NO: 11650 - protein, 201 aa, Nocardioides daphniae
  REGION 1..201: note = tr|A0A4P7UF84|A0A4P7UF84_9ACTN GTP cyclohydrolase 1; OS = Nocardioides daphniae OX=402297 GN=folE PE=3 SV=1
MVAPERDPADVPAFDHARAEAAVRELLAAMGEDVEREGLRDTPARVARAYAELTVGLHQRPEDVLTTTFDLGHDEMVLVRDIELWSMCEHHLVPFTGVAHVGYIPSTSGKITGLSKMARLVDVYSKRPQVQERLTTQIADAMTDILEARGVIVVIEAEHLCMTMRGVRKAGARTITSAVRGQMRDAATRSEAMALIRSGTR

SEQ ID NO: 11651 - protein, 206 aa, Nocardioides dokdonensis
  REGION 1..206: note = tr|A0A1A9GIF8|A0A1A9GIF8_9ACTN GTP cyclohydrolase 1; OS = Nocardioides dokdonensis FR1436 OX=1300347 GN=folE_1; PE = 3 SV=1
MTDPVTVAERDPGDIPDFDHARAEAAVRELLLAIGEDPDREGLLETPARVARAYAETTAGLRMRAEDVLTTTFDLGHGEMVLVRDIELWSMCEHHLVPFTGVAHVGYIPAESGKITGISKLARLVDVYAQRPQVQERLTTQIVESLMRILDARGAVVVIEAEHLCMTMRGVRKAGARTITSAVRGTMLTDQATRAEAMALIHGTTR

SEQ ID NO: 11652 - protein, 213 aa, Nocardioides dokdonensis
  REGION 1..213: note = tr|A0A1A9GJW6|A0A1A9GJW6_9ACTN GTP cyclohydrolase 1; OS = Nocardioides dokdonensis FR1436 OX=1300347 GN=folE_2; PE = 3 SV=1
MTALTAMTTATRTTPSCAPAPDTEAATRAAAALLTALGVDWDTVHMARTPARLAAAYAEMLTAPAFELTTFPNDQGHDGQGHDELVVVRDIAFQSLCEHHLLPFVGVAHVGYLPGERLLGLSKFARLVDFTARAPQTQERLTQQVARQLEKHLRPRGVGVVLEADHSCMTLRGARAGGARTVTSTLLGTLRHDPAARAEFLDLARPARSPGVR

SEQ ID NO: 11653 - protein, 206 aa, Nocardioides exalbidus
  REGION 1..206: note = tr|A0A1H4R930|A0A1H4R930_9ACTN GTP cyclohydrolase 1; OS = Nocardioides exalbidus OX=402596 GN=folE PE=3 SV=1
MTDPVSIPERAPEDVPVFDHERAEAAVRELLFAIGEDPDREGLLETPARVARAYAELTQGLRQSAADVLTTTFDLGHEEMVLVRDIELWSMCEHHLVPFTGVAHVGYIPAETGKITGLSKLARLVDVYAKRPQVQERLTTQVADSLLEILEARGVIVVIEAEHLCMTMRGVRKAGARTITSAVRGSFLTDSATRAEAMALIRSGTR

SEQ ID NO: 11654 - protein, 206 aa, Nocardioides ganghwensis
  REGION 1..206: note = tr|A0A4Q2SFF2|A0A4Q2SFF2_9ACTN GTP cyclohydrolase 1; OS = Nocardioides ganghwensis OX=252230 GN=folE PE=3 SV=1
MTDPITVPERAPEDVPDFDHARAEAAVRELLFAIGEDPDREGLRETPARVARAYAELTHGLRQTAEDVLTTTFDLGHEEMILVRDIELWSMCEHHLVPFTGVAHVGYIPADTGKITGLSKLARLVDVYAKRPQVQERLTTQVADSLMEILGARGVIVVIEAEHLCMTMRGVKKAGARTITSAVRGGFLTNQATRAEAMTLIHSGTR

SEQ ID NO: 11655 - protein, 206 aa, unidentified
  source 1..206: note = Nocardioides glacieisoli
  REGION 1..206: note = tr|A0A4Q2RSE9|A0A4Q2RSE9_9ACTN GTP cyclohydrolase 1; OS = Nocardioides glacieisoli OX=1168730 GN=folE PE=3 SV=1
MTDPITVPERPVEDVPEFDHARAEAAVRELLAAIGEDPDREGLRDTPARVARAYAELTQGLRQTAQEVLTTTFDLGHDEMVLVRDIELWSMCEHHLVPFTGVAHVGYIPADTGKITGLSKLARLVDVYAKRPQVQERLTTQVADSLMEILGARGVIVVIEAEHLCMTMRGVKKAGARTITSAVRGSFLTHQATRAEAMALIHSGTR

SEQ ID NO: 11656 - protein, 201 aa, unidentified
  source 1..201: note = Nocardioides immobilis
  REGION 1..201: note = tr|A0A417Y2G3|A0A417Y2G3_9ACTN GTP cyclohydrolase 1; OS = Nocardioides immobilis OX=2049295 GN=folE PE=3 SV=1
MHTPDRDPAQVPPYDHVRAEAAVRELLIAVGEDPEREGLLETPARVARAYAELTAGLRLRPEDVLTTTFDLGHDEMVLVRDIELWSMCEHHLVPFTGVAHVGYIPAETGKITGLSKLARLVDVYAKRPQVQERLTTQIADALMRILEARGVIVVVEAEHLCMTMRGVRKAGARTITSAIRGSMHNAATRNEAMSLIMHGTR

SEQ ID NO: 11657 - protein, 212 aa, Nocardioides iriomotensis
  REGION 1..212: note = tr|A0A4Q5J9U8|A0A4Q5J9U8_9ACTN GTP cyclohydrolase 1; OS = Nocardioides iriomotensis OX=715784 GN=folE PE=3 SV=1
MQTDGHASGEITRITQEPRDNIPEFDQPRAEAAVRELLFAVGEDPDREGLRDTPARVARAYKELLSGMRLGAEDVLTTTFDLGHDELILVRDIELWSMCEHHLVPFTGVAHIGYIPNDNGRITGLSKLARLVDVYAKRPQVQERLTTQVADALMEILEAQGAIVVIEAEHLCMTMRGVKKPGAKTITSAIRGSMHRAATRQEAMSLIMRGTR

SEQ ID NO: 11658 - protein, 208 aa, Nocardioides iriomotensis
  REGION 1..208: note = tr|A0A4Q5J0L4|A0A4Q5J0L4_9ACTN GTP cyclohydrolase 1; OS = Nocardioides iriomotensis OX=715784 GN=folE PE=3 SV=1
MSSRQPEAHVLPLRARMSAPHVDVDRETAEAAATTLLAALGLPLDSPHMRETPRRMVAAYAEMLTAPSFDFTTFPNSEEYDELVVVEDIPVRSLCEHHMLPFVGVAHVGYLPADHVLGLSKLARVVDLYSHRAQTQERLTKQVAEHLQEHLTPRGVGVVIEAEHTCMTLRGVRAPGTRTVTSALLGTLRTHPSSRAEFLDLVRGTRPR

SEQ ID NO: 11659 - protein, 206 aa, unidentified
  source 1..206: note = Nocardioides lianchengensis
  REGION 1..206: note = tr|A0A1G6PJ71|A0A1G6PJ71_9ACTN GTP cyclohydrolase 1; OS = Nocardioides lianchengensis OX=1045774 GN=folE PE=3 SV=1
MTDPVSSPVRRPEDVPAFDHARAEAAVRELLFAIGEDPDREGLLETPARVARAYAELTAGIRMTPEDVLTTTFDLGHDEMVLVRDIELWSMCEHHLVPFTGVAHVGYIPAETGKITGLSKLARLVDVYAKRPQVQERLTTQVADALVEILEARGVIVVIEAEHLCMTMRGVRKAGARTITSAVRGSFLNSPSTRAEAMALIHSPRR

SEQ ID NO: 11660 - protein, 212 aa, Nocardioides luteus
  REGION 1..212: note = tr|A0A1J4NAW3|A0A1J4NAW3_9ACTN GTP cyclohydrolase 1; OS = Nocardioides luteus OX=1844 GN=folE PE=3 SV=1
MSDTFDDVAPVHVPERDVADVPVFDQKRAEAAVRELLYAIGEDPDREGLLETPARVARAYQEVTRGLHQTPEEVLTTTFDLGHDEMVLVRDIELWSMCEHHLVPFTGVAHVGYIPAESGKITGLSKLARLVDVYAKRPQVQERLTTQVADALTEILEARGVIVVIEAEHLCMTMRGVKKAGARTITSAVRGSMRSNATTRAEAMALIRGGTR

SEQ ID NO: 11661 - protein, 206 aa, Nocardioides oleivorans
  REGION 1..206: note = tr|A0A4Q2RXW7|A0A4Q2RXW7_9ACTN GTP cyclohydrolase 1; OS = Nocardioides oleivorans OX=273676 GN=folE PE=3 SV=1
MTDPISTPVRAPEDVPVFDHARAEAAVRELLVAIGEDPDREGLLETPARVARAYAEVTQGLRQSAEEVLTTTFDLGHEEMVLVRDIELWSMCEHHLVPFTGVAHVGYIPAVTGKITGLSKLARLVDVYAKRPQVQERLTTQVADSLMEILEARGVIVVIEAEHLCMTMRGVRKAGARTITSAVRGTMLTDQATRAEAMSLIRSGTR

SEQ ID NO: 11662 - protein, 204 aa, unidentified
  source 1..204: note = Nocardioides psychrotolerans
  REGION 1..204: note = tr|A0A1I3MZF1|A0A1I3MZF1_9ACTN GTP cyclohydrolase 1; OS = Nocardioides psychrotolerans OX=1005945 GN=folE PE=3; SV = 1
MTDPISLTIDPSTVPEFDHPRAEAAIRELLYAIGEDPTREGLLDTPARVARAYAELTQGLRQTPEEVLTTTFDLGHDEMVLVRDIELWSMCEHHLVPFTGVAHVGYIPAESGLITGLSKLARLVDVYAKRPQVQERLTTQVADALMEILEARGVIVVIEAEHLCMTMRGVRKAGARTITSAVRGIMHNGPTRAEAMALIHSSRR

SEQ ID NO: 11663 - protein, 206 aa, Nocardioides simplex
  REGION 1..206: note = tr|A0A0A1DKZ6|A0A0A1DKZ6_NOCSI GTP cyclohydrolase 1; OS = Nocardioides simplex OX=2045 GN=folE PE=3 SV=1
MTDPISVPDRGPQDVPPFDHDRAEAAVRELLAAIGEDPDREGLRETPARVARAYAELTAGLRMAPEDVLTTTFDLGHDEMVLVRDIELWSMCEHHLVPFTGVAHVGYIPAESGKITGLSKLARLVDLYAKRPQVQERLTTQVADSLMELLDARGVIVVIEAEHLCMTMRGVRKAGARTITSAVRGSMLSNATTRAEAMALIHSPRG

SEQ ID NO: 11664 - protein, 200 aa, Nocardioides sp.
  REGION 1..200: note = tr|A0A2T8FA39|A0A2T8FA39_9ACTN GTP cyclohydrolase 1; OS = Nocardioides sp. WSJ-1 OX=2138300 GN=folE PE=3 SV=1
MAAPVRDPDDVPPFDHARAEAAVRELLIAIGEDPEREGLRETPARVARAYAEVTHGLRQRPEDVLTTTFDIGHDEMVLVRDIELWSMCEHHLVPFTGVAHVGYIPAESGKITGLSKLARLVDVYAKRPQVQERLTTQVADALMELLEARGVIVVIEAEHLCMTMRGVRKAGARTITSAVRGQMHNAATRAEAMALIHRNP

SEQ ID NO: 11665 - protein, 206 aa, Nocardioides sp.
  REGION 1..206: note = tr|A0A4Q2T5Z0|A0A4Q2T5Z0_9ACTN GTP cyclohydrolase 1; OS = Nocardioides sp. HLT2-9 OX=1168729 GN=folE PE=3 SV=1
MTDPVTVPERSPEDVPDFDHPRAEAAIRELLAAMGEDPTREGLLDTPARVARAYAELTQGLRQTAHDVLTTTFDLGHNEMVLVRDIELWSMCEHHLVPFTGVAHVGYIPAVTGKITGLSKLARLVDVYSKRPQVQERLTTQIADSLMEILEARGVVVVIEAEHLCMTMRGVKKAGARTITSAVRGTMLTDQATRAEAMALIRSGTR

SEQ ID NO: 11666 - protein, 204 aa, unidentified
  source 1..204: note = Nocardioides szechwanensis
  REGION 1..204: note = tr|A0A1H0C4J5|A0A1H0C4J5_9ACTN GTP cyclohydrolase 1; OS = Nocardioides szechwanensis OX=1005944 GN=folE PE=3 SV=1
MPDPISTPERAPRDIPDFDHDRAAAAVRELLIALGEDPDREGLKETPARVARAYAELTQGLRQAPEDVLTTTFDIGHDEMVLIRDIELWSMCEHHLVPFTGVAHVGYIPAESGKITGLSKLARLVDVYAKRPQVQERLTTQVADALMDILDARGVIVVIEAEHLCMTMRGVKKAGARTITSAVRGIMHNAATRSEAMALINRNH

SEQ ID NO: 11667 - protein, 202 aa, Nocardioides terrae
  REGION 1..202: note = tr|A0A1I1H8F3|A0A1I1H8F3_9ACTN GTP cyclohydrolase 1; OS = Nocardioides terrae OX=574651 GN=folE PE=3 SV=1
MIDPVTIQDAEPVGAFDKDRAEAAVRELLIAIGENPDREGLRETPARVARAYAELTAGLRMEAEDVLTTTFDLGHDEMILVRDIELWSMCEHHLVPFTGVAHVGYIPAESGKITGLSKLARLVDVYAKRPQVQERLTTQIADSLTRILDARGVIVVIEAEHLCMTMRGVKKAGARTITSAVRGTMRSNPTTRAEAMALIHRR

SEQ ID NO: 11668 - protein, 211 aa, Nocardioides terrae
  REGION 1..211: note = tr|A0A1I1LWX2|A0A1I1LWX2_9ACTN GTP cyclohydrolase 1; OS = Nocardioides terrae OX=574651 GN=folE PE=3 SV=1
MSHATIDPSVEPSHSRLRITHEPAAVDLVAAERAAADMLAALGLPIDGEDMFETPRRLVHAYAELLTVPEFDLTTFDNAASYDELVLVSDIPVRSLCEHHLLPFTGVAHVGYLPGERILGLSKFARTVDFFARRAQTQERLTAQIADHLHDRLAPLGVGVVIEAEHSCMSLRGARATGARTTTSTLRGRLREDAAARAEFLALARDGRSGR

SEQ ID NO: 11669 - protein, 195 aa, unidentified
  source 1..195: note = Nocardiopsaceae bacterium
  REGION 1..195: note = tr|A0A3N0DY81|A0A3N0DY81_9ACTN GTP cyclohydrolase 1; OS = Nocardiopsaceae bacterium YIM 96095 OX=2487137 GN=folE; PE = 3 SV=1
MVSSTNGSVDQPRIEKAVREILLAIGEDPDREGLQETPARVARAYEEQFAGLAQRPEDVLTTVFEAGHEEMVLVKDIELYSTCEHHLVPFYGSAHVGYIPNNRGQITGLSKLARLVDVYARRPQVQERLTSEVADAIQTTLEPRGVIVVIEAEHLCMTMRGVRKPGAKTVTSAVRGDFRNRDRTRAEAMSLILGH

SEQ ID NO: 11670 - protein, 188 aa, Nocardiopsis alba
  REGION 1..188: note = tr|J7L9U6|J7L9U6_NOCAA GTP cyclohydrolase 1; OS = Nocardiopsis alba (strain ATCC BAA-2165 / BE74); OX = 1205910 GN=folE PE=3 SV=1
MDRERVARAVREILIAIGEDPDRDGLLETPDRVARAYEEQFAGLGQKPGDVLTTVFEAGHEEMVLVKDIELYSTCEHHLVPFYGVAHVGYIPGEDGRITGLSKLARLVDVYARRPQVQERLTGEVADAIMQHLEPRGVIVVIEAEHLCMTMRGVRKPGAQTVTSAVRGIFRSSDRTRAEAMSLILDRR

SEQ ID NO: 11671 - protein, 192 aa, Nocardiopsis dassonvillei
  REGION 1..192: note = tr|A0A223QE71|A0A223QE71_NOCDA GTP cyclohydrolase 1; OS = Nocardiopsis dassonvillei OX=2014 GN=CGQ36_15630 PE=3; SV = 1
MTLADLPRDSTVRDPLEDVARRLLIEIGEDPDRSGLRDTPQRFARWWREFSDYQAGRVETSFPLHTDGQIVMVSDVTVWSLCEHHLLPFSCVLTIAYRPDERVLGLSKFARIAHRHAHRLQVQERLVRDIAEEVSKVAHTNDVAVIGRGEHLCMSMRGIRTPALMTCSAFDGIFRDYGPPRDELVRIALSGN

SEQ ID NO: 11672 - protein, 199 aa, Nocardiopsis dassonvillei
  REGION 1..199: note = tr|D7B845|D7B845_NOCDD GTP cyclohydrolase 1; OS = Nocardiopsis dassonvillei (strain ATCC 23218 / DSM 43111 / CIP 107115 / JCM 7437 / KCTC 9190 / NBRC 14626 / NCTC 10488/ NRRL B-5397 / IMRU 509) OX=446468 GN=folE PE=
MSPTEDLPPRSVDRPRIERAVREILLAIGEDPDRDGLVKTPERVARAYEEQFAGLGQKPGDVLTTVFEADHEEMVLVKDIELYSTCEHHLVPFYGVAHVGYIPGADGRITGLSKLARLVDVYARRPQVQERLTGQVSDAIMEFLQPRGVIVVVEAEHLCMTMRGVRKPGAKTVTSAVRGIFRSSDRTRSEAMSLILSQR

SEQ ID NO: 11673 - protein, 198 aa, Nocardiopsis flavescens
  REGION 1..198: note = tr|A0A1M6P1I5|A0A1M6P1I5_9ACTN GTP cyclohydrolase 1; OS = Nocardiopsis flavescens OX=758803 GN=folE PE=3 SV=1
MTGAQAPGGRVDRERIESAVREILIAIGEDPDRDGLVETPERVARAYEEQFAGLGQKPGDVLTTVFEAGHQELVLVKDIELYSTCEHHLVPFYGVAHVGYIPGSDGRITGLSKLARLVDIYARRPQVQERLTGQVADAVMEHLNPRGVIVVVEAEHLCMTMRGVRKPGAQTVTSAVRGIFRGSDRTRAEAMSLILDRR

SEQ ID NO: 11674 - protein, 198 aa, Nocardiopsis gilva
  REGION 1..198: note = tr|A0A223SEJ3|A0A223SEJ3_9ACTN GTP cyclohydrolase 1; OS = Nocardiopsis gilva YIM 90087 OX=1235441 GN=folE PE=3; SV = 1
MFTTEAPAAGVDQPRIEKAVREILLAIGEDPDRDGLLDTPARVARAYQEQFAGLSQRPEDVLTTVFEAGHDEMVLVKDIEMYSTCEHHLVPFHGSAHIGYIPNTKGQITGLSKLARLVDVYARRPQVQERLTTEIADALMEYLDPRGVIVVIEAEHLCMTMRGVRKPGAKTVTSAVRGVFAKRDRTRAEAMSLIIGHS

SEQ ID NO: 11675 - protein, 200 aa, Nocardiopsis sinuspersici
  REGION 1..200: note = tr|A0A1V3C7C1|A0A1V3C7C1_9ACTN GTP cyclohydrolase 1; OS = Nocardiopsis sinuspersici OX=501010 GN=folE PE=3 SV=1
MSSEDEQLPPRSVDRPRVEKAIREILIAIGEDPDRDGLLKTPERVARAYEEQFAGLGQKPGDVLTTVFEADHEEMVLVKDIELYSTCEHHLVPFYGVAHVGYIPGADGRITGLSKLARLVDVYARRPQVQERLTGQVSDAIMGHLQPRGVIVVIEAEHLCMTMRGVRKPGAKTVTSAVRGIFRSSDRTRSEAMSLILDRR

SEQ ID NO: 11676 - protein, 193 aa, Nocardiopsis sp.
  REGION 1..193: note = tr|A0A0M8XZZ1|A0A0M8XZZ1_9ACTN GTP cyclohydrolase 1; OS = Nocardiopsis sp. NRRL B-16309 OX=1519494 GN=folE PE=3; SV = 1
MEPRPVDRERIERAVREILIAIGEDPERDGLVKTPERVARAYEEQFSGLGQKPGDVLTTVFEAGHEEMILVKDIELYSTCEHHLVPFYGVAHVGYIPAADGRITGLSKLARLVDVYARRPQVQERLTGQVADAIMDHLQPRGVIVVVEAEHLCMTMRGVRKPGAKTVTSAVRGIFRGSDRTRAEAMSLILDRR

SEQ ID NO: 11677 - protein, 199 aa, Nocardiopsis sp.
  REGION 1..199: note = tr|A0A495L204|A0A495L204_9ACTN GTP cyclohydrolase 1; OS = Nocardiopsis sp. Huas11 OX=2183912 GN=folE PE=3 SV=1
MTAMEGLEPRPVDRERIERAVREILIAIGEDPERDGLVKTPERVARAYEEQFSGLGQKPGDVLTTVFEAGHEEMILVKDIEMYSTCEHHLVPFYGVAHVGYIPAADGRITGLSKLARLVDVYARRPQVQERLTGQVADAIMDNLQPRGVIVVVEAEHLCMTMRGVRKPGAKTVTSAVRGIFRGSDRTRAEAMSLIFDRR

SEQ ID NO: 11678 - protein, 235 aa, Nodularia sp.
  REGION 1..235: note = tr|A0A218PX82|A0A218PX82_9CYAN GTP cyclohydrolase 1; OS = Nodularia sp. NIES-3585 OX=1973477 GN=folE_1 PE=3 SV=1
MTIASSNGSNRSKSPLSPDLIEAISPKPDRNTHNGRQPDLHPPSGEEMESMMDGVRALIVGVGEDPEREGLLKTPKRVAEAMQFLTSGYNQSLEELLNDAIFDEGHNEMVLVRDINFFSLCEHHMLPFMGKAHVAYIPNQKVVGLSKLARIVEMFSRRLQVQERLTRQIAEAIQTILEPQGVAVVMEATHMCMAMRGVQKPGSWTVTSAMVGAFDEQQKTREEFFNLIRHQPSFY

SEQ ID NO: 11679 - protein, 216 aa, Nodularia sp.
  REGION 1..216: note = tr|A0A218Q691|A0A218Q691_9CYAN GTP cyclohydrolase 1; OS = Nodularia sp. NIES-3585 OX=1973477 GN=folE_2 PE=3 SV=1
MTLSIRPDLTSADQVLSSLTAQKQPKVTEAEMMQAVRTLLIGLGEDPDREGLKDTPKRVMKALQFLTKGYTESLDELLNGAVFTEDANEMVLVRDIDIFSSCEHHILPIIGRAHVAYIPNGKVIGLSKIARICEMYGRRLQVQERLTTQIADALQNLLKPQGVAVVVEATHMCMVMRGVQKPGSWTLSSAMRGVFAEDSKTRDEFMNLIRHNANFH

SEQ ID NO: 11680 - protein, 236 aa, Nodularia spumigena
  REGION 1..236: note = tr|A0A2S0Q457|A0A2S0Q457_NODSP GTP cyclohydrolase 1; OS = Nodularia spumigena UHCC 0039 OX=1914872 GN=folE PE=3; SV = 1
MPTEISQLTNSAKHSYKTQKMTLSIRPDLTSADQVISSLTAQKQPKVTEAEMMQAVRTLLIGLGEDPDREGLKDTPKRVMKALQFLTKGYTDSLDELLNGAVFTEDANEMVLVRDIDIFSSCEHHILPIIGRAHVAYIPNGKVIGLSKIARICEMYGRRLQVQERLTTQIADALQGLLKPQGVAVVVEATHMCMVMRGVQKPGSWTVSSAMRGVFAEDSRTREEFMNLIRHNANFH

SEQ ID NO: 11681 - protein, 235 aa, Nodularia spumigena
  REGION 1..235: note = tr|A0A166JFF8|A0A166JFF8_NODSP GTP cyclohydrolase 1; OS = Nodularia spumigena CENA596 OX=1819295 GN=folE PE=3 SV=1
MTIASSNGSNRSKSPLSQDLVEAISPKPDRNTHNGRQPNLHPPTGEEMESMMDGVRAIIVGVGEDPEREGLLKTPKRVAEAMQFLTSGYNQSLEELLNDAIFDEGHNEMVLVRDINFFSLCEHHMLPFMGKAHVAYIPNQKVVGLSKLARIVEMYSRRLQVQERLTRQIAEAIQTILEPQGVAVVMEATHMCMAMRGVQKPGSWTVTSAMVGAFDEEQKTREEFFNLIRHQPSFY

SEQ ID NO: 11682 - protein, 198 aa, Nonlabens agnitus
  REGION 1..198: note = tr|A0A2S9WTC9|A0A2S9WTC9_9FLAO GTP cyclohydrolase 1; OS = Nonlabens agnitus OX=870484 GN=folE PE=3 SV=1
MPYRVFEEYNIEVTEDIQQKYKSVITDLGEDVEREGLLKTPERAAKAMQFLTSGYDQDASEVLKSAMFAEDYQDMVIIKDIELYSLCEHHMLPFFGKAHIAYIPNGHIVGLSKIPRIVDIFARRLQVQERLTHDILECIHQTLKPKGVAVVIEASHMCMMMRGVQKQNSSTTTSGFRGQFEKVETRSEFLHLISSDLH

SEQ ID NO: 11683 - protein, 223 aa, Nonlabens agnitus
  REGION 1..223: note = tr|A0A2S9WUS8|A0A2S9WUS8_9FLAO GTP cyclohydrolase 1; OS = Nonlabens agnitus OX=870484 GN=folE PE=3 SV=1
MKVEDFLDNMEDQDHLSSNEQTPLREDAFQLSDAEKIESIKKNVHEILVTLGMDMTDDSLKGTPNRVAKMFVNEIFGGLRPQMKPSASTFENKYKYNEMLVEKNIVLYSTCEHHLLPIVGRAHVAYISNGNVVGLSKMNRIVDYYAKRPQVQERLNIQIVRELQQVLNTEDVACVIDAKHLCVNSRGIRDIDSSTVTGEFGGKFKDPQVKSEFLDYIKLETKF

SEQ ID NO: 11684 - protein, 198 aa, unidentified
  source 1..198: note = Nonlabens arenilitoris
  REGION 1..198: note = tr|A0A2S7UCG6|A0A2S7UCG6_9FLAO GTP cyclohydrolase 1; OS = Nonlabens arenilitoris OX=1217969 GN=folE PE=3 SV=1
MPYRVFEEYNIEVTEDIKNQYKEVIQNIGEDVEREGLIKTPERAAKAMQFLTSGYDSDPAEILKGAMFAEDYNDMVIIKDIELYSLCEHHMLPFFGKAHIAYIPNGHIVGLSKIPRIVDVFARRLQVQERLTHDILECIHNTLKPMGVAVVIEASHMCMMMRGVQKQNSVTTTSGFRGQFEKVETRNEFLKLITAKLH

SEQ ID NO: 11685 - protein, 223 aa, unidentified
  source 1..223: note = Nonlabens arenilitoris
  REGION 1..223: note = tr|A0A2S7UF14|A0A2S7UF14_9FLAO GTP cyclohydrolase 1; OS = Nonlabens arenilitoris OX=1217969 GN=folE PE=3 SV=1
MKIEDLINNVDDHDHLSSNEQTPLRPDAFEKSDAEKIELIKKDVHNILETLGMDMTDDSLKGTPNRVAKMFVKEIFGGLRPDAKPSASTFDNKYKYGEMLVEKNIVLYSTCEHHLLPIVGRAHVAYISNGSVVGLSKMNRIVDYYAKRPQVQERLNIQIVRELQQVMNTEDVACVIDAKHLCVNSRGIRDIESSTVTGEFGGAFKDPIVRREFLDYIKMETKF

SEQ ID NO: 11686 - protein, 223 aa, unidentified
  source 1..223: note = Nonlabens dokdonensis
  REGION 1..223: note = tr|A0A1Z8B2A9|A0A1Z8B2A9_9FLAO GTP cyclohydrolase 1; OS = Nonlabens dokdonensis OX=328515 GN=folE PE=3 SV=1
MKIEDLLENIEDNDHLSSNEQTPLRPDAFDMSDADKIASIKKDVHHILETLGMDMTDDSLKGTPNRVAKMFVNEIFGGLRPDRKPSASTFENKYKYNEMLVEKDIVVYSTCEHHLLPIVGRAHVAYISNGSVVGLSKMNRIVDYYAKRPQVQERLNIQIVRELQQVMNTEDVACIIDAKHLCVNSRGIRDIESSTVTGEFGGKFKDPAVKREFLDYIKMDTKF

SEQ ID NO: 11687 - protein, 199 aa, unidentified
  source 1..199: note = Nonlabens dokdonensis
  REGION 1..199: note = tr|A0A1Z8B7L7|A0A1Z8B7L7_9FLAO GTP cyclohydrolase 1; OS = Nonlabens dokdonensis OX=328515 GN=folE PE=3 SV=1
MAPYRTFEEYNIKTTEEIKDKYREVITEIGEDVEREGLLKTPERAAKAMQFLTSGYDIDPAEILKGAMFAEDYNDMVIIKDIELYSLCEHHMLPFFGKAHIAYIPNGHIVGLSKIPRIVDVFARRLQVQERLTHDILECIDNTLNPKGVAVVIEASHMCMMMRGVQKQNSSTTTSGFRGQFENSETRAEFMTLISSQLH

SEQ ID NO: 11688 - protein, 223 aa, unidentified
  source 1..223: note = Nonlabens marinus
  REGION 1..223: note = tr|W8VRA3|W8VRA3_9FLAO GTP cyclohydrolase 1; OS = Nonlabens marinus S1-08 OX=1454201 GN=folE PE=3 SV=1
MNVEDFLENIEDQDHLSANEQTPLRDNAFEMTDGEKIESIKKNVYEILHTLGMDMSDDSLKGTPNRVAKMFVNEIFGGLKPERKPSASTFENKYKYNEMLVEKNIVLYSTCEHHLLPIVGRAHVAYISNGNVVGLSKMNRIVDYYAKRPQVQERLNIQIVRELQKVLNTDDVACVIDAKHLCVNSRGIRDIDSSTVTGEFGGKFKDPQTKSEFLDYIKLETKF

SEQ ID NO: 11689 - protein, 198 aa, unidentified
  source 1..198: note = Nonlabens marinus
  REGION 1..198: note = tr|W8VWP3|W8VWP3_9FLAO GTP cyclohydrolase 1; OS = Nonlabens marinus S1-08 OX=1454201 GN=folE PE=3 SV=1
MPYRVFEEFNIQVTDDIKENYKSVIEHLGEDVSREGLVKTPERAAKAMQFLTSGYDQDPGAVLKGAMFAEDYQDMVIIKDIELYSLCEHHMLPFFGKAHIAYIPNGHIVGLSKIPRIVDIFARRLQVQERLTHDILECIHSTLKPQGVAVVIEASHMCMMMRGVQKQNSVTTTSGFRGQFEKEGTRSEFLNLISAKLH

SEQ ID NO: 11690 - protein, 235 aa, unidentified
  source 1..235: note = Nonlabens sediminis
  REGION 1..235: note = tr|A0A090Q197|A0A090Q197_9FLAO GTP cyclohydrolase 1; OS = Nonlabens sediminis OX=319236 GN=folE PE=3 SV=1
MKNKELEVDELITNDNLLDNLTFDEIGDDHLFTGMETPMKADAFVMSDDEKKDKIANLFSQIMDVMGLDLTDDSLKGTPRRVAKMYIDEIFSGLNPANKPKIALFDNKYQYNQMLVEKNITFYSNCEHHFVPIIGKAHVAYISSGRVIGLSKLNRIVQYYAKRPQVQERLTNQIGTDLQEILNTEDVAVVIDAKHLCVSSRGVKDDTSSTVTAFYGGKFNDDEKIRQLQNYIYNQ

SEQ ID NO: 11691 - protein, 223 aa, unidentified
  source 1..223: note = Nonlabens sediminis
  REGION 1..223: note = tr|A0A090PZK8|A0A090PZK8_9FLAO GTP cyclohydrolase 1; OS = Nonlabens sediminis OX=319236 GN=folE PE=3 SV=1
MKVEDLLDDINDHDHSWSSEETPLREDAFSLTDEEKIESIKKDVHNILQTLGMDMTDDSLQGTPKRVAKMFVNEIFGGLRPDKKPKASTFDNKYKYNEMLVEKNITLYSTCEHHLLPIVGRAHVAYISNGTVVGLSKMNRIVDYYAKRPQVQERLNIQIVRELQRVLGTENVACVIDAKHLCVNSRGIRDIESSTVTGEFGGEFKKPEVKKEFLDYISLETKF

SEQ ID NO: 11692 - protein, 199 aa, Nonlabens sp.
  REGION 1..199: note = tr|A0A2K8X9W7|A0A2K8X9W7_9FLAO GTP cyclohydrolase 1; OS = Nonlabens sp. MB-3u-79 OX=2058134 GN=folE PE=3 SV=1
MAPYRVFEEYNIKITDEIKSKYRDVITELGEDVEREGLVKTPERAAKAMQFLTSGYDIDPAEILRGAMFAEDYHDMVIIKDIELYSLCEHHMLPFFGKAHIAYIPNGHIVGLSKIPRIVDVFARRLQVQERLTHDILECIDKTLKPKGVAVVIEASHMCMMMRGVQKQNSATTTSGFRGQFQKVETRTEFMNLISSKLH

SEQ ID NO: 11693 - protein, 198 aa, Nonlabens sp.
  REGION 1..198: note = tr|A0A0Q0XVB9|A0A0Q0XVB9_9FLAO GTP cyclohydrolase 1; OS = Nonlabens sp. YIK11 OX=1453349 GN=folE PE=3 SV=1
MPYRVFEEYNIEVTDDIREKYKSVITDLGEDVEREGLLKTPERAAKAMQFLTSGYDQDAAEVLKSAMFAEDYQDMVIIKDIELYSLCEHHMLPFFGKAHIAYIPNGHIVGLSKIPRIVDIFARRLQVQERLTHDILECIHQTLKPKGVAVVIEASHMCMMMRGVQKQNSSTTTSGFRGQFEKVETRSEFLHLISSDLH

SEQ ID NO: 11694 - protein, 235 aa, unidentified
  source 1..235: note = Nonlabens spongiae
  REGION 1..235: note = tr|A0A1W6MPE9|A0A1W6MPE9_9FLAO GTP cyclohydrolase 1; OS = Nonlabens spongiae OX=331648 GN=folE PE=3 SV=1
MKENVIALEEYLNENNVISNLSDEEIGDDHLFTGLETPMKVDAFKLSDEQKKQKIAEHFAEIMDILGLDLTDDSLKGTPSRVAKMYVEEIFSGLNPANKPKIALFENKYQYNQMLVEKNITFYSNCEHHFVPIIGKAHVAYISSGKVIGLSKLNRIVQYYAKRPQVQERLTNQIGVDLQKLLGTEDVAVIIDAKHLCVSSRGVKDDTSSTVTVFYGGQFKNDEKIFQLNNLISNS

SEQ ID NO: 11695 - protein, 223 aa, unidentified
  source 1..223: note = Nonlabens spongiae
  REGION 1..223: note = tr|A0A1W6MJD5|A0A1W6MJD5_9FLAO GTP cyclohydrolase 1; OS = Nonlabens spongiae OX=331648 GN=folE PE=3 SV=1
MKVEDFLEDIDNHDHMSSNEETPLREDAFKLSDDEKIASIQDDVFNILQTLGMDMTDDSLKGTPKRVAKMFVNEIFGGLRPDKKPSASTFDNKYKYGEMLVEKNIVLYSTCEHHLLPIVGRAHVAYISNGNVVGLSKMNRIVDYYAKRPQVQERLNIQIVRELQNVLNTEDVACVIDAKHLCVNSRGIRDIDSSTVTGEFGGAFKNLETKREFLDYIKMDTRF

SEQ ID NO: 11696 - protein, 235 aa, Nonlabens tegetincola
  REGION 1..235: note = tr|A0A2S7TEF7|A0A2S7TEF7_9FLAO GTP cyclohydrolase 1; OS = Nonlabens tegetincola OX=323273 GN=folE PE=3 SV=1
MKNKELEVDELITNDNLLNNLTFDEIGDDHLFTGMETPMKADAFVMSDDEKKDKIANLFSQIMDVMGLDLTDDSLKGTPRRVAKMYIDEIFSGLNPANKPKIALFDNKYQYNQMLVEKNITFYSNCEHHFVPIIGKAHVAYISSGRVIGLSKLNRIVQYYAKRPQVQERLTNQIGTDLQEILNTEDVAVVIDAKHLCVSSRGVKDDTSSTVTAFYGGKFNDDEKIRQLQNYIYNQ

SEQ ID NO: 11697 - protein, 223 aa, Nonlabens tegetincola; identical to SEQ ID NO: 11691
  REGION 1..223: note = tr|A0A2S7T331|A0A2S7T331_9FLAO GTP cyclohydrolase 1; OS = Nonlabens tegetincola OX=323273 GN=folE PE=3 SV=1

SEQ ID NO: 11698 - protein, 232 aa, unidentified
  source 1..232: note = Nonlabens ulvanivorans
  REGION 1..232: note = tr|A0A081DDJ1|A0A081DDJ1_NONUL GTP cyclohydrolase 1; OS = Nonlabens ulvanivorans OX=906888 GN=folE PE=3 SV=1
MAPFRANVHMKIEDLINNVDDHDHLSSNEQTPLRPDAFEKSDAEKIEIIKKDVHHILETLGMDMTDDSLKGTPNRVAKMFVKEIFGGLRPDAKPSASTFDNKYKYGEMLVEKNIVLYSTCEHHLLPIVGRAHVAYISNGSVVGLSKMNRIVDYYAKRPQVQERLNIQIVRELQQVMNTEDVACVIDAKHLCVNSRGIRDIESSTVTGEFGGAFKDPIVRREFLDYIKMETKF

SEQ ID NO: 11699 - protein, 198 aa, unidentified
  source 1..198: note = Nonlabens ulvanivorans
  REGION 1..198: note = tr|A0A081DEM1|A0A081DEM1_NONUL GTP cyclohydrolase 1; OS = Nonlabens ulvanivorans OX=906888 GN=folE PE=3 SV=1
MPYRVFEEYNIEVTEDIKNQYKGVIQNIGENVEREGLIKTPERAAKAMQFLTSGYDKDPAEILKGAMFAEDYNDMVIIKDIELYSLCEHHMLPFFGKAHIAYIPNGHIVGLSKIPRIVDVFARRLQVQERLTHDILECIHNTLKPLGVAVVIEASHMCMMMRGVQKQNSVTTTSGFRGQFEKVETRNEFLKLITAKLH

SEQ ID NO: 11700 - protein, 223 aa, unidentified
  source 1..223: note = Nonlabens xylanidelens
  REGION 1..223: note = tr|A0A2S6IH80|A0A2S6IH80_9FLAO GTP cyclohydrolase 1; OS = Nonlabens xylanidelens OX=191564 GN=folE PE=3 SV=1
MKIDDLLDNIEDHDHLSSNEQTPLRPDAFELSDADKIESIKKDVYSILETLGMDMTDDSIKGTPNRVAKMFVNEIFGGLRPDKKPNASTFENKYKYNEMLVEKDIVVYSTCEHHLLPIVGRAHVAYISNGSVVGLSKMNRIVDYYAKRPQVQERLNIQIVRELQKVMNTEDVACIIDAKHLCVNSRGIRDIESSTVTGEFGGKFKDPEVKREFLDYIKMETKF

SEQ ID NO: 11701 - protein, 227 aa, unidentified
  source 1..227: note = Nonlabens xylanidelens
  REGION 1..227: note = tr|A0A2S6IMM3|A0A2S6IMM3_9FLAO GTP cyclohydrolase 1; OS = Nonlabens xylanidelens OX=191564 GN=folE PE=3 SV=1
MINVVLKMDEKEIELIGDNHISHNTDTPMLPTAFDKTDAEKIKTIEYHFSEIMKELGLDLSDDSLSGTPYRVAKMYVKELFSGLNPENKPQLSVFENKYGYNKMLVDQNINIDSACEHHFLPITGFAHVAYVPKNKVIGLSKINRLVDYYARRPQVQERLSMQILKDLQESLDTEDVIVMISAKHLCVSSRGIKDKNSTTTTLVYGGCFEKKQYRADFLNIIDQPST

SEQ ID NO: 11702 - protein, 192 aa, unidentified
  source 1..192: note = Nonomuraea fuscirosea
  REGION 1..192: note = tr|A0A2T0MXP7|A0A2T0MXP7_9ACTN GTP cyclohydrolase 1; OS = Nonomuraea fuscirosea OX=1291556 GN=folE PE=3 SV=1
MTQHDVDLGRIEKAVREILYAIGEDPDRDGLIETPARVARAMAEQYSGLGQTPEEVLTKVFDVDHDEMVLVRDIEVYSTCEHHLVPFHGLAHVGYIPNTKGQVTGLSKLARLVDVYARRPQVQERMTSQIADALMRVLEPRGVIVVVEAEHLCMTMRGVRKPGAKTVTSAVRGSFRSSDSTRSEAMALILGR

SEQ ID NO: 11703 - protein, 215 aa, unidentified
  source 1..215: note = Nonomuraea fuscirosea
  REGION 1..215: note = tr|A0A2T0LXS8|A0A2T0LXS8_9ACTN GTP cyclohydrolase 1; OS = Nonomuraea fuscirosea OX=1291556 GN=folE PE=3 SV=1
MTTEAVRPPETAQFSRAESQSPEDVPGSPVNTPLVAGLIRELLIALGEDPQREGLLDTPARVASWWRSFLSPDPSAMATRFADTHASDQLVVVGGLNVWSLCEHHLLPMQLDAHVGYLTDGTVLGLSKFGRIAQRYAGRLQMQERFTRQLADEVATAVGSHDVAVTVHGVHLCMSMRGVRMESARTSTVHAAGRFRTDPLLSQQFLTLTTSGRTT

SEQ ID NO: 11704 - protein, 219 aa, unidentified
  source 1..219: note = Nonomuraea gerenzanensis
  REGION 1..219: note = tr|A0A1M4EE23|A0A1M4EE23_9ACTN GTP cyclohydrolase 1; OS = Nonomuraea gerenzanensis OX=93944 GN=folE PE=3 SV=1
MQRSRAGGMSESVAEPAVTPAEHQQRRLRVVRRGDGVDLEAAQRAVADLLTALGRDATSEHLADTPRRVAHAYAELLAPREFNLTTFPNEEGYDELVLARDIPVQSLCEHHLLPFQGVAHVGYLPGDRILGLSKLARVVELFARDLQVQERLTKQVADWLRQHLAPKGVGVVIEAEHLCMSMRGVRVRGSRTVTSALQGVLREDARSRQEFFALSGVHA

SEQ ID NO: 11705 - protein, 192 aa, unidentified
  source 1..192: note = Nonomuraea gerenzanensis
  REGION 1..192: note = tr|A0A1M4DWI4|A0A1M4DWI4_9ACTN GTP cyclohydrolase 1; OS = Nonomuraea gerenzanensis OX=93944 GN=folE PE=3 SV=1
MTQHDVDLGRIEKAVREILYAIGEDPDRDGLVETPSRVARAMAEQYSGLGQTPEDVLNKVFDVDHDEMVLVRDIEVYSTCEHHLVPFHGLAHVGYIPNDRGQVTGLSKLARLVDVYARRPQVQERMTSQIADALMRVLDPRGVIVVVECEHLCMTMRGVRKPGAKTVTSAVRGDFRTSDKTRSEAMALILGR

SEQ ID NO: 11706 - protein, 217 aa, Nonomuraea jiangxiensis
  REGION 1..217: note = tr|A0A1G8A3P4|A0A1G8A3P4_9ACTN GTP cyclohydrolase 1; OS = Nonomuraea jiangxiensis OX=633440 GN=folE PE=3 SV=1
MTQPPHTPLHMAPETPEPPKPAHTALHVVRSSGEPDLAAAELAAESFLHALGIETGSESMRGTPGRMARAYAELFSPRPFDLTTFPNDEGYDELVLARDIPLRSVCEHHLLPFVGRAHIGYLPGSRILGLSKLARTLEHFASRPQVQERLTKQVADWLQAQLDPKGVGVVIQAEHTCMTLRGAQAIGSTTTTSTLLGLLRTDARSRSEFLTLTGASS

SEQ ID NO: 11707 - protein, 192 aa, Nonomuraea jiangxiensis
  REGION 1..192: note = tr|A0A1G8XRJ6|A0A1G8XRJ6_9ACTN GTP cyclohydrolase 1; OS = Nonomuraea jiangxiensis OX=633440 GN=folE PE=3 SV=1
MTQHDVDLGRIEKAVREILYAIGEDPDRDGLVDTPSRVARAMAEQYSGLGQAPEDVLTKVFDVDHDEMVLVRDIEVYSSCEHHLVPFHGVAHVGYIPNDRGQVTGLSKLARLVDVFARRPQVQERMTSQIADALMRVLDPRGVIVVVEAEHLCMTMRGVRKPGAKTVTSAVRGDFRTSDKTRSEAMALILGR

SEQ ID NO: 11708 - protein, 192 aa, Nonomuraea maritima
  REGION 1..192: note = tr|A0A1G9E8V3|A0A1G9E8V3_9ACTN GTP cyclohydrolase 1; OS = Nonomuraea maritima OX=683260 GN=folE PE=3 SV=1
MTQYDVDLARIEKAVREILYAIGEDPDRDGLVETPARVARAMAEQYSGLGQAPEDVLTKVFDVDHDEMVLVRDIEVYSTCEHHLVPFHGLAHVGYIPNERGQVTGLSKLARLVDVFARRPQVQERMTSQIADALVRVLDPRGVIVVVEAEHLCMTMRGVRKPGAKTVTSAVRGNFRTSDSTRSEAMALILGR

SEQ ID NO: 11709 - protein, 192 aa, Nonomuraea polychroma
  REGION 1..192: note = tr|A0A438MIR4|A0A438MIR4_9ACTN GTP cyclohydrolase 1; OS = Nonomuraea polychroma OX=46176 GN=folE PE=3 SV=1
MTQHDVDLARIEKAVREILYAIGEDPDRDGLVETPARVARAMAEQYSGLGLTPEDVLNKVFDVDHDEMILVKDIEVYSNCEHHLVPFHGLAHVGYIPNESGQVTGLSKLARLVDVFARRPQVQERMTSQIADALMRVLEPRGVIVVIEAEHLCMTMRGVRKPGAKTVTSAVRGDFRTSDKTRSEAMALILGR

SEQ ID NO: 11710 - protein, 197 aa, Nonomuraea pusilla
  REGION 1..197: note = tr|A0A1H8CVA0|A0A1H8CVA0_9ACTN GTP cyclohydrolase 1; OS = Nonomuraea pusilla OX=46177 GN=folE PE=3 SV=1
MTRNDEVFDRVDLGRIEKAVREILYAIGEDPDRDGLLDTPSRVARAMAEQFSGLGQTPEDVLTKVFDVDHDEMVLVRDIEVYSTCEHHLVPFHGVAHVGYIPNERGQVTGLSKLARLVDVFARRPQVQERMTSQIADALMRVLEPRGVIVVVECEHLCMTMRGVRKPGAKTVTSAVRGDFRTSDKTRAEAMALILGR

SEQ ID NO: 11711 - protein, 192 aa, unidentified
  source 1..192: note = Nonomuraea solani
  REGION 1..192: note = tr|A0A1H6D6M0|A0A1H6D6M0_9ACTN GTP cyclohydrolase 1; OS = Nonomuraea solani OX=1144553 GN=folE PE=3 SV=1
MTQHDVDLGRIEKAVREILYAIGEDPERDGLLETPSRVARAMAEQYSGLGQTPEQVLNKVFDVDHDEMVLVRDIEVYSTCEHHLVPFHGLAHVGYIPNEKGQVTGLSKLARLVDVFARRPQVQERMTSQIADALMRVLEPRGVIVVIECEHLCMTMRGVRKPGAKTVTSAVRGDFRTSDKTRSEAMALILGR

SEQ ID NO: 11712 - protein, 264 aa, unidentified
  source 1..264: note = Nonomuraea solani
  REGION 1..264: note = tr|A0A1H6EZ45|A0A1H6EZ45_9ACTN GTP cyclohydrolase FolE2 OS=Nonomuraea solani OX=1144553 GN=folE2 PE=3 SV=1
MLTDVQAAHDSRGVPLDEVGIEGLRYPVLVADGQGAKRETVATATMAVDLGPEAKGAHLSRFIEVLHGSREQLTPATAAGLADELRLHMGSDRARVHLTFPYFLEREAPVTRARAFVEYTCSITARSSVAGTQLAWSVEVPVTSVCPCSKAISDRGAHNQRGHITIEVKDADHTSGPWFDELIDIAEAAASSPVYALLKRPDERHVTMAGYDNPVFVEDMVRNVCQVLSDCDRIAAYRVRAVNDESIHNHAAYAAITWSSPRGV

SEQ ID NO: 11713 - protein, 192 aa, Nonomuraea sp.
  REGION 1..192: note = tr|A0A5C8J8S1|A0A5C8J8S1_9ACTN GTP cyclohydrolase 1; OS = Nonomuraea sp. C10 OX=2600577 GN=folE PE=3 SV=1
MKAHEVDFGRIEKAVREILYAIGEDPDRDGLLETPARVARAYAEQFSGLGLTPEDVLNKVFDVDHDEMILVKDIEVYSTCEHHLVPFYGLAHVGYIPNEHGQVTGLSKLARLVDVYARRPQVQERMTSQIADGIMRVLEPRGVIVVVEAEHLCMTMRGVRKPGAKTVTSAVRGDFRTSDKTRAEAMALILGR

SEQ ID NO: 11714 - protein, 192 aa, Nonomuraea sp.
  REGION 1..192: note = tr|A0A4R5F3X9|A0A4R5F3X9_9ACTN GTP cyclohydrolase 1; OS = Nonomuraea sp. 6K102 OX=2530382 GN=folE PE=3 SV=1
MTQHDIDQGRIEKAVREILYAIGEDPDRDGLIDTPARVARAMAEQYSGLGQTPEDVLTKVFDVDHDEMVLVRDIEVYSTCEHHLVPFHGVAHVGYIPNQRGEVTGLSKLARLVDVFARRPQVQERMTSQIADALMRVLEPRGVIVVVEAEHLCMTMRGVRKPGAKTVTSAVRGDFRTSDKTRSEAMALILHR

SEQ ID NO: 11715 - protein, 209 aa, Nonomuraea wenchangensis
  REGION 1..209: note = tr|A0A1I0LJW4|A0A1I0LJW4_9ACTN GTP cyclohydrolase 1; OS = Nonomuraea wenchangensis OX=568860 GN=folE PE=3 SV=1
MSEILAVPAAASDQQQRRLRVVRSGGGVDVEAAQRAVADLLTALGRDAESEHLADTPRRVAHAYAELLAPREFNLTTFPNEEGYDELVLARDIPVQSLCEHHLLPFQGVAHVGYLPGDRILGLSKLARVVELFARDLQVQERLTKQVAGWLQQHLEPKGVGVVIEAEHLCMSMRGVRVRGSRTVTSALQGLLREDARSRQEFFALSGIH

SEQ ID NO: 11716 - protein, 192 aa, Nonomuraea wenchangensis
  REGION 1..192: note = tr|A0A1I0HH03|A0A1I0HH03_9ACTN GTP cyclohydrolase 1; OS = Nonomuraea wenchangensis OX=568860 GN=folE PE=3 SV=1
MTQHDVDLARIEKAVREILAAIGEDPDRDGLVETPARVARAMAEQFSGLGQTPEDVLNKVFDVDHDEMVLVRDIEVYSTCEHHLVPFHGLAHVGYIPNQRGQVTGLSKLARLVDVFARRPQVQERMTSQIADALMRVLEPRGVIVVVECEHLCMTMRGVRKPGAKTVTSAVRGDFRTSDKTRSEAMALILGR

SEQ ID NO: 11717 - protein, 235 aa, unidentified
  source 1..235: note = Nostoc azollae
  REGION 1..235: note = tr|D7E2V7|D7E2V7_NOSA0 GTP cyclohydrolase 1; OS = Nostoc azollae (strain 0708) OX=551115 GN=folE PE=3 SV=1
MTIASSNASNRSQSPLIPDLSQAISTRPDRNTHNGKQADLHPPSEESMEQMMEAVRTMLIGVGEDPEREGLLKTPKRVAEAMMFLTGGYNQSLEELVNGAIFDEGHNEMVLVRDINFFTLCEHHMLPFMGRAHVAYIPNQKVVGLSKMARIVEMYSRRLQVQERLTRQIAEAVQTILEPKGVAVVMEATHMCMVMRGVQKPGSWTVTSSMVGVFQDEQKTREEFLNLIRHQPAFF

SEQ ID NO: 11718 - protein, 216 aa, Nostoc calcicola
  REGION 1..216: note = tr|A0A1U7IWX7|A0A1U7IWX7_9NOSO GTP cyclohydrolase 1; OS = Nostoc calcicola FACHB-389 OX=1357508 GN=folE PE=3 SV=1
MTLSICPDLTSADQRLSTLAIEQQPTVTEAEMMQAVRTLLIGLGEDPDREGLKDTPKRVMKALQFLTKGYHESLDELLNGAVFTENANEMVLVRDIDIFSSCEHHILPIIGRAHVAYIPNGKVIGLSKIARICEMYARRLQVQERLTVQIADALQGLLKPQGVAVVIEATHMCMVMRGVQKPGSWTVTSAMRGVFAEDVRTRQEFMNLIRHNSNFH

SEQ ID NO: 11719 - protein, 235 aa, Nostoc calcicola
  REGION 1..235: note = tr|A0A1U7IXE1|A0A1U7IXE1_9NOSO GTP cyclohydrolase 1; OS = Nostoc calcicola FACHB-389 OX=1357508 GN=folE PE=3 SV=1
MTIASSNGSNYSQSPLIPDLAEAITPRPDRNTHNGRQPDVFPPTEEQMEQMKDAVRTIILGVGEDPEREGLLKTPKRVAEAMRFLTSGYNQSLEELVNDAIFDEGHNEMVLVRDINFFSLCEHHMLPFMGRAHVAYIPNQKVVGLSKLARIVEMYSRRLQVQERLTRQIAEAIQTILEPQGVAVVMEASHMCMVMRGVQKPGSWTVTSAMVGVFQEEHKTREELFNLIRHQATFM

SEQ ID NO: 11720 - protein, 211 aa, unidentified
  source 1..211: note = Nostoc carneum
  REGION 1..211: note = tr|A0A1Z4HIE4|A0A1Z4HIE4_9NOSO GTP cyclohydrolase 1; OS = Nostoc carneum NIES-2107 OX=1973483 GN=folE PE=3 SV=1
MTLSITPELISATALPNQQLPHVTESDMIQAVRTLLIGLGENPDREGLKDTPKRVVKALQFLTKGYDESLDELLNGAVFTENADEMVLVRDIDIFSSCEHHILPIIGRAHVAYIPNGKVIGLSKIARICEMYARRLQVQERLTIQIADALQGLLKPRGVAVVLEATHMCMVMRGVQKPGSWTVTSAMRGVFAEDVRTRQEFMNLIRHNASF

SEQ ID NO: 11721 - protein, 235 aa, unidentified
  source 1..235: note = Nostoc carneum
  REGION 1..235: note = tr|A0A1Z4HVZ4|A0A1Z4HVZ4_9NOSO GTP cyclohydrolase 1; OS = Nostoc carneum NIES-2107 OX=1973483 GN=folE PE=3 SV=1
MTIASPNGSNRSQSPLIPDLAEAITIRPDRNTHDGHEPNLHPPQEEEMEQMTAAVRQILLGVGEDPEREGLLKTPKRVAEAMRFLTSGYNQSLEELVNGAIFNEGHNEMVLVRDINFFSLCEHHMLPFMGRAHIAYIPNQKVVGLSKLARIVEMYSRRLQVQERLTRQIAEAVQTILNPQGVAVVMEATHMCMVMRGVQKPGSWTVTSAMLGVFQDEQKTREEFLNLIRHQAAFF

SEQ ID NO: 11722 - protein, 235 aa, Nostoc commune
  REGION 1..235: note = tr|A0A2R5FQC7|A0A2R5FQC7_NOSCO GTP cyclohydrolase 1; OS = Nostoc commune NIES-4072 OX=2005467 GN=folE PE=3 SV=1
MTIASSNGSNFPQSPVIPDLAEAITPRPDRNTHNGRQADVSPPKEEHLEEMKDAVRTLILGVGEDPEREGLLKTPKRVAEAMRFLTSGYTQSLEELVNDAIFDEGHNEMVLVRDINFFSLCEHHMLPFMGRAHVAYIPNQKVVGLSKLARIVEMYSRRLQVQERLTRQIAEAIQTILEPQGVAVVMEASHMCMVMRGVQKPGSWTVTSAMVGAFQEEHKTREEFFNLIRHQAAFF

SEQ ID NO: 11723 - protein, 235 aa, unidentified; identical to SEQ ID NO: 4555
  source 1..235: note = Nostoc cycadae
  REGION 1..235: note = tr|A0A2H6LB20|A0A2H6LB20_9NOSO GTP cyclohydrolase 1; OS = Nostoc cycadae WK-1 OX=1861711 GN=folE PE=3 SV=1

SEQ ID NO: 11724 - protein, 235 aa, unidentified
  source 1..235: note = Nostoc flagelliforme
  REGION 1..235: note = tr|A0A2K8SP67|A0A2K8SP67_9NOSO GTP cyclohydrolase 1; OS = Nostoc flagelliforme CCNUN1 OX=2038116 GN=folE PE=3 SV=1
MTIASSNGSNSSQSPLIPDLAEAITPRPDRNTHNGRQADVSPPKEEHLEEMKDAVRTLILGVGEDPEREGLLKTPKRVAEAMRFLTSGYTQSLEELVNDAIFDEGHNEMVLVRDINFFSLCEHHMLPFMGRAHVAYIPNQKVVGLSKLARIVEMYSRRLQVQERLTRQIAEAIQTILEPQGVAVVMEASHMCMVMRGVQKPGSWTVTSAMVGAFQEEHKTREEFFNLIRHQPAFI

SEQ ID NO: 11725 - protein, 235 aa, unidentified
  source 1..235: note = Nostoc linckia
  REGION 1..235: note = tr|A0A2C6WCD8|A0A2C6WCD8_NOSLI GTP cyclohydrolase 1; OS = Nostoc linckia z16 OX=1628751 GN=folE PE=3 SV=1
MTIASSNGSNYSQSPLISDLAEAITPRPDRNTHNGKQADLFSPKEEQMEQMMDAVRTLILGVGEDPEREGLLKTPKRAAEAMRFLTSGYNQSLEELVNGAIFDEGHNEMVLVRDINFFSLCEHHMLPFMGRAHVAYIPNQKVVGLSKLARIVEMYSRRLQVQERLTRQIAEAIQTILEPQGVAVVMEATHMCMVMRGVQKPGSWTVTSAMVGVFQEEHKTREELFNLIRHQATFI

SEQ ID NO: 11726 - protein, 216 aa, unidentified
  source 1..216: note = Nostoc linckia
  REGION 1..216: note = tr|A0A2C6WFF8|A0A2C6WFF8_NOSLI GTP cyclohydrolase 1; OS = Nostoc linckia z16 OX=1628751 GN=folE PE=3 SV=1
MILSIRPDLTSADQRLSSLVVEEQQTVTEAEMMQAVRTLLIGLGEDPDREGLKDTPKRLMKALQFLTKGYHESLDELLNGAVFTEDAHEMVLVRDIDIFSSCEHHILPIIGRAHVAYIPNGKVIGLSKIARICEMYARRLQVQERLTAQIADALQGLLKPQGVAVVIEATHMCMVMRGVQKPGSWTVTSAMRGVFAEDERTRQEFMNLVRHNSNFG

SEQ ID NO: 11727 - protein, 235 aa, Nostoc minutum
  REGION 1..235: note = tr|A0A367QB14|A0A367QB14_9NOSO GTP cyclohydrolase 1; OS = Nostoc minutum NIES-26 OX=1844469 GN=folE PE=3 SV=1
MTIASSNGSDCFQSPLIPDLAETINSRPDRNTHDGRQPDLHQPKEEDMEQMMDAVRTLLVGVGEDPEREGLLKTPKRVAEAMRFLTSGYNQSLEELVNGAIFNEGHNEMVLVRDINFFSLCEHHMLPFMGRAHVAYIPNQKVVGLSKLARIVEMYSRRLQVQERLTRQIAEAIQTILEPQGVAVVMEASHMCMVMRGVQKPGSWTVTSAMVGVFQEEHKTREEFFNLIRHQAAFF

SEQ ID NO: 11728 - protein, 235 aa, unidentified
  source 1..235: note = Nostoc piscinale
  REGION 1..235: note = tr|A0A0M3V5G8|A0A0M3V5G8_9NOSO GTP cyclohydrolase 1; OS = Nostoc piscinale CENA21 OX=224013 GN=folE PE=3 SV=1
MTIASSNGSNRFQSPLISELADAINTRPDRNTHDGRQPDLHPPSEEQMEQMMDAVRNIIVGVGEDPEREGLLKTPKRVAEAMRFLTSGYNQSLDELVNGAIFDEGHNEMVLVRDINFFSLCEHHMLPFMGRAHLAYIPNQKVVGLSKLARIVEMYSRRLQVQERLTRQIAEAIQTILEPQGVAVVMEATHMCMVMRGVQKPGSWTVTSAMLGVFQEEQKTREEFFNLIRHQPSFF

SEQ ID NO: 11729 - protein, 235 aa, unidentified
  source 1..235: note = Nostoc punctiforme
  REGION 1..235: note = sp|B2J1L7|GCH1_NOSP7 GTP cyclohydrolase 1 OS=Nostoc punctiforme (strain ATCC 29133 / PCC 73102) OX=63737; GN = folE PE=3 SV=1
MTIASSNGSNYSQSPLIPDLADAITPRPDRNTNNGRQADVFPPKEEHIEEMKDAVRKIILGVGEDPEREGLLKTPKRVAEAMRFLTSGYNQSLEELVNDAIFDEGHNEMVLVRDINFFSLCEHHMLPFMGRAHVAYIPNQKVVGLSKLARIVEMYSRRLQVQERLTRQIAEAIQTILEPRGVAVVMEASHMCMVMRGVQKPGSWTVTSAMVGVFQEEHKTREEFFNLIRHQPAFF

SEQ ID NO: 11730 - protein, 235 aa, unidentified
  source 1..235: note = Nostoc punctiforme
  REGION 1..235: note = tr|A0A367RYC2|A0A367RYC2_NOSPU GTP cyclohydrolase 1; OS = Nostoc punctiforme NIES-2108 OX=1356359 GN=folE PE=3; SV = 1
MTIASSNGSNCSQSPLIPDLAEAITPRPDRNTHNGRQPDVFPPKEEQMEEMKDAVRTLILGVGEDPEREGLLKTPKRVAEAMRFLTSGYNQSLEELVNDAIFDEGHSEMVLVRDINFFSLCEHHMLPFMGRAHVAYIPNQKVVGLSKLARIVEMYSRRLQVQERLTRQIAEAIQTILEPQGVAVVMEASHMCMVMRGVQKPGSWTVTSAMVGVFQEEHKTREEFFNLIRHQPAFF

SEQ ID NO: 11731 - protein, 216 aa, Nostoc sp.
  REGION 1..216: note = sp|Q8YN49|GCH12_NOSS1 GTP cyclohydrolase 1 2; OS = Nostoc sp. (strain PCC 7120 / SAG 25.82 / UTEX 2576); OX = 103690 GN=folE2 PE=3 SV=1
MTLSIRPDTVSAAQMVSSLSTQQTPTVTEAEMVQAVRTLLIGLGENPDREGLLDTPKRVVKALQFLTKGYNESLDELLNGAVFTEDANEMVLIRDIDIFSSCEHHILPIIGRAHVAYIPNGKVIGLSKIARVCEMYARRLQVQERLTLQIADALQGLLKPQGVAVVIEATHMCMVMRGVQKPGSWTVTSAMRGVFAEDARTREEFMNLVRHNANFH

SEQ ID NO: 11732 - protein, 235 aa, Nostoc sp.
  REGION 1..235: note = tr|K9QZ45|K9QZ45_NOSS7 GTP cyclohydrolase 1; OS = Nostoc sp. (strain ATCC 29411 / PCC 7524) OX=28072; GN = folE PE=3 SV=1
MTIASSNGSNRFQSPLIPDLAEAINTRPDRNTHDGKQPDLHPPSEEQMEPMMDAVRAILLGVGEDPEREGLLKTPKRVAEAMRFLTSGYNQSLEELINGAVFDEGHNEMVLVRDINFFSLCEHHMLPFMGRAHVAYIPNQKVVGLSKLARIVEMYSRRLQVQERLTRQIAEAIQTILEPQGVAVVMEASHMCMVMRGVQKPGSWTVTSAMVGVFQEEHKTREEFFNLIRHQAAFF

SEQ ID NO: 11733 - protein, 236 aa, unidentified
  source 1..236: note = Nostocales cyanobacterium
  REGION 1..236: note = tr|A0A1Y0RIC2|A0A1Y0RIC2_9CYAN GTP cyclohydrolase 1; OS = Nostocales cyanobacterium HT-58-2 OX=1940762 GN=folE; PE = 3 SV=1
MTIARSNGTNRSQQSPLISDLTEAITTRPDRNTHDGRQADLHPQTEEQMEQMMDAVRTLLVGVGEDPEREGLLKTPKRVAEAMRFLTSGYNQSLEELVNGAIFDEGHNEMVLVRDINFFSLCEHHMLPFMGKAHVAYIPNQKVVGLSKLARIVEMYSRRLQVQERLTRQIAEAVQTILEPKGVAVVMEATHMCMVMRGVQKPGSWTVTSAMVGVFQEEHKTREEFFNLIRHQSAFF

SEQ ID NO: 11734 - protein, 207 aa, unidentified
  source 1..207: note = Notoacmeibacter marinus
  REGION 1..207: note = tr|A0A231UWF0|A0A231UWF0_9RHIZ GTP cyclohydrolase 1; OS = Notoacmeibacter marinus OX=1876515 GN=folE PE=3 SV=1
MDATIHKFRDASGREDRPSRTEAEDAVRTLLRYIGEDEMREGLVDTPARVVKAYDEMFAGYDQDPEQILGRTFEDVSGYRDMVLIRDIVFHSHCEHHMVPIHGRAHIAYLPDGKVLGLSKIARLVDAFAHRLQTQESMTAQIADQIQGVLKPQGVAVMIEAEHMCMVMRGIRREGSDTVTTAFTGTFSDEVAERARFFDLIRTGSGR

SEQ ID NO: 11735 - protein, 209 aa, unidentified
  source 1..209: note = Notoacmeibacter sp.
  REGION 1..209: note = tr|A0A3L7JB69|A0A3L7JB69_9RHIZ GTP cyclohydrolase 1; OS = Notoacmeibacter sp. M2BS9Y-3-1 OX=2448481 GN=folE PE=3; SV = 1
MDATIHKFLDKSDKNERPTRSEAEEAVRTLLRYIGEDETREGLQDTPSRVVRAYEEMFAGYEQDPEQILGRTFEEVAGYKDIVLIRDIAFHSHCEHHMVPIHGKAHIAYLPDGKVLGLSKVARLVDVFAHRLQTQEAMTAQIADQIQSVLQPLGVAIMIEAEHMCMVMRGIRREGSDTVTTAFTGIFSDEASERARFFDLIRTGSGRRS

SEQ ID NO: 11736 - protein, 199 aa, unidentified
  source 1..199: note = Novibacillus thermophilus
  REGION 1..199: note = tr|A0A1U9K9J8|A0A1U9K9J8_9BACL GTP cyclohydrolase 1; OS = Novibacillus thermophilus OX=1471761 GN=folE PE=3 SV=1
MVLGRFCGGERSLAVDHEKIEAAVRMILDAIGEDPDREGLVDTPKRVARMYEELFTGMNEDPGEHFSVMFNEEHEELVLVKDIPFFSMCEHHLVPFFGQAHVAYIPRDGRVTGLSKLARAVEAVSRRPQLQERITSTVADTIMKKLNPYGVVVVLEAEHMCMTMRGVKKPGAKTVTSAVRGIFNKDAAARAEVFSLINS

SEQ ID NO: 11737 - protein, 189 aa, unidentified
  source 1..189: note = Noviherbaspirillum autotrophicum
  REGION 1..189: note = tr|A0A0C1YRB4|A0A0C1YRB4_9BURK GTP cyclohydrolase 1; OS = Noviherbaspirillum autotrophicum OX=709839 GN=folE PE=3; SV = 1
MDDNNFSADDWRRLLRHIGEDPQRQGLQDTPERVDRAWKHWTSGYGQDPADILKVFEDGAEKYNELIVVRGIPVYSHCEHHLAPFFGSATVGYTPNGRIVGLSKLTRLVECFSKRLQVQERLTIQIAEALMTHLQPLSVGVVIRCRHMCMESRGIRTPGQETVTSALLGEMQTNFPLRTEFLALAREKD

SEQ ID NO: 11738 - protein, 268 aa, unidentified
  source 1..268: note = Noviherbaspirillum autotrophicum
  REGION 1..268: note = tr|A0A0C1YL30|A0A0C1YL30_9BURK GTP cyclohydrolase FolE2 OS=Noviherbaspirillum autotrophicum OX=709839; GN = folE2 PE=3 SV=1
MNSPDPNLHAIPDVQSTVDTRRLSIQRVGVKGVRYPVTIKTRNGAQPTVGTWNMYVHLPQDQKGTHMSRFIALLEGNRAPLDVARFGALMSKMVKLLEADAGRIELSFPYFINKTAPVSGVESLMDYEVGFTGEVRNGELEVTLKVLVPVTSLCPCSKKISAYGAHNQRSHITVSAVLDGDLEVDDLIAKIEEQASCELFGLLKRPDEKYVTERAYDNPKFVEDLVRDVAGMLNADRRIMAYTLEAENFESIHNHSAYALIENDKRNK

SEQ ID NO: 11739 - protein, 189 aa, unidentified
  source 1..189: note = Noviherbaspirillum denitrificans
  REGION 1..189: note = tr|A0A254TL06|A0A254TL06_9BURK GTP cyclohydrolase 1; OS = Noviherbaspirillum denitrificans OX=1968433 GN=folE; PE = 3 SV=1
MEEENFTQHDWRRLLKHLGDDPSRQGLLDTPQRVEKAWQQWTSGYAMDPADILKVFEDGAEQYNELIVVRGIPVYSHCEHHLAPFFGTATVGYTPNGKIVGLSKLTRLVDCFAKRLQVQERLTIQIAEALMEHVEPLSVGVVIRCRHMCMESRGIQTPGEETVTSALLGEMRTNLGLRGEFLALARENK

SEQ ID NO: 11740 - protein, 189 aa, unidentified
  source 1..189: note = Noviherbaspirillum denitrificans
  REGION 1..189: note = tr|A0A254TEF8|A0A254TEF8_9BURK GTP cyclohydrolase 1; OS = Noviherbaspirillum denitrificans OX=1968433 GN=folE; PE = 3 SV=1
MSDKNFSTEDWRRLLGHLGEDPDRQGLRDTPERVDKAWKHWTSGYDQNPADILKVFEDGAEKYNELIVVRGIPVYSHCEHHLAPFFGSATVGYTPNGRIVGLSKLTRLVDCFSKRLQVQERLTVQIADSLMEHLQPLSVGVVIRCRHMCMESRGIRTPGEETVTSALLGEMRTNLGLRTEFLSLAREKD

SEQ ID NO: 11741 - protein, 266 aa, unidentified
  source 1..266: note = Noviherbaspirillum humi
  REGION 1..266: note = tr|A0A239BWH9|A0A239BWH9_9BURK GTP cyclohydrolase FolE2 OS=Noviherbaspirillum humi OX=1688639 GN=folE2 PE=3; SV = 1
MNAPVDHFLPDVQSALDRRNIAIQRVGVKSITHPVMVKTATGAQPSVATIDMTVRLPAHVKGTHMSRFLEVLQAHEEALSPASLSRMLDAMLLRLDADSGLIEMSMPYFLRKTAPVSGVESLLDYKLMLRAEQTEGRRRLTLQVLVPVTSLCPCSKEISQYGAHNQRSHITIAATLAPGAEMAAEELIALAERSASCELWGLLKRPDEKYVTERAYENPKFVEDLVRDIATVLNADRRIARYEVASENFESIHNHSAYAWIEGPAD

SEQ ID NO: 11742 - protein, 191 aa, unidentified
  source 1..191: note = Noviherbaspirillum humi
  REGION 1..191: note = tr|A0A239L0D7|A0A239L0D7_9BURK GTP cyclohydrolase 1; OS = Noviherbaspirillum humi OX=1688639 GN=folE PE=3 SV=1
MEVKQFSDEDWRRFLESLGEDPDRPGLVETPQRVAKAWTHWASGYEQDPAEILKVFEDGAEQYNELIVVRGIPVYSHCEHHLAPFFGFATVGYTPRGKIVGLSKLTRLVDCFSKRLQVQERLTIQIAEALMTHVEPLAVGVVIRCRHLCMESRGIRTPGEETVTSAILGEMRTNPALRAEFLALAREREKV

SEQ ID NO: 11743 - protein, 268 aa, unidentified
  source 1..268: note = Noviherbaspirillum sp.
  REGION 1..268: note = tr|A0A3A3GIT6|A0A3A3GIT6_9BURK GTP cyclohydrolase FolE2 OS=Noviherbaspirillum sp. K1S02-23 OX=2320865; GN = folE2 PE=3 SV=1
MNTRDLNLTTIPDVQSTVDTRRLTIQRVGVKGVRYPVTVKTSSGAQPTVGTWNMYVQLPEEQKGTHMSRFIALLEGNRAPLDIAHFSALMRKMVKLLEAEAGRIELTFPYFINKTAPVSGVESLMDYEVGLTGDIRGDQVEVTLKVMVPVTSLCPCSKKISAYGAHNQRSHITVNALLAGDILVDQLIAKIEQQASCELFGLLKRPDEKYVTERAYENPKFVEDLVRDVAGMLNADGRIVAYTLEAENFESIHNHSAYALIEHDKRAQ

SEQ ID NO: 11744 - protein, 189 aa, unidentified
  source 1..189: note = Noviherbaspirillum sp.
  REGION 1..189: note = tr|A0A5B8N7R2|A0A5B8N7R2_9BURK GTP cyclohydrolase 1; OS = Noviherbaspirillum sp. UKPF54 OX=2601898 GN=folE PE=3; SV = 1
MNDNHFSADDWRRLLRHIGEDPQRQGLQDTPERVDRAWKHWTSGYGQDPAEILKVFEDGAEKYNELIVVRGIPVYSHCEHHLAPFFGSATVGYTPNGRIVGLSKLTRLVECFSKRLQVQERLTIQIAEALMTHLQPLSVGVVIRCRHMCMESRGIRTPGQETVTSALLGEMQTNFPLRTEFLALAREKD

SEQ ID NO: 11745 - protein, 265 aa, unidentified
  source 1..265: note = Novimethylophilus kurashikiensis
  REGION 1..265: note = tr|A0A2R5F7C5|A0A2R5F7C5_9PROT GTP cyclohydrolase FolE2 OS=Novimethylophilus kurashikiensis OX=1825523; GN = folE PE=3 SV=1
MNQVVDFPIEDVQGMVDTRHLAIDKVGIKSMRHPVKVKDKSGGVQHTVAMFNMYVHLPHHFKGTHMSRFVEMLNVNDREISMENFESILREMAHRLEAQSGLIEMSFPYFINKSAPVSGVTSLLDYDVTFIGEVKNGEYSITVKVLVPVTSLCPCSKKISNYGAHNQRSHVTVTAKINEFIWVEDIIGLVEGQASSELYGLLKRPDEKYVTELAYDNPKFVEDMVRDVAAQLNEEPRLGAYTVECENFESIHNHSAYAVIEGKQS

SEQ ID NO: 11746 - protein, 267 aa, unidentified
  source 1..267: note = Novimethylophilus kurashikiensis
  REGION 1..267: note = tr|A0A2R5FGY0|A0A2R5FGY0_9PROT GTP cyclohydrolase FolE2 OS=Novimethylophilus kurashikiensis OX=1825523; GN = folE PE=3 SV=1
MNQLTTPAIEDVQNTPDVRHLAIDKVGIKSIRHPVKVKDKSGGVQHTVALFNMYVHLPHNFKGTHMSRFVEILNMNEREISIENFETILREMVKRLEAESGHIEMTFPYFINKAAPVSGVTSLLDYDVTFIGEIKNGEYNITVKVLVPVTSLCPCSKKISDYGAHNQRSHVTITALINEFIWVEDLIRIVEEQASSELYGLLKRPDEKFVTEHAYDNPKFVEDMVRDVAAQLNAEPRIDAYVVESENFESIHNHSAYALIERDKRQG

SEQ ID NO: 11747 - protein, 211 aa, Novosphingobium aromaticivorans
  REGION 1..211: note = tr|Q2G8Z8|Q2G8Z8_NOVAD GTP cyclohydrolase 1; OS = Novosphingobium aromaticivorans (strain ATCC 700278 / DSM 12444 / CIP 105152 / NBRC 16084 / F199) OX=279238; GN = folE PE =3 SV=1
MNVLSPSLAASSGMADVIGEDGKIVVPADVEEAIRTLIRWSGDQPEREGLLDTPKRVARAWREYCSGYAQDPGLHLSRTFEEVGGYDEVVLLRDIPFQSHCEHHMAPITGTASIAYLPRDRVVGISKLARVLHGFAQRLQVQERLTAEVAQCIWDNLKPHGVAVVIEAQHGCMTGRGVRTHGVGMVTSRMLGCFLDDASSRKEVLALMGRG

SEQ ID NO: 11748 - protein, 192 aa, Novosphingobium aromaticivorans
  REGION 1..192: note = tr|A4XEY3|A4XEY3_NOVAD GTP cyclohydrolase 1; OS = Novosphingobium aromaticivorans (strain ATCC 700278 / DSM 12444 / CIP 105152 / NBRC 16084 / F199) OX=279238; GN = folE PE =3 SV=1
MEQGKPHVPREVEEAIATLIRWAGDDPTREGLLDTPRRVARAWRECCSGYAEDPAHHLSRQFEEVGGYDEIVLLKDIPFQSHCEHHMAPIIGKAAIAYLPREKVVGISKLARVLHAYARRLQIQERLTSEVAQCIWDNLRPHGVAVVIEAQHGCMTGRGVRTPGVGMVTSRMMGTFLDDNRTRKEVLGLMGY

SEQ ID NO: 11749 - protein, 202 aa, unidentified
  source 1..202: note = Novosphingobium barchaimii
  REGION 1..202: note = tr|A0A561I070|A0A561I070_9SPHN GTP cyclohydrolase 1; OS = Novosphingobium barchaimii OX=1420591 GN=folE PE=3 SV=1
MSSLDGPGEDNPLGKPAVPEHVQDAIRTLIEWAGDDPSREGLLDTPKRVARAWKEYCQGYGEDPAVHLSRVFEEVGGYNEVVLLKDIPFQSHCEHHMAPIIGKAAIAYLPKDHVVGISKLARVLHGFARRLQIQERLTAEVAQCIWDHLQPQGVAVVIEASHACMTARGVRTPGVSMITSRMMGTFLDDERSRKEVLSLMGY

SEQ ID NO: 11750 - protein, 206 aa, unidentified
  source 1..206: note = Novosphingobium barchaimii
  REGION 1..206: note = tr|A0A0J7Y6Y5|A0A0J7Y6Y5_9SPHN GTP cyclohydrolase 1; OS = Novosphingobium barchaimii LL02 OX=1114963 GN=folE PE=3; SV = 1
MSSLVGHDEDDLQDGPLGKPAVPGHVQDAIRTLIEWAGDDPTREGLVDTPKRVARAWLEYCQGYQEDPAVHLSRIFEEVGGYDEVVLLKDIPFQSHCEHHMAPIIGKAAIAYLPRDHVVGISKLARVLHGFARRLQIQERLTAEVAQCIWQHLKPQGVAVVIEANHACMTARGVRTPGVSMITSRMMGTFLEDERSRKEVLSLMGY

SEQ ID NO: 11751 - protein, 204 aa, unidentified
  source 1..204: note = Novosphingobium fuchskuhlense
  REGION 1..204: note = tr|A0A117UTU9|A0A117UTU9_9SPHN GTP cyclohydrolase 1; OS = Novosphingobium fuchskuhlense OX=1117702 GN=folE PE=3; SV = 1
MDVHHGLDDDDAGEVGKIPVPADVQEAIRTLIRWSGDDPDREGLIDTPRRVARAWKEYCQGYGEDPASHLARQFEEVGGYNELVLLKDIPFQSHCEHHMAPIIGKAAIAYLPRDKVVGISKLARVLNAFARRLQIQERLTAEVARCIWDNLKPHGVAVVIEAQHGCMTGRGVRTPGVGMVTSRLMGTFLEDNRSRKEVLSLMGY

SEQ ID NO: 11752 - protein, 204 aa, unidentified
  source 1..204: note = Novosphingobium fuchskuhlense
  REGION 1..204: note = tr|A0A117UXW5|A0A117UXW5_9SPHN GTP cyclohydrolase 1; OS = Novosphingobium fuchskuhlense OX=1117702 GN=folE PE=3; SV = 1
MNYVNHEFEARDEDGKLIVPEPVQEAIRTLLRWAGDDPEREGLADTPSRVGRAWREYCAGYDEDPGQHLRRTFSEVAGYDEVVLLRDIPFQSHCEHHLAPITGTASIAYLPRNRVVGISKLARVLHGYARRLQIQERLTSEVATCIWDNLQPHGVAVVIEAQHGCMTGRGVRTPGVGMVTSRMLGCFLEDDSSRKEVLSLMGRK

SEQ ID NO: 11753 - protein, 201 aa, unidentified
  source 1..201: note = Novosphingobium ginsenosidimutans
  REGION 1..201: note = tr|A0A5B8S6A7|A0A5B8S6A7_9SPHN GTP cyclohydrolase 1; OS = Novosphingobium ginsenosidimutans OX=1176536 GN=folE; PE = 3 SV=1
MGCDHEPELDENGKLPVPPEVQEAIRTLIRWSGDDPQREGLIDTPSRVARAWKEYCQGYGEDPAYHLSRQFEEVGGYDELVLLKDIPFQSHCEHHMAPITGKAAIAYMPKDRVVGISKLARVLHAFARRLQIQERLTAEVAQCIWDNLHPHGVAVVIEAQHGCMTGRGVRTPGVGMVTSRLMGCFLDDNRSRKEVLSLMGY

SEQ ID NO: 11754 - protein, 200 aa, unidentified
  source 1..200: note = Novosphingobium ginsenosidimutans
  REGION 1..200: note = tr|A0A5B8S836|A0A5B8S836_9SPHN GTP cyclohydrolase 1; OS = Novosphingobium ginsenosidimutans OX=1176536 GN=folE; PE = 3 SV=1
MTSHLDHDEGETKLVVPDEVQDALRTLLRWAGEDPSREGLIDTPARVARAWREYCQGNEEDPALHLSRTFEEVGGYDEVVLLKDIPFQSHCEHHMAPITGKASIAYLPKNRVVGISKLARVLHGFARRLQIQERLTAEVAQCIWDHLQPHGVAVVIEAQHGCMTGRGVRTPGVGMVTSRMLGCFLEDERSRKEVLSLMGY

SEQ ID NO: 11755 - protein, 202 aa, unidentified
  source 1..202: note = Novosphingobium guangzhouense
  REGION 1..202: note = tr|A0A2K2G2K8|A0A2K2G2K8_9SPHN GTP cyclohydrolase 1; OS = Novosphingobium guangzhouense OX=1850347 GN=folE PE=3; SV = 1
MSSLVGPDEDNPLGKPNVPDNVQDAIRTLIEWAGDDPTREGLIDTPKRVARAWLEYCQGYQEDPAIHLSRIFEEVGGYDEVVLLKDIPFQSHCEHHMAPIIGKAAIAYLPRNHVVGISKLARVLHGFARRLQIQERLTAEVAQCIWEHLKPQGVAVVIEANHACMTARGVRTPGVGMITSRMMGTFLEDERSRKEVLSLMGY

SEQ ID NO: 11756 - protein, 203 aa, unidentified
  source 1..203: note = Novosphingobium kunmingense
  REGION 1..203: note = tr|A0A2N0I3C4|A0A2N0I3C4_9SPHN GTP cyclohydrolase 1; OS = Novosphingobium kunmingense OX=1211806 GN=folE PE=3 SV=1
MTHDHDDYGDAGPMAKLPVPDDVQEAIRTLIRWSGDDPSREGLLDTPARVARAWKEYCLGYQEEPAYHLSRTFEEVGGYNELVLLKDIPFQSHCEHHMAPITGKAAIAYMPNERVVGISKLARVLHGFAQRLQIQERLTAEVAQCIWDNLQPQGVAVVIEAQHGCMTGRGVKTPGVGMVTSRLIGCFLDDSRSRKEVLSLMGY

SEQ ID NO: 11757 - protein, 202 aa, unidentified
  source 1..202: note = Novosphingobium lindaniclasticum
  REGION 1..202: note = tr|T0IC38|T0IC38_9SPHN GTP cyclohydrolase 1; OS = Novosphingobium lindaniclasticum LE124 OX=1096930; GN = folE PE=3 SV=1
MSSLDGPDEDNPQGKPAVPEHVQQAIRTLIEWAGDDPSREGLLDTPKRVARAWKEYCQGYGEDPAFHLSRVFEEVGGYDEVVLLKDIPFQSHCEHHMAPIIGKAAIAYLPKNHVVGISKLARVLHGFARRLQIQERLTAEVAQCIWDHLQPQGVAVVIEASHACMTARGVRTPGVGMITSRMMGTFLDDERSRKEVLSLMGY

SEQ ID NO: 11758 - protein, 202 aa, unidentified
  source 1..202: note = Novosphingobium malaysiense
  REGION 1..202: note = tr|A0A0B1ZQ84|A0A0B1ZQ84_9SPHN GTP cyclohydrolase 1; OS = Novosphingobium malaysiense OX=1348853 GN=folE PE=3 SV=1
MSSLVGPDEDNPLGKPDVPDDVQEAIRTLIRWAGDDPTREGLQDTPKRVARAWLEYCQGYQQDPSIHLSRIFEEVGGYDEVVLLKDIPFQSHCEHHMAPIIGKAAIAYLPRDHVVGISKLARVLHGFARRLQIQERLTAEVAQCIWDNLQPHGVAVVIEASHACMTARGVRTPGVGMITSRMMGTFLEDDRSRKEVLSLMGY

SEQ ID NO: 11759 - protein, 204 aa, unidentified
  source 1..204: note = Novosphingobium malaysiense
  REGION 1..204: note = tr|A0A0B1ZQK5|A0A0B1ZQK5_9SPHN GTP cyclohydrolase 1; OS = Novosphingobium malaysiense OX=1348853 GN=folE PE=3 SV=1
MNVMHGHVVACRETDEAPVPAEVQEAVRTLLRWAGDDPGREGLLDTPSRVGRAWREYCAGYEEDPAVHLKRTFEEVSGYDEVVLLRDIPFHSHCEHHLAPIVGTASIAYLPTDRVVGISKLARVLHGYARRLQIQERLTAEIAQCIWDNLDPLGVAVVVKATHGCMTGRGVRTHGVDMVTSKLLGCFREDPSSRKEVLSLMNAN

SEQ ID NO: 11760 - protein, 202 aa, Novosphingobium mathurense
  REGION 1..202: note = tr|A0A1U6H328|A0A1U6H328_9SPHN GTP cyclohydrolase 1; OS = Novosphingobium mathurense OX=428990 GN=folE PE=3 SV=1
MSSLIGPDEDDPLGKPPVPQDVQEAIRTLIRWAGDDPEREGLLDTPQRVARAWKEYCLGYAEDPAIHLSRIFEEVGGYDEVVLLKDIPFQSHCEHHMAPIIGKAAIAYLPRDHVVGISKLARVLHGYARRLQIQERLTAEVAQCIWDHLQPHGVAVVIEANHACMSARGVRTPGVGMITSRMMGTFLEDERSRKEVLSLMGY

SEQ ID NO: 11761 - protein, 217 aa, Novosphingobium nitrogenifigens
  REGION 1..217: note = tr|F1ZCX8|F1ZCX8_9SPHN GTP cyclohydrolase 1; OS = Novosphingobium nitrogenifigens DSM 19370 OX=983920; GN = folE PE=3 SV=1
MGAPEGTDTLNELAFTLDHCEAHETAAEHPPVPEEVRSAIRTLLRWTGDNPDREGLRDTPSRVARAWKEYCSGYTENPGLHLRRTFSEVAGYDEVVLLKDIPFQSHCEHHLAPITGCASIAYLPRHRVVGISKLARVLHGFSRRLQIQERMTSEIAQCIWNALQPHGVAVVIEAQHGCMTGRGVRTPGVAMITSRMLGCFLDDASSRKEVLALMGRG

SEQ ID NO: 11762 - protein, 206 aa, Novosphingobium nitrogenifigens
  REGION 1..206: note = tr|F1Z9Q1|F1Z9Q1_9SPHN GTP cyclohydrolase 1; OS = Novosphingobium nitrogenifigens DSM 19370 OX=983920; GN = folE PE=3 SV=1
MTTFDLPDMDDDTETRPGKIPVPDHVQEAIRTLIRWAGDDPEREGLRDTPLRVARAWKEYCQGYGEDPSFHLGRQFEEVGGYHELVLLKDIPFQSHCEHHMAPIIGKASIAYLPRDKVVGISKLARVLHGYARRLQIQERLTSEVAQCIWDSLKPHGVAVVIEAQHGCMTGRGVRTPGVGMVTSRLMGEFLKDNRSRKEVLSLMGY

SEQ ID NO: 11763 - protein, 202 aa, Novosphingobium pentaromativorans
  REGION 1..202: note = tr|G6EI04|G6EI04_9SPHN GTP cyclohydrolase 1; OS = Novosphingobium pentaromativorans US6-1 OX=1088721; GN = folE PE=3 SV=1
MSSLIGPDEDNPLGKPPVPEDVQEAIRTLIRWAGDDPQREGLLDTPKRVARAWKEYCIGYAEDPAIHLSRIFEEVGGYDEVVLLKDIPFQSHCEHHMAPIIGKAAIAYLPRDHVVGISKLARVLHGFARRLQIQERLTAEVAQCIWDHLKPHGVAVVIEASHACMSARGVRTPGVGMITSRMMGTFLEDERTRKEVLSLMGY

SEQ ID NO: 11764 - protein, 202 aa, Novosphingobium pentaromativorans
  REGION 1..202: note = tr|A0A2W5NRX0|A0A2W5NRX0_9SPHN GTP cyclohydrolase 1; OS = Novosphingobium pentaromativorans OX=205844 GN=folE; PE = 3 SV=1
MSSLDGPDEDNPLGKPAVPEHVQQAIRTLIEWAGDDPSREGLLDTPKRVARAWKEYCQGYGEDPAIHLSRVFEEVGGYDEVVLLKDIPFQSHCEHHMAPIIGKAAIAYLPKDHVVGISKLARVLHGFARRLQIQERLTAEVAQCIWDHLQPQGVAVVIEASHACMTARGVRTPGVSMITSRMMGTFLDDERSRKEVLSLMGY

SEQ ID NO: 11765 - protein, 206 aa, Novosphingobium resinovorum
  REGION 1..206: note = tr|A0A1D8A0Q6|A0A1D8A0Q6_9SPHN GTP cyclohydrolase 1; OS = Novosphingobium resinovorum OX=158500 GN=folE PE=3 SV=1
MSSQVSPDEDSPRHDPLRKPDVPDNVQDAIRTLIEWAGDDPTREGLVDTPKRVARAWLEYCQGYQEDPAVHLSRIFEEVGGYDEVVLLKDIPFQSHCEHHMAPIIGKAAIAYLPRNHVVGISKLARVLHGFARRLQIQERLTAEVAQCIWEHLKPQGVAVVIEANHACMTARGVRTPGVGMITSRMMGTFLEDERSRKEVLSLMGY

SEQ ID NO: 11766 - protein, 206 aa, Novosphingobium resinovorum
  REGION 1..206: note = tr|A0A031K6N0|A0A031K6N0_9SPHN GTP cyclohydrolase 1; OS = Novosphingobium resinovorum OX=158500 GN=folE PE=3 SV=1
MSSLVGPDEDSPRHDPLRKPDVPDNVQDAIRTLIQWAGDDPTREGLVDTPKRVARAWLEYCQGYQEDPAVHLSRIFEEVGGYDEVVLLKDIPFQSHCEHHMAPIIGKAAIAYLPRNHVVGISKLARVLHGFARRLQIQERLTAEVAQCIWEHLKPQGVAVVIEANHACMTARGVRTPGVGMITSRMMGTFLEDERSRKEVLSLMGY

SEQ ID NO: 11767 - protein, 204 aa, unidentified
  source 1..204: note = Novosphingobium sediminis
  REGION 1..204: note = tr|A0A512AMZ8|A0A512AMZ8_9SPHN GTP cyclohydrolase 1; OS = Novosphingobium sediminis OX=707214 GN=folE_2 PE=3 SV=1
MNYVNHEFEARDEDGKLIVPEPVQEAIRTLLRWAGDDPEREGLADTPARVGRAWREYCAGYEEDPGIHLRRTFSEVAGYDEVVLLRDIPFQSHCEHHLAPITGTASIAYLPKNRVVGISKLARVLHGFARRLQIQERLTSEVANCIWDNLQPHGVAVVIDAQHGCMTGRGVRTPGVGMVTSRMLGCFLEDDSSRKEVLSLMGRK

SEQ ID NO: 11768 - protein, 204 aa, unidentified
  source 1..204: note = Novosphingobium sediminis
  REGION 1..204: note = tr|A0A512AFM7|A0A512AFM7_9SPHN GTP cyclohydrolase 1; OS = Novosphingobium sediminis OX=707214 GN=folE_1 PE=3 SV=1
MTVHHGHDDDDFGEDGKIVVPDHVQDAIRTLIRWSGDDPDREGLLDTPRRVARAWKEYCQGYGEDPATHLARQFEEVGGYNELVLLKDIPFQSHCEHHMAPIIGKAAIAYLPRHKVVGISKLARVLNAYARRLQIQERLTAEVATCIWDNLKPHGVAVVIEAQHGCMTGRGVRTPGVGMVTSRMMGTFLEDNRSRKEVLSLMGY

SEQ ID NO: 11769 - protein, 209 aa, Novosphingobium sp.
  REGION 1..209: note = tr|A0A2Z5EA51|A0A2Z5EA51_9SPHN GTP cyclohydrolase 1; OS = Novosphingobium sp. P6W OX=1609758 GN=folE PE=3 SV=1
MSPAQHENIEGAIAVDVRPTDAPVTQAKIEEAFRTLFQWVGEDPDREGLLDTPGRAARAWLEYCAGYLEDPRAYLARTFAEVGGYDDVVLLRDIPFHSHCEHHLAPITGTASIAYLPGERVVGISKLARVLHGFARRLQVQERLTAQVADCIWERLRPRGVAVVIDAQHGCMSGRGVRTHGVAMVTSRMMGCFKDDPDSRREILSLMGR

SEQ ID NO: 11770 - protein, 204 aa, Novosphingobium sp.
  REGION 1..204: note = tr|A0A3B7DPH9|A0A3B7DPH9_9SPHN GTP cyclohydrolase 1; OS = Novosphingobium sp. THN1 OX=1016987 GN=folE PE=3 SV=1
MSSLVGPDEDDDLARGKPPVPEDVQDAIRTLIRWSGDDPSREGLLDTPKRVARAWKEYCLGYGEDPASHLSRQFEEVGGYDEIVLLKDIPFQSHCEHHMAPIIGKAAIAYLPRHKVVGISKLARVLHGFARRLQIQERLTAEVAQCIWDNLKPHGVAVVIEASHACMTARGVRTPGVGMVTSRMMGTFLDDTRSRKEVLSLMGY

SEQ ID NO: 11771 - protein, 204 aa, Novosphingobium subterraneum
  REGION 1..204: note = tr|A0A0B8ZPT1|A0A0B8ZPT1_9SPHN GTP cyclohydrolase 1; OS = Novosphingobium subterraneum OX=48936 GN=folE PE=3 SV=1
MSSLVGPDEDDDLAQGKPPVPEDVQDAIRTLIRWSGDDPAREGLLDTPKRVARAWKEYCLGYGEDPASHLSRQFEEVGGYDEIVLLKDIPFQSHCEHHMAPIIGKAAIAYLPRHKVVGISKLARVLHGFARRLQIQERLTAEVAQCIWDNLKPHGVAVVIEASHACMTARGVRTPGVGMVTSRMMGTFLDDTRSRKEVLSLMGY

SEQ ID NO: 11772 - protein, 211 aa, Novosphingobium subterraneum
  REGION 1..211: note = tr|A0A0B8ZHX5|A0A0B8ZHX5_9SPHN GTP cyclohydrolase 1; OS = Novosphingobium subterraneum OX=48936 GN=folE PE=3 SV=1
MNVLSPSLAASSGMADVIGEDGKIVVPAEVEEAIRTLIRWSGDEPEREGLLDTPKRVARAWREYCRGYAEDPGLHLSRTFEEVGGYDEVVLLRDIPFQSHCEHHMAPIIGTASIAYLPKDRVVGISKLARVLHGYASRLQVQERLTAEVAKCIWDNLQPQGVAVVIEAQHGCMTGRGVRTHGVGMVTSRMLGCFLDDASSRKEVLALMGRG

SEQ ID NO: 11773 - protein, 204 aa, Novosphingobium taihuense
  REGION 1..204: note = tr|A0A562JIN9|A0A562JIN9_9SPHN GTP cyclohydrolase 1; OS = Novosphingobium taihuense OX=260085 GN=folE PE=3 SV=1
MSSVVGPDEDDDLARGKLPVPDDVQDAIRTLIRWSGDDPSREGLLDTPKRVARAWKEYCLGYGEDPASHLARQFEEVGGYDEIVLLKDIPFQSHCEHHMAPIIGKAAIAYLPRHKVVGISKLARVLHAYARRLQIQERLTAEVAQCIWDNLKPHGVAVVIEASHACMTARGVRTPGVGMVTSRLMGTFLEDNRSRKEVLSLMGY

SEQ ID NO: 11774 - protein, 211 aa, Novosphingobium taihuense
  REGION 1..211: note = tr|A0A562JZ75|A0A562JZ75_9SPHN GTP cyclohydrolase 1; OS = Novosphingobium taihuense OX=260085 GN=folE PE=3 SV=1
MNVLSPSLAASSGMADVIGEDGKIIVPADVEDAIRTLIRWSGDEPEREGLLDTPKRVARAWREYCRGYAEDPGLHLSRTFEEVGGYDEVVLLKDIPFQSHCEHHMAPIIGTASIAYLPKDRVVGISKLARVLHGYASRLQVQERLTAEVARCIWDNLQPHGVAVVIEAQHGCMTGRGVRTHGVGMVTSRMLGCFLDDASSRKEVLALMGRG

SEQ ID NO: 11775 - protein, 202 aa, Novosphingobium tardaugens
  REGION 1..202: note = tr|U2YJ30|U2YJ30_9SPHN GTP cyclohydrolase 1; OS = Novosphingobium tardaugens NBRC 16725 OX=1219035; GN = folE PE=3 SV=1
MSSLVGPDEDDPRGKAPVPQDVQEAIRTLIRWAGDDPEREGLLDTPKRVARAWKEYCSGYDDDPAIHLSRIFEEVGGYDEVVLLKDIPFQSHCEHHMAPIIGKAAIAYLPKDHVVGISKLARVMHGYARRLQIQERLTAEVAQCIWDNLKPRGVAVVIEASHACMTARGVRTPGVTMVTSQMMGVFLEDERSRKEVLSLMGY

SEQ ID NO: 11776 - protein, 220 aa, Obesumbacterium proteus
  REGION 1..220: note = tr|A0A1B7KA36|A0A1B7KA36_9GAMM GTP cyclohydrolase 1; OS = Obesumbacterium proteus ATCC 12841 OX=1354268 GN=folE; PE = 3 SV=1
MSSLSKEAVLVHTALEARGLETPLKGEVLDRETRKQRIKEHMTEIMQLLNLDLSDDSLAETPHRIAKMYVDEIFSGLDYANFPKITVIENKMKVDEMVTVRDITLTSTCEHHFVTIDGKATVAYIPKDCVIGLSKINRIVQFFAQRPQVQERLTQQILVALQTLLGTNNVAVSIDATHYCVKARGVRDATSATTTTSLGGLFKSSQNTRQEFLRAVRHHG

SEQ ID NO: 11777 - protein, 306 aa, Obesumbacterium proteus
  REGION 1..306: note = tr|A0A1B7KFK2|A0A1B7KFK2_9GAMM GTP cyclohydrolase FolE2 OS=Obesumbacterium proteus ATCC 12841 OX=1354268; GN = folE2 PE=3 SV=1
MVGTPEGPLADAQAMKDKASNIGLDWVGMEGIALPVEISGRPVSAFVNAGINLISRDEGQKGIHMSRLYQGLDELTQGELTPQRIEKTLNHFLSSHEGQTSQANMRVSGDILLSRSSMLSGNRGWKAYPLEIDATLADSLILTLKIGVPYSSTCPSSAALSVQVAQQQFNLDFDSHGDSVSQKDVSKWLIERGLPATPHSQRSWAWITVRLGLNASQFPVIELINRIEVALSTPVQTVVKRNDEQAFAIANGQNLMFCEDAARRLYNALKNQCHFDRVDIQVEHQESLHAHNAVARTSWKRGFYAA

SEQ ID NO: 11778 - protein, 184 aa, unidentified
  source 1..184: note = Oblitimonas alkaliphila
  REGION 1..184: note = tr|A0A0K1XEX9|A0A0K1XEX9_9GAMM GTP cyclohydrolase 1; OS = Oblitimonas alkaliphila OX=1697053 GN=folE PE=3 SV=1
MCDAIANNYREILQQLGEDPEREGLLDTPQRAAKAMQYLCNGYGKTLDEVVNGALFESDSDEMVIVRNIELYSLCEHHILPFIGKAHVAYIPTGKVIGLSKVARIVDMFARRLQIQENLTRQIADAIQDVTQAAGVAVVIEAQHMCMMMRGVEKQNSVMTSSAMLGAFRNSGTTRQEFLQLIRD

SEQ ID NO: 11779 - protein, 213 aa, unidentified
  source 1..213: note = Oceanibacterium hippocampi
  REGION 1..213: note = tr|A0A1Y5RWD8|A0A1Y5RWD8_9PROT GTP cyclohydrolase 1; OS = Oceanibacterium hippocampi OX=745714 GN=folE PE=3 SV=1
MLDSPNSQALAESSAESGSTAIKRPSRQQAEEAVRTLLRWAGDDPNREGLIGTPDRVVRAYEEFFAGYDQNPATYLERTFEDVEGYDEVILLRDIRFESYCEHHMLPIIGRAHVAYLPSDRVVGISKLARVVDAFAKRLQIQEKLTAQIAQTIQEALTPRGVAVVLESEHQCMSTRGVHKDGVSMVTSCMLGAFRDDPTTRRELLTMIGTSTG

SEQ ID NO: 11780 - protein, 218 aa, Oceanibaculum indicum
  REGION 1..218: note = tr|K2IU49|K2IU49_9PROT GTP cyclohydrolase 1; OS = Oceanibaculum indicum P24 OX=1207063 GN=folE PE=3 SV=1
MNENIMKPSVEASRLALGSVSGVERPSREEAEAAVRTLLRWAGDDPAREGLLDTPKRVAKAYEEWFGGYAVDPVEMLKRTFDETDGYDEMVLLRDIRFVSHCEHHMAPIVGRAHVAYLPLNRVVGISKLARVVNAYARRLQIQERLTAQIANTINDVLEPKGVAVVIEAEHGCMTSRGVNTHGTSMVTSRMLGAFRANASTRREFLTMIGNPQSSAAL

SEQ ID NO: 11781 - protein, 218 aa, Oceanibaculum indicum; identical to SEQ ID NO: 11780
  REGION 1..218: note = tr|A0A420WHA5|A0A420WHA5_9PROT GTP cyclohydrolase 1; OS = Oceanibaculum indicum OX=526216 GN=folE PE=3 SV=1

SEQ ID NO: 11782 - protein, 215 aa, Oceanibaculum pacificum
  REGION 1..215: note = tr|A0A154W2U1|A0A154W2U1_9PROT GTP cyclohydrolase 1; OS = Oceanibaculum pacificum OX=580166 GN=folE PE=3 SV=1
MTPLVRRSTDPAKLAVPPALPRPTREEAEAAVKTLLLWAGEDPAREGLLDTPKRVAKAYEEWFGGYSVDPVDMLKRTFDETDGYDEMVLLRDIRFVSHCEHHMAPIVGRAHIAYLPLNRVVGISKLARVVNAYARRMQIQERLTAQIANTINDVLEPKGVAVVIEAEHGCMTSRGVNTHGTSMVTSRMLGAFRTDPSTRREFLTMIGNPQNTAML

SEQ ID NO: 11783 - protein, 209 aa, Oceanicaulis sp.
  REGION 1..209: note = tr|A0A2T4ZNK9|A0A2T4ZNK9_9RHOB GTP cyclohydrolase 1; OS = Oceanicaulis sp. PT13A OX=2135616 GN=folE PE=3 SV=1
MDAMTDKETLANLPEDAIARPTREEAEEAVRTLLRWAGDDPRREGLLETPKRVVKAYQDWFRGYNEDPHEILGKRFEDVQGYDDMVMLTNIDVESHCEHHIAPILGTACVAYLPDRAVVGISKIAKVVEAFSKRLQTQETMTAQIADAIEDAMSPLGVAIFVDAKHQCMTTRGVHHPNVSTITTMFRGEFKANAELRQRFMNLCEQSKR

SEQ ID NO: 11784 - protein, 205 aa, Oceanicaulis sp.
  REGION 1..205: note = tr|A0A2E5V1N6|A0A2E5V1N6_9RHOB GTP cyclohydrolase 1; OS = Oceanicaulis sp. OX=1924941 GN=folE PE=3 SV=1
MDAVTPEAARLAGVTNSKPTREEAEEAVRTLIAWAGDDPAREGLIDTPKRVVKAWSEWFSGYEADPMAALGKTFEDVQGYDDMVMLTNIDVESHCEHHLAPILGVAHVAYLPRKAVVGISKIARVVEIFSKRMQTQETMTAQIADALTEAMQPLGVAVLIDAKHQCMTTRGVHHPNVSTITTTFTGEFKTDPALKDRFIRMVERA

SEQ ID NO: 11785 - protein, 357 aa, unidentified
  source 1..357: note = Oceanicella actignis
  REGION 1..357: note = tr|A0A1M7TN97|A0A1M7TN97_9RHOB GTP cyclohydrolase FolE2 OS=Oceanicella actignis OX=1189325 GN=folE2 PE=3 SV=1
MNIKPGSMTPAEPAPSEEAARAALEVLRRLRRADPALAARLEAESGAAAPARVYDEGFRPDAPYLAAMPDLQNGPESLIRGARRPIQHVGISNFRLPLLWPLRDGGTATLETSVVGSVALEATRKGINMSRIMRSFYRLAQGPMDFEALGRILDAYLHDLDSDEARLMLRLRLPLRRKALRSGLEGWQYYDLAFELAQAGGRRLRAMHLDYVYSSTCPCSLELAEHARAARGRMATPHSQRSLARVSAALAEGAERLWPEDLIDMCARAIPTETQVMVKREDEQAFAELNGANPIFVEDAARLLCAALEADPRIGDFRVAASHQESLHSHDAVSVLVSGPTFAQASIDPRFFETLRA

SEQ ID NO: 11786 - protein, 230 aa, unidentified
  source 1..230: note = Oceanicoccus sagamiensis
  REGION 1..230: note = tr|A0A1X9NAJ4|A0A1X9NAJ4_9GAMM GTP cyclohydrolase 1; OS = Oceanicoccus sagamiensis OX=716816 GN=folE PE=3 SV=1
MMESVAEQTLSFPNVSVTYSEEAELVRKALIDAGLETPLTAKQLTRDEKYERIREAMTDVVDALGLDLTDDSLCETPHRIAKMYVDEIFSGLDYSQFPKITAIENKMGVEEMVKVSDISLVSTCEHHFVTIDGVAKVAYIPGDKIIGLSKINRIVRFFAQRPQVQERLTQQVLLALQTLLETEHVAVRIDASHYCVKARGVMDASSVTQTTALGGKFKHNATSRKEFLDA

SEQ ID NO: 11787 - protein, 201 aa, unidentified
  source 1..201: note = Oceanicoccus sagamiensis
  REGION 1..201: note = tr|A0A1X9NQL8|A0A1X9NQL8_9GAMM GTP cyclohydrolase 1; OS = Oceanicoccus sagamiensis OX=716816 GN=folE PE=3 SV=1
MGQPIKNAKDTANPEDSLENMITAFEQIIDGVGEDRQRDGLLDTPKRAAKAMQFLTKGYDQTVEEIVNGALFESDANEMVLVSDIELYSMCEHHMLPFIGKCHVAYIPNGKVVGLSKIARIVDMYARRLQIQESLTSQIGRAIMDVTGAAGVGVIIEAKHMCMMMRGVEKQNSVMRTSSLMGSFRDNDKTRAEFLSLVNPR

SEQ ID NO: 11788 - protein, 368 aa, Oceanicola granulosus
  REGION 1..368: note = tr|Q2CBE6|Q2CBE6_OCEGH GTP cyclohydrolase FolE2; OS = Oceanicola granulosus (strain ATCC BAA-861 / DSM 15982 / KCTC 12143 / HTCC2516) OX=314256 GN=folE2 PE=3 SV=1
MNLHAPDVDREISRAEAEDALALVRRWAELRTPEEVAALDPVISRLLPAGEVSNYPALSRRYPDDFDADAAYKATMPDLQNGPTSLIRGEATQIQHVGISNFRLPIRYRLRDGGEVTLETSVTGTVSLEAEKKGINMSRIMRSFYRNAEEAFSFGVMARTLDDYLADLESLDARLMMRFSFPVKVKSLRSGLEGYQYYDIAMELVEHAGTRKKIFHLDYVYSSTCPCSLELSEHARQQRGQLATPHSQRSVARISLLVDPEATERLWFEDLIDLARAAVPTETQVMVKREDEQAFAELNAANPIFVEDAARLFCERLRADARIADFRVVASHQESLHSHDAVSILTEGDTFAAESLDPKLFATLHHPG

SEQ ID NO: 11789 - protein, 365 aa, unidentified
  source 1..365: note = Oceanicola litoreus
  REGION 1..365: note = tr|A0A1N6EII3|A0A1N6EII3_9RHOB GTP cyclohydrolase FolE2 OS=Oceanicola litoreus OX=1217970 GN=folE2 PE=3 SV=1
MNIHAAALDAATEEEARAALELLRRWAKGATPEEVAALDPAIARLLPDAPLPNYPALARAYPEEFKVDEAYKAGLPDLQNGPSSLIRGARQHIEHVGISNFRLPIRFHRRDGGDITLETSVTGTVSLEAEKKGINMSRIMRTFYARAEEVFSLDVVEETLEAYKGDLESFDARIQMRFSFPMKVGSLRSGLEGYQYYDIAMEVVDTGGRRKKLMHLDFVYSSTCPCSLELSEHARRARGQLATPHSQRSVARISVECLPGQRLWFEDLVELCRRAVPTETQVMVKREDEQAFAELNAANPIFVEDAARSFCEALQAEPRVGDFRVVASHQESLHSHDAVAVLTEGGTFAAQSLDPRLFTTLVHGG

SEQ ID NO: 11790 - protein, 365 aa, Oceanicola sp.
  REGION 1..365: note = tr|A0A5B8BWK0|A0A5B8BWK0_9RHOB GTP cyclohydrolase FolE2 OS=Oceanicola sp. D3 OX=2587163 GN=folE2 PE=3 SV=1
MNILAAALGETTDEEARAALDVLRRWAEKATPEEVAALDPAIARLLPDAPLPNYPALARAYPEEFKVDEAYKAGLPDLQNGPSSLIRGARQHIEHVGISNFRLPIRFHRRDGGDITLETSVTGTVSLEAEKKGINMSRIMRTFYARAEEVFSLDVVEETLEAYKGDLESFDARIQMRFSFPMKVDSLRSGLTGYQYYDIAMEVVDAGGRRKKLMHLDFVYSSTCPCSLELSEHARRARGQLATPHSQRSVARISVECLPGQRLWFEDLVELCRSAVPTETQVMVKREDEQAFAELNAANPIFVEDAARSFCEALQAEPRVGDFRIVASHQESLHSHDAVAVLTEGPTFAAQSLDPKLFTTLVHGG

SEQ ID NO: 11791 - protein, 364 aa, Oceanicola sp.
  REGION 1..364: note = tr|A0A254R5L8|A0A254R5L8_9RHOB GTP cyclohydrolase FolE2 OS=Oceanicola sp. 22II-s10i OX=1317116 GN=folE2 PE=3; SV = 1
MNIHPKDMARRPDRDEARAALDKLRAWAETASDSDIASLDPVIAKLLPAQGEYPVMSRVYPDNFIADDAYRATLPDLQNGPASLIRGARRTLQHVGISNFRLPIRFRTRSGGEMTLETSVTGSVSLEANKKGINMSRIMRSFYAHSEKSFSFSVIEDALEDYKTDLESLDARIQMRFSYPVKRQSLRSGLEGYQYYDIALELVEQAGQRLKIMHLDYVYSSTCPCSLELSEHARRERGQLATPHSQRSVARISVVVEGDETLWFEDLIDMARVAVPTETQVMVKREDEQAFAELNAANPIFVEDAARLFSQQLEDDARVGDFRVVASHQESLHSHDAVSVVTEGPTFAQASLDPRLFSTLHHPG

SEQ ID NO: 11792 - protein, 225 aa, unidentified
  source 1..225: note = Oceanihabitans sediminis
  REGION 1..225: note = tr|A0A368P4J2|A0A368P4J2_9FLAO GTP cyclohydrolase 1; OS = Oceanihabitans sediminis OX=1812012 GN=folE PE=3 SV=1
MKFDEKLEEFESLGENHIGTSSDTPMRKDAFKLSNDEKIEIIKDDVRHIMETLGLDLTDDSLKGTPNRVAKMFVKEIFGGLDPKSKPNASTFDNKYKYGEMLVEKNITVYSTCEHHLLPIVGRAHVAYISNGTVVGLSKMNRIVDYYAKRPQVQERLTIQIVKELQEVLNTEDVACVIDAKHLCVNSRGIRDVDCSTVTSEFGGKFKDLETRREFLDYIKLDTTF

SEQ ID NO: 11793 - protein, 198 aa, unidentified
  source 1..198: note = Oceanihabitans sediminis
  REGION 1..198: note = tr|A0A368P524|A0A368P524_9FLAO GTP cyclohydrolase 1; OS = Oceanihabitans sediminis OX=1812012 GN=folE PE=3 SV=1
MPYKQFEEYNIQVTEDIKQQYKSIIEDLGEDTKREGLVKTPERAAKAMQFLTQGYHQDPAEVLRGAMFKEDYKDMVIVKDIELYSLCEHHILPFFGKAHIAYIPNGQIVGLSKLPRIVDIFARRLQVQERLTHQILDCINDTLKPEGVAVVIEASHMCMMMRGVQKQNSVTTTSGFRGQFEKIETRNEFLNLIGQKLS

SEQ ID NO: 11794 - protein, 217 aa, Oceanimonas baumannii
  REGION 1..217: note = tr|A0A235CFB9|A0A235CFB9_9GAMM GTP cyclohydrolase 1; OS = Oceanimonas baumannii OX=129578 GN=folE PE=3 SV=1
MTALSDEAIRVRSALEARGLETPMRSNNLTTAQQQEQITGLMTQVMDVLGLDLEDDSLAETPQRIAKMYVREIFSGLDYTQFPKITLIDNKMKVDEMVQVRDITMTSTCEHHFVTIDGTATVAYIPRGKVIGLSKINRIVQFFARRPQVQERLTQQVLLALQTLLESDDVAVSITATHYCVKARGVMDATSTTTTTSLGGIFKSRQETRQEFLRGVR

SEQ ID NO: 11795 - protein, 322 aa, Oceanimonas baumannii
  REGION 1..322: note = tr|A0A235CBR4|A0A235CBR4_9GAMM GTP cyclohydrolase FolE2 OS=Oceanimonas baumannii OX=129578 GN=folE2 PE=3 SV=1
MNRDLPDVAATETPSIQAPLQWVGMSRIDIPFHLAEPGCPGPVHAMADVQVNLPAATIKGIHMSRIYRMLDDLSRQTAITPSHLETLLGQMVESHRDCETDSARVILNFNLLVRRPALKTPELAGWKSYPARLEATLARGHFSLEARVQVEYSSTCPCSAALSRQLVARGFREHFPGDKAVTTDEVTAWLKQHATLATPHSQRSEAQVTVTLASNAPDFGLMPLIDQIEEVLTTPVQTAVKRADEQAFAWLNGQNLMYVEDAARRIQHALLKPYATALVHVRHLESLHSHDAVASANGNVSSARFYTEEPDSRHNPIPQNSD

SEQ ID NO: 11796 - protein, 218 aa, Oceanimonas doudoroffii
  REGION 1..218: note = tr|A0A233RHC5|A0A233RHC5_9GAMM GTP cyclohydrolase 1; OS = Oceanimonas doudoroffii OX=84158 GN=folE PE=3 SV=1
MTALSDAAIRVRSALEARGLETPMRGTHLSTDEQQEQITGLMTQVMDVLGLDLEDDSLAETPQRIAKMYVREIFSGLDYAHFPKITLIENKMQVDEMVQVRDITLTSTCEHHFVTIDGTATVAYIPRGKVIGLSKINRIVQFFARRPQVQERLTQQVLVALQTLLESEDVAISITATHYCVKARGVMDATSATTTTSLGGIFKTRPATRHEFLSGVVR

SEQ ID NO: 11797 - protein, 305 aa, Oceanimonas doudoroffii
  REGION 1..305: note = tr|A0A233RB42|A0A233RB42_9GAMM GTP cyclohydrolase FolE2 OS=Oceanimonas doudoroffii OX=84158 GN=folE2 PE=3; SV = 1
MNRDLPDVAADEHSPIQAPLEWVGMSGIDLPVTISEPGCPGPVHAVVDAQVNLPSATVKGIHMSRIYRMLNELSHQAEIAPAQLETLLERMIESHSDCHTDSARIRLRFNLLARRAALKTPELAGWKSYPVRLEATLKRGELSLQASVQVEYSSTCPASAALSRQLVAQGFRDHFPDGKGVTTEDVAAWLEQHATLATPHSQRSEAQVAVTLCSDAPSFGLMALIDRIEQALATPVQTAVKRADEQAFASLNGQNLMYVEDAARRIQHALGVHDSEAQIHVRHLESLHPHDAVASANGNPAMAAP

SEQ ID NO: 11798 - protein, 218 aa, Oceanimonas sp.
  REGION 1..218: note = tr|H2FWH6|H2FWH6_OCESG GTP cyclohydrolase 1; OS = Oceanimonas sp. (strain GK1) OX=511062 GN=folE PE=3 SV=1
MTALSDAAIRVRSALEARGLETPMRSHNLTTDEQQEKITGLMTQVMDVLGLDLDDDSLAETPQRIAKMYVREIFSGLDYAHFPKITLIDNKMKVDEMVQVRDITLTSTCEHHFVTIDGTATVAYIPRGKVIGLSKINRIVQFFARRPQVQERLTQQVLVALQALLESDDVAVSITATHYCVKARGVMDATSNTTTTSLGGIFKSRPATRQEFLSGVVR

SEQ ID NO: 11799 - protein, 365 aa, unidentified
  source 1..365: note = Oceaniovalibus guishaninsula
  REGION 1..365: note = tr|K2H9Z9|K2H9Z9_9RHOB GTP cyclohydrolase FolE2; OS = Oceaniovalibus guishaninsula JLT2003 OX=1231392; GN = folE2 PE=3 SV=1
MNVHLPKTAPLGDADDAARALDALRLWAASAAPEELARADPALRALLPGAAGPAPLSRVYPHAFASDAAYIATLPDLQNGPAASIRGARRTIQHVGISNFRLPIRYRTRDGDDMTLETAVTGTVSLDAESKGINMSRIMRTFYRHADRTFSFGVIEAALDDYKTDLGSFDARIQMRLSFPMRVQSLRSGLSGWQYYDIALELVDQGGVRRKIVHLDYVYSSTCPCSLELSEHARLSRRQLATPHSQRSVARLSVLLEPDRPCLWFEDLVGICRAAVPTETQAMVKREDEQAFAELNAANPVFVEDAARLFAQGLHADERIADFRVVASHQESLHSHDAVSVLTQGDTFAQASLDPRLFASLFHVG

SEQ ID NO: 11800 - protein, 367 aa, unidentified
  source 1..367: note = Oceaniovalibus sp.
  REGION 1..367: note = tr|A0A5D0SDJ0|A0A5D0SDJ0_9RHOB GTP cyclohydrolase FolE2 OS=Oceaniovalibus sp. ACAM 378 OX=2599923 GN=folE2; PE = 3 SV=1
MTRLATEFDRTPDRDQAAAALRLLQDWVAQAGAKDIAALDPVLARLLPGQPPETCAKLSRSYPDEFVVDADYRATLPDLQNGSHTLIKGSKRQIQHVGISNFRLPIRYHTRDGADLVLETSVTGTVSLEAEKKGINMSRIMRTFYRHAEATFSFEVIEAALDDYKTDLESFDARIQMRLSFPMKMDSLRSGLSGYQYYDIALELVEIDGVRRKILHLDYVYSSTCPCSLELSEHAREARGQLATPHSQRSVARLSMALTPDAPCLWFEDLVDLCRAAVPTETQVMVKREDEQAFAELNAANPIFVEDAARLFAGRLQDDPRIGDFRVVASHQESLHSHDAVSVLTEGDTFAQASLDPRLFATLFHVG

SEQ ID NO: 11801 - protein, 218 aa, unidentified
  source 1..218: note = Oceanisphaera arctica
  REGION 1..218: note = tr|A0A2P5TQY1|A0A2P5TQY1_9GAMM GTP cyclohydrolase 1; OS = Oceanisphaera arctica OX=641510 GN=folE PE=3 SV=1
MTALSDAAIRVRSALEAKGLETPMKGNTLTLDEKQSRITGLMTEMMDVLGLDLEDDSLAETPKRIAKMYVREIFSGLDYSYFPKITLIENKMKVDEMVQVRDITLTSTCEHHFVTIDGTATVAYIPRSKVIGLSKINRIVQFFARRPQVQERLTQQVLVALQELLESDDVAVSITATHYCVKARGVMDATSSTTTTSLGGIFKSRPETRQEFLGGVVR

SEQ ID NO: 11802 - protein, 218 aa, unidentified
  source 1..218: note = Oceanisphaera avium
  REGION 1..218: note = tr|A0A1Y0CVS2|A0A1Y0CVS2_9GAMM GTP cyclohydrolase 1; OS = Oceanisphaera avium OX=1903694 GN=folE PE=3 SV=1
MTALSDAAIRVRSALEQRGLETPMKGNSLTLDEKQARITALMTEMMDVLGLDLADDSLADTPQRIAKMYVREIFSGLDYSYFPKITLIDNKMKVDEMVQVRDITLTSTCEHHFVTIDGTATVAYIPRTKVIGLSKINRIVQFFARRPQVQERLTQQVLVALQTLLESEDVAVSISATHYCVKARGVMDATSSTTTTSLGGIFKSRAATRHEFLSGVVR

SEQ ID NO: 11803 - protein, 218 aa, unidentified
  source 1..218: note = Oceanisphaera profunda
  REGION 1..218: note = tr|A0A1Y0D2J7|A0A1Y0D2J7_9GAMM GTP cyclohydrolase 1; OS = Oceanisphaera profunda OX=1416627 GN=folE PE=3 SV=1
MTALSDAAIRVRSALEERGLETPMKSNNLTADDKQARITGLMTEMMDVLGLDLADDSLAETPQRIAKMYVREIFSGLDYSYFPKITMIDNKMKVDEMVQVRDITLTSTCEHHFITIDGRATVAYIPRSKVIGLSKINRIVQFFARRPQVQERLTQQILVALQTLLESDDVAVSISATHYCVKARGVMDATSSTTTTSLGGIFKSRAETRHEFLSGIVR

SEQ ID NO: 11804 - protein, 218 aa, unidentified
  source 1..218: note = Oceanisphaera psychrotolerans
  REGION 1..218: note = tr|A0A1J4QAB0|A0A1J4QAB0_9GAMM GTP cyclohydrolase 1; OS = Oceanisphaera psychrotolerans OX=1414654 GN=folE PE=3; SV = 1
MTALSDAAIRVRSALEARGLETPMKGNNLTLDEKQSRITGLMTEMMDVLGLDLEDDSLAETPKRIAKMYVREIFSGLDYSYFPKITLIENKMKVDEMVQVRDITLTSTCEHHFVTIDGTATVAYIPRSKVIGLSKINRIVQFFARRPQVQERLTQQVLVALQALLESDDVAVSITATHYCVKARGVMDATSSTTTTSLGGIFKSRPETRQEFLGGVVR

SEQ ID NO: 11805 - protein, 185 aa, unidentified
  source 1..185: note = Oceanispirochaeta sp.
  REGION 1..185: note = tr|A0A370AHS1|A0A370AHS1_9SPIO GTP cyclohydrolase 1; OS = Oceanispirochaeta sp. M1 OX=2283433 GN=folE PE=3 SV=1
MNKEKVSGLIRELLIEIGEDPDREGLLKTPERVAEAYKFLTSGYSMDLKSVINNAVFESEANNMIVCKDIEVYSLCEHHMLPFFGVCHIGYIAKDKVLGVSKLARIVDFYSRRLQIQERLTAEIARTVRDEAGAEGVGVVMECRHMCMMMRGVQKQNSSMLTSSVLGSFHSSIATREEFMSLIRH

SEQ ID NO: 11806 - protein, 187 aa, unidentified
  source 1..187: note = Oceanispirochaeta sp.
  REGION 1..187: note = tr|A0A5C1QJM6|A0A5C1QJM6_9SPIO GTP cyclohydrolase 1; OS = Oceanispirochaeta sp. K2 OX=2518645 GN=folE PE=3 SV=1
MNKERVSQLIKELLIEIGEDPHREGLLKTPERVAEAYRFLTSGYSMDLKEIINDAVFESEANNMIVCKDIEVYSLCEHHMLPFFGVCHIGYIAKNKVLGVSKLARIVDFYSRRLQIQERLTAEIARTVKDESGAEGVGVVMECRHMCMMMRGVQKQNSSMLTSTVLGSFHSSVATREEFMSLISRQK

SEQ ID NO: 11807 - protein, 204 aa, Oceanithermus desulfurans
  REGION 1..204: note = tr|A0A511RGF6|A0A511RGF6_9DEIN GTP cyclohydrolase 1; OS = Oceanithermus desulfurans NBRC 100063 OX=1227550; GN = folE PE=3 SV=1
MKKRIELEDTGMTFETAYDLEAMSRLARSWLEQIGEDPDREGLVDTPGRVARAWAFLTRGYQQSLEEVINGAIFEAEGSEMVVVKGIEFYSMCEHHLLPFFGQVHIGYIPGGKILGLSKFARLVDMYARRLQLQERLATQIAGALMQVLEPRGVGVVVEGAHLCMMMRGVEKQHSTTVTSAMRGVFQEDLKTREEFLALLRSQP

SEQ ID NO: 11808 - protein, 204 aa, Oceanithermus profundus
  REGION 1..204: note = tr|E4U9M4|E4U9M4_OCEP5 GTP cyclohydrolase 1; OS = Oceanithermus profundus (strain DSM 14977 / NBRC 100410 / VKM B-2274 / 506) OX=670487 GN=folE PE=3 SV=1
MKKRIELEDTGMTFETAYDLEAMSRLARSWLEQIGEDPAREGLADTPGRVARAWAFLTRGYQQSLEEVINGAVFEAEGSEMVVVKGIEFYSMCEHHLLPFFGQVHIGYIPDGKILGLSKFARLVDMYARRLQLQERLATQIAGALMQVLEPRGVGVVVEGAHLCMMMRGVEKQHSTTVTSAMRGVFKEDLKTREEFLALLRSQP

SEQ ID NO: 11809 - protein, 185 aa, unidentified
  source 1..185: note = Oceanobacillus arenosus
  REGION 1..185: note = tr|A0A3D8PQN0|A0A3D8PQN0_9BACI GTP cyclohydrolase 1; OS = Oceanobacillus arenosus OX=1229153 GN=folE PE=3 SV=1
MDKQKIEEAVRMILEAIGEDPDRQGLLDTPKRVAKMYEEVFSGLKKDPAEHCKTVFEEEHDEVVLVKDIQFSSMCEHHLVPFFGVAHIAYIPKHGRVIGLSKLARIIDDFSKRPQLQERITTSVAELLMEELDPIGVMVVLEAEHMCMTIRGVKKQGAKTVTSAVRGEFRTNSKSRNEVLSLIKF

SEQ ID NO: 11810 - protein, 185 aa, unidentified
  source 1..185: note = Oceanobacillus bengalensis
  REGION 1..185: note = tr|A0A494Z844|A0A494Z844_9BACI GTP cyclohydrolase 1; OS = Oceanobacillus bengalensis OX=1435466 GN=folE PE=3 SV=1
MDKEKIATAVRMILEAIGEDPDRQGLLDTPKRVANMYEEVFSGLDKDPAVHCQTVFEEPHEEIVLVKDIQFSSMCEHHLVPFIGVAHVAYLPKNGQVIGLSKLARIVDDISKRPQLQERITKSVADLLMKELDPIGVMVVIEAEHMCMSIRGVKKQGSKTITSAVRGEFKTNNKSRSEVLALINR

SEQ ID NO: 11811 - protein, 185 aa, Oceanobacillus caeni
  REGION 1..185: note = tr|A0A0N1N1X6|A0A0N1N1X6_9BACI GTP cyclohydrolase 1; OS = Oceanobacillus caeni OX=405946 GN=folE PE=3 SV=1
MDKEKIQSAVRQILEAIGEDPDRQGLLDTPKRVANMYEEVFSGLSKNPAVHCETVFEEQHEEMVLVKDIQFSSMCEHHLVPFIGVAHVAYIPKNGRVIGLSKMARIVDDISKRPQLQERITKSVADLLMEELDPVGVMVILEAEHMCMSIRGVKKQGSKTVTSAVRGSFRENSKSRNEVLALISK

SEQ ID NO: 11812 - protein, 185 aa, unidentified
  source 1..185: note = Oceanobacillus chungangensis
  REGION 1..185: note = tr|A0A3D8PXY7|A0A3D8PXY7_9BACI GTP cyclohydrolase 1; OS = Oceanobacillus chungangensis OX=1229152 GN=folE PE=3; SV = 1
MDKKKMEEAVRMILEAIGEDPDRQGLLDTPARVAKMYEEVFSGLKKDPAEHCKTVFEEEHDEVVLVKDIQFSSMCEHHLVPFFGVAHIAYIPKNGRVIGLSKLARIVDDFSKRPQLQERITTSVAELLMEELSPIGVMVVLEAEHMCMTIRGVKKQGAKTVTSAVRGEFRTNSKSRNEVLSLIKF

SEQ ID NO: 11813 - protein, 190 aa, unidentified
  source 1..190: note = Oceanobacillus halophilus
  REGION 1..190: note = tr|A0A495A2W7|A0A495A2W7_9BACI GTP cyclohydrolase 1; OS = Oceanobacillus halophilus OX=930130 GN=folE PE=3 SV=1
MRQQIMDKEKIASAVKMILEAIGDDPDRQGLLDTPKRVANMYEEVFAGLSKNPAIHCETVFEEQHEEMVLVKDIPFSSMCEHHLVPFIGEAHVAYIPKNGRVIGLSKIARIVDDISKRPQLQERITKSVADLLMEELDPVGVMVVLEAEHMCMSIRGVNKQGAKTVTSAVRGSFHSNSKSRNEVLALINK

SEQ ID NO: 11814 - protein, 302 aa, Oceanobacillus iheyensis
  REGION 1..302: note = sp|Q8EQK9|GCH4_OCEIH GTP cyclohydrolase FolE2; OS = Oceanobacillus iheyensis (strain DSM 14371 / CIP 107618 / JCM 11309 / KCTC 3954 / HTE831) OX=221109 GN=folE2 PE=3; SV = 2
MPKKQLPPKEERHKLFGSVPPKERTKPIEKNKMADLQNTKRDFLFKLDAVGISNVKYPVIIHSDLAPKEQTSIGTFEFSSSIPTMSKGTNMSRFMELLQEYSSSGMNVSISELKRFTKELSGKLEQKDATIEVSFPWFFERKGPESQSAGMNHADAKLSVTYDSNSGFSIDVSLSAWITTLCPCSKEISEYSAHNQRGNVTLEATLVEDFDEAKIDWKLALLEAAESNASARLHPVLKRTDEKMVTEQAYENPRFVEDMVRLIAADLYEMPFVSKFHVSCRNEESIHMHDAIASITYDKSSE

SEQ ID NO: 11815 - protein, 311 aa, Oceanobacillus iheyensis
  REGION 1..311: note = tr|A0A2P1WJX2|A0A2P1WJX2_9BACI GTP cyclohydrolase FolE2 OS=Oceanobacillus iheyensis OX=182710 GN=folE2 PE=3; SV = 1
MNTKFFPLKQLPSKAERHKLFGSVLPVPRTKPIEKSQMADLQNTKKDFLFDLDAVGISNVKHPVSVTGDLDPKVQSSIANISFSTSLKSTSKGTNMSRFTEQLSTYYRQGVFQADWQILKTFTKELADRLDQQDATIELQFPWFFERRGPQSDLAGLNHTDITMKVIYDYQTGYTFSASLSALITTLCPCSKEISEYSAHNQRGVVSIEVELNEGAVQAEMDWKTMLLEAAESNASARIHPVLKRPDEKMVTEQAYENPRFVEDMVRLVAADLYEMDMVDKFRVACRNEESIHMHDAIASVTYDKRTENLG

SEQ ID NO: 11816 - protein, 188 aa, unidentified
  source 1..188: note = Oceanobacillus limi
  REGION 1..188: note = tr|A0A1I0AGA7|A0A1I0AGA7_9BACI GTP cyclohydrolase 1; OS = Oceanobacillus limi OX=930131 GN=folE PE=3 SV=1
MKKMNNEKIKNAVQMILEAIGEDTSREGILDTPERVAKMYEELFSGLHTDPKECFSTSFCDDHEELVLVKDIAFHSICEHHLVPFYGKAHFAYIPKDGRVTGIGNFAKALEVVAKRPQIQERMTSTLANTIDETVDPIGIMVVIEAEHMCMTMRGVKKPGSKTVTTAVRGSLKNDSAARSEILSLIHQ

SEQ ID NO: 11817 - protein, 310 aa, Oceanobacillus oncorhynchi
  REGION 1..310: note = tr|A0A0A1MDQ4|A0A0A1MDQ4_9BACI GTP cyclohydrolase FolE2 OS=Oceanobacillus oncorhynchi OX=545501 GN=folE2; PE = 3 SV=1
MHQLNTIPLKKLPSKEERHKLFGSVPPGEKKKPTEKNEMADLQNVKRDFLFDLDVVGVSNVKYPVRVLSGQAPFEQTTVGTFTFSSSIPANSKGTNMSRFMELLEQYHQGGFTVSIDELKQFAKDLAVKLEQTDATVSVSFPWFYERKAPQTYAAGLNHAEASVSVRYSKYEDYQITVSLNVQITTLCPCSKEISEYSAHNQRGNVTVETELEPSFSNTDGDWKGILLEAAESNASARLHPILKRPDEKMVTEAAYENPRFVEDMVRLIAADLYELPAVMKFHVACRNEESIHMHDAIASVTYDKRNRQG

SEQ ID NO: 11818 - protein, 311 aa, Oceanobacillus picturae
  REGION 1..311: note = tr|W9A9H8|W9A9H8_9BACI GTP cyclohydrolase FolE2; OS = Oceanobacillus picturae OX=171693 GN=folE2 PE=3 SV=1
MNTKFFPLKQLPSKAERHKLFGSVLPVPRTKPIEKSQMADLQNTKKDFLFDLDAVGISNVKHPLSVTGDLEPKIQSSIANISFSTSLKSTSKGTNMSRFTEQLSTYYRQGVFQADWQLLKTFTKELADRLDQQDATIELQFPWFFERRGPQSDLAGLNHADITMKVIYDYQTGYTLSASLSALITTLCPCSKEISEYSAHNQRGVVSIDVELNEGAVQAEMDWKTLLLEAAESNASARIHPVLKRPDEKMVTEQAYENPRFVEDMVRLVAADLYEMDMVDKFQVACRNEESIHMHDAIASVTYDKRTENLG

SEQ ID NO: 11819 - protein, 311 aa, Oceanobacillus profundus
  REGION 1..311: note = tr|A0A417YA53|A0A417YA53_9BACI GTP cyclohydrolase FolE2 OS=Oceanobacillus profundus OX=372463 GN=folE2 PE=3; SV = 1
MQHTKIFPLKQLPTKEQRHKLFGSVQPAERTKPVEKSKMADLQNTKKDFLFDLNVVGISNVKYPITIESNMNPGFQTSIGTFKFSSSLANTSKGTNMSRFMEQLNQYHEQGFNITLANLKSFAKELAERLEQKDATIEVDFPWFYERKGPSSNLAGLNHANASIRVTYKQAKGTSVNVALSALITTLCPCSKEISEYSAHNQRGEVAMDITLSDDFDENKTDWKETLLQAAESNASARIHPVLKRPDEKMVTEQAYENPRFVEDIVRLVAADLYELPFVTKFNVSCRNEESIHLHDAIASITFDKQNAEIE

SEQ ID NO: 11820 - protein, 310 aa, Oceanobacillus sojae
  REGION 1..310: note = tr|A0A511ZJ28|A0A511ZJ28_9BACI GTP cyclohydrolase FolE2 OS=Oceanobacillus sojae OX=582851 GN=folE2 PE=3 SV=1
MQQIDTISLKKLPSKEERHRLFGSVPPGEKKKPTEKSKMADLQNVKRDFLFDLDAVGVANVKYPVRVLSGQTPYEQTTIGTFTFSSSIPANSKGTNMSRFMELLEQYYQGGFTISIDELKQFTKDLANKLEQDDASVSVSFPWFYEREAPQTLASGLNHAEASVSVRYSKHEDYQINVSLKVQITTLCPCSKEISEYSAHNQRGNVTIETELESNFSNADDDWKVLLLEAAESNASARLHPILKRPDEKMVTEQAYENPRFVEDMVRLIAADLYELPSVLKFHVSCRNEESIHMHDAIASVTYDKRNGQG

SEQ ID NO: 11821 - protein, 185 aa, Oceanobacillus sp.
  REGION 1..185: note = tr|A0A345PEY6|A0A345PEY6_9BACI GTP cyclohydrolase 1; OS = Oceanobacillus sp. 160 OX=2052660 GN=folE PE=3 SV=1
MDKKKMEEAVRMILEAIGEDPDRQGLLDTPARVAKMYEEVFSGLKKDPAEHCKTVFEEEHDEVVLVKDIQFSSMCEHHLVPFFGVAHIAYIPKNGRVIGLSKLARIVDDFSKRPQLQERITTSVAELLMEELNPIGVMVVLEAEHMCMTIRGVKKQGAKTVTSAVRGEFRTNSKSRNEVLSLIKF

SEQ ID NO: 11822 - protein, 185 aa, Oceanobacillus sp.
  REGION 1..185: note = tr|A0A498DAY1|A0A498DAY1_9BACI GTP cyclohydrolase 1; OS = Oceanobacillus sp. YLB-02 OX=2448030 GN=folE PE=3 SV=1
MDKEKIQSAVRMILEAIGENPDRQGLMDTPRRVADMYEEVFAGIEKDPAIHAQTVFDEPHEEMVLVKDIQFSSMCEHHLVPFIGVAHVAYMPKNGRVIGLSKLARIVDDISKRPQLQERITKSVADLLMEELAPIGVMVVIEAEHMCMSIRGVKKQGSTTVTSAVRGEFKTNSKSRNEVLALINR

SEQ ID NO: 11823 - protein, 183 aa, Oceanobacter sp.
  REGION 1..183: note = tr|A0A2G2JE48|A0A2G2JE48_9GAMM GTP cyclohydrolase 1; OS = Oceanobacter sp. OX=2030817 GN=folE PE=3 SV=1
MSKLETLYHDVLSELGENPEREGLLDTPKRAAKAMQFLTSGYTTELNDVVNGAVFSSDNDEMVVVQGIEFYSMCEHHMLPFIGRAHIGYLPEGKVLGLSKFARIVDMFGRRLQIQENMTKQIAEAVEEVTGCRGVGVIIEAQHMCMMMRGVQKQNSKMRTSVMKGVFRENPATRDEFMRLAGV

SEQ ID NO: 11824 - protein, 189 aa, unidentified
  source 1..189: note = Oceanococcus atlanticus
  REGION 1..189: note = tr|A0A1Y1SAX9|A0A1Y1SAX9_9GAMM GTP cyclohydrolase 1; OS = Oceanococcus atlanticus OX=1317117 GN=folE PE=3 SV=1
MRYNADVEHQYLEILKALGEDPERDGLRDTPKRAAAAMQFLTSGYTQKLEDIVNDAIFESEMDEMVIVRDIEMYSLCEHHLLPFTGRCHVAYLPAGKVIGLSKIPRIVDMFARRLQIQEGLTRDIALAVEQVTGARGVGVVIESRHMCMMMRGVEKQNSSMMTSMMLGAFREDPRTRGEFLNLLNCGQR

SEQ ID NO: 11825 - protein, 198 aa, unidentified
  source 1..198: note = Oceanococcus atlanticus
  REGION 1..198: note = tr|A0A1Y1SDI3|A0A1Y1SDI3_9GAMM GTP cyclohydrolase 1; OS = Oceanococcus atlanticus OX=1317117 GN=folE PE=3 SV=1
MGKYQDNTPASLTRPSREQAEEAVRTLIRWAGDDPLREGLLDTPARVTRAYEEFFAGYAQSPQDLLQATFEEVSGYQDMVLLRDIRLESHCEHHIVPIIGKAHVAYMPSSRVVGISKLVRLVEVFAKRLQTQETLTAQIAQALDAALAPRGVAVLIDAAHQCMTTRGVKQPGVSTVTSQFSGVFAADVALQERIWRLL

SEQ ID NO: 11826 - protein, 237 aa, unidentified
  source 1..237: note = Oceanococcus sp.
  REGION 1..237: note = tr|A0A520SWF1|A0A520SWF1_9GAMM GTP cyclohydrolase 1; OS = Oceanococcus sp. OX=1958892 GN=folE PE=3 SV=1
MATARKPASRLVTSGCVFALWPPCVSPPRKRTKSVSAITVGKCQDNTPASLIRPSREQAEEAVRTLIRWAGDDPLREGLLDTPARVTRAYEEFFAGYAQSPQDLLQATFEEVSGYQDMVLLRDIRLESHCEHHIVPIIGKAHVAYMPSSRVVGISKLVRLVEVFAKRLQTQETLTAQIAQALDAALAPRGVAVLIDAAHQCMTTRGVKQPGVSTVTSQFSGVFATDVALQERIWRLL

SEQ ID NO: 11827 - protein, 189 aa, unidentified; identical to SEQ ID NO: 11824
  source 1..189: note = Oceanococcus sp.
  REGION 1..189: note = tr|A0A520SQ87|A0A520SQ87_9GAMM GTP cyclohydrolase 1; OS = Oceanococcus sp. OX=1958892 GN=folE PE=3 SV=1

SEQ ID NO: 11828 - protein, 185 aa, unidentified
  source 1..185: note = Oceanospirillaceae bacterium
  REGION 1..185: note = tr|A0A2E9DLU7|A0A2E9DLU7_9GAMM GTP cyclohydrolase 1; OS = Oceanospirillaceae bacterium OX=1899355 GN=folE PE=3; SV = 1
MSEALQGCYAQIIEGLGEDLNRDGLRDTPKRAAKAMAYLCNGYDKSLEEVVNGALFPTNNDEMVIVKDVELYSLCEHHLLPFVGKAHVAYIPTGRVLGLSKIARIVDMFARRLQIQENLTLEIAEAIQGVTGAAGVGVVIEAQHMCMMMRGVEKQNSVMSSSVMLGAFRESNTTRQEFLQLIGRG

SEQ ID NO: 11829 - protein, 301 aa, unidentified
  source 1..301: note = Oceanospirillaceae bacterium
  REGION 1..301: note = tr|A0A2D6DL30|A0A2D6DL30_9GAMM GTP cyclohydrolase FolE2 OS=Oceanospirillaceae bacterium OX=1899355 GN=folE2; PE = 3 SV=1
MFIKSLPDVTSDKHAETAGTLQWVGMEDIAVPVAIPSKGNKPYSTSAKAGVYVNLADPKAKGIHMSRLHLMLNNLAELECNKANIDQLLDNMVASQGAISQQAKIKLAFDLMLNKPALLSDESGFQSYPIIIHAEKNNQGYSYELEVTVAYSSTCPCSASLAQQLYAKAVHKSFPGDTIDKAELMDWIQSQAGAVATPHSQRSYAYIRLAIGANNWPDLGALIVQLEAMIGTPVQTAVKRIDEQAFAKLNAENLMFCEDAARRIKFGLEALDYVQDYWFKVEHQESLHAHNAVVIDQKFTA

SEQ ID NO: 11830 - protein, 183 aa, unidentified
  source 1..183: note = Oceanospirillales bacterium
  REGION 1..183: note = tr|A0A3D3E433|A0A3D3E433_9GAMM GTP cyclohydrolase 1; OS = Oceanospirillales bacterium OX=1914300 GN=folE PE=3 SV=1
MKALSDLYSQVITELGEDVNREGLLDTPQRAAKAMQFLTSGYEQSLEDIVNNAVFASDNDEMVVISDIEMYSMCEHHMLPFIGKVHIGYLPNGNVLGLSKFARITDMFARRLQIQENLTKQIAEAVQQVTGARGVAVVVEARHMCMMMRGVQKQNSSMSSSVMMGSFRESQATRSEFLRLIGK

SEQ ID NO: 11831 - protein, 189 aa, unidentified
  source 1..189: note = Oceanospirillales bacterium
  REGION 1..189: note = tr|A0A2A4YLY7|A0A2A4YLY7_9GAMM GTP cyclohydrolase 1; OS = Oceanospirillales bacterium OX=1914300 GN=folE PE=3 SV=1
MTKLLDDLAGNYRAIINGLGEDTNREGLQDTPMRAAKAMQFLTRGYQQDLGDLVNNAVFESAMDEMVVVQDIELYSMCEHHMLPFIGKCHIAYLPQGRVLGLSKFARIVDMYARRLQIQENLTRQIAEAVESVTDAKGVAVVIEAQHMCMMMRGVEKQNSKMKTSMMLGQFRKSQATRSEFLNLISNHR

SEQ ID NO: 11832 - protein, 298 aa, Oceanospirillum linum
  REGION 1..298: note = tr|A0A1T1HFA0|A0A1T1HFA0_OCELI GTP cyclohydrolase FolE2 OS=Oceanospirillum linum OX=966 GN=folE2 PE=3 SV=1
MNQELPDVARHQVSNIRTPLEWVGMSGIDIPLSLSEPEGSAPLHASVEAQVNLPDVTVKGIHMSRIYRMLDGLSQQDSVTPVDLKAVLEQMVISHSDCGTDSARLVIEFKMLARRSALSTPGLAGWKAYPVKIEAVLQQGVLQLSAAVQVEYSSTCPCSAALARQLIASHFREHFSGEQLTTEVVSDWLETHATYATPHSQRSVASVQVSLGANEGGFGLMPLIDRTEQALATAVQTAVKRADEQAFALLNGQNLMYVEDAARRIQEALSEGYQGVEVSVRHLESLHPHDAVAYTKGF

SEQ ID NO: 11833 - protein, 184 aa, Oceanospirillum linum
  REGION 1..184: note = tr|A0A1T1HF68|A0A1T1HF68_OCELI GTP cyclohydrolase 1; OS = Oceanospirillum linum OX=966 GN=folE PE=3 SV=1
MTEKLTGLYETILAELGENPEREGLTDTPKRAAKAMQYLTKGYNETLESVTNGAVFESETDEMVIVKDIELYSMCEHHILPFIGKCHIAYLPTGKVLGLSKFARIVDMYARRLQIQENLTKQIADAVMQVTGARGVAVTIEAKHMCMMMRGVEKQNSVMKSSVMLGAFRESQSTRMEYLQLISN

SEQ ID NO: 11834 - protein, 184 aa, Oceanospirillum multiglobuliferum
  REGION 1..184: note = tr|A0A1T4KWL8|A0A1T4KWL8_9GAMM GTP cyclohydrolase 1; OS = Oceanospirillum multiglobuliferum OX=64969 GN=folE PE=3; SV = 1
MTEKLASLYETLLTEVGENPKREGLLDTPVRAAKAIKYLTKGYQQTLEEVTNNAIFESEADEMVVVKDIELYSMCEHHLLPFIGKCHIAYLPNGKVLGLSKFARIVDMYARRFQIQENLTKQIADAVMQVTGARGVAVTIEAKHMCMMMRGVEKQNSSMKSSVMLGAFRNSAATRQEYLTLISN

SEQ ID NO: 11835 - protein, 314 aa, Oceanospirillum sp.
  REGION 1..314: note = tr|A0A2D5GIV3|A0A2D5GIV3_9GAMM GTP cyclohydrolase FolE2 OS=Oceanospirillum sp. OX=2021254 GN=folE2 PE=3 SV=1
MPDVAATERPQVTGALDWVGMAGIALPLRIQDSLQGEKLCQGQAQTYVSLDQPETKGIHMSRLYLLLEEFCQQQALQPQALQTLLQQQLISHEGLSEQSGIRFNFDLYLQRSALKSDSSGWKAYPITLKVKQKTAQPETSQSAATEIELTVTVAYSSTCPCSASLSRQLLEQAMQDAFAGQEQVSKSELSEWLLSKQGSIATPHSQRSLATVTVRLDAQLQTLPVTELIDQIEGALQTPVQTAVKRQDEQEFARLNGQNLMFCEDAARRIRQGLLNQEIYQDFCLKVEHLESLHAHDAVAFASKGVKGGLRADF

SEQ ID NO: 11836 - protein, 184 aa, Oceanospirillum sp.
  REGION 1..184: note = tr|A0A2D5GA19|A0A2D5GA19_9GAMM GTP cyclohydrolase 1; OS = Oceanospirillum sp. OX=2021254 GN=folE PE=3 SV=1
MSEKLADLYETILTELGEDPKREGLLDTPTRAAKAMQYLTRGYHQTLTEVTNGAVFESETDEMVIVKDIELYSMCEHHLLPFIGKCHIAYLPAGKVLGLSKFARIVDMYARRFQIQENLTKQIADAVLEVTGARGVAVTIEAKHMCMMMRGVEKQNSVMKSSVMLGSFRESQATRQEYLQLITS

SEQ ID NO: 11837 - protein, 213 aa, Ochrobactrum anthropi
  REGION 1..213: note = sp|A6X0X0|GCH1_OCHA4 GTP cyclohydrolase 1; OS = Ochrobactrum anthropi (strain ATCC 49188 / DSM 6882 / JCM 21032 / NBRC 15819 / NCTC 12168) OX=439375 GN=folE; PE = 3 SV=1
MDARILKEDDESGLPNKQADVTLLHGKPTQADAEAAVRTLLLWAGDDPEREGLLETPKRVAKAYKELFAGYTESPEEVLGTVFEEVGGYNDLVLVKDISFHSHCEHHMVPIIGKAHVAYLPDHKVVGLSKIARVVDIFARRLQTQESITAQIADSIQRILKPRGVAVMIEAEHMCMAMRGIRKQGSTTITTTFTGEMQVNAEEQVRFMTLTRR

SEQ ID NO: 11838 - protein, 213 aa, Ochrobactrum anthropi; identical to SEQ ID NO: 11837
  REGION 1..213: note = tr|A0A137XS66|A0A137XS66_OCHAN GTP cyclohydrolase 1; OS = Ochrobactrum anthropi OX=529 GN=folE PE=3 SV=1

SEQ ID NO: 11839 - protein, 213 aa, Ochrobactrum cytisi; identical to SEQ ID NO: 11837
  REGION 1..213: note = tr|A0A1J6I3B7|A0A1J6I3B7_9RHIZ GTP cyclohydrolase 1; OS = Ochrobactrum cytisi OX=407152 GN=folE PE=3 SV=1

SEQ ID NO: 11840 - protein, 206 aa, Ochrobactrum gallinifaecis
  REGION 1..206: note = tr|A0A502BMW5|A0A502BMW5_9RHIZ GTP cyclohydrolase 1; OS = Ochrobactrum gallinifaecis OX=215590 GN=folE PE=3 SV=1
MDARILKVDDEINATANLKKPTQAEAEAAVRTLLLWAGENPEREGLLDTPTRVAKSYGELFGGYAESPEDVLGTTFEDVSGYDDMVLVKDISFFSHCEHHMVPIIGKTHVAYLPDGKVLGLSKIARVVDIFARRLQTQESITAQIADSIQRILKPRGVAVMIDAEHMCMAMRGIRKQGSSTITTTFTGEFKSEVNEQVRFMNLIRK

SEQ ID NO: 11841 - protein, 206 aa, Ochrobactrum grignonense
  REGION 1..206: note = tr|A0A256FMG2|A0A256FMG2_9RHIZ GTP cyclohydrolase 1; OS = Ochrobactrum grignonense OX=94627 GN=folE PE=3 SV=1
MDARILKIDDESNLPVDLPKPTQAEAEAAVRTLLRWAGDNPDREGLLDTPQRVAKSYSELFGGYAESPEDVLGTTFEEVSGYDDMVLVKDISFFSHCEHHMVPIIGKAHVAYLPDGKVLGLSKIARVVDIFARRLQTQESITAQIAESIQRILKPRGVAVMIDAEHMCMAMRGIRKQGSSTITTTFTGTFKEDVNEQVRFMSLIRK

SEQ ID NO: 11842 - protein, 214 aa, Ochrobactrum haematophilum
  REGION 1..214: note = tr|A0A397L136|A0A397L136_9RHIZ GTP cyclohydrolase 1; OS = Ochrobactrum haematophilum OX=419474 GN=folE PE=3 SV=1
MDARILKEENETGLPSKQTNVTPLHGTPTQADAEAAVRTLLLWAGDDPDREGLLETPKRVAKAYKELFAGYTESPEEVLGTVFEEVAGYNDLVLVKDISFFSHCEHHMVPIIGKAHVAYLPDGKVVGLSKVARVVDIFARRLQTQESITAQIADSIQSILKPRGVAVMIEAEHMCMAMRGIRKQGSTTITTTFTGEMKDKVDEQVRFMTLSRSK

SEQ ID NO: 11843 - protein, 215 aa, Ochrobactrum haematophilum; identical to SEQ ID NO: 5824
  REGION 1..215: note = tr|A0A2P9HN00|A0A2P9HN00_9RHIZ GTP cyclohydrolase 1; OS = Ochrobactrum haematophilum OX=419474 GN=folE PE=3 SV=1

SEQ ID NO: 11844 - protein, 213 aa, Ochrobactrum intermedium; identical to SEQ ID NO: 11837
  REGION 1..213: note = tr|U4VHK0|U4VHK0_9RHIZ GTP cyclohydrolase 1; OS = Ochrobactrum intermedium 229E OX=1337887 GN=folE PE=3; SV = 1

SEQ ID NO: 11845 - protein, 213 aa, Ochrobactrum intermedium; identical to SEQ ID NO: 11837
  REGION 1..213: note = tr|C4WI97|C4WI97_9RHIZ GTP cyclohydrolase 1; OS = Ochrobactrum intermedium LMG 3301 OX=641118 GN=folE; PE = 3 SV=1

SEQ ID NO: 11846 - protein, 213 aa, Ochrobactrum lupini; identical to SEQ ID NO: 11837
  REGION 1..213: note = tr|A0A256GZ22|A0A256GZ22_9RHIZ GTP cyclohydrolase 1; OS = Ochrobactrum lupini OX=255457 GN=folE PE=3 SV=1

SEQ ID NO: 11847 - protein, 213 aa, Ochrobactrum oryzae
  REGION 1..213: note = tr|A0A2S7IXT4|A0A2S7IXT4_9RHIZ GTP cyclohydrolase 1; OS = Ochrobactrum oryzae OX=335286 GN=folE PE=3 SV=1
MDARILKEDDESGLPNKQADVTLLHGKPTQADAEAAVRTLLLWAGDDPEREGLLETPKRVAKAYKELFAGYTESPEEVLGTVFEEVGGYNDLVLVKDISFHSHCEHHMVPIIGKAHVAYLPDHKVVGLSKIARVVDIFARRLQTQESITAQIADSIQRILNPRGVAVMIEAEHMCMAMRGIRKQGSTTITTTFTGEMQVNAEEQVRFMTLTRR

SEQ ID NO: 11848 - protein, 214 aa, Ochrobactrum pecoris
  REGION 1..214: note = tr|A0A5C5CJA0|A0A5C5CJA0_9RHIZ GTP cyclohydrolase 1; OS = Ochrobactrum pecoris OX=867683 GN=folE PE=3 SV=1
MDARILKEDDESGLPTNKQANVALLHGKPTQADAEAAVRTLLLWAGDDPEREGLLETPKRVAKAYKELFAGYTESPEEVLGTVFEEVGGYNDLVLVKDISFHSHCEHHMVPIIGKAHVAYLPDHKVVGLSKIARVVDIFARRLQTQESITAQIADSIQRILKPRGVAVMIEAEHMCMAMRGIRKQGSTTITTTFTGEMQVNAEEQVRFMTLTRR

SEQ ID NO: 11849 - protein, 206 aa, Ochrobactrum pseudogrignonense
  REGION 1..206: note = tr|A0A256GUQ8|A0A256GUQ8_9RHIZ GTP cyclohydrolase 1; OS = Ochrobactrum pseudogrignonense OX=419475 GN=folE PE=3; SV = 1
MDARILKIDDESNPSADLPRPTQADAEAAVRTLLLWAGDNPDREGLLDTPKRVAKSYSELFGGYAESPEDVLGTTFEEVSGYNDMVLVKDISFFSHCEHHMVPIIGKAHVAYLPDGKVLGLSKIARVVDIFARRLQTQESITAQIAESIQRILKPRGVAVMIDAEHMCMAMRGIRKQGSSTITTTFTGTFQEEVNEQVRFMSLIRQ

SEQ ID NO: 11850 - protein, 206 aa, Ochrobactrum pseudogrignonense
  REGION 1..206: note = tr|A0A1A9FLF0|A0A1A9FLF0_9RHIZ GTP cyclohydrolase 1; OS = Ochrobactrum pseudogrignonense OX=419475 GN=folE PE=3; SV = 1
MDARILKIDDESNPSADLPRPTQAEAEAAVRTLLLWAGDNPDREGLLDTPKRVAKSYSELFGGYDESPEDVLGTTFEEVSGYNDMVLVKDISFFSHCEHHMVPIIGKAHVAYLPDGKVLGLSKIARVVDIFARRLQTQESITAQIAESIQRILKPRGVAVMIDAEHMCMAMRGIRKQGSSTITTTFTGTFQEEVNEQVRFMSLIRQ

SEQ ID NO: 11851 - protein, 206 aa, unidentified
  source 1..206: note = Ochrobactrum quorumnocens
  REGION 1..206: note = tr|A0A248UKG4|A0A248UKG4_9RHIZ GTP cyclohydrolase 1; OS = Ochrobactrum quorumnocens OX=271865 GN=folE PE=3 SV=1
MDARILKIDDESNLPADLPKPTQAEAEAAVRTLLRWAGDNPDREGLLDTPKRVAKSYSELFGGYAESPEDVLGTTFEEVSGYNDMVLVKDISFFSHCEHHMVPIIGKAHVAYLPDGKVLGLSKIARVVDIFARRLQTQESITAQIADSIQRILKPRGVAVMIDAEHMCMAMRGIRKQGSSTITTTFTGTFKEEVNEQVRFMSLIRK

SEQ ID NO: 11852 - protein, 206 aa, Ochrobactrum rhizosphaerae
  REGION 1..206: note = tr|A0A256FJC1|A0A256FJC1_9RHIZ GTP cyclohydrolase 1; OS = Ochrobactrum rhizosphaerae OX=571254 GN=folE PE=3 SV=1
MDARILKIDDESNLPADLPKPTQAEAEAAVRTLLRWAGDNPDREGLLDTPKRVAKSYSELFGGYAENPEDVLGTTFEEVSGYDDMVLVKDISFFSHCEHHMVPIIGKAHVAYLPDGKVLGLSKIARVVDIFARRLQTQESITAQIANSIQRILKPRGVAVMIDAEHMCMAMRGIRKQGSSTITTTFTGTFKEEVNEQVRFMSLIRK

SEQ ID NO: 11853 - protein, 206 aa, Ochrobactrum sp.
  REGION 1..206: note = tr|A0A4R7WT55|A0A4R7WT55_9RHIZ GTP cyclohydrolase 1; OS = Ochrobactrum sp. LP_5_YM OX=2485134 GN=folE PE=3 SV=1
MDARILKIDDESNLPADLPKPTQAEAEAAVRTLLRWAGDNPDREGLLDTPKRVAKSYSELFGGYTESPEDVLGTTFEEVSGYNDMVLVKDISFFSHCEHHMVPIIGKAHVAYLPDGKVLGLSKIARVVDIFARRLQTQESITAQIADSIQRILKPRGVAVMIEAEHMCMAMRGIRKQGSSTITTTFTGTFKEEVNEQVRFMSLIRK

SEQ ID NO: 11854 - protein, 215 aa, Ochrobactrum sp.; identical to SEQ ID NO: 5824
  REGION 1..215: note = tr|A0A5C5CY80|A0A5C5CY80_9RHIZ GTP cyclohydrolase 1; OS = Ochrobactrum sp. LCB8 OX=2479765 GN=folE PE=3 SV=1

SEQ ID NO: 11855 - protein, 206 aa, Ochrobactrum thiophenivorans
  REGION 1..206: note = tr|A0A256FWB7|A0A256FWB7_9RHIZ GTP cyclohydrolase 1; OS = Ochrobactrum thiophenivorans OX=571255 GN=folE PE=3 SV=1
MDARILKIDDESTSSAYLPKPTQAEAEAAVRTLLRWAGDNPDREGLLDTPMRVTKSYSELFGGYAESPEDVLGTTFEEVSGYDDMVLVKDISFFSHCEHHMVPIIGKAHVAYLPDGKVLGLSKIARVVDIFARRLQTQESITAQIAGSIQRILKPRGVAVMIDAEHMCMAMRGIRKQGASTITTTFTGEYKSEVHEQVRFMSLIRQ

SEQ ID NO: 11856 - protein, 191 aa, unidentified
  source 1..191: note = Unknown
  REGION 1..191: note = tr|A0A2A4Z8V5|A0A2A4Z8V5_9PROT GTP cyclohydrolase 1; OS = OCS116 cluster bacterium OX=2030921 GN=folE PE=3 SV=1
MSELVKPSREEAEAAVKTLLAWAGDNTEREGLLDTPRRVVKAYEQYFKGYDEDPIEILGRRFDEVGGYDDIVLLRDINFHSHCEHHMAPFIGKAHVAYIPNKAVVGISKIARVVDIYARRLQIQEKMTMQIADAIEEALQPRGVAVFVQAEHQCMSMRGVMKPNVDTITTQFRGEYSTPEMKAAFMSMIRS

SEQ ID NO: 11857 - protein, 392 aa, Octadecabacter antarcticus
  REGION 1..392: note = tr|M9RBK0|M9RBK0_9RHOB GTP cyclohydrolase FolE2; OS = Octadecabacter antarcticus 307 OX=391626 GN=folE2 PE=3; SV = 1
MEKDRTHPHLDVLRAVPKGNAMNIQSKDLNRDLTHEDAAEALALLRNWAGQVTDEEVAALDPLVSRLVPGREVSNYPALARAYPEEFEVDDVYKASMPDLQNGPSSLIKGAKRAIQHVGISNFRLPIRFHTRVGKSVGDDLTLETSVTGTVSLEAEKKGINMSRIMRTFYKHAEETFSFEVIDAALDAYKTDLDSFDARIMMRMSFPMKVDSLRSGLAGYQYYDIALELIETGGQRKKIVHLDYVYSSTCPCSLELSEHARQFRGQLATPHSQRSVARVSVELAPEGDVLWFEDLIDICRAAVPTETQVMVKREDEQAFAELNAANPIFVEDAARLFAQKLQSDARVADYRVIASHQESLHSHDAVSVLTEGTTFDAESLDPRLFASLFHVG

SEQ ID NO: 11858 - protein, 392 aa, Octadecabacter arcticus
  REGION 1..392: note = tr|M9RLW0|M9RLW0_9RHOB GTP cyclohydrolase FolE2; OS = Octadecabacter arcticus 238 OX=391616 GN=folE2 PE=3 SV=1
MEKDRIHPHLDVLRGVPKGDSMNIRPKDLNRDLTHEDAAEALALLRNWAGQVTDEEVAALDPLVSRLVPGREVSNYPALARAYPEEFEVDDVYKASMPDLQNGPSSLIKGAKRAIQHVGISNFRLPIRFHTRSGKAVGDDLTLETSVTGTVSLEAEKKGINMSRIMRTFYKHAEETFSFEVIDAALDAYKTDLDSFDARIMMRMSFPMKVNSLRSGLVGYQYYDIALELIEAGGQRKKIVHLDYVYSSTCPCSLELSEHARQFRGQLATPHSQRSVARVSVELAPEADVLWFEDLIDMCRAAVPTETQVMVKREDEQAFAELNAANPIFVEDAARLFAQQMQADPRIADYRVIASHQESLHSHDAVSVLTEGTTFDAESLDPRLFQSLFHVG

SEQ ID NO: 11859 - protein, 388 aa, unidentified
  source 1..388: note = Octadecabacter ascidiaceicola
  REGION 1..388: note = tr|A0A238K4V4|A0A238K4V4_9RHOB GTP cyclohydrolase FolE2 OS=Octadecabacter ascidiaceicola OX=1655543 GN=folE2; PE = 3 SV=1
MENDHDHPHVEVLRALSEGDDMNIHTSEPERTLTHEEAAEALALLRHWAGQVSEEEVVALDPLVSRLVPGRELSNYPALARAYPEEFEVDETYKASMPDLQNGPSSLIKGAKRAIQHVGISNFRLPIRFHRRDGADLTLETSVTGTVSLEAEKKGINMSRIMRTFYKHAEKTFSFEVIDAALDAYKTDLESFDARIMMRTSFPMKVNSLRSGLSGYQYYDIALELIEADNVRKKIVHLDYVYSSTCPCSLELSEHARQFRGQLATPHSQRSVARVSVEMAQDADILWFEDLIDMCRAAVPTETQVMVKREDEQAFAELNAANPIFVEDAARLFAETFQADVRIADYRVIASHQESLHSHDAVSVLTEGSTFDAESLDPRLFATLFHVG

SEQ ID NO: 11860 - protein, 367 aa, Octadecabacter sp.
  REGION 1..367: note = tr|A0A5B9ETF2|A0A5B9ETF2_9RHOB GTP cyclohydrolase FolE2 OS=Octadecabacter sp. SW4 OX=2602067 GN=folE2 PE=3; SV = 1
MNIHQPDAARAPSRAEAEDALALLRRWAVDATAEEVATLDPLVSRLIPGSELPNYPALARAYPEDFAVDEAYRAMLPDLQNGPASLIRGAKQQIQHVGISNFRLPIRFHTRDGDDLTLETSVTGTVSLEAEKKGINMSRIMRTFYKHAGETFSFDVIERALEAYKADLDSFDARIQMRFSFPMKVQSLRSGLEGFQYYDIALVLIEQKGVAKKIVHLDYVYSSTCPCSLELSEHARQYRGQLATPHSQRSVARISVELEQDAPCLWFEDLIDICRAAVPTETQVMVKREDEQAFAELNAANPIFVEDAARSFCEKLQQDQRIRDFRVVASHQESLHSHDAVSVLTEGQTFAADSLDPKLFATLFHIG

SEQ ID NO: 11861 - protein, 388 aa, unidentified
  source 1..388: note = Octadecabacter temperatus
  REGION 1..388: note = tr|A0A0K0Y3H3|A0A0K0Y3H3_9RHOB GTP cyclohydrolase FolE2 OS=Octadecabacter temperatus OX=1458307 GN=folE2; PE = 3 SV=1
MENDHDHPHVEVLRAASKGDDMNIQTGEPERTLTHAEAAEALALLRHWAGQVSEEEVAALDPLVSRLVPGRELSNYPALARAYPEEFEVDETYKASMPDLQNGPSSLIKGAKRAIQHVGISNFRLPIRFHRRDGDDLTLETSVTGTVSLEAEKKGINMSRIMRTFYKHAEKTFSFEVIDAALDAYKTDLESFDARIMMRTSFPMKVDSLRSGLSGYQYYDIALELIEADGVRKKIVHLDYVYSSTCPCSLELSEHARQFRGQLATPHSQRSVARVSVEMAQDADILWFEDLIDMCRAAVPTETQVMVKREDEQAFAELNAANPIFVEDAARLFAETFQADKRITDYRVIASHQESLHSHDAVSVLTEGSTFDAESLDPRLFATLFHVG

SEQ ID NO: 11862 - protein, 207 aa, Odoribacter laneus
  REGION 1..207: note = tr|R5US47|R5US47_9BACT GTP cyclohydrolase 1; OS = Odoribacter laneus CAG:561 OX=1263089 GN=folE PE=3 SV=1
MEQEITNEEEFYKKVEYFNAERTKQLSYHYQEILKLLGEDPEREGLLKTPLRVAKAMQFMTQGYSQNPEEILSSALFKEDYRQMVIVKDIEIYSLCEHHMLPFYGRAHVAYIPNGYVTGLSKIARVVETYARRLQVQERLTYEIKNCIQNTLHPLGVAVVIEAKHMCMAIRGVEKQNSVTTTSDFSGAFEKLATREEFIRLISSKLH

SEQ ID NO: 11863 - protein, 207 aa, Odoribacter laneus; identical to SEQ ID NO: 11862
  REGION 1..207: note = tr|H1DJ90|H1DJ90_9BACT GTP cyclohydrolase 1; OS = Odoribacter laneus YIT 12061 OX=742817 GN=folE PE=3 SV=1

SEQ ID NO: 11864 - protein, 208 aa, Odoribacter sp.; identical to SEQ ID NO: 5920
  REGION 1..208: note = tr|A0A373U9L6|A0A373U9L6_9BACT GTP cyclohydrolase 1; OS = Odoribacter sp. AF21-41 OX=2293111 GN=folE PE=3 SV=1

SEQ ID NO: 11865 - protein, 208 aa, Odoribacter sp.
  REGION 1..208: note = tr|A0A1Q6II96|A0A1Q6II96_9BACT GTP cyclohydrolase 1; OS = Odoribacter sp. 43_10 OX=1897010 GN=folE PE=3 SV=1
MKYTELNDCEEFYHKVEYYNKTKTEQLSYHYKEILKLLGEDPDREGLVKTPYRVAKAMQFMTRGYHENPEEILRSALFKEDYRQMVIVKNIEIYSMCEHHMLPFIGQAHVAYIPNGYITGLSKIARVVEAFSRRLQVQERLTNDIKNCIQNTLNPLGVAVVIEAQHMCMMMRGVQKQNSVTTTSDFSGAFEKLATREEFIRLISNKFH

SEQ ID NO: 11866 - protein, 208 aa, Odoribacter splanchnicus
  REGION 1..208: note = tr|F9ZBT1|F9ZBT1_ODOSD GTP cyclohydrolase 1; OS = Odoribacter splanchnicus (strain ATCC 29572 / DSM 20712 / CIP 104287 / JCM 15291 / NCTC 10825 / 1651/6) OX=709991; GN = f olE PE=3 SV=1
MKYTELDDCEEFYHKVEYYNKTKTEQLSYHYKEILKLLGEDPDREGLVKTPYRVAKAMQFMTRGYHENPEEILRSALFKEDYRQMVIVKNIEIYSMCEHHMLPFIGQAHVAYIPNGYITGLSKIARVVEAFSRRLQVQERLTNDIKNCIQNTLNPLGVAVVIEAQHMCMMMRGVQKQNSVTTTSDFSGAFEKLATREEFIRLISNKFH

SEQ ID NO: 11867 - protein, 208 aa, Odoribacter splanchnicus; identical to SEQ ID NO: 11866
  REGION 1..208: note = tr|R6G2P2|R6G2P2_9BACT GTP cyclohydrolase 1; OS = Odoribacter splanchnicus CAG:14 OX=1263090 GN=folE PE=3; SV = 1

SEQ ID NO: 11868 - protein, 351 aa, Oenococcus sp.
  REGION 1..351: note = tr|A0A3T0TMZ4|A0A3T0TMZ4_9LACT GTP cyclohydrolase 1; OS = Oenococcus sp. UCMA 16435 OX=2259623 GN=folE PE=3 SV=1
MENVFLSLGSNLGNRQLNLQRAIKYLGQNENILIETASSYYETSPVGNLDQANFLNMAVKICTKLSPRELLLYIHQIETKLKRTREIHWGPRTLDIDIIFFGKQTISDSKLIIPHPETFKRLFVLEPILEICDTNLIYYQEIKESIKELKNGQQKIRIVRKEEFGQQKIEQAVKQLLEAIGEDPKRPGLTETPTRVARMYQEIFSAQGIDEFTDYKIFQIPETDNPQMILIKDIRFNSVCEHHLLPFFGKVSLAYIPKDGKIIGLSKIPRLIDFVSHRLNIQEKMTANIAEIFNEILQPKGVAVLTNARHMCMEMRGIKKIGETTQMTYFSGLFDSQSQLQTQFLKMLEQK

SEQ ID NO: 11869 - protein, 203 aa, Oerskovia enterophila
  REGION 1..203: note = tr|A0A163RG82|A0A163RG82_9CELL GTP cyclohydrolase 1; OS = Oerskovia enterophila OX=43678 GN=folE PE=3 SV=1
MAQVPDQGLRAPADVPEYDEERARAAVRELLLAVGEDPDREGLQETPSRVARAYREIFAGLRQEPSDVLTTMFDLGHEEMVLVKDIEVYSTCEHHLVPFHGVAHVGYIPNVDGRITGLSKLARLVDVFARRPQVQERLTSQIADALVENLAPRGVIVVVECEHLCMSMRGVRKPGSRTVTSAVRGQMRDGATRAEAMSLILGR

SEQ ID NO: 11870 - protein, 307 aa, Oerskovia enterophila
  REGION 1..307: note = tr|A0A163R9H5|A0A163R9H5_9CELL Putative GTP cyclohydrolase 1 type 2 OS=Oerskovia enterophila OX=43678; GN = OJAG_23530 PE=4 SV=1
MTAVRRRAADSLVPVTAHPTLAHVVRTLEALYPPSTAEGWDAVGLVTGDPAQPVRKILFAVDPVATVADEAIEWGADLIVTHHPLFLRPVHSIAATTFKGSLVHRLVRAGVGLYVAHTNADAAPRGVADALADAIGLVDRSPLVPAPSAPDGGAYPVETGIGRVGRLEEPTTLRAFAQRVATALPATEQGVRVAGDLDAAVSTVAVVGGSGDSLFDAVRSAGADVYVTADLRHHPASELRERAEYEGGAAGGPFLVDVAHFASEWPWLRYAAADLTERLADAGTVETRVSVRRTDPWTARIGSAPRA

SEQ ID NO: 11871 - protein, 200 aa, Oerskovia sp.
  REGION 1..200: note = tr|A0A0Q9CWP1|A0A0Q9CWP1_9CELL GTP cyclohydrolase 1; OS = Oerskovia sp. Root918 OX=1736607 GN=folE PE=3 SV=1
MPDQGLRAPADVPEYDEERARAAVRELLLAVGEDPDREGLQETPSRVARAYREIFAGLRQEPSDVLTTMFDLGHEEMVLVKDIEVYSTCEHHLVPFHGVAHVGYIPNVDGRITGLSKLARLVDVFARRPQVQERLTSQIADALVENLAPRGVIVVVECEHLCMSMRGVRKPGSRTVTSAVRGQMRDGATRAEAMSLILGR

SEQ ID NO: 11872 - protein, 195 aa, Oerskovia turbata
  REGION 1..195: note = tr|A0A4Q1L3A1|A0A4Q1L3A1_9CELL GTP cyclohydrolase 1; OS = Oerskovia turbata OX=1713 GN=folE PE=3 SV=1
MRAAADVPEYDEERARAAVRELLLAVGEDPDREGLQETPARVARAYREIFGGLRQEPADVLTTMFDLGHEEMVLVKDIEVYSTCEHHLVPFHGVAHVGYIPNADGRITGLSKLARLVDVYARRPQVQERLTTQIADALVEHLEPRGVIVVVECEHLCMSMRGVRKPGSRTVTSAVRGQMRDGATRAEAMSLILGR

SEQ ID NO: 11873 - protein, 211 aa, unidentified
  source 1..211: note = Oharaeibacter diazotrophicus
  REGION 1..211: note = tr|A0A4R6RK03|A0A4R6RK03_9RHIZ GTP cyclohydrolase 1; OS = Oharaeibacter diazotrophicus OX=1920512 GN=folE PE=3; SV = 1
MDAILTPAGLLQRSAPATDAPRRRPTREEAEAAVRTLIAWAGDDPTREGLLDTPKRVVKAYGELFRGYDEDPHAVLDRVFEEVSGYDDLVLVRDIPFQSHCEHHMVPFVGKAHVAYYPAEGVVGLSKLARVVDIYARRLQTQETMTAQIVAAIDEALKPRGIAVMIEAEHMCMSMRGVQKAGVSTLTTQFTGVFRDDPTEQVRFMTLVRSK

SEQ ID NO: 11874 - protein, 229 aa, Ohtaekwangia koreensis
  REGION 1..229: note = tr|A0A1T5M3P1|A0A1T5M3P1_9BACT GTP cyclohydrolase 1; OS = Ohtaekwangia koreensis OX=688867 GN=folE PE=3 SV=1
MRQKGISLNIRPVNPEEEDIADDHVATSADTPMREDAFNMDDEEKIDLIEKHFREIMNILGLDLTDDSLNGTPRRVAKMYVKEVFSGLNPKNRPHARLFENKYNYDQMLVEKDITFYSHCEHHFVPIYGKVHVAYFSSGKVIGLSKINRIVQYFSKRPQVQERLTVQIGKEMQRVLQTEDVGVVIDANHMCVASRGVGDTNSKTGTAYFSGKFKDENIKREFLNYINSK

SEQ ID NO: 11875 - protein, 212 aa, unidentified
  source 1..212: note = Okeania hirsuta
  REGION 1..212: note = tr|A0A3N6PEB0|A0A3N6PEB0_9CYAN GTP cyclohydrolase 1; OS = Okeania hirsuta OX=1458930 GN=folE PE=3 SV=1
MTLPTVPDFVSTNDLKTKSQPPVTEAEMIQAVRTLLIGLGENPDREGLLDTPKRVVKALKFLTSGYHQSLDELLNGAVFNEDISEMVLVRDIDLFSSCEHHILPILGRAHVAYIPNGKVIGLSKIARICEMYARRLQVQERLTAQIADALQGLLQPLGVAVVVEATHMCMVMRGVQKPGSWTTTSAMRGVFADDVKTRQEFMSLIKHSNSFH

SEQ ID NO: 11876 - protein, 237 aa, unidentified
  source 1..237: note = Okeania hirsuta
  REGION 1..237: note = tr|A0A3N6R778|A0A3N6R778_9CYAN GTP cyclohydrolase 1; OS = Okeania hirsuta OX=1458930 GN=folE PE=3 SV=1
MTQTFSNASNNTISTNGVKTSTNGISHRPDRSSSSNGQPIKQQPPATETNEAMMEAVRTMLLSVGENPEREGLLKTPKRVAEAMRFLTQGYNQSLEEIVNNAIFDEGHNEMVLVRDINLFSLCEHHMLPFMGKAHVAYIPNQKVVGLSKLARIVEMYSRRLQVQERLNRQIAEAIQQVLEPKGVAVVIEATHTSMVMRGVQKPGSWTVTSAMLGLFEEDQKVREEYLSLIRHQPAFF

SEQ ID NO: 11877 - protein, 198 aa, Okibacterium fritillariae
  REGION 1..198: note = tr|A0A1T5KU81|A0A1T5KU81_9MICO GTP cyclohydrolase 1; OS = Okibacterium fritillariae OX=123320 GN=folE PE=3 SV=1
MTGVDRPRIEAAVRELLAAIGEDVSREGLAETPRRVGEAYAEFFGGLHVDAEAFLANTVPVGDRAGEVVLVRDIAFRSICEHHLLPFLGTAHVAYVPGEHVVGLGSLPRVVDAIASRPQMQERLTEEIADTLERGLQARGVLVVLDAVHGCVVARGQQQRDSSTVTVASRGTLGDPAARAEIFALIGARPAPDAGATP

SEQ ID NO: 11878 - protein, 186 aa, unidentified
  source 1..186: note = Olavius algarvensis
  REGION 1..186: note = tr|A0A3P5VLH0|A0A3P5VLH0_9SPIR GTP cyclohydrolase 1; OS = Olavius algarvensis spirochete endosymbiont OX=260710; GN = folE PE=3 SV=1
MNKQRVEKLIRSLLIEIGENPDREGLCGTPQRVTESWNFLSSGYRSNLEEIVRGAVFKSDSNNMILCKDIEVYSICEHHMLPFFGTCTIGYISKVKIVGVSKLARMVNHFSRRLQLQERLTTDIAKAVMRLVDADGAGVVINAKHMCMTMRGVEKQHSSMTTSSVLGSFHSDPSTRTEFLTLATKC

SEQ ID NO: 11879 - protein, 318 aa, unidentified
  source 1..318: note = Oleiagrimonas soli
  REGION 1..318: note = tr|A0A099CWI0|A0A099CWI0_9GAMM GTP cyclohydrolase FolE2 OS=Oleiagrimonas soli OX=1543381 GN=folE2 PE=3 SV=1
MANDDNTARALSDVAHQAQAQVAGTLDWVGMDSIQAPLLVTDADGQTQRVAARVDAHVNLHRPEARGIHMSRLYLLVEQALTAEPLAPCMLRKLLHGFLDTHADLSDRARLRIRFEHLLRRSALKSDHSGWRSYPVTVTAIMRDGQVDVELAVDIVYSSTCPASAALSRQLIQQQFATDFGADTALDREAVLAWLGSEQGMVATPHAQRSTASLRLRMAPAFGFDLESIIDRVEHALGTPVQTAVKREDEQAFALANGQNLMFCEDAARRIQAALDADERIADFAVRVAHHESLHPHDAVAHASKGVDGGYRGSAFDD

SEQ ID NO: 11880 - protein, 197 aa, unidentified
  source 1..197: note = Oleiagrimonas soli
  REGION 1..197: note = tr|A0A099CSM1|A0A099CSM1_9GAMM GTP cyclohydrolase 1; OS = Oleiagrimonas soli OX=1543381 GN=folE PE=3 SV=1
MSDPSNTDVTREQAEEAVRVLLRWAGEDPSREGLLDTPKRVVKAYGDWFSGYTEDPGEYLRRTFEEVEGYDELVVLRGIEFESHCEHHMAPIIGRAHVGYLPDKKVVGISKLARVVDGYARRFQVQEKLTAQIANCIQETLQPRGVGVVIDASHECMTTRGVHKRGVSMVTSQMLGTFREDARTRAEFLRFIDIDGH

SEQ ID NO: 11881 - protein, 205 aa, unidentified
  source 1..205: note = Oleiagrimonas sp.
  REGION 1..205: note = tr|A0A328SVB7|A0A328SVB7_9GAMM GTP cyclohydrolase 1; OS = Oleiagrimonas sp. MCCC 1A03011 OX=1926883 GN=folE PE=3; SV = 1
MPWADTPALDSKPGTRKAKARPTRSEAEGAVRTLIRWAGDRPSREGMADTPARVVKAYEEWFRGYAVDPESLLRRTFEHAGYKEVVVLRDIPVQSICEHHMAPIRGMAHVAYLPNSRVVGISKLARVVDAYARRFQIQERLTVEIADVIQRALEPRGVAVVIKAAHECISSRGIQMHGVSMVTRHVMGHFEQEPHRRDIMTMLSP

SEQ ID NO: 11882 - protein, 197 aa, unidentified
  source 1..197: note = Oleiagrimonas sp.
  REGION 1..197: note = tr|A0A328T2H1|A0A328T2H1_9GAMM GTP cyclohydrolase 1; OS = Oleiagrimonas sp. MCCC 1A03011 OX=1926883 GN=folE PE=3; SV = 1
MSDPTHSDVTREQAEDAVRVLLRWAGEDPSREGLLDTPKRVVKAYRDWFSGYEEDPGEYLRRTFEEVEGYDELVVLRGIEFESHCEHHMAPIIGRAHVGYLPDKKVVGISKLARVVDGFARRFQVQEKLTAQIAHCILETLQPRGVGVVIDASHECMTTRGVHKRGVSMVTSQMLGTFREDARTRAEFLRFIDIDGH

SEQ ID NO: 11883 - protein, 183 aa, Oleibacter marinus
  REGION 1..183: note = tr|A0A1N7P9K5|A0A1N7P9K5_9GAMM GTP cyclohydrolase 1; OS = Oleibacter marinus OX=484498 GN=folE PE=3 SV=1
MSKLESLYSDVLTELGEDVSREGLLDTPKRAAKAMQFLTSGYETKIDEVVNGAVFSSDNDEMVVVEGIEFYSLCEHHMLPFIGRCHIGYLPNGKVLGLSKFARIVDMFGRRLQIQENMTKQIAEAVEEVTGCRGVGVIVEAKHMCMMMRGVQKQNSMMRTSVMKGDFRANQATREEFMRLVGL

SEQ ID NO: 11884 - protein, 307 aa, Oleibacter marinus
  REGION 1..307: note = tr|A0A1N7QAL6|A0A1N7QAL6_9GAMM GTP cyclohydrolase FolE2 OS=Oleibacter marinus OX=484498 GN=folE2 PE=3 SV=1
MYPSQATQSTRSLPDVSVTDKAHAGGGLTHVGMNAIDLPITLSELIEHPTVNARVSATVNLPAPDIKGIHMSRLYQRLLPFGDSELLTPNALQRLLTDMISSHETCSSTAAEVSFSFILLLKKSALKTLDAYGWSHYPVEIRARMQNNKTTIQLRVSVGYSSTCPCSAALSRQMIAEQFLEDFQHDSANLNAETVAHWLKDNATYATPHSQRSRADIEVIIDNLSTGFGLTSLIGKIENALQTPLQTAVKRIDEQAFARLNGSNLMFVEDAARRLSSALSPHYSGLKVDVSHFESLHPHDAVASFSA

SEQ ID NO: 11885 - protein, 183 aa, Oleibacter sp.
  REGION 1..183: note = tr|A0A2D8AD51|A0A2D8AD51_9GAMM GTP cyclohydrolase 1; OS = Oleibacter sp. OX=2024845 GN=folE PE=3 SV=1
MSDLESLYRQVLAGLGEDTEREGLLDTPKRAAKAMQFLTSGYETNLTEVINNAVFTSDNDEMVVVQGIEFYSLCEHHVLPFIGRCHIGYLPDGQVLGLSKFARIVDMFARRLQIQENMTKQIAEAVQEVTGCRGVGVIVEAQHMCMMMRGVQKQNSMMRTSVMLGDFRSSQATRDEFMRLVGL

SEQ ID NO: 11886 - protein, 184 aa, Oleiphilus messinensis; identical to SEQ ID NO: 11833
  REGION 1..184: note = tr|A0A1H5T3T0|A0A1H5T3T0_9GAMM GTP cyclohydrolase 1; OS = Oleiphilus messinensis OX=141451 GN=folE PE=3 SV=1

SEQ ID NO: 11887 - protein, 185 aa, Oleiphilus messinensis
  REGION 1..185: note = tr|A0A1Y0I296|A0A1Y0I296_9GAMM GTP cyclohydrolase 1; OS = Oleiphilus messinensis OX=141451 GN=folE PE=3 SV=1
MPEKMESHYRQIIEAVGENPDREGLRDTPARAAKAMAFLTRGYHQNLEEVVNNATFESDNDEMVIVQNIELYSMCEHHLLPFVGKCHIAYLPQGRVLGLSKFARIVDMFARRLQIQENLTREIAEAVQQVTQARGVGVVIEAQHMCMMMRGVEKQNSVMSTSVMLGALRNSQATRNEFLTLIGKR

SEQ ID NO: 11888 - protein, 183 aa, Oleispira antarctica
  REGION 1..183: note = tr|R4YNA1|R4YNA1_OLEAN GTP cyclohydrolase 1; OS = Oleispira antarctica RB-8 OX=698738 GN=folE PE=3 SV=1
MKALSDLYSQVITELGEDVNREGLLDTPKRAAKAMQFLTSGYEQSLEVIVNNAVFASDNDEMVVISDIEMYSMCEHHMLPFIGKVHIGYLPNGQVLGLSKLARITDMFARRLQIQENLTKQIAEAVQEVTGARGVAVVIEARHMCMMMRGVQKQNSSMSTSVMMGSFRESPATRSEFLRLIGK

SEQ ID NO: 11889 - protein, 183 aa, Oleispira antarctica
  REGION 1..183: note = tr|A0A1Y5HW05|A0A1Y5HW05_OLEAN GTP cyclohydrolase 1; OS = Oleispira antarctica OX=188908 GN=folE PE=3 SV=1
MKALSNLYSQVITELGEDVNREGLLDTPNRAAKAMQFLTSGYETSLEDIVNNAVFASDNDEMVVISNVEMYSMCEHHMLPFIGKVHIGYLPNGNVLGLSKFARITDMFARRLQIQENLTKQIADAVQEVTGARGVGVVIEARHMCMMMRGVEKQNSSMSTSVMLGAFREQPATRSEFFRLIGK

SEQ ID NO: 11890 - protein, 183 aa, Oleispira sp.; identical to SEQ ID NO: 11830
  REGION 1..183: note = tr|A0A2E3BEN4|A0A2E3BEN4_9GAMM GTP cyclohydrolase 1; OS = Oleispira sp. OX=2024846 GN=folE PE=3 SV=1

SEQ ID NO: 11891 - protein, 221 aa, unidentified
  source 1..221: note = Oleomonas sp.
  REGION 1..221: note = tr|A0A418WG31|A0A418WG31_9PROT GTP cyclohydrolase 1; OS = Oleomonas sp. K1W22B-8 OX=2320859 GN=folE PE=3 SV=1
MKLAGKPARPARGRESGNLVLGSARTDKPTREEAEAAVRTLLLWAGDDPDREGLADTPGRVVRSYEEFFAGYDADPVEMLNRTFEEVDGYDEMIVLKDIRLESYCEHHMVPIIGKAHVGYLPSTRVVGISKLARVVDAYAKRFQVQEKLTAQIANSIEEVLQPRGVAVIIEAAHQCMTTRGVHKPGVALVTSRMLGAFRHDPLTRREFLTIVGNPSSSFGV

SEQ ID NO: 11892 - protein, 268 aa, Oligella ureolytica
  REGION 1..268: note = tr|A0A378XJF0|A0A378XJF0_9BURK GTP cyclohydrolase FolE2 OS=Oligella ureolytica OX=90244 GN=folE2 PE=3 SV=1
MKSTELNTPAMPDVQGSVDERSVQIDRVGVRQVKHPLSVKNGQGAILGTVGVWDTAVLLPASEKGTHMSRFMGLIDEYHAKGMDAKLFKEMAADMLPLLNAEEGEIRVTFPYFITKKAPVSGVSSMMDYEVTWVALADKEKGVRFITEVVVPVMSLCPCSKAISDYGAHNQRSHVTVKLEATEDYVLDDFIKAIEEQGSSQLWALLKRPDEKYVTETSYDNPKFVEDLIRDVALRVKQWPGLVAYRVEVENFESIHNHSAYAVLEGTA

SEQ ID NO: 11893 - protein, 232 aa, Oligella ureolytica
  REGION 1..232: note = tr|A0A378XDY5|A0A378XDY5_9BURK GTP cyclohydrolase 1; OS = Oligella ureolytica OX=90244 GN=folE PE=4 SV=1
MSGSDTDTTYISNVIRKRITTAGARFNANDNIAEFIEDGELELLQQEVEKKMTEVLKSLVIDIETDHNTQETARRVAKMYVREVFAGRYHKMPPITEFPNIEQLSELIIIGPIQVRSACSHHLCPIMGQVWVGVLPDSDSNLIGLSKYARLTQWVMGRPQIQEEAIVQLADLLVDKMNPRGLAIVMRADHFCMQWRGVKDMNSKMINSVMRGAFLKNSDLRKEFLDLLTKTE

SEQ ID NO: 11894 - protein, 268 aa, Oligella urethralis
  REGION 1..268: note = tr|A0A2X1WJ62|A0A2X1WJ62_9BURK GTP cyclohydrolase FolE2 OS=Oligella urethralis OX=90245 GN=folE2_1 PE=3 SV=1
MKLTESTAAVMPDVQGSTDLRRIQIDRVGVRKVKHPLTIKNGQGDVLATVGMWETTVLLPATEKGTHMSRFMGLIDEYHAQGMDATLFKQMATAMLPLLNAEEGEIRVTFPYFITKKAPVSGVASMMDYEVTWTAIATTDGVRLITEVVVPVMSLCPCSKAISEYGAHNQRSHVTVRLEAGSDYVLDDLIRAIEEQGSSQLWALLKRPDEKYVTEYSYDNPKFVEDLIRDVALRLHQWPGMIAYRVEVENFESIHNHSAYAMLEGRAE

SEQ ID NO: 11895 - protein, 231 aa, Oligella urethralis
  REGION 1..231: note = tr|A0A2X1WFM6|A0A2X1WFM6_9BURK GTP cyclohydrolase 1; OS = Oligella urethralis OX=90245 GN=folE_2 PE=4 SV=1
MSDSDSKYISNIIRQRIQHAGARFNANDNIADFIEEGELDQLQAEVEEKMTEVLKSLVIDIDTDHNTQETARRVAKMYVREVFGGRYHSMPPITEFPNIEKLSELIIIGPIQVRSACSHHLCPIMGQVWIGVLPDSNSNLIGLSKYARITNWVMGRPQIQEEAIVQLADLLNDKMKPQGLAIVMKADHFCMQWRGVKDMNSKMINSVMRGAFLKNSDLRKEFLDLLPLNKN

SEQ ID NO: 11896 - protein, 210 aa, Oligotropha carboxidovorans
  REGION 1..210: note = tr|B6JAN4|B6JAN4_OLICO GTP cyclohydrolase 1; OS = Oligotropha carboxidovorans (strain ATCC 49405 / DSM 1227 / KCTC 32145 / OM5) OX=504832 GN=folE1 PE=3 SV=1
MSNLSNVQVLERDRKAEEESARPDRAEVEAAVRTIIRWAGDDPKRDGLIETPSRVARAFEEFFIGYSQNPTTILQKTFEEIDGYDEMITLRAVRFESHCEHHMAPIVGKAWVAYIPNGRVVGISKLARVVEVYAKRLQIQEKMTAQIANTINEVLKPQGVAVLIKAQHHCMTTRGIHKPGTDLVTSRMLGCFRDNATTRQEFLSMTTDPE

SEQ ID NO: 11897 - protein, 227 aa, Oligotropha carboxidovorans
  REGION 1..227: note = tr|B6JEN3|B6JEN3_OLICO GTP cyclohydrolase 1; OS = Oligotropha carboxidovorans (strain ATCC 49405 / DSM 1227 / KCTC 32145 / OM5) OX=504832 GN=folE2 PE=3 SV=1
MDAVIKPLRSKLDKTEVPAAEIDQAGVRPDQPRPTREEAESAVKTLLSYIGENPSREGLLDTPRRMVEAYDELFQGYHQCPAEVLNRTFGETAGYDDFVLIRDIEFHSHCEHHVMPFYGKAHIAYTPVDRVVGLSKIARLVDAFAHRLQTQEHLTAQIAAALDKVLQPRGVAVLLEAEHTCMSVRGIAKHGAKTVTSRFTGMFYDNPDEQNRFLHMVRGISAPFAGA

SEQ ID NO: 11898 - protein, 213 aa, Olivibacter sp.
  REGION 1..213: note = tr|A0A5C0ZF61|A0A5C0ZF61_9SPHI GTP cyclohydrolase 1; OS = Olivibacter sp. LS-1 OX=2592345 GN=folE PE=3 SV=1
MNINNNEAPLDDEELDGYVKIDRYNTDKIESIANHYEDILSQLGENPKRQGLLKTPERIAKALQYLTHGYDIDPAAILKSAMFEEDYSQMVVVKDIEVYSMCEHHLLPFFGKAHIAYIPKGHIVGLSKIPRVVDAFARRLQVQERLTNEIRDCIQETLNPAGVAVVIECKHLCMAMRGIQKQNSVTTTSAFTGEFAHERTRAEFLRLITASLD

SEQ ID NO: 11899 - protein, 225 aa, Olleya aquimaris
  REGION 1..225: note = tr|A0A327R4V4|A0A327R4V4_9FLAO GTP cyclohydrolase 1; OS = Olleya aquimaris OX=639310 GN=folE PE=3 SV=1
MKIENNIEENDAIGENHISTNHDTPLRLDAFKLSDSDKIESIKKDVTNIMETLGLDLTDDSLKGTPKRVAKMFVNEIFGGLHPDKKPSASTFENKYQYGEMLVEKNITVYSTCEHHLLPIVGKAHVAYISNGTVVGLSKMNRIVDYFAKRPQVQERLTIQIVKELQDVLGTKDVACVIDAKHLCVNSRGIRDVESSTVTSEFGGQFKKKETKREFLDYIKLDTKF

SEQ ID NO: 11900 - protein, 198 aa, Olleya aquimaris
  REGION 1..198: note = tr|A0A327R597|A0A327R597_9FLAO GTP cyclohydrolase 1; OS = Olleya aquimaris OX=639310 GN=folE PE=3 SV=1
MPYKKFEEYNIKVTDDVKDRYKKIIEDLGEDSNREGLLKTPERAAKAMQFLTQGYAQDAAKILKGAMFAEDYNDMVIVKDIEFYSLCEHHILPFFGKAHIAYIPNGHIVGLSKLPRIVDVFSRRLQVQERLTHQILDCINDTLKPEGVAVVLEASHMCMQMRGVQKQSSVTTTSGFRGAFENIETRTEFLNLINSKLS

SEQ ID NO: 11901 - protein, 198 aa, unidentified
  source 1..198: note = Olleya namhaensis
  REGION 1..198: note = tr|A0A1I3SUI3|A0A1I3SUI3_9FLAO GTP cyclohydrolase 1; OS = Olleya namhaensis OX=1144750 GN=folE PE=3 SV=1
MPYKKFEEYNVKVTDDVKNRYKNIIEDLGEDTQREGLLKTPERAAKAMQYLTQGYDQDAAEILKGAMFKEDYNDMVIVKDIEFYSLCEHHILPFFGKAHIAYIPNGHIVGLSKLPRIVDVFSRRLQVQERLTHQILDCINDTLQPEGVAVVIEASHMCMQMRGVQKQNSVTTTSGFRGAFQNIETRTEFLNLISSKLS

SEQ ID NO: 11902 - protein, 225 aa, unidentified
  source 1..225: note = Olleya namhaensis
  REGION 1..225: note = tr|A0A1I3RKQ5|A0A1I3RKQ5_9FLAO GTP cyclohydrolase 1; OS = Olleya namhaensis OX=1144750 GN=folE PE=3 SV=1
MKIENNIDDNDAIGENHIGTNHDTPLRADAFDLSDADKIESIKKDVTKILETLGLDLTDDSLKGTPNRVAKMFVNEIFGGLHPDKKPKASTFDNKYQYGEMLVEKNITVYSTCEHHLLPIVGRAHVAYISNGTVVGLSKMNRIVDYYAKRPQVQERLTIQIVKELQKALGTDDVACVIDAKHLCVNSRGIRDIESSTVTSEFGGQFKKKSTRHEFLEYIKLETKF

SEQ ID NO: 11903 - protein, 225 aa, Olleya sp.
  REGION 1..225: note = tr|A0A2K8X3S5|A0A2K8X3S5_9FLAO GTP cyclohydrolase 1; OS = Olleya sp. Bg11-27 OX=2058135 GN=folE PE=3 SV=1
MKIENNIDDNDAIGENHIGTNHDTPLRADAFDLSDADKIESIKKDVTKILETLGLDLTDDSLKGTPNRVAKMFVNEIFGGLHPDKKPKASTFDNKYQYGEMLVEKNITVYSTCEHHLLPIVGRAHVAYISNGTVVGLSKMNRIVDYYAKRPQVQERLTIQIVKELQEALGTDDVACVIDAKHLCVNSRGIRDIESSTVTSEFGGQFKKKSTRREFLEYIKLETKF

SEQ ID NO: 11904 - protein, 198 aa, Olleya sp.
  REGION 1..198: note = tr|A0A559R8E8|A0A559R8E8_9FLAO GTP cyclohydrolase 1; OS = Olleya sp. Hel_I_94 OX=1250001 GN=folE PE=3 SV=1
MPYKKFEEYNIKVTDDVKNRYKNIIEDLGEDTTREGLIKTPERAAKAMQFLTQGYNQDAANILKGAMFKEEYNDMVIVKDIEFYSLCEHHILPFFGKAHIAYIPNGHIVGLSKLPRIVDVFSRRLQVQERLTHQILDCINDTLKPEGVAVVIEASHMCMQMRGVQKQNSVTTTSGFRGAFENIETRTEFLNLISTKLS

SEQ ID NO: 11905 - protein, 195 aa, Olsenella profusa
  REGION 1..195: note = tr|U2TTB5|U2TTB5_9ACTN GTP cyclohydrolase 1; OS = Olsenella profusa F0195 OX=1125712 GN=folE PE=3 SV=1
MTERAHMDRARIERGVRLMLEGMGEDPEREGLLETPARVARALEESCAGLHQDPAPLFEKSFDAHCHEMVIVRDIPFYSLCEHHLLPFFGMAHVAYLPGRDGRVCGISKLARVVDVYAKRPQIQEQLTRQVADAIMEGVDALGVLVVMEAEHLCMTMRGVRKPGSKTTTSAVRGAFEHHGATRDEAMSLIMRGSR

SEQ ID NO: 11906 - protein, 186 aa, unidentified
  source 1..186: note = Olsenella scatoligenes
  REGION 1..186: note = tr|A0A124EGW6|A0A124EGW6_9ACTN GTP cyclohydrolase 1; OS = Olsenella scatoligenes OX=1299998 GN=folE PE=3 SV=1
MDKPRVEAAVRELLAAIGEDPDRPGLVGTPDRVARACEEIFGGMQEDPGRYLRKQFHEPGNEEMVVVRDIPFASMCEHHVLPFMGKASVCYIPRDGRITGLSKIARCVTGYAHRLQLQERLTSQIADAMVRELDPLGVLVVVEAEHTCMTIRGIRTPGAKTVTSAVRGCLKTDSKSRAEALRLLGL

SEQ ID NO: 11907 - protein, 185 aa, Olsenella sp.
  REGION 1..185: note = tr|A0A1Y4DPP7|A0A1Y4DPP7_9ACTN GTP cyclohydrolase 1; OS = Olsenella sp. An270 OX=1965615 GN=folE PE=3 SV=1
MDKPRVEAAVRELLLAIGEDPDREGLVGTPDRVARACEEVLGGMQEDPGAHLRKQFHEPGNQEMVIVKDIPFSSLCEHHILPFTGRAHVCYIPRDGRITGLSKIARCVSGYARRLQVQERLTGQIADAMVRELDPLGVLVVLEAEHTCMTMRGIRAAGALTTTSAVRGCLRDLKTREEALRLLEL

SEQ ID NO: 11908 - protein, 214 aa, Olsenella sp.
  REGION 1..214: note = tr|A0A1K1VLJ0|A0A1K1VLJ0_9ACTN GTP cyclohydrolase 1; OS = Olsenella sp. kh2p3 OX=1797112 GN=folE PE=3 SV=1
MDDRDDEDFDLPEQTEGPGRTSELQYGKLDKPRVEAAVRELLIAIGENPDRPGLVGTPDRVARAYEEIFGGMQEDPAAYLRKQFHEPGNEEMVVVRDIPFASMCEHHILPFMGKASVCYIPRDGRITGLSKIARCVTGYAHRLQLQERLTSQIADAMVRELDPLGVLVVVEAEHTCMTIRGIRTPGAKTVTSAVRGCLKSDIKTRSEALRLLGL

SEQ ID NO: 11909 - protein, 200 aa, Olsenella uli
  REGION 1..200: note = tr|X8HSP5|X8HSP5_9ACTN GTP cyclohydrolase 1; OS = Olsenella uli MSTE5 OX=1190621 GN=folE PE=3 SV=1
MVEPTMHDGWRMDHDKIERGVRLMLAGMGEDPDREGLRETPARVARALEESCAGLCQDPALLFEKSFDVGCHEMVIVRDIPFYSLCEHHLLPFFGVAHVAYLPGEDGRVCGISKLARVVDVFAKRPQVQEQLTRQVADAVMEGVGASGVLVVMEAEHLCMTMRGVRKPGAKTTTSAVRGAFERHDATRAEAMSLIFNGTK

SEQ ID NO: 11910 - protein, 200 aa, Olsenella uli; identical to SEQ ID NO: 11909
  REGION 1..200: note = tr|E1QXW8|E1QXW8_OLSUV GTP cyclohydrolase 1; OS = Olsenella uli (strain ATCC 49627 / DSM 7084 / CIP 109912 / JCM 12494 / NCIMB 702895 / VPI D76D-27C); OX = 633147 GN=folEPE=3 SV=1

SEQ ID NO: 11911 - protein, 194 aa, Olsenella umbonata
  REGION 1..194: note = tr|A0A1H9NWZ8|A0A1H9NWZ8_9ACTN GTP cyclohydrolase 1; OS = Olsenella umbonata OX=604330 GN=folE PE=3 SV=1
MDNQLSYNALDKKRVEAAVRDFLLAIGEDPDREGLRGTPDRVARACEEIFGGMQEDPGVYLRKQFHEGENEEMVIVRDIAFSSMCEHHLLPFVGKAHVCYIPRKGRITGLSKIARCVNGYAKRPQLQERLTSQIADAMMRELEPLGVLVVMQAEHTCMTMRGVRSAGALTVTSAVRGCFDNLKTREEALRLLGV

SEQ ID NO: 11912 - protein, 217 aa, Olsenella umbonata
  REGION 1..217: note = tr|A0A1H1LR31|A0A1H1LR31_9ACTN GTP cyclohydrolase 1; OS = Olsenella umbonata OX=604330 GN=folE PE=3 SV=1
MVPETSSFRAAEPTGEKDRYGRPLNDQGFAPIDKPRAEAAVREFLLAIGEDPDREGLRGTPERVARAAEELFGGMQEDPAAHLRRQFQEEQNQEMVVVRDIPFSSMCEHHILPFEGTASVCYIPRKGRITGLSKIARCVVGYGHRLQVQERLTAQVADALMRELDPLGVMVVMQAEHTCMTMRGVRAAGSSTVTSAVRGVFKADSKTREEAFRLLRG

SEQ ID NO: 11913 - protein, 229 aa, unidentified
  source 1..229: note = Unknown
  REGION 1..229: note = tr|A0A520S1X7|A0A520S1X7_9GAMM GTP cyclohydrolase 1; OS = OM182 bacterium OX=2510334 GN=folE PE=3 SV=1
MSVTAEGLKNKNCHLPNTCSAEANLVREALVLKGLETPTIDNGLSRDEKYIRIKAAMTDVVTALGLDLRDDSLAETPHRIAKMYVDEIFGGLDYRNFPKITAIDNKMGVEEMVKVDNISVVSTCEHHFVTIDGASRVAYIPGKKIIGLSKINRIVRFFAQRPQVQERLTQQILIALQTLLGIDDVAVTIDATHYCVKSRGVMDTNSSTRTTALGGQFKDDHRTRSEFLR

SEQ ID NO: 11914 - protein, 305 aa, unidentified
  source 1..305: note = Unknown
  REGION 1..305: note = tr|A0A520RQK9|A0A520RQK9_9GAMM GTP cyclohydrolase FolE2 OS=OM182 bacterium OX=2510334 GN=folE2 PE=3 SV=1
MPDIANRTLAEAQSTLDWVGMSNVHQPLLVKDGDHNREVHANVQVYVNLADPLAKGIHMSRLYLLLDEHASTRPLTAAGLKMLLASVLESHHDLSTNAFVQFEFDHSIRRRALLSDNMGWSSYPVMVKGTLIKGQIALELSVEVKYSSTCPCSAALARQLIQEQFCKDFGKEGDVSISEVKQWLGTEEGVLATPHSQRSTAKILVQLDVENDDLPLTALIDQIEASLKTPVQSAVKREDEQEFARLNGKNLMFIEDAGRRLKGALSEDSRWSDYWVRIEHHESLHAHDAVGVFTKGVENGYLPIP

SEQ ID NO: 11915 - protein, 193 aa, unidentified
  source 1..193: note = Omnitrophica bacterium
  REGION 1..193: note = tr|A0A1G1JWR7|A0A1G1JWR7_9BACT GTP cyclohydrolase 1; OS = Omnitrophica bacterium RIFCSPHIGHO2_02_FULL_46_11; OX = 1801820 GN=folE PE=3 SV=1
MHDLETQVKQGNIESIVKDLISLLGEDPNREGLLKTPKRVESSLKFLTRGYKQDIEKILNGAIYEENYDEMVVVKDIDLFSLCEHHLLPFYGKANVAYLPDGKIIGLSKIPRIVDVFSRRMQVQERLTSQIADCLMQHLRPKGVAVVIEAFHLCMAMRGVEKKDSFCVTSSMLGMFRSDPRSRAEFFSLVGKR

SEQ ID NO: 11916 - protein, 181 aa, unidentified
  source 1..181: note = Omnitrophica bacterium
  REGION 1..181: note = tr|A0A1G1KQP7|A0A1G1KQP7_9BACT GTP cyclohydrolase 1; OS = Omnitrophica bacterium RIFCSPLOWO2_12_FULL_44_17; OX = 1801832 GN=folE PE=3 SV=1
MESLIKEMLVQLGENPNREGLLKTPKRVAASFKYLTRGYRQDIDQVVNGAIFQENYDEMVLVKEIDLFSLCEHHLLPFYGKVHVAYFPNGKVIGLSKIPRIVDVFAQRLQLQERLTSQIADCLMHYLNPKGVAVVIEAYHLCMAMRGVEKKDAFCTTSAMLGMFRKDPRSRAEFLNLIARK

SEQ ID NO: 11917 - protein, 184 aa, unidentified
  source 1..184: note = Unknown
  REGION 1..184: note = tr|A0A1G1M2R6|A0A1G1M2R6_9BACT GTP cyclohydrolase 1; OS = Omnitrophica WOR_2 bacterium GWB2_45_9 OX=1801843; GN = folE PE=3 SV=1
MDKKKIEKAVRDILEAIGENPRRKDLLDTPLRVAEMYEEIFSGVRKDPAKELEIILEQKHEEIVLLKGIPLYSVCEHHLLPFLGRANVAYIPKQGRVTGLSKIARVVDILAKRPQVQERLTTQIAEIIMAKLKPLGVMVVIEAEHMCMSMRGVQKPGTLTVTSAVRGVFKENFKTRSEALSLMK

SEQ ID NO: 11918 - protein, 257 aa, unidentified
  source 1..257: note = Unknown
  REGION 1..257: note = tr|A0A0S8IGJ9|A0A0S8IGJ9_9BACT GTP cyclohydrolase FolE2 OS=Omnitrophica WOR_2 bacterium SM23_72 OX=1703777; GN = folE2 PE=3 SV=1
MRDIQNQQDHRNIAIDKVGVKDIRYPITVLDKATKTQQTVAMINMYVNLPKDFKGTHMSRLVEILNEHDRRISIKNFSEILSTMKERLNAESAHIEISFPYFVMKTSPTTKSKGLMEYQCTFKGSLNKGKDLVVIINVPITTLCPCSQEISKFGAHNQRGEVRLQVRFKKFVWIEDLIKLVEDSASCDVYSVLKREDEKYVTEKAYQNPKFVEDVVRDIAEKLERNNDIVWFAVEAENFESIHNHNAYAYIERHKES

SEQ ID NO: 11919 - protein, 319 aa, unidentified
  source 1..319: note = Opitutaceae bacterium
  REGION 1..319: note = tr|A0A178IGU8|A0A178IGU8_9BACT GTP cyclohydrolase FolE2 OS=Opitutaceae bacterium TSB47 OX=1184151 GN=folE2; PE = 3 SV=1
MYLHQAADGPAPRIARGYDAAFKPDAAYRASLPDLMGAGGPIEGAAVGIQQVGVSNFRLPLRFAARRGGPVTLEASVSGSVSLDAHLKGINMSRVVRSFYEHQDQVCTPELLERILKKYLRAVGSREARLRVAFSFPLRQESLRSGLEGWQYYRVVFEASLSAGTKARRFVEFDFVYSSACPCSAELAEHARDRRGVYAVGHSQRSKARLRVELAPGRRLAVEDLHAHCRAALRTETQVMVKREDEQAFAELNGAHLKFVEDAARLVYARLDADARIRDFRVVCAHFESLHSHDAVSVICKGAPGGMTAEFMEFETLAG

SEQ ID NO: 11920 - protein, 343 aa, unidentified
  source 1..343: note = Opitutaceae bacterium
  REGION 1..343: note = tr|A0A2T6E1I1|A0A2T6E1I1_9BACT GTP cyclohydrolase FolE2 OS=Opitutaceae bacterium EW11 OX=2161865 GN=folE2; PE = 3 SV=1
MKSISSSGGTAASSRASTRRAAKSMYLHNGPGGAAPKIKRRYDAEFVATPAYRESLPDLMEAEDAIHGAKVPVQQVGVSNFRLPLKLGVRGGKPVVLEASVLGTVSLDANLKGINMSRIVRSFYDHRDEVFTPELLKKILLRYQRSVGSLEARLRVSFSYPILQKSLRSGLEGFQYYQVAYEGVIDRSGTFRKYIDFDFVYSSACPCSAELAEHARDKRGAYAVPHNQRSKVRVRAEIAPAKKLAVEDLHDRCLAALKTETQVMVKREDEQAFAELNGAYIKFVEDAARLVYQQLDADDRIRDFQAACAHFESLHSHDAVSVICKGVPGGLAADFTDFRSLVC

SEQ ID NO: 11921 - protein, 317 aa, unidentified
  source 1..317: note = Opitutae bacterium
  REGION 1..317: note = tr|A0A2D6VJ88|A0A2D6VJ88_9BACT GTP cyclohydrolase FolE2 OS=Opitutae bacterium OX=2026771 GN=folE2 PE=3 SV=1
  VARIANT 41: note = Xaa can be any naturally occurring amino acid
  VARIANT 89: note = Xaa can be any naturally occurring amino acid
MDTPSDKKKKLKREYDSSFVVTPEYRKSLPDIQNSGSEGMXGAHVPILQVGISGFRLPLQFVGPDGESLNIETKITGTVSLDADKKGIXMSRIIRIFYEYKDEVFSPEILGKILRHYKERLDSQEARLKADFSYPMIQQSLRSGLEGYQYYGCSFEGTIDRADRVRKIIHFDFVYSSACPCASELSEHARESRDLLAIPHSQRSKARVSVEVHPDRELSLLELRDMCINALNTETQVMVRREDEQAFAEMNGAKVKFVEDAARLVYEQLEEDARIIDFRVICSHFESLHSHDAVAVLCRGVDGGFRAEYEDFGNLVV

SEQ ID NO: 11922 - protein, 324 aa, unidentified
  source 1..324: note = Opitutae bacterium
  REGION 1..324: note = tr|A0A2A2QCR0|A0A2A2QCR0_9BACT GTP cyclohydrolase FolE2 OS=Opitutae bacterium Tous-C1TDCM OX=1982319; GN = folE2 PE=3 SV=1
MKKKPMFLHRTAGGIEPLIARGFQAKFKSDAAYRESLPDMMEAVDAIGGANVPIQQVGCANFRLPLKFKAKDGRVLTLETAVTGTVSLEANLKGINMGRIMRTFYEHEEKVFSPDLLRRILEQYRRKIVAFEARVRLSFSYPILQPSLRSGLKGWQYYKVTFEGTMDREGRFRKFIEFDFVYSSTCPCSAELAEHARRTRGVYATPHAQRSKARVKVEIAAGRTLPIEDLQRHCAEGLKTETQVMVKREDEQAFAELNGTYIKFVEDAARLLYRELAGDKRIADFQIACSHLESLHSHDAVSVICKGVPGGLRADFTDFGSLVC

SEQ ID NO: 11923 - protein, 317 aa, unidentified
  source 1..317: note = Opitutales bacterium
  REGION 1..317: note = tr|A0A2E7PY93|A0A2E7PY93_9BACT GTP cyclohydrolase FolE2 OS=Opitutales bacterium OX=2026772 GN=folE2 PE=3 SV=1
MDAPSKKPKPLKREYDKTFVVTPEYRASLPDVQNSGGKEMEGARVPILQVGISGFRLPLRFVGPDGEDLAVETKVTGTVSLDADKKGINMSRIIRIFYEYKEETFSPEILAKILRHYKTKLDSKEARIKADFSYPMVQQSLRSGLEGYQYYGCSFEGIIDRADRVRKIIHFDFVYSSACPCASELSEHAREKRGLLAIPHSQRSKARVSVEVHPDRELSLLELRDMCVNGLSTETQVMVRREDEQAFAEMNGANIKFVEDAARLLYAQLIEDSRIIDFRVVCSHFESLHSHDAIAVLCRGVDGGFRAEYEDFANLIV

SEQ ID NO: 11924 - protein, 269 aa, unidentified
  source 1..269: note = Opitutales bacterium
  REGION 1..269: note = tr|A0A2E7VDP4|A0A2E7VDP4_9BACT GTP cyclohydrolase FolE2 OS=Opitutales bacterium OX=2026772 GN=folE2 PE=3 SV=1
MPGKHSTTFTTTSPLHDEQSTRDTRELPIDKVGVRGLRFPIQVQDRAHMVQNTVATVGLFVDLPMEFKGTHMSRFIEVLHSHGRMIHVENIPDLLARMQERLKANTSHLEMEFPYFITKTAPATGREGLMDYTVRFEANATGSNIDFVMTLRVAVTTLCPCSKAISQYGAHNQRGEVTVAIRSSETVWIEDLIALVEQSASSELYSLLKRPDEKAVTEQAYDNPVFVEDLVRNVVLRLKAHKHVTWYRVEAENFESIHNHNAYACIEKG

SEQ ID NO: 11925 - protein, 326 aa, Opitutus sp.
  REGION 1..326: note = tr|A0A2T6CQA3|A0A2T6CQA3_9BACT GTP cyclohydrolase FolE2 OS=Opitutus sp. ER46 OX=2161864 GN=folE2 PE=3 SV=1
MSKAKPMYLHRSASGTAPRIARRYDAAFRVTPQYRASLPDMMEAEHDAIQGAHVPIQQVGVHNFRLPLKFRTKQKEIVTLEASVTGTVSLEADLKGINMSRIVRSFYEHKDAVFTGEWMGRILRAYLRNVATKDARLRVKFSYPMLQRSLRSGLEGYQFYDVAWEGVMTRGGDYRRFIHFDFVYSSACPCSAELSEHARDTRGMYTVPHSQRSKARVTVEEAPGKKIWIEDIQALCARGLQTETQVMVKREDEQAFAELNGAHLKFVEDAARLLYREFDADPRIRDFRIACSHLESLHSHDAVSVICKGVKGGFNADFMDFGSLVC

SEQ ID NO: 11926 - protein, 327 aa, Opitutus terrae
  REGION 1..327: note = sp|B1ZTR5|GCH4_OPITP GTP cyclohydrolase FolE2; OS = Opitutus terrae (strain DSM 11246 / JCM 15787 / PB90-1); OX = 452637 GN=folE2 PE=3 SV=1
MSKKKKSMYLHESASGAAPKIQRRYDPAFEVDAAYRASLPDMMEAAYAAIQGAHVPIQQVGVSNFKLPLKFRTKKGEILTLEASITGTVSLEADLKGINMSRIVRSFYDHKDEVFTGEWMGKILCAYLRNVKSKDARLKVSFSYPMLHRSLRSGLEGYQFYNVAFEGVLTRKGDYRRFIHFDFVYSSACPCSAELAEHARDQRGVYSVPHSQRSKARIVVEETQGKKIWIEDVHAHCLRALQTETQVMVKREDEQAFAELNGAHLKFVEDAARLLYREFDADEKIADFRIACSHLESLHSHDAVSVICKGVKGGFTADFMDFQSLVC

SEQ ID NO: 11927 - protein, 211 aa, Opitutus terrae
  REGION 1..211: note = tr|B1ZNQ4|B1ZNQ4_OPITP GTP cyclohydrolase 1; OS = Opitutus terrae (strain DSM 11246 / JCM 15787 / PB90-1); OX = 452637 GN=Oter_2141 PE=3 SV=1
MDTKSPRDLSVVAHAPDLAEIARHYAAIITEIGGDLSSAGMRDTPLRAAKALVEMTEGARTGTERLLTMFEAECHQAVCNDMVIVEGIHEVGLCEHHLLPIIMSITIAYIPDKKIIGLSKLPRIAGHFARRWQNQERTAHLIAEFLENLVQPLGAAVFIAGKHMCAMARGVRDTHSVMKVNVLHGAFQHDVNRRNELLMRLSPGSAAGFGW

SEQ ID NO: 11928 - protein, 219 aa, Orbus hercynius
  REGION 1..219: note = tr|A0A495RH55|A0A495RH55_9GAMM GTP cyclohydrolase 1; OS = Orbus hercynius OX=593135 GN=folE PE=3 SV=1
MSELSLEAQKVKTALEQKNLETPLCRVAMDNRERKAKIEAHFREIMQLMELDLSDDSLVETPRRVAKMYVDEIFSGLDYHNFPKITLIENKMQVDEMITVRDITLTSVCEHHFVTIDGKATVSYIPKSSVIGLSKINRIVEFFSQRPQVQERLTQQILVALQTLLGTAHVAVSIDATHYCVKARGVKDATSITTTTSLGGGFKTNPSTRQEFLRSLKHY

SEQ ID NO: 11929 - protein, 256 aa, Orenia marismortui
  REGION 1..256: note = tr|A0A4R8GSB4|A0A4R8GSB4_9FIRM GTP cyclohydrolase 1; OS = Orenia marismortui OX=46469 GN=folE PE=3 SV=1
MDVEVKFNDIIIDEIDNFDCAFLANSLMGLIKLSRIKELRYTNDNGLFDKLVREFNNQLYGVEEGWGRMDKKKIERAVRNILEAIGEDPTREGLQRTPERVAQMYEDIFAGTNQNPEEHLEFFSDDMDYEDLILVKDISFYSMCEHHLVPFFGKVHIAYIPKEGRITGFSRLARLVETVARRLQLQERMNKMIADAIVKILEPLGVLVIVEAEQMCMTMRGIKKTESRTITSAVRGIFKEDSASRAEVMNLIKGSD

SEQ ID NO: 11930 - protein, 259 aa, Orenia marismortui
  REGION 1..259: note = tr|A0A4R8H668|A0A4R8H668_9FIRM GTP cyclohydrolase FolE2 OS=Orenia marismortui OX=46469 GN=folE2 PE=3 SV=1
MKDIQNTQGDYKFDINKVGVDNLVCPFKIQSKIGEVISTVGNFSMMVNLPKELKGINMSRLPQLLSELKQEELTLNDLKQDIRSIVERMKKRMESKDAYLDLDFDYFLEKKAPVSGFMGIVPYHAKINASLQGSSYNFILTVEVPITTLCPCSKEISDYSAHNQRGYVEVSIKFDGLFYIEDIIEIVEEVASCEIYSVLKRVDEKYVTERAYENPRFVEDVVRLVAEKLDQASQIKSFSVSSRHQESIHSHDAYAIIER

SEQ ID NO: 11931 - protein, 188 aa, unidentified
  source 1..188: note = Orenia metallireducens
  REGION 1..188: note = tr|A0A1C0A5E8|A0A1C0A5E8_9FIRM GTP cyclohydrolase 1; OS = Orenia metallireducens OX=1413210 GN=folE PE=3 SV=1
MDKKKIERAVRDILEAIGENPDREGLQRTPERVAEMYEDILSGTNQQPEEHLEFFSEDEKYEDLIMVKDISFYSICEHHLVPFFGKVHIAYVPKEGRITGFSRLARLVETVARRLQLQERMNKMIADAIVNVLEPLGVLVIVEAEQMCMTMRGIKKTESRTITSAARGVFKEDSAARAEIMNLIKSSR

SEQ ID NO: 11932 - protein, 261 aa, unidentified
  source 1..261: note = Orenia metallireducens
  REGION 1..261: note = tr|A0A285GVS8|A0A285GVS8_9FIRM GTP cyclohydrolase FolE2 OS=Orenia metallireducens OX=1413210 GN=folE2 PE=3; SV = 1
MKDVQNTKGNYKFAINKVGVNNLIHPIRIKAKSGEVVATVGDFSLAVNLSKSLKGINMSRLPQLLSELNRDRFTIEDFKEDILKVLEEIKSRMESDNAYFEVEFDYFIEKQAPVSEYSGIAPYKCRIEGSLADGEYDLILTVEVPITTLCPCSKEISNYSAHNQRGYVKTSIRYNDLIYLEDIIKLVEEVGSCEIYPILKRVDEKYVTEKAYENPRFVEDVVRLVAEELEINPKVTWFRVSSRHQESIHPHDAYAMLESWK

SEQ ID NO: 11933 - protein, 190 aa, Oribacterium sp.
  REGION 1..190: note = tr|A0A1I2Q3Y4|A0A1I2Q3Y4_9FIRM GTP cyclohydrolase 1; OS = Oribacterium sp. WCC10 OX=1855343 GN=folE PE=3 SV=1
MIDKKAIEEHIRGILIALGDDPEREGLKDTPKRVAEMYEEVFEGMNYSNHEIAEMFGKTFEAEMDESIDTDRVVVMKDIDIFSYCEHHLALMYDMKVNVAYLPKGRVIGLSKIARVCDMVGRRLQLQEKIGKDIADIICEITGSEDVAVTIEGYHSCVTARGIKKTNTKTFSAELRGRFKTDASLQFYIK

SEQ ID NO: 11934 - protein, 190 aa, Oribacterium sp.
  REGION 1..190: note = tr|A0A1H3XLI4|A0A1H3XLI4_9FIRM GTP cyclohydrolase 1; OS = Oribacterium sp. KHPX15 OX=1855342 GN=folE PE=3 SV=1
MIDKKAIEEHIRGILIALGDDPNREGLLETPKRVAEMYAEVFEGMNYTNHEIAEMFDKSFEEDLQGTSSVGRVVVMKDIDIFSYCEHHLALMYDMKVNVAYVPKGKVVGLSKIARVCDMVGRRLQLQEKIGKDIADIMIEITGSEDVAVTIEGCHSCVTARGIKKHNTKTFTAELRGEFKTDPSLQMYLR

SEQ ID NO: 11935 - protein, 212 aa, unidentified
  source 1..212: note = Oricola cellulosilytica
  REGION 1..212: note = tr|A0A4R0PDT3|A0A4R0PDT3_9RHIZ GTP cyclohydrolase 1; OS = Oricola cellulosilytica OX=1429082 GN=folE PE=3 SV=1
MDAVITSFAKRSEENKRRDLERPTQEEAEAAVRTLLLWAGDDPDREGLLETPARVAKAYQEMFAGYGMDPDEVLGRTFEEVAGYDDIVLVKDIAFHSHCEHHMVPIIGKAHVAYLPDGRVLGLSKIARVVDIYAQRLQTQEAMTAQIAGAIDDALQPRGVAVMIEAEHMCMAMRGIRKQGSTTLTTTFTGAFLDDVQEQGRFMSMLRGSGAA

SEQ ID NO: 11936 - protein, 201 aa, unidentified
  source 1..201: note = Oricola sp.
  REGION 1..201: note = tr|A0A3M8GXV2|A0A3M8GXV2_9RHIZ GTP cyclohydrolase 1; OS = Oricola sp. OX=1979950 GN=folE PE=3 SV=1
MDAIAPTSTHPSDEKPSRAEAEAAVLTLLKWIGDDPAREGLIDTPARVVKAYEEMFGGYDSDPADILGRTFEEVAGYDDIVLVKDIAFHSHCEHHMVPIIGKAHVAYLPRERVLGLSKIVRVVDIFARRLQTQETMTAQIATSIDDALAPRGVAVMVEAEHMCMAMRGIRKHGSTTITTRFTGAFDDPAWQNRFTDLIRTR

SEQ ID NO: 11937 - protein, 183 aa, unidentified
  source 1..183: note = Ornatilinea apprima
  REGION 1..183: note = tr|A0A0P6XY95|A0A0P6XY95_9CHLR GTP cyclohydrolase 1; OS = Ornatilinea apprima OX=1134406 GN=folE PE=3 SV=1
MSVHDLLTNIGEDPEREGLLNTPDRIARMYDELTAGYHVDTEKLINGALFNVDYDEMVIVKDIEFYSLCEHHMLPFFGRAHVAYIPDGKVIGLSKIPRIVEMFARRLQVQERMTKQIADFIKETIQPKGVAVVVEGVHMCSMMRGVKKAEASMITSAYLDQLKNNRDLRTEFIDHINSRRSMD

SEQ ID NO: 11938 - protein, 304 aa, unidentified
  source 1..304: note = Ornithinibacillus halophilus
  REGION 1..304: note = tr|A0A1M5CHE9|A0A1M5CHE9_9BACI GTP cyclohydrolase FolE2 OS=Ornithinibacillus halophilus OX=930117 GN=folE2; PE = 3 SV=1
MENIKIKSLPNKEERHRLFGSVPPGPKTKPTEKNKMSDLQNVEKDFLFDIDTVGIANVKHPIFVNSNLQPTHQTTVATFQFESSISKNNKGTNMSRFTEQLNQYHEQGFTADLSTLKSFTYELAQRLGKDDATISVAFPWFYERKGPQSNLVGMNHADISITVSYDAKKGYSVVASLSALITTLCPCSKEISEYSAHNQRGNVTMEVTFTDDFDDTSLDWKELLLEAAESNASARIHPVLKRPDEKIVTEQAYENPRFVEDMVRLVAADLYEMTFVRKFKVSCRNEESIHMHDAIASLTYDKEK

SEQ ID NO: 11939 - protein, 305 aa, Ornithinibacillus sp.
  REGION 1..305: note = tr|A0A3C1I174|A0A3C1I174_9BACI GTP cyclohydrolase FolE2 OS=Ornithinibacillus sp. OX=1898027 GN=folE2 PE=3; SV = 1
MNVKDNSQKILPNKIERLKLFGSVEPGPKHKPTEKDKMSDLQNLEKDFLFELDAVGITNVKYPVILKSKLKPYTQNSIGTFTFTSSIKQTSKGTNMSRFMEQLELYSKNGFIIELHTLKEFTKELAERLGQRDATVEINTTWFYERKGPSSQIAGLNHADINLIVSYHQDSGYKVSAGLSVFVTTLCPCSKEISEYSAHNQRGNVSIQVSLTEDFNEDEFDWKYALLEAAESNASSRLHPILKRPDEKMVTEGAYENPRFVEDMARLVAADLYELPYVKSFEVTCQNEESIHMHDAIATIRYTKE

SEQ ID NO: 11940 - protein, 212 aa, Ornithinicoccus hortensis
  REGION 1..212: note = tr|A0A542YVY5|A0A542YVY5_9MICO GTP cyclohydrolase 1; OS = Ornithinicoccus hortensis OX=82346 GN=folE PE=3 SV=1
MAGDRPDNGNGNGDAGEMPTVAPVDHARIAAAVREILIAVGEDPDRDGLRDTPARVARSYAELFSGLVQRPEQVLTTSFDVGHSEMILVRDIEMFSLCEHHLVPFHGVAHVGYIPGADGRVTGLSKLARLVDVFARRPQVQERLTSQIADAIEEHLGPQGALVVIEAEHLCMSMRGVRRPGARTITSAVRGQLRNPATRAEAMSLVMADRSR

SEQ ID NO: 11941 - protein, 206 aa, Ornithinicoccus hortensis
  REGION 1..206: note = tr|A0A542YRE5|A0A542YRE5_9MICO GTP cyclohydrolase 1; OS = Ornithinicoccus hortensis OX=82346 GN=folE PE=3 SV=1
MTTLETEFPDLRVMPSPDAEVGLEAATRAAQDFLEALGVDCETPGTLDSPRRMAKAYADLLSAPEFTMTTFPNDEGYQELVLVSDLPVTSVCEHHLLPFTGVAHIGYLPGARLLGLSKFARAVESFARRPQVQERLTSQLAHWLHEALAPRGVGVIVEASHSCMSLRGATVSGSTTRTTALTGAIHDHPATRAEFLAAVADRTRRI

SEQ ID NO: 11942 - protein, 213 aa, Ornithinimicrobium humiphilum
  REGION 1..213: note = tr|A0A543KKG8|A0A543KKG8_9MICO GTP cyclohydrolase 1; OS = Ornithinimicrobium humiphilum OX=125288 GN=folE PE=3; SV = 1
MSIPVSTDLVGPDEEDAPGAPATTQVDHARIEAAVREILAAIGEDPERDGLRDTPARVARAYAEVFSGLSQDPAEVLGTTFDVEHEEMILVRDIELHSTCEHHLVPFHGAAHIAYIPGADGRVVGLSKLARLVDVFARRPQVQERLTTQVAEALVEHLDPAGVLVVVEAEHLCMSMRGVRRPGARTITSAVRGQLRNPATRAEAMSLVMGRTS

SEQ ID NO: 11943 - protein, 206 aa, Ornithinimicrobium humiphilum
  REGION 1..206: note = tr|A0A543KJM6|A0A543KJM6_9MICO GTP cyclohydrolase 1; OS = Ornithinimicrobium humiphilum OX=125288 GN=folE PE=3; SV = 1
MNAVAAVEQATPLRPRIVAERPVVDLEAAEAAAADLLAALGLDLTQESLVDTPRRMARALHELMAPEGFELTSFANEEGYDELVLVRDIPVRSLCEHHMLPLVGVAHVGYLPDRRILGLSKLARMVDLHSRRPQTQERLTTAVADHLRRELAPAGVGVVVEAEHTCMTLRGARAPGARTLTSAVLGRLRDDPSSRAEFLSLARRLP

SEQ ID NO: 11944 - protein, 224 aa, Ornithinimicrobium pekingense
  REGION 1..224: note = tr|A0A285VQH5|A0A285VQH5_9MICO GTP cyclohydrolase 1; OS = Ornithinimicrobium pekingense OX=384677 GN=folE PE=3; SV = 1
MADVSIPAPSDEAAPDEGEAPAPDEGDAPGGPARVAVDHARIEAAVRELLVAVGEDPDRDGLLDTPARVARSYAEIFSGLGQDPGTVLGTTFDVDHDEMILVKDIEMFSVCEHHLVPFHGVAHVGYIPGRDGRVVGLSKLARLVDVFARRPQVQERLTTQIADALEAHLDPRGVIVVVEAEHLCMSMRGIRRPGARTITSTVRGQLRNPATRAEAITLMTRPTP

SEQ ID NO: 11945 - protein, 203 aa, Ornithinimicrobium sp.
  REGION 1..203: note = tr|A0A1U7MRA4|A0A1U7MRA4_9MICO GTP cyclohydrolase 1; OS = Ornithinimicrobium sp. CNJ-824 OX=1904966 GN=folE PE=3; SV = 1
MTDEADAPGGPVVQEVDHDRIAAAVREILLAVGEDPDRDGLRDTPARVARSYAEVFSGLRQDASEVLGTRFDVEHDEMIIVRDIALYSVCEHHLVPFHGVAHIGYVPGRDGRVVGLSKLARLVDVYARRPQVQERLTTQIAEALVDHLDPGGVMVVVEAEHLCMSMRGVRRPGARTTTSAVRGMLRDPATRAEAMSLMTGRST

SEQ ID NO: 11946 - protein, 197 aa, Ornithinimicrobium sp.
  REGION 1..197: note = tr|A0A516GEG9|A0A516GEG9_9MICO GTP cyclohydrolase 1; OS = Ornithinimicrobium sp. H23M54 OX=2594265 GN=folE PE=3; SV = 1
MSTVASTEVDHGRIEAAVREILIAVGEDPDREGLRDTPARVARSYAEIFAGLHQDPESAMSVTFDVAHDEMVLVKDIAMYSTCEHHLVPFHGVAHVGYIPGADGRVTGLSKLARLVEVFARRPQVQERLTTQIAEALKEHLQPRGVIVVIEAEHLCMSMRGVRKPGATTITSAVRGQLTDPATRAEAMSLILADRGR

SEQ ID NO: 11947 - protein, 228 aa, Ornithobacterium rhinotracheale
  REGION 1..228: note = tr|I3ZZQ0|I3ZZQ0_ORNRL GTP cyclohydrolase 1; OS = Ornithobacterium rhinotracheale (strain ATCC 51463 / DSM 15997 / CCUG 23171 / CIP 104009 / LMG 9086) OX=867902; GN = folEPE=3 SV=1
MAHNNLDELYEDMGDGHIPGNHETPLRDDAFALPDEQKIASIEENFHQIMQTLGLDMTDDSLKGTPRRVAKMFVKEIFGGLSPERKPKMSTFENKYQYNQMLVEKDIVVYSTCEHHFLPIVGRAHVAYISKGSVVGLSKINRIVDYYAKRPQVQERLTMQIVRAMQEALGTKDVACVIDAKHLCVNSRGIRDIESSTVTAELGGAFKTNPTTRAEFLKYIGMETRFNV

SEQ ID NO: 11948 - protein, 228 aa, Ornithobacterium rhinotracheale
  REGION 1..228: note = tr|A0A410JU53|A0A410JU53_9FLAO GTP cyclohydrolase 1; OS = Ornithobacterium rhinotracheale OX=28251 GN=folE PE=3; SV = 1
MTENNLDELYEDMGDGHIAGNHETPLRADAFAIPEEEKIASIEAHFHQIMQTLGLDMTDDSLKGTPRRVAKMFVKEIFGGLNPERKPKMSTFENKYQYNQMLVEKDIVVYSTCEHHFLPIVGRAHVAYISKGRVVGLSKINRIVDYYAKRPQVQERLTMQIVRAMQEALGTKDVACVIDAKHLCVNSRGIRDIESSTVTAELGGAFKTNPTTRAEFLKYIGMETRFNV

SEQ ID NO: 11949 - protein, 265 aa, unidentified
  source 1..265: note = Orrella dioscoreae
  REGION 1..265: note = tr|A0A1C3K7X9|A0A1C3K7X9_9BURK GTP cyclohydrolase FolE2 OS=Orrella dioscoreae OX=1851544 GN=folE2 PE=3 SV=1
MNSPVDSAIVMPDVQSSVDIRQIPIQRVGIRGVRHPMLVAGADGAQPTVANWTLTVALPAEEKGTHMSRFIALLEKYRRVPMTPALFATMAREMLPLLHAERGDITATFPYFIEKSAPVSGVRSLLDYEVQWTARAGAQGTEFELSVLVPVTSLCPCSKTISDYGAHNQRSHVTVVAVMQDENVDMDAMIRLVEDEASCELWGLLKRPDEKYVTERAYDNPKFVEDLVRDVAVRVKAQPGVLRFRVEAENFESIHNHSAYAVVEG

SEQ ID NO: 11950 - protein, 214 aa, Oryzihumus leptocrescens
  REGION 1..214: note = tr|A0A542ZED0|A0A542ZED0_9MICO GTP cyclohydrolase 1; OS = Oryzihumus leptocrescens OX=297536 GN=folE PE=3 SV=1
MTSAAPESSPARLLHTGNEAPRRLRVVHGRDGVDLPAAERAVADLLRALGKDPSTEHLTDTPRRVAESLTELITPREFDLTTFPNDEGYDELVLARDIPVQSLCEHHLLPFRGVAHVGYLPGPRLLGLSKLARVVELFARDLQVQERLTTQVAGWLQEHLAPKGVGVVIEAEHLCMSLRGVQATGSRTVTSAVHGLIREDARSRQEFFTLARGF

SEQ ID NO: 11951 - protein, 193 aa, Oryzihumus leptocrescens
  REGION 1..193: note = tr|A0A542ZEK5|A0A542ZEK5_9MICO GTP cyclohydrolase 1; OS = Oryzihumus leptocrescens OX=297536 GN=folE PE=3 SV=1
MSTPTHIDLERAERAVRELLVAIGENPDRDGLQATPGRVARAYAEMFAGMGQQPEDVLTTTFEIGHSELILVRDIEVYSTCEHHLVPFHGVAHVGYIPGKDGRVTGLSKLARLVDVFARRPQVQERLTTQVADALVDHLKPQGVIVVVECEHLCMSMRGVRRPGSRTITSAVRGQLRDPATRAEAMGLIGGHR

SEQ ID NO: 11952 - protein, 269 aa, unidentified
  source 1..269: note = Oryzomicrobium terrae
  REGION 1..269: note = tr|A0A5C1E5G3|A0A5C1E5G3_9RHOO GTP cyclohydrolase FolE2 OS=Oryzomicrobium terrae OX=1735038 GN=folE PE=3 SV=1
MNAPDKIFLPDIQSTPDTRQLAIQQVGVKGLRYPLLLRTPAGERATVAEFAMTVALPPEVKGTHMSRFVEILERPRAALAPADFLAVLGDTLVRLDARSGRIEARFPYFIEKRAPVSGVASLLDYDVAIVAEQLPDAAPRLTLEITAAATSLCPCSKKISAYGAHNQRSHLTLRAQLRPGQEDRLSIEALVRLAEEEASCEVFGLLKRPDEKWVTERAYDNPKFVEDLVRDIALRLMAEPAVAAWTVASENFESIHNHSAYAELHGVNA

SEQ ID NO: 11953 - protein, 268 aa, unidentified
  source 1..268: note = Oryzomicrobium terrae
  REGION 1..268: note = tr|A0A5C1E7S1|A0A5C1E7S1_9RHOO GTP cyclohydrolase FolE2 OS=Oryzomicrobium terrae OX=1735038 GN=folE PE=3 SV=1
MTSTPQHLAIPDVQSSADTRQLAINKVGIKSIRHPVQISDRSGDVQHTVATFNMYVGLPHNFKGTHMSRFVEILNSREREISVESFPAMLRDMVQRLEAETGHIEMNFPYFINKTAPVSGVQSLLDYDVTFIGDIRNGQVSFSLKVVVPVTSLCPCSKKISDYGAHNQRSHVTITAELDGHLWIEELVRLVEDEASCELYGLLKRPDEKFVTERAYDNPKFVEDMVRDVAARLNAEPRVVAYVAESENFESIHNHSAYALIERDKRQG

SEQ ID NO: 11954 - protein, 216 aa, Oscillatoria acuminata
  REGION 1..216: note = tr|K9TKM0|K9TKM0_9CYAN GTP cyclohydrolase 1; OS = Oscillatoria acuminata PCC 6304 OX=56110 GN=folE PE=3; SV = 1
MTLSIPANLTVSNSVPSSLDNGSQPPVSEAEMIQAVRTLLIGLGEDPDREGLVDTPKRMVKALKFLTQGYQQSVDELLNGAVFTEDVNEMVLVRDIDIFSSCEHHILPIIGRVHVAYIPNGKVIGLSKIARICEMYGRRLQVQERLTAQIADAIEGLLKPQGVAVVVEATHMCMVMRGVQKPGSWTVTSAMRGIFSEDARTRQEFMSLVRHNPQFH

SEQ ID NO: 11955 - protein, 241 aa, Oscillatoria acuminata
  REGION 1..241: note = tr|K9THY4|K9THY4_9CYAN GTP cyclohydrolase 1; OS = Oscillatoria acuminata PCC 6304 OX=56110 GN=folE PE=3; SV = 1
MTIAASHGSQLPETGNGMKSAQTSDKTPRIETRPDRNTLNGAQANIHQPPAESADQMMEAFREVLIGVGEDPEREGLLKTPKRAADAMRFLTSGYNQSLEELLNGAIFDEGHNEMVLVRDINFFSLCEHHMLPFMGRAHVAYIPNEKVVGLSKLARIVEMYSRRLQVQERLTRQVAEAIQSILEPKGVAVVMEATHMCMVMRGVQKPGSWTVTSAMVGQFQEEQKTREEFLNLIRHQPSFF

SEQ ID NO: 11956 - protein, 244 aa, unidentified
  source 1..244: note = Oscillatoria nigroviridis
  REGION 1..244: note = tr|K9VDE4|K9VDE4_9CYAN GTP cyclohydrolase 1; OS = Oscillatoria nigro-viridis PCC 7112 OX=179408 GN=folE; PE = 3 SV=1
MTIASSTDSNGSNSLSTDSMKLSETADNNTPRIPTRPDRNSSHGQESSVPIASEVGLEEMMEAVRTMLLGVGEDPEREGLLKTPKRVAEAMRFLTSGYSQSLEELLNGAIFDEGHNEMVLVRDISVFSMCEHHMLPFMGRVHIAYIPNQKVVGLSKLARIAEMYSRRLQVQERLTRQIAEAVQTILEPKGVAVVMEASHMCMTMRGVQKPGAWTVTSAMLGVFQEEQKTREEFLNLIRHQPTFF

SEQ ID NO: 11957 - protein, 216 aa, unidentified
  source 1..216: note = Oscillatoria nigroviridis
  REGION 1..216: note = tr|K9VQN6|K9VQN6_9CYAN GTP cyclohydrolase 1; OS = Oscillatoria nigro-viridis PCC 7112 OX=179408 GN=folE; PE = 3 SV=1
MTLSTRPELTSPNGIVSSITTQSQPAVSDEEMRQAVRTLLLGLGEDPDREGLRDTPKRVVKALQFITEGYRQSLDELLNGAVFTENANEMVLVRDIDIFSSCEHHILPIIGKAHVAYIPNGKVIGLSKIARICEMYGRRLQVQERLTAQIADALQGLLKPQGVAVVIEATHMCMVMRGVQKPGSWTATSAMRGVFTEDARTRQEFMSLIAHKSSFH

SEQ ID NO: 11958 - protein, 243 aa, unidentified
  source 1..243: note = [Oscillatoria] sp.
  REGION 1..243: note = tr|D8FVZ7|D8FVZ7_9CYAN GTP cyclohydrolase 1; OS = [Oscillatoria] sp. PCC 6506 OX=272129 GN=folE PE=3 SV=1
MTIAPPNAFNGSNSPSTNSAKLSETTSDVPRISTRPDRNSLNGQEPNLPVPSEVSSDEMMAAVRTMLLGVGEDPEREGLLKTPKRVAEAMKFLTSGYSQSLEELLNGAIFDEGHNEMVLVRDISVFSLCEHHMLPFMGKAHVAYIPNQKVVGLSKLARIVEMYARRLQVQERLTRQIAEAVQTILEPKGVAVVLEASHMCMVMRGVQKPGSWTVTSAMLGEFQDEQKTREEFLNLIRHQPAFF

SEQ ID NO: 11959 - protein, 216 aa, unidentified
  source 1..216: note = Oscillatoriales cyanobacterium
  REGION 1..216: note = tr|A0A1C0V2K5|A0A1C0V2K5_9CYAN GTP cyclohydrolase 1; OS = Oscillatoriales cyanobacterium USR001 OX=1880991; GN = folE PE=3 SV=1
MTAQIPVRNLSADQAIAAIPTQPQPRVSQSEMEQAVRTLLLGLGEDPDREGLRDTPKRVVKALKFLTSGYQQSLDELLNGAVFHEDANEMVLVRDIDLFSSCEHHILPILGRAHVAYIPNGKVIGLSKIARICEMYGRRLQVQERLTQQIADALQGLLQPQGVAVVVEATHMCMVMRGVQKPGSWTVTSSMQGVFADDARTRQEFMDLIRHSPSFH

SEQ ID NO: 11960 - protein, 229 aa, unidentified
  source 1..229: note = Oscillatoriales cyanobacterium
  REGION 1..229: note = tr|A0A1J5GWU3|A0A1J5GWU3_9CYAN GTP cyclohydrolase 1; OS = Oscillatoriales cyanobacterium CG2_30_40_61 OX=1805291; GN = folE PE=3 SV=1
MTISPNTNGVKNEDLNGFSIRPDRTLSYDQSTISQPSIEVSDEEMMGAVRTMLLGVGEDPEREGLLKTPKRVAEAMRFLTSGYNQSLEDLVNGAIFDEGHEEMVLVRDITFFSMCEHHMLPFMGRAHVAYIPNQKVIGLSKLARIVEMYSRRLQVQERLTRQIAESIQSVLEPQGVAVVMEATHMCMAMRGVQKPGSWTVTSAMVGVFQDEQKTREEFLNLIRHQPAFF

SEQ ID NO: 11961 - protein, 185 aa, Oscillibacter sp.
  REGION 1..185: note = tr|A0A3D1X2Q7|A0A3D1X2Q7_9FIRM GTP cyclohydrolase 1; OS = Oscillibacter sp. OX=1945593 GN=folE PE=3 SV=1
MDSEKIKEGVRLILSGIGEDINREGLLETPDRIARMYEELAGGYTDSAATHLQKRFHVDNNDMVLEKDIHFYSFCEHHMLPFYGTAAIAYIPNGEVVGLSKIARTVEVFAKRFQLQERLTAQIADAFMDELKPKGVMVLVQAEHMCMTMRGIKKQGAKTVTVVTRGVFDDDERLRTDFYRMLEHC

SEQ ID NO: 11962 - protein, 179 aa, unidentified
  source 1..179: note = Osedax symbiont
  REGION 1..179: note = tr|A0A1Y5HF65|A0A1Y5HF65_9BACT GTP cyclohydrolase 1; OS = 'Osedax' symbiont bacterium Rs2_46_30_T18 OX=1856298; GN = folE PE=3 SV=1
MEKAFAKIIDSIGEDLNRDGLRDTPARAAKAMSYLTRGYTQSLDQVVNNALFDSDNSEMVVVTNIEFYSLCEHHMLPFIGQAHVAYIPQGKVIGLSKIARIVDMFARRLQIQENMSKEIAEAIMQVTNAEGVGVVIEAEHMCMKMRGVEKQNSVMKTSMLLGSFRERAATRAEFFSLVS

SEQ ID NO: 11963 - protein, 179 aa, unidentified
  source 1..179: note = Osedax symbiont
  REGION 1..179: note = tr|S6HND3|S6HND3_9GAMM GTP cyclohydrolase 1; OS = Osedax symbiont Rs2 OX=1330035 GN=folE PE=3 SV=1
MEKAFAKIIDSIGEDLSRDGLRDTPARAAKAMSYLTRGYTQSLDEVVNNALFDSDNSEMVVVTNIEFYSLCEHHMLPFIGRAHVAYIPQGKVIGLSKIARIVDMFARRLQIQENMSKEIAEAIMQVTNAEGVGVVIEAEHMCMKMRGVEKQNSVMKTSMLLGSFRERAATRAEFFSLVS

SEQ ID NO: 11964 - protein, 179 aa, unidentified
  source 1..179: note = Osedax symbiont
  REGION 1..179: note = tr|S6HUW7|S6HUW7_9GAMM GTP cyclohydrolase 1; OS = Osedax symbiont Rs1 OX=1330036 GN=folE PE=3 SV=1
MEKAFAKIIEEIGEDLSREGLIDTPSRAAKAIKYLTQGYTQSLDEVVNNALFPSDNSEMVVVQNIEFYSLCEHHMLPFIGRAHVAYIPQGKVIGLSKIARIVDMFARRLQIQENMTKEIAEAIMQVTNAEGVGVVIEAEHMCMKMRGVEKQNSTMKTSMLLGSFRARPATRAEFFSLVS

SEQ ID NO: 11965 - protein, 218 aa, unidentified
  source 1..218: note = Otariodibacter oris
  REGION 1..218: note = tr|A0A420XJC8|A0A420XJC8_9PAST GTP cyclohydrolase 1; OS = Otariodibacter oris OX=1032623 GN=folE PE=3 SV=1
MNTISPEAQSVKEALLAKGIETPTIPHQKDKDHRRAEIQQHMRAVLELLGLDLRDDSLEETPHRLAKMYVDEIFSGLDYQTFPKITKIRNQMKVSEMVIVDDITLTSTCEHHFVTIDGSVAVAYYPKDWVIGLSKINRVVQFFAQRPQVQERFTEQILTAFQTILETEDVAVYVKATHFCVKCRGVKDTNSQTMTSAFGGVFLQDRETRKEFLSLINR

SEQ ID NO: 11966 - protein, 197 aa, Ottowia sp.
  REGION 1..197: note = tr|A0A5C7VHG8|A0A5C7VHG8_9BURK GTP cyclohydrolase 1; OS = Ottowia sp. OX=1898956 GN=folE PE=3 SV=1
MSDDSRNDVSRQQAEEAVRTLLRWAGEDPTREGLLDTPRRVAEAYGDWFSGYRDDPRAYLERTFEEVAGYDEMIVLRDIEYESHCEHHMAPIIGKVHVGYLPDGKVVGISKLARVVEVYARRFQVQEKMTAQIAQCIQHVLHPLGVGVVVEGAHECMTTRGIHKRGVSMVTSKMLGSFREDARTRAEFLRFIETGRR

SEQ ID NO: 11967 - protein, 234 aa, Owenweeksia hongkongensis
  REGION 1..234: note = tr|G8R360|G8R360_OWEHD GTP cyclohydrolase 1; OS = Owenweeksia hongkongensis (strain DSM 17368 / CIP 108786 / JCM 12287 / NRRL B-23963 / UST20020801) OX=926562; GN = folE P E=3 SV=1
MSTDKNNDHLVVSDDMMDDAGDAHISGRAETPMRADAFDKSEAEKIESIRQNFENIMNTLGLDLTDDSLKGTPLRVAKMFVKEIFGGLDPAREPKASVFDNKYKYGEMLVEKNIVVYSTCEHHFLPIVGRAHVAYISNGTVIGLSKMNRIVDYFAKRPQVQERMTKQIVQALQVALGTDDVACVIDAKHLCVNSRGIRDIESSTVTAEFGGKFQEDSVKRDFLDYINMKTTFDA

SEQ ID NO: 11968 - protein, 231 aa, Owenweeksia sp.
  REGION 1..231: note = tr|A0A1Z8LAH1|A0A1Z8LAH1_9FLAO GTP cyclohydrolase 1; OS = Owenweeksia sp. TMED14 OX=1986609 GN=folE PE=3 SV=1
MEEFSNHTECFDDGHDHRATSFDNPIKKDAFLKNDNEKIEIIEKHVQGILETLGMDLTDDSLKGTPRRVAKMFVTETFGGLNPSRKPDLNTFENSYKYGEMLVEKNIVVYSTCEHHLMPIIGRAHIAYLSKDRVIGLSKMNRIVDYYAKRPQVQERLTRQITNAMQEALRTLDVAVLIDAKHLCVNARGIRDIDSSTVTAEYGGEFQNDEGLKSSFLTYTQLNTDFENLNE

SEQ ID NO: 11969 - protein, 232 aa, Owenweeksia sp.
  REGION 1..232: note = tr|A0A2D8SLX7|A0A2D8SLX7_9FLAO GTP cyclohydrolase 1; OS = Owenweeksia sp. OX=2024847 GN=folE PE=3 SV=1
MEIKKNSKALEAIAEEQGDIHLSSGNTDTPMREGAFDRSDDEKIEIIRNHFEKILDTLGMDLTDDSLKGTPLRVAKMFVKEIFGGLNPERKPSTSTFENKYQYGEMLVEKNIVVYSTCEHHLLPIVGRAHVAYISNGTVIGLSKMNRIVDYYAKRPQVQERMTKQIVLALQEALGTKDVACVIDAKHLCVNSRGIRDIESSTVTAEFGGKFKEESAKRDFLDYINMKTTFDA

SEQ ID NO: 11970 - protein, 299 aa, Oxalobacter formigenes
  REGION 1..299: note = tr|C3X5X7|C3X5X7_OXAFO GTP cyclohydrolase FolE2; OS = Oxalobacter formigenes HOxBLS OX=556268 GN=folE2 PE=3; SV = 2
MNFRDSHSFECNWEDCSNIRTTITSSSATKMNSDLHSIPDVQSTLDTRHIAIQKVGVKGVRHPLRIQTKNGIQSSVGTWNMYVRLPDQKKGTHMSRFIALLEEFTGSDSAPLNIGVFGQLIRDMLKLLDAESGSIELSFPFFMTKAAPVSGVKSLMDYEVGFIGEMNKDHIEISQTVLVPVTSLCPCSKEISAYGAHNQRSHITVKAILKEDLPVEELITKIEAEASCELFGLLKRPDEKYVTEHAYDNPKFVEDLVRDVACMLNTDERIVAYTLEAENFESIHNHSAYACIEFDKRIR

SEQ ID NO: 11971 - protein, 270 aa, Oxalobacter formigenes
  REGION 1..270: note = tr|C3XC57|C3XC57_OXAFO GTP cyclohydrolase FolE2; OS = Oxalobacter formigenes OXCC13 OX=556269 GN=folE2 PE=3; SV = 1
MNADDNFSIPDVQNTLDTRHIAIQRVGVKGVRHPLQIQTRDGIQSSVGTWNMTVHLPEQKKGTHMSRFMALLEEFTSSDSKPLNVDVFGKLIRNMLELLDAESGRIELSFPFFITKTAPVSGVKSLMDYEVGLIGEMKNGQIEISQKVLVPVTSLCPCSKEISAYGAHNQRSHITVHAIIKDDLPIEDLISKIEAQASCELFGLLKRPDEKYVTEHAYDNPKFVEDLVRDVAGMLNADSRVLAYSLEAENFESIHNHSAYACIEFDKRKQ

SEQ ID NO: 11972 - protein, 282 aa, Oxalobacter sp.
  REGION 1..282: note = tr|A0A3A6P081|A0A3A6P081_9BURK GTP cyclohydrolase FolE2 OS=Oxalobacter sp. OX=2093374 GN=folE2 PE=3 SV=1
MQEAKRTGTIGAKKAKQVAKTMPDVQSSADTRHIAIQRVGVKDVRYPIRLKTPTGILSTVGNWTLAVQLSEHQKGTHMSRFIGLLEAMNGADSMAIDVAIFSRMVRKMLTLLEAESGRIDVTFPYFINKTAPVSGVQSLMDYEVGLSGEVKHGLLEVTQKVVVPVTSLCPCSKEIAAYGAHNQRSHITVHAVMAGHFPMEELIAKIEAQASCELYGLLKRPDEKFVTERAYDNPKFVEDLVRDVASMLNADDRIAAYKLEAENFESIHNHSAYALIEHDKRI

SEQ ID NO: 11973 - protein, 271 aa, unidentified
  source 1..271: note = Oxalobacteraceae bacterium
  REGION 1..271: note = tr|A0A3D6AJU0|A0A3D6AJU0_9BURK GTP cyclohydrolase FolE2 OS=Oxalobacteraceae bacterium OX=1871070 GN=folE2; PE = 3 SV=1
MNSRDPNLTSIPDVQSTVDTRRLAIQRVGVKGVRYPVTVKTSVGAQPTVGTWNMYVQLPEDQKGTHMSRFIALLEGNRAPLDIPHFSGLMRKMVKLLEAEAGRIELSFPYFINKTAPVSGVESLMDYEVGLTGEVRGDQVEVTLKVMVPVTSLCPCSKKISAYGAHNQRSHITVSALIAGDILVDQLIAKIEQQASCELFGLLKRPDEKYVTERAYDNPKFVEDLVRDVAGMLNADGRIAAYTLEAENFESIHNHSAYALIEHDKRKPGAA

SEQ ID NO: 11974 - protein, 188 aa, unidentified
  source 1..188: note = Oxalobacteraceae bacterium
  REGION 1..188: note = tr|A0A4Y9RIQ4|A0A4Y9RIQ4_9BURK GTP cyclohydrolase 1; OS = Oxalobacteraceae bacterium OM1 OX=2561929 GN=folE PE=3; SV = 1
MDKNFSEQDWRRLLAHLGEDPERQGLQDTPARVDKAWKHWTSGYDQNPADILKVFEDGAEHYSELIVVRGIPVYSHCEHHLAPFFGTATVGYTPNGKIVGLSKLTRLVDCFAKRLQVQERLTVQIANSLMEHLEPLSVGVVIRCRHMCMESRGIRTPGEETVTSALLGEMRTNLGLRTEFLALEREKS

SEQ ID NO: 11975 - protein, 368 aa, unidentified
  source 1..368: note = Pacificibacter marinus
  REGION 1..368: note = tr|A0A1Y5SQP9|A0A1Y5SQP9_9RHOB GTP cyclohydrolase FolE2 OS=Pacificibacter marinus OX=658057 GN=folE2 PE=3; SV = 1
MTMHQANVDTDAKRSDAKAALDVLRAWARTATPTEVAELDPAISRLLPEAQDLANYPALRRAYPEEFTVDEAYRDTLPDLQNGPESLIKGAKQHIQHVGISNFRLPIQFHTRDDGDLTLETSVTGTVSLEAEKKGINMSRIMRSYYKHAERTFSFEVIEAALDDYMSDLDSFDARIQMRFSFPMKVPSLRSGLLGYQYYDIALELVERAGVRTKIMHLDYVYSSTCPCSLELSEHARTTRQQLATPHSQRSVARISIEILQDQSCLWFEDLIDLCRAAVATETQVMVKREDEQAFAELNAANPIFVEDAARLFCEVLQNDVRIGDFRIIASHQESLHSHDAVSVLTEGDTFASDSLDPKLFSTLIHVG

SEQ ID NO: 11976 - protein, 368 aa, Pacificibacter maritimus
  REGION 1..368: note = tr|A0A3N4UU11|A0A3N4UU11_9RHOB GTP cyclohydrolase FolE2 OS=Pacificibacter maritimus OX=762213 GN=folE2 PE=3; SV = 1
MNIRETNMNKDDDHSEVRAALDLLRTWATHATPTEVAELDPAIARLLPQSQDLANYPALRRAYPEDFAVDQAYRDTLPDLQNGPESLIKGAKQHIQHVGISNFRLPIRFHTRDNGDLTLETSVTGTVSLEAEKKGINMSRIMRSYYKHAERTFSFDVIEAALDDYITDLESFDARIQMRFSFPMKVPSLRSGLEGYQYYDIALELVEQGGVRSKIMHLDYVYSSTCPCSLELSEHARATRQQLATPHSQRSVARISIEILPDQNILWFEDLIDLCRQAVSTETQVMVKREDEQAFAELNAANPIFVEDAARLFCQAMQSDGRIGDFRVIASHQESLHSHDAVSILTEGDTFAANSLDPKLFSTLIHVG

SEQ ID NO: 11977 - protein, 212 aa, unidentified
  source 1..212: note = Pacificimonas flava
  REGION 1..212: note = tr|M2SF87|M2SF87_9SPHN GTP cyclohydrolase 1; OS = Pacificimonas flava OX=1234595 GN=folE PE=3 SV=1
MTEDEQRASPDDGDLVRGEDRDANIPGEVLAAIRTLIEWTGDDPAREGLVDTPGRVARAWKEYCQGYDENPGSHLSRVFEEVGGYDEIVLLRDIPFQSHCEHHMAPIIGKAHIAYLPKSHVVGISKLARVLHGFARRLQVQERLTAEVADCIWEKLQPLGVAVVIEATHACMTARGVRTPGVTMTTSRMMGVFRDDERSRDEVLNLMGVGKG

SEQ ID NO: 11978 - protein, 209 aa, unidentified
  source 1..209: note = Pacificimonas flava
  REGION 1..209: note = tr|A0A219B3E5|A0A219B3E5_9SPHN GTP cyclohydrolase 1; OS = Pacificimonas flava OX=1234595 GN=folE PE=3 SV=1
MTDTPDPADGDLVSPPDRDAEIPDDVLAAVKTLIRWTGDDPAREGLVDTPGRVARAWKEYCQGYEEDPGTHLSRIFEEVGGYDEIVLLRDIPFQSHCEHHMAPIIGKAHIAYLPENYVVGISKLARVLHGFARRLQVQERLTAEVADCIWEKLQPRGVAVVIEASHACMTARGVRTPGVTMTTSRMMGVFRDDERSRKEVLTLMGVAKG

SEQ ID NO: 11979 - protein, 270 aa, Paenalcaligenes hominis
  REGION 1..270: note = tr|A0A1U9K267|A0A1U9K267_9BURK GTP cyclohydrolase FolE2 OS=Paenalcaligenes hominis OX=643674 GN=folE2 PE=3; SV = 1
MSTMTSPVETMPDVQSSVDTRHIPIQKVGVRDVTYPMLIDTGTEALPTVAEWELTVALPAEEKGTHMSRFLALLEQHRTQPMSMQGFCHMTAEMLELLNATEGDVTATFPYFINKVAPVSEVSSLLDYQVSWAANAVATVDNDVDVQFELTVLVPVTSLCPCSKAISKYGAHNQRSHVTVSVVAHPDQLNINQLIQAIEAQASCELWGLLKRTDEKYVTEQAYENPKFVEDLVRDVAVAIEQIEGIQGYRIEAENFESIHNHSAYAVVEG

SEQ ID NO: 11980 - protein, 211 aa, unidentified
  source 1..211: note = Paenarthrobacter aurescens
  REGION 1..211: note = tr|A1R155|A1R155_PAEAT GTP cyclohydrolase 1; OS = Paenarthrobacter aurescens (strain TC1) OX=290340; GN = folE PE=3 SV=1
MTHFDDDDDLAAAHGSAAGSKHDHKVDRPRIEAAVREILLAIGEDPERGGLLDTPKRVAKAYAEMFAGLHQHPVDVLSTTFDLDHEELVLVKDIPFYSTCEHHLVPFHGVAHVGYIPSHDGKVTGLSKLARLVDIYARRPQVQERLTTQIVEALVTHLNPRGAIVVVECEHMCMSMRGIRKPGAKTVTSAVRGQLHDPATRAEAMSLILGR

SEQ ID NO: 11981 - protein, 210 aa, unidentified
  source 1..210: note = Paenarthrobacter aurescens
  REGION 1..210: note = tr|A0A4Y3NJR1|A0A4Y3NJR1_PAEAU GTP cyclohydrolase 1; OS = Paenarthrobacter aurescens OX=43663 GN=folE PE=3 SV=1
MTHFDDDDLAAAHGSAAGSTHGHKVDRPRIEAAVREILLAIGEDPERGGLLDTPKRVAKAYAEVFAGLHQHPAEVLSTTFDLDHEELVLVKDIPFYSTCEHHLVPFHGVAHVGYIPSHDGKVTGLSKLARLVDIFARRPQVQERLTTQIVEALVKHLNPRGAIVVVECEHMCMSMRGIRKPGAKTVTSAVRGQLHDPATRAEAMSLILGR

SEQ ID NO: 11982 - protein, 210 aa, unidentified
  source 1..210: note = Paenarthrobacter nicotinovorans
  REGION 1..210: note = tr|A0A175J962|A0A175J962_PAENI GTP cyclohydrolase 1; OS = Paenarthrobacter nicotinovorans OX=29320 GN=folE PE=3; SV = 1
MTHFDDDDLAAAHGSATGSKAHSKVDRPRIEAAVREILLAIGEDPDRGGLQDTPKRVAKAYAEVFAGLHQHPADVLSTTFDLDHEELVLVKDIPFYSTCEHHLVPFHGVAHVGYIPSHDGKVTGLSKLARLVDIYARRPQVQERLTTQIVEALVKHLNPRGAIVVVECEHMCMSMRGIRKPGAKTVTSAVRGQLHDPATRAEAMSLIIGR

SEQ ID NO: 11983 - protein, 211 aa, unidentified
  source 1..211: note = Paenarthrobacter nitroguajacolicus
  REGION 1..211: note = tr|A0A558GN63|A0A558GN63_PAENT GTP cyclohydrolase 1; OS = Paenarthrobacter nitroguajacolicus OX=211146 GN=folE; PE = 3 SV=1
MTHFDDDDDLAAAHGSAAGSKHGHKVDRPRIEAAVREILLAIGEDPDRGGLQDTPKRVAKAYAEVFAGLHQHPADVLSTTFDLDHEELVLVKDIPFYSTCEHHLVPFHGVAHVGYIPSHDGKVTGLSKLARLVDIYARRPQVQERLTTQIVEALVKHLNPRGAIVVVECEHMCMSMRGIRKPGAKTVTSAVRGQLHDPATRAEAMSLILGR

SEQ ID NO: 11984 - protein, 210 aa, unidentified
  source 1..210: note = Paenarthrobacter ureafaciens
  REGION 1..210: note = tr|A0A444GVJ6|A0A444GVJ6_9MICC GTP cyclohydrolase 1; OS = Paenarthrobacter ureafaciens OX=37931 GN=folE PE=3 SV=1
MTHFDDEDLAAAHGPAGDSKGGHKVDRPRIEAAVREILLAIGEDPDRGGLKDTPKRVAKAYAEVFAGLHHDPVDVLSTTFDLDHEELVLVKDIPFYSTCEHHLVPFHGVAHVGYIPSHDGKVTGLSKLARLVDIYARRPQVQERLTTQIVEALVEHLNPRGAIVVVECEHMCMSMRGIRKPGAKTVTSAVRGQLHDPATRAEAMSLILGR

SEQ ID NO: 11985 - protein, 197 aa, unidentified
  source 1..197: note = Paenibacillaceae bacterium
  REGION 1..197: note = tr|A0A2A6E3A1|A0A2A6E3A1_9BACL GTP cyclohydrolase 1; OS = Paenibacillaceae bacterium JTherm OX=1906605 GN=folE; PE = 3 SV=1
MAEIREYRNEWVQANREQLEYHVREILRLIGEDVDREGLRDTPARVVRMFEEIFAGYSVDPREVLGTTFDERHEELVIVKDIVYYSQCEHHMAPFFGKIHIGYIPSGKVLGLSKFARLVDAVTRRLQVQERITSEIADILVETVRPRGVMVVVEGEHLCMCARGVKKPGSKTVTSAVRGEFGSNAALRAEFLSLLNR

SEQ ID NO: 11986 - protein, 197 aa, unidentified
  source 1..197: note = Paenibacillaceae bacterium
  REGION 1..197: note = tr|A0A1Y3Q9T1|A0A1Y3Q9T1_9BACL GTP cyclohydrolase 1; OS = Paenibacillaceae bacterium ZCTH02-B3 OX=1861638 GN=folE; PE = 3 SV=1
MSGIKEYRNGSIERHRGELELHIREILRLVGEDPEREGLRDTPSRVVNWYAEMLSGYGVDPRDVLGDTFDERHEELVIVKDIMYYSLCEHHLVPFFGKAHIGYIPSGKIAGLSKLARLVDAVTKRLQVQERLTSQIADTLEEVLKPHGVMVVVEGEHLCMCARGVKKYGSKTVTSAVRGQFLRSAAARSEFLSLIRE

SEQ ID NO: 11987 - protein, 197 aa, Paenibacillus agaridevorans
  REGION 1..197: note = tr|A0A2R5ETU5|A0A2R5ETU5_9BACL GTP cyclohydrolase 1; OS = Paenibacillus agaridevorans OX=171404 GN=folE PE=3 SV=1
MAGRKDYVNSKVASNREQIEHHVKEILKLIGEDVEREGLLETPARVTRMYEEIFAGYDVDPREVLGVSFDEQHEELVIVRDIVYYSLCEHHMAPFFGKAHIGYIPSGKIAGLSKLARLVDAITRKLQVQERVTTQIADILEQELSPHGVMVVVEGEHLCMCSRGVKKPGSKTVTSAVRGEFRTSSPLRSEFLALLKQ

SEQ ID NO: 11988 - protein, 197 aa, Paenibacillus algorifonticola
  REGION 1..197: note = tr|A0A1I2FBB8|A0A1I2FBB8_9BACL GTP cyclohydrolase 1; OS = Paenibacillus algorifonticola OX=684063 GN=folE PE=3; SV = 1
MAGKKDYVNSKVIQNREQIEFHVKEILKLVGENVEREGLLETPARVTRMYEEIFAGYEVDPSEVLGVTFDEQHEELVIVKDIIYYSQCEHHMAPFFGKAHIGYIPSGKIAGLSKLARLVEAITRRLQVQERITSQIADILEQELQPHGVMVVVEGEHLCMCSRGVKKPGSMTVTSAVRGEFRSNPALRSEFLALLKS

SEQ ID NO: 11989 - protein, 196 aa, Paenibacillus alvei
  REGION 1..196: note = tr|S9U4I4|S9U4I4_PAEAL GTP cyclohydrolase 1; OS = Paenibacillus alvei TS-15 OX=1117108 GN=folE PE=3 SV=1
MAGLKDYVNTQVGTNREKIEHHIKEILKLVGEDVEREGLLDTPARVTRMYEEIFAGYEVDPRDALGVAFDENHEELVIVKDITYYSQCEHHMAPFFGKVHIGYIPSGKIAGLSKFARLVEAISRRLQVQERITTEIADIMDEVLMPHGVMVVVEGEHLCMCARGVKKPGSKTVTMATRGSFRTDAAQRAEFLSLIK

SEQ ID NO: 11990 - protein, 197 aa, Paenibacillus alvei
  REGION 1..197: note = tr|K4Z9L3|K4Z9L3_PAEA2 GTP cyclohydrolase 1; OS = Paenibacillus alvei (strain ATCC 6344 / DSM 29 / NBRC 3343 / NCIMB 9371 / NCTC 6352) OX=1206781 GN=folE PE=3 SV=1
MAGLKDYVNTQVDANREQIEHHIKEILRLVGEDVEREGLLDTPARVTRMYEEIFAGYEVDPRDALGVAFDENHEELVIVKDITYYSQCEHHMAPFFGKVHIGYIPSGKIAGLSKFARLVEAISRRLQVQERITSEIADIMDEVLKPHGVMVVVEGEHLCMCARGVKKPGSKTVTMATRGSFRTDAAQRAEFLSLIKQ

SEQ ID NO: 11991 - protein, 197 aa, Paenibacillus amylolyticus
  REGION 1..197: note = tr|A0A124DYU0|A0A124DYU0_PAEAM GTP cyclohydrolase 1; OS = Paenibacillus amylolyticus OX=1451 GN=folE PE=3 SV=1
MAGVKDYMNSKVSDNREKIEYHVEQILKLIGEDSTREGLLETPARVTRMYEEIFGGYEVDPRDVLGVTFDENHEELVIVKDIVYYSQCEHHMAPFFGKVHIGYVPSGKIVGLSKMARLVEAVTRRLQVQERITSQIADILTEAVEPHGVMVVVEGEHLCMCSRGVKKPGSKTVTSAVRGSFRENPAQRAEFLSLVKD

SEQ ID NO: 11992 - protein, 197 aa, Paenibacillus amylolyticus
  REGION 1..197: note = tr|A0A1R1DF54|A0A1R1DF54_PAEAM GTP cyclohydrolase 1; OS = Paenibacillus amylolyticus OX=1451 GN=folE PE=3 SV=1
MAGVKDYLNSKVSDNREKIEYHVEQILKLIGEDSTREGLLETPARVTRMYEEIFGGYEVDPRDVLGVTFDENHEELVIVKDIVYYSQCEHHMAPFFGKVHIGYVPSGKIVGLSKMARLVEAVTRRLQVQERITSQIADILTEAVEPHGVMVVVEGEHLCMCSRGVKKPGSKTVTSAVRGSFRENPAQRAEFLSLVKD

SEQ ID NO: 11993 - protein, 197 aa, Paenibacillus anaericanus
  REGION 1..197: note = tr|A0A433XTY5|A0A433XTY5_9BACL GTP cyclohydrolase 1; OS = Paenibacillus anaericanus OX=170367 GN=folE PE=3 SV=1
MAGLKDYVNNKVGENRDQIEHHVREILKLIGEDIEREGLHETPARVTRMYEEIFGGYEIDPREVLGVTFEENHQELVIVKDIVYYSQCEHHMAPFFGKAHIGYIPSGRIAGLSKLARLVEVVTRRLQVQERITSQLADIMEEVLDPAGVMVVVEGEHLCMCARGVKKPGSKTITSAVRGSFRTDAASRAEFLSLIKD

SEQ ID NO: 11994 - protein, 198 aa, Paenibacillus antarcticus
  REGION 1..198: note = tr|A0A168NHS1|A0A168NHS1_9BACL GTP cyclohydrolase 1; OS = Paenibacillus antarcticus OX=253703 GN=folE PE=3 SV=1
MSGVKDYVNTDVGNNREKIEYHIEQILNLIGEDTKREGLLETPARVTRMYEEIYAGYEVDPRDVLGVTFDENHEELVIVKDIVYYSQCEHHMAPFFGKIHIGYIPSGKIAGLSKFARLVEAVTRRLQVQERITSQIADILNEVLEPNGVMVVVEGEHLCMCSRGVKKPGSKTVTSAVRGIFREDSASRAEFLSLLRDY

SEQ ID NO: 11995 - protein, 197 aa, unidentified
  source 1..197: note = Paenibacillus aquistagni
  REGION 1..197: note = tr|A0A1X7LDC0|A0A1X7LDC0_9BACL GTP cyclohydrolase 1; OS = Paenibacillus aquistagni OX=1852522 GN=folE PE=3 SV=1
MAGVKDYVNTSVSDNREKVEYHIRELLKLIGENVEREGLLDTPARVTRMYEEIFSGYSVDPREVLGVTFDEQHEELVIVKDIVYYSQCEHHMAPFFGKVHIGYVPSGQIVGLSKLARLVDAITRRLQVQERITTEIADILEEVLKPQGVIVVVEGEHLCMCARGVRKPGSKTVTTAARGVFKTDAAGRQEFMSLLKQ

SEQ ID NO: 11996 - protein, 196 aa, unidentified
  source 1..196: note = Paenibacillus baekrokdamisoli
  REGION 1..196: note = tr|A0A3G9JA23|A0A3G9JA23_9BACL GTP cyclohydrolase 1; OS = Paenibacillus baekrokdamisoli OX=1712516 GN=folE PE=3; SV = 1
MAGKKDYVNSIVSDNREQIEYHIKQILSLIGEDVDREGLQETPARVTRMYEEIFAGYDVDPRDVLGVTFDEQHEELVIVKDIVYYSQCEHHMAPFFGKVHIGYIPSGKIAGLSKFARLVEAISRRLQVQERITSQIANILEEVLQPHGVMVVVEGEHLCMCARGVKKPGSQTVTSAVRGEFRKSAALRSEFLSLIK

SEQ ID NO: 11997 - protein, 308 aa, Paenibacillus barcinonensis
  REGION 1..308: note = tr|A0A2V4V987|A0A2V4V987_PAEBA GTP cyclohydrolase FolE2 OS=Paenibacillus barcinonensis OX=198119 GN=folE2; PE = 3 SV=1
MNSRVRPDGYILPGKAERLRIFGSVDPVEGNKPVSKAEMKDLQNMKKDFLFELQQVGVDNVKYPLEVISAKEPEQLSSIGNFRLTTALDYESKGINMSRLMEQLERSRTRGLSDRIQDLITLTQQFAELMQQPKAELKVTYPWFYERTAPVTGLSGLNHSLAIVHVIWKAGETPIIRAGLEIQITTLCPCSKEISEYSAHNQRGTLRIQVQSNPCENLPSYWKEELLNAAESNASSCLHPILKRPDEKRVTERAYENPRFVEDMVRLTAADLYEKHWLSQFEVDCRNEESIHQHDAVTRIVYDKRTPQ

SEQ ID NO: 11998 - protein, 197 aa, Paenibacillus barcinonensis
  REGION 1..197: note = tr|A0A2V4V4P8|A0A2V4V4P8_PAEBA GTP cyclohydrolase 1; OS = Paenibacillus barcinonensis OX=198119 GN=folE PE=3 SV=1
MAGVKDYLNSKVSDNREKIEYHVEQILKLIGEDSTREGLLETPARVTRMYEEIFGGYEVDPRDVLGVTFDENHEELVIVKDIVYYSQCEHHMAPFFGKVHIGYVPSGKIVGLSKMARLVEAVTRRLQVQERITSQIADILTEAVEPHGVMVVVEGEHLCMCSRGVKKPGSKTVTSAVRGSFRDNPAQRAEFLSLIKE

SEQ ID NO: 11999 - protein, 197 aa, Paenibacillus barengoltzii
  REGION 1..197: note = tr|R9L7Q8|R9L7Q8_9BACL GTP cyclohydrolase 1; OS = Paenibacillus barengoltzii G22 OX=1235795 GN=folE PE=3; SV = 1
MSGLKDYVNTQVGDHREQIEYHVREILKLIGEDVEREGLIETPARVTRMYEEIFAGYEVDPRDVLGVTFEENHEELVIVKDIVYYSQCEHHMAPFFGKAHIGYIPSGRIAGLSKLARLVEAVTRRLQVQERITSQIADIMEEVLQPKGVMVVVEGEHLCMCSRGVKKPGSKTVTSAVRGSFRKDAASRAEFLSLIKE

SEQ ID NO: 12000 - protein, 197 aa, unidentified
  source 1..197: note = Paenibacillus beijingensis
  REGION 1..197: note = tr|A0A0D5NGZ9|A0A0D5NGZ9_9BACL GTP cyclohydrolase 1; OS = Paenibacillus beijingensis OX=1126833 GN=folE PE=3 SV=1
MAGAKDYVNSMVSRNREQIEYHIKEILKLIGEDVEREGLLETPARVTRMYEEIFAGYDVDPRDVLGVTFDERHEELVIVRDIVYYSQCEHHMAPFFGKAHIGYIPSGKIAGLSKLARLVEAVSRKLQVQERITTQIADILVETLQPHGVMVVVEGEHLCMCARGVKKPGSKTVTSAVRGEFRSSEALRSEFLSLLKQ

SEQ ID NO: 12001 - protein, 197 aa, Paenibacillus borealis
  REGION 1..197: note = tr|A0A089L7M5|A0A089L7M5_9BACL GTP cyclohydrolase 1; OS = Paenibacillus borealis OX=160799 GN=folE PE=3 SV=1
MGSIKEYMNGKVSVNREQIEYHVEKILELIGEDTSREGLLETPARVTRMYEEIFGGYSIDPREALGVTFDESHEELVIVKDIVYYSQCEHHMAPFFGKVHIGYVPSGRIAGLSKLARLVEAVSRRLQVQERITAQIADIMTEVLNPHGVMVVVEGEHLCMCARGVKKPGSKTVTMATRGTFREDAAARAEFLALIKE

SEQ ID NO: 12002 - protein, 197 aa, Paenibacillus borealis
  REGION 1..197: note = tr|A0A1R0YB77|A0A1R0YB77_9BACL GTP cyclohydrolase 1; OS = Paenibacillus borealis OX=160799 GN=folE PE=3 SV=1
MGGIKEYVNGKVSVNREQIEYHVEKILELIGEDTGREGLLETPARVTRMYEEIFGGYSIDPREALGVTFDESHEELVIVKDIVYYSQCEHHMAPFFGKVHIGYVPSGRIAGLSKLARLVEAVSRRLQVQERITTQIADIMTEVLNPHGVMVVVEGEHLCMCARGVKKPGSKTVTMATRGSFREEAAARAEFLALIKE

SEQ ID NO: 12003 - protein, 198 aa, unidentified
  source 1..198: note = Paenibacillus bovis
  REGION 1..198: note = tr|A0A172ZDR3|A0A172ZDR3_9BACL GTP cyclohydrolase 1; OS = Paenibacillus bovis OX=1616788 GN=folE PE=3 SV=1
MAGIKDYTNLKVAAHRDQIEYHIKEILNLIGEDTEREGLLETPARVTRMYEEIFAGYSVDPREALGVTFDENHQEMVIVKDIVYYSQCEHHMAPFFGKVHIGYVPSGKIAGLSKFARLVEAVTRRLQVQERITSQIADILDEVLKPTGVMVVVEGEHLCMCARGVKKPGSKTITSAVRGGFQNDAPLRAEFLSLIKDH

SEQ ID NO: 12004 - protein, 196 aa, unidentified
  source 1..196: note = Paenibacillus catalpae
  REGION 1..196: note = tr|A0A1I2D4L8|A0A1I2D4L8_9BACL GTP cyclohydrolase 1; OS = Paenibacillus catalpae OX=1045775 GN=folE PE=3 SV=1
MAGMKDYVNSAVSRNREQIEHHVKEILKLVGEDVEREGLLETPARVTRMYEEIFAGYEVDPREVLGVTFDEQHEELVIVKDIVYYSQCEHHMAPFFGKVHIGYIPSGKIAGLSKLARLVEAITRRLQVQERITTQIADIMQEVLKPQGVMVVVEGEHLCMCARGVKKPGSKTVTSAVRGVFSDSALRSEFLALLKQ

SEQ ID NO: 12005 - protein, 197 aa, Paenibacillus cellulosilyticus
  REGION 1..197: note = tr|A0A2V2YRT6|A0A2V2YRT6_9BACL GTP cyclohydrolase 1; OS = Paenibacillus cellulosilyticus OX=375489 GN=folE PE=3; SV = 1
MAGKKDYVNSMVSSNRDQIEYHVREILKLIGEDVEREGLLETPARVARMYEEIFAGYEVDPREVLGVTFDEQHEELVIVKDIVYYSQCEHHMAPFFGKVHIGYIPSGKIVGLSKLARLVEAVSRKLQVQERITSQIADILMEELKPHGVMVVVEGEHLCMCARGVKKTGSKTVTSAVRGQFHGNAAARAEFMALIRD

SEQ ID NO: 12006 - protein, 195 aa, Paenibacillus chitinolyticus
  REGION 1..195: note = tr|A0A410X3N2|A0A410X3N2_9BACL GTP cyclohydrolase 1; OS = Paenibacillus chitinolyticus OX=79263 GN=folE PE=3 SV=1
MPAKEYKNTKVADNREEIEGHIREILRLIGENPEREGLLDTPARVARMYEEIFAGYEADFHDVLGVTFDEQHEELVIIKDIVYYSQCEHHMAPFFGKIHVGYIPSGKIAGLSKFARLVEAITRKLQVQERITSQIANTLDEVLEPHGVMVVVEGEHLCMCSRGVKKPGSKTVTSAVRGSFRTDSALRAEFLSLIK

SEQ ID NO: 12007 - protein, 196 aa, Paenibacillus contaminans
  REGION 1..196: note = tr|A0A329LXY6|A0A329LXY6_9BACL GTP cyclohydrolase 1; OS = Paenibacillus contaminans OX=450362 GN=folE PE=3 SV=1
MPAKEYRNERVIANREKVEEHVREILRLIGEDVDREGLLETPARVTRMYEEIFSGYDADPREVLGVTFDEKHEELVIVKDIVYYSQCEHHMAPFFGKVHIGYIPSGKIAGLSKFARLVDAVTRKLQVQERITSEIADIMEDVLKPHGIMVVVEGEHMCMCSRGVKKSGSKTVTSAVRGIFRTDAASRSEFLSLVKE

SEQ ID NO: 12008 - protein, 196 aa, unidentified
  source 1..196: note = Paenibacillus crassostreae
  REGION 1..196: note = tr|A0A167AIC7|A0A167AIC7_9BACL GTP cyclohydrolase 1; OS = Paenibacillus crassostreae OX=1763538 GN=folE PE=3 SV=1
MAGVKDYSNTEVSKNREKIEYHIEQILNLVGEDAKREGLLETPARVTRMYEEIFAGYEVDPRDVLGVTFDENHEELVIVKDIVYYSQCEHHMAPFFGKIHIGYIPSGKIAGLSKFARLVEAITRRLQVQERITSQIADIINEVLQPNGVMVVVEGEHLCMCSRGVKKPGSKTVTSAVRGIFREDSASRAEFLSLVK

SEQ ID NO: 12009 - protein, 196 aa, Paenibacillus curdlanolyticus
  REGION 1..196: note = tr|E0I7E6|E0I7E6_9BACL GTP cyclohydrolase 1; OS = Paenibacillus curdlanolyticus YK9 OX=717606 GN=folE; PE = 3 SV=1
MASKEYRNIQAAENREQIEAHIRSILRLIGEDADREGLLETPARVARMYEEIFSGYVADYHEVLGVLFDENHEELVIVKDIDYFSQCEHHMVPFMGKVHIGYVPSGKVAGLSKFARLVEAVSKKLQLQERMTTEISGVIMDVLAPKGVMVVVTGQHLCMCGRGVKKSGAVTVTSATRGEFRHNYALRNEFMALIQS

SEQ ID NO: 12010 - protein, 197 aa, Paenibacillus curdlanolyticus
  REGION 1..197: note = tr|E0IB02|E0IB02_9BACL GTP cyclohydrolase 1; OS = Paenibacillus curdlanolyticus YK9 OX=717606 GN=folE; PE = 3 SV=1
MAGMKDYVNAAVGSNREQIEFHVKEILKLIGEDVEREGLLETPARVARMYEEIFAGYEVDPRDVLGVTFDEQHEELVIVKDIVFYSQCEHHMAPFFGKVHIGYIPSGKIAGLSKLARLVEAVTRKLQVQERITSQIADILAETLSPHGVMVVVEGEHLCMCARGVKKPGSKTITSAVRGQFHRNAAARAEFMALIRD

SEQ ID NO: 12011 - protein, 197 aa, unidentified
  source 1..197: note = Paenibacillus darwinianus
  REGION 1..197: note = tr|A0A015LTW8|A0A015LTW8_9BACL GTP cyclohydrolase 1; OS = Paenibacillus darwinianus OX=1380763 GN=folE PE=3 SV=1
MAGVKDYLNGKVSANREQIEYHVKEILKLIGENVEREGLLETPARVTRMYEEIFAGYDVDPREVLGVTFDEQHEELVIVRDIVYYSQCEHHMAPFFGKAHIGYIPSGKIAGLSKLARLVEAVTRKLQVQERITSQLADIMNDALHPNGVMVVVEGEHLCMCARGVKKSGSKTVTSAVRGEFVTNAALRSEFLSLLKQ

SEQ ID NO: 12012 - protein, 186 aa, unidentified
  source 1..186: note = Paenibacillus darwinianus
  REGION 1..186: note = tr|A0A015P8Z3|A0A015P8Z3_9BACL GTP cyclohydrolase 1; OS = Paenibacillus darwinianus OX=1380763 GN=folE PE=3 SV=1
MAGSDPLEMSIRTILEEIGENPNREGLLDTPKRVAKMYREVFANVGVDPATALTTTFEEEYDGIITVKDIAYYTFCEHHLIPFYGQAHIGYMPEGRIVGLSKFARLVELVSGRPQVQERMTQQIAAAVVDVLKPKGVIVTVEGTHLCMCARGVKKPGTSTVTTVKKGIFADNVALCEEFDRSISRK

SEQ ID NO: 12013 - protein, 197 aa, Paenibacillus dendritiformis
  REGION 1..197: note = tr|H3SKQ8|H3SKQ8_9BACL GTP cyclohydrolase 1; OS = Paenibacillus dendritiformis C454 OX=1131935 GN=folE; PE = 3 SV=1
MAGLKDYVNSKVGENREQIEHHVKEILRLIGEDVDREGLKETPARVTRMYEEIFGGYEVDPRDVLGVTFDEAHEELVIVKDITYYSLCEHHMAPFFGKVHIGYIPSGQVAGLSKLARLVEAVTRRLQVQERVTSEIADIMEEVLKPHGVMVVVEGEHLCMCSRGVKKPGSKTVTMSTRGSFKDDAAQRAEFLSLIKQ

SEQ ID NO: 12014 - protein, 197 aa, Paenibacillus dendritiformis; identical to SEQ ID NO: 12013
  REGION 1..197: note = tr|A0A2W4IXG8|A0A2W4IXG8_9BACL GTP cyclohydrolase 1; OS = Paenibacillus dendritiformis OX=130049 GN=folE PE=3 SV=1

SEQ ID NO: 12015 - protein, 197 aa, unidentified
  source 1..197: note = Paenibacillus donghaensis
  REGION 1..197: note = tr|A0A2Z2KRS0|A0A2Z2KRS0_9BACL GTP cyclohydrolase 1; OS = Paenibacillus donghaensis OX=414771 GN=folE PE=3 SV=1
MGGIKEYINGKVAGNREQIEYHVSKILELIGEDTRREGLLETPARVTRMYEEIFGGYSVDPREALGVTFDESHEELVIVKDIVYYSQCEHHMAPFFGKVHIGYIPSGRIAGLSKLARLVEAVSRRLQVQERITAQIADIMTEVLNPHGVIVVVEGEHLCMCARGVKKPGSKTVTMASRGSFREDAAARAEFLSLIKE

SEQ ID NO: 12016 - protein, 197 aa, Paenibacillus durus
  REGION 1..197: note = tr|A0A089HJ50|A0A089HJ50_PAEDU GTP cyclohydrolase 1; OS = Paenibacillus durus OX=44251 GN=folE PE=3 SV=1
MGGVKDYVNGSVSANREKIEYHVQKILELIGEDTGREGLLETPARVTRMYEEIFAGYSVDPREVLGVTFDESHEELVIVKDIVYYSQCEHHMAPFFGKVHIGYIPSGRIAGLSKLARLVEAVTRRLQVQERITSQIADIMTEVLDPNGVMVVVEGEHLCMCARGVKKPGSKTVTSAVRGIFRENPATRAEFLSLIKE

SEQ ID NO: 12017 - protein, 197 aa, Paenibacillus durus
  REGION 1..197: note = tr|A0A0F7FEP3|A0A0F7FEP3_PAEDU GTP cyclohydrolase 1; OS = Paenibacillus durus ATCC 35681 OX=1333534 GN=folE PE=3; SV = 1
MGGVKDYVNGSVSANREKIEYHVQKILELIGEDTGREGLLETPARVTRMYEEIFAGYSVDPREVLGVTFNESHEELVIVKDIVYYSQCEHHMAPFFGKVHIGYIPSGRIAGLSKLARLVEAVTRRLQVQERITTQIADIMTEVLNPNGVMVVVEGEHLCMCARGVKKPGSKTVTSAVRGIFRENPATRAEFLSLIKE

SEQ ID NO: 12018 - protein, 196 aa, Paenibacillus elgii
  REGION 1..196: note = tr|A0A163VD09|A0A163VD09_9BACL GTP cyclohydrolase 1; OS = Paenibacillus elgii OX=189691 GN=folE PE=3 SV=1
MPAKEYKNSRVADNREQVEHHIREILRLIGEDPDREGLLDTPARVTRMYEEIFAGYDADVKDILGVAFDEKHEELVIVKDIVYYSQCEHHMAPFFGKIHIGYIPSGKIAGLSKFARLVEAVTRRLQVQERITSEIADIIETELEPHGCMVVVEGEHLCMCARGVKKPGSKTVTSAVRGLFRTDAASRSEFLSLIKD

SEQ ID NO: 12019 - protein, 197 aa, unidentified
  source 1..197: note = Paenibacillus etheri
  REGION 1..197: note = tr|A0A0W1APZ2|A0A0W1APZ2_9BACL GTP cyclohydrolase 1; OS = Paenibacillus etheri OX=1306852 GN=folE PE=3 SV=1
MGNINEYVNGKVSENREQIEYHVEKILELIGEDTGREGLLETPARVTRMYEEIFGGYSIDPREALGVTFDESHEELVIVKDIVYYSQCEHHMAPFFGKVHIGYIPSGRIAGLSKLARLVEAVSRRLQVQERITTQIADIMTEVLSPHGVMVVVEGEHLCMCARGVKKPGSKTVTMATRGVFREDAAARAEFLNLIKE

SEQ ID NO: 12020 - protein, 197 aa, unidentified
  source 1..197: note = Paenibacillus faecis
  REGION 1..197: note = tr|A0A5D0CP74|A0A5D0CP74_9BACL GTP cyclohydrolase 1; OS = Paenibacillus faecis OX=862114 GN=folE PE=3 SV=1
MSGVKDYVNTRVESNREQIEHHVREILKLIGEDVEREGLLETPARVTRMYEEIFGGYEVDPRDVLGVTFDENHEELVIVKDIVYYSQCEHHMAPFFGKAHIGYIPSGKIAGLSKLARLVEAVTRRLQVQERITSQIADIIDEVLKPQGVMVVVEGEHLCMCARGVKKPGSKTVTSAVRGTFRSDAASRAEFLSLIKE

SEQ ID NO: 12021 - protein, 195 aa, unidentified
  source 1..195: note = Paenibacillus ferrarius
  REGION 1..195: note = tr|A0A1V4HNB7|A0A1V4HNB7_9BACL GTP cyclohydrolase 1; OS = Paenibacillus ferrarius OX=1469647 GN=folE PE=3 SV=1
MASIEYKNTRVSENRELIEQHVREILRLIGEDVDREGLLDTPARVTRMYEEIFSGYEANPRDVLGVTFDEQHEELVIIKDIIYYSQCEHHMAPFFGKVHVGYLPSGKVAGLSKFARLVDVITRKLQVQERITSEIADILDEVLKPHGVMVVVEGEHMCMCSRGVKKYGSQTITSAVRGSFRTDSTLRSEFLSLLK

SEQ ID NO: 12022 - protein, 197 aa, Paenibacillus ginsengarvi
  REGION 1..197: note = tr|A0A3B0BHE5|A0A3B0BHE5_9BACL GTP cyclohydrolase 1; OS = Paenibacillus ginsengarvi OX=400777 GN=folE PE=3 SV=1
MAGLKDYSNEHVGRNRDKIEEHIREILRLMGEDVEREGLIETPARVTRMYEEIFAGYSVDPREVLGVTFDERHEELVIIKDIVYYSQCEHHMAPFFGKIHVGYLPSGKIAGLSKFARLVEAVTRRLQVQERITSEIADILVEVLHPQGVMVIVEGEHLCMCSRGVKKPGSKTVTSAVRGRFTSDSALRAEFLSLVKE

SEQ ID NO: 12023 - protein, 197 aa, Paenibacillus glacialis
  REGION 1..197: note = tr|A0A162M810|A0A162M810_9BACL GTP cyclohydrolase 1; OS = Paenibacillus glacialis OX=494026 GN=folE PE=3 SV=1
MSGVKDYVNTGVGNNREKIEYHIEQILGLIGEDTKREGLLETPARVTRMYEEIFAGYEVDPRDVLGVTFDENHEELVIVKDIVYYSQCEHHMAPFFGKIHIGYIPSGKIAGLSKFARLVEAVTRRLQVQERITSQIADILNEVLQPNGVMVVVEGEHLCMCSRGVKKPGSKTVTSAVRGIFREDSASRAEFLSLVKD

SEQ ID NO: 12024 - protein, 197 aa, Paenibacillus glucanolyticus
  REGION 1..197: note = tr|A0A163K0U9|A0A163K0U9_9BACL GTP cyclohydrolase 1; OS = Paenibacillus glucanolyticus OX=59843 GN=folE PE=3 SV=1
MAGVKDYVNNKVGENREQIEYHVEQILKLIGEDTEREGLLETPARVTRMYEEIFAGYEVDPKDVLGVTFDENHEELVIVKDIVYYSQCEHHMAPFFGKVHIGYVPSGKIAGLSKLARLVEAVTRRLQVQERITSQIADIMVEALEPNGVMVVVEGEHLCMCARGVKKPGSKTVTSAVRGSFRSDSAQRSEFLSLIKE

SEQ ID NO: 12025 - protein, 197 aa, Paenibacillus graminis
  REGION 1..197: note = tr|A0A089NCW1|A0A089NCW1_9BACL GTP cyclohydrolase 1; OS = Paenibacillus graminis OX=189425 GN=folE PE=3 SV=1
MGGVKDYMNGKVAANRDQIEYHVEKILELIGEDTGREGLLETPARVTRMYEEIFGGYSIDPREALGVTFDESHEELVIVKDIVYYSQCEHHMAPFFGKVHIGYIPSGRIAGLSKLARLVEAVSRRLQVQERITAQIADIMTEVLNPHGVMVVVEGEHLCMCARGVKKPGSKTVTMATRGTFREDAAARAEFLALIKE

SEQ ID NO: 12026 - protein, 197 aa, unidentified
  source 1..197: note = Paenibacillus hemerocallicola
  REGION 1..197: note = tr|A0A5C4T9S6|A0A5C4T9S6_9BACL GTP cyclohydrolase 1; OS = Paenibacillus hemerocallicola OX=1172614 GN=folE PE=3; SV = 1
MAGVKDYRNDNVDRNRERIEEHVREILRLMGENVEREGLLETPARVTRMYEEIFAGYSVDPRDVMGVTFDENHQELVIIKDIVYYSQCEHHMAPFFGKIHIGYLPSGKIAGLSKFARLVEAVTRRLQVQERITSEIADILVEVLDPQGVMVVVDGEHMCMCSRGVKKPGSKTVTSAVRGRFTSDSALRAEFLSLVKD

SEQ ID NO: 12027 - protein, 197 aa, unidentified
  source 1..197: note = Paenibacillus herberti
  REGION 1..197: note = tr|A0A229NVY5|A0A229NVY5_9BACL GTP cyclohydrolase 1; OS = Paenibacillus herberti OX=1619309 GN=folE PE=3 SV=1
MAGLKDYSNSMVARNREQIEYHLREILKLVGEDVDREGLLDTPARVTRMYEEIFAGYEVNPADVLGVTFDENHEELVIVKDIVYYSQCEHHMAPFFGKIHIGYLPNGHILGLSKMARLVEAVTRKLQVQERITSQIADILEKALNPQGVMVVVEGEHLCMCSRGVKKPGSKTITSGVRGEFRSSSALRSEFLALLKQ

SEQ ID NO: 12028 - protein, 197 aa, unidentified
  source 1..197: note = Paenibacillus ihbetae
  REGION 1..197: note = tr|A0A1B2DZ47|A0A1B2DZ47_9BACL GTP cyclohydrolase 1; OS = Paenibacillus ihbetae OX=1870820 GN=folE PE=3 SV=1
MAGVKDYVNDKVVENREQIEYHIEQILKLIGEDPQREGLLETPARVTRMYEEIFAGYSVDPKDVLGVTFDEQHEELVIVKDIVYYSQCEHHMAPFFGKVHIGYVPSGKIAGLSKLARLVEAVTRRLQVQERITSQIANIIVEELQPSGVMVVVEGEHLCMCARGVKKPGSKTVTSAVRGTFQSDAAQRSEFLSLIKE

SEQ ID NO: 12029 - protein, 197 aa, Paenibacillus illinoisensis
  REGION 1..197: note = tr|A0A2W0D660|A0A2W0D660_9BACL GTP cyclohydrolase 1; OS = Paenibacillus illinoisensis OX=59845 GN=folE PE=3 SV=1
MAGVKDYLNSKVSDNREKIEYHVEQILKLIGEDSTREGLLETPARVTRMYEEIFGGYEVDPRDVLGVTFDENHEELVIVKDIVYYSQCEHHMAPFFGKVHIGYVPSGKIVGLSKMARLVEAVTRRLQVQERITSQIADILNEAVEPHGVMVVVEGEHLCMCSRGVKKPGSKTVTSAVRGSFRDNTAQRAEFLSLVKD

SEQ ID NO: 12030 - protein, 197 aa, Paenibacillus jilunlii
  REGION 1..197: note = tr|A0A1G9WU32|A0A1G9WU32_9BACL GTP cyclohydrolase 1; OS = Paenibacillus jilunlii OX=682956 GN=folE PE=3 SV=1
MGGVKDYMNGKVAANREQIEYHVEKILELIGEDPGREGLLETPARVTRMYEEIFGGYSVDPREALGVTFDESHEELVIVKDIVYYSQCEHHMAPFFGKVHIGYIPSGRIAGLSKLARLVEAVSRRLQVQERITAQIADIMTEVLNPHGVMVVVEGEHLCMCARGVKKPGSKTVTMATRGTFREDAAARAEFLALIKE

SEQ ID NO: 12031 - protein, 197 aa, Paenibacillus kribbensis
  REGION 1..197: note = tr|A0A222WSX9|A0A222WSX9_9BACL GTP cyclohydrolase 1; OS = Paenibacillus kribbensis OX=172713 GN=folE PE=3 SV=1
MAGVKDYINRKAADNRDKIEYHVEQILQLIGEDPKREGLLETPARVARMYEEIFAGYEVDPRDALGVTFDENHEELVIVKDIVYYSQCEHHMAPFFGKVHIGYVPSGKIVGLSKLARLVEAVTRRLQVQERITSQIADILNEAVSPHGVMVVVEGEHLCMCARGVKKPGSKTVTSAVRGSFRDDAAQRAEFLSLIKE

SEQ ID NO: 12032 - protein, 304 aa, Paenibacillus kribbensis
  REGION 1..304: note = tr|A0A222WNZ0|A0A222WNZ0_9BACL GTP cyclohydrolase FolE2 OS=Paenibacillus kribbensis OX=172713 GN=folE2 PE=3; SV = 1
MRENRVTSKLPSKAERHRLFGSVDPTPGDKPTLKEHMSDLQNEQRNYLFDIEQVGIARVKHPITVEAGLAPASQVSIGTFKLTTSLNREAKGINMSRLTEHLEEYRQQGGTTDLAQLIRFTKGLTARMNQERAELELSFPWFYERRSPMLGKTGLNHAEGLIRISYEEGRGSCVVVGLTVAVTTLCPCSKEISEYSAHNQRGVVTMEAHIDELDMEQDWKVMLLNAAESNASAPLHPILKRPDEKAVTEKAYENPRFVEDMVRLIAADLVELKAVRAFTVECRNEESIHLHDAIAKISYKKPRS

SEQ ID NO: 12033 - protein, 197 aa, Paenibacillus lactis; identical to SEQ ID NO: 12028
  REGION 1..197: note = tr|G4HPJ8|G4HPJ8_9BACL GTP cyclohydrolase 1; OS = Paenibacillus lactis 154 OX=743719 GN=folE PE=3 SV=1

SEQ ID NO: 12034 - protein, 196 aa, Paenibacillus larvae
  REGION 1..196: note = tr|V9W647|V9W647_9BACL GTP cyclohydrolase 1; OS = Paenibacillus larvae subsp. larvae DSM 25430 OX=697284; GN = folE PE=3 SV=1
MPAKEHRNGQVAENREQIEYHIREILRLIGEDVDREGLLDTPARVTRMYEEIFGGYEADYEEVLGVTFDENHEELVIVKDIVYYSQCEHHMAPFFGKVHIGYIPSGKIAGLSKFARLVEAVTRKLQVQERITSQIADIIEEVLKPQGIMVMVDGEHLCMCSRGVKKPGSKTVTSAVRGIFRTDAALRAEFLSLIKD

SEQ ID NO: 12035 - protein, 196 aa, Paenibacillus larvae; identical to SEQ ID NO: 12034
  REGION 1..196: note = tr|A0A2L1UII0|A0A2L1UII0_9BACL GTP cyclohydrolase 1; OS = Paenibacillus larvae subsp. larvae OX=147375 GN=folE; PE = 3 SV=1

SEQ ID NO: 12036 - protein, 197 aa, Paenibacillus lautus
  REGION 1..197: note = tr|A0A2A5LAS4|A0A2A5LAS4_PAELA GTP cyclohydrolase 1; OS = Paenibacillus lautus OX=1401 GN=folE PE=3 SV=1
MAGVKDYVNHKVGQNREQIEYHVEQILKLIGEDPKREGLLETPARVTRMYEEIFAGYEVDPKDVLGVTFDENHEELVIVKDIVYYSQCEHHMAPFFGKVHIGYVPSGKIAGLSKLARLVEAVTRRLQVQERITSQIADIMVEALQPNGVMVVVEGEHLCMCARGVKKPGSKTVTSAVRGTFQSDSAQRSEFLSLIKD

SEQ ID NO: 12037 - protein, 197 aa, Paenibacillus lautus
  REGION 1..197: note = tr|A0A385TS61|A0A385TS61_PAELA GTP cyclohydrolase 1; OS = Paenibacillus lautus OX=1401 GN=folE PE=3 SV=1
MAGVKDYVNHKVGQNREQIEYHVEQILKLIGEDPEREGLLETPARVTRMYEEIFAGYEVDPKDVLGVTFDENHEELVIVKDIVYYSQCEHHMAPFFGKVHIGYVPSGKIAGLSKLARLVEAVTRRLQVQERITSQIADIMVEALQPNGVMVVVEGEHLCMCARGVKKPGSKTVTSAVRGTFQSDSAQRSEFLSLIKD

SEQ ID NO: 12038 - protein, 197 aa, unidentified
  source 1..197: note = Paenibacillus lentus
  REGION 1..197: note = tr|A0A3Q8S3C0|A0A3Q8S3C0_9BACL GTP cyclohydrolase 1; OS = Paenibacillus lentus OX=1338368 GN=folE PE=3 SV=1
MAGVKDYVNTRVGANREKIEHHVREILKLIGEDVEREGLIDTPARVARMYEEIYGGYEVDPRDVLGVTFEENHEELVIVKDIVYYSQCEHHTAPFFGKVHIGYIPSGKIAGLSKLARLVEAITRRLQVQERITSQIADIMDEVLKPQGVMVVVEGEHLCMCARGVKKPGSKTVTSAVRGTFRKDAASRAEFLSLIKE

SEQ ID NO: 12039 - protein, 309 aa, Paenibacillus macerans
  REGION 1..309: note = tr|A0A090ZPH6|A0A090ZPH6_PAEMA GTP cyclohydrolase FolE2 OS=Paenibacillus macerans OX=44252 GN=folE2 PE=3 SV=1
MQPIKNQKILPAKPERHRRFGSTAPIPGNKPTVKEQMADLQNRREDYLFPIDRVGICRVQHPILVCSEMEPGTQTSVATITLTTSLPRESKGINMSRLTEQLERYRQKGWTSELPDLCDFVRDLAERMGQDKAEITMTFPWFYERTAPVTENAGLNHAEASIKTAYEKGKPFTAEVSLRAAVTTLCPCSKEISEYSAHNQRGMVTMTVEIDPASPPVRDWKAMLLEAAESNASSALHPVLKRPDEKRVTEQAYENPRFVEDMVRLVAADLYEMEAVQAFTVECRNEESIHMHDAYAVITYDKRNEALTH

SEQ ID NO: 12040 - protein, 197 aa, Paenibacillus macerans
  REGION 1..197: note = tr|A0A090ZR09|A0A090ZR09_PAEMA GTP cyclohydrolase 1; OS = Paenibacillus macerans OX=44252 GN=folE PE=3 SV=1
MAGLKDYVNKQVGENHEKIEHHVREILKLIGENVEREGLLDTPARVARMYEEIFAGYEVDPRDVLGVTFEENHEELVIVKDIVYYSQCEHHMAPFFGKVHIGYIPSGRIAGLSKLARLVEAVTRRLQVQERITSQIADIMEEVLNPQGVMVVVEGEHLCMCARGVKKPGSKTVTSAVRGSFRKDAASRAEFLSLIKE

SEQ ID NO: 12041 - protein, 198 aa, Paenibacillus macquariensis
  REGION 1..198: note = tr|A0A168G8B1|A0A168G8B1_9BACL GTP cyclohydrolase 1; OS = Paenibacillus macquariensis subsp. defensor OX=467974; GN = folE PE=3 SV=1
MSGVKDYVNTEVGNNREKIEYHIEQILNLIGEDTKREGLLETPARVTRMYEEIFAGYEVDPRDVLGVTFDENHEELVIVKDIVYYSQCEHHMAPFFGKIHIGYIPSGKIAGLSKFARLVEAVTRRLQVQERITSQIADILNEVLQPNGVMVVVEGEHLCMCSRGVKKPGSKTVTSAVRGIFREDSASRAEFLSLLRDY

SEQ ID NO: 12042 - protein, 198 aa, Paenibacillus macquariensis; identical to SEQ ID NO: 12041
  REGION 1..198: note = tr|A0A167WMI6|A0A167WMI6_PAEMC GTP cyclohydrolase 1; OS = Paenibacillus macquariensis OX=1468 GN=folE PE=3 SV=1

SEQ ID NO: 12043 - protein, 197 aa, unidentified
  source 1..197: note = Paenibacillus montanisoli
  REGION 1..197: note = tr|A0A328TVA6|A0A328TVA6_9BACL GTP cyclohydrolase 1; OS = Paenibacillus montanisoli OX=2081970 GN=folE PE=3 SV=1
MAGKKDYVNSAVSTNREKIEHHIREILALIGENVEREGLLETPARVTRMYEEIFAGYEVDPREVLGVTFDEQHEELVIVRDIVYYSQCEHHMAPFFGKAHIGYIPSGKIAGLSKLARLVEAVTRRLQVQERITSQIADIMDEVLQPHGVMVVVEGEHLCMCARGVKKPGSKTVTSAVRGDFRTSAALRSEFLSLLKQ

SEQ ID NO: 12044 - protein, 196 aa, Paenibacillus mucilaginosus
  REGION 1..196: note = tr|F8FQ24|F8FQ24_PAEMK GTP cyclohydrolase 1; OS = Paenibacillus mucilaginosus (strain KNP414) OX=1036673; GN = folE PE=3 SV=1
MPAKEYRNNRVIENREQIEHHVREILRLIGEDVDREGLHDTPARVTRMYEEIFAGYEADVKDILGVAFDEKHEELVIVKDIVYYSQCEHHMAPFFGRIHIGYIPSGKIAGLSKFARLVEAVTRRLQVQERITSELADIIEGELEPHGCMVVVEGEHLCMCARGVKKPGSKTISSAVRGVFRTDASSRAEFLSLIKD

SEQ ID NO: 12045 - protein, 196 aa, Paenibacillus mucilaginosus; identical to SEQ ID NO: 12044
  REGION 1..196: note = tr|H6NSN3|H6NSN3_9BACL GTP cyclohydrolase 1; OS = Paenibacillus mucilaginosus 3016 OX=1116391 GN=folE; PE = 3 SV=1

SEQ ID NO: 12046 - protein, 197 aa, Paenibacillus nanensis
  REGION 1..197: note = tr|A0A3A1VPI1|A0A3A1VPI1_9BACL GTP cyclohydrolase 1; OS = Paenibacillus nanensis OX=393251 GN=folE PE=3 SV=1
MAGLKDYVNSKVTNNREKIEYHIKEILKLIGEDVEREGLLETPARVTRMYEEIFAGYEVDPKDVLGVSFDEQHEELVIVRDIVYYSQCEHHMAPFFGKAHIGYIPSGKIAGLSKLARLVEAVTRRLQVQERITSQIANIIESELSPHGVMVVVEGEHLCMCARGVKKPGSKTVTSAVRGEFRTSEALRSEFLALLKQ

SEQ ID NO: 12047 - protein, 196 aa, Paenibacillus naphthalenovorans
  REGION 1..196: note = tr|A0A480BK75|A0A480BK75_9BACL GTP cyclohydrolase 1; OS = Paenibacillus naphthalenovorans OX=162209 GN=folE PE=3; SV = 1
MPAKEYKNRLVAENREQIEEHIRQILRLIGEDVDREGLLDTPARVTRMYEEIFAGYEADFREILGVAFDEKHEELVIVKDIVYYSQCEHHMAPFFGKIHIGYIPSGKIAGLSKFARLVEAVTRRLQVQERITSEIADIIEEVLEPHGCMVVVEGEHLCMCARGVKKPGSKTVTSAVRGLFRNDAAARAEFLALVKE

SEQ ID NO: 12048 - protein, 196 aa, Paenibacillus naphthalenovorans
  REGION 1..196: note = tr|A0A0U2INA0|A0A0U2INA0_9BACL GTP cyclohydrolase 1; OS = Paenibacillus naphthalenovorans OX=162209 GN=folE PE=3; SV = 1
MPAKEYKNRLVAENREQIEEHIRQILRLIGEDVDREGLLDTPARVTRMYEEIFAGYEADFREILGVAFDEKHEELVIVKDIVYYSQCEHHMAPFFGKIHIGYIPSGKIAGLSKFARLVEAVTRRLQVQERITSEIADIIEEVLEPHGCMVVVEGEHLCMCARGVKKPGSKTVTSAVRGLFRKDAAARAEFLALVKE

SEQ ID NO: 12049 - protein, 197 aa, unidentified
  source 1..197: note = Paenibacillus nuruki
  REGION 1..197: note = tr|A0A1E3KZX1|A0A1E3KZX1_9BACL GTP cyclohydrolase 1; OS = Paenibacillus nuruki OX=1886670 GN=gch1 PE=3 SV=1
MAGIKDYTNLDVGENRAQIEDHIRQILKLIGEDTEREGLLDTPARVTRMYEEIFAGYSVDPREALGVTFNENHEEMVIVKDIVYYSQCEHHMAPFFGKVHIGYVPSGKIAGLSKFARLVEAVSRRLQVQERITSQIADILVEVLDPTGVMVVVEGEHLCMCARGVKKPGSKTITSAVRGGFRTDAPLRAEFLALIKD

SEQ ID NO: 12050 - protein, 197 aa, Paenibacillus odorifer
  REGION 1..197: note = tr|A0A1R0ZBW6|A0A1R0ZBW6_9BACL GTP cyclohydrolase 1; OS = Paenibacillus odorifer OX=189426 GN=folE PE=3 SV=1
MGNINEYVNGKVSENREQIEYHVEKILELIGEDTGREGLLETPARVTRMYEEIFGGYSIDPREALGVTFDESHEELVIVKDIVYYSQCEHHMAPFFGKVHIGYIPSGRIAGLSKLARLVEAVSRRLQVQERITTQIADIMTEVLSPHGVMVVVEGEHLCMCARGVKKPGSKTVTMSTRGVFREDAAARAEFLNLIKE

SEQ ID NO: 12051 - protein, 197 aa, Paenibacillus odorifer
  REGION 1..197: note = tr|A0A1R0WVP4|A0A1R0WVP4_9BACL GTP cyclohydrolase 1; OS = Paenibacillus odorifer OX=189426 GN=folE PE=3 SV=1
MGNIKEYVNGKVAENREQIEYHVEKILELIGEDTGREGLLETPARVTRMYEEIFGGYSIDPREALGVTFDESHEELVIVKDIVYYSQCEHHMAPFFGKVHIGYIPSGRIAGLSKLARLVEAVSRRLQVQERITAQIADIMTEVLGPHGVMVVVEGEHLCMCARGVKKPGSKTVTMATRGVFREDAAARAEFLSLIKE

SEQ ID NO: 12052 - protein, 197 aa, unidentified
  source 1..197: note = Paenibacillus oryzae
  REGION 1..197: note = tr|A0A1A5YJ10|A0A1A5YJ10_9BACL GTP cyclohydrolase 1; OS = Paenibacillus oryzae OX=1844972 GN=folE PE=3 SV=1
MAGAKDYLNSNVADNREQIQYHVKEILKLIGEDVEREGLLETPARVTRMYEEIFAGYSVDPRDVLGVTFDEQHEELVIVRDIVYYSQCEHHMAPFFGKAHIGYIPSGKIAGLSKLARLVEAITRRLQVQERITSQIADILEQELKPHGVMVVVEGEHLCMCARGVKKPGSKTVTSAVRGEFRTSAALRSEFLALLKQ

SEQ ID NO: 12053 - protein, 195 aa, unidentified
  source 1..195: note = Paenibacillus oryzisoli
  REGION 1..195: note = tr|A0A198A8Q9|A0A198A8Q9_9BACL GTP cyclohydrolase 1; OS = Paenibacillus oryzisoli OX=1850517 GN=folE PE=3 SV=1
MASIDYKNGLVAENREQIESHVREILRLIGEDVDREGLLDTPARVTRMYEEIFAGYAADPREVLGVTFDEQHEELVIIKDIVYYSQCEHHMAPFFGKVHVGYLPSGKVAGLSKFARLVDVVTRKLQVQERITSEIADILFDVLKPHGVMVVVEGEHMCMCARGVKKYGSQTVTSAVRGSFRKDATLRSEFLSLLK

SEQ ID NO: 12054 - protein, 197 aa, Paenibacillus pabuli
  REGION 1..197: note = tr|A0A327P8Z9|A0A327P8Z9_9BACL GTP cyclohydrolase 1; OS = Paenibacillus pabuli OX=1472 GN=folE PE=3 SV=1
MAGVKDYLNSKVSDNREKIEYHIEQILQLIGEDSTREGLLETPARVTRMYEEIFGGYEVDPRDVLGVTFDENHEELVIVKDIVYYSQCEHHMAPFFGKVHIGYVPSGKIVGLSKMARLVEAVTRRLQVQERITSQIADILTEAVEPNGVMVVVEGEHLCMCSRGVKKPGSKTVTSAVRGSFRENPAQRAEFLSLIKD

SEQ ID NO: 12055 - protein, 197 aa, unidentified
  source 1..197: note = Paenibacillus paeoniae
  REGION 1..197: note = tr|A0A371PG13|A0A371PG13_9BACL GTP cyclohydrolase 1; OS = Paenibacillus paeoniae OX=2292705 GN=folE PE=3 SV=1
MAGRKDYVNSKVSDNREQIEFHVKEILKLIGEDVEREGLLDTPARVTRMYEEIFAGYEVDPREVLGVTFDEQHEELVIVRDIVYYSQCEHHMAPFYGKAHIGYLPSGKIAGLSKLARLVEAVTRKLQVQERITSQIADILDEELAPHGVMVVVEGEHLCMCARGVKKPGSKTVTSAVRGEFRSSSALRSEFLALLKQ

SEQ ID NO: 12056 - protein, 197 aa, Paenibacillus pasadenensis
  REGION 1..197: note = tr|A0A2N5NBQ2|A0A2N5NBQ2_9BACL GTP cyclohydrolase 1; OS = Paenibacillus pasadenensis OX=217090 GN=folE PE=3 SV=1
MAGLKDYSNSMVARNRDQIEYHLREILKLVGEDVEREGLLDTPARVTRMYEEIFAGYEVNPADVLGVTFDENHEELVIVKDIVYYSQCEHHMAPFFGKIHIGYLPNGHILGLSKMARLVEAVTRKLQVQERITSQLADILDEALSPQGVMVVVEGEHLCMCSRGVKKPGSKTITSGVRGEFRSNSALRAEFLSLLKQ

SEQ ID NO: 12057 - protein, 196 aa, Paenibacillus pectinilyticus
  REGION 1..196: note = tr|A0A1C1A657|A0A1C1A657_9BACL GTP cyclohydrolase 1; OS = Paenibacillus pectinilyticus OX=512399 GN=folE PE=3 SV=1
MASIDYKNALVAENREKIEGHVREILRLIGEDVDREGLLDTPARVTRMYEEIFSGYAADPRDVIGVTFDEQHEELVIIKDIVYYSQCEHHMAPFYGKVHVGYLPSGKVAGLSKFARLVDVITRKLQVQERITSEIADILDEVLKPHGVMVVVEGEHMCMCARGVKKYGSQTVTSAVRGSFRKDATLRSEFLSLIKS

SEQ ID NO: 12058 - protein, 197 aa, Paenibacillus peoriae
  REGION 1..197: note = tr|A0A0K2F4H9|A0A0K2F4H9_9BACL GTP cyclohydrolase 1; OS = Paenibacillus peoriae OX=59893 GN=folE PE=3 SV=1
MAGVKDYINRKAADNRDKIEYHVEQILQLIGEDPKREGLLETPARVARMYEEIFAGYEVDPRDALGVTFDENHEELVIVKDIVYYSQCEHHMAPFFGKVHIGYVPSGKIVGLSKLARLVEAVTRRLQVQERITSQIADILNEAVSAHGVMVVVEGEHLCMCARGVKKPGSKTVTSAVRGTFRDDAAQRAEFLSLLKD

SEQ ID NO: 12059 - protein, 197 aa, Paenibacillus peoriae
  REGION 1..197: note = tr|A0A2S6NT84|A0A2S6NT84_9BACL GTP cyclohydrolase 1; OS = Paenibacillus peoriae OX=59893 GN=folE PE=3 SV=1
MAGVKDYINRKAADNRDKIEYHVEQILQLIGEDPKREGLLETPARVARMYEEVFAGYEVDPRDALGVTFDENHEELVIVKDIVYYSQCEHHMAPFFGKVHIGYVPSGKIVGLSKLARLVEAVTRRLQVQERITSQIADILNEAVSAHGVMVVVEGEHLCMCARGVKKPGSKTVTSAVRGTFRDDAAQRAEFLSLLKD

SEQ ID NO: 12060 - protein, 197 aa, Paenibacillus pini
  REGION 1..197: note = tr|W7YQ53|W7YQ53_9BACL GTP cyclohydrolase 1; OS = Paenibacillus pini JCM 16418 OX=1236976 GN=folE PE=3; SV = 1
MAGVKDYVNTEVGNNREQIEHHVAQILRLIGEDTEREGLLETPARVTRMYEEIFAGYEVDPREALGVTFDENHEELVIVKDIVYYSQCEHHMAPFFGKVHIGYIPSGKIAGLSKFARLVEAVTRKLQVQERITSQIADIMVEVLNPHGVMVVVEGEHLCMCARGVKKPGSKTVTSGVRGIFREDSASRAEFLSLIKS

SEQ ID NO: 12061 - protein, 197 aa, unidentified
  source 1..197: note = Paenibacillus pinisoli
  REGION 1..197: note = tr|A0A3A6PDN9|A0A3A6PDN9_9BACL GTP cyclohydrolase 1; OS = Paenibacillus pinisoli OX=1276110 GN=folE PE=3 SV=1
MAGKKDYVNSKVSDNREQIEFHVKEILKLIGEDVEREGLLETPARVTRMYEEIFAGYDVDPREVLGVTFDEQHEELVIVRDIVYYSQCEHHMAPFFGKAHIGYLPSGKIAGLSKLARLVEAVTRKLQVQERITSQIADILDEELSPHGVMVVVEGEHLCMCARGVKKPGSKTVTSAVRGEFRTSSALRSEFLALLKQ

SEQ ID NO: 12062 - protein, 197 aa, Paenibacillus polymyxa
  REGION 1..197: note = tr|A0A5B8JYS6|A0A5B8JYS6_PAEPO GTP cyclohydrolase 1; OS = Paenibacillus polymyxa OX=1406 GN=folE PE=3 SV=1
MAGVKDYINRKAADNRDKIEYHVEQILKLIGEDPKREGLLETPARVARMYEEIFAGYEVDPRDALGVTFDENHEELVIVKDIVYYSQCEHHMAPFFGKVHIGYVPSGKIVGLSKLARLVEAVTRRLQVQERITSQIADILNEAVSPHGVMVVVEGEHLCMCARGVKKPGSKTVTSAVRGTFRGDAAQRAEFLSLIKE

SEQ ID NO: 12063 - protein, 197 aa, Paenibacillus polymyxa; identical to SEQ ID NO: 12058
  REGION 1..197: note = tr|A0A074M1D4|A0A074M1D4_PAEPO GTP cyclohydrolase 1; OS = Paenibacillus polymyxa OX=1406 GN=folE PE=3 SV=1

SEQ ID NO: 12064 - protein, 197 aa, unidentified
  source 1..197: note = Paenibacillus polysaccharolyticus
  REGION 1..197: note = tr|A0A1G5LF07|A0A1G5LF07_9BACL GTP cyclohydrolase 1; OS = Paenibacillus polysaccharolyticus OX=582692 GN=folE; PE = 3 SV=1
MAGVKDYLNSKVSDNREKIEYHVEQILKLIGEDSTREGLLETPARVTRMYEEIFGGYEVDPRDVLGVTFDENHEELVIVKDIVYYSQCEHHMAPFFGKVHIGYIPSGKIVGLSKMARLVEAVTRRLQVQERITSQIADILTEAVAPHGVMVVVEGEHLCMCSRGVKKPGSKTVTSAVRGSFRDNPAQRAEFLSLVKE

SEQ ID NO: 12065 - protein, 197 aa, Paenibacillus popilliae
  REGION 1..197: note = tr|M9LP60|M9LP60_PAEPP GTP cyclohydrolase 1; OS = Paenibacillus popilliae ATCC 14706 OX=1212764 GN=folE; PE = 3 SV=1
MAGLRDYANSKVGENRELIEHHVKEILRLLGEDVDREGLRETPARVTRMYEEILGGYEVDPRDVLGVTFDEAYEELVIVKDITYYSLCEHHMAPFFGKVHIGYTPSGQVAGLSKLAQLVEAVTRRLQVQERVTSEIADIMEEVLKPHGVMVVVEGEHLCMCSRGVKKPGSKTVTMSTRGSFKDGAAQRAEFLSLIKQ

SEQ ID NO: 12066 - protein, 197 aa, Paenibacillus prosopidis
  REGION 1..197: note = tr|A0A368W772|A0A368W772_9BACL GTP cyclohydrolase 1; OS = Paenibacillus prosopidis OX=630520 GN=folE PE=3 SV=1
MAGRKDYVNSKVTSNREQIEHHVREILKLVGENVEREGLLETPARVTRMYEEIFAGYEVDPREVLGVSFDEQHEELVIVKDIVYYSQCEHHMAPFFGKVHIGYIPSGKIAGLSKLARLVEAITRRLQVQERITSQIADIMDEELKPNGVMVVVEGEHLCMCARGVKKPGSKTVTSAVRGEFRTSSALRSEFLALLKQ

SEQ ID NO: 12067 - protein, 299 aa, Paenibacillus prosopidis
  REGION 1..299: note = tr|A0A368W1U5|A0A368W1U5_9BACL GTP cyclohydrolase FolE2 OS=Paenibacillus prosopidis OX=630520 GN=folE2 PE=3; SV = 1
MSKLNLPTKQERHTRFGSIQPAAGTKPTSKELMTDLQNKPHDYLFALDAVGICEVKYPVNIPSSTSPTMQVSMAAFKMTTSLGRHSKGINMSRIMEQLEAYRQENWVMNLPTLANFTQELAARMQQTSAEIEVWFPWFYERISPALKKTGLQHSEAFIKISYEKDCPIKAEIGIKAAITTLCPCSKEISEYSAHNQRGIVTITAVPYDPINVNEDWKAMLLEAAESNASSMLYPVLKRPDEKKVTETAYENPRFVEDMVRLVAADLYEMESIQAFTVECRNEESIHLHDAIAKITFSKE

SEQ ID NO: 12068 - protein, 197 aa, Paenibacillus rhizosphaerae
  REGION 1..197: note = tr|A0A1R1EAF9|A0A1R1EAF9_9BACL GTP cyclohydrolase 1; OS = Paenibacillus rhizosphaerae OX=297318 GN=folE PE=3 SV=1
MAGVKDYVNTRVGENREKIEYHIEQILKLIGENPEREGLLETPARVTRMYEEIFAGYEVDPRDVLGVTFDENHEELVIVKDIVYYSQCEHHMAPFFGKVHIGYIPSGKIAGLSKLARLVEAVTRRLQVQERITSQIADIMVDVLQPHGVMVVVEGEHLCMCSRGVKKPGSKTVTSGVRGIFREDPASRAEFLSLIKE

SEQ ID NO: 12069 - protein, 309 aa, Paenibacillus rhizosphaerae
  REGION 1..309: note = tr|A0A1R1ECA3|A0A1R1ECA3_9BACL GTP cyclohydrolase FolE2 OS=Paenibacillus rhizosphaerae OX=297318 GN=folE2; PE = 3 SV=1
MKSTSNQRIFPPKAERLRRFGSTDPIPGNKPTVKEHMTDLQNFRQDYLFPIDHVGICRVKHPVLVCSELEPRIQSSIATMTLTTSLPRESKGINMSRLTEQLELYRQKDWTSNLADLCNFVHELAKRMEQDKAEMTMTFPWFYERAAPVTGKSGLSHAEVSIKTGYEKGRDFTAEVSLRVAVTTLCPCSKEISEYSAHNQRGTVTMTIEINPLLDSGCDWKAILLEAAESNASSSLHPILKRPDEKKVTEQAYENPRFVEDMVRLISADLYEIDAVQAFTVECRNEESIHMHDAYAVITYDKRKEAATR

SEQ ID NO: 12070 - protein, 196 aa, Paenibacillus rigui
  REGION 1..196: note = tr|A0A229UNR6|A0A229UNR6_9BACL GTP cyclohydrolase 1; OS = Paenibacillus rigui OX=554312 GN=folE PE=3 SV=1
MPAKEYKNTRVAENRAAIEGHIREILRLIGEDVDREGLLDTPARVTRMYEEIFAGYEADYKDILGVAFDEKHEELVIVKDIVYYSQCEHHMAPFFGKIHIGYVPSGKIAGLSKFARLVEAVTRKLQVQERITSEIADIIETELSPHGCMVVVEGEHLCMCARGVKKPGSKTVTSAVRGLFRKDAASRAEFLSLIKD

SEQ ID NO: 12071 - protein, 197 aa, Paenibacillus riograndensis
  REGION 1..197: note = tr|A0A0E4CUJ8|A0A0E4CUJ8_9BACL GTP cyclohydrolase 1; OS = Paenibacillus riograndensis SBR5 OX=1073571 GN=folE; PE = 3 SV=1
MGGVKDYMNGKVAANREQIEYHVEKILQLIGEDPGREGLLETPARVTRMYEEIFGGYSIDPREALGVTFDESHEELVIVKDIVYYSQCEHHMAPFFGKVHIGYIPSGRIAGLSKLARLVEAVSRRLQVQERITAQIADIMTEVLNPHGVMVVVEGEHLCMCARGVKKPGSKTVTMAARGTFREDAAARAEFLALIKE

SEQ ID NO: 12072 - protein, 197 aa, Paenibacillus riograndensis; identical to SEQ ID NO: 12071
  REGION 1..197: note = tr|A0A132TZ10|A0A132TZ10_9BACL GTP cyclohydrolase 1; OS = Paenibacillus riograndensis OX=483937 GN=folE PE=3 SV=1

SEQ ID NO: 12073 - protein, 197 aa, Paenibacillus sabinae
  REGION 1..197: note = tr|X4ZSV7|X4ZSV7_9BACL GTP cyclohydrolase 1; OS = Paenibacillus sabinae T27 OX=1268072 GN=folE PE=3 SV=1
MGGIKDYVNETVSANREKIEYHVQKILELIGEDTGREGLLETPARVTRMYEEIFGGYSIDPKEALGVTFDESHEELVIVKDIVYYSQCEHHMAPFFGKVHIGYIPSGRIAGLSKLARLTEAVTRRLQVQERITSQIADIMTEVLHPHGVMVVVEGEHLCMCARGVKKPGSKTVTSAVRGTFRKNPAARAEFLSLIKE

SEQ ID NO: 12074 - protein, 196 aa, unidentified
  source 1..196: note = Paenibacillus selenitireducens
  REGION 1..196: note = tr|A0A1T2X7K6|A0A1T2X7K6_9BACL GTP cyclohydrolase 1; OS = Paenibacillus selenitireducens OX=1324314 GN=folE PE=3; SV = 1
MSGAKDYVNENVEQNREKIEYHVQQILKLIGEDVEREGLIETPARVARMYEEIFAGYAVDPREVIGVTFDEQHEELVIVKDITYYSQCEHHMAPFFGKIHIGYIPSGKIAGLSKLARLVEAVTRKLQVQERITSEIADIMQEVLQPHGVMVVVEGEHLCMCARGVKKPGSKTVTSGVRGSFRKSATLRNEFLSLIK

SEQ ID NO: 12075 - protein, 197 aa, unidentified
  source 1..197: note = Paenibacillus silvae
  REGION 1..197: note = tr|A0A2W6NAG6|A0A2W6NAG6_9BACL GTP cyclohydrolase 1; OS = Paenibacillus silvae OX=1325358 GN=folE PE=3 SV=1
MAGVKDYLNSKVSDNREKIEYHVEQILKLIGEDSTREGLLETPARVTRMYEEIFGGYEVDPRDVLGVTFDENHEELVIVKDIVYYSQCEHHMAPFFGKVHIGYVPSGKIVGLSKMARLVEAVTRRLQVQERITSQIADILTEAVEPHGVMVVVEGEHLCMCARGVKKPGSKTVTSAVRGSFRDNPAQRAEFLSLIKE

SEQ ID NO: 12076 - protein, 197 aa, unidentified
  source 1..197: note = Paenibacillus solani
  REGION 1..197: note = tr|A0A0M1N476|A0A0M1N476_9BACL GTP cyclohydrolase 1; OS = Paenibacillus solani OX=1705565 GN=folE PE=3 SV=1
MSGVKDYVNLLVGENREQIEYHVEQILKLIGEDPDREGLIETPARVTRMYEEIFAGYAVDPKDVLGVTFDENHEELVIVKDIVYYSLCEHHMAPFFGKVHIGYVPSGKIAGLSKLARLVEAVSRRLQVQERITSQIANIIVDALEPNGVMVVVEGEHLCMCSRGVKKPGSKTVTSAVRGSFQTDSAQRAEFLSLIKD

SEQ ID NO: 12077 - protein, 197 aa, Paenibacillus sophorae
  REGION 1..197: note = tr|A0A1H8S8U9|A0A1H8S8U9_9BACL GTP cyclohydrolase 1; OS = Paenibacillus sophorae OX=1333845 GN=folE PE=3 SV=1
MGGVKDYVNGSVSANREKIEYHVQKILELIGEDTGREGLLETPARVTRMYEEIFAGYSVDPREVLGVTFDESHEELVIVKDIVYYSQCEHHMAPFFGKVHIGYIPSGRIAGLSKLARLVEAVTRRLQVQERITSQIADIMTEVLSPHGVMVVVEGEHLCMCARGVKKPGSKTVTSAVRGIFRENPATRAEFLSLIKE

SEQ ID NO: 12078 - protein, 197 aa, Paenibacillus sp.
  REGION 1..197: note = tr|A0A089HZK3|A0A089HZK3_9BACL GTP cyclohydrolase 1; OS = Paenibacillus sp. FSL H7-0357 OX=1536774 GN=folE PE=3; SV = 1
MGGIKEYVNGKVSVNREQIEYHVEKILELIGEDTGREGLLETPARVTRMYEEIFGGYSIDPREALGVTFDESHEELVIVKDIVYYSQCEHHMAPFFGKVHIGYVPSGRIAGLSKLARLVEAVSRRLQVQERITTQIADIMTEVLNPHGVMVVVEGEHLCMCARGVKKPGSKTVTMATRGSFREDAAARAEFLALIKE

SEQ ID NO: 12079 - protein, 195 aa, Paenibacillus sp.
  REGION 1..195: note = tr|A0A0Q7JTM4|A0A0Q7JTM4_9BACL GTP cyclohydrolase 1; OS = Paenibacillus sp. Root444D2 OX=1736538 GN=folE PE=3 SV=1
MASIDYKNTRVAENRELIEQHVREILRLIGEDVDREGLLDTPARVTRMYEEIFSGYEANPRDVMGVTFDEQHEELVIIKDIIYYSQCEHHMAPFFGKVHVGYLPSGKVAGLSKFARLVDVITRKLQVQERITSEIADILDDVLKPHGVMVVVEGEHMCMCSRGVKKYGSQTITSAVRGSFRSDSTLRAEFLSLLK

SEQ ID NO: 12080 - protein, 197 aa, unidentified
  source 1..197: note = Paenibacillus spiritus
  REGION 1..197: note = tr|A0A5J5FUV8|A0A5J5FUV8_9BACL GTP cyclohydrolase I FolE OS=Paenibacillus spiritus OX=2496557 GN=folE PE=4 SV=1
MRGVKDCRNVKVAENRELIEGHIREILELIGEDPGREGLLDTPARVARMYEEIFGGYAADPRETLGVTFDESHEELVIVKDIVYYSQCEHHMAPFFGKVHIGYIPNGRIAGLSKLARLVEAVTRRLQVQERITSQIADIMEEVLEAQGVMVVVEGEHLCMCARGVKKPGSKTVTTAARGLFRADPAARAEFLALIKE

SEQ ID NO: 12081 - protein, 197 aa, Paenibacillus stellifer
  REGION 1..197: note = tr|A0A089LSW8|A0A089LSW8_9BACL GTP cyclohydrolase 1; OS = Paenibacillus stellifer OX=169760 GN=folE PE=3 SV=1
MGGVKDYVNGSVTANREKIEYHVQKILELIGEDTEREGLLETPARVTRMYEEIFGGYSIDPRDALGVTFDESHEELVIVKDIVYYSQCEHHMAPFFGKVHIGYVPSGRIAGLSKLARLVEAVSRRLQVQERITTQIADIMEEVLHPHGVMVVVEGEHLCMCARGVKKPGSKTVTTGVRGCFREDPAARAEFLSLIKE

SEQ ID NO: 12082 - protein, 197 aa, unidentified
  source 1..197: note = Paenibacillus swuensis
  REGION 1..197: note = tr|A0A172TPE0|A0A172TPE0_9BACL GTP cyclohydrolase 1; OS = Paenibacillus swuensis OX=1178515 GN=folE PE=3 SV=1
MAGVKDYLNDQVGENREAIEGHIREILRLIGEDVDREGLLETPARVTRMYEEIFGGYSVNPRDVLGVTFDEKHEELVIVKDIVYYSQCEHHMAPFFGKAHIGYIPSGKIAGLSKLARLVEAVTRRLQVQERITSEIADIMDEVLQPHGVMVVVEGEHLCMCARGVKKPGSRTMTSAVRGLFRTDPAARSEFLSLIRD

SEQ ID NO: 12083 - protein, 197 aa, Paenibacillus taichungensis; identical to SEQ ID NO: 12054
  REGION 1..197: note = tr|A0A2V3S2H8|A0A2V3S2H8_9BACL GTP cyclohydrolase 1; OS = Paenibacillus taichungensis OX=484184 GN=folE PE=3 SV=1

SEQ ID NO: 12084 - protein, 295 aa, Paenibacillus taichungensis
  REGION 1..295: note = tr|A0A329QE29|A0A329QE29_9BACL GTP cyclohydrolase FolE2 OS=Paenibacillus taichungensis OX=484184 GN=folE2; PE = 3 SV=1
MPDKAERLRLFGSVDPIQGDKPVQKEKMQDLQNSKNDFLFELQQVGIDQVKYPLDVISAKDPVRLSSIGTFRLTTSLDRESKGINMSRLMEQLQHSRSEGLSDRIPDLIALTQQMAEQMNQPKAELKVTYPWFYERTAPVTGLSGLNHSLATVHVIWEAGKSPVLRTGLHIQVTTLCPCSKEISEYSAHNQRGLLRIQVQANPGEALPGYWKEELLNVAESNASSCLYPILKRPDEKRVTERAYENPRFVEDIVRLVAADLYEKHWVNKFKVDCKNEESIHQHDAVARIVYDKSK

SEQ ID NO: 12085 - protein, 197 aa, unidentified
  source 1..197: note = Paenibacillus taihuensis
  REGION 1..197: note = tr|A0A3D9SB83|A0A3D9SB83_9BACL GTP cyclohydrolase 1; OS = Paenibacillus taihuensis OX=1156355 GN=folE PE=3 SV=1
MAGKKDYVNSLVSDNREKVEHHIREILRLIGEDVDREGLLETPARVTRMYEEIFAGYEVDPRDVLGVTFDEQHEELVIVRDIVYYSQCEHHMAPFFGKAHIGYIPSGKIAGLSKLARLVEAVSRRLQVQERITTQIADIMDEVLDPHGVMVVVEGEHLCMCARGVKKPGSKTVTSAVRGEFRTSPALRSEFLSLLKQ

SEQ ID NO: 12086 - protein, 197 aa, Paenibacillus terrae
  REGION 1..197: note = tr|G7VYQ8|G7VYQ8_PAETH GTP cyclohydrolase 1; OS = Paenibacillus terrae (strain HPL-003) OX=985665 GN=folE; PE = 3 SV=1
MAGVKDYINRKAADNRDKIEYHVEQILQLIGEDPKREGLLETPARVARMYEEIFAGYEVDPRDALGVTFDENHEELVIVKDIVYYSQCEHHMAPFFGKVHIGYVPSGKIVGLSKLARLVEAVTRRLQVQERITAQIADILNEAVSAHGVMVVVEGEHLCMCSRGVKKPGSKTVTSAVRGTFRDDAAQRAEFLSLLKD

SEQ ID NO: 12087 - protein, 197 aa, Paenibacillus terrae
  REGION 1..197: note = tr|A0A4U2Q0X4|A0A4U2Q0X4_9BACL GTP cyclohydrolase 1; OS = Paenibacillus terrae OX=159743 GN=folE PE=3 SV=1
MAGVKDYINRKAADNRDKIEYHVEQILQLIGEDPKREGLLETPARVARMYEEIFAGYEVDPRDALGVTFDENHEELVIVKDIVYYSQCEHHMAPFFGKVHIGYVPSGKIVGLSKLARLVEAVTRRLQVQERITAQIADILNEAVSAHGVMVVVEGEHLCMCARGVKKPGSKTVTSAVRGTFRDDAAQRAEFLSLLKD

SEQ ID NO: 12088 - protein, 197 aa, unidentified; identical to SEQ ID NO: 12040
  source 1..197: note = Paenibacillus thermophilus
  REGION 1..197: note = tr|A0A388MYK3|A0A388MYK3_9BACL GTP cyclohydrolase 1; OS = Paenibacillus thermophilus OX=1181891 GN=folE PE=3 SV=1

SEQ ID NO: 12089 - protein, 197 aa, Paenibacillus thiaminolyticus
  REGION 1..197: note = tr|A0A378XB51|A0A378XB51_PANTH GTP cyclohydrolase 1; OS = Paenibacillus thiaminolyticus OX=49283 GN=folE PE=3 SV=1
MAGLKDYVNSKVGENREKIEHHVKEILRLIGEDVDREGLQETPARVTRMYEEIFGGYEVDPRDVLGVTFDEAHEELVIVKDITYYSLCEHHMAPFFGKVHIGYIPSGQVAGLSKLARLVEAVTRRLQVQERVTASIADIMEEVLKPHGVMVVVEGEHLCMCSRGVKKPGSKTVTMSTRGSFKDDAAQRAEFLSLIKQ

SEQ ID NO: 12090 - protein, 197 aa, Paenibacillus thiaminolyticus
  REGION 1..197: note = tr|A0A3A3H9D9|A0A3A3H9D9_PANTH GTP cyclohydrolase 1; OS = Paenibacillus thiaminolyticus OX=49283 GN=folE PE=3 SV=1
MAGLKDYVNSKVGVNREQIEHHVKEILRLIGEDVDREGLQETPARVTRMYEEIFGGYEVDPRDVLGVTFDEAHEELVIVKDITYYSLCEHHMAPFFGKVHIGYIPSGHVAGLSKLARLVEAVTRRLQVQERVTANIADIMEEVLKPHGVMVVVEGEHLCMCSRGVKKPGSKTVTMSTRGSFKDDAAQRAEFLSLIKQ

SEQ ID NO: 12091 - protein, 196 aa, Paenibacillus tianmuensis
  REGION 1..196: note = tr|A0A1G4RX79|A0A1G4RX79_9BACL GTP cyclohydrolase 1; OS = Paenibacillus tianmuensis OX=624147 GN=folE PE=3 SV=1
MPAKEYRNSRVADNREQVEYHVREILRLIGEDPDREGLLDTPARVTRMYEEIFAGYDADVKDILGVAFDEKHEELVIVKDIVYYSQCEHHMAPFFGKIHIGYIPSGKIAGLSKFARLVEAVTRRLQVQERITSEIADIIESVLEPHGCMVVVEGEHLCMCARGVKKPGSKTVTSAVRGLFRTDAASRSEFLSLIKE

SEQ ID NO: 12092 - protein, 197 aa, unidentified
  source 1..197: note = Paenibacillus typhae
  REGION 1..197: note = tr|A0A1G8SV79|A0A1G8SV79_9BACL GTP cyclohydrolase 1; OS = Paenibacillus typhae OX=1174501 GN=folE PE=3 SV=1
MGGIKEYVNGKVSANREQIEYHVARILELIGEDTGREGLLDTPARVTRMYEEIFGGYSVDPREALGVTFDESHEELVIVKDIVYYSQCEHHMAPFFGKVHIGYVPSGRIAGLSKLARLVEAVSRRLQVQERITAQIADIMAEVLSPHGVMVVVEGEHLCMCARGVKKPGSKTVTMATRGTFREDAAARAEFLALIKE

SEQ ID NO: 12093 - protein, 196 aa, unidentified
  source 1..196: note = Paenibacillus tyrfis
  REGION 1..196: note = tr|A0A081NTW6|A0A081NTW6_9BACL GTP cyclohydrolase 1; OS = Paenibacillus tyrfis OX=1501230 GN=folE PE=3 SV=1
MPAKEYKNSRVADNREQVEHHIREILRLIGEDPDREGLLDTPARVTRMYEEIFAGYDADVKDILGVAFDEKHEELVIVKDIVYYSQCEHHMAPFFGKIHIGYIPSGKIAGLSKFARLVEAVTRRLQVQERITSEIADIIESELEPHGCMVVVEGEHLCMCARGVKKPGSKTVTSAVRGLFRTDAASRSEFLSLIKE

SEQ ID NO: 12094 - protein, 197 aa, Paenibacillus uliginis
  REGION 1..197: note = tr|A0A1X7HQU7|A0A1X7HQU7_9BACL GTP cyclohydrolase 1; OS = Paenibacillus uliginis N3/975 OX=1313296 GN=folE PE=3; SV = 1
MAGVKDYVNNKVGEHREQIEYHVEQILKLIGEDTEREGLLETPARVTRMYEEIFAGYEIDPRDVLGVTFDEQHEELVIVKDIVYYSQCEHHMAPFFGKVHIGYVPSGKIAGLSKLARLVEAVTRRLQVQERITSQIANIMVEVLQPQGVMVVVEGEHLCMCARGVKKPGSKTITSAVRGTFQSDSAQRAEFMSLIKN

SEQ ID NO: 12095 - protein, 197 aa, unidentified
  source 1..197: note = Paenibacillus vortex
  REGION 1..197: note = tr|A0A2R9SZM7|A0A2R9SZM7_9BACL GTP cyclohydrolase 1; OS = Paenibacillus vortex V453 OX=715225 GN=folE PE=3 SV=1
MAGVKDYVNNKVGENREQIEYHVEQILKLIGEDTEREGLLETPARVTRMYEEIFAGYEVDPKDVLGVTFDENHEELVIVKDIVYYSQCEHHMAPFFGKVHIGYVPSGKIAGLSKLARLVEAVTRRLQVQERITSQIADIMVEALEPNGVMVVVEGEHLCMCARGVKKPGSKTVTSAVRGSFRSDSAQRSEFLSLIKD

SEQ ID NO: 12096 - protein, 196 aa, unidentified
  source 1..196: note = Paenibacillus whitsoniae
  REGION 1..196: note = tr|A0A3S0A453|A0A3S0A453_9BACL GTP cyclohydrolase 1; OS = Paenibacillus whitsoniae OX=2496558 GN=folE PE=3 SV=1
MASTEYKNTLVAENRAQIEEHVRAILRLIGEDADREGLLDTPARVTRMYEEIFAGYAADPRDVLGVTFDEQHEELVIIKDIVYFSQCEHHMAPFFGKVHVGYIPSGKVAGLSKFARLVDVVTRKLQVQERITSQIADILEEVLKPHGVMVVVDGEHMCMCSRGVKKFGSKTVTSAVRGIFHTDASLRSEFLSLLKQ

SEQ ID NO: 12097 - protein, 299 aa, unidentified
  source 1..299: note = Paenibacillus whitsoniae
  REGION 1..299: note = tr|A0A3S0BP63|A0A3S0BP63_9BACL GTP cyclohydrolase FolE2 OS=Paenibacillus whitsoniae OX=2496558 GN=folE2 PE=3; SV = 1
MNHKKIINLPSKIERHKRFGSVDPIQGTKPTTKEKMADLQNTPHDYLFQLDSVGICQVQHPITVYSDIEPIEQTTIASLQLTTSLHREAKGINMSRLTEQLEVYRQEGWSTELGTLAKFTKELAVRMNQDKAEIKLSFPWFYETASPVMNLKGLNHAQATVQMTYQQGRLFTNVGLQVAVATLCPCSKEISEYSAHNQRGIVTISVELHSDFEGDWKVLLLSAAESNASSALFPILKRPDEKAVTERAYENPRFVEDMVRLVAADLYEMDSVRSFTVECRNEESIHLHDAIAKVSYTKA

SEQ ID NO: 12098 - protein, 197 aa, Paenibacillus wynnii
  REGION 1..197: note = tr|A0A098MBR9|A0A098MBR9_9BACL GTP cyclohydrolase 1; OS = Paenibacillus wynnii OX=268407 GN=folE PE=3 SV=1
MGRINEYVNGKVSDNREKIEYHVGKILELIGEDAGREGLLETPARVTRMYEEIFGGYSVDPREALGVTFDESHEELVIVKDIVYYSQCEHHMAPFFGKVHIGYIPSGRIAGLSKLARLVEAVSRRLQVQERITAQIADIMTEVLHPHGVMVVVEGEHLCMCARGVKKYGSKTLTLATRGTFREDAAARAEFLALIKE

SEQ ID NO: 12099 - protein, 196 aa, unidentified
  source 1..196: note = Paenibacillus xerothermodurans
  REGION 1..196: note = tr|A0A2W1NVM0|A0A2W1NVM0_9BACL GTP cyclohydrolase 1; OS = Paenibacillus xerothermodurans OX=1977292 GN=folE PE=3; SV = 1
MPAREYRNTRVDENRALIEGHVREILRLIGEDVDREGLVDTPARVTRMYEEIFAGYEADYKDILGVAFDEQHEELVIVKDIVYYSQCEHHMAPFFGQIHIGYIPSGKIAGLSKFARLVEAVTRKLQVQERITSELADIIESELTPHGCMVVVEGEHLCMCARGVKKPGSKTVTSAVRGLFRTDAAARSEFLSLVKH

SEQ ID NO: 12100 - protein, 197 aa, Paenibacillus xylanexedens
  REGION 1..197: note = tr|A0A1L5LK42|A0A1L5LK42_9BACL GTP cyclohydrolase 1; OS = Paenibacillus xylanexedens OX=528191 GN=folE PE=3 SV=1
MAGVKDYLNSKVSDNREKIEYHVEQILKLIGEDSTREGLLETPARVTRMYEEIFGGYEVDPRDVLGVTFDENHEELVIVKDIVYYSQCEHHMAPFFGKVHIGYIPSGKIVGLSKMARLVEAVTRRLQVQERITSQIADILTEAVEPHGVMVVVEGEHLCMCSRGVKKPGSKTVTSAVRGSFRENPAQRAEFLSLMKD

SEQ ID NO: 12101 - protein, 197 aa, Paenibacillus xylanexedens; identical to SEQ ID NO: 11992
  REGION 1..197: note = tr|A0A3N6DY34|A0A3N6DY34_9BACL GTP cyclohydrolase 1; OS = Paenibacillus xylanexedens OX=528191 GN=folE PE=3 SV=1

SEQ ID NO: 12102 - protein, 307 aa, unidentified
  source 1..307: note = Paenibacillus yonginensis
  REGION 1..307: note = tr|A0A1B1MZ05|A0A1B1MZ05_9BACL GTP cyclohydrolase FolE2 OS=Paenibacillus yonginensis OX=1462996 GN=folE2; PE = 3 SV=1
MKSYAAQPFPSKEERLIRFGSVPPIPGNKPTTKEEMPDLQNRSHDYLFNINQVGICKVRHPIKIRSELMPDLQTTVAELTLTTSLQRESKGINMSRLTELLERYRRENWEADFEGLQRLATEMAEYMGQTQAEIELEFPWFYERSSPVLGMTGLNHSQASMKVIYNQGNPLEFVLKLQTAVTTLCPCSKEISEYSAHNQRGNVTVTVELDETSLPQGDWKTLLLDAIESNASSPLHPVLKRPDEKAVTERAYENPRFVEDMARLVAADLYEMDFMKAFKVECRNEESIHLHDALAVISFDKTTEAAL

SEQ ID NO: 12103 - protein, 197 aa, unidentified
  source 1..197: note = Paenibacillus yonginensis
  REGION 1..197: note = tr|A0A1B1N6A6|A0A1B1N6A6_9BACL GTP cyclohydrolase 1; OS = Paenibacillus yonginensis OX=1462996 GN=folE PE=3 SV=1
MAGVKDYLNTQVGKNREQIEHHIREILKLVGEDVEREGLLDTPARVTRMYEEIFAGYEVDPRDVLGVTFEENHEELVIVKDIVYYSQCEHHMAPFFGKVHIGYIPSGRIAGLSKLARLVEAVTRRLQVQERITSQIADLMDEVLKPQGVMVVVEGEHLCMCSRGVKKPGSKTVTSAVRGTFRTDSASRSEFLSLIKG

SEQ ID NO: 12104 - protein, 152 aa, unidentified
  source 1..152: note = Paeniclostridium sordellii
  REGION 1..152: note = tr|T0E6W1|T0E6W1_PAESO GTP cyclohydrolase 1; OS = Paeniclostridium sordellii ATCC 9714 OX=1292036 GN=folE; PE = 3 SV=1
MYEEIFSGIHKDPREHLKILFQSEEHEELVLVKDIPFYSCCEHHLVPFFGKAHIAYLPKDGRLTGLSKLARVIEDLAKRPQLQERITKETADIIMQELKPYGVIVVLEAEHMCMTMRGVKKPGSKTITSAVRGIFEKDIAARAEAMSLINMR

SEQ ID NO: 12105 - protein, 190 aa, unidentified
  source 1..190: note = Paeniclostridium sordellii
  REGION 1..190: note = tr|A0A0A1SG51|A0A0A1SG51_PAESO GTP cyclohydrolase 1; OS = Paeniclostridium sordellii OX=1505 GN=folE PE=3 SV=1
MYSVDKSKIENAIRDILEAIGEDPNREGLLDTPSRVAKMYEEIFSGIHKDPREHLKILFQSEEHEELVLVKDIPFYSCCEHHLVPFFGKAHIAYLPKDGRLTGLSKLARVIEDLAKRPQLQERITKETADIIMQELKPYGVIVVLEAEHMCMTMRGVKKPGSKTITSAVRGIFEKDIAARAEAMSLINMR

SEQ ID NO: 12106 - protein, 203 aa, unidentified
  source 1..203: note = Paeniglutamicibacter gangotriensis
  REGION 1..203: note = tr|M7MYI2|M7MYI2_9MICC GTP cyclohydrolase 1; OS = Paeniglutamicibacter gangotriensis Lz1y OX=1276920; GN = folE PE=3 SV=1
MNEIEQREENNVQGAGGVDLERIEKAVREILYAIGEDPGRDGLLETPKRVAKAYGEFFAGLHQDPSDHLSTTFDIEHDELVLVKDIPFYSTCEHHLVPFHGTAHVGYIPGPEGKVTGLSKLARLVEVFAKRPQVQERLTTQIVEALVEHLNPRGAMVVIECEHMCMSMRGVRKPGAKTVTSAVRGQLREPATRAEAMSLILGK

SEQ ID NO: 12107 - protein, 206 aa, unidentified
  source 1..206: note = Paeniglutamicibacter gangotriensis
  REGION 1..206: note = tr|A0A5B0EQF5|A0A5B0EQF5_9MICC GTP cyclohydrolase 1; OS = Paeniglutamicibacter gangotriensis OX=254787 GN=folE; PE = 3 SV=1
MGSVNEIEQREENNVQGAGGVDLERIEKAVREILYAIGEDPGRDGLLETPKRVAKAYGEFFAGLHQDPSDHLSTTFDIEHDELVLVKDIPFYSTCEHHLVPFHGTAHVGYIPGPEGKVTGLSKLARLVEVFAKRPQVQERLTTQIVEALVEHLNPRGAMVVIECEHMCMSMRGVRKPGAKTVTSAVRGQLREPATRAEAMSLILGK

SEQ ID NO: 12108 - protein, 365 aa, unidentified
  source 1..365: note = Paenimaribius caenipelagi
  REGION 1..365: note = tr|A0A547Q5S3|A0A547Q5S3_9RHOB GTP cyclohydrolase FolE2 OS=Paenimaribius caenipelagi OX=2489174 GN=folE2; PE = 3 SV=1
MNVHPKDIAPSLTREDADEMLTALKAWAKTASREEVLDLEPALLPLVDGGVQDYPALRRAYPEEFEVDDAYKANMPDLQNGPSSLIRGAKREIQHVGISNFRLPIRYHTRNSGDLTLETSVTGSVSLDAGKKGINMSRIMRTFYERAGDTFSFEVMERTLDAYKENLDSFDARLSMRFSFPMMMKSLRSGLSGYQYYDFALEVIDRDGQRMKVVHLDYVYSSTCPCSLELSEHARMARGQLATPHSQRSVARISVVVEPGDPLWFEDLIDLCRRAVVTETQAMVKREDEQAFAELNAANPIFVEDAARLFAEQFQADQRVGDFRVVASHQESLHSHDAISILTEGPTFASDSVDPHLFPTLIHVG

SEQ ID NO: 12109 - protein, 363 aa, unidentified
  source 1..363: note = Paenirhodobacter enshiensis
  REGION 1..363: note = tr|A0A086XSN0|A0A086XSN0_9RHOB GTP cyclohydrolase FolE2 OS=Paenirhodobacter enshiensis OX=1105367 GN=folE2; PE = 3 SV=1
MEAAKAAPDVHAAKAALATLRAWAESADPTEVARLDPAIARLLPGHELANYPDLSRRYDPEFRADPGYIATLPDLQNGPASLIVGARARIEHVGISNFHLPIRYRLRKGGDMPLETSVTGTVSLEATQKGINMSRVIRAFYTHAESAFSFEVMAAVIDGYKEKLGAFDARLMMRFRYPTEIRSLRSGLTGWQYYDIALEMADTDGQRLKAIHLDYVYSSTCPCSLELSEHARRERGQLATPHSQRSVARISVALAPGQGALWFEDLIDIARKAVPTETQVMVKREDEQAFAELNAANPIFVEDAVRAFAEGLLAEPRIGDFRVVASHQESLHSHDAVAVLSEGPTFSSQSIDPRLFASLVHQG

SEQ ID NO: 12110 - protein, 189 aa, unidentified
  source 1..189: note = Paenisporosarcina antarctica
  REGION 1..189: note = tr|A0A4P6ZXZ2|A0A4P6ZXZ2_9BACL GTP cyclohydrolase 1; OS = Paenisporosarcina antarctica OX=417367 GN=folE PE=3 SV=1
MSTVNLQKIEEAVKMILEAVGEDPQREGLIETPKRVAKMYAEMFSGLNEDPKEYFKTVFHEEHEELVLVKDIPFHSMCEHHLVPFYGKAHIAYIPRGGVVTGLSKLARAVETTARRPQLQERITSTIADSIMEMLKPYGVYVVIEAEHMCMTMRGIKKPGAKTVTAVARGIYEQDHVKRSEILSFIQMK

SEQ ID NO: 12111 - protein, 189 aa, Paenisporosarcina quisquiliarum
  REGION 1..189: note = tr|A0A1H7VIR5|A0A1H7VIR5_9BACL GTP cyclohydrolase 1; OS = Paenisporosarcina quisquiliarum OX=365346 GN=folE PE=3; SV = 1
MTKVDLNKIEEAVKMILEAVGEDPNREGLLETPKRVSKMYAEMFEGLHQDPKEYFKTVFNEEHEELVLVKDIPFYSMCEHHLVPFYGKAHVAYIPRNGVVTGLSKLARAVETTARRPQLQERITSSVADDIMQMLNPHGVYVVVEAEHMCMTMRGIKKPGAKTITAVARGILETDDVKRSEILSFIKMK

SEQ ID NO: 12112 - protein, 189 aa, Paenisporosarcina sp.
  REGION 1..189: note = tr|A0A2T6K6T9|A0A2T6K6T9_9BACL GTP cyclohydrolase 1; OS = Paenisporosarcina sp. OV554 OX=2135694 GN=folE PE=3 SV=1
MSTVDLQKIEEAVKMILEAVGENPEREGLLETPKRVAKMYAEMFSGLNEDPKEYFKTVFHEDHEELVLVKDIPFHSMCEHHLVPFYGKAHIAYIPRDGVVTGLSKLARAVETTARRPQLQERITSTIADSIMEMLNPFGVYVIIEAEHMCMTMRGIKKPGAKTVTAVARGIYEQDDIKRSEILSFIQMK

SEQ ID NO: 12113 - protein, 189 aa, Paenisporosarcina sp.
  REGION 1..189: note = tr|S2YN59|S2YN59_9BACL GTP cyclohydrolase 1; OS = Paenisporosarcina sp. HGH0030 OX=1078085 GN=folE PE=3; SV = 1
MSKVNLQKIEEAVKMILEAVGEDPEREGLLETPKRVAKMYAEMFSGLQEDPKEYFKTVFHEDHEELVLVKDIPFHSMCEHHLVPFYGKAHIAYIPRDGVVTGLSKLARAVETTARRPQLQERITSTIADSIMEMLNPYGVYVVIEAEHMCMTMRGIKKPGAKTVTAVARGVYEEDDIKRSEILSFIQMN

SEQ ID NO: 12114 - protein, 187 aa, unidentified
  source 1..187: note = Pajaroellobacter abortibovis
  REGION 1..187: note = tr|A0A1L6MYD8|A0A1L6MYD8_9DELT GTP cyclohydrolase 1; OS = Pajaroellobacter abortibovis OX=1882918 GN=BCY86_07780; PE = 3 SV=1
MLEIDVAIQGIQTFLKSMGHFDQNDAELEATAKRVAMTYLHDLCDGYAVEPGPMIAAQRIRGSTEIVLLRDIYITTLCPHHLLPASGMATIVFSPNEWIVGLGAMIRTLEAFAHRLTFQEQIGEQVVEVLMAHLKPYWTACRLIMRHQCLALREATQHQTQVETLAIKGTLSAEERRAIYSLVGLGT

SEQ ID NO: 12115 - protein, 365 aa, unidentified
  source 1..365: note = Palleronia abyssalis
  REGION 1..365: note = tr|A0A2R8BXG2|A0A2R8BXG2_9RHOB GTP cyclohydrolase FolE2 OS=Palleronia abyssalis OX=1501240 GN=folE2 PE=3 SV=1
MNLHSREFDTPKDRDEAADLLGRLRAWAESASPEEVADLDPGLALLVTGQSGSYPALKRAYPEDFTIDDAYKAQMPDLQNGPSSLIRGAKRAIQHVGISNFRLPVRYHTRDNGDLMLETSVTGTVSLDAEKKGINMSRIIRTFYDRAERTFSFDVMEETLDAYKENLESFDARLQMKLSFPVRKDSLRSGLSGYQYYDIALEVIDRDGVRTKVIHLDYVYSSTCPCSLELSEHARQQRGQLATPHSQRSVARLSVVVEDGQTLWFEDLVDLCRQAVPTETQVMVKREDEQAFAELNAANPIFVEDAVRLFAQGCQADPRIGDFRVVASHQESLHSHDAVSVLTEGTTFEGASLEPRLFGTLIHGG

SEQ ID NO: 12116 - protein, 389 aa, Palleronia marisminoris
  REGION 1..389: note = tr|A0A1Y5SWN8|A0A1Y5SWN8_9RHOB GTP cyclohydrolase FolE2 OS=Palleronia marisminoris OX=315423 GN=folE2 PE=4; SV = 1
MTQGRGTGNGNAYLEGEFVKGPKVMNIQPRDFDTPATREEAADLLARLRNWAATADAAELNDLDPRLRLLVEGDEVSYPVLDRVYPEAFKADAAYVAGMPDLQNGPASLIRGARRAIQHVGISNFRLPIRYRLRDGGEAMLETSVTGTVSLEAEKKGINMSRIMRSFYEHVDETFGLDVIERAVDGYKASMDSFDARIQMRFSQPLRVESMRSGLSGYQYYDVALELIDRGEVRTRVLHLDYVYASTCPCSLELSEHARQTRGQLATPHSQRSVARISVVVEPDADLLVEDMVDLCRGAVPTETQVMVKREDEQAFAELNAANPIFVEDAARLFAHACEADPRIGDFRIVASHQESLHSHDAVSILTEGETFDAISIDPRHLQTLVHAG

SEQ ID NO: 12117 - protein, 192 aa, unidentified
  source 1..192: note = Paludibacter jiangxiensis
  REGION 1..192: note = tr|A0A170YR47|A0A170YR47_9BACT GTP cyclohydrolase 1; OS = Paludibacter jiangxiensis OX=681398 GN=folE PE=3 SV=1
MEIVKQDNEQLEKLKYHYGEILRLLGEDTERDGLIKTPERVAKAVQFMTQGYEMDAREVLLSAKFREDYRQMVIVKEIEFYSTCEHHMLPFFGKAHVAYIPNKYITGLSKIARVVDIFAHRLQVQERMTTQIKECIQQTLNPLGVMVVIEAQHTCMQMRGVQKYGAVTTTSDFTGVFEVAKTREEFISLIKN

SEQ ID NO: 12118 - protein, 198 aa, Paludibacter propionicigenes
  REGION 1..198: note = tr|E4T723|E4T723_PALPW GTP cyclohydrolase 1; OS = Paludibacter propionicigenes (strain DSM 17365 / JCM 13257 / WB4) OX=694427 GN=folE PE=3 SV=1
MDFNLNQPVPFDAEKTAKIAEHYHQIIELLGEDVNREGLLKTPERVSKAMQFLMQGYEQDPEEILRSAMFTENYRQMVIVKDIDFYSMCEHHMLPFFGKAHIAYIPNKQITGLSKIARIVEVYARRMQVQERMTTQIKACIQKTLNPMGVMVIIEAQHLCMQMRGVQKQHSITTTSDFTGVFEQAKTREEFMNLINRK

SEQ ID NO: 12119 - protein, 190 aa, Paludibacter sp.
  REGION 1..190: note = tr|A0A2G6QZI6|A0A2G6QZI6_9BACT GTP cyclohydrolase 1; OS = Paludibacter sp. OX=1898105 GN=folE PE=3 SV=1
MVYNEKTTTSLSKKYKEIIEILGENPNREGLTKTPERVAKAMQFFLQGYSQDPAEILKSAMFTENYKQMVIVKEIDFYSLCEHHMVPFFGKVHVAYIPDKKITGLSKIARVVDVFARRLQVQERLTTQIKEAIQTNLNPLGVIVVIEAQHLCMQMRGVEKQHSITTTSDFTGAFRKAKTREEFFNLIKRG

SEQ ID NO: 12120 - protein, 197 aa, Paludibacter sp.
  REGION 1..197: note = tr|A0A1M3MDW1|A0A1M3MDW1_9BACT GTP cyclohydrolase 1; OS = Paludibacter sp. 47-17 OX=1895899 GN=folE PE=3 SV=1
MDFNPTTIAPFDADKTNQIALHYKEIIRLLGETPEREGLLKSPERVSKAMQFLMSGYEQDPDEILKSAMFTEDYRQMVIVKDIDFYSMCEHHMLPFFGKAHVAYIPNHKITGLSKIARIVEVFARRMQVQERMTTQIKECIQNTLNPLGVMVILEAQHLCMQMRGVQKQNSITTTSDFTGVFQQAKTREEFMNLIKR

SEQ ID NO: 12121 - protein, 190 aa, unidentified
  source 1..190: note = Paludifilum halophilum
  REGION 1..190: note = tr|A0A235BBZ3|A0A235BBZ3_9BACL GTP cyclohydrolase 1; OS = Paludifilum halophilum OX=1642702 GN=folE PE=3 SV=1
MEINHEKIQQAVRMILEAVGEDPDREGLVDTPKRVARMYEEVFSGMREDPEEHFSTIFNEVHEELVLVKDIPFFSMCEHHLVPFFGKAHVGYIPRGGRVTGLSKLARAVEAISRRPQLQERITYSIADSIKKTLDPHGVIVVAEAEHMCMTMRGVKKPGAMTVTSSVRGVFEKDPAARAEALSLIGIGSK

SEQ ID NO: 12122 - protein, 196 aa, unidentified
  source 1..196: note = Paludisphaera borealis
  REGION 1..196: note = tr|A0A1U7CJP7|A0A1U7CJP7_9BACT GTP cyclohydrolase 1; OS = Paludisphaera borealis OX=1387353 GN=folE PE=3 SV=1
MAANTPRHEVDLDRIRRAVREILLAVGEDPEREGLVETPDRVARMYAEVFQGLHQDPRVHLTKLFTQKYDEMVLVKDIRFVSFCEHHLLPVVGQAHVAYIPNGKVVGLSKIPRVIDVLAKRPQMQERLTEELADLLMRELDARGVAVVIEASHSCMTIRGVNKPNATFVTSAVRGAFKERMATRSEVMSLIFGAKN

SEQ ID NO: 12123 - protein, 185 aa, Panacagrimonas perspica
  REGION 1..185: note = tr|A0A4R7P129|A0A4R7P129_9GAMM GTP cyclohydrolase 1; OS = Panacagrimonas perspica OX=381431 GN=folE PE=3 SV=1
MTSIIVEEHFRAIIEAIGENPDREGLVKTPYRAARAMEFLTQGYEQDLGEIVNEAIFASSNDEMVIVRDIEMYSMCEHHMLPFIGKCHVAYLPAGKVIGLSKIPRIVDMFARRLQIQENLTKQIGESIQQVTEANGVAVVIEAKHLCAMMRGVEKQNSTMITSMMLGRFREDQRTRQELLSLLRT

SEQ ID NO: 12124 - protein, 198 aa, unidentified
  source 1..198: note = Panacibacter ginsenosidivorans
  REGION 1..198: note = tr|A0A5B8VEQ1|A0A5B8VEQ1_9BACT GTP cyclohydrolase 1; OS = Panacibacter ginsenosidivorans OX=1813871 GN=folE PE=3; SV = 1
MAYKKTEQYDEKTTAQLIDNYKNVLGLLGEDSEREGLQKTPERIAKAMQYLTQGYQMNAIDIINSAKFHETVSEMVIVKDIELYSMCEHHMLPFIGKAHIAYIPNGWITGLSKIARVVDVFSRRLQVQERLTVQIMDAIRESLNPLGVAVVIEAKHLCMMMRGVQKQNSVTTTSAFYGEFEKDTTRSEFVKLISADLS

SEQ ID NO: 12125 - protein, 241 aa, unidentified
  source 1..241: note = Panacibacter sp.
  REGION 1..241: note = tr|A0A4U3KXQ2|A0A4U3KXQ2_9BACT GTP cyclohydrolase 1; OS = Panacibacter sp. 17mud1-8 OX=2575867 GN=folE PE=3 SV=1
MKQNETSWNIQHPEDNDNIEWSNVLIDEIGDNHIAASTDTPMKADAFKLTDDEKIAIIEKHFAAIMDTLGLNLADDSLRGTPKRVAKMYVQEIFSGLNPANRPAVTLFENKYKYNQMLVEKNITFYSNCEHHFVPIYGKAHIAYISSGKVIGLSKLNRFVQYFARRPQVQERLSMQIGKELQQILQTEDVAVVIDALHLCVSSRGVNDTSASTVTAFYGGKFKEETTRQEFLRYLELKPDA

SEQ ID NO: 12126 - protein, 217 aa, unidentified
  source 1..217: note = Panacibacter sp.
  REGION 1..217: note = tr|A0A4V5UWE2|A0A4V5UWE2_9BACT GTP cyclohydrolase 1; OS = Panacibacter sp. 17mud1-8 OX=2575867 GN=folE PE=3 SV=1
MINGKLTVDVMDDKRASTCFDIAIHDDVFELTKEEKIRRISLHFKQIMLALGLNLHDDSLRDTPNRVARMYVEEIFSGLDPLNKPDITLFNNNYRYNGMLIEKNISLYSYCEHHFVPIAGKAHVAYIPNGKVIGLSKINRVVQYYSKRPQVQERLTRQIGDALKDILGTEDVAVMIDAIHYCVASRGIEDTNSSTITTHYSGKFLNSDERREFLSML

SEQ ID NO: 12127 - protein, 249 aa, Pandoraea apista
  REGION 1..249: note = tr|A0A0G4JDK0|A0A0G4JDK0_9BURK Nif3-like dinuclear metal center hexameric protein OS=Pandoraea apista; OX = 93218 GN=ybgI PE=4 SV=1
MNRVELELYLNDTLQIAQFRDYCPNGLQVEGRSDIRKIASGVTASLAFLEAARDWGADAVLVHHGYFWKNEDARITGMKRRRLGVLIGHDINLFAYHLPLDAHPEMGNNAQLGKLLDFTDDGGRFGPDQLGWLGAPAQPTTLAALAAHVGARLGRVPLMLGAPNREVRRVAWCTGGAQGFFEAAIAAGADAYISGEVSEPTQHLALESGVGYLAAGHHATERGGAKAVGEHVAARFGLEHRFFDMPNPA

SEQ ID NO: 12128 - protein, 269 aa, Pandoraea apista
  REGION 1..269: note = tr|A0A0B5F8B6|A0A0B5F8B6_9BURK GTP cyclohydrolase FolE2 OS=Pandoraea apista OX=93218 GN=folE2 PE=3 SV=1
MNQMNPAFVMPDVQSTVDTRQIPIQRVGVRGVRHPLSVRLADGDAQATVGLFNLDVHLPADQKGTHMSRFVALLEAHRAPMDVAGFRAMLGSMLDKLEAEAGRIEVTFPYFINKTAPVSGVQSLMDYEVTLTGDVRDGQTRVWLKVLVPVTSLCPCSKKISQYGAHNQRSHITIDAEIAGDIAVEDLVRMAEEEASCELWGLLKRPDEKYVTERAYENPKFVEDLVRDVATRLNNEPRVVAYVLQAENFESIHNHSAYAVIERDKRSVA

SEQ ID NO: 12129 - protein, 269 aa, Pandoraea faecigallinarum
  REGION 1..269: note = tr|A0A0H3WRV9|A0A0H3WRV9_9BURK GTP cyclohydrolase FolE2 OS=Pandoraea faecigallinarum OX=656179 GN=folE2 PE=3; SV = 1
MNQMNPAFVMPDVQSTVDTRQIPIQRVGVRGVRHPLTVRLADGGVQASVGLFNLDVHLPADQKGTHMSRFVALLEANRAPLDVAGFRAMLASMLDKLEAEAGRIEVTFPYFINKTAPVSGVQSLMDYEVTLTGDVRNGETRVWLKVLVPVTSLCPCSKKISQYGAHNQRSHITIDAEIAGDIAVEALVRMAEEEASCELWGLLKRPDEKYVTERAYENPKFVEDLVRDVATRLNEEPRIVAYVLQAENFESIHNHSAYAVIERDKRHAA

SEQ ID NO: 12130 - protein, 188 aa, Pandoraea faecigallinarum
  REGION 1..188: note = tr|A0A0H3WNC9|A0A0H3WNC9_9BURK GTP cyclohydrolase 1; OS = Pandoraea faecigallinarum OX=656179 GN=folE PE=3 SV=1
MSHDTFDENDWKRFLKHIGEDPNRPGLHETPARVQKAWRQWTAGYEQDPAEVLKVFEDGAEQYNELIVVRGIPVYSHCEHHLAPFFGKATIGYLPNGKIVGLSKLTRLVDCFARRLQVQERLTTQVAEALMTHLQPKAVGVVVSCRHMCMESRGIRTAGEETVTSAMLGELQPNLALRTEFLALARDK

SEQ ID NO: 12131 - protein, 187 aa, unidentified
  source 1..187: note = Pandoraea fibrosis
  REGION 1..187: note = tr|A0A0B3T484|A0A0B3T484_9BURK GTP cyclohydrolase 1; OS = Pandoraea fibrosis OX=1891094 GN=folE PE=3 SV=1
MEQLFGDGDWRRFLASVGEDPDRSGLQETPQRVRLAWEHWTQGYRQDPAEVLKVFEDGAQMYNELIIVRNIPVYSHCEHHLAPFFGQATIGYVPAGRIVGLSKLTRLVDCFAKRLQVQERLTTQVANALMTHLQPKAVGVILTCRHLCMESRGIRTPGEESVTSAMLGELQPNLALRTEFLSLARMK

SEQ ID NO: 12132 - protein, 269 aa, unidentified
  source 1..269: note = Pandoraea fibrosis
  REGION 1..269: note = tr|A0A0B3T0C1|A0A0B3T0C1_9BURK GTP cyclohydrolase FolE2 OS=Pandoraea fibrosis OX=1891094 GN=folE2 PE=3 SV=1
MNQMNPAFVMPDVQSTVDTRQIPIQRVGVRGVRHPLSVRLADGDAQATVGLFNLDVHLPADQKGTHMSRFVALLEAHRAPMDVAGFRAMLGSMLDKLEAEAGRIEVTFPYFINKTAPVSGVQSLMDYEVTLTGDVRNGQTRVWLKVLVPVTSLCPCSKKISQYGAHNQRSHITIDAEIAGDIAVEDLVRMAEEEASCELWGLLKRPDEKYVTERAYENPKFVEDLVRDVATRLNDESRVVAYVLQAENFESIHNHSAYAVIERDKRVAA

SEQ ID NO: 12133 - protein, 188 aa, Pandoraea norimbergensis
  REGION 1..188: note = tr|A0A0U2Y8H7|A0A0U2Y8H7_9BURK GTP cyclohydrolase 1; OS = Pandoraea norimbergensis OX=93219 GN=folE PE=3 SV=1
MSHDTFDENDWKRFLKHLGEDPDRPGLHETPARVSKAWRQWTSGYGQDPAEVLKVFEDGAEQYNELIVVRGIPVYSHCEHHLAPFFGKATIGYLPNGKIVGLSKLTRLVDCFARRLQVQERLTVQIADALMTHLQPKAVGVVVSCRHMCMESRGIRTAGEETVTSSMLGELQPNLALRTEFLALARDK

SEQ ID NO: 12134 - protein, 269 aa, Pandoraea norimbergensis
  REGION 1..269: note = tr|A0A0U2Y9N5|A0A0U2Y9N5_9BURK GTP cyclohydrolase FolE2 OS=Pandoraea norimbergensis OX=93219 GN=folE2 PE=3; SV = 1
MNQMNPAFVMPDVQSSVDTRQIPIQRVGVRGVRHPLSVRLAGGDVQASVGLFNLDVHLPADQKGTHMSRFVALLEENRAPLDLAAFRAMLDSMLVKLEAEAGRIEVTFPYFINKTAPVSGVQSLMDYEVTLTGDVRNGVSRIWLKVLVPVTSLCPCSKKISQYGAHNQRSHITIDAELSGDIAVEDLVRMAEEEASCELWGLLKRPDEKFVTERAYENPKFVEDLVRDVATRLNNEPRVVAYVLQAENFESIHNHSAYAVIERDKRVTA

SEQ ID NO: 12135 - protein, 188 aa, Pandoraea oxalativorans
  REGION 1..188: note = tr|A0A0E3U803|A0A0E3U803_9BURK GTP cyclohydrolase 1; OS = Pandoraea oxalativorans OX=573737 GN=folE PE=3 SV=1
MSHDTFDEYDWKRFLKHIGEDPERSGLHETPARVQKAWRHWTAGYGQDPAEVLKVFEDGAEQYNELIVVRGIPVYSHCEHHLAPFFGKATIGYLPNGKIVGLSKLTRLVDCFARRLQVQERLTTQVAEALMTHLQPKAVGVVVSCRHMCMESRGIRTAGEETVTSSMLGELQPNLALRTEFLALAREK

SEQ ID NO: 12136 - protein, 269 aa, Pandoraea oxalativorans
  REGION 1..269: note = tr|A0A0E3U832|A0A0E3U832_9BURK GTP cyclohydrolase FolE2 OS=Pandoraea oxalativorans OX=573737 GN=folE2 PE=3; SV = 1
MNQMNPAFVMPDVQSTVDTRQIPIQRVGVRGVRHPLSVRLADGDVQATIGLFNLDVHLPADQKGTHMSRFVALLEANRDPMSVAGFRAMLASMLDKLEAEAGRIEVTFPYFISKTAPVSGVQSLMDYEVTLTGDVRNGETRVWLKVLVPVTSLCPCSKKISQYGAHNQRSHITIDVEIAGDIAVEELVRMAEEEASCELWGLLKRPDEKYVTERAYENPKFVEDLVRDVATRLNNEPRVAAYVLQAENFESIHNHSAYAVIERDKRVAA

SEQ ID NO: 12137 - protein, 269 aa, Pandoraea pnomenusa
  REGION 1..269: note = tr|A0A518R4Z2|A0A518R4Z2_9BURK GTP cyclohydrolase FolE2 OS=Pandoraea pnomenusa OX=93220 GN=folE2 PE=3 SV=1
MNQMNPAFVMPDVQSTVDTRQIPIQRVGVRGVRHPLTVRLTGGDTQATVGMFNLDVHLPADQKGTHMSRFVALLEENRVPMDVAGFRAMLDGMLEKLEAQAGRIEVTFPYFINKTAPVSGVRSLMDYEVTLTGDMRDGQTRVWLKVLVPVTSLCPCSKKISQYGAHNQRSHITIDAEIDGDIAVEALVKMAEEEASCELWGLLKRPDEKYVTERAYENPKFVEDLVRDVATRLNDEPRIVAYVLQAENFESIHNHSAYAVIERDKRTTV

SEQ ID NO: 12138 - protein, 245 aa, Pandoraea pnomenusa
  REGION 1..245: note = tr|A0A378YF44|A0A378YF44_9BURK GTP cyclohydrolase 1; OS = Pandoraea pnomenusa OX=93220 GN=folE_2 PE=4 SV=1
MGAVIDSQQAIAITQGPQEGIPLSQAIRQRLRGAGVRFHANDNIAAYLREGDVDRLQDEVTVHIENALRALVIDVDNDHNTRDTAKRVAKMFVKEVFAGRYEPPPAITEFPNIGQLNELTLIGPLRVRSACSHHLCPIMGHAWIGVLPNADSNLPGLSKYARLLNWVMARPQIQEEAVKQIADLLEEKIAPDGLAVVMEADHFCMHWRGTKDDGARMVSSVMRGRFLEDSALRREFLALMASRAR

SEQ ID NO: 12139 - protein, 188 aa, Pandoraea pulmonicola
  REGION 1..188: note = tr|A0A378ZBH2|A0A378ZBH2_9BURK GTP cyclohydrolase 1; OS = Pandoraea pulmonicola OX=93221 GN=folE PE=3 SV=1
MSHDTFDENDWKRFLKHIGEDPNRPGLHETPSRVAKAWRHWTAGYEQDPAEVLKVFEDGAEQYNELIVVRGIPVYSHCEHHLAPFFGKATIGYLPNGKIVGLSKLTRLVDCFARRLQVQERLTTQIADALMTHLQPKAVGVVVSCRHMCMESRGIRTAGEETVTSAMLGELQPNLALRTEFLALARDK

SEQ ID NO: 12140 - protein, 269 aa, Pandoraea pulmonicola
  REGION 1..269: note = tr|A0A378ZAH7|A0A378ZAH7_9BURK GTP cyclohydrolase FolE2 OS=Pandoraea pulmonicola OX=93221 GN=folE2 PE=3 SV=1
MNQMNPAFVMPDVQSSVDTRQIPIQRVGVRGVRHPLSVRLAGGDVQATVGLFNLDVHLPADQKGTHMSRFVALLEAHRAPLDMAAFRAMLGDMLQKLEAEAGRIEVTFPYFINKTAPVSGVQSLLDYEVTLTGDVRDGVTRVWLKVLVPVTSLCPCSKKISQYGAHNQRSHITIDAEVSEDIAVEELVRMAEEEASCELWGLLKRPDEKFVTERAYENPKFVEDLVRDVATRLNHESRVVAYLLQAENFESIHNHSAYAVIERDKRLAA

SEQ ID NO: 12141 - protein, 188 aa, Pandoraea sp.
  REGION 1..188: note = tr|A0A1Q4CKW0|A0A1Q4CKW0_9BURK GTP cyclohydrolase 1; OS = Pandoraea sp. 64-18 OX=1895806 GN=folE PE=3 SV=1
MSHDTFDENDWKRFLKHIGEDPNRPGLHETPSRVQKAWRQWTSGYGQDPAEVLKVFEDGAEQYNELIVVRGIPVYSHCEHHLAPFFGKATIGYLPNGKIVGLSKLTRLVDCFARRLQVQERLTTQIAEALMTHLQPKAVGVVVSCRHMCMESRGIRTAGEETVTSAMLGELQPNLALRTEFLALARDK

SEQ ID NO: 12142 - protein, 269 aa, Pandoraea sp.
  REGION 1..269: note = tr|A0A522ERI2|A0A522ERI2_9BURK GTP cyclohydrolase FolE2 OS=Pandoraea sp. OX=1883445 GN=folE2 PE=3 SV=1
MNQMNPAFVMPDVQSSVDTRQIPIQRVGVRAVRHPLTLRTPDGQAQTTVGVFNMDVHLPAEQKGTHMSRFVALLEERKTPLDLAGFRSMLAGMLEKLEATAGRIEVIFPYFITKTAPISGVQSLMDYEVALVGELRDGVARCWLKVLVPVTSLCPCSKKISDYGAHNQRSHVTITAELAGDISVEEIVRMAEEEASCELWGLLKRPDEKFVTERAYDNPKFVEDLVRDVARRLNDEPRIVAYVLEAENFESIHNHSAYAVIERDKRIDA

SEQ ID NO: 12143 - protein, 269 aa, Pandoraea sputorum
  REGION 1..269: note = tr|A0A239SDX7|A0A239SDX7_9BURK GTP cyclohydrolase FolE2 OS=Pandoraea sputorum OX=93222 GN=folE2 PE=3 SV=1
MNQMNPAFVMPDVQSTVDTRQIPIQRVGVRGVRHPLSVRLADGDVQATIGLFNLDVHLRADQKGTHMSRFVALLEANREPMNVAGFRAMLASMLDKLEAEAGRIEVTFPYFINKTAPVSGVQSMMDYEVTLTGDVRHGETRVWLKVLVPVTSLCPCSKKISQYGAHNQRSHITIDAEIAGDIAVEELVRMAEEEASCELWGLLKRPDEKYVTERAYENPKFVEDLVRDVATRLNSEPRVAAYVLQAENFESIHNHSAYAVIERDKRVAA

SEQ ID NO: 12144 - protein, 269 aa, Pandoraea sputorum
  REGION 1..269: note = tr|A0A5E5AVZ1|A0A5E5AVZ1_9BURK GTP cyclohydrolase FolE2 OS=Pandoraea sputorum OX=93222 GN=folE2 PE=3 SV=1
MNQMNPAFVMPDVQSTVDTRQIPIQRVGVRGVRHPLSVRLADGDVQATIGLFNLDVHLPADQKGTHMSRFVALLEANREPMNVAGFRAMLASMLDKLEAEAGRIEVTFPYFINKTAPVSGVQSLMDYEVTLTGDVRHGETRVWLKVLVPVTSLCPCSKKISQYGAHNQRSHITIDAEIAGDIAVEELVRMAEEEASCELWGLLKRPDEKYVTERAYENPKFVEDLVRDVATRLNNEPRVAAYVLQAENFESIHNHSAYAVIERDKRVAA

SEQ ID NO: 12145 - protein, 269 aa, unidentified
  source 1..269: note = Pandoraea terrae
  REGION 1..269: note = tr|A0A5E4XRI7|A0A5E4XRI7_9BURK GTP cyclohydrolase FolE2 OS=Pandoraea terrae OX=1537710 GN=folE2 PE=3 SV=1
MNQMNPAFVMPDVQSSVDTRQIPIQRVGVRAVRFPLVLKTPAGQPQATVGVFNMDVHLPADQKGTHMSRFVALLEENRAPLDVAGFRHMLAVMLEKLEAEAGRIEVTFPYFITKTAPVSGVQSLMDYEVTLVGDVRDGQARVWLKVLVPVTSLCPCSKKISEYGAHNQRSHVTINAELAGEIGVEEIVRMAEEEASCELWGLLKRPDEKFVTERAYDNPKFVEDLVRDVAQRLNQEPRIVAYVLEAENFESIHNHSAYAVIERDKRLDA

SEQ ID NO: 12146 - protein, 269 aa, Pandoraea thiooxydans
  REGION 1..269: note = tr|A0A0G3EV38|A0A0G3EV38_9BURK GTP cyclohydrolase FolE2 OS=Pandoraea thiooxydans OX=445709 GN=folE2 PE=3 SV=1
MNQMNPAFVMPDVQSSVDTRQIPIQRVGVRAVRHPLTLRTPDGQVQATVGVFNMDVHLPAEQKGTHMSRFVALLEERKTPLDLAGFRSMLAGMLEKLEATAGRIEVTFPYFITKTAPISGVQSLMDYEVALVGELREGVARCWLKVLVPVTSLCPCSKKISDYGAHNQRSHVTITAELAADVSVEEIVRMAEEEASCELWGLLKRPDEKFVTERAYDNPKFVEDLVRDVARRLNEEPRIVAYVLEAENFESIHNHSAYAVIERDKRIDA

SEQ ID NO: 12147 - protein, 269 aa, Pandoraea vervacti
  REGION 1..269: note = tr|A0A0C5K1U9|A0A0C5K1U9_9BURK GTP cyclohydrolase FolE2 OS=Pandoraea vervacti OX=656178 GN=folE2 PE=3 SV=1
MNQMNPAFVMPDVQSTVDTRQIPIQRVGVRGVRHPLSVRLADGDVQATVGLFNLDVHLLADQKGTHMSRFVALLEANRAPLDVAGFRAMLASMLEKLEAEAGRIEVTFPYFINKTAPVSGVQSLMDYEVTLMGDVRNGETRVWLKVLVPVTSLCPCSKKISQYGAHNQRSHITIDAEITGDIAVEDLVRMAEEEASCELWGLLKRPDEKYVTERAYENPKFVEDLVRDVATRLNNEPRIVAYVLQAENFESIHNHSAYAVIERDKRMGA

SEQ ID NO: 12148 - protein, 188 aa, Pandoraea vervacti
  REGION 1..188: note = tr|A0A0C5K747|A0A0C5K747_9BURK GTP cyclohydrolase 1; OS = Pandoraea vervacti OX=656178 GN=folE PE=3 SV=1
MSHDTFDENDWKRFLKHIGEDPNRPGLHETPARVQKAWRQWTAGYDQDPAEVLKVFEDGAEQYNELIVVRGIPVYSHCEHHLAPFFGKATIGYLPNGKIVGLSKLTRLVDCFARRLQVQERLTTQVAEALMTHLQPKAVGVVVSCRHMCMESRGIRTAGEETVTSAMLGELQPNLALRTEFLALARDK

SEQ ID NO: 12149 - protein, 211 aa, unidentified
  source 1..211: note = Pannonibacter indicus
  REGION 1..211: note = tr|A0A0K6IBI2|A0A0K6IBI2_9RHOB GTP cyclohydrolase 1; OS = Pannonibacter indicus OX=466044 GN=folE PE=3 SV=1
MDAILKPADEKAPRRAPHEIARPSREQAEAAVRTLLAYIGEDPEREGLLDTPKRVVKSFAELYSGYAEDPKAHLERTFEDVGGYEDMIMVRGIPFHSHCEHHMLPFIGKAYIAYYPSGGVVGLSKLARVVDIYANRLQTQENLTSQIVSSIDEHLAPRGIAVMLEAEHQCMTMRGVQKAGVSTITTQFTGVFQDDPAEQARFMTFIRGGDR

SEQ ID NO: 12150 - protein, 211 aa, Pannonibacter phragmitetus
  REGION 1..211: note = tr|A0A378ZTF8|A0A378ZTF8_9RHOB GTP cyclohydrolase 1; OS = Pannonibacter phragmitetus OX=121719 GN=folE PE=3 SV=1
MDAILKPADEKAPRRAPHEIARPSREQAEAAVRTLLAYIGEDPEREGLLDTPKRVVKSFAELYSGYAEDPKAHLERTFEDVGGYEDMIMVRGIPFHSHCEHHMLPFIGKAYIAYYPSGGVVGLSKLARVVDIYANRLQTQENLTSQIVSSIDEHLAPRGIAVMLEAEHQCMTMRGVQKAGVTTITTQFTGVFQDDPAEQARFMTFIRGGDR

SEQ ID NO: 12151 - protein, 211 aa, Pannonibacter phragmitetus
  REGION 1..211: note = tr|A0A0U3P6U5|A0A0U3P6U5_9RHOB GTP cyclohydrolase 1; OS = Pannonibacter phragmitetus OX=121719 GN=folE PE=3 SV=1
MDAILKPADEKAPRRAPHEIARPSREQAEAAVRTLLAYIGEDPEREGLLDTPKRVVKSYAELYSGYAEDPKAHLERTFEDVGGYEDMIMVRGIPFHSHCEHHMLPFIGKAYIAYYPSGGVVGLSKLARVVDIYANRLQTQENLTSQIVSSIDEHLAPRGIALMLEAEHQCMTMRGVQKAGVSTITTQFTGVFQDDPAEQARFMTFIRGGDR

SEQ ID NO: 12152 - protein, 221 aa, unidentified
  source 1..221: note = Pantoea alhagi
  REGION 1..221: note = tr|A0A1W6BB56|A0A1W6BB56_9GAMM GTP cyclohydrolase 1; OS = Pantoea alhagi OX=1891675 GN=folE PE=3 SV=1
MATLSHEAALVHDALVARGLETPLRAPVREMDDETRKRLIAGHMTEIMQLLNLDLEDDSLMETPHRIAKMYVNEIFSGLDYANFPKITLIENKMKVDEMVTVRDITLTSTCEHHFVIIDGQATVAYIPKDKVIGLSKINRIVQFFAQRPQVQERLTQQVLIALQTLLGTNNVAVSIDAVHYCVKARGIRDANSATTTTSLGGLFKSSQNTRQEFLRAVRHN

SEQ ID NO: 12153 - protein, 187 aa, Pantoea allii
  REGION 1..187: note = tr|A0A4S3B7T1|A0A4S3B7T1_9GAMM GTP cyclohydrolase 1 (Fragment) OS=Pantoea allii OX=574096 GN=folE PE=3 SV=1
MSTLSQEAALVHEALLARGLETPLRAPTRDIDDKTRKSLIAGHMTEIMQLLNLDLEDDSLMETPHRIAKMYVDEVFSGLDYANFPKITVIENKMKVDEMVTVRDITLTSTCEHHFVIIDGKATVAYIPKEKVIGLSKINRIVQFFAQRPQVQERLTQQVLVALQTLLGTNNVAVSIDAVHYLSLIHI

SEQ ID NO: 12154 - protein, 43 aa, Pantoea allii
  REGION 1..43: note = tr|A0A4S3BCI0|A0A4S3BCI0_9GAMM GTP cyclohydrolase I FolE (Fragment) OS=Pantoea allii OX=574096 GN=folE PE=4; SV = 1
VHYCVKARGVKDATSATTTTSLGGLFKSSQNTRQEFLRAVRHS

SEQ ID NO: 12155 - protein, 221 aa, unidentified
  source 1..221: note = Pantoea ananas
  REGION 1..221: note = tr|A0A2S8A1Q8|A0A2S8A1Q8_PANAN GTP cyclohydrolase 1; OS = Pantoea ananas OX=553 GN=folE PE=3 SV=1
MSTLSQEAALVHEALLARGLETPLRAPTRDIDDETRKSLIAGHMTEIMQLLNLDLEDDSLMETPHRIAKMYVDEIFSGLDYANFPKITVIENKMKVDEMVTVRDITLTSTCEHHFVIIDGKATVAYIPKEKVIGLSKINRIVQFFAQRPQVQERLTQQVLVALQTLLGTNNVAVSIDAVHYCVKARGVKDATSATTTTSLGGLFKSSQNTRQEFLRAVRHS

SEQ ID NO: 12156 - protein, 221 aa, unidentified
  source 1..221: note = Pantoea ananas
  REGION 1..221: note = tr|A0A2U1DDG1|A0A2U1DDG1_PANAN GTP cyclohydrolase 1; OS = Pantoea ananas OX=553 GN=folE PE=3 SV=1
MSTLSQEAALVHEALLARGLETPLRAPTREIDDETRKSLIAGHMTEIMQLLNLDLEDDSLMETPHRIAKMYVDEVFSGLDYANFPKITLIENKMKVDEMVTVRDITLTSTCEHHFVIIDGKATVAYIPKDKVIGLSKINRIVQFFAQRPQVQERLTQQVLLALQTLLGTNNVAVSIDAVHYCVKARGVKDATSATTTTSLGGLFKSSQNTRQEFLRAVRHN

SEQ ID NO: 12157 - protein, 221 aa, Pantoea ananatis; identical to SEQ ID NO: 12156
  REGION 1..221: note = tr|A0A0H3KXY7|A0A0H3KXY7_PANAA GTP cyclohydrolase 1; OS = Pantoea ananatis (strain AJ13355) OX=932677 GN=folE; PE = 3 SV=1

SEQ ID NO: 12158 - protein, 221 aa, Pantoea ananatis
  REGION 1..221: note = tr|D4GIH7|D4GIH7_PANAM GTP cyclohydrolase 1; OS = Pantoea ananatis (strain LMG 20103) OX=706191 GN=folE; PE = 3 SV=1
MSTLSQEAAQVHEALLARGLETPLRAPTREIDDETRKSLIAGHMTEIMQLLNLDLEDDSLMETPHRIAKMYVDEVFSGLDYANFPKITLIENKMKVDEMVTVRDITLTSTCEHHFVIIDGKATVAYIPKDKVIGLSKINRIVQFFAQRPQVQERLTQQVLLALQTLLGTNNVAVSIDAVHYCVKARGVKDATSATTTTSLGGLFKSSQNTRQEFLRAVRHN

SEQ ID NO: 12159 - protein, 221 aa, Pantoea anthophila
  REGION 1..221: note = tr|A0A506PG98|A0A506PG98_9GAMM GTP cyclohydrolase 1; OS = Pantoea anthophila OX=470931 GN=folE PE=3 SV=1
MSTLSQEAALVHEALLARGLETPLRAPTRDIDDNTRKSLIAGHMTEIMQLLNLDLEDDSLMETPHRIAKMYVDEVFSGLDYANFPKITVIENKMKVDEMVTVRDITLTSTCEHHFVIIDGKATVAYIPKDKVIGLSKINRIVQFFAQRPQVQERLTQQVLVALQTLLGTNNVAVSIDAVHYCVKARGVKDATSATTTTSLGGLFKSSQNTRQEFLRAVRHS

SEQ ID NO: 12160 - protein, 221 aa, unidentified
  source 1..221: note = Pantoea coffeiphila
  REGION 1..221: note = tr|A0A2S9IG70|A0A2S9IG70_9GAMM GTP cyclohydrolase 1; OS = Pantoea coffeiphila OX=1465635 GN=folE PE=3 SV=1
MATLSQEAALVHEALLARGLETPLRAPVREMDDETRRQLIAGHMTEIMQLLNLDLDDDSLRETPQRIAKMYVNEVFSGLDYANFPKITVIENKMKVDEMVTVRDITLTSTCEHHFVIIDGKATVAYIPKDKVIGLSKINRIVQFFSSRPQVQERLTQQILVALQTLLGTNNVAVSIDAVHYCVKARGIRDATSATTTTSLGGLFKSSQNTRQEFLRAVRHS

SEQ ID NO: 12161 - protein, 221 aa, Pantoea conspicua
  REGION 1..221: note = tr|A0A1X1BW25|A0A1X1BW25_9GAMM GTP cyclohydrolase 1; OS = Pantoea conspicua OX=472705 GN=folE PE=3 SV=1
MSTLSQEAALVHEALLARGLETPLRAPTRDLDDETRKSLIAGHMTEIMQLLNLDLEDDSLIETPHRIAKMYVDEVFSGLDYANFPKITVIENKMKVDEMVTVRDITLTSTCEHHFVIIDGKATVAYIPKDKVIGLSKINRIVQFFAQRPQVQERLTQQVLVALQTLLGTNNVAVSIDAVHYCVKARGVKDATSATTTTSLGGLFKSSQNTRQEFLRAVRHS

SEQ ID NO: 12162 - protein, 221 aa, Pantoea cypripedii
  REGION 1..221: note = tr|A0A1X1EW07|A0A1X1EW07_PANCY GTP cyclohydrolase 1; OS = Pantoea cypripedii OX=55209 GN=folE PE=3 SV=1
MSTLSQEAALVHEALLARGLETPLRAPVREMDDETRKRQIAGHMTEIMQLLNLDLEDDSLMETPHRIAKMYVDEIFSGLDYANFPKITVIENKMKVDEMVTVRDITLTSTCEHHFVIIDGKATVAYIPKDKVIGLSKINRIVQFFAQRPQVQERLTQQVLIALQTLLGTNNVAVSIDAVHYCVKARGVKDATSATTTTSLGGLFKSSQNTRQEFLRAVRHN

SEQ ID NO: 12163 - protein, 221 aa, Pantoea deleyi
  REGION 1..221: note = tr|A0A506Q1B4|A0A506Q1B4_9GAMM GTP cyclohydrolase 1; OS = Pantoea deleyi OX=470932 GN=folE PE=3 SV=1
MSTLSQEAALVHEALLARGLETPLRAPTRDIDDETRKSLIAGHMTEIMQLLNLDLEDDSLMETPHRIAKMYVDEVFSGLDYANFPKITVIENKMKVDEMVTVRDITLTSTCEHHFVIIDGKATVAYIPKDKVIGLSKINRIVQFFAQRPQVQERLTQQVLVALQTLLGTNNVAVSIDAVHYCVKARGVKDATSATTTTSLGGLFKSSQNTRQEFLRAVRHS

SEQ ID NO: 12164 - protein, 221 aa, Pantoea dispersa
  REGION 1..221: note = tr|A0A518XE10|A0A518XE10_9GAMM GTP cyclohydrolase 1; OS = Pantoea dispersa OX=59814 GN=folE PE=3 SV=1
MSTLSQEAALVHEALLARGLETPLRAPVRDMDDETRKREIAGHMTQIMQLLNLDLEDDSLMETPHRIAKMYVDEIFSGLDYANFPKITVIENKMKVDEMVTVRDITLTSTCEHHFVIIDGKATVAYIPKDKVIGLSKINRIVQFFAQRPQVQERLTQQVLVALQTLLGTNNVAVSIDAVHYCVKARGVKDATSATTTTSLGGLFKSSQNTRQEFLRAVRHS

SEQ ID NO: 12165 - protein, 221 aa, Pantoea dispersa
  REGION 1..221: note = tr|A0A437T505|A0A437T505_9GAMM GTP cyclohydrolase 1; OS = Pantoea dispersa OX=59814 GN=folE PE=3 SV=1
MSTLSQEAALVHEALLARGLETPLRAPVRDMDDASRKREIAGHMTQIMQLLNLDLEDDSLMETPHRIAKMYVDEIFSGLDYANFPKITVIENKMKVDEMVTVRDITLTSTCEHHFVIIDGKATVAYIPKDKVIGLSKINRIVQFFAQRPQVQERLTQQVLVALQTLLGTNNVAVSIDAVHYCVKARGVKDATSATTTTSLGGLFKSSQNTRQEFLRAVRHS

SEQ ID NO: 12166 - protein, 221 aa, Pantoea eucalypti; identical to SEQ ID NO: 12155
  REGION 1..221: note = tr|A0A506PHP4|A0A506PHP4_9GAMM GTP cyclohydrolase 1; OS = Pantoea eucalypti OX=470933 GN=folE PE=3 SV=1

SEQ ID NO: 12167 - protein, 221 aa, unidentified
  source 1..221: note = Pantoea latae
  REGION 1..221: note = tr|A0A1V9DFC9|A0A1V9DFC9_9GAMM GTP cyclohydrolase 1; OS = Pantoea latae OX=1964541 GN=folE PE=3 SV=1
MSTLSQEAILVHEALLARGLETPLRAPTREMDDETRKRLIAGHMTEVMQLLNLDLEDDSLMETPHRIAKMYVDEVFSGLDYANFPKITVIENKMKVDEMVTVRDITLTSTCEHHFVIIDGKATVAYIPKEKVIGLSKINRIVQFFAQRPQVQERLTQQVLVALQTLLGTNNVAVSIDAVHYCVKARGVKDATSATTTTSLGGLFKSSQNTRQEFLRAVRHI

SEQ ID NO: 12168 - protein, 221 aa, unidentified
  source 1..221: note = Pantoea rodasii
  REGION 1..221: note = tr|A0A2M9WG29|A0A2M9WG29_9GAMM GTP cyclohydrolase 1; OS = Pantoea rodasii OX=1076549 GN=folE PE=3 SV=1
MSTLSQEAALVHEALLARGLETPLRAPVREMDDETRKHEIAGHMTQIMQLLNLDLEDDSLMETPHRIAKMYVDEIFSGLDYANFPKITVIENKMKVDEMVTVRDITLTSTCEHHFVIIDGKATVAYIPKEKVIGLSKINRIVQFFAQRPQVQERLTQQVLVALQTLLGTNNVAVSIDAVHYCVKARGVKDATSATTTTSLGGLFKSSQNTRQEFLRAVRHS

SEQ ID NO: 12169 - protein, 221 aa, unidentified
  source 1..221: note = Pantoea rodasii
  REGION 1..221: note = tr|A0A0B1R0Y0|A0A0B1R0Y0_9GAMM GTP cyclohydrolase 1; OS = Pantoea rodasii OX=1076549 GN=folE PE=3 SV=1
MSTLSQEAALVHEALLARGLETPLRAPVREMDDEARKREIAGHMTQIMQLLNLDLEDDSLMETPHRIAKMYVDEIFSGLDYANFPKITVIENKMKVDEMVTVRDITLTSTCEHHFVIIDGKATVAYIPKEKVIGLSKINRIVQFFAQRPQVQERLTQQVLVALQTLLGTNNVAVSIDAVHYCVKARGVKDATSATTTTSLGGLFKSSQNTRQEFLRAVRHS

SEQ ID NO: 12170 - protein, 221 aa, unidentified
  source 1..221: note = Pantoea rwandensis
  REGION 1..221: note = tr|A0A1X1CQZ9|A0A1X1CQZ9_9GAMM GTP cyclohydrolase 1; OS = Pantoea rwandensis OX=1076550 GN=folE PE=3 SV=1
MSTLSQEAALVHEALLARGLETPLRAPVREMDDETRKREIAGHMTQIMQLLNLDLEDDSLMETPHRIAKMYVDEIFSGLDYANFPKITVIENKMKVDEMVTVRDITLTSTCEHHFVIIDGKATVAYIPKDKVIGLSKINRIVQFFAQRPQVQERLTQQVLVALQTLLGTNNVAVSIDAVHYCVKARGVKDATSATTTTSLGGLFKSSQNTRQEFLRAVRHS

SEQ ID NO: 12171 - protein, 222 aa, unidentified; identical to SEQ ID NO: 7843
  source 1..222: note = Pantoea sesami
  REGION 1..222: note = tr|A0A1M5V206|A0A1M5V206_9GAMM GTP cyclohydrolase 1; OS = Pantoea sesami OX=1881110 GN=folE PE=3 SV=1

SEQ ID NO: 12172 - protein, 221 aa, Pantoea sp.
  REGION 1..221: note = tr|A0A2S5KFR1|A0A2S5KFR1_9GAMM GTP cyclohydrolase 1; OS = Pantoea sp. ICBG 1758 OX=2071682 GN=folE PE=3 SV=1
MSTLSQEAALVHEALLARGLETPLRAPVREMDSETRKREIAGHMTQIMQLLNLDLEDDSLMETPHRIAKMYVDEIFSGLDYANFPKITVIENKMKVDEMVTVRDITLTSTCEHHFVIIDGKATVAYIPKDKVIGLSKINRIVQFFAQRPQVQERLTQQVLVALQTLLGTTNVAVSIDAVHYCVKARGVKDATSATTTTSLGGLFKSSQNTRQEFLRAVRHI

SEQ ID NO: 12173 - protein, 221 aa, Pantoea sp.
  REGION 1..221: note = tr|A0A443IF42|A0A443IF42_9GAMM GTP cyclohydrolase 1; OS = Pantoea sp. LMG 27579 OX=1490476 GN=folE PE=3 SV=1
MTTLSQEAALVHEALLARGLETPLRSPAREIDDETRKRLIAGHMTEIMQLLNLDLEDDSLAETPHRIAKMYVNEVFSGLDYANFPKITVIENKMKVDEMVTVRDITLTSTCEHHFVIIDGKATVAYIPKDKVIGLSKINRIVQFFASRPQVQERLTQQILLALQTLLGTNNVAVSIDAVHYCVKARGIRDATSATTTTSLGGLFKSSQNTRQEFLRAVRHS

SEQ ID NO: 12174 - protein, 221 aa, Pantoea stewartii
  REGION 1..221: note = tr|H3REQ3|H3REQ3_PANSE GTP cyclohydrolase 1; OS = Pantoea stewartii subsp. stewartii DC283 OX=660596; GN = folE PE=3 SV=1
MSTLSQEAALVHEALLARGLETPLRAPTREMDDETRKSLIAGHMTEIMQLLNLDLEDDSLMETPHRIAKMYVDEVFSGLDYANFPKITLIENKMKVDEMVTVRDITLTSTCEHHFVIIDGKATVAYIPKDKVIGLSKINRIVQFFAQRPQVQERLTQQVLLALQTLLGTNNVAVSIDAVHYCVKARGVKDATSATTTTSLGGLFKSSQNTRQEFLRAVRHS

SEQ ID NO: 12175 - protein, 221 aa, Pantoea vagans
  REGION 1..221: note = tr|E1SJ73|E1SJ73_PANVC GTP cyclohydrolase 1; OS = Pantoea vagans (strain C9-1) OX=712898 GN=folE PE=3 SV=1
MSTLSQEAALVHEALLARGLETPLRAPTRDIDKETRKSLIAGHMTEIMQLLNLDLEDDSLMETPHRIAKMYVDEVFSGLDYANFPKITVIENKMKVDEMVTVRDITLTSTCEHHFVIIDGKATVAYIPKEKVIGLSKINRIVQFFAQRPQVQERLTQQVLVALQTLLGTNNVAVSIDAVHYCVKARGVKDATSATTTTSLGGLFKSSQNTRQEFLRAVRHS

SEQ ID NO: 12176 - protein, 221 aa, Pantoea vagans; identical to SEQ ID NO: 12155
  REGION 1..221: note = tr|A0A501SIK2|A0A501SIK2_9GAMM GTP cyclohydrolase 1; OS = Pantoea vagans OX=470934 GN=folE PE=3 SV=1

SEQ ID NO: 12177 - protein, 221 aa, unidentified
  source 1..221: note = Pantoea wallisii
  REGION 1..221: note = tr|A0A1X1D8J3|A0A1X1D8J3_9GAMM GTP cyclohydrolase 1; OS = Pantoea wallisii OX=1076551 GN=folE PE=3 SV=1
MSTLSQEAALVHEALLARGLETPLRAPVREMDDESRKREIAGHMTQIMQLLNLDLEDDSLMETPHRIAKMYVDEIFSGLDYANFPKITVIENKMKVDEMVTVRDITLTSTCEHHFVIIDGKATVAYIPKDKVIGLSKINRIVQFFAQRPQVQERLTQQVLVALQTLLGTTNVAVSIDAVHYCVKARGVKDATSATTTTSLGGLFKSSQNTRQEFLRAVRHS

SEQ ID NO: 12178 - protein, 197 aa, unidentified
  source 1..197: note = Parabacteroides acidifaciens
  REGION 1..197: note = tr|A0A3D8HAR9|A0A3D8HAR9_9BACT GTP cyclohydrolase 1; OS = Parabacteroides acidifaciens OX=2290935 GN=folE PE=3; SV = 1
MSEEVNAKTLQAREELAGHYKSIISLLGEDVDREGLLKTPERVAKAMQFLTKGYQEDPAAVLRGAMFKEEDYKQMVIVKDIDFFSLCEHHMLPFFGKAHVAYIPKKYITGLSKIPRVVDIFARRLQIQERLTMQIKECIQETLDPLGVMVVIEAQHMCMQMRGVEKQNSLTTTSDFTGFFQQAKTREEFMNLIKHNR

SEQ ID NO: 12179 - protein, 195 aa, unidentified; identical to SEQ ID NO: 10185
  source 1..195: note = Parabacteroides chartae
  REGION 1..195: note = tr|A0A1T5A2A0|A0A1T5A2A0_9BACT GTP cyclohydrolase 1; OS = Parabacteroides chartae OX=1037355 GN=folE PE=3 SV=1

SEQ ID NO: 12180 - protein, 198 aa, unidentified
  source 1..198: note = Parabacteroides chinchillae
  REGION 1..198: note = tr|A0A1H5XIQ2|A0A1H5XIQ2_9BACT GTP cyclohydrolase 1; OS = Parabacteroides chinchillae OX=871327 GN=folE PE=3 SV=1
MVLKQSEEEKSRVQGELAVHYNAILSLLGEDPKREGLLKTPFRVAKAMQFLTKGYSEDPEAVLRSAMFQEEDYKQMVIVKDIDFFSLCEHHMLPFFGKAHIAYIPKKYITGLSKIPRVVDIFARRLQIQERLTMQIKDCIQKTLDPLGVMVVIEAQHMCMQMRGVEKQNSLTTTSDFTGFFQQAKTREEFMNLIKHNR

SEQ ID NO: 12181 - protein, 196 aa, Parabacteroides distasonis
  REGION 1..196: note = sp|A6LFE8|GCH1_PARD8 GTP cyclohydrolase 1; OS = Parabacteroides distasonis (strain ATCC 8503 / DSM 20701 / CIP 104284 / JCM 5825 / NCTC 11152) OX=435591; GN = folE PE=3 SV =1
MSEVNEETLRAREALAGHYKEVLGLLGEDVEREGLLKTPERVAKAMQFLTKGYHEDPEAVLRSAMFQEEDYKQMVIVKDIDFFSLCEHHMLPFFGKAHVAYIPKKYITGLSKIPRVVDIFARRLQIQERMTMQIKDCIQRTLDPLGVMVVIEAQHMCMQMRGVEKQNSLTTTSDFTGFFQQAKTREEFMNLIKHNR

SEQ ID NO: 12182 - protein, 197 aa, Parabacteroides distasonis
  REGION 1..197: note = tr|A0A3L7ZW46|A0A3L7ZW46_9BACT GTP cyclohydrolase 1; OS = Parabacteroides distasonis OX=823 GN=folE PE=3 SV=1
MMSEVNEETLRAREVLAGHYKEVLGLLGEDAGREGLLKTPERVAKAMQFLTKGYHEDPEAVLRSAMFQEEDYKQMVIVKDIDFFSLCEHHMLPFFGKAHVAYIPKKYITGLSKIPRVVDIFARRLQIQERMTMQIKDCIQRTLDPLGVMVVIEAQHMCMQMRGVEKQNSLTTTSDFTGFFQQAKTREEFMNLIKHNR

SEQ ID NO: 12183 - protein, 208 aa, Parabacteroides goldsteinii
  REGION 1..208: note = tr|A0A0F5JIP6|A0A0F5JIP6_9BACT GTP cyclohydrolase 1; OS = Parabacteroides goldsteinii DSM 19448 = WAL 12034; OX = 927665 GN=folE PE=3 SV=1
MSPWLTRIIIEMTKEIDDKTLAAREELAGHYKQILGLLGEDAEREGLIKTPERVAKAMQFLTKGYNEDPAKVLASAMFQEEDYKQMVIVKDIDFFSLCEHHMLPFFGKAHVAYIPKKYITGLSKIPRVVDIFARRLQIQERLTMQIKDCIQQTLDPLGVMVVIEAQHMCMQMRGVEKQNSLTTTSDFTGFFQQAKTREEFMNLIKNNR

SEQ ID NO: 12184 - protein, 197 aa, Parabacteroides goldsteinii
  REGION 1..197: note = tr|S0GM23|S0GM23_9BACT GTP cyclohydrolase 1; OS = Parabacteroides goldsteinii dnLKV18 OX=1235789 GN=folE; PE = 3 SV=1
MTKEIDDKTLAAREELAGHYKQILGLLGEDAEREGLIKTPERVAKAMQFLTKGYNEDPAKVLASAMFQEEDYKQMVIVKDIDFFSLCEHHMLPFFGKAHVAYIPKKYITGLSKIPRVVDIFARRLQIQERLTMQIKDCIQQTLDPLGVMVVIEAQHMCMQMRGVEKQNSLTTTSDFTGFFQQAKTREEFMNLIKNNR

SEQ ID NO: 12185 - protein, 197 aa, Parabacteroides gordonii
  REGION 1..197: note = tr|A0A0F5JFU2|A0A0F5JFU2_9BACT GTP cyclohydrolase 1; OS = Parabacteroides gordonii MS-1 = DSM 23371 OX=1203610; GN = folE PE=3 SV=1
MIEEINDKTLAAREELAGHYKGILNLLGEDAEREGLLKTPERVAKAMQFLTKGYNEDPAKVLASAMFQEEDYKQMVIVKDIDFFSLCEHHMLPFFGKAHVAYIPKKYITGLSKIPRVVDIFARRLQIQERLTMQIKDCIQQTLDPLGVMVVIEAQHMCMQMRGVEKQNSLTTTSDFTGFFQQAKTREEFMNLIKNNR

SEQ ID NO: 12186 - protein, 197 aa, Parabacteroides johnsonii
  REGION 1..197: note = tr|B7BH38|B7BH38_9BACT GTP cyclohydrolase 1; OS = Parabacteroides johnsonii DSM 18315 OX=537006 GN=folE; PE = 3 SV=1
MSEEINEKTLLAREELAGHYKSIINLLGEEVDREGLLKTPERVAKAMQFLTKGYREDPAAVLRGAMFKEEDYKQMVIVKDIDFFSLCEHHMLPFFGKAHVAYIPKKYITGLSKIPRVVDIFARRLQIQERLTMQIKDCIQETLDPLGVMVVIEAQHMCMQMRGVEKQNSLTTTSDFTGFFQQAKTREEFMNLIKHNR

SEQ ID NO: 12187 - protein, 197 aa, Parabacteroides johnsonii; identical to SEQ ID NO: 12186
  REGION 1..197: note = tr|K5ZXY2|K5ZXY2_9BACT GTP cyclohydrolase 1; OS = Parabacteroides johnsonii CL02T12C29 OX=999419 GN=folE; PE = 3 SV=1

SEQ ID NO: 12188 - protein, 197 aa, Parabacteroides merdae
  REGION 1..197: note = tr|A7AIA5|A7AIA5_9BACT GTP cyclohydrolase 1; OS = Parabacteroides merdae ATCC 43184 OX=411477 GN=folE; PE = 3 SV=1
MSEEVNEKTLLAREELAGHYKSIINLLGEDVDREGLLKTPERVAKAMQFLTKGYHEDPAAVLRGAMFKEEDYKQMVIVKDIDFFSLCEHHMLPFFGKAHVAYIPKKYITGLSKIPRVVDIFARRLQIQERLTMQIKDCIQETLDPLGVMVVIEAQHMCMQMRGVEKQNSLTTTSDFTGFFQQAKTREEFMNLIKHNR

SEQ ID NO: 12189 - protein, 197 aa, Parabacteroides merdae; identical to SEQ ID NO: 12188
  REGION 1..197: note = tr|A0A351E170|A0A351E170_9BACT GTP cyclohydrolase 1; OS = Parabacteroides merdae OX=46503 GN=folE PE=3 SV=1

SEQ ID NO: 12190 - protein, 196 aa, Parabacteroides sp.; identical to SEQ ID NO: 12181
  REGION 1..196: note = tr|A0A3E4P8E6|A0A3E4P8E6_9BACT GTP cyclohydrolase 1; OS = Parabacteroides sp. 20_3 OX=469591 GN=folE PE=3 SV=1

SEQ ID NO: 12191 - protein, 196 aa, Parabacteroides sp.
  REGION 1..196: note = tr|C7XDX8|C7XDX8_9BACT GTP cyclohydrolase 1; OS = Parabacteroides sp. D13 OX=563193 GN=folE PE=3 SV=1
MSEVNEETLRAREALAGHYKEVLGLLGEDAGREGLLKTPERVAKAMQFLTKGYHEDPEAVLRSAMFQEEDYKQMVIVKDIDFFSLCEHHMLPFFGKAHVAYIPKKYITGLSKIPRVVDIFARRLQIQERMTMQIKDCIQRTLDPLGVMVVIEAQHMCMQMRGVEKQNSLTTTSDFTGFFQQAKTREEFMNLIKHNR

SEQ ID NO: 12192 - protein, 268 aa, unidentified
  source 1..268: note = Paraburkholderia aromaticivorans
  REGION 1..268: note = tr|A0A248VV70|A0A248VV70_9BURK GTP cyclohydrolase FolE2 OS=Paraburkholderia aromaticivorans OX=2026199; GN = folE2 PE=3 SV=1
MNQMNPAFVMPDVQSTPDTRQIPIQRVGVKAVRHPLTVRTQGGEVQPTVGTWNLDVHLPADQKGTHMSRFVALLEENKAPLEPATFRTMLAAMLEKLEAEAGRIEVSFPYFVSKTAPVSGVQSLLDYEVTLTGETRNGATRLFMQVQVPVTSLCPCSKKISQYGAHNQRSHVTINAELAGDVAVEELIRVAEEEASCELWGLLKRPDEKFVTERAYENPKFVEDLVRDVAQRLNADERIVAYVLEAENFESIHNHSAYAVIERDKRAG

SEQ ID NO: 12193 - protein, 212 aa, unidentified
  source 1..212: note = Paraburkholderia aromaticivorans
  REGION 1..212: note = tr|A0A248VS21|A0A248VS21_9BURK GTP cyclohydrolase 1; OS = Paraburkholderia aromaticivorans OX=2026199 GN=folE; PE = 3 SV=1
MTSSKAKKKQPIAATERPSREEAEAAVRVLLRWAGDDPAREGLIDTPARVVRSYEEFYAGYQVDPREILARTFSEVDGYDEMIVLKDIRFESYCEHHMVPIIGRAHVAYLPQHRVVGISKLARLVDAFAKRLQIQEKMTVQIADTLNEVLQPAGVGVILEAAHQCMSTRGVHKAGVTMVTSRMLGTFRTDPSTRREFLSIVGNPGVVAVANT

SEQ ID NO: 12194 - protein, 212 aa, unidentified
  source 1..212: note = Paraburkholderia aspalathi
  REGION 1..212: note = tr|A0A1I7ES33|A0A1I7ES33_9BURK GTP cyclohydrolase 1; OS = Paraburkholderia aspalathi OX=1324617 GN=folE PE=3 SV=1
MDVHSVNDSDDFPGHHLPAIGIQRVRAFDATAFEKSVRDMLEASGLDIGATHISRTAQRVRELWQKRLLDGYDINPAEALGSGFADVRSDMVIIRGIAVHGVCPHHLLPFRGVAHVAYLPGGSLHGFGRIARMIDAISHRYTYQEWITSEIANTLIIHGHALGAACLIKAEHLCLLLGEDRRGDERVITQCYAGEFEQNIQARTEFLRAIEH

SEQ ID NO: 12195 - protein, 268 aa, unidentified
  source 1..268: note = Paraburkholderia aspalathi
  REGION 1..268: note = tr|A0A1I7D0G5|A0A1I7D0G5_9BURK GTP cyclohydrolase FolE2 OS=Paraburkholderia aspalathi OX=1324617 GN=folE2; PE = 3 SV=1
MNQMNPAFVMPDVQSTPDTRQIPIQRVGVKAVRHPLTVRTQSGEAQPSVGTWNLDVHLPADQKGTHMSRFVALLEENKAPLEAATFRTMLAAMLEKLEAEAGRIEVSFPYFVNKTAPVSGVQSLLDYEVTLTGETRNGATRLFLKVLVPVTSLCPCSKKISQYGAHNQRSHVTINAELVGDVAVEELVRIAEEEASCELWGMLKRPDEKFVTERAYENPKFVEDLVRDVAQRLNADERIVAYVLEAENFESIHNHSAYAVIERDKRVA

SEQ ID NO: 12196 - protein, 238 aa, unidentified
  source 1..238: note = Paraburkholderia azotifigens
  REGION 1..238: note = tr|A0A5C6VKH6|A0A5C6VKH6_9BURK GTP cyclohydrolase 1; OS = Paraburkholderia azotifigens OX=2057004 GN=folE PE=3; SV = 1
MHIPVGHRAGKHGTMARRAMRVLLELERRMTTKKTTPTDTPGRPSREEAEEAVRTLLRWAGDNPQREGLLDTPARVVRAYEEFFAGYNVEPREILARTFSEVDGYDEMIVLKDIRFESYCEHHMVPIIGRAHVAYLPEHRVVGISKLARLVDAFAKRLQIQEKMTVQIADTLNEVLQPKGVGVILEASHQCMSTRGVHKAGVEMVTSRMLGTFRSDASTRREFLSIVNSPTSVSVANT

SEQ ID NO: 12197 - protein, 268 aa, unidentified
  source 1..268: note = Paraburkholderia azotifigens
  REGION 1..268: note = tr|A0A5C6VE85|A0A5C6VE85_9BURK GTP cyclohydrolase FolE2 OS=Paraburkholderia azotifigens OX=2057004 GN=folE2; PE = 3 SV=1
MNQMNPAFVMPDVQSTLDTRQIPIQRVGVKAVRHPLTVRTPDGSVQPSVGTWNLDVHLPAEVKGTHMSRFVALLEENKAPLDSSVFRAMLASMLEKLEAPAGRIEVSFPYFVNKTAPVSGVQSLLDYEVTLMADARDGATRLFLKVLVPVTSLCPCSKKISQYGAHNQRSHVTINAELIDDVAVEDLIRIAEEEASCELWGLLKRPDEKFVTERAYENPKFVEDLVRDVAQRLNADQRIIAYVLEAENFESIHNHSAYAVVERDKRSV

SEQ ID NO: 12198 - protein, 268 aa, unidentified
  source 1..268: note = Paraburkholderia bryophila
  REGION 1..268: note = tr|A0A329C6J2|A0A329C6J2_9BURK GTP cyclohydrolase FolE2 OS=Paraburkholderia bryophila OX=420952 GN=folE2; PE = 3 SV=1
MNQMNPAFVMPDVQSTPDTRQIPIQRVGVKAVRHPLTVRTQGGDIQPTVGTWNLDVHLPADQKGTHMSRFVALLEENKAPLESATFRTMLAAMLEKLEAEAGRIEVSFPYFVNKTAPVSGVQSLLDYEVTLTGETRNGATRLFLKVLVPVTSLCPCSKKISQYGAHNQRSHVTINAELAGDVAVEELVRVAEEEASCELWGLLKRPDEKFVTERAYENPKFVEDLVRDVAQRLNADERIVAYVLEAENFESIHNHSAYAVIERDKRTV

SEQ ID NO: 12199 - protein, 212 aa, unidentified
  source 1..212: note = Paraburkholderia bryophila
  REGION 1..212: note = tr|A0A329CLQ2|A0A329CLQ2_9BURK GTP cyclohydrolase 1; OS = Paraburkholderia bryophila OX=420952 GN=folE PE=3 SV=1
MTSSKTEKTQPAANADRPSREEAEAAVRVLLRWAGDDPAREGLIDTPARVVRSYEEFYAGYQVDPREILARTFSEVDGYDEMIVLKDIRFESYCEHHMVPIIGRAHVAYLPQHRVVGISKLARLVDAFAKRLQIQEKMTVQIADTLNEVLQPAGVGVILEAAHQCMSTRGVHKAGVTMVTSRMLGTFRSDPSTRREFLSIVGNPGVVAVANT

SEQ ID NO: 12200 - protein, 269 aa, unidentified
  source 1..269: note = Paraburkholderia caballeronis
  REGION 1..269: note = tr|A0A1H7KXK6|A0A1H7KXK6_9BURK GTP cyclohydrolase FolE2 OS=Paraburkholderia caballeronis OX=416943 GN=folE2; PE = 3 SV=1
MNQMNPAFVMPDVQSSVDTRQIPIQRVGVKAVRHPLTVRTATGDAQPTVGTWNLDVHLPADQKGTHMSRFVALLEAHRAPLDPAAFRTMLTAMLVKLESQAGRIEVSFPYFVKKVAPVSGVESLLDYEVTLTGDARDGATRLWLKVLVPVTSLCPCSKKISQYGAHNQRSHVTINAELADDLPVEDLIRIAEEEASCELWGLLKRPDEKFVTERAYENPKFVEDLVRDIAVRLNADARVAAYVLEAENFESIHNHSAYAVIERDKRVAV

SEQ ID NO: 12201 - protein, 218 aa, unidentified
  source 1..218: note = Paraburkholderia caballeronis
  REGION 1..218: note = tr|A0A1H7P2S3|A0A1H7P2S3_9BURK GTP cyclohydrolase 1; OS = Paraburkholderia caballeronis OX=416943 GN=folE PE=3; SV = 1
MSDKKTADKAKKAKTQISEPAGRPSRTEAEDAVRVLLRWAGDDPTREGLIDTPARVARAFEEFFAGYQLDPREILSRTFSEVDGYDEMIVLKDIRFESYCEHHMVPIIGRAHVAYLPEHRVVGISKLARLVDAFAKRLQIQEKMTAQIADTLNDILQPKGVGVILEASHQCMSTRGVHKAGVEMVTSRMLGTFRTDPSTRREFLAIVGNQASASLSNT

SEQ ID NO: 12202 - protein, 268 aa, unidentified
  source 1..268: note = Paraburkholderia caffeinilytica
  REGION 1..268: note = tr|A0A346BBB6|A0A346BBB6_9BURK GTP cyclohydrolase FolE2 OS=Paraburkholderia caffeinilytica OX=1761016; GN = folE2 PE=3 SV=1
MNQMNPAFVMPDVQSTPDTRQIPIQRVGVKAVRHPLTVRTQGGEVQPSVGTWNLDVHLPADQKGTHMSRFVALLEENKAPLEAATFRTMLAAMLEKLEAEAGRIEVSFPYFMNKTAPVSGVQSLLDYEVTLTGETRNGATRLFLKVLVPVTSLCPCSKKISQYGAHNQRSHVTINAELVGDVAVEELVRIAEEEASCELWGLLKRPDEKFVTERAYENPKFVEDLVRDVAQRLNADERVVAYVLEAENFESIHNHSAYAVIERDKRVA

SEQ ID NO: 12203 - protein, 212 aa, unidentified
  source 1..212: note = Paraburkholderia caffeinilytica
  REGION 1..212: note = tr|A0A346B6S3|A0A346B6S3_9BURK GTP cyclohydrolase 1; OS = Paraburkholderia caffeinilytica OX=1761016 GN=folE PE=3; SV = 1
MASSKAKKTKPGAAAERPSREEAEAAVRVLLRWAGDNPEREGLIDTPSRVVRSYEEFYAGYQIDPREILARTFSEVDGYDEMIVLKDIRFESYCEHHMVPIIGRAHVAYLPGHRVVGISKLARLVDAFAKRLQIQEKMTVQIADTLNDVLQPAGVGVILEAAHQCMSTRGVHKAGVTMVTSRMLGTFRTDPSTRREFLSIVGNPGVVAIPNT

SEQ ID NO: 12204 - protein, 268 aa, unidentified
  source 1..268: note = Paraburkholderia caledonica
  REGION 1..268: note = tr|A0A2Z5MKC2|A0A2Z5MKC2_9BURK GTP cyclohydrolase FolE2 OS=Paraburkholderia caledonica OX=134536 GN=folE2; PE = 3 SV=1
MNQMNPAFVMPDVQSTPDTRQIPIQRVGVKAVRHPLMVRTPGGEAQPTVGTWNLDVHLPAEQKGTHMSRFVALLEENKAPLEPATFRKMLAAMLTKLEAEAGRIEVSFPYFVNKTAPVSGVQSLLDYEVTLTGDTRNGETRLFLKVLVPVTSLCPCSKKISQYGAHNQRSHVTINAELAGEVAVEDLIRIAEEEASCELWGLLKRPDEKFVTERAYENPKFVEDLVRDVAQRLNADERIVAYVLEAENFESIHNHSAYAVIERDKRLV

SEQ ID NO: 12205 - protein, 212 aa, unidentified
  source 1..212: note = Paraburkholderia caledonica
  REGION 1..212: note = tr|A0A2Z5MK57|A0A2Z5MK57_9BURK GTP cyclohydrolase 1; OS = Paraburkholderia caledonica OX=134536 GN=folE PE=3 SV=1
MTSSKTEQTTPAATNGRPSREEAEAAVRVLLRWAGDDPQREGLLDTPARVVRSYEEFYAGYQVDPREILARTFSEVDGYDEMIVLKDIRFESYCEHHMVPIIGRAHVAYLPQHRVVGISKLARLVDAFAKRLQIQEKMTVQIADTLNDVLQPAGVGVILEAAHQCMSTRGVHKAGVTMVTSRMLGTFRTDPSTRREFLSIVGNPGAVAVPNT

SEQ ID NO: 12206 - protein, 209 aa, unidentified
  source 1..209: note = Paraburkholderia caribensis
  REGION 1..209: note = tr|A0A0P0RGE4|A0A0P0RGE4_9BURK GTP cyclohydrolase 1; OS = Paraburkholderia caribensis MBA4 OX=1323664 GN=folE; PE = 3 SV=1
MNTKNTTSADAPGRPSRDEAEEAVRVLLRWAGDNPQREGLLDTPARVVRAYEEFFAGYEVDPREILARTFSEVDGYDEMIVLKDIRFESYCEHHMVPIIGRAHVAYLPEHRVVGISKLARLVDAFAKRLQIQEKMTVQIADTLNEVLQPKGVGVILEASHQCMSTRGVHKAGVEMVTSRMLGTFRTDPSTRREFLSIVHGPTSVSVANT

SEQ ID NO: 12207 - protein, 265 aa, unidentified
  source 1..265: note = Paraburkholderia caribensis
  REGION 1..265: note = tr|A0A142Z4Y3|A0A142Z4Y3_9BURK GTP cyclohydrolase FolE2 OS=Paraburkholderia caribensis OX=75105 GN=folE2; PE = 3 SV=1
MNQMNPAFVMPDVQSTVDTRQIPIQRVGVKAVRHPLTVRTPDGSVQPTIGTWNLDVHLPAEVKGTHMSRFVALLEENKTPLDSAAFRAMLASMLEKLEAPAGRIEVSFPYFVNKTAPVSGVQSLLDYEVTLTGDSRDGATRLFLKVLVPVTSLCPCSKKISQYGAHNQRSHVTIDAELVDDVPVEDLIRIAEEEASCELWGLLKRPDEKFVTERAYENPKFVEDLVRDVAQRLNADKRIVAYVLEAENFESIHNHSAYAVIEKRA

SEQ ID NO: 12208 - protein, 268 aa, unidentified
  source 1..268: note = Paraburkholderia diazotrophica
  REGION 1..268: note = tr|A0A1H7DCD1|A0A1H7DCD1_9BURK GTP cyclohydrolase FolE2 OS=Paraburkholderia diazotrophica OX=667676 GN=folE2; PE = 3 SV=1
MNQMNPAFVMPDVQSTVDTRQIPIQRVGVKAVRHPLTVRTPDGNVQPTVGTWNLDVHLPAEVKGTHMSRFVALLEENKAPLDASAFRAMLASMLDKLEAPAGRIQVSFPYFVNKTAPVSGVQSLLDYEVTLTADSRNGATRLFLKVLVPVTSLCPCSKKISEYGAHNQRSHVTIDAELVDDMPVEDLIRIAEDEASCELWGLLKRPDEKFVTERAYENPKFVEDLVRDVATRLNEDRRIVAYVLEAENFESIHNHSAYAVIENDKRKA

SEQ ID NO: 12209 - protein, 211 aa, unidentified
  source 1..211: note = Paraburkholderia diazotrophica
  REGION 1..211: note = tr|A0A1H7CK82|A0A1H7CK82_9BURK GTP cyclohydrolase 1; OS = Paraburkholderia diazotrophica OX=667676 GN=folE PE=3; SV = 1
MNKRDTEIGAEEASVRPTRNQAEEAVRTLIRWAGDDPEREGLIQTPARVARAYREFFSGYESDPMQILATTFSEVDGYDEMVVLKDIRFESYCEHHMVPIIGRAHVAYLPEHRVVGISKLARLVDVYAKRLQIQEKMTVQIADALNTVLQPKGVAVILEAAHQCMSTRGVHKPGASLVTSRMLGAFRDDPSTRREFLSIVGHSTIMPLPNS

SEQ ID NO: 12210 - protein, 268 aa, unidentified
  source 1..268: note = Paraburkholderia dipogonis
  REGION 1..268: note = tr|A0A4Y8MS54|A0A4Y8MS54_9BURK GTP cyclohydrolase FolE2 OS=Paraburkholderia dipogonis OX=1211383 GN=folE2; PE = 3 SV=1
MNQMNPAFVMPDVQSTPDTRQIPIQRVGVKAVRHPLTVRTQSGEVQPTVGTWNLDVHLPADQKGTHMSRFVALLEENKAPLEPATFRIMLAAMLEKLEAEAGRIEVSFPYFVNKTAPVSGVQSLLDYEVTLTGETRNGATRLFLQVLVPVTSLCPCSKKISQYGAHNQRSHVTINAELAGDVAVEELIRIAEEEASCELWGLLKRPDEKFVTERAYENPKFVEDLVRDVAQRLNADERIVAYVLEAENFESIHNHSAYAVIERDKRVA

SEQ ID NO: 12211 - protein, 212 aa, unidentified
  source 1..212: note = Paraburkholderia dipogonis
  REGION 1..212: note = tr|A0A4Y8MQ01|A0A4Y8MQ01_9BURK GTP cyclohydrolase 1; OS = Paraburkholderia dipogonis OX=1211383 GN=folE PE=3 SV=1
MTSSKAKKTKSITATERPSREEAEAAVRVLLRWAGDDPAREGLIDTPARVVRSYEEFYAGYQVDPREILARTFSEVDGYDEMIVLKDIRFESYCEHHMVPIIGRAHVAYLPEHRVVGISKLARLVDAFAKRLQIQEKMTVQIADTLNEVLQPAGVGVILEAAHQCMSTRGVHKAGVTMVTSRMLGTFRTDPSTRREFLSIVGNPGVVAVANT

SEQ ID NO: 12212 - protein, 268 aa, unidentified
  source 1..268: note = Paraburkholderia eburnea
  REGION 1..268: note = tr|A0A2S4MJ26|A0A2S4MJ26_9BURK GTP cyclohydrolase FolE2 OS=Paraburkholderia eburnea OX=1189126 GN=folE2 PE=3; SV = 1
MNQMNPAFVMPDVQSSVDTRQIPIQRVGVKGVRHPLTVKTLAGDVQPSVGTWNLDVHLPADQKGTHMSRFVALLEENKTPLEPATFRAMLAAMLLKLESQAGRIEVSFPYFVKKVAPVSGVESLLDYEVTLTGDVRDGVTRLFLKVLVPVTSLCPCSKKISQYGAHNQRSHVTIDVEFDGDLPVEELILIAEQEASCELWGLLKRPDEKFVTERAYENPKFVEDLVRDVAVRLNADARVIAYTLEAENFESIHNHSAYAVIEHDKRVA

SEQ ID NO: 12213 - protein, 231 aa, unidentified
  source 1..231: note = Paraburkholderia eburnea
  REGION 1..231: note = tr|A0A2S4MBH2|A0A2S4MBH2_9BURK GTP cyclohydrolase 1; OS = Paraburkholderia eburnea OX=1189126 GN=folE PE=3 SV=1
MSDEKNAEKTKKRKSKASVQANSGIDTATTPASVARPSREEAEDAVRVLLRWAGDDPSREGLLDTPGRVVRAYEEFFAGYEHDPREILSRTFSEVDGYDEMIVLKDIRFESYCEHHMVPIIGRAHVAYLPEHRVVGISKLARLVDAFAKRLQIQEKMTAQIADTLNEVLQPKGVGVILEAAHQCMSTRGVHKAGVTMVTSRMLGTFRSDPSTRREFLAIVGSPGVMSVPNT

SEQ ID NO: 12214 - protein, 269 aa, unidentified
  source 1..269: note = Paraburkholderia endofungorum
  REGION 1..269: note = tr|A0A2P5K6P1|A0A2P5K6P1_9BURK GTP cyclohydrolase FolE2 OS=Paraburkholderia endofungorum OX=417203 GN=folE2; PE = 3 SV=1
MNQMNPAFLMPDVQSTPDTRQIPIQRVGIRAVRHPLTVRTAQGDVQPTVGSWNLNVHLPAEQKGTHMSRFIALLDQAQTPLDTAHFRAMLATMLEKLEATAGRIEVTFPYFIRKTAPVSGVQSLLDYEVTLSVDARDGATRLFTKVLVPVTSLCPCSKKISQYGAHNQRSHVTIAAELADDVPVEDLVRMAEEEASCELWGLLKRPDEKFVTERAYDNPKFVEDLVRDVAQRLNADPRIVAYVLEAENFESIHNHSAYALIEHDKRLSG

SEQ ID NO: 12215 - protein, 268 aa, unidentified
  source 1..268: note = Paraburkholderia fungorum
  REGION 1..268: note = tr|A0A2N8Q750|A0A2N8Q750_9BURK GTP cyclohydrolase FolE2 OS=Paraburkholderia fungorum OX=134537 GN=folE2 PE=3; SV = 1
MNQMNPAFVMPDVQSTPDTRQIPIQRVGVKAVRHPLTVRTQGGEVQPSVGTWNLDVHLPADQKGTHMSRFVALLEENKAPLEAATFRTMLAAMLERLEAEAGRIEVSFPYFVNKTAPVSGVQSLLDYEVTLTGETRNGATRLFLKVLVPVTSLCPCSKKISQYGAHNQRSHVTINAELAGDVAVEELVRIAEEEASCELWGLLKRPDEKFVTERAYENPKFVEDLVRDVAQRLNADERIVAYVLEAENFESIHNHSAYAVIERDKRVA

SEQ ID NO: 12216 - protein, 211 aa, unidentified
  source 1..211: note = Paraburkholderia fungorum
  REGION 1..211: note = tr|A0A1H1IND4|A0A1H1IND4_9BURK GTP cyclohydrolase 1; OS = Paraburkholderia fungorum OX=134537 GN=folE PE=3 SV=1
MTSSKAKKKTQPAAERPSRDEAEAAVRVLLRWAGDDPAREGLIDTPARVVRSYEEFYAGYQVDPREILARTFSEVDGYDEMIVLKDIRFESYCEHHMVPIIGRAHVAYLPQHRVVGISKLARLVDAFAKRLQIQEKMTVQIADTLNDVLQPAGVGVILEAAHQCMSTRGVHKAGVTMVTSRMLGTFRTDPSTRREFLSIVGNPGVVAVANT

SEQ ID NO: 12217 - protein, 212 aa, unidentified
  source 1..212: note = Paraburkholderia ginsengiterrae
  REGION 1..212: note = tr|A0A1A9N5R3|A0A1A9N5R3_9BURK GTP cyclohydrolase 1; OS = Paraburkholderia ginsengiterrae OX=1462993 GN=folE PE=3; SV = 1
MTSSKAKKTKPVAAAERPSREEAEAAVRVLLRWAGDDPAREGLLDTPARVVRSYEEFYAGYQVDPREILARTFSEVDGYDEMIVLKDIRFESYCEHHMVPIIGRAHVAYLPEHRVVGISKLARLVDAFAKRLQIQEKMTVQIADTLNEVLQPAGVGVILEAAHQCMSTRGVHKAGVTMVTSRMLGTFRTDPSTRREFLSIVGNPGVVSVANT

SEQ ID NO: 12218 - protein, 268 aa, unidentified
  source 1..268: note = Paraburkholderia ginsengiterrae
  REGION 1..268: note = tr|A0A1A9NH70|A0A1A9NH70_9BURK GTP cyclohydrolase FolE2 OS=Paraburkholderia ginsengiterrae OX=1462993; GN = folE2 PE=3 SV=1
MNQMNPAFVMPDVQSTPDTRQIPIQRVGVKAVRHPLTVRTQGGEVQPSVGTWNLDVHLPAEQKGTHMSRFVALLEENKAPLEPATFRTMLAAMLEKLEAEAGRIEVSFPYFVNKTAPVSGVQSLLDYEVTLTGEIRNGATRLFLKVLVPVTSLCPCSKKISQYGAHNQRSHVTINAELAGEIAVEELIRIAEEEASCELWGMLKRPDEKFVTERAYENPKFVEDLVRDVAQRLNADERVVAYVLEAENFESIHNHSAYAVIERDKRVA

SEQ ID NO: 12219 - protein, 268 aa, unidentified
  source 1..268: note = Paraburkholderia graminis
  REGION 1..268: note = tr|B1FVF1|B1FVF1_PARG4 GTP cyclohydrolase FolE2; OS = Paraburkholderia graminis (strain ATCC 700544 / DSM 17151 / LMG 18924 / NCIMB 13744 / C4D1M) OX=396598; GN = folE2 PE =3 SV=1
MNQMNPAFVMPDVQSTPDTRQIPIQRVGVKAVRHPLTVRTQSGDAQPTVGTWNLDVHLPADQKGTHMSRFVALLEENKAPLEPATFRTMLAAMLQKLEAEAGRIEVSFPYFVNKTAPVSGVQSLLDYEVTLTGDTRNGETRLFLKVLVPVTSLCPCSKKISQYGAHNQRSHVTINAELAGEVAVEDLIRIAEEEASCELWGLLKRPDEKFVTERAYENPKFVEDLVRDVAQRLNADERIVAYVLEAENFESIHNHSAYAVIERAKRVV

SEQ ID NO: 12220 - protein, 216 aa, unidentified
  source 1..216: note = Paraburkholderia graminis
  REGION 1..216: note = tr|B1G118|B1G118_PARG4 GTP cyclohydrolase 1; OS = Paraburkholderia graminis (strain ATCC 700544 / DSM 17151 / LMG 18924 / NCIMB 13744 / C4D1M) OX=396598 GN=folE; PE = 3 SV =1
MTSSKTEQTTATNATEAANGRPSREEAEAAVRVLLRWAGDNPEREGLIDTPARVVRSYEEFYAGYQIDPREILARTFSEVDGYDEMIVLKDIRFESYCEHHMVPIIGRAHVAYLPGHRVVGISKLARLVDAFAKRLQIQEKMTVQIADTLNDVLQPEGVGVILEASHQCMSTRGVHKAGVTMVTSRMLGTFRTDPSTRREFLSIVGNPGAVAVHNT

SEQ ID NO: 12221 - protein, 265 aa, unidentified
  source 1..265: note = Paraburkholderia hospita
  REGION 1..265: note = tr|A0A244DVZ8|A0A244DVZ8_9BURK GTP cyclohydrolase FolE2 OS=Paraburkholderia hospita OX=169430 GN=folE2 PE=3; SV = 1
MNQMNPAFVMPDVQSTVDTRQIPIQRVGVKAVRHPLTVRTPDGSVQPTIGTWNLDVHLPAEVKGTHMSRFVALLEENKTPLDSAAFRAMLAAMLEKLEAPAGRIEVSFPYFVNKTAPVSGVQSLLDYEVTLTADSRDGATRLFLKVLVPVTSLCPCSKKISQYGAHNQRSHVTINAELIEDVPVEDLIRIAEEEASCELWGLLKRPDEKFVTERAYENPKFVEDLVRDVAQRLNADKRIVAYVLEAENFESIHNHSAYAVIEKRA

SEQ ID NO: 12222 - protein, 209 aa, unidentified
  source 1..209: note = Paraburkholderia hospita
  REGION 1..209: note = tr|A0A244DER2|A0A244DER2_9BURK GTP cyclohydrolase 1; OS = Paraburkholderia hospita OX=169430 GN=folE PE=3 SV=1
MNTKNTTSADAPGRPSRDEAEEAVRVLLRWAGDNPQREGLLDTPARVVRAYEEFFAGYDVDPREILARTFSEVDGYDEMIVLKDIRFESYCEHHMVPIIGRAHVAYLPEHRVVGISKLARLVDAFAKRLQIQEKMTVQIADTLNEVLQPKGVGVILEASHQCMSTRGVHKAGVEMVTSRMLGTFRTDPSTRREFLSIVHGPTSVSVANT

SEQ ID NO: 12223 - protein, 268 aa, unidentified
  source 1..268: note = Paraburkholderia insulsa
  REGION 1..268: note = tr|A0A2T1B2Z0|A0A2T1B2Z0_9BURK GTP cyclohydrolase FolE2 OS=Paraburkholderia insulsa OX=1441714 GN=folE2 PE=3; SV = 1
MNQMNPAFVMPDVQSTPDTRQIPIQRVGVKAVRHPLTVRTQGGEVQPSVGTWNLDVHLPADQKGTHMSRFVALLEENKAPLEAATFRTMLAAMLERLEAEAGRIEVSFPYFVNKTAPVSGVQSLLDYEVTLTGETRNGATRLFLKVLVPVTSLCPCSKKISQYGAHNQRSHVTINAEVAGDVAVEELVRIAEEEASCELWGLLKRPDEKFVTERAYENPKFVEDLVRDVAQRLNADERIVAYVLEAENFESIHNHSAYAVIERDKRVA

SEQ ID NO: 12224 - protein, 268 aa, unidentified
  source 1..268: note = Paraburkholderia megapolitana
  REGION 1..268: note = tr|A0A1I3LU15|A0A1I3LU15_9BURK GTP cyclohydrolase FolE2 OS=Paraburkholderia megapolitana OX=420953 GN=folE2; PE = 3 SV=1
MNQMNPAFVMPDVQSTLDTRQIPIQRVGVKAVRHPVTVRTQTGEAQPTVGTWNLDVHLPADQKGTHMSRFVALLEENRVPLDTTAFRTMLASMLEKLEAEAGRIEVSFPYFVSKVAPVSGVQSLLDYEVTLTGETRHGVTRVFLKVLVPVTSLCPCSKKISQYGAHNQRSHVTIDAELAGDVAVEELIRIAEEEASCELWGLLKRPDEKFVTERAYENPKFVEDLVRDVAQRLNADARIVAYVLEAENFESIHNHSAYALIEHDKRVR

SEQ ID NO: 12225 - protein, 220 aa, unidentified
  source 1..220: note = Paraburkholderia megapolitana
  REGION 1..220: note = tr|A0A1I3PY36|A0A1I3PY36_9BURK GTP cyclohydrolase 1; OS = Paraburkholderia megapolitana OX=420953 GN=folE PE=3; SV = 1
MNSKAGKVRAIRTTAKAKPAETPVRPTREEAEAAVRTLLRWAGDDPQREGLLDTPARVVRSYEEFFAGYSVDPRDVLARTFSEVDGYDEMIVLKDIRFESYCEHHMVPIIGRAHVAYLPQHRVVGISKLARLVDAFAKRLQIQEKMTAQIADTLNEVLQPRGVGVILEASHQCMSTRGVHKAGVAMVTSRMLGAFRSDASTRREFLAIVNGPPSVGIANT

SEQ ID NO: 12226 - protein, 212 aa, unidentified
  source 1..212: note = Paraburkholderia monticola
  REGION 1..212: note = tr|A0A149PJ57|A0A149PJ57_9BURK GTP cyclohydrolase 1; OS = Paraburkholderia monticola OX=1399968 GN=folE PE=3 SV=1
MSSSKAKKTKPAAAAERPSREEAEAAVRVMLRWAGDDPSREGLIDTPARVVRAYEEFFAGYQVDPRDILARTFSEVDGYDEMIVLKDIRFESYCEHHMVPIIGRAHVAYLPNHRVVGISKLARLVDAFAKRLQIQEKMTVQIADTLNDVLQPAGVGVILEAAHQCMSTRGVHKAGVTMVTSRMLGTFRTDPSTRREFLAIVGNPGVVAVPNT

SEQ ID NO: 12227 - protein, 268 aa, unidentified
  source 1..268: note = Paraburkholderia monticola
  REGION 1..268: note = tr|A0A149PQ94|A0A149PQ94_9BURK GTP cyclohydrolase FolE2 OS=Paraburkholderia monticola OX=1399968 GN=folE2; PE = 3 SV=1
MNQMNPAFVMPDVQSTPDTRQIPIQRVGVKGVRHPLTVRTQGGEVQPTVGTWNLDVHLPAEQKGTHMSRFVALLEENKAPLEPAAFRTMLAAMLEKLEAEAGRIEVSFPYFVNKTAPVSGVQSLLDYEVTLAGETRNGATRLFLKVLVPVTSLCPCSKKISQYGAHNQRSHVTIDAELSGDVAVEELILIAEEEASCELWGLLKRPDEKFVTERAYENPKFVEDLVRDVAQRLNADERVVAYVLEAENFESIHNHSAYAVIERDKRIA

SEQ ID NO: 12228 - protein, 211 aa, unidentified
  source 1..211: note = Paraburkholderia phenazinium
  REGION 1..211: note = tr|A0A1N6JAL4|A0A1N6JAL4_9BURK GTP cyclohydrolase 1; OS = Paraburkholderia phenazinium OX=60549 GN=folE PE=3 SV=1
MSSKAKKTKQSEALGRPTRDEAEAAVRVLLRWAGDDPQREGLLDTPARVVRSYEEFFAGYSVDPREILARTFSEVDGYDEMIVLKDIRFESYCEHHMVPIIGRAHVAYLPGHRVVGISKLARLVDAFAKRLQIQEKMTVQIADTLNEVLQPEGVGVILEASHQCMSTRGVHKAGVTMVTSRMLGTFRTDPSTRREFLSIVGNPGVVAVANT

SEQ ID NO: 12229 - protein, 213 aa, unidentified
  source 1..213: note = Paraburkholderia phenazinium
  REGION 1..213: note = tr|A0A4R7QI37|A0A4R7QI37_9BURK GTP cyclohydrolase 1; OS = Paraburkholderia phenazinium OX=60549 GN=folE PE=3 SV=1
MTSKSKAKKTKQSEALGRPTREEAEDAVRVLLRWAGDDPQREGLLDTPARVVRSYEEFFAGYSVDPRELLARTFSEVDGYDEMIVLKDIRFESYCEHHMVPIIGRAHVAYLPGRRVVGISKLARLVDAFAKRLQIQEKMTVQIADTLNEVLQPEGVGVILEAAHQCMSTRGVHKAGVTMVTSRMLGTFRTDPSTRREFLSIVGHPGIVAVSNT

SEQ ID NO: 12230 - protein, 268 aa, unidentified
  source 1..268: note = Paraburkholderia phenoliruptrix
  REGION 1..268: note = tr|K0DS56|K0DS56_9BURK GTP cyclohydrolase FolE2; OS = Paraburkholderia phenoliruptrix BR3459a OX=1229205; GN = folE2 PE=3 SV=1
MNQMNPAFVMPDVQSTPDTRQIPIQRVGVKAVRHPLTVRTSSGDVQPTVGTWNLDVHLPADQKGTHMSRFVALLEENKAPLEPATFRAMLAAMLEKLEAEAGRIEVSFPYFVNKTAPVSGVQSLLDYEVTLSGETRNGATRLFLKVMVPVTSLCPCSKKISQYGAHNQRSHVTINAELAGEIAVEDLIRIAEEEASCELWGLLKRPDEKFVTERAYENPKFVEDLVRDVAQRLNADERIVAYVLEAENFESIHNHSAYAVIERDKRVV

SEQ ID NO: 12231 - protein, 212 aa, unidentified
  source 1..212: note = Paraburkholderia phenoliruptrix
  REGION 1..212: note = tr|K0DQD5|K0DQD5_9BURK GTP cyclohydrolase 1; OS = Paraburkholderia phenoliruptrix BR3459a OX=1229205; GN = folE PE=3 SV=1
MTSSKRENTPPAAADGRPSREEAEAAVRVLLRWAGDNPEREGLVDTPARVVRAYEEFFAGYQVDPRDILARTFSEVDGYDEMIVLKDIRFESYCEHHMVPIIGRAHVAYLPGHRVVGISKLARLVDAFAKRLQIQEKMTVQIADTLNEVLQPAGVGVILEAAHQCMSTRGVHKAGVTMVTSRMLGTFRTDPSTRREFLSIVGNPGAVAVPNT

SEQ ID NO: 12232 - protein, 268 aa, unidentified
  source 1..268: note = Paraburkholderia phymatum
  REGION 1..268: note = sp|B2JP67|GCH4_PARP8 GTP cyclohydrolase FolE2; OS = Paraburkholderia phymatum (strain DSM 17167 / CIP 108236 / LMG 21445 / STM815) OX=391038 GN=folE2 PE=3 SV=1
MNQMNPAFVMPDVQSTVDTRQIPIQRVGVKAVRHPLTVRTPDGSAQPTVGTWNLDVHLPAEVKGTHMSRFVALLEENKAPLDSSAFRALLTSMLEKLEAPAGRIEVSFPYFVNKTAPVSGVQSLLDYEVSLMGDSRDGATRLFLKVLVPVTSLCPCSKKISQYGAHNQRSHVTINAELIDDVPVEDLIRIAEEEASCELWGLLKRPDEKFVTERAYENPKFVEDLVRDVAQRLNDDHRIVAYVLEAENFESIHNHSAYAVIESDKRLR

SEQ ID NO: 12233 - protein, 209 aa, unidentified
  source 1..209: note = Paraburkholderia phymatum
  REGION 1..209: note = tr|B2JQM7|B2JQM7_PARP8 GTP cyclohydrolase 1; OS = Paraburkholderia phymatum (strain DSM 17167 / CIP 108236 / LMG 21445 / STM815) OX=391038 GN=folE PE=3 SV=1
MTTKKTIPTDAPGRPSREEAEEAVRTLLRWAGDNPQREGLLDTPARVVRAYEEFFAGYNVEPRDILARTFSEVDGYDEMIVLKDIRFESYCEHHMVPIIGRAHVAYLPEHRVVGISKLARLVDAFAKRLQIQEKMTVQIADTLNEVLQPKGVGVILEASHQCMSTRGVHKAGVEMVTSRMLGTFRSDPSTRREFLSIVNSPTSVSVANT

SEQ ID NO: 12234 - protein, 212 aa, unidentified
  source 1..212: note = Paraburkholderia phytofirmans
  REGION 1..212: note = tr|B2TF16|B2TF16_PARPJ GTP cyclohydrolase 1; OS = Paraburkholderia phytofirmans (strain DSM 17436 / LMG 22146 / PsJN) OX=398527 GN=folE PE=3 SV=1
MTSSKAKKTKPITATERPSREEAEAAVRVLLRWAGDDPAREGLIDTPARVVRSYEEFYAGYQVDPREILARTFSEVDGYDEMIVLKDIRFESYCEHHMVPIIGRAHVAYLPQHRVVGISKLARLVDAFAKRLQIQEKMTVQIADTLNEVLQPAGVGVILEAAHQCMSTRGVHKAGVTMVTSRMLGTFRTDPSTRREFLSIVGNPGVVAVANT

SEQ ID NO: 12235 - protein, 268 aa, unidentified
  source 1..268: note = Paraburkholderia phytofirmans
  REGION 1..268: note = tr|B2T9H2|B2T9H2_PARPJ GTP cyclohydrolase FolE2; OS = Paraburkholderia phytofirmans (strain DSM 17436 / LMG 22146 / PsJN) OX=398527 GN=folE2 PE=3 SV=1
MNQMNPAFVMPDVQSTPDTRQIPIQRVGVKAVRHPLTVRTQSGEVQPTVGTWNLDVHLPADQKGTHMSRFVALLEENKAPLEPATFRTMLAAMLEKLEAEAGRIEVSFPYFVNKTAPVSGVQSLLDYEVTLTGETRNGATRLFLQVLVPVTSLCPCSKKISQYGAHNQRSHVTINTELAGDVAVEELIRIAEEEASCELWGLLKRPDEKFVTERAYENPKFVEDLVRDVAQRLNADERVVAYVLEAENFESIHNHSAYAVIERDKRAA

SEQ ID NO: 12236 - protein, 268 aa, unidentified
  source 1..268: note = Paraburkholderia piptadeniae
  REGION 1..268: note = tr|A0A1N7S6E7|A0A1N7S6E7_9BURK GTP cyclohydrolase FolE2 OS=Paraburkholderia piptadeniae OX=1701573 GN=folE; PE = 3 SV=1
MNQMNPAFVMPDVQSTLDTRQIPIQRVGVKAVRHPLTVRTPDGNVQPTIGTWNLDVHLPADVKGTHMSRFVALLEENNAPLDASAFRAMLASMLEKLEAPAGRIQVSFPYFVNKTAPVSGVQSLLDYEVTLTADARNGATRLFLKVMVPVTSLCPCSKKISEYGAHNQRSHVTIDAELVDDMPVEDLIRIAEDEASCELWGLLKRPDEKFVTERAYENPKFVEDLVRDVATRLNADRRIIAYVLEAENFESIHNHSAYAVIENDKRTS

SEQ ID NO: 12237 - protein, 209 aa, unidentified
  source 1..209: note = Paraburkholderia piptadeniae
  REGION 1..209: note = tr|A0A1N7SMR3|A0A1N7SMR3_9BURK GTP cyclohydrolase 1; OS = Paraburkholderia piptadeniae OX=1701573 GN=folE PE=3; SV = 1
MTTKTNTPADTPNRPSRDEAEEAVRVLLRWAGDDPRREGLIDTPSRVVRAYEEFFAGYDVEPRDILARTFSEVDGYDEMIVLKDIRFESYCEHHMVPIIGRAHVAYLPEHRVVGISKLARLVDAFAKRLQIQEKMTVQIADTLNEVLQPKGVGVILEASHQCMSTRGVHKAGVEMVTSRMLGTFRSDPSTRREFLSIVNSPTSMSVANT

SEQ ID NO: 12238 - protein, 269 aa, unidentified
  source 1..269: note = Paraburkholderia rhizosphaerae
  REGION 1..269: note = tr|A0A4R8LZ38|A0A4R8LZ38_9BURK GTP cyclohydrolase FolE2 OS=Paraburkholderia rhizosphaerae OX=480658 GN=folE2; PE = 3 SV=1
MNQMNPAFVMPDVQSTIDTRQIPIQRVGVKAVRYPLTVRTQGRADQPTIGTWNLDVHLPADQKGTHMSRFVALLEEQTGPLDASTLRTMLAAMLEKLEAHAGRIEVSFPYFVNKTAPVSGVQSLLDYEVTLAGELRDGATRVFLKVLVPVTSLCPCSKKISQYGAHNQRSHVTINAELAGDIAIEDLIRIAEEEASCELWGLLKRPDEKFVTERAYENPKFVEDLVRDVAQRLNADERIAAYVLEAENFESIHNHSAYAVIENDKRAAR

SEQ ID NO: 12239 - protein, 218 aa, unidentified
  source 1..218: note = Paraburkholderia rhizosphaerae
  REGION 1..218: note = tr|A0A4R8LXA1|A0A4R8LXA1_9BURK GTP cyclohydrolase 1; OS = Paraburkholderia rhizosphaerae OX=480658; GN = BX592_105186 PE=3 SV=1
MSYPGHQYGRNDAPCVPSAGGIARVRPFDAAAFETAVTAMLTAAGVDVESEHLRLSAQCVRELWQQRLLDGYDVDSADALGNGFADARRDVVIMRGITVHGMCPHHLLPFRGVAHIAYLPGGRLYGFGGLTRLVDAVCHRFVYQEWATDAIANALVAHGHARGAACVIEAEQLCQLIGEVRRGDERVVTQSFAGEFSKNSAARAEFLRVIGTSGTSGA

SEQ ID NO: 12240 - protein, 281 aa, unidentified
  source 1..281: note = Paraburkholderia rhizoxinica
  REGION 1..281: note = tr|E5APH1|E5APH1_PARRH GTP cyclohydrolase FolE2; OS = Paraburkholderia rhizoxinica (strain DSM 19002 / CIP 109453 / HKI 454) OX=882378 GN=folE2 PE=3 SV=1
MNRGVRRCQGMPMNQMNPAFVMPDVQSTPDTRQIPIQRVGIRAVRHPLTVRTAQGDAQPTVGSWNLNVLLPAEQKGTHMSRFIALLDQAQTPLDIAHFRAMLATMLEKLEATAGRIEVTFPYFIRKTAPVSGVQSLLDYEVTLSADACDGTTRLFTKVLVPVTSLCPCSKKISQYGAHNQRSHVTISAELVDDVPVEDLVRMAEEEASCELWGLLKRPDEKFVTERAYDNPKFVEDLVRDVAQRLNADPRIVAYVLEAENFESIHNHSAYALIEHDKRCSD

SEQ ID NO: 12241 - protein, 211 aa, unidentified
  source 1..211: note = Paraburkholderia rhynchosiae
  REGION 1..211: note = tr|A0A2N7WAB9|A0A2N7WAB9_9BURK GTP cyclohydrolase 1; OS = Paraburkholderia rhynchosiae OX=487049 GN=folE PE=3 SV=1
MTSKTEQTTPADTTGRPSREEAEAAVRVLLRWAGDDPQREGLMDTPARVVRSYEEFFAGYQVDPREILARTFSEVDGYDEMIVLKDIRFESYCEHHMVPIIGRAHVAYLPGHRVVGISKLARLVDAFAKRLQIQEKMTVQIADTLNDVLQPAGVGVILEAAHQCMSTRGVHKAGVTMVTSRMLGTFRTDPSTRREFLSIVGNPGAVAVSNT

SEQ ID NO: 12242 - protein, 268 aa, unidentified
  source 1..268: note = Paraburkholderia rhynchosiae
  REGION 1..268: note = tr|A0A2N7WAI1|A0A2N7WAI1_9BURK GTP cyclohydrolase FolE2 OS=Paraburkholderia rhynchosiae OX=487049 GN=folE2; PE = 3 SV=1
MNQMNPAFVMPDVQSTPDTRQIPIQRVGVKAVRHPLTVRTQSGDAQPTIGTWNLDVHLPADQKGTHMSRFVALLEENKAPLEPATFRTMLAAMLDKLEAEAGRIEVSFPYFVNKTAPVSGVQSLLDYEVTLTGETRNGAARLFVKVLVPVTSLCPCSKKISQYGAHNQRSHVTINAELAGDVAVEELICIAEEEASCELWGLLKRPDEKFVTERAYENPKFVEDLVRDVAQRLNADERIVAYLLEAENFESIHNHSAYAVIERDKRVV

SEQ ID NO: 12243 - protein, 268 aa, unidentified
  source 1..268: note = Paraburkholderia ribeironis
  REGION 1..268: note = tr|A0A1N7SH32|A0A1N7SH32_9BURK GTP cyclohydrolase FolE2 OS=Paraburkholderia ribeironis OX=1247936 GN=folE2; PE = 3 SV=1
MNQMNPAFMMPDVQSTPDSRQIPIQRVGVRGVRHPLTVRTQGGDVQPTVGTWNLDVHLPADQKGTHMSRFVALLEENKAPLEPVTFRTLLAAMLEKLEAEAGRIEVSFPYFVSKIAPVSGVQSLLDYEVTLTGDARHGATRLFLKVLVPVTSLCPCSKEISQYGAHNQRSHVTINAELAGDVAVEELVRIAEEQASCELWGLLKRPDEKFVTERAYENPKFVEDLVRDVAQRLNADERIVAYVLEAENFESIHNHSAYAVIERDKRVG

SEQ ID NO: 12244 - protein, 212 aa, unidentified
  source 1..212: note = Paraburkholderia ribeironis
  REGION 1..212: note = tr|A0A1N7SCL2|A0A1N7SCL2_9BURK GTP cyclohydrolase 1; OS = Paraburkholderia ribeironis OX=1247936 GN=folE PE=3 SV=1
MTSSKAKKTKPAAAAQRPSRDEAEAAVRVLLRWAGDDPQREGLLDTPGRVVRSYEEFYAGYQVDPREILARTFSEVDGYDEMIVLKDIRFESYCEHHMVPIIGRAHVAYLPAHRVVGISKLARLVDAFAKRLQIQEKMTVQIADTLNDVLQPVGVGVILEAAHQCMSTRGVHKTGVTMVTSRMLGTFRSDPSTRREFLAIVGNPGVVSVANT

SEQ ID NO: 12245 - protein, 216 aa, unidentified
  source 1..216: note = Paraburkholderia sacchari
  REGION 1..216: note = tr|A0A0A6QB24|A0A0A6QB24_9BURK GTP cyclohydrolase 1; OS = Paraburkholderia sacchari OX=159450 GN=folE PE=3 SV=1
MSDAKKTEENTPKEPKTGAGRPSREQAEDAVRVLLRWAGDDPAREGLIDTPARVVRAYEEFFAGYDHDPREILSRTFSEVDGYDEMIVLKDIRFESYCEHHMVPIIGRAHVAYLPEHRVVGISKLARLVDAFAKRLQIQEKMTAQIADTLNEVLQPKGVGVILEAAHQCMSTRGVHKAGVTMVTSRMLGTFRSDPSTRREFLAIVGNPGVMSVPNT

SEQ ID NO: 12246 - protein, 266 aa, unidentified
  source 1..266: note = Paraburkholderia sacchari
  REGION 1..266: note = tr|A0A0A6Q7J6|A0A0A6Q7J6_9BURK GTP cyclohydrolase FolE2 OS=Paraburkholderia sacchari OX=159450 GN=folE2 PE=3; SV = 1
MNQMNPAFVMPDVQSSVDTRQIPIQRVGVKGVRHPLTVKTGAGDVQPSVGTWNLDVHLPADQKGTHMSRFVALLEENKAPLEAATFRAMLAAMVEKLESQAGRIEVSFPYFVKKVAPVSGVESLLDYEVTLAGEVRNGETRLFLKVLVPVTSLCPCSKKISQYGAHNQRSHVTIDAELAGDLPVEDLIRIAEEEASCELWGLLKRPDEKFVTERAYENPKFVEDLVRDVAVRLNADARVMAYTLEAENFESIHNHSAYAVIEHDKR

SEQ ID NO: 12247 - protein, 269 aa, unidentified
  source 1..269: note = Paraburkholderia sartisoli
  REGION 1..269: note = tr|A0A1H4HEK8|A0A1H4HEK8_9BURK GTP cyclohydrolase FolE2 OS=Paraburkholderia sartisoli OX=83784 GN=folE2 PE=3; SV = 1
MNQMNPAFVMPDVQSTVDTRQIAIQRVGVKAVRHPLTVRTPRGDAQPTIGTWSLDVHLPAEVKGTHMSRFVALLEESRAPLDTAAFRAMLATMLEKLEAEAGRIEVSFPYFVNKTAPVSGVESLLDYDVTLTGDTRNGMTRLFLKVLVPVTSLCPCSKKISQYGAHNQRSHVTINVELADDVPVEDLIRIAEEEASCELWGLLKRPDEKFVTERAYENPKFVEDLVRDVAQRLNADSRIVAYVLEAENFESIHNHSAYALIENDKRTVR

SEQ ID NO: 12248 - protein, 208 aa, unidentified
  source 1..208: note = Paraburkholderia sartisoli
  REGION 1..208: note = tr|A0A1H4HRT0|A0A1H4HRT0_9BURK GTP cyclohydrolase 1; OS = Paraburkholderia sartisoli OX=83784 GN=folE PE=3 SV=1
MTRTTKAEEAPIRPTREEAEAAVRVLLRWAGDDPAREGLLDTPSRVVRSYEEFFAGYTVDPKELLARTFSEVDGYDEMIVLKDIRFESYCEHHMVPIIGRAHVAYLPEHRVVGISKLARLVDAFAKRLQIQEKMTVQIADTLNEVLQPKGVGVILEASHQCMSTRGVHKAGVAMVTSRMLGTFRSDPSTRREFLSIVGNASTVSVANT

SEQ ID NO: 12249 - protein, 212 aa, unidentified
  source 1..212: note = Paraburkholderia sediminicola
  REGION 1..212: note = tr|A0A419TKT6|A0A419TKT6_9BURK GTP cyclohydrolase 1; OS = Paraburkholderia sediminicola OX=458836 GN=folE PE=3; SV = 1
MASSKAKKTKPAAAVDRPSREEAEAAVRVLLRWAGDNPEREGLLDTPSRVVRSYEEFYAGYQVDPREILARTFSEVDGYDEMIVLKDIRFESYCEHHMVPIIGRAHVAYLPGHRVVGISKLARLVDAFAKRLQIQEKMTVQIADTLNDVLQPAGVGVILEAAHQCMSTRGVHKAGVTMVTSRMLGTFRTDPSTRREFLSIVGNPGVVAVANT

SEQ ID NO: 12250 - protein, 268 aa, unidentified; identical to SEQ ID NO: 5890
  source 1..268: note = Paraburkholderia sediminicola
  REGION 1..268: note = tr|A0A419TGI5|A0A419TGI5_9BURK GTP cyclohydrolase FolE2 OS=Paraburkholderia sediminicola OX=458836 GN=folE2; PE = 3 SV=1

SEQ ID NO: 12251 - protein, 268 aa, unidentified
  source 1..268: note = Paraburkholderia silvatlantica
  REGION 1..268: note = tr|A0A2U1A7H7|A0A2U1A7H7_9BURK GTP cyclohydrolase FolE2 OS=Paraburkholderia silvatlantica OX=321895 GN=folE2; PE = 3 SV=1
MNQMNPAFVMPDVQSSVDTRQIVIQRVGVKAVRHPLTVKTGAGDVQPSVGTWNLDVHLPADQKGTHMSRFVALLEEHKAPLEPATFRAMLAAMLAKLESQAGRIEVRFPYFVKKVAPVSGVESLLDYEVTLTGDVRNGQTRLFLEVLVPVTSLCPCSKKISQYGAHNQRSHVTMNVEFEGDLPVEDLIRIAEEEASCELWGLLKRPDEKFVTERAYENPKFVEDLVRDVAVRLNADARVLAYTLEAENFESIHNHSAYAVIEHDKRAA

SEQ ID NO: 12252 - protein, 229 aa, unidentified
  source 1..229: note = Paraburkholderia silvatlantica
  REGION 1..229: note = tr|A0A2U1ACY0|A0A2U1ACY0_9BURK GTP cyclohydrolase 1; OS = Paraburkholderia silvatlantica OX=321895 GN=folE PE=3; SV = 1
MSEEKKAGKSRQGASQAAKPRKSATNATVQTAARPSRAEAEDAVRVLLRWAGDDPAREGLLDTPARVTRAYEEFFAGYQVDPREILSRTFSEVDGYDEMIVLKDIRFESYCEHHMVPIIGRAHVAYLPEHRVVGISKLARLVDAFAKRLQIQEKMTAQIADTLNEILQPKGVGVILEAAHQCMSTRGVHKAGVEMVTSRMLGTFRTDPSTRREFLAIVGNPGAMSVSNT

SEQ ID NO: 12253 - protein, 268 aa, unidentified
  source 1..268: note = Paraburkholderia sp.
  REGION 1..268: note = tr|A0A2S8RL33|A0A2S8RL33_9BURK GTP cyclohydrolase FolE2 OS=Paraburkholderia sp. BL21I4N1 OX=1938801 GN=folE2; PE = 3 SV=1
MNQMNPAFVMPDVQSTPDTRQIPIQRVGVKAVRHPLTVRTQGGDVQPTIGTWNLDVHLPADQKGTHMSRFVALLEENKAPLESATFRAMLAAMLEKLEAEAGRIEVSFPYFVNKTAPVSGVQSLLDYEVTLTGETRNGATRLFLKVLVPVTSLCPCSKKISQYGAHNQRSHVTINAELAGDVAVEELVRIAEEEASCELWGLLKRPDEKFVTERAYENPKFVEDLVRDVAQRLNADERIVAYVLEAENFESIHNHSAYAVIERDKRAV

SEQ ID NO: 12254 - protein, 219 aa, unidentified
  source 1..219: note = Paraburkholderia sp.
  REGION 1..219: note = tr|A0A372K9C4|A0A372K9C4_9BURK GTP cyclohydrolase 1; OS = Paraburkholderia sp. DHOC27 OX=2303330 GN=folE PE=3 SV=1
MISKAKKTKQNDAASRSAAPAIQRPSREEAEDAVRVLLRWAGDDPTREGLLDTPARVVRSYEEFFAGYAVDPREILARTFSEVDGYDEMIVLKDIRFESYCEHHMVPIIGRAHVAYLPKHRVVGISKLARLVDAFAKRLQIQEKMTVQIADTLNEVLQPEGVGVILEAAHQCMSTRGVHKAGVSMVTSRMLGTFRTDPSTRREFLSIVGNPGVVAVSNV

SEQ ID NO: 12255 - protein, 268 aa, unidentified
  source 1..268: note = Paraburkholderia sprentiae
  REGION 1..268: note = tr|A0A1I9YNG0|A0A1I9YNG0_9BURK GTP cyclohydrolase FolE2 OS=Paraburkholderia sprentiae WSM5005 OX=754502; GN = folE2 PE=3 SV=1
MNQMNPAFVMPDVQSTPDTRQIPIQRVGVKGVRHPLTVRTQGGEVQPTVGTWNLDVHLPAEQKGTHMSRFVALLEENKAPLELATFRTMLEAMLEKLEAEAGRIEVSFPYFVNKTAPVSGVQSLLDYEVTLTGETRQGAMRLFLKVLVPVTSLCPCSKKISQYGAHNQRSHVTIDAELNGDVAVEELIRIAEEEASCELWGLLKRPDEKFVTERAYENPKFVEDLVRDVAQRLNADERIVAYVLEAENFESIHNHSAYALIERDKRLA

SEQ ID NO: 12256 - protein, 213 aa, unidentified
  source 1..213: note = Paraburkholderia sprentiae
  REGION 1..213: note = tr|A0A1I9YQ19|A0A1I9YQ19_9BURK GTP cyclohydrolase 1; OS = Paraburkholderia sprentiae WSM5005 OX=754502 GN=folE; PE = 3 SV=1
MTSSKTNKTDPVAAAVERPSREEAEAAVRVLLRWAGDDPQREGLIDTPARVTRAYEEFFAGYQVDPREILARTFSEVDGYDEMIVLKDIRFESYCEHHMVPIIGRAHVAYLPNHRVVGISKLARLVDAFAKRLQIQEKMTVQIADTLNDVLQPAGVGVILEAAHQCMSTRGVHKAGVTMVTSRMLGTFRTDPSTRREFLSIVGNPGVVTVPNS

SEQ ID NO: 12257 - protein, 268 aa, unidentified
  source 1..268: note = Paraburkholderia susongensis
  REGION 1..268: note = tr|A0A1X7M3L2|A0A1X7M3L2_9BURK GTP cyclohydrolase FolE2 OS=Paraburkholderia susongensis OX=1515439 GN=folE2; PE = 3 SV=1
MNQMNPAFVMPDVQSTPDTRQIPIQRVGVKGVRHPLTVRTQGGEVQPTVGTWNLDVHLPAEQKGTHMSRFVALLEENKAPLEPPAFRTMLAAMLEKLEAEAGRIEVSFPYFVNKTAPVSGVQSLLDYEVTLTGETRNGATRLFLKVLVPVTSLCPCSKKISQYGAHNQRSHVTIDAELAGDIAVEELIRIAEEEASCELWGLLKRPDEKFVTERAYENPKFVEDLVRDVAQRLDADERVAAYVLEAENFESIHNHSAYAVIERDKRAG

SEQ ID NO: 12258 - protein, 213 aa, unidentified
  source 1..213: note = Paraburkholderia susongensis
  REGION 1..213: note = tr|A0A1X7LD34|A0A1X7LD34_9BURK GTP cyclohydrolase 1; OS = Paraburkholderia susongensis OX=1515439 GN=folE PE=3; SV = 1
MTSSKAENNTPPAAVVERPSREEAEAAVRVLLRWAGDDPQREGLLDTPARVTRAYEEFFAGYQTDPRDILARTFSEVDGYDEMIVLKDIRFESYCEHHMVPIIGRAHVAYLPQHRVVGISKLARLVDAFAKRLQIQEKMTVQIADTLNEVLQPAGVGVILEAAHQCMSTRGVHKAGVTMVTSRMLGTFRTDPSTRREFLSIVGSPEGMAVPNT

SEQ ID NO: 12259 - protein, 265 aa, unidentified
  source 1..265: note = Paraburkholderia terrae
  REGION 1..265: note = tr|A0A2I8EUW3|A0A2I8EUW3_9BURK GTP cyclohydrolase FolE2 OS=Paraburkholderia terrae OX=311230 GN=folE2 PE=3; SV = 1
MNQMNPAFVMPDVQSTVDTRQIPIQRVGVKAVRHPLTVRTPDGSVQPTIGTWNLDVHLPAEVKGTHMSRFVALLEENKTPLDSAAFRAMLASMLEKLEAPAGRIEVSFPYFVNKTAPVSGVQSLLDYEVTLTADSRDGATRLFLKVLVPVTSLCPCSKKISQYGAHNQRSHVTIDAELIDDVPVEDLIRIAEEEASCELWGLLKRPDEKFVTERAYENPKFVEDLVRDVAQRLNADKRIVGYVLEAENFESIHNHSAYAVIEKRG

SEQ ID NO: 12260 - protein, 209 aa, unidentified; identical to SEQ ID NO: 12222
  source 1..209: note = Paraburkholderia terrae
  REGION 1..209: note = tr|I5CPF3|I5CPF3_9BURK GTP cyclohydrolase 1; OS = Paraburkholderia terrae BS001 OX=1171375 GN=folE PE=3; SV = 1

SEQ ID NO: 12261 - protein, 212 aa, unidentified
  source 1..212: note = Paraburkholderia terricola
  REGION 1..212: note = tr|A0A1M6SQM3|A0A1M6SQM3_9BURK GTP cyclohydrolase 1; OS = Paraburkholderia terricola OX=169427 GN=folE PE=3 SV=1
MTSSKTKKIKPAAATGRPSREEAEAAVRVLLRWAGDDPEREGLADTPGRVVRAYEEFFAGYQVDPREILARTFSEVDGYDEMIVLKDIRFESYCEHHMVPIIGRAHVAYLPVHRVVGISKLARLVDAFAKRLQIQEKMTVQIADTLNDVLQPAGVGVILEAAHQCMSTRGVHKAGVTMVTSRMIGTFRTDPSTRREFLAIVGNPGVVAVANT

SEQ ID NO: 12262 - protein, 268 aa, unidentified
  source 1..268: note = Paraburkholderia terricola
  REGION 1..268: note = tr|A0A1M6N9L2|A0A1M6N9L2_9BURK GTP cyclohydrolase FolE2 OS=Paraburkholderia terricola OX=169427 GN=folE2; PE = 3 SV=1
MNQMNPAFVMPDVQSTPDTRQIPIQRVGVKAVRHPLTVRTQDGEVQPTVGMWNLDVHLPADQKGTHMSRFVALLEENKAPLEAATFRTLLAAMLEKLEAEAGRIEVSFPYFVNKTAPVSGVQSLLDYEVTLTGEIRNGATRLFIKVLVPVTSLCPCSKKISQYGAHNQRSHVTINAELAGEVAVEDLIRIAEEEASCELWGLLKRPDEKFVTERAYENPKFVEDLVRDVAQRLNADERIVAYVLEAENFESIHNHSAYAVIERDKRVP

SEQ ID NO: 12263 - protein, 220 aa, unidentified
  source 1..220: note = Paraburkholderia tropica
  REGION 1..220: note = tr|A0A1H7DZX9|A0A1H7DZX9_9BURK GTP cyclohydrolase 1; OS = Paraburkholderia tropica OX=92647 GN=folE PE=3 SV=1
MSDTKNTEKKGKKRPSKDAVEIAARPSRSEAEDAVRVLLRWAGDDPAREGLIDTPSRVVRAYEEFFAGYQLDPREILSRTFSEVDGYDEMIVLKDIRFESYCEHHMVPIIGRAHVAYLPEHRVVGISKLARLVDAFAKRLQIQEKMTAQIADTLNDVLQPKGVGVILEAAHQCMSTRGVHKAGVSMVTSRMLGTFRTDPSTRREFLAIVGNPGAMSVANT

SEQ ID NO: 12264 - protein, 269 aa, unidentified
  source 1..269: note = Paraburkholderia tropica
  REGION 1..269: note = tr|A0A1A5XEL3|A0A1A5XEL3_9BURK GTP cyclohydrolase FolE2 OS=Paraburkholderia tropica OX=92647 GN=folE2 PE=3; SV = 1
MNQMNPAFVMPDVQSSVDTRQIPIQRVGVKGVRHPLTVKTAAGDVQPSVGTWNLDVHLPADQKGTHMSRFVALLEENKQPLEPSTFRAMLTAMIAKLESQAGRIEVSFPYFVKKVAPVSGVESLLDYEVTLTGDVRDGVTRLFLQVLVPVTSLCPCSKKISQYGAHNQRSHVTMNVEFDGELAVEELIVIAEQEASCELWGLLKRPDEKFVTERAYENPKFVEDLVRDVAVRLNADARVIAYTLEAENFESIHNHSAYAVIEHDKRVSA

SEQ ID NO: 12265 - protein, 212 aa, unidentified
  source 1..212: note = Paraburkholderia tuberum
  REGION 1..212: note = tr|A0A1H1JEU3|A0A1H1JEU3_9BURK GTP cyclohydrolase 1; OS = Paraburkholderia tuberum OX=157910 GN=folE PE=3 SV=1
MTSSKAKKTKPVVAAERPSREEAEAAVRVLLRWAGDDPQREGLIDTPARVTRAYDEFFVGYQVDPRDILARTFSEVDGYDEMIVLKDIRFESYCEHHMVPIIGRAHVAYLPNHRVVGISKLARLVDAFAKRLQIQEKMTVQIADTLNEVLQPAGVGVILEAAHQCMSTRGVHKAGVTMVTSRMLGTFRTDPSTRREFLAIVGNPGVVAMPNA

SEQ ID NO: 12266 - protein, 211 aa, unidentified
  source 1..211: note = Paraburkholderia tuberum
  REGION 1..211: note = tr|A0A1H1JU73|A0A1H1JU73_9BURK GTP cyclohydrolase 1; OS = Paraburkholderia tuberum OX=157910 GN=folE PE=3 SV=1
MNKRDNQIGAEEVSIRPTPDEAEQAVRTLIRWAGDDPEREGLIQTPARVARAYREFFSGYDSDPMQILATTFSEVDGYDEMVVLKDIRFESYCEHHMVPINGRAHVAYLPEHRVVGISKLARLVDIYAKRLQIQEKMTVQIADALNTVLQPKGVAVILEAAHQCMSTRGVHKPGASLVTSRMLGAFRDDPSTRREFLSIVGHSTIAPLPNS

SEQ ID NO: 12267 - protein, 220 aa, unidentified
  source 1..220: note = Paraburkholderia unamae
  REGION 1..220: note = tr|A0A328XAI2|A0A328XAI2_9BURK GTP cyclohydrolase 1; OS = Paraburkholderia unamae OX=219649 GN=folE PE=3 SV=1
MSEIKKAGKAKQRKSQTSQDVRASRPSRDEAEDAVRVLLRWAGDDPSREGLIDTPARVVRAYEEFFAGYDVDPRDILSRTFSEVDGYDEMIVLKDIRFESYCEHHMVPIIGRAHVAYLPEHRVVGISKLARLVDAFAKRLQIQEKMTAQIADTLNEVLQPKGVGVILEAAHQCMSTRGVHKAGVSMVTSRMLGTFRTDPSTRREFLAIVGNPGAMSVANT

SEQ ID NO: 12268 - protein, 269 aa, unidentified
  source 1..269: note = Paraburkholderia unamae
  REGION 1..269: note = tr|A0A328Y4P4|A0A328Y4P4_9BURK GTP cyclohydrolase FolE2 OS=Paraburkholderia unamae OX=219649 GN=folE2 PE=3; SV = 1
MNQMNPAFVMPDVQSSVDTRQIVIQRVGVKAVRHPLTVKTGAGDVQPSVGMWNLDVHLPADQKGTHMSRFVALLEENKAPLEPATFRAMLAAMLAKLESQAGRIEVTFPYFVKKVAPVSGVESLLDYEVTLKGDVRNGQTRLFLKVLVPVTSLCPCSKKISQYGAHNQRSHVTMDVEFEGDLPVEHLIRIAEEEASCELWGLLKRPDEKFVTERAYENPKFVEDLVRDVAVRLNADARVIAYTLEAENFESIHNHSAYAVIDHDKRVAG

SEQ ID NO: 12269 - protein, 268 aa, unidentified
  source 1..268: note = Paraburkholderia xenovorans
  REGION 1..268: note = sp|Q13RX0|GCH4_PARXL GTP cyclohydrolase FolE2; OS = Paraburkholderia xenovorans (strain LB400) OX=266265; GN = folE2 PE=3 SV=1
MNQMNPAFVMPDVQSTPDTRQIPIQRVGVKAVRHPLTVRTQGGEVQPTVGTWNLDVHLPADQKGTHMSRFVALLEENKAPLEPATFRTMLAAMLEKLEAEAGRIEVSFPYFVNKTAPVSGVQSLLDYEVTLTGETRNGATRLFLRVRVPVTSLCPCSKKISQYGAHNQRSHVTINAELAGDVAVEELIRIAEEEASCELWGLLKRPDEKFVTERAYENPKFVEDLVRDVAQRLNADERIVAYVLEAENFESIHNHSAYAVIERDKRAG

SEQ ID NO: 12270 - protein, 212 aa, unidentified
  source 1..212: note = Paraburkholderia xenovorans
  REGION 1..212: note = tr|Q13KS7|Q13KS7_PARXL GTP cyclohydrolase 1; OS = Paraburkholderia xenovorans (strain LB400) OX=266265; GN = folE PE=3 SV=1
MTSSKAKKTRLITTAERPSREEAEAAVRVLLRWAGDDPAREGLIDTPARVVRSYEEFYAGYQVDPREILARTFSEVDGYDEMIVLKDIRFESYCEHHMVPIIGRAHVAYLPEHRVVGISKLARLVDAFAKRLQIQEKMTVQIADTLNEVLQPAGVGVILEAAHQCMSTRGVHKAGVTMVTSRMLGTFRTDPSTRREFLSIVGNPGVVAVSNT

SEQ ID NO: 12271 - protein, 257 aa, unidentified
  source 1..257: note = Paracandidimonas soli
  REGION 1..257: note = tr|A0A4R3VC96|A0A4R3VC96_9BURK GTP cyclohydrolase FolE2 OS=Paracandidimonas soli OX=1917182 GN=folE2 PE=3; SV = 1
MPDVQSSTDLRHIPIERVGIRGVRHPMLVAGGDGQPLPTIGQWELTVALPAHEKGTHMSRFVALLEKSRTTALTPALFCDLAREMLPLLNAQKGDITVHFPYFINKTAPMSGVTSLMDYELTWVARAAENGVAFELSVLVPVTSLCPCSKAISEYGAHNQRSHVTVTVALDDLSSLDIDGLIRSIEKEGSSELWGLLKRTDEKYVTERAYENPKFVEDLVRDVAGQVRKLPGLTSYRVQAENFESIHNHSAYAVVEG

SEQ ID NO: 12272 - protein, 238 aa, Parachlamydia acanthamoebae
  REGION 1..238: note = tr|A0A0C1E4G2|A0A0C1E4G2_9BACT GTP cyclohydrolase 1; OS = Parachlamydia acanthamoebae OX=83552 GN=folE_2 PE=3 SV=1
MTKSKKNKPQLSHEEFEVSQAVAKRAAITRYPSPIKAKKNPMSKQEKIAFIADKFRDIMLALDLDLTDGSLARTPERVARMYVEEVFSGLDLNEFPRVSFIEDQYQHDERANMVLVKVKFHSFCEHHFVPMFGTAHVAYIPNGKLIGLSKIPRIVRFFARRPQVQERLGAQIADSLCTLMDTQDVAVSISAQHFCVIARGIEDENSHTITNVLRGAFDTHEALKNEFFEGVNRKYIQT

SEQ ID NO: 12273 - protein, 240 aa, Parachlamydia acanthamoebae
  REGION 1..240: note = tr|A0A0C1C5A6|A0A0C1C5A6_9BACT GTP cyclohydrolase 1; OS = Parachlamydia acanthamoebae OX=83552 GN=folE PE=3 SV=1
MLCRSLFIRRYKMLELEEKVLSNPFATSHINDSGDEIPYPWNDNHLTDDEKIKNIEYYFEKILLTLGMDVEDDSIRKTPYRYAKMLVKELFPGLNRNNFPKITTQENKFNYRNMLLESHISIHSMCEHHFVPILGYCHIAYIPNDRVIGLSKLNRVAHYFARRPQVQERLTRQIKECLSSLLNTPDVAVVIDASHLCVKMRGVQDADCFTRTYDMGGLFEEDTYRNEFFGAIPKHSEIKL

SEQ ID NO: 12274 - protein, 248 aa, Parachlamydia sp.
  REGION 1..248: note = tr|A0A2H9SQX9|A0A2H9SQX9_9BACT GTP cyclohydrolase 1; OS = Parachlamydia sp. OX=2052048 GN=folE PE=3 SV=1
MQNTKQTFNLAANKLATKYVSSSQEILVSEEVSKLAALTHYPSPISSAKCKMSKEEKIAFIADKFRDIMIALDLDLNDHSLARTPERVAKMYVEEVFSGLDASQFPRVSFIEDHYQHENKANIVLVKVKFHSFCEHHFVPMFGTAHVAYIPNGKLIGLSKIPRIVRFFARRPQVQERLTAQIADSLCTLLDTPDVAVSISAQHFCVIARGIEDENSHTITNVLRGGFDTNEVLTREFFEGVNRKYVHV

SEQ ID NO: 12275 - protein, 190 aa, unidentified
  source 1..190: note = Paraclostridium benzoelyticum
  REGION 1..190: note = tr|A0A0M3DKW5|A0A0M3DKW5_9FIRM GTP cyclohydrolase 1; OS = Paraclostridium benzoelyticum OX=1629550 GN=folE PE=3; SV = 1
MHNVDKKKIENAVRDILEAIGEDPNREGLLDTPSRVAKMYEEIFSGIHKDPRDHLKILFQSEEHEELVLVKDIPFYSCCEHHLVPFFGKAHVAYLPKDGRLTGLSKLARVIEDLAKRPQLQERITKDTADIIMKELKPYGVIVVVEAEHMCMTMRGVKKPGSKTITSAVRGIFEKNIAARAEAMSLINMR

SEQ ID NO: 12276 - protein, 190 aa, unidentified
  source 1..190: note = Paraclostridium bifermentans
  REGION 1..190: note = tr|A0A1X2JK84|A0A1X2JK84_PARBF GTP cyclohydrolase 1; OS = Paraclostridium bifermentans OX=1490 GN=folE PE=3 SV=1
MHNVDKKKIENAVRDILEAIGEDSNREGLIDTPSRVAKMYEEIFSGIHKDPRDHLKILFQSEEHEELVLVKDIPFYSCCEHHLVPFFGKAHVAYLPKDGRLTGLSKLARVIEDLAKRPQLQERITKDTADIIMEELKPYGVIVVVEAEHMCMTMRGVKKPGSKTITSAVRGIFEKNIAARAEAMSLINMR

SEQ ID NO: 12277 - protein, 190 aa, unidentified
  source 1..190: note = Paraclostridium bifermentans
  REGION 1..190: note = tr|T4W1X9|T4W1X9_PARBF GTP cyclohydrolase 1; OS = Paraclostridium bifermentans ATCC 19299 OX=1233170; GN = folE PE=3 SV=1
MHNVDKKKIENAVRDILEAIGEDPNREGLLDTPSRVAKMYEEIFSGIHKDPRDHLKILFQSEEHEELVLVKDIPFYSCCEHHLVPFFGKAHVAYLPKDGRLTGLSKLARVIEDLAKRPQLQERITKDTADIIMEELKPYGVIVVVEAEHMCMTMRGVKKPGSKTITSAVRGIFEKNIAARAEAMSLINMR

SEQ ID NO: 12278 - protein, 320 aa, Paracoccus aestuarii
  REGION 1..320: note = tr|A0A419A1M6|A0A419A1M6_9RHOB GTP cyclohydrolase FolE2 OS=Paracoccus aestuarii OX=453842 GN=folE2 PE=3 SV=1
MTEIRPLSPAYPALARSYDDQFRVDPAYKAGLPDLQNGPASLIVGARAAIQHVGISNFRLPIRYLTREGGEIALETSVTGTVSLEADRKGINMSRIMRSFYGHSESAFSLTVLEAALDDYKTDLDALDARIQMRFSYPMRVDSLRSGLSGWQYYDIALEVIEQGGRRLRVMHVDYVYSSTCPCSLELSEHARQTRGRLATPHSQRSVARLSLVMEGPDRIWFEDVIDLCRRAVPTETQVMVKREDEQAFAELNAAHPIFVEDAVRAFAGQLLADARIGDFRVIASHQESLHSHDAVSLLTSGPTFAQASLDPATFAGLRA

SEQ ID NO: 12279 - protein, 320 aa, Paracoccus alcaliphilus
  REGION 1..320: note = tr|A0A1H8KZV9|A0A1H8KZV9_9RHOB GTP cyclohydrolase FolE2 OS=Paracoccus alcaliphilus OX=34002 GN=folE2 PE=3; SV = 1
MTEARPLVPAYPALIREYDADFQVDPAYKDDLPDLQNGPASLIVGARAPIQHVGISNFRLPIRYQTRDGGELTLETSVTGTVSLEADRKGINMSRIMRSFYGHSEHLFSLKVLEAALDDYKSDLDAFDARIQMRFSYPIRVDSLRSGLSGWQYYDIAQEVLEHQGHRLRIMHFDYVYSSTCPCSLELSEHAREVRGRLATPHSQRSVARISAVMLGPEKVWFEDMVDMCRRAVPTETQVMVKREDEQAFAELNASNPIFVEDAVRAFAKELQEDSRIGDFRVIASHQESLHSHDAVSLLTEGPTFVQSSLDPMTFAGLRA

SEQ ID NO: 12280 - protein, 321 aa, Paracoccus aminophilus
  REGION 1..321: note = tr|S5YS68|S5YS68_PARAH GTP cyclohydrolase FolE2; OS = Paracoccus aminophilus JCM 7686 OX=1367847 GN=folE2; PE = 3 SV=1
MTHVRPVNTSQPVYSRTYPADFKVDEAYKATLPDLQNGPASLIVGANAPIQHVGISNFRLPIRYLKRDGGEITLETSVTGTVSLEADRKGINMSRIMRSFYAHANKDFSLAVISEALDDYKSDLDSFDARIQMRFSYPMEVGSLRSGLSGWQYYDIALELIEQGGERLRIMHFDYVYSSTCPCSLELSEHARNTRGQLATPHSQRSIARISAVMLPEDGKLWFEDMVAICRAAVPTETQVMVKREDEQAFAELNAANPIFVEDAVRAFADQLLKDPRIGDFRVIASHQESLHSHDAVSLLTSGPTFAQSSLDPTTFSALRA

SEQ ID NO: 12281 - protein, 326 aa, Paracoccus aminovorans
  REGION 1..326: note = tr|A0A1I3AKE5|A0A1I3AKE5_9RHOB GTP cyclohydrolase FolE2 OS=Paracoccus aminovorans OX=34004 GN=folE2 PE=3 SV=1
MTEARPVATDRAYPALKREYPADFRVDDSYKASLPDLQNGPASLIVGARTAIQHVGISNFRLPMRYQTRADSSHPTGEITLETSVTGTVSLEADRKGINMSRIMRSFYAHAEKQFSMRVLQAALDDYKSDLDSLDARIQMRLSYPMRVDSLRSGLAGWQYYDVALELVERGGDRLRIMHFDYVYSSTCPCSLELSEHARQIRGQLATPHSQRSVARISAVMHGDTLWFEDMVELCRRAVATETQVMVKREDEQAFAELNAANPIFVEDAVRAFAAELLAEPRIGDFRVVASHQESLHSHDAVSVLTEGATFAHASLDPALFAGLRA

SEQ ID NO: 12282 - protein, 321 aa, Paracoccus bengalensis
  REGION 1..321: note = tr|A0A3D9XQX9|A0A3D9XQX9_9RHOB GTP cyclohydrolase FolE2 OS=Paracoccus bengalensis OX=302403 GN=folE2 PE=3; SV = 1
MTDARPVATERAYPALSREYPADFRVDDSYKASLPDLQNGPASLIVGARAPIQHVGISNFRLPIRYLTQEGGEIALETSVTGTVSLEADRKGINMSRIMRSFYAHAEKQFSMGVLEAALEDYKSDLGSFDARIMMRLSYPMRVESLRSGLSGWQYYDIALELAERAGQRLRIMHFDYVYSSTCPCSLELSEHARQMRGQLATPHSQRSVARISAVMQGDTLWFEDMVALCRRAVATETQVMVKREDEQAFAELNAANPIFVEDAVRAFAAELMAEPRIGDFRVVASHQESLHSHDAVSVLTRGETFAHASLDPAIFAGLRA

SEQ ID NO: 12283 - protein, 321 aa, Paracoccus denitrificans
  REGION 1..321: note = sp|A1BA17|GCH4_PARDP GTP cyclohydrolase FolE2; OS = Paracoccus denitrificans (strain Pd 1222) OX=318586; GN = folE2 PE=3 SV=1
MTEARPVATERAYPALSREYPADFRVDDSYKASLPDLQNGPASLIVGARAPIQHVGISNFRLPIRYQTQEGGEIALETSVTGTVSLEADRKGINMSRIMRSFYAHAEKQFSMGVLEAALEDYKSDLGSFDARIMMRLSYPMRVESLRSGLSGWQYYDIALELSERAGQRLRIMHFDYVYSSTCPCSLELAEHARQMRGQLATPHSQRSIARISVVMQGDTLWFEDMVTLCRRAVATETQVMVKREDEQAFAELNAANPIFVEDAVRAFAAELMAEPRIGDFRVVASHQESLHSHDAVSVLTQGETFAHASLDPAIFAGLRA

SEQ ID NO: 12284 - protein, 325 aa, Paracoccus denitrificans
  REGION 1..325: note = tr|A0A533I9E4|A0A533I9E4_PARDE GTP cyclohydrolase FolE2 OS=Paracoccus denitrificans OX=266 GN=folE2 PE=3 SV=1
MEPTVNTPRPPTVYPALSREYDADFRVDPQYKASLPDLQNGPASLIVGANVLIQHVGISNFRLPIRYQTRDGGEITLETSVTGTVSLEADRKGINMSRIMRSFYAHADKAFSLDVLQAALDDYKDDLDSMDARIQMRFSYPTKVDSLRSGLSGWQYYDIALELIEHKGQRRRIMHVDYVYSSTCPCSLELSEHARESRGRLATPHSQRSVARISVEMTGHDRLWFEDMIELCRRAVPTETQVMVKREDEQAFAELNASNPIFVEDAVRSFAEQLIAEPRVSDFRVIASHQESLHSHDAVSMLVNGPTFAQDSLDPTTFASLLHRG

SEQ ID NO: 12285 - protein, 355 aa, unidentified
  source 1..355: note = Paracoccus gahaiensis
  REGION 1..355: note = tr|A0A4U0R4N6|A0A4U0R4N6_9RHOB GTP cyclohydrolase FolE2 OS=Paracoccus gahaiensis OX=1706839 GN=folE2 PE=3; SV = 1
MNVLSPDKPTLEEAEAALAVLQRYGALSRAHDPIAMPVSLALQAYPDFSRTYPEVFRGDAAYRSSLPDLQNGPSSLIVGAQAVIQHVGISNFRLPIRYRLRDGGDIVLETSVTGTVSLEAEKKGINMSRIMRSFYVHAERDFSLEVIEHTLNDYKHDLESFDARIQMRFSFPARVESLRSGLAGWQYYDIALELADAGGQRKKIMHLDYVYSSTCPCSLELSEHARKTRSQLATPHSQRSVARLSIEMTGEQLWFEDLISLARKAVPTETQTMVKREDEQAFAELNAANPMFVEDAARSFCAELQADPRVGDFRIVASHQESLHSHDAVSVLTEGPTFSQLSLDPRLFSTLYHIG

SEQ ID NO: 12286 - protein, 325 aa, unidentified
  source 1..325: note = Paracoccus gahaiensis
  REGION 1..325: note = tr|A0A4U0R6W4|A0A4U0R6W4_9RHOB GTP cyclohydrolase FolE2 OS=Paracoccus gahaiensis OX=1706839 GN=folE2 PE=3; SV = 1
MTEIRPLTPAYPALARDYDAGFRVDPAYKDGLPDLQNGPASLIVGARAAIQHVGISNFRLPIRYLTRDDAQGAGGEITLETSVTGTVSLEADRKGINMSRIMRSFYVHSDTQFSLSVLEAALDDYKTDLDALDARIQMRFSYPMRVDSLRSGLSGWQYYDIALEVIEAAGTRLRVMHLDYVYSSTCPCSLELSEHARQTRGRLATPHSQRSIARISLVMEGPDRLWFEDAIELCRRAVPTETQVMVKREDEQAFAELNAAHPIFVEDAVRAFAAQLIADPRIGDFRVVASHRESLHSHDAVSLLTGGATFAQASLDPGTFAGLTV

SEQ ID NO: 12287 - protein, 320 aa, Paracoccus haeundaensis
  REGION 1..320: note = tr|A0A5C4R5I3|A0A5C4R5I3_9RHOB GTP cyclohydrolase FolE2 OS=Paracoccus haeundaensis OX=225362 GN=folE2 PE=3; SV = 1
MTEIRPLTPAYPALARSYDAEFRVDPAYKDSLPDLQNGPASLIVGARTAIQHVGISNFRLPIRYLVRDGGEITLETSVTGTVSLEADRKGINMSRIMRSFYGHADHAFSLSVLEAALDDYKTDLDALDARIQMRFSYPVRVDSLRSGLSGWQYYDIALEVIDVAGARLRVMHVDYVYSSTCPCSLELSEHARQTRGRLATPHSQRSVARISLVMDGPERIWFEDVIALCRAAVPTETQVMVKREDEQAFAELNAANPIFVEDAVRAFAGQLIADPRVGDFRVVASHQESLHSHDAVSLLTSGPTFAQASLDPATFAGLRA

SEQ ID NO: 12288 - protein, 325 aa, Paracoccus halophilus
  REGION 1..325: note = tr|A0A099F1I1|A0A099F1I1_9RHOB GTP cyclohydrolase FolE2 OS=Paracoccus halophilus OX=376733 GN=folE2 PE=3 SV=1
MTDSRPVATERAYPALSREYPEDFRVDAGYRASLPDLQNGPASLIVGAHAPIQHVGISNFRLPIRYQTRPGPDGGGEITLETSVTGTVSLEADRKGINMSRIMRSFYAHAEKRFSMGVLEAALDDYKSDLDSLDARIQMRLSYPMRVESLRSSLSGWQYYDIALELAERAGQRLQIMHFDYVYSSTCPCSLELSEHARQMRGQMATPHSQRSIARISAVTQGDTLWFEDMVELCRRAVPTETQVMVKREDEQAFAELNAANPIFVEDAVRAFAAQLMAEPRLGDFRIIASHQESLHSHDAVSVLTRGETFAQASLNPAIFAGLRA

SEQ ID NO: 12289 - protein, 320 aa, unidentified
  source 1..320: note = Paracoccus hibiscisoli
  REGION 1..320: note = tr|A0A4U0QNT0|A0A4U0QNT0_9RHOB GTP cyclohydrolase FolE2 OS=Paracoccus hibiscisoli OX=2023261 GN=folE2 PE=3; SV = 1
MTEIRPLTPAYPALARSYDADFRVDGAYKDSLPDLQNGPASLIVGARTAIQHVGISNFRLPIRYLVRDGGEITLETSVTGTVSLEADRKGINMSRIMRSFYGHADHAFSLSVLEAALDDYKTDLDALDARIQMRFSYPVRVDSLRSGLSGWQYYDIALEVIEQAGTRLRVMHVDYVYSSTCPCSLELSEHARQTRGRLATPHSQRSVARISLVMDGPERIWFEDVIALCRAAVPTETQVMVKREDEQAFAELNAANPIFVEDAVRAFAGQLLADPRVGDFRVVASHQESLHSHDAVSLLTSGPTFAQASLDPATFAGLRA

SEQ ID NO: 12290 - protein, 320 aa, Paracoccus homiensis
  REGION 1..320: note = tr|A0A1I0GGN7|A0A1I0GGN7_9RHOB GTP cyclohydrolase FolE2 OS=Paracoccus homiensis OX=364199 GN=folE2 PE=3 SV=1
MTDARPMIPSYPALVREYDADFRVTDDYKADLPDLQNGPASLIVGARAPIQHVGISNFRLPIRYQTSDGGELVLETSVTGTVSLEADRKGINMSRIMRSFYGHSDHLFSLKVLEAALDDYKADLDAFDARIQMRFSYPIRVDSLRSGLSGWQYYDIALEVVEQAGQRLRIMHFDYVYSSTCPCSLELSEHARESRARLATPHSQRSIARISVVMDGPDKLWFEDMVDICRRAVPTETQVMVKREDEQAFAELNAANPIFVEDAVRAFAQGLQDDPRIGDFRVVASHQESLHSHDAVSLLTQGTTFAQSSLDPMTFAGLRA

SEQ ID NO: 12291 - protein, 321 aa, Paracoccus isoporae
  REGION 1..321: note = tr|A0A1G7C956|A0A1G7C956_9RHOB GTP cyclohydrolase FolE2 OS=Paracoccus isoporae OX=591205 GN=folE2 PE=3 SV=1
MNTPRPPALYPALSREYDADFKVDPQYKAGLPDLQNGPASLIVGANVLIQHVGISNFRLPIRYRMRDKGEITLETSVTGTVSLEADRKGINMSRIMRSFYAHADKEFSMAVMETALDDYKDDLDSMDARIQMRLSYPMRVDSLRSGLSGWQYYDIAQELIEHGGQRRRILHLDYVYSSTCPCSLELSEHARESRARLATPHSQRSVARLSVVMEGRERLWFEDLIALCRRAVPTETQVMVKREDEQAFAELNAANPIFVEDAVRSFAEQLIAEPRVGDFRIIASHQESLHSHDAVSMLVNGETFAQDSLDPTAFASLLHRG

SEQ ID NO: 12292 - protein, 321 aa, unidentified
  source 1..321: note = Paracoccus laeviglucosivorans
  REGION 1..321: note = tr|A0A521CUH5|A0A521CUH5_9RHOB GTP cyclohydrolase FolE2 OS=Paracoccus laeviglucosivorans OX=1197861 GN=folE2; PE = 3 SV=1
MTEARPVATERAYPALSREYPADFRVDDSYKASLPDLQNGPASLIVGARAPIQHVGISNFRLPLRYRMPDGGDITLETSVTGTVSLDADRKGINMSRIMRSFYAHAEKQFSMGVLEAALEDYKTDLDSFDARIQMRISYPMRVESLRSGLTGWQYYDIALELVERAGQRLRIMHFDYVYSSTCPCSLELSEHARQMRGQLATPHSQRSIARISVVMQGDTLWFEDMVELCRRAVATETQVMVKREDEQAFAELNAANPIFVEDAVRAFAEQLLAEPRIGDFRVVASHQESLHSHDAVSVMTQGETFAHASLDPAIFAGLRA

SEQ ID NO: 12293 - protein, 343 aa, unidentified
  source 1..343: note = Paracoccus laeviglucosivorans
  REGION 1..343: note = tr|A0A521FL56|A0A521FL56_9RHOB GTP cyclohydrolase FolE2 OS=Paracoccus laeviglucosivorans OX=1197861 GN=folE2; PE = 3 SV=1
MSFEDMTALSGSLSRETGEEKPAKTGSKESYPDLKRVYDPGFRVGENYRATLPDLQNGPASLIVGANTRIEHVGISNFRLPIGYKLRAGGSIMLETSVTGTVSLEANQKGINMSRIMRSFYDYAENQFSFEVMAAAIDAYKKDLGSFDARLMMRFSFPAQVTSLRSGLKGWQYYEIALELVETAGTRRKIIHLDYVYSSTCPCSLELSEHARRERGQLATPHSQRSVARISVVLNDGVDDPLWFEDLIEMARFAVPTETQVMVKREDEQAFAELNAANPIFVEDAVRAFAAPLIADPRVGDFRVVASHQESLHSHDAVAVLSEGTTFIGQSLDPRMFGSLIHS

SEQ ID NO: 12294 - protein, 321 aa, unidentified
  source 1..321: note = Paracoccus lutimaris
  REGION 1..321: note = tr|A0A368Z907|A0A368Z907_9RHOB GTP cyclohydrolase FolE2 OS=Paracoccus lutimaris OX=1490030 GN=folE2 PE=3 SV=1
MTESRPIATQRAYPALSREYPSDFRVDDAYKAGLPDLQNGPASLIVGARAPIQHVGISNFRLPIRYQTREGGEMTLETGVTGTVSLEADRKGINMSRIMRSFYAHAEKRFSMGVLEAALDDYKSDLDSLDARIQMRLSYPMRVDSLRSGLSGWQYYDIALELVEQAGQRLRIMHVDYVYSSTCPCSLELSEHARQMRGQLATPHSQRSIARISMVTQGDTLWFEEVIALCRRAVPTETQVMVKREDEQAFAELNAANPIFVEDAVRAFAAELMAEPRIGDFRVIASHQESLHSHDAVSVLTDGPTFAQASLDPAIFAGLRA

SEQ ID NO: 12295 - protein, 326 aa, unidentified
  source 1..326: note = Paracoccus mutanolyticus
  REGION 1..326: note = tr|A0A2Z4PDL9|A0A2Z4PDL9_9RHOB GTP cyclohydrolase FolE2 OS=Paracoccus mutanolyticus OX=1499308 GN=folE2 PE=3; SV = 1
MTEARPLFPGPLATERAYPALKRDYPADFRVDASYKASLPDLQNGPASLIVGARAAIQHVGISNFRLPIRYQTKEGGEVTLETSVTGTVSLESDRKGINMSRIMRSFYAHAEKRFSMGVLEAALQDYKSDLDSIDARIQMRLSYPMRVDSLRSGLTGWQYYDIALELAERAGQRLKIMHFDYVYSSTCPCSLELSEHARQMRGQLATPHSQRSIARISAVTQGETLWFEDMVALCRRAVATETQVMVKREDEQAFAELNAANPIFVEDAVRAFAAELLAEPRIGDFRVVASHQESLHSHDAVSVLTQGETFAQVSLDPSIFAGLRA

SEQ ID NO: 12296 - protein, 321 aa, Paracoccus pantotrophus
  REGION 1..321: note = tr|A0A1K1U6F3|A0A1K1U6F3_PARPN GTP cyclohydrolase FolE2 OS=Paracoccus pantotrophus OX=82367 GN=folE2 PE=3; SV = 1
MTDARPVATERAYPALSREYPADFRVDDSYKASLPDLQNGPASLIVGARAPIQHVGISNFRLPIRYLTQEGGEIALETSVTGTVSLEADRKGINMSRIMRSFYAHAEKQFSMGVLEAALEDYKSDLGSFDARIMMRLSYPMRVESLRSGLSGWQYYDIALELAERAGQRLRIMHFDYVYSSTCPCSLELSEHARQMRGQLATPHSQRSVARISVVMQGDTLWFEDMVALCRRAVATETQVMVKREDEQAFAELNAANPIFVEDAVRAFAAELMAEPRIGDFRVVASHQESLHSHDAVSVLTRGETFAHASLDPAIFAGLRA

SEQ ID NO: 12297 - protein, 321 aa, Paracoccus pantotrophus
  REGION 1..321: note = tr|A0A454NLA4|A0A454NLA4_PARPN GTP cyclohydrolase FolE2 OS=Paracoccus pantotrophus OX=82367 GN=folE2 PE=3; SV = 1
MTEARPVATERAYPALSREYPADFRVDDSYKASLPDLQNGPASLIVGARAPIQHVGISNFRLPIRYQTQEGGEIALETSVTGTVSLEADRKGINMSRIMRSFYAHAEKQFSMGVLEAALEDYKSDLGSFDARIMMRLSYPMRVESLRSGLSGWQYYDIALELAERAGQRLRIMHFDYVYSSTCPCSLELSEHARQMRGQLATPHSQRSVARISAVMQGDTLWFEDMVALCRRAVATETQVMVKREDEQAFAELNAANPIFVEDAVRAFAAELMAEPRIADFRVVASHQESLHSHDAVSVLTQGETFAHASLDPAIFAGLRA

SEQ ID NO: 12298 - protein, 320 aa, Paracoccus saliphilus
  REGION 1..320: note = tr|A0A1N7LF76|A0A1N7LF76_9RHOB GTP cyclohydrolase FolE2 OS=Paracoccus saliphilus OX=405559 GN=folE2 PE=3 SV=1
MTEARPMVPAYPALSRDYDAEFRVDDAYKASLPDLQNGPASLIVGARAPIQHVGISNFRLPIRYQTRDGGEIALETSVTGTVSLEADRKGINMSRIMRSFYGHADHLFSVKVLEAALDDYKADLEAFDARIQMCFSYPIRVDSLRSGLSGWQYYDISQEVIEHQGQRLRVMHFDYVYSSTCPCSLELSEHAREARGRLATPHSQRSIARISLVMNGPEKIWFEDIVDLCRRAVPTETQVMVKREDEQAFAELNAANPIFVEDAVRAFAKELQAEPRIGDFRIIASHQESLHSHDAVSLLVDGPTFAQSSLDPMTFAGLRA

SEQ ID NO: 12299 - protein, 320 aa, unidentified
  source 1..320: note = Paracoccus sediminis
  REGION 1..320: note = tr|A0A238VVH2|A0A238VVH2_9RHOB GTP cyclohydrolase FolE2 OS=Paracoccus sediminis OX=1214787 GN=folE2 PE=3 SV=1
MTEARPMIPAYPALARSYDAGFRADDAYKAGLPDLQNGPASLIVGARAPIQHVGISNFRLPIRYQTRDGGEITLETSVTGTVSLEADRKGINMSRIMRSFYVHSEHAFSLRVLESALDDYQADLDAYDARIQMRFSYPIRVDSLRSGLSGWQYYDIAMEVLDLHGQRLRIMHFDYVYSSTCPCSLELSEHARETRSRLATPHSQRSIARISVVMDGPEKIWFEDVVELCRRAVPTETQVMVKREDEQAFAELNAANPIFVEDAVRAFAGELLSDPRFGDFRVVASHQESLHSHDAVSLLVSGPTFAQSSLDPMTFAGLRA

SEQ ID NO: 12300 - protein, 320 aa, Paracoccus seriniphilus
  REGION 1..320: note = tr|A0A239Q2Z7|A0A239Q2Z7_9RHOB GTP cyclohydrolase FolE2 OS=Paracoccus seriniphilus OX=184748 GN=folE2 PE=3; SV = 1
MTDARPLVPAYPALVREYDAEFRVDDDYRAGLPDLQNGPASLIVGARAPIQHVGISNFRLPIRYQTRAGGEVALETSVTGTVSLDADRKGINMSRIMRSFYGHSDHLFSLSVLEAALDDYKADLDAFDARIQMRFSYPVRVESLRSGLSGWQYYDIAQEVIERKGERLRIMHFDYVYSSTCPCSLELSEHARESRSRLATPHSQRSIARISLVMAGPEKVWFEDLVDLCRRAVPTETQVMVKREDEQAFAELNASNPIFVEDAVRAFAKELQGDPRIGDFRVVASHQESLHSHDAVSLLVDGPTFAQSSLDPMTFESLRV

SEQ ID NO: 12301 - protein, 325 aa, unidentified
  source 1..325: note = Paracoccus siganidrum
  REGION 1..325: note = tr|A0A419A7B7|A0A419A7B7_9RHOB GTP cyclohydrolase FolE2 OS=Paracoccus siganidrum OX=1276757 GN=folE2 PE=3; SV = 1
MTEARPMVPAYPALVREYDADFRAGPDYKAGLPDLQNGPASLIVGARAPIQHVGISNFRLPIRYQTRPDSLHGGGEIQLETSVTGTVSLEADRKGINMSRIMRSFYGHSEHLFSVKVLEAALDDYKADLDAFDARIQMRFSYPIRVESLRSGLSGWQYYDIAQEVLEHRGQRLRIMHFDYVYSSTCPCSLELAEHARETRSRLATPHSQRSIARISAVMKGPEKFWFEDLVDMCRRAVPTETQVMVKREDEQAFAELNASNPIFVEDAVRAFAKQLQDDPRIGDFRVVASHQESLHSHDAVSLLVEGPTFAQSSLDPMTFAGLRA

SEQ ID NO: 12302 - protein, 320 aa, Paracoccus sp.
  REGION 1..320: note = tr|A0A3A3DI98|A0A3A3DI98_9RHOB GTP cyclohydrolase FolE2 OS=Paracoccus sp. JM45 OX=2283626 GN=folE2 PE=3 SV=1
MTQARPLTPAYPALIRKYDADFQVDEAYKADLPDLQNGPASLIIGARAPIQHVGISNFRLPIRYQTRDGGEIVLETSVTGTVSLEADRKGINMSRIMRSFYGHSEHLFSLSVLEAALEDYKSHLDALDARIQMRFSYPMRVDSLRSGLSGWQYYDIALEVIEHQGQRLRVMHVDYVYSSTCPCSLELSEHARETRGRLATPHSQRSVARISLVMEGAEKIWFEDMIDLCRRAVPTETQVMVKREDEQAFAELNAANPIFVEDAVRAFAGQLMADPRIGDFRVIASHQESLHSHDAVSLLTSGSTFAQESLDPTTFAALKV

SEQ ID NO: 12303 - protein, 320 aa, Paracoccus sp.
  REGION 1..320: note = tr|A0A2K9EK30|A0A2K9EK30_9RHOB GTP cyclohydrolase FolE2 OS=Paracoccus sp. BM15 OX=1529068 GN=folE2 PE=3 SV=1
MTENRPMIPAYPALARDYDADFKVDVDYKAGLPDLQNGPASLIVGAHKPIQHVGISNFRLPIRYERRDGGDMTLETSVTGTVSLEADRKGINMSRIMRSFYEHAEKQFSLKVLEAALNDYQTDLDALDARILMRLSYPVRVDSLRSGLSGWQYYDIALEVAEQAGQRLRIVHFDYVYSSTCPCSLELSEHAREDRGRLATPHSQRSIARISVVMKGPEKIWFEDIVDLCRRAVPTETQVMVKREDEQAFAELNASNPIFVEDAVRAFAQQLMTDDRFGDFRIVASHQESLHSHDAVSVLTDGPTFAQHSLDPSLFAELRV

SEQ ID NO: 12304 - protein, 321 aa, Paracoccus sulfuroxidans
  REGION 1..321: note = tr|A0A562NI01|A0A562NI01_9RHOB GTP cyclohydrolase FolE2 OS=Paracoccus sulfuroxidans OX=384678 GN=folE2 PE=3; SV = 1
MTESRAIQTAGSYPALSRTYPADFTVDAAYKESLPDLQNGPASLIVGARTAIQHVGISNFRLPIRYLTRSGGEITLETSVTGSVSLEADRKGINMSRIMRSFYAHADKRFSMGVLAAALDDYKSDLDSLDARIQMRLSYPIQVDSLRSGLSGWQYYDIALELVEQAGHRLRIMHFDYVYSSTCPCSLELAEHARQVRGQLATPHSQRSIARISAVMQGDTLWFEDMVELCRRAVSTETQVMVKREDEQAFAELNAANPIFVEDAVRAFAEQLLSEPRIGDFRVVASHQESLHSHDAVSLLTSGLTFEQVSLDPMAFAGLRA

SEQ ID NO: 12305 - protein, 321 aa, Paracoccus thiocyanatus
  REGION 1..321: note = tr|A0A1N6UHS2|A0A1N6UHS2_9RHOB GTP cyclohydrolase FolE2 OS=Paracoccus thiocyanatus OX=34006 GN=folE2 PE=3; SV = 1
MTEASPIATERACPALNREYPADFRVDDAYKASLPDLQNGPASLIVGARAPIQHVGISNFRLPIRYQAPQGGEITLETSVTGTVSLEADRKGINMSRIMRSFYAHAEKRFSMGVLEAALEDYKSDLGSVDARIMMRLSYPMRVESLRSGLSGWQYYDIALELAEQAGRRLRIMHFDYVYSSTCPCSLELAEHARQMRGQLATPHSQRSVARLSVVMQGDTLWFEDMVALCRRAVATETQVMVKREDEQAFAELNAANPIFVEDAVRAFAAELMGEPRVGDFRVVASHQESLHSHDAVSVMTRGETFAHANLDPAIFAGLRA

SEQ ID NO: 12306 - protein, 344 aa, unidentified
  source 1..344: note = Paracoccus tibetensis
  REGION 1..344: note = tr|A0A1G5DP82|A0A1G5DP82_9RHOB GTP cyclohydrolase FolE2 OS=Paracoccus tibetensis OX=336292 GN=folE2 PE=3 SV=1
MSMGLELSPHREQGETTVNVPGAVATQKPEQHRDYPIFSRKYDASFAADAAYRSGLPDLQNGPASLIVGAQAPIQHVGISNFRLPIRHLLRNGGEVVLETSITGTVSLSAEKKGINMSRIMRSFYVHAEKSTSLEVIEHALRDYKQDLESFDARIQMRFSFPLQTRSLRSGLTGWQYYDVALELVDLRGQRKKMVHLDYVYSSTCPCSLELSEHARQTRGQLATPHSQRSTARLSILAGEDLWIEDFIDLARLAVPTETQVMVKREDEQAFAELNAANPLFVEDAARSFCAALQSDHRIRDFRIVASHQESLHSHDAVSILTRGATFDQASLDPKFFSTLIKAA

SEQ ID NO: 12307 - protein, 320 aa, unidentified
  source 1..320: note = Paracoccus tibetensis
  REGION 1..320: note = tr|A0A1G5J0Q3|A0A1G5J0Q3_9RHOB GTP cyclohydrolase FolE2 OS=Paracoccus tibetensis OX=336292 GN=folE2 PE=3 SV=1
MTEIRPLTPAYPALARDYDRSFRVTDDYKAGLPDLQNGPASLIVGARAPIQHVGISNFRLPIRYLMRDGGEITLETSVTGTVSLEADRKGINMSRIMRSFYNHSEHAFSLSVLEAALQDYKIDLGSLDARIQMRFSYPMRVESLRSGLSGWQYYDITLEVAEHQGQHLRNMHIDYVYSSTCPCSLELSEHARQTRGRLATPHSQRSVARISLVMAGPERLWFEDVIELCRRAVPTETQVMVKREDEQAFAELNAANPIFVEDAVRAFAAELQAEPRVGDFRVVASHQESLHSHDAVSLLTSGTTFAQASLDPATFMGLRA

SEQ ID NO: 12308 - protein, 321 aa, Paracoccus versutus; identical to SEQ ID NO: 12296
  REGION 1..321: note = tr|A0A099FH56|A0A099FH56_PARVE GTP cyclohydrolase FolE2 OS=Paracoccus versutus OX=34007 GN=folE2 PE=3 SV=1

SEQ ID NO: 12309 - protein, 326 aa, Paracoccus yeei; identical to SEQ ID NO: 12295
  REGION 1..326: note = tr|A0A1V0GU49|A0A1V0GU49_9RHOB GTP cyclohydrolase FolE2 OS=Paracoccus yeei OX=147645 GN=folE2 PE=3 SV=1

SEQ ID NO: 12310 - protein, 320 aa, unidentified
  source 1..320: note = Paracoccus zhejiangensis
  REGION 1..320: note = tr|A0A2H5F3C8|A0A2H5F3C8_9RHOB GTP cyclohydrolase FolE2 OS=Paracoccus zhejiangensis OX=1077935 GN=folE2 PE=3; SV = 1
MTENRPLIPAYPALARDYDAGFTVDAAYKASLPDLQNGPASLIVGAHKPIQHVGISNFRLPIRYQRRDGGEITLETSVTGTVSLEAGRKGINMSRIMRSFYAHSEKQFSLKVLEAALDDYQADLDALDARILMRLSYPVRVDSLRSGLWGWQYYDISQEVVEQRGHRLRIMHFDYVYSSTCPCSLELSEHARETRARLATPHSQRSIARISVVMNGPEKIWFEDMVDLCRRAVPTETQVMVKREDEQAFAELNASNPIFVEDAVRAFAQQLMDDPRYGDFRVVASHQESLHSHDAVSVLTDGPTFEQHSLDPALFARLRA

SEQ ID NO: 12311 - protein, 214 aa, Paracraurococcus sp.
  REGION 1..214: note = tr|A0A4R4DRK9|A0A4R4DRK9_9PROT GTP cyclohydrolase 1; OS = Paracraurococcus sp. NE82 OX=2527868 GN=folE PE=3 SV=1
MNIQTPPSQIRPDTATLEGRPTRAEAEAAVRTLLRWTGDDPDREGLVDTPARVVRAYEEFFAGYETDPVELLARSFEETDGYDEMVVLRDIRLESHCEHHVVPILGRAHIAYLPAGRVVGISKLARVLEVYAKRLQIQEKLTAQVANCINDVLRPKGVAVVIEAAHQCMTTRGIHKPGVSMVTSRMLGAFRDDPSTRREFLAMISGRGGSGFEG

SEQ ID NO: 12312 - protein, 202 aa, Paracraurococcus sp.
  REGION 1..202: note = tr|A0A4R4DES7|A0A4R4DES7_9PROT GTP cyclohydrolase 1; OS = Paracraurococcus sp. NE82 OX=2527868 GN=folE PE=3 SV=1
MPATPLAETPMPVARPSRAEAEAAVRTLLAWAGDDPSREGLLDTPARVAKAYEEFFAGYRIDPVSVLERTFAETEGYDEIVLLKDIRLESYCEHHMVPIIGVAHVAYLPEHRVVGISKLARVVEAYAKRLQIQEKLTAQIANTIEAVLRPRGVAVIIESEHQCMTTRGVHQHGASMVTSRMLGAFRDDPNTRRELLALLGKG

SEQ ID NO: 12313 - protein, 187 aa, Paraeggerthella hongkongensis
  REGION 1..187: note = tr|A0A369LI76|A0A369LI76_9ACTN GTP cyclohydrolase 1; OS = Paraeggerthella hongkongensis OX=230658 GN=folE PE=3; SV = 1
MDRAKIEQGVRLILEGMGEDPDREGLLKTPERVAKMYEEVFSGLTEDPSEHFETTFDEHHEEMILVRDIPFYSMCEHHLVPFFGLAHVAYIPAADGRICGLSKLARLVDVFAKRPQVQERLTSQIADTLIEELHPQGVIVVLEAEHMCMSMRGVKKPGTKTMTSAVRGAFEKSQATRAEALSLIFAR

SEQ ID NO: 12314 - protein, 189 aa, Paraeggerthella hongkongensis
  REGION 1..189: note = tr|A0A3N0BGR4|A0A3N0BGR4_9ACTN GTP cyclohydrolase 1; OS = Paraeggerthella hongkongensis OX=230658 GN=folE PE=3; SV = 1
MDRAKIEQGVRLILEGMGEDPDREGLVKTPERVAKMYEEVFSGLAEDPSEHFETTFDEHHEEMILVRDIPFYSMCEHHLVPFFGLAHVAYIPAADGRICGLSKLARLVDVFAKRPQVQERLTSQVADTLIEELHPQGVIVVLEAEHMCMSMRGVKKPGTRTMTSAVRGAFEKSQATRAEAMSLIFARRD

SEQ ID NO: 12315 - protein, 205 aa, unidentified
  source 1..205: note = Parafilimonas terrae
  REGION 1..205: note = tr|A0A1I5TBP6|A0A1I5TBP6_9BACT GTP cyclohydrolase 1; OS = Parafilimonas terrae OX=1465490 GN=folE PE=3 SV=1
MHYSIEDNLVKEEKISLTASEQISIIEHHFREIMLALGLDMRDDSLKDTPLRVAKMYVNEAFMGLNPLNEPSVTLFENKFKYNEIILEKDIPLYSYCEHHFVPIIGKVHIAYISKGEVIGLSKLNRITHYFSKRPQVQERLTIQIAEHLKSVMNIEDVAVIIRAEHLCVASRGINDKGCATITHSFHGQFLQDSRSNQLYAMLTV

SEQ ID NO: 12316 - protein, 198 aa, unidentified
  source 1..198: note = Parafilimonas terrae
  REGION 1..198: note = tr|A0A1I5SB45|A0A1I5SB45_9BACT GTP cyclohydrolase 1; OS = Parafilimonas terrae OX=1465490 GN=folE PE=3 SV=1
MLYEKKIYYDEEAINSLKESYANIIGSIGEDVQREGLLKTPERIAKAMLYNTQGYNQDAVAILNSAKFHENISEMIVVKDIELYSMCEHHMLPFFGKAHIAYIPNGYITGLSKIARVVDVFSRRLQVQERLTTQILDAIKEALNPLGVAVVIEAKHLCMMMRGVQKQNSVTTTSAFFGEFEKYPTRNEFLKLIAADLD

SEQ ID NO: 12317 - protein, 188 aa, unidentified
  source 1..188: note = Parageobacillus caldoxylosilyticus
  REGION 1..188: note = tr|A0A023DG17|A0A023DG17_9BACI GTP cyclohydrolase 1; OS = Parageobacillus caldoxylosilyticus NBRC 107762; OX = 1220594 GN=folE PE=3 SV=1
MSHVNYEQIEYAVRLILEAIGEDPNREGLIDTPKRVARMYAEVFAGLHEDPKEHFQTVFNENHEELVLVKDIPFYSMCEHHLVPFFGVAHIAYIPREGKVTGLSKLARAVEAVARRPQLQERITATVADSIVEALDPHGVMVVVEAEHMCMTMRGVKKPGAKTVTTAVRGVFETDQNARAEVLSLIKA

SEQ ID NO: 12318 - protein, 188 aa, unidentified
  source 1..188: note = Parageobacillus caldoxylosilyticus
  REGION 1..188: note = tr|A0A150LC15|A0A150LC15_9BACI GTP cyclohydrolase 1; OS = Parageobacillus caldoxylosilyticus OX=81408 GN=folE; PE = 3 SV=1
MSHVNYEQIEYAVRLILEAIGEDPNREGLIDTPKRVARMYAEVFAGLHEDPKEHFQTVFSEDHEELVLVKDIPFYSMCEHHLVPFFGVAHVAYIPREGKVTGLSKLARAVEAVARRPQLQERITATVADSIVEALDPHGVMVVVEAEHMCMTMRGIKKPGAKTVTTAVRGVFETDQNARAEVLSLIKS

SEQ ID NO: 12319 - protein, 188 aa, unidentified
  source 1..188: note = Parageobacillus genomosp.
  REGION 1..188: note = tr|A0A023CKD8|A0A023CKD8_9BACI GTP cyclohydrolase 1; OS = Parageobacillus genomosp. 1 OX=1295642 GN=folE PE=3 SV=1
MSHVNYEQIEYAVRLILEAIGEDPNREGLIDTPKRVARMYAEVFAGLHEDPKEHFQTVFSEDHEELVLVKDIPFYSMCEHHLVPFFGVAHVAYIPREGKVTGLSKLARAVEAVARRPQLQERITATVADSIVEALDPHGVMVVVEAEHMCMTMRGVKKPGAKTVTTAVRGVFATDQNARAEVLSLIKA

SEQ ID NO: 12320 - protein, 188 aa, unidentified
  source 1..188: note = Parageobacillus thermantarcticus
  REGION 1..188: note = tr|A0A1I0T3G7|A0A1I0T3G7_9BACI GTP cyclohydrolase 1; OS = Parageobacillus thermantarcticus OX=186116 GN=folE PE=3; SV = 1
MSHVNYEQIEYAVRLILEAIGEDPNREGLVDTPKRVAKMYEEVFSGLHEDPKQYFQTVFNEKHEELVLVKDIPFYSMCEHHLVPFFGVAHVAYIPRGGKVTGLSKLARAVEAVARRPQLQERITATVADSIMETLDPYGVMVVVEAEHMCMTMRGVKKPGAKTVTTAVRGLFETDQAARAEVLSLIKG

SEQ ID NO: 12321 - protein, 188 aa, unidentified
  source 1..188: note = Parageobacillus thermoglucosidasius
  REGION 1..188: note = tr|A0A1B7KXK1|A0A1B7KXK1_PARTM GTP cyclohydrolase 1; OS = Parageobacillus thermoglucosidasius OX=1426 GN=folE; PE = 3 SV=1
MSHVNYEQIEYAVRLILEAIGEDPNREGLVDTPKRVAKMYAEVFSGLHEDPKQYFQTVFNEDHEELVLVKDIPFYSMCEHHLVPFFGVAHVAYIPRGGKVTGLSKLARAVEAVARRPQLQERITATVADSIMETLDPYGVMVVVEAEHMCMTMRGVKKPGAKTVTTAVRGSFETDQTARAEVLSLIKG

SEQ ID NO: 12322 - protein, 188 aa, unidentified; identical to SEQ ID NO: 8506
  source 1..188: note = Parageobacillus thermoglucosidasius
  REGION 1..188: note = tr|A0A1Y3PKG2|A0A1Y3PKG2_PARTM GTP cyclohydrolase 1; OS = Parageobacillus thermoglucosidasius OX=1426 GN=folE; PE = 3 SV=1

SEQ ID NO: 12323 - protein, 188 aa, unidentified; identical to SEQ ID NO: 8500
  source 1..188: note = Parageobacillus toebii
  REGION 1..188: note = tr|A0A150N4X0|A0A150N4X0_9BACI GTP cyclohydrolase 1; OS = Parageobacillus toebii OX=153151 GN=folE PE=3 SV=1

SEQ ID NO: 12324 - protein, 188 aa, unidentified; identical to SEQ ID NO: 8500
  source 1..188: note = Parageobacillus toebii
  REGION 1..188: note = tr|A0A3M0FCY3|A0A3M0FCY3_9BACI GTP cyclohydrolase 1; OS = Parageobacillus toebii NBRC 107807 OX=1223503 GN=folE; PE = 3 SV=1

SEQ ID NO: 12325 - protein, 184 aa, unidentified
  source 1..184: note = Paraglaciecola agarilytica
  REGION 1..184: note = tr|K6W8J1|K6W8J1_9ALTE GTP cyclohydrolase 1; OS = Paraglaciecola agarilytica NO2 OX=1125747 GN=folE PE=3; SV = 1
MSEDLTQHYSQILSILGEDTQRGGLVDTPKRAAKAMQFLTDGYEKNLDDVVNGAIFEADTDEMVVIQNIEYYSLCEHHILPFIGQCHIAYLPKGKVLGLSKFARIVDMYARRLQIQEGLTKQIADAIQEVTGAAGVGVIMEGKHMCMMMRGVQKQNSSMVTSVMLGGMRNSDATRNEFLRLIGK

SEQ ID NO: 12326 - protein, 184 aa, unidentified
  source 1..184: note = Paraglaciecola arctica
  REGION 1..184: note = tr|K6YV67|K6YV67_9ALTE GTP cyclohydrolase 1; OS = Paraglaciecola arctica BSs20135 OX=493475 GN=folE PE=3; SV = 1
MSDKLADHYSGILSILGEDVSRGGLVDTPKRAAKAMQFLTDGYEKDLDGVVNGAIFEADTDEMVIIQDIEFYSLCEHHILPFIGRCHIAYLPNGKVLGLSKFARIVDMYSRRLQIQEGLTKQIADAVQLVTGATGVGVIMEGKHMCMMMRGVQKQNSSMITSVMLGSMRTSDATRNEFLRLIGK

SEQ ID NO: 12327 - protein, 184 aa, unidentified
  source 1..184: note = Paraglaciecola hydrolytica
  REGION 1..184: note = tr|A0A136A1Y6|A0A136A1Y6_9ALTE GTP cyclohydrolase 1; OS = Paraglaciecola hydrolytica OX=1799789 GN=folE PE=3 SV=1
MSDKLAAHYSEILTILGEDVSRNGLLDTPNRAAKAMQFLTDGYATDLDTVVNGAIFEADSDEMVIVQDIEFYSLCEHHILPFIGRCHIAYIPQGRVLGLSKFARIVDMYARRLQIQEGLTKQIADAVQQVTGALGVGVVMEGKHMCMMMRGVQKQNSSMITSVMLGSFRRSQATRDEFLRLIGK

SEQ ID NO: 12328 - protein, 184 aa, unidentified
  source 1..184: note = Paraglaciecola mesophila
  REGION 1..184: note = tr|K6Z2I4|K6Z2I4_9ALTE GTP cyclohydrolase 1; OS = Paraglaciecola mesophila KMM 241 OX=1128912 GN=folE2; PE = 3 SV=1
MSDDLTQHYSQILSILGEDTQRGGLVDTPKRAAKAMQFLTDGYEKNLSDVVNGAIFEADTDEMVVIQNIEYYSLCEHHILPFIGQCHIAYLPQGKVLGLSKFARIVDMYARRLQIQEGLTKQIADAIQEVTGAAGVGVIMEGKHMCMMMRGVQKQNSSMVTSVMLGAMRKSDATRNEFLRLIGK

SEQ ID NO: 12329 - protein, 305 aa, unidentified
  source 1..305: note = Paraglaciecola polaris
  REGION 1..305: note = tr|K7AI90|K7AI90_9ALTE GTP cyclohydrolase FolE2; OS = Paraglaciecola polaris LMG 21857 OX=1129793 GN=folE2; PE = 3 SV=1
MSANLPDVTSSANALTAAPLKWVGMEGIAVPIQVPLASHVTAYVSAKTDIFVSLDKSDAKGIHMSRLFIKLNDILGVELLSGASLTRLLNELIASQEGLSQCAKISVDFELTLHKKALLSNEFGYQSYPISIAKQQVNEKMLTVLSLTIPYSSTCPCSSALSQQAVSDAISERFTDDTIVKSELTQWITSQHGAVATPHSQRSYAYIKLTIDGEELPNLPQLIAELEAVIGTPVQTAVKREDEQAFAKLNAQNLMFCEDAARRLKHAFEIKKDVLDYWFKVEHQESLHAHNAVAIDFKGASVSEQ

SEQ ID NO: 12330 - protein, 184 aa, unidentified
  source 1..184: note = Paraglaciecola polaris
  REGION 1..184: note = tr|K6YSE3|K6YSE3_9ALTE GTP cyclohydrolase 1; OS = Paraglaciecola polaris LMG 21857 OX=1129793 GN=folE2; PE = 3 SV=1
MSDDLTHHYSQILSILGEDTKRGGLVDTPKRAAKAMQFLTNGYQKNLSDVVNGAIFEADTDEMVVIQNIEYYSLCEHHILPFIGQCHIAYLPKGKVLGLSKFARIVDMYARRLQIQEGLTKQIADAVQEVTGAAGVGVIMEGKHMCMTMRGVQKQNSSMVTSVMLGAMRKSDATRNEFLRLIGK

SEQ ID NO: 12331 - protein, 184 aa, unidentified
  source 1..184: note = Paraglaciecola psychrophila
  REGION 1..184: note = tr|K6Z2U2|K6Z2U2_9ALTE GTP cyclohydrolase 1; OS = Paraglaciecola psychrophila 170 OX=1129794 GN=folE PE=3; SV = 1
MSDKLAGHYSDILSILGEDVSRGGLVDTPQRAAKAMQFLTDGYQKDLDGVVNGAIFEADTDEMVIIQDIEFYSLCEHHILPFIGRCHIAYLPNGKVLGLSKFARIVDMFARRLQIQEGLTKQIADAVQKVTGATGVGVIMEGKHMCMMMRGVQKQNSSMITSVMLGSMRTSDATRNEFLRLIGK

SEQ ID NO: 12332 - protein, 300 aa, unidentified
  source 1..300: note = Paraglaciecola psychrophila
  REGION 1..300: note = tr|K7A6H1|K7A6H1_9ALTE GTP cyclohydrolase FolE2; OS = Paraglaciecola psychrophila 170 OX=1129794 GN=folE2; PE = 3 SV=1
MLMNTLPDITSELKAETSSPLQWVGMEEIAVPISVRLSSKKLQTIPAKANVFVSLDTPDAKGIHMSRLHKTINKLAELECNKDNVEHLLNSLIESQLGISHQSKIELTFDLILNKPALLSDESGYQSYPVTLKAEKSDQGLNCQFSITIPYSSTCPCSASLARQLYASAIDEEFPGLAIDKATLMQWVQSQSGSIATPHSQRSYAYLHFALGNNDWPDLSWFIFELEKAIGTPVQTAVKRSDEQAFAKLNAENLMFCEDAARRIKSALEQASFVNDYWFKVEHQESLHAHNAVVIDQKQK

SEQ ID NO: 12333 - protein, 184 aa, unidentified
  source 1..184: note = Paraglaciecola sp.
  REGION 1..184: note = tr|A0A2N1DEB4|A0A2N1DEB4_9ALTE GTP cyclohydrolase 1; OS = Paraglaciecola sp. MB-3u-78 OX=2058332 GN=folE PE=3 SV=1
MSDKLAGHYTDILSILGEDVSRGGLVDTPKRAAKAMQFLTDGYQKDLDGVVNGAIFEADTDEMVIIQDIEFYSLCEHHILPFIGRCHIAYLPNGKVLGLSKFARIVDMYARRLQIQEGLTKQIADAVQKVTGATGVGVIMEGKHMCMMMRGVQKQNSSMITSVMLGSMRTSDATRNEFLRLIGK

SEQ ID NO: 12334 - protein, 226 aa, unidentified
  source 1..226: note = Parahaliea aestuarii
  REGION 1..226: note = tr|A0A5C8ZXG0|A0A5C8ZXG0_9GAMM GTP cyclohydrolase 1; OS = Parahaliea aestuarii OX=1852021 GN=folE PE=3 SV=1
MDAVVANYPTHHRDAISDDARRVRNALLERGLETPLIDNGLNREEKFQRISDAFTEITRTLGLDLTDDSLCDTPDRIAKMYVDEIFAGLDYGEFPKVAVIDNKMQVEEMVLIDDIDLVSTCEHHFVTIDGSARVAYIPGERIIGLSKINRIVRFFAQRPQVQERLTQQVLVALQTLLETEDVAITINATHYCVKARGVMDSNSSTRTTALGGAFKSIPSTRAEFLR

SEQ ID NO: 12335 - protein, 182 aa, unidentified
  source 1..182: note = Parahaliea aestuarii
  REGION 1..182: note = tr|A0A5C9A4H0|A0A5C9A4H0_9GAMM GTP cyclohydrolase 1; OS = Parahaliea aestuarii OX=1852021 GN=folE PE=3 SV=1
MEDNWARIIEAIGEDLERPGLVDTPKRAAKAFEFLTRGYQQSVEDVVNNALFPSDSSEMVLVQDVELYSLCEHHLLPFIGKCHVAYIPTGKVLGLSKVARLVDVFARRLQIQESLTMQIAETIMDVTGAEGVGVIIEAQHMCMMMRGVEKQNSVMKTSAMLGCFRSSQKTREEFLSLLQLRR

SEQ ID NO: 12336 - protein, 275 aa, Paralcaligenes ureilyticus
  REGION 1..275: note = tr|A0A4R3M175|A0A4R3M175_9BURK GTP cyclohydrolase FolE2 OS=Paralcaligenes ureilyticus OX=627131 GN=folE2; PE = 3 SV=1
MRAPDVVTMNSLIEPAVAMPDVQSTVDTRHIAIQRVGVRGVRHPMLVAGPDGQAIPTVAVWELTVALPPEEKGTHMSRFVALLEQYRAVPMTPALFCEMARSMLPLLHAQKGDITASFPYFLNKLAPVSGVASLMDYEIKWVARVGADALEFELSVLVPVTSLCPCSKAISEYGAHNQRSHVTVNVVLDGTAPIDIEALIRSIEAQASSELWGLLKRVDEKFVTEQAYENPKFVEDLVRDVAAQVKQLAGLQRFRIEAENFESIHNHSAYAVVEG

SEQ ID NO: 12337 - protein, 265 aa, Paralcaligenes ureilyticus
  REGION 1..265: note = tr|A0A4R3M8D3|A0A4R3M8D3_9BURK GTP cyclohydrolase FolE2 OS=Paralcaligenes ureilyticus OX=627131 GN=folE2; PE = 3 SV=1
MNSPLDLPVALPDVQSSPDGRHLVIQRVGIRGARYPMQVVADDGSAQGTIADWTLTVELPAAEKGTHMSRFMALLEQYRAVAMTPAVFRTMTRDMLRLLHAQRGDITAQFPYFINKSAPVSGVNSLLDYDVQWTARAREEQVDFEMTLKIPVTSLCPCSKAISKYGAHNQRSHVTIFVALGGDLDMNQLIGLVEQEGSCELWGLLKRPDEKYVTEYAYNNPKFVEDLVRDVAVRLEDCPAIARYRVEAENFESIHNHSAYAVIEG

SEQ ID NO: 12338 - protein, 308 aa, Paraliobacillus ryukyuensis
  REGION 1..308: note = tr|A0A366EGW2|A0A366EGW2_9BACI GTP cyclohydrolase FolE2 OS=Paraliobacillus ryukyuensis OX=200904 GN=folE2; PE = 3 SV=1
MGINTNGKKQLPNKQERHKLFGSVEPGKKTKPTDKEAMADLQNSQNNYLFDLDAVGISNVKYPVKVSSQLQPTTQSSIGEFSFSSSVAKDSKGTNMSRFTEQLHAYLIDGNFDVSLSNLKEFTKELAARLKRNDAFLEVTFPWFFERKGPASDLSGFNHADAYIRINYDKELGYDIITGITGTITTLCPCSKEISEYSAHNQRGKVSMEIGLADSFDENKIDWKQALLEAAESNASARIHPVLKRPDEKMVTEQAYENPRFVEDMVRLVAADLYEMEFVQAFHVVCQNEESIHLHDAIASITYDKSEE

SEQ ID NO: 12339 - protein, 309 aa, Paraliobacillus sp.
  REGION 1..309: note = tr|A0A0U1KNM1|A0A0U1KNM1_9BACI GTP cyclohydrolase FolE2 OS=Paraliobacillus sp. PM-2 OX=1462524 GN=folE2 PE=3; SV = 1
MMGIGISRKIKLPSKYERHKLFGSVEPGPKVKPTEKGVMADLQNTQNDFLFDLDAVGIANVKYPVKINSDLNPSLQTSVGEFSFSSTVSKNSKGTNMSRFTEQLHAYLSDGSFDLSISNLKVFTKELAERLKRNDAFLEVSFSWFFERKSPSAAFSGLNHADAYIQINYNKDFGYDIITGLTGTITTLCPCSKEISEYSAHNQRGKMTMEIELNKDFDESVVDWKTFLLEAAESNASARIYPVLKRPDEKMVTEQAYENPRFVEDMVRLVAADLYEQDFVQAFHVICRNEESIHLHDAIASITYDKTNE

SEQ ID NO: 12340 - protein, 188 aa, unidentified
  source 1..188: note = Paramaledivibacter caminithermalis
  REGION 1..188: note = tr|A0A1M6NPU2|A0A1M6NPU2_9CLOT GTP cyclohydrolase 1; OS = Paramaledivibacter caminithermalis DSM 15212 OX=1121301; GN = folE PE=3 SV=1
MDKERIKKAVREILEAIGENPDREGLKDTPRRIADMYEEIFEGLNEDPGKHLEIYFQDEKHEELVLVKDIPFYSTCEHHFAPFFGKAHVGYLPKGGKLTGLSKLARVVETVARRPQLQERLTATIAETLMEKLNPHGVIVVVEAEHMCMTMRGIKKPGSKTVTSAVRGLFNKDAKARAEAMALINFGR

SEQ ID NO: 12341 - protein, 195 aa, unidentified
  source 1..195: note = Paramaledivibacter caminithermalis
  REGION 1..195: note = tr|A0A1M6R0C6|A0A1M6R0C6_9CLOT GTP cyclohydrolase 1; OS = Paramaledivibacter caminithermalis DSM 15212 OX=1121301; GN = folE PE=3 SV=1
MAINKEKIMEYIRGILIEIGEDIEREGLIDTPKRVADMYEEIFEGIRLTNDDIANMFKVTFDNDLDIVDKYDDMVLLKNIKIFSYCEHHLALMYNMSINIAYIPKDRVIGLSKMARIAEMVGKRLQLQERIGSDIAEILERIINTNDIAVIIKAEHACIAARGIKKTNSETITTTLRGKFNEDRGLLNNLMMLVK

SEQ ID NO: 12342 - protein, 208 aa, unidentified
  source 1..208: note = Paramesorhizobium deserti
  REGION 1..208: note = tr|A0A135HW67|A0A135HW67_9RHIZ GTP cyclohydrolase 1; OS = Paramesorhizobium deserti OX=1494590 GN=folE PE=3 SV=1
MDAILNLRESSARQGKKTVTRPTQQEAEAAVRTLLLWAGDNPDREGLLETPKRVVKSYKELFSGYEESPEEVLGTTFEEVAGYADPVLVKDINFHSHCEHHMLPIIGKAHIAYLPAGRVVGLSKIARLVDIFGRRLQTQESITAQIADAMDTILQPRGVAVMIEADHMCMAMRGIRKQGSTTITTTFKGTYHEDVNEQVRFMTMVRHG

SEQ ID NO: 12343 - protein, 182 aa, unidentified
  source 1..182: note = Paramuribaculum intestinale
  REGION 1..182: note = tr|A0A2V1IRD3|A0A2V1IRD3_9BACT GTP cyclohydrolase 1; OS = Paramuribaculum intestinale OX=2094151 GN=folE PE=3 SV=1
MARLAECYRQIIEIIGEDPSREGLLRTPARAAKALWYATGGYRRSLQQTVGDAVFECQQREMVIVRDIEYHSLCEHHILPFYGHVSVGYLPKGKILGLSKLARIVDLYARRLQVQERLTDEICKAVARVLPTDGVMVSITGEHLCMKMRGVEKQDSATVTVATSGRFADDPALRAEFMASIR

SEQ ID NO: 12344 - protein, 205 aa, Paraoerskovia marina
  REGION 1..205: note = tr|A0A1H1PYJ0|A0A1H1PYJ0_9CELL GTP cyclohydrolase 1; OS = Paraoerskovia marina OX=545619 GN=folE PE=3 SV=1
MGETPDVGADLPGPDVVPPYDEDRARAAVRELLLAVGEDPDREGLVETPDRVARAYREIFAGLRQEPADVLTTTFDIGHQEMVLVKDIEVYSTCEHHLVPFHGVAHVGYIPSADGRITGLSKLARLVEVYARRPQVQERLTTQIADALVEHLDPRGVIVVIECEHLCMAMRGVRKPGARTVTSAVRGQMRDGTTRAEAMSLVLGR

SEQ ID NO: 12345 - protein, 210 aa, Parapedobacter composti
  REGION 1..210: note = tr|A0A1I1IZ60|A0A1I1IZ60_9SPHI GTP cyclohydrolase 1; OS = Parapedobacter composti OX=623281 GN=folE PE=3 SV=1
MEEHFSLNEEEIDGYVKIDRYNPEKVARIAAHYADILALLGEDPSRQGLLKTPERVAKALQFLTHGYDLDAAEILRSAMFEEEYSQMVVVKDIEVYSMCEHHMLPFFGKAHVAYIPNGHIVGLSKIPRVVDIFARRLQVQERLTNEIRDCIQQTLQPAGVAVVIECKHLCMCMRGVQKQNSVTTTSAFTGEFAHERTRSEFLRLITASLD

SEQ ID NO: 12346 - protein, 210 aa, unidentified
  source 1..210: note = Parapedobacter indicus
  REGION 1..210: note = tr|A0A1I3TAE6|A0A1I3TAE6_9SPHI GTP cyclohydrolase 1; OS = Parapedobacter indicus OX=1477437 GN=folE PE=3 SV=1
METNFPLNEEEIDGYVKIDRYNPEKIARIASHYTEILELLGEDPSRQGLLKTPERVAKALQYLTHGYDLDAAAILRGAMFEEEYSQMVVVKDIEVYSMCEHHMLPFFGKAHVAYIPNGHIVGLSKIPRVIDIFARRLQVQERLTNEIRDCIQNTLNPVGVAVVIECKHLCMCMRGVQKQNSVTTTSAFTGEFAHERTRNEFLRLITASLD

SEQ ID NO: 12347 - protein, 219 aa, Parapedobacter koreensis
  REGION 1..219: note = tr|A0A1H7IDK3|A0A1H7IDK3_9SPHI GTP cyclohydrolase 1; OS = Parapedobacter koreensis OX=332977 GN=folE PE=3 SV=1
MQEETEQLLVDEMGDAHIMTSIDTPLRPDAFDKPDEEKIANIARHFAAIMEELGLDLTDDSLRGTPHRVAKMYVRELFRGLDPANRPNLSVFENKYGYGRMLVEKDIDVSSACEHHFLPIIGRAHVGYIAGEKVIGLSKINRIVEYYSRRPQVQERLTLQVFNELKRALSTENVIVVVEAEHLCVSARGIRDPHSRTTTLEYGGLFADQKLRDEFLRMV

SEQ ID NO: 12348 - protein, 210 aa, Parapedobacter koreensis
  REGION 1..210: note = tr|A0A1H7T9D2|A0A1H7T9D2_9SPHI GTP cyclohydrolase 1; OS = Parapedobacter koreensis OX=332977 GN=folE PE=3 SV=1
MENNFPLNEEEIDGYVKIDRYNPEKIARIAGHYAEILELLGEDPSRAGLVKTPERVAKALQFLTHGYDLDAATVLRGAMFEEEYSQMVVVKDIEVYSMCEHHMLPFFGKAHVAYIPNGHIVGLSKIPRVVDIFARRLQVQERLTNEIRDCIHETLQPVGVAVVIECKHLCMCMRGVQKQNSVTTTSAFTGEFVHERTRHEFLRLITASLD

SEQ ID NO: 12349 - protein, 218 aa, Parapedobacter luteus
  REGION 1..218: note = tr|A0A1T5CVS5|A0A1T5CVS5_9SPHI GTP cyclohydrolase 1; OS = Parapedobacter luteus OX=623280 GN=folE PE=3 SV=1
MQNIPEQLLDDLGDAHVMTSIETPLRPDAFDKTDGEKIATIARHFAAIMEALGLDLTDDSLKGTPRRVAKMYVKELFRGLNPANKPDLSVFDNKYGYGRMLVEKDIDVSSACEHHFLPMIGRAHVGYIADKQVIGLSKINRIVEYYARRPQVQERLTLQVFNELKQALGTESVIVVINAEHLCVSARGVRDRGSRTTTLEYGGAFSDKELREEFLRMT

SEQ ID NO: 12350 - protein, 210 aa, Parapedobacter luteus
  REGION 1..210: note = tr|A0A1T5F8Z4|A0A1T5F8Z4_9SPHI GTP cyclohydrolase 1; OS = Parapedobacter luteus OX=623280 GN=folE PE=3 SV=1
MENNFPLNEEEIDGYVKIDRYNPEKVARIAAHYAEILELLGEDPSRSGLVKTPERVAKALQFLTHGYDLDAATVLRSAMFEEEYSQMVVVKDIEVYSMCEHHMLPFFGKAHVAYIPNGHIVGLSKIPRVVDIFARRLQVQERLTNEIRDCIHKTLQPAGVAVVVECKHLCMCMRGVQKQNSVTTTSAFTGEFVHERTRNEFLRLITASLG

SEQ ID NO: 12351 - protein, 210 aa, Parapedobacter sp.
  REGION 1..210: note = tr|A0A3N7JDZ4|A0A3N7JDZ4_9SPHI GTP cyclohydrolase 1; OS = Parapedobacter sp. OX=1958893 GN=folE PE=3 SV=1
METNFPLNEEEIDGYVKIDRYNPEKIARIAGHYTEILELLGEDPSRQGLLKTPERVAKALQYLTHGYDLDAAEILRGAMFEEEYSQMVVVKDIEVYSMCEHHMLPFFGKAHVAYIPNGHIVGLSKIPRVVDIFARRLQVQERLTNEIRDCIQDTLNPVGVAVVIECKHLCMCMRGVQKQNSVTTTSAFTGEFAHERTRNEFLRLITASLD

SEQ ID NO: 12352 - protein, 180 aa, Paraperlucidibaca baekdonensis
  REGION 1..180: note = tr|A0A3E0H0K8|A0A3E0H0K8_9GAMM GTP cyclohydrolase 1; OS = Paraperlucidibaca baekdonensis OX=748120 GN=folE PE=3; SV = 1
MENAYADIIRAVGEDLGRPGLLDTPKRAAKAFKYLCKGYEEDLDTLVNGAVFPSDNDQMVLVKDIELYSLCEHHLLPFIGKVHVAYIPSGQVLGLSKVARIADMYARRLQIQENLTKQIADAIQQVTNARGVAVTIEAKHMCMMMRGVEKQNSVMKTSIMLGMFRENPQTRNEYLALINS

SEQ ID NO: 12353 - protein, 218 aa, unidentified
  source 1..218: note = Paraphotobacterium marinum
  REGION 1..218: note = tr|A0A220VEU3|A0A220VEU3_9GAMM GTP cyclohydrolase 1; OS = Paraphotobacterium marinum OX=1755811 GN=folE PE=3 SV=1
MINFTKEAMRVRDALIEKGIETPLQQNDSMSSEKTKNSIEYHVNEILKLLQLDLSDDSLKDTPKRIAKMYVEEIFSGLDYSNFPKITLIDNKMNCDEMVRVNKISLTSTCEHHFVVIDGYATVAYIPRKKIIGLSKINRVVRFFSQRPQVQERMTQQILVALQTLLESDDVAVKIDATHYCVKSRGVLDSTSSTTTTALGGIFKSNAATRYEFLNQSN

SEQ ID NO: 12354 - protein, 195 aa, Paraprevotella clara
  REGION 1..195: note = tr|G5SMP4|G5SMP4_9BACT GTP cyclohydrolase 1; OS = Paraprevotella clara YIT 11840 OX=762968 GN=folE PE=3; SV = 1
MERQVYNETVQRELETHYKAVLALLGEDTEREGLQKTPYRVAKAMQTLTRGYAEDPKEILNSAKFKEDYRHMVIVKDIDFFSLCEHHMLPFYGKAHVAYIPNGYITGLSKIARVVDCFSHRLQVQERMTLQIRDCIQEALDPLGVMVVVEARHMCMQMRGVEKQNSVTTTSDFTGAFNQAKTREEFLNLIHRDSL

SEQ ID NO: 12355 - protein, 195 aa, Paraprevotella clara; identical to SEQ ID NO: 12354
  REGION 1..195: note = tr|R5N9G0|R5N9G0_9BACT GTP cyclohydrolase 1; OS = Paraprevotella clara CAG:116 OX=1263095 GN=folE PE=3; SV = 1

SEQ ID NO: 12356 - protein, 195 aa, Paraprevotella xylaniphila
  REGION 1..195: note = tr|F3QTS9|F3QTS9_9BACT GTP cyclohydrolase 1; OS = Paraprevotella xylaniphila YIT 11841 OX=762982 GN=folE; PE = 3 SV=1
MECQVYNETVQRELETHYKAVLALLGEDTEREGLQKTPYRVAKAMQTLTRGYAEDPKEILNSAKFKEDYRHMVIVKDIDFFSLCEHHMLPFYGKAHVAYIPNGYITGLSKIARVVDSFSHRLQVQERMTLQIRDCIQEALNPLGVMVVVEARHMCMQMRGVEKQNSVTTTSDFTGAFNQAKTREEFLNLIHRDSL

SEQ ID NO: 12357 - protein, 308 aa, unidentified
  source 1..308: note = Pararheinheimera mesophila
  REGION 1..308: note = tr|A0A3P3QQ65|A0A3P3QQ65_9GAMM GTP cyclohydrolase FolE2 OS=Pararheinheimera mesophila OX=1547515 GN=folE2; PE = 3 SV=1
MPTTMPDVANHSSATTEGVLEWVGMSNIELPLMLSVAGEAPRQVSAKVEAFVNLKDPKAKGIHMSRLYLLLDQLSIESSLSFASLSELLHGFISSHEELSTHAFVKFDFELHLRRKALITEKQGWKAYPVTITGQLKEGKLGVEMKVDVPYSSTCPCSAALARQLIQDAFVAKFAGHAQVNAEQVKDWLGTTQGIVATPHSQRSVAEIKVQLNHKVTDFPVIALIDAIEDALQTPVQAAVKRADEQEFARLNGQNLMFCEDAARRLKHALNQLSEFDDFWLRVNHYESLHAHDAVAVTVKGIANGYHA

SEQ ID NO: 12358 - protein, 214 aa, unidentified
  source 1..214: note = Pararheinheimera mesophila
  REGION 1..214: note = tr|A0A3P3QC49|A0A3P3QC49_9GAMM GTP cyclohydrolase 1; OS = Pararheinheimera mesophila OX=1547515 GN=folE PE=3 SV=1
MLTESALVVRSALEAAGLETPMLDNGLSNEQKKQRLTELMTQVVHTLGLDLTDDSLAETPARIAKMYVDEVFSGLDYRTFPKISMIDNKMRAEEMVKVQNISFTSTCEHHFVTIDGTATVAYIPGQKIIGLSKLNRIVKFFAQRPQVQERLTQQIQVALQALLGVKDVAVSIDAVHYCVKSRGVMDTSSSTKTMALGGTFKTDAATRAEFLSKF

SEQ ID NO: 12359 - protein, 214 aa, unidentified
  source 1..214: note = Pararheinheimera tangshanensis
  REGION 1..214: note = tr|A0A5C8LSK1|A0A5C8LSK1_9GAMM GTP cyclohydrolase 1; OS = Pararheinheimera tangshanensis OX=400153 GN=folE PE=3; SV = 1
MLTESALVVRGALEAAGLETPMLDNGLSNEQKKQRLTELMTQVVHTLGLDLTDDSLAETPARIAKMYVDEVFSGLDYSTFPKISMIDNKMRAEEMVKVQNISFTSTCEHHFVTIDGTATVAYIPGKKIIGLSKLNRIVKFFAQRPQVQERLTQQIQVSLQALLGVKDVAVSIDAVHYCVKSRGVMDTSSSTKTMALGGAFKTDPATRSEFLSKF

SEQ ID NO: 12360 - protein, 308 aa, unidentified
  source 1..308: note = Pararheinheimera tangshanensis
  REGION 1..308: note = tr|A0A5C8LVB8|A0A5C8LVB8_9GAMM GTP cyclohydrolase FolE2 OS=Pararheinheimera tangshanensis OX=400153 GN=folE2; PE = 3 SV=1
MPTTMPDVANHSSATTEGVLEWVGMSNIELPLMFSVAGEAPRQVSAKVEAFVNLKDPKAKGIHMSRLYLLLDQLSTESSLSFASLSELLHGFISSHEELSTHAFVKFDFELHLRRKALITEKQGWKAYPVTITGQLKDGKLGVEMKVDVPYSSTCPCSAALARQLIQEAFVAKFAGHAQVNAEQVKDWLGTTQGIVATPHSQRSIAEIKVQLNHKVTDFPVIALIDAIEDALQTPVQAAVKRADEQEFARLNGQNLMFCEDAARRLKHSLNQLSEFDDFWLRVNHYESLHAHDAVAVTVKGIANGYHA

SEQ ID NO: 12361 - protein, 205 aa, unidentified
  source 1..205: note = Pararhizobium polonicum
  REGION 1..205: note = tr|A0A1C7P624|A0A1C7P624_9RHIZ GTP cyclohydrolase 1; OS = Pararhizobium polonicum OX=1612624 GN=folE PE=3 SV=1
MDAIVKNFPALPATDGRPSQKEAEDAVRVLLRWAGDDPQREGLLDTPARVAKAYKELFSGYDLAAEDVLGRTFEEVGGYDDIVLVKDIPFFSHCEHHMVPIIGKAHIAYLPNGKVLGLSKIARVVDIYGRRLQTQETMTAQIAKAIDDTLQPRGVAVMIEAEHMCMAMRGVQKQGSTTLTTTFTGAFKTEPAEQARFMTMLRGFK

SEQ ID NO: 12362 - protein, 207 aa, unidentified
  source 1..207: note = Pararhizobium sp.
  REGION 1..207: note = tr|A0A506U9X6|A0A506U9X6_9RHIZ GTP cyclohydrolase 1; OS = Pararhizobium sp. BGMRC6574 OX=2590452 GN=folE PE=3 SV=1
MDARVEPFPEPAAADRRPSRAEAEEAVRTLLRWTGDDPTREGLRDTPRRVVDSYRELFAGYDQDAAEILGRTFEEVSGYDDIVLVKDIPFFSHCEHHMVPIIGKAHVAYLPDERVLGLSKIARVVEIFARRLQTQEALTAQITDAIDETLGPRGVAVMIEAEHLCMSMRGVRKQGSLTTTSRFTGAFKDHAQNQAHFFALLRGRDAA

SEQ ID NO: 12363 - protein, 366 aa, unidentified
  source 1..366: note = Pararhodobacter aggregans
  REGION 1..366: note = tr|A0A2T7UJI7|A0A2T7UJI7_9RHOB GTP cyclohydrolase FolE2 OS=Pararhodobacter aggregans OX=404875 GN=folE2 PE=3; SV = 1
MNIQQPIGNREPSRTEAEAALDTLRAWADRASDDEIAGLDPRLLRLIPGLPDPAYPVMSREYPAHFVPDESYKRTMPDLQNGPASLIRGANRPIQHVGISNFRLPVRFRTREGGDVTLQASVTGTVSLEADKKGINMSRIMRSFYQHAEKQFSVWVIAAALDDYKADLESFDARIQMRFSFPMKVESLRSGLMGWQYYDIALELVDQAGVRRQFLHLDYVYSSTCPCSLELSEHARAGRGQLATPHSQRSVARLSVEVLPGKVLWFEDLIDLCRRAVPTETQVMVKREDEQAFAELNAANPIFVEDAARLFCEVLEDDARIGDFRVVASHQESLHSHDAVSVLTRGETFASASLDPRLFSTLIHAG

SEQ ID NO: 12364 - protein, 373 aa, unidentified
  source 1..373: note = Pararhodobacter sp.
  REGION 1..373: note = tr|A0A2T8HYV3|A0A2T8HYV3_9RHOB GTP cyclohydrolase FolE2 OS=Pararhodobacter sp. AM505 OX=2172121 GN=folE2; PE = 3 SV=1
MNIQKPAADFEPDTAQAEAALDVLRAFAARASDAQLAAMDPALRRLLPGEPDPAYPEFRRDYPAEFEADTAYKRTMPDLQNGPSSLIKGARTAIQHVGISNFRLPIRFMTRDGGGDSAEHGDVTLQASITGTVSLEAEKKGINMSRIMRSFYVHAEKRFSSQVVEAALDDYKNDLESFDARIQMRFSFPLKVNSLRSGLTGWQYYDIALELVDTGGVRRQFIHLDYVYSSTCPCSLELSEHARAGRGQLATPHSQRSVARISVEVLPGKVLWFEDLIDACRSAVPTETQVMVKREDEQAFAELNAANPIFVEDAARLFCEALEGDARIGDFRVVASHQESLHSHDAVSVLTRGAAFEAQSLDPKLFSTLIHIG

SEQ ID NO: 12365 - protein, 366 aa, unidentified
  source 1..366: note = Pararhodobacter sp.
  REGION 1..366: note = tr|A0A2U2C7W7|A0A2U2C7W7_9RHOB GTP cyclohydrolase FolE2 OS=Pararhodobacter sp. CIC4N-9 OX=2184063 GN=folE2; PE = 3 SV=1
MNIHMPLDERDPTQSEAEAALDTLRAWANRASDEDISALDPRLRRLIPGLPDPAYPDLSATYPADFAPDEAYKRSMPDLQNGPASLIRGARAPIQHVGISNFRLPVRFRNREGGDTTLQASVTGTVSLDADKKGINMSRIMRSFYQHAEKLFSVKVIEAALDDYKADLESFDARIQMRFSFPMKVDSLRSGLSGWQYYDIALELVDQGGVRRQFLHLDYVYSSTCPCSLELSEHARSGRGQLATPHSQRSVARISVEVVAGQVLWFEDLIDLCRRAVPTETQVMVKREDEQAFAELNAANPIFVEDAARLFCEAMRSDSRIGDFRVVASHQESLHSHDAVSVLTQGPTFQSESLDPKLFSTLIHVG

SEQ ID NO: 12366 - protein, 243 aa, unidentified
  source 1..243: note = Pararhodospirillum oryzae
  REGION 1..243: note = tr|A0A512H8Y2|A0A512H8Y2_9PROT GTP cyclohydrolase 1; OS = Pararhodospirillum oryzae OX=478448 GN=folE PE=3 SV=1
MPFPVACRRDRQKEPLPVSISTTHREEPAAVFDSLKGGSLSKPTHPIHRPSREEAEEAVRTLLRWAGDDPNREGLFDTPARVVRAYEEFFEGYRADPEEILRRTFEEVEGYDEMVLLRDIRLESHCEHHMVPILGKAHIAYLPNRRVVGISKLARVAEAYAKRLQIQEKMTAQIANAINDVLEPKGVAVVIEAAHQCMTTRGVRKPGVTMVTSRMLGAFRQDSDTRREFLHLIGQGRDPSLGA

SEQ ID NO: 12367 - protein, 225 aa, unidentified
  source 1..225: note = Pararhodospirillum photometricum
  REGION 1..225: note = tr|H6SSA0|H6SSA0_PARPM GTP cyclohydrolase 1; OS = Pararhodospirillum photometricum DSM 122 OX=1150469; GN = folE PE=3 SV=1
MTSIIDRGEPRVVLDPLEGGALSKPSYPTHKPSRQEAEEAVRVLLRWAGDDPNREGLFDTPARVVRAYEEFFEGYGADPEEILRRTFEEVEGYDEMVLLRDIRLESHCEHHMVPIIGKVHIAYLPNRRVVGISKLARVAEAYAKRLQIQETMTAQIANAINTVLEPKGVAVVVEAAHQCMTTRGIRKPGVTMVTSRMLGAFRDNSDTRREFLHLIGQVRDASLGA

SEQ ID NO: 12368 - protein, 184 aa, unidentified
  source 1..184: note = Parasaccharibacter apium
  REGION 1..184: note = tr|A0A2C6IAU9|A0A2C6IAU9_9PROT GTP cyclohydrolase 1; OS = Parasaccharibacter apium OX=1510841 GN=folE PE=3 SV=1
MERIAGGVRELLLAIGEDPSREGLRDTPERVAKMYLEVFSGLYEDPRDHLKKQFSADHHSGMVLVKDIRFHSTCEHHLLPVIGRAHVAYLPEGGRLTGLSKLARVVEGYARRPQLQERLTDQIVQALVEILEPKAVLVMIEAEHMCMSLRGVRSPGATTVTTGSYGLWAEDAQARQEVMGLMRD

SEQ ID NO: 12369 - protein, 213 aa, unidentified
  source 1..213: note = Parasaccharibacter apium
  REGION 1..213: note = tr|A0A2S4PD98|A0A2S4PD98_9PROT GTP cyclohydrolase 1; OS = Parasaccharibacter apium OX=1510841 GN=folE PE=3 SV=1
MSANETGIPGKQAPTPEGAAGAITRPEDAISRIAGGVRELLLAIGEDPSREGLRDTPDRVAKMYLEIFSGLYEDPRDHLKKQFSADQHGGMVLVKDIRFQSTCEHHLLPVLGRAHVAYLPEGGRLTGLSKLARVVEGYARRPQLQERLTDQIVQAMVEVLEPKAVLVVVEAEHMCMSLRGVRSPGATTVTTGSYGLWADDAQARQEVMALMRD

SEQ ID NO: 12370 - protein, 217 aa, Parascardovia denticolens
  REGION 1..217: note = tr|E6K0Y9|E6K0Y9_PARDN GTP cyclohydrolase 1; OS = Parascardovia denticolens DSM 10105 = JCM 12538; OX = 864564 GN=folE PE=3 SV=1
MMTMSETTEGIESSRSPRPPYPSCPSRPFDADGVKRAVRLYLQSIGEDPDREGLKDTPDRIARASQEIFSGMSQNPRDVLGARFNVATEDLVVVRDIEFYSVCEHHLLPFHGLAHIGYIPDKNRVVGLSKLARLVQVFAHRPQIQERMTQQIADALMDELGAKGAIVITDCEHMCMSMRGVKESQARTVTSAVRGYLRQSDTRAEALRLILDAPQLR

SEQ ID NO: 12371 - protein, 214 aa, Parascardovia denticolens
  REGION 1..214: note = tr|I8J8I1|I8J8I1_PARDN GTP cyclohydrolase 1; OS = Parascardovia denticolens IPLA 20019 OX=1193128 GN=folE; PE = 3 SV=1
MSETTEGIESSRSPRPPYPSCPSRPFDADGVKRAVRLYLQSIGEDPDREGLKDTPDRIARASQEIFSGMSQNPRDVLGARFNVATEDLVVVRDIEFYSVCEHHLLPFHGLAHIGYIPDKNRVVGLSKLARLVQVFAHRPQIQERMTQQIADALMDELGAKGAIVITDCEHMCMSMRGVKESQARTVTSAVRGYLRQSDTRAEALRLILDAPQLR

SEQ ID NO: 12372 - protein, 224 aa, unidentified
  source 1..224: note = Parashewanella curva
  REGION 1..224: note = tr|A0A3L8PVW9|A0A3L8PVW9_9GAMM GTP cyclohydrolase 1; OS = Parashewanella curva OX=2338552 GN=folE PE=3 SV=1
MTIQAVTINTPTLSDAASKVQQALIERGLETPMRDNTLSPEQQKDKIEHHMREILNTLALDLTDDSLADTPKRIAKMYVNEVFSGLDYSNFPKITVIENKMNVDEMIKVKDISLTSTCEHHLVTIDGVATVAYLPRKKIIGLSKINRIVRFFAQRPQVQERLTQQVLVALQTLLDTDNVAVKIDAVHYCVKARGVMDATSETSTSALGGIFKSDPSTRSEFLSR

SEQ ID NO: 12373 - protein, 225 aa, unidentified
  source 1..225: note = Parashewanella spongiae
  REGION 1..225: note = tr|A0A3A6U0B4|A0A3A6U0B4_9GAMM GTP cyclohydrolase 1; OS = Parashewanella spongiae OX=342950 GN=folE PE=3 SV=1
MTIQAVTLNQPLLSDAALKVQQALIEKGLETPMLPNTLSSEQRKEKIEHHMREILSLMALDLNDDSLADTPRRVAKMYIDEIFSGLDYCNFPKITMIDNKMNVEEMIKVQDISLTSTCEHHLVTIDGVATVAYLPRKKIIGLSKINRIVRFFAQRPQVQERLNQQVLIALQTLLETNDVAVKMDAVHYCVKSRGIMDATSSTTTSALGGIFKSDPATRAEFLMRK

SEQ ID NO: 12374 - protein, 205 aa, unidentified
  source 1..205: note = Parasphingopyxis lamellibrachiae
  REGION 1..205: note = tr|A0A3D9FE16|A0A3D9FE16_9SPHN GTP cyclohydrolase 1; OS = Parasphingopyxis lamellibrachiae OX=680125 GN=folE PE=3; SV = 1
MSDFDHAIDGDLDPLPGKIAVPDDVQEAIRTLIRWSGDDPTREGLIDTPQRVGRAWKEYCQGYEEDPSVHLSRTFEEVGGYDELVLLKDIPFQSHCEHHMAPIIGTASIAYMPKERVVGISKLARVLNGYARRLQVQERMTAEIAQCIWDHLQPSGVAVVICASHSCMTARGVRTPGVRMMTSRLLGCFLDDDRSRKEVLSLMGY

SEQ ID NO: 12375 - protein, 187 aa, Parasporobacterium paucivorans
  REGION 1..187: note = tr|A0A1M6FWB7|A0A1M6FWB7_9FIRM GTP cyclohydrolase 1; OS = Parasporobacterium paucivorans DSM 15970 OX=1122934; GN = folE PE=3 SV=1
MDKDRIEKAVREILYAVGENPDREGLIDTPRRIAKMYEEIFSGIDQDPAKHLEIYFQEEKYEELVLIKDIPFYSVCEHHLVPFFGKAHVGYLPKDGKLTGLSKLARVVETVAKRPQLQERLTASVADAIQNTLEPYGVIVVVEAEHMCMTMRGVKKPGSKTITSAVRGVFASDAKARAEVLSIINMK

SEQ ID NO: 12376 - protein, 268 aa, Parasutterella excrementihominis
  REGION 1..268: note = tr|R5EGZ5|R5EGZ5_9BURK GTP cyclohydrolase FolE2; OS = Parasutterella excrementihominis CAG:233 OX=1263099; GN = folE2 PE=3 SV=1
MTDNKLMVLPDVQSSADRRNIPIRRVGVKGIRTPILVKSQSGAQHTVADVEMYVSLPADKKGTHMSRFWTLLGGINKPFAPQMMVEVMQEMLASLKSDGGYIRLAFPFFMEKSAPVSHLQSTMDYDVVLTAECADGKITVTQEVIAPVTSLCPCSKEISKYGAHNQRSHVSITAELETNFPIEKQIEMIESCASCQVWGLLKRSDEKYVTEHAYENPKFVEDLVRDVAIRCQDEPAILAFTVEAENFESIHNHSAFASLHFDKRQTAE

SEQ ID NO: 12377 - protein, 268 aa, Parasutterella excrementihominis; identical to SEQ ID NO: 12376
  REGION 1..268: note = tr|F3QP33|F3QP33_9BURK GTP cyclohydrolase FolE2; OS = Parasutterella excrementihominis YIT 11859 OX=762966; GN = folE2 PE=3 SV=1

SEQ ID NO: 12378 - protein, 187 aa, unidentified; identical to SEQ ID NO: 6283
  source 1..187: note = Parcubacteria group
  REGION 1..187: note = tr|A0A0G0S7X9|A0A0G0S7X9_9BACT GTP cyclohydrolase 1; OS = Parcubacteria group bacterium GW2011_GWA2_40_37; OX = 1618817 GN=folE PE=3 SV=1

SEQ ID NO: 12379 - protein, 195 aa, unidentified
  source 1..195: note = Parcubacteria group
  REGION 1..195: note = tr|A0A0G1H3B3|A0A0G1H3B3_9BACT GTP cyclohydrolase 1; OS = Parcubacteria group bacterium GW2011_GWA2_43_17; OX = 1618827 GN=folE PE=3 SV=1
MNKIKKTSVDAERIKRAVKEILLAVGEDVSREGLIDTPDRVARMYVELLSGMSDSPDVYFESAFTENYDEIVLLRNIPFYSICEHHLMPFIGKAHVAYLPKGKVLGVSKLARIVDSYAHRLQLQERFTSQIADSLMSGIKPMGVVVVIEASHSCMTIRGIKKPGAVMVTSTVRGLFRSDQRARSEVMSLLHDNHI

SEQ ID NO: 12380 - protein, 251 aa, unidentified
  source 1..251: note = Parendozoicomonas haliclonae
  REGION 1..251: note = tr|A0A1X7AFA6|A0A1X7AFA6_9GAMM Putative GTP cyclohydrolase 1 type 2 OS=Parendozoicomonas haliclonae; OX = 1960125 GN=EHSB41UT_00694 PE=4 SV=1
MKLKDLVKVLNDELQPEQFKDYCPNGLQVEGKPEVFKLATGVTACEELIEQAIAWGADAILVHHGFFWKNERDEIVGMKKRRLQKLLTHDISLLGYHLPLDAHETMGNNATLAALLDITTTGPLDPAEKRPVGNIGEITASLSLEQFAEHIEKKLNRKPLVISGGDHPVKSVAWCTGGAQGFISLAVNAGVDVYISGEISESTVHTAREEGVHYISAGHHATEKGGVQAFGEWLQKQHGIEHRFFDIPNPV

SEQ ID NO: 12381 - protein, 190 aa, unidentified
  source 1..190: note = Parendozoicomonas haliclonae
  REGION 1..190: note = tr|A0A1X7AFU4|A0A1X7AFU4_9GAMM GTP cyclohydrolase 1; OS = Parendozoicomonas haliclonae OX=1960125 GN=folE PE=3; SV = 1
MSQNSSMTPDISEHYKAILEGLGEDPQRDGLKDTPKRAAKAMAYLTRGYQQDLGDIVNGAVFESDNDEMVVVRDIELYSLCEHHLLPFIGKAHVAYLPNGKVLGLSKFARIVDMFARRLQIQENMTLEIAKAIEEVTGARGVAVVIEAKHMCMMMRGVEKQNSSMTTSVMRGDFRDSLPTREEFLRYISK

SEQ ID NO: 12382 - protein, 195 aa, unidentified
  source 1..195: note = Parolsenella catena
  REGION 1..195: note = tr|A0A3G9K746|A0A3G9K746_9ACTN GTP cyclohydrolase 1; OS = Parolsenella catena OX=2003188 GN=folE PE=3 SV=1
MENENLGVDRPRVEAAVRELLIGIGEDPDRPGLVGTPDRVARACEELFGGIADDPARHLRKQFHEPGNEELVVVRDIPFHSMCEHHLLPFIGRAHVAYIPRDGRITGLSKIARCVAGYAARPQLQERLTAQVADAMVDELDPLGVLVVIEAEHTCMTMRGIRAAGAMTVTSAVRGSLRSDARSREEALSLLHVSA

SEQ ID NO: 12383 - protein, 188 aa, unidentified
  source 1..188: note = Parvibacter caecicola
  REGION 1..188: note = tr|A0A3N0A8J0|A0A3N0A8J0_9ACTN GTP cyclohydrolase 1; OS = Parvibacter caecicola OX=747645 GN=folE PE=3 SV=1
MDNAKIEEGVRLILEGVGEDPNREGLLDTPARVARMYNEVFAGLEENPAKHFQVTFDEHHDGIVLVRDIPFYSMCEHHLVPFFGTAHVAYLPSEEGRLCGISKLARLVDVFAKRPQVQERLTAQVADTLMEQLNPRGVAVVMEAEHMCMSMRGVKKPGSKTTTSVVRGLFESDPAVKAEVMSLIFRPV

SEQ ID NO: 12384 - protein, 188 aa, unidentified
  source 1..188: note = Parvibacter caecicola
  REGION 1..188: note = tr|A0A4T9TA84|A0A4T9TA84_9ACTN GTP cyclohydrolase 1; OS = Parvibacter caecicola OX=747645 GN=folE PE=3 SV=1
MDNAKIEEGVRLILEGVGEDPNREGLLDTPARVARMYNEVFAGLEENPAKHFQVTFDEHHDGIVLVRDIPFYSMCEHHLVPFFGTAHVAYLPSEEGRLCGISKLARLVDVFAKRPQVQERLTAQVADTLMEQLNPRGVAVVMEAEHMCMSMRGVKKPGSKTTTSVVRGLFESDPVVKAEVMSLIFRPV

SEQ ID NO: 12385 - protein, 222 aa, Parvibaculum lavamentivorans
  REGION 1..222: note = tr|A7HWI9|A7HWI9_PARL1 GTP cyclohydrolase 1; OS = Parvibaculum lavamentivorans (strain DS-1 / DSM 13023 / NCIMB 13966) OX=402881 GN=folE PE=3 SV=1
MAGKPLDEIGRMDMNAAVDGLRAQPDDERLTQVEKPSREAAEAAVRTLIAWAGDNPQREGLIDTPGRVVRAYEEFFEGYNEDPYKELTRTFEEVEGYNDMVMLRDINIESHCEHHMVAILGKAHVAYVPTKKVVGISKLARVIEIYSKRLQTQETMTAQIAETINAALQPQGVAILIEAKHQCMTTRGIKKPDVATITTQFTGVFRDDPRMESRFMQMIRGY

SEQ ID NO: 12386 - protein, 207 aa, Parvibaculum sp.
  REGION 1..207: note = tr|A0A2D8XCT7|A0A2D8XCT7_9RHIZ GTP cyclohydrolase 1; OS = Parvibaculum sp. OX=2024848 GN=folE PE=3 SV=1
MNSVVEDVLENIKKSDNPDRPSRKEAEAAVRTLISWAGDDPAREGLIETPKRVVKAYEEFFAGYDEDPDQVLGKTFEEVEGYDDMVMLRDIDLESHCEHHMVAILGKAHIAYVPTSKVVGISKLARVIEIYAKRLQTQETMTAQVADTINRVLAPKGVAILIEAKHQCMTTRGIKKPDVATITTQFTGVFKEDPNMERRFLSMIRGY

SEQ ID NO: 12387 - protein, 209 aa, Parvibaculum sp.
  REGION 1..209: note = tr|A0A2E1EEN9|A0A2E1EEN9_9RHIZ GTP cyclohydrolase 1; OS = Parvibaculum sp. OX=2024848 GN=folE PE=3 SV=1
MNAAVDGLRAQTGNERLAEVKKPSREEAEAAVRTLIAWAGDNPDREGLIDTPGRVVRAYEEFFEGYEIDPYKELTRTFEEVEGYQDMVMLRDINIESHCEHHMVAILGRAHIAYVPTKKVVGISKLARVIEIYARRLQTQETMTAQIADTINAALQPQGVAILIEAKHQCMTTRGIKKPDVATITTQFTGVFRDDPRMEARFMQMIRGY

SEQ ID NO: 12388 - protein, 255 aa, unidentified
  source 1..255: note = Parvibium lacunae
  REGION 1..255: note = tr|A0A368L8E2|A0A368L8E2_9BURK GTP cyclohydrolase FolE2 OS=Parvibium lacunae OX=1888893 GN=folE2 PE=3 SV=1
MPDVQGFADERHLAIQRVGVKGVRHPLQIRTANGQVQPTVAIWNLYVHLPDTQKGTHMSRFLALLEERSAPLDVNEFAELLQVMLVRLEAHSGHVEATFPYFIKKIAPVSGVSSLLDYEVSLLGTVTQGNVELALRVLVPVTSLCPCSKKISDYGAHNQRSHVTVTAHLANTNLSIEELVRLVEDEASCELFGLLKRPDEKWVTERAYDNPKFVEDLVRDVAGRLKADSRISKFVVEAENFESIHNHSAYALIEG

SEQ ID NO: 12389 - protein, 264 aa, unidentified
  source 1..264: note = Parvibium lacunae
  REGION 1..264: note = tr|A0A368L0Q2|A0A368L0Q2_9BURK GTP cyclohydrolase FolE2 OS=Parvibium lacunae OX=1888893 GN=folE2 PE=3 SV=1
MNAPEKLFLPDVQNHLDTRNLVIQRVGVKSIVHPVQLRTAAGVQPSVAHIDMYVRLPAEVKGTHMSRFLEVLQEQHDPLSYDTLQTLMRAMLLKLDATCGYIEMRFPYFIQKTAPVSGVASLLDYQVTLRAEVVPSQPGVVQISQQVLVPVTSLCPCSKKISDYGAHNQRSHVTINLQLNAPLAIEEQVRIAEDAASCELWGLLKRPDEKWVTERAYDNPKFVEDLVRDIALKLQQDARVQRFTVESENFESIHNHSAYALIEG

SEQ ID NO: 12390 - protein, 192 aa, Parvularcula bermudensis
  REGION 1..192: note = tr|E0TCM3|E0TCM3_PARBH GTP cyclohydrolase 1; OS = Parvularcula bermudensis (strain ATCC BAA-594 / HTCC2503 / KCTC 12087) OX=314260 GN=folE PE=3 SV=1
MTKANRPSRADAEEAVRTILSYIGEDPQREGLIDTPKRFIGAYDDWFKGYSEDPEEFLSRTFEEVEGYDDIVLLRNIRVESHCEHHVAPIIGTAHVGYLPSDRVVGLSKIARVVDAYSKRLQSQETLTNQIAGALDRVLQPRGVAVIIDAEHQCISTRGIHKDDISCVTRSFTGDFKADPRMEDRFYRLIGG

SEQ ID NO: 12391 - protein, 203 aa, Parvularcula bermudensis
  REGION 1..203: note = tr|E0TBN0|E0TBN0_PARBH GTP cyclohydrolase 1; OS = Parvularcula bermudensis (strain ATCC BAA-594 / HTCC2503 / KCTC 12087) OX=314260 GN=folE PE=3 SV=1
MSVIAYERSPHARDHDRPSREAAEEAVRTLIKWAGDDPGREGLIDTPARVARAFEDWFSGYGEDAEAVLSRTFEEVEGYDDIVLMRDIRLESYCEHHMAPIIGKAHIAYLPDGKVVGISKLARLVDIFGKRLQVQEKMTAQIADTLERVLKPKGVAIMVEAEHQCMSTRGVHKHGVDTMTTRFTGVFKDDPALESRFFKLIGR

SEQ ID NO: 12392 - protein, 167 aa, Parvularcula sp.
  REGION 1..167: note = tr|A0A355C1I1|A0A355C1I1_9PROT GTP cyclohydrolase 1 (Fragment) OS=Parvularcula sp. OX=1979207 GN=folE PE=3 SV=1
DDPAREGLIDTPKRVVKAYEEWFGGYDEDAEAILARTFDEVEGYDDIVLVRDIRLESTCEHHMAPIVGKAHIAYLPSARVVGLSKLARLVDVFGKRLQVQEKLTAQIAAALQSALEPRGVAVMIEAEHHCMSTRGVRRHGADTVTTRFTGAFQADMALQDRFLRLVK

SEQ ID NO: 12393 - protein, 196 aa, Parvularcula sp.
  REGION 1..196: note = tr|A0A357L8R4|A0A357L8R4_9PROT GTP cyclohydrolase 1; OS = Parvularcula sp. OX=1979207 GN=folE PE=3 SV=1
MVKVPKRSGDPRVRAEAAVRELIRWAGDDPDREGLVETPQRVVDAWREYFRGYAEDPDAYLKRTFEQVGGYDEIVLLRDIPFHSHCEHHMAPIIGKAHVGYMPRARVVGISKLARVVHAYARRLQVQERMTAEIADCIERVLEPLGTAVVIEATHACMTCRGVETPGVIMTTSRMIGLFRDDPRSRAEVLKLMGFC

SEQ ID NO: 12394 - protein, 204 aa, unidentified
  source 1..204: note = Parvularculaceae bacterium
  REGION 1..204: note = tr|A0A520R5Z6|A0A520R5Z6_9PROT GTP cyclohydrolase 1; OS = Parvularculaceae bacterium OX=2510335 GN=folE PE=3 SV=1
MSAETIQLAQTVTKPRPDRTEAEEAVRTLLSYFGEDPTREGLVDTPKRFVDAFAEFLGGYTQNPTDILGRTFEEVDGYDDIVLMKNIRLESHCEHHIVPIIGEAHVAYLPSDRVVGISKIARVVDAFAHRLVSQETLTEQIADAIDYALKPRGVAVLIDAQHYCISTRGVHKPDVACVTQKMTGAFKDDPQMEERFFRLIQGQR

SEQ ID NO: 12395 - protein, 189 aa, unidentified
  source 1..189: note = Parvularculaceae bacterium
  REGION 1..189: note = tr|A0A520R9X6|A0A520R9X6_9PROT GTP cyclohydrolase 1; OS = Parvularculaceae bacterium OX=2510335 GN=folE PE=3 SV=1
MTKPTRAEAEEAVRTLIKWAGDDPTREGLVDTPKRVAKAYEEWFTGYDEDPEEILERTFEEVDGYDDIVLLRNIRLESYCEHHIAPIIGTAHVAYLPSERVVGISKLARLVDAYAKRLQVQETLTAQIASAIEKVLQPRGVAVVIAAEHQCMSTRGVHKNGVDTVTTRFTGEFRDNPALEERFLRLTQS

SEQ ID NO: 12396 - protein, 217 aa, Pasteurella aerogenes
  REGION 1..217: note = tr|A0A448JZX1|A0A448JZX1_PASAE GTP cyclohydrolase 1; OS = Pasteurella aerogenes OX=749 GN=folE PE=3 SV=1
MDSILPEAKKVRNALIAKGIETPMIAPQQSKDERRAGIEQHMREVMKLIGLDLDDDSLEETPARLAKMFIDEIFSGLDYANFPKITNIENRMKVSEMVLVNDITLTSTCEHHFVTIDGVVSVAYYPKKWVIGLSKINRVVSFFAQRPQVQERLTEQILLAFQTILETEDVAVYVKATHFCVKCRGIKDTNSYTVTSAFGGVFLDDRETRKEFLTLIR

SEQ ID NO: 12397 - protein, 218 aa, Pasteurella bettyae
  REGION 1..218: note = tr|I3DIA3|I3DIA3_9PAST GTP cyclohydrolase 1; OS = Pasteurella bettyae CCUG 2042 OX=1095749 GN=folE PE=3; SV = 1
MTIISAEAEKVRNALIEKGIETPMIALTQTKDERRTHIEKHMREVMQLIGLDLTDDSLEETPVRLAKMFVDEIFSGLDYVNFPKITNIENRMKVSEMVLVNDITLTSTCEHHFVTIDGLVSVAYYPKKWVIGLSKINRVVKFFAQRPQVQERLTEQILLAFQTILETEDVAVYMKATHFCVKCRGIEDSNSYTVTSAFGGVFLQDRETRKEFLTLINK

SEQ ID NO: 12398 - protein, 218 aa, unidentified
  source 1..218: note = Pasteurella caecimuris
  REGION 1..218: note = tr|A0A4S2EC11|A0A4S2EC11_9PAST GTP cyclohydrolase 1; OS = Pasteurella caecimuris OX=1796644 GN=folE PE=3 SV=1
MSNISQDALNVRDALVAKGIETPMITPNPNKDERRSGIASHMREVMKLIGLDLGDDSLEETPNRLAKMFVDEIFSGMDYANFPKMTKIKNQMKVSEMVQVNDITLTSTCEHHFVTIDGNVAVAYYPKDWVIGLSKINRIVAFFAQRPQVQERLTEQLLTAFQTILETDDVAVYVKATHFCVKARGVKDTNSYTVTSAYGGVFLEDRETRKEFLASIQK

SEQ ID NO: 12399 - protein, 218 aa, Pasteurella canis
  REGION 1..218: note = tr|A0A379ETN1|A0A379ETN1_9PAST GTP cyclohydrolase 1; OS = Pasteurella canis OX=753 GN=folE PE=3 SV=1
MNKISPEAEKVRNALLSKGIETPMIVPTQPKDERRVGIENHMREVMKLIGLDLRDDSLEETPVRLAKMFVDEIFSGMDYANFPKITNIENRMKVSEMVLVNDVTLTSTCEHHFVTIDGMVSVAYYPKKWVIGLSKINRIVSFFAQRPQVQERLTEQILLAFQTILETEDVAVYVKATHFCVKCRGIKDTNSYTVTSAFGGVFLDDRETRKEFLTLINK

SEQ ID NO: 12400 - protein, 218 aa, Pasteurella dagmatis
  REGION 1..218: note = tr|C9PQD1|C9PQD1_9PAST GTP cyclohydrolase 1; OS = Pasteurella dagmatis ATCC 43325 OX=667128 GN=folE PE=3; SV = 1
MNKISPEAEKVRNALLSKGIETPMIRLEQDKESRRVGIENHMREVMKLIGLDLRDDSLEETPVRLAKMFVDEIFSGLDYANFPKITNIENRMKVSEMVLVNDVTLTSTCEHHFVTIDGMVSVAYYPKKWVIGLSKINRIVSFFAQRPQVQERLTEQILLAFQTILETEDVAVYVKATHFCVKCRGIKDTNSYTVTSAFGGVFLDDRETRKEFLTLINK

SEQ ID NO: 12401 - protein, 217 aa, Pasteurella langaaensis
  REGION 1..217: note = tr|A0A2U0SPY8|A0A2U0SPY8_9PAST GTP cyclohydrolase 1; OS = Pasteurella langaaensis DSM 22999 OX=1122935 GN=folE; PE = 3 SV=1
MTISAEAKKVRDALVEKGIETPMLHLQESKDSRRNAIEQKMREVMELIGLDLRDDSLEETPVRLAKMYVDEIFSGLDYANFPKITNIENRMKVSEMVLVNDVTLTSTCEHHFVTIDGLVSVAYYPKNWVIGLSKINRVVQFFAQRPQVQERLTEQILLAFQTILETDDVAVYMKATHFCVKCRGIKDTNSYTVTSAFGGVFLEDRETRKEFLSLINK

SEQ ID NO: 12402 - protein, 217 aa, unidentified
  source 1..217: note = [Pasteurella] mairii
  REGION 1..217: note = tr|A0A379B3I9|A0A379B3I9_9PAST GTP cyclohydrolase 1; OS = [Pasteurella] mairii OX=757 GN=folE PE=3 SV=1
MDSILPEAKKVREALIAKGIETPMIAPQQSKDERRAGIEQHMREVMKLIGLDLRDDSLEETPARLAKMFIDEIFSGLDYANFPKITNIENRMKVSEMVLVNDVTLTSTCEHHFVTIDGMVSVAYYPKKWVIGLSKINRVVSFFAQRPQVQERLTEQILLAFQTILETEDVAVYVKATHFCVKCRGIKDTNSYTVTSAFGGVFLDDRETRKEFLTLIR

SEQ ID NO: 12403 - protein, 218 aa, Pasteurella multocida
  REGION 1..218: note = sp|P57865|GCH1_PASMU GTP cyclohydrolase 1; OS = Pasteurella multocida (strain Pm70) OX=272843 GN=folE; PE = 3 SV=1
MNKISPEAEKVRNALLSKGIETPMITPEQDRDTRRAGIEQHMREVMKLIGLDLRDDSLEETPVRLAKMFVDEIFSGLDYANFPKITNIENRMKVSEMVLVNDVTLTSTCEHHFVTIDGMVSVAYYPKKWVIGLSKINRIVAFFAQRPQVQERLTEQILLAFQTILETDDVAVYVKATHFCVKCRGIKDTNSYTVTSAFGGVFLDDRETRKEFLTLINK

SEQ ID NO: 12404 - protein, 218 aa, Pasteurella multocida; identical to SEQ ID NO: 12403
  REGION 1..218: note = tr|A0A1D7R1S2|A0A1D7R1S2_PASMD GTP cyclohydrolase 1; OS = Pasteurella multocida OX=747 GN=folE PE=3 SV=1

SEQ ID NO: 12405 - protein, 218 aa, Pasteurella skyensis
  REGION 1..218: note = tr|A0A1H8A6C2|A0A1H8A6C2_9PAST GTP cyclohydrolase 1; OS = Pasteurella skyensis OX=97481 GN=folE PE=3 SV=1
MNTTSFEADNVRNALLKKGIETPMVSLQQDKETRKVAIQQHFRSILELLGMNLNDDSLEETPQRLAKMYIDEIFSGLDYDTFPKITKIKNQMNVSEMVLVDEITLTSTCEHHFVTIDGTVAVAYYPKDWIIGLSKINRVVQFFAQRPQVQERFTEQILTAFQTILDTDDVAVYVKATHFCVKCRGIKDTNSKTITSAFGGVFLQDRNTRTEFLTLIQK

SEQ ID NO: 12406 - protein, 218 aa, Pasteurella sp.
  REGION 1..218: note = tr|A0A4Y9GY13|A0A4Y9GY13_9PAST GTP cyclohydrolase 1; OS = Pasteurella sp. WM03 OX=2558280 GN=folE PE=3 SV=1
MSEISPDALSVRNALREKGIETPMIDLSKNKDERRIGIAKHMNEVMKLIGLDLADDSLEETPHRLAKMFIDEIFSGMDYANFPKMTKIKNQMKVSEMVQVNDITLTSTCEHHFVTIDGKVCVAYYPKDWVIGLSKINRIVSFFAQRPQVQERLTEQLLTAFQTILETDDVAVYVKATHFCVKARGIKDTHSYTVTSAYGGVFLEDRDTRKEFLATVQK

SEQ ID NO: 12407 - protein, 218 aa, Pasteurella testudinis
  REGION 1..218: note = tr|A0A1W1UZZ3|A0A1W1UZZ3_9PAST GTP cyclohydrolase 1; OS = Pasteurella testudinis DSM 23072 OX=1122938 GN=folE; PE = 3 SV=1
MSNISVEAAKVRDALIAKGIETPMKSVGLSLEHRRKEIEKHMREVLQLIGLDLTDDSIEETPVRMAKMYLDEIFTGMDYANFPKITNIRNRMKVSEMVLVNDVTLTSTCEHHFVTIDGKVSVAYYPKDWVIGLSKINRVVAFLAQRPQVQERLTEQVLTALQTILQTDDVAVYVKATHFCVKCRGIKDTNSYTVTSAFGGVFLEDRETRKEFLSLISK

SEQ ID NO: 12408 - protein, 218 aa, unidentified
  source 1..218: note = Pasteurellaceae bacterium
  REGION 1..218: note = tr|A0A5C4Q940|A0A5C4Q940_9PAST GTP cyclohydrolase 1; OS = Pasteurellaceae bacterium BK431 OX=2585026 GN=folE PE=3; SV = 1
MSNISAEAARVRDALIAKGIETPMKSVALSLNERRKQIESHMREVIQLIGLDLSDDSIEETPGRMAKMYLDEIFTGMDYANFPKITTIRNRMKVSEMVLVNDITLTSTCEHHFVTIDGQVSVAYYPKDWVIGLSKINRVVSFLAQRPQVQERLTEQVLTALQAILQTDDVAVYVKATHFCVKCRGIKDTNSYTVTSAFGGVFLEDRETRKEFLGLISK

SEQ ID NO: 12409 - protein, 229 aa, unidentified; identical to SEQ ID NO: 10238
  source 1..229: note = Pasteurellaceae bacterium
  REGION 1..229: note = tr|A0A3Q8GIP0|A0A3Q8GIP0_9PAST GTP cyclohydrolase 1; OS = Pasteurellaceae bacterium 12565 OX=2093222 GN=folE PE=3; SV = 1

SEQ ID NO: 12410 - protein, 224 aa, unidentified
  source 1..224: note = Patescibacteria group
  REGION 1..224: note = tr|A0A521Z7A9|A0A521Z7A9_9BACT GTP cyclohydrolase 1; OS = Patescibacteria group bacterium OX=2052139 GN=folE PE=3; SV = 1
MTDRSTALFRPRAAPARRLSTARFSSHNGTGVVKTPVPQPNNARTTLMKDENIIKKLLQNIGEDPEREGLVKTPVRYLDFIRQATSPKPIDFTTFDAENYDEMIVQKQIRFYSLCEHHLLPFFGTGVIAYVPNKRIVGLSKLARTLDHHSKRLQNQERITTQVADELEAVLKPKGVAVILSARHMCMEMRGVCQPEAVTTTSRLTGVFKSRPETRTELLRLASI

SEQ ID NO: 12411 - protein, 182 aa, unidentified
  source 1..182: note = Patescibacteria group
  REGION 1..182: note = tr|A0A522BCH3|A0A522BCH3_9BACT GTP cyclohydrolase 1; OS = Patescibacteria group bacterium OX=2052139 GN=folE PE=3; SV = 1
MAVRDIQKNIRAIIEALDDDPDREGLLDTPRRYEAFLEEFLSPDEFKPTVFTNEGYSEMIVERNITFYSMCEHHLLPFFGTATVAYIPGDKIIGLSKLARTVDHFSRRLQNQERVTTQIADFLQKELSPKGVGVVLNARHLCMEMRGIKKPGAITTTSCVYGLFRSNDATRSEFLSLARAAE

SEQ ID NO: 12412 - protein, 339 aa, unidentified
  source 1..339: note = Patulibacter medicamentivorans
  REGION 1..339: note = tr|H0E9P3|H0E9P3_9ACTN GTP cyclohydrolase I; OS = Patulibacter medicamentivorans OX=1097667; GN = PAI11_35630 PE=3 SV=1
MPSTTTHSALDVQNQRPTVHVALSRVGVAGVEKLIRVGRPGEEVPYLATLETVVDLGPHQKGAHMSRFEEVVNGAMADVVVGGEPVLRAEDLARQVAVAIRDRQGARRAEVRITARYPEDRPAPVSGIPTQEIFTLHGIAVATDAGTRTVTGVTAQGMTACPCAQEHLRDSSTTRLRAAGFDDAQIEAILEAVPVATHNQRGLGTLYLGRINEDPTRRDATVDIDARAMVRVVEQSMSSEIYELMKRSDEGSVVEKAHRNPRFVEDCVREMLRGVVEGFGGLADEAFVLARQENLETIHQHDVVAERYGTLGELRAELVGGVEPSSHTSLREWLDAAGR

SEQ ID NO: 12413 - protein, 207 aa, unidentified
  source 1..207: note = Patulibacter medicamentivorans
  REGION 1..207: note = tr|H0E3X7|H0E3X7_9ACTN GTP cyclohydrolase 1; OS = Patulibacter medicamentivorans OX=1097667 GN=folE PE=3; SV = 1
MSGSQDLAALPARGERTEEGIDLARAERATAELLRALGADPAGDEEALRQTPRRVAAAFGQLLTPRPFDATTFPNDEGYDELVVVHDIPFRSLCMHHLLPFHGVAHVGYVPGERIVGLSKLARVVEWFSSGLQTQERLTAQVADWLQDELAPVGVGVALEAEHLCMTLRGVGARGAATTTLARRGAIRDDPDVGAEFRARVADRGGR

SEQ ID NO: 12414 - protein, 264 aa, unidentified
  source 1..264: note = Paucibacter aquatile
  REGION 1..264: note = tr|A0A2N8L3T0|A0A2N8L3T0_9BURK GTP cyclohydrolase FolE2 OS=Paucibacter aquatile OX=2070761 GN=folE2 PE=3 SV=1
MNQVTSALHIPDTQSERDERHLVIQRVGVKDVRYPLQIQVGTQAQPTVGTWTLDVSLPAEKKGTHMSRFVAWLDALQAPLDAASLRELHGQMLAKLEAFEGRIEVAFSFFIRKRAPVSGIESLLDYQGRLISETRAGQTTVWAEVAVPVKSLCPCSKEISDYGAHNQRSLVTVRAEIGAQPVSWQELVRFAEESASSEIWPLLKRSDEKWITEHAYENPKFVEDLVRDVALRLNADPRIGRYTVDVENFESIHNHSAYARIERL

SEQ ID NO: 12415 - protein, 264 aa, Paucibacter sp.
  REGION 1..264: note = tr|A0A3N7DM99|A0A3N7DM99_9BURK GTP cyclohydrolase FolE2 OS=Paucibacter sp. KBW04 OX=2153361 GN=folE2 PE=3; SV = 1
MNQVTAALHIPDTQSERDERHLVIQRVGVKDVRYPLQVLIGQQAQGSVGQWTLDVSLPAEKKGTHMSRFVAWLDALNAPLDANGLRELHGQMLAKLEAVDGRIEVRFPFFIRKRAPISGIESLLDYQGALISETRAGITTVWAEVAVPVKSLCPCSKEISDYGAHNQRSLVTIRAEMAEQAPSWQELVRFAEESASSEIWPLLKRSDEKWITEHAYENPKFVEDLVRDVALRLNADARIGRYTVDVENFESIHNHSAYARIERA

SEQ ID NO: 12416 - protein, 265 aa, Paucibacter sp.
  REGION 1..265: note = tr|A0A0U2UHV2|A0A0U2UHV2_9BURK GTP cyclohydrolase FolE2 OS=Paucibacter sp. KCTC 42545 OX=1768242 GN=folE2; PE = 3 SV=1
MNQVTSALHIPDTQSERDERHLMIQRVGVKDVRYPLQVLVGKQAQPTVGTWTLDVALPAEKKGTHMSRFVAWLDALKAPLEPASLRELHGQMLSKLEAQEGRIEVRFAFFIRKRAPVSGIESLLDYQGALISETRAGVTSVWAEVAVPVKSLCPCSKEISDYGAHNQRSLVTIRAEMAEAAAVSWQELVRFAEESASSEIWPLLKRSDEKWITEHAYENPKFVEDLVRDVALRLNADARIGRYTVDVENFESIHNHSAYARIERA

SEQ ID NO: 12417 - protein, 264 aa, Paucibacter toxinivorans
  REGION 1..264: note = tr|A0A4R6QGT5|A0A4R6QGT5_9BURK GTP cyclohydrolase FolE2 OS=Paucibacter toxinivorans OX=270368 GN=folE2 PE=3; SV = 1
MNQITDLLHIPDTQSERDERHLVIQRVGIKDVRYPMQIRVAGKSQPTVGQWTLDVALPAEKKGTHMSRLIAWLDSLNRPLDAATLKTELALMLDKLHASEGRIEARFPFFIRKRAPVSGVESLLDYQGAWIAETRGGRTAIWAEVAVPVKSLCPCSKEISDYGAHNQRSLVTVKVELIGEEIPWNQLVRFAEESASSEIWPLLKRPDEKWVTERAYENPKFVEDLVRDVALRLNADARIGRYNVDVENFESIHNHSAYAHIERN

SEQ ID NO: 12418 - protein, 271 aa, Paucimonas lemoignei
  REGION 1..271: note = tr|A0A4R3HPZ9|A0A4R3HPZ9_PAULE GTP cyclohydrolase FolE2 OS=Paucimonas lemoignei OX=29443 GN=folE2 PE=3 SV=1
MNSRDPNLTSMPDVQSTPDTRRLAIQRVGVKGVRYPVTIKTSSGVQPTVGIWNMYVQLPEEQKGTHMSRFIALLEGNRAPFDIAYFSSLMRKMVKLLEAESGRIELSFPYFINKTAPVSGVESLMDYEVGLTGEIRGDDVEVTLKVMVPVTSLCPCSKKISAYGAHNQRSHITVNAVLAGDILVDQLIAKIEEQASCELFGLLKRPDEKYVTERAYENPKFVEDLVRDVAGMLNADSRIAAYTLEAENFESIHNHSAYALIEHDKRKQGAA

SEQ ID NO: 12419 - protein, 186 aa, Paucimonas lemoignei
  REGION 1..186: note = tr|A0A2X4CYZ7|A0A2X4CYZ7_PAULE GTP cyclohydrolase 1; OS = Paucimonas lemoignei OX=29443 GN=folE_2 PE=3 SV=1
MTPSLAEHYRDIIVGLGENPEREGLLDTPTRAATAMKYLCNGYTMSLEDVVNGALFESKNDEMVIVRDIELYSLCEHHMLPFIGKAHVAYIPTGRVLGLSKVARVVDMFARRLQIQENLTKQIADAIQHITDAAGVAVVIEAKHMCMMMRGVEKQNSVMTSSVMLGAFRESSSTRHEFLQLIGRLG

SEQ ID NO: 12420 - protein, 261 aa, Pectinatus cerevisiiphilus
  REGION 1..261: note = tr|A0A4R3K2I0|A0A4R3K2I0_9FIRM GTP cyclohydrolase FolE2 OS=Pectinatus cerevisiiphilus OX=86956 GN=folE2 PE=3; SV = 1
MKDVQSMGDTRGIAIQSVGISKAWLPFLAAAEKGQPQNVTAMVEKFTVDLPKEYKGTHMSRFMEILHEYANKPLNFIAINELLREALRKLAAKSAHITINFKYFIEKAAPVSKRQSLLDVDCVFSGDKIENKPLVFTMAVAVPVTSLCPCSKEISDYGAHNQRSIIKAAVKFSKPNGLTIERLANIIEAQASSSVYSILKREDEKYVTEAAYENPKFVEDMLRDLVLSMRKLKEIDYFSIECENFESIHNHNAYAAHEEYV

SEQ ID NO: 12421 - protein, 220 aa, unidentified
  source 1..220: note = Pectobacterium actinidiae
  REGION 1..220: note = tr|A0A1V2R592|A0A1V2R592_9GAMM GTP cyclohydrolase 1; OS = Pectobacterium actinidiae OX=1507808 GN=folE PE=3 SV=1
MSSLSKEAVMVHEALLSRGLETPLRGALLDRDTRKQRIAEHMTEIMNLLSLDLGDDSLAETPTRIAKMYVDEIFSGLDYANFPKITIIENKMKVDEMVTVRDITLTSTCEHHFVTIDGKATVAYIPKDGVIGLSKLNRIVQFFSQRPQVQERLTQQILVALQTLLGTSNVAVSIDAVHYCVKARGIRDATSATTTTSLGGLFKSSQNTRQEFLRAVRHHN

SEQ ID NO: 12422 - protein, 220 aa, unidentified
  source 1..220: note = Pectobacterium aquaticum
  REGION 1..220: note = tr|A0A3R8UQA3|A0A3R8UQA3_9GAMM GTP cyclohydrolase 1; OS = Pectobacterium aquaticum OX=2204145 GN=folE PE=3 SV=1
MSSLSKEAVMVHEALLARGLETPLRGALLDRDTRKQRIAEHMTEIMNLLSLDLSDDSLAETPTRIAKMYVDEIFSGLDYANFPKITIIENKMKVDEMVTVRDITLTSTCEHHFVTIDGKATVAYIPKEGVIGLSKLNRIVQFFSQRPQVQERLTQQILVALQTLLGTNNVAVSIDAVHYCVKARGIRDATSATTTTSLGGLFKSSQNTRQEFLRAVRHHN

SEQ ID NO: 12423 - protein, 220 aa, Pectobacterium atrosepticum
  REGION 1..220: note = sp|Q6D3N3|GCH1_PECAS GTP cyclohydrolase 1; OS = Pectobacterium atrosepticum (strain SCRI 1043 / ATCC BAA-672) OX=218491 GN=folE PE=3 SV=1
MSSLSKEAVMVHEALLARGLETPLRGALLDRDTRKQRIAEHMTEIMNLLSLDLGDDSLAETPTRIAKMYVDEIFSGLDYANFPKITIIENKMKVDEMVTVRDITLTSTCEHHFVMIDGKATVAYIPKDGVIGLSKLNRIVQFFSQRPQVQERLTQQILVALQTLLGTNNVAVSIDAVHYCVKARGIRDATSATTTTSLGGLFKSSQNTRQEFLRAVRHHN

SEQ ID NO: 12424 - protein, 220 aa, Pectobacterium betavasculorum
  REGION 1..220: note = tr|A0A093SAA7|A0A093SAA7_9GAMM GTP cyclohydrolase 1; OS = Pectobacterium betavasculorum OX=55207 GN=folE PE=3 SV=1
MSSLSKEAVMVHEALLARGLETPLRGALLERDTRKQRIAEHMTEIMNLLSLDLGDDSLAETPTRIAKMYVDEIFSGLDYANFPKITIIENKMKVDEMVTVRDITLTSTCEHHFVTIDGKATVAYIPKDGVIGLSKLNRIVQFFSQRPQVQERLTQQILIALQTLLGTNNVAVSIDAVHYCVKARGIRDATSATTTTSLGGLFKSSQNTRQEFLRAVRHHN

SEQ ID NO: 12425 - protein, 220 aa, unidentified
  source 1..220: note = Pectobacterium brasiliense
  REGION 1..220: note = tr|A0A0M2F1D2|A0A0M2F1D2_9GAMM GTP cyclohydrolase 1; OS = Pectobacterium brasiliense OX=180957 GN=folE PE=3 SV=1
MSSLSKEAVMVHEALLARGLETPLRGALLDRDTRKQRIAEHMTEIMNLLSLDLSDDSLAETPTRIAKMYVDEIFSGLDYANFPKITIIENKMKVDEMVTVRDITLTSTCEHHFVTIDGKATVAYIPKDGVIGLSKLNRIVQFFSQRPQVQERLTQQILIALQTLLGTNNVAVSIDAVHYCVKARGIRDATSATTTTSLGGLFKSSQNTRQEFLRAVRHHN

SEQ ID NO: 12426 - protein, 220 aa, unidentified
  source 1..220: note = Pectobacterium brasiliense
  REGION 1..220: note = tr|A0A086E8L6|A0A086E8L6_9GAMM GTP cyclohydrolase 1; OS = Pectobacterium brasiliense OX=180957 GN=folE PE=3 SV=1
MSSLSKEAVMVHEALLARGLETPLRGALLDRDTRKQRIAEHMTEIMNLLSLDLSDDSLAETPTRIAKMYVDEIFSGLDYANFPKITIIENKMKVDEMVTVRDITLTSTCEHHFVTIDGKATVAYIPKDGVIGLSKLNRIVQFFSQRPQVQERLTQQILVALQTLLGTNNVAVSIDAVHYCVKARGIRDATSATTTTSLGGLFKSSQNTRQEFLRAVRHHN

SEQ ID NO: 12427 - protein, 220 aa, Pectobacterium carotovorum; identical to SEQ ID NO: 12426
  REGION 1..220: note = sp|C6DEM6|GCH1_PECCP GTP cyclohydrolase 1; OS = Pectobacterium carotovorum subsp. carotovorum (strain PC1) OX=561230 GN=folE PE=3 SV=1

SEQ ID NO: 12428 - protein, 220 aa, Pectobacterium carotovorum; identical to SEQ ID NO: 12421
  REGION 1..220: note = tr|A0A518VLH8|A0A518VLH8_PECCC GTP cyclohydrolase 1; OS = Pectobacterium carotovorum subsp. carotovorum OX=555; GN = folE PE=3 SV=1

SEQ ID NO: 12429 - protein, 220 aa, unidentified
  source 1..220: note = Pectobacterium odoriferum
  REGION 1..220: note = tr|A0A094S530|A0A094S530_9GAMM GTP cyclohydrolase 1; OS = Pectobacterium odoriferum OX=78398 GN=folE PE=3 SV=1
MSSLSKEAVMVHEALLSRGLETPLRGALLERDTRKQRIAEHMTEIMNLLSLDLGDDSLAETPTRIAKMYVDEIFSGLDYANFPKITIIENKMKVDEMVTVRDITLTSTCEHHFVTIDGKATVAYIPKDGVIGLSKLNRIVQFFSQRPQVQERLTQQILVALQTLLGTNNVAVSIDAVHYCVKARGIRDATSATTTTSLGGLFKSSQNTRQEFLRAVRHHN

SEQ ID NO: 12430 - protein, 220 aa, unidentified
  source 1..220: note = Pectobacterium parmentieri
  REGION 1..220: note = tr|A0A0H3I1P6|A0A0H3I1P6_PECPM GTP cyclohydrolase 1; OS = Pectobacterium parmentieri OX=1905730 GN=folE PE=3 SV=1
MSLLSKEAVMVHEALLARGLETPLRGALLDRDTRKQRIAEHMTEIMNLLSLDLSDDSLAETPTRIAKMYVDEIFSGLDYANFPKITIIENKMKVDEMVTVRDITLTSTCEHHFVTIDGKATVAYIPKDGVIGLSKLNRIVQFFSQRPQVQERLTQQILVALQTLLGTNNVAVSIDAVHYCVKARGIRDATSATTTTSLGGLFKSSQNTRQEFLRAVRHHN

SEQ ID NO: 12431 - protein, 220 aa, unidentified; identical to SEQ ID NO: 12423
  source 1..220: note = Pectobacterium peruviense
  REGION 1..220: note = tr|A0A0J5XP14|A0A0J5XP14_9GAMM GTP cyclohydrolase 1; OS = Pectobacterium peruviense OX=2066479 GN=folE PE=3 SV=1

SEQ ID NO: 12432 - protein, 220 aa, unidentified
  source 1..220: note = Pectobacterium polaris
  REGION 1..220: note = tr|A0A093SBL2|A0A093SBL2_9GAMM GTP cyclohydrolase 1; OS = Pectobacterium polaris OX=2042057 GN=folE PE=3 SV=1
MSSLSKEAVMVHEALLARGLETPLRGALLDRDTRKQRIAEHMTEIMNLLSLDLSDDSLVETPTRIAKMYVDEIFSGLDYANFPKITIIENKMKVDEMVTVRDITLTSTCEHHFVTIDGKATVAYIPKDGVIGLSKLNRIVQFFSQRPQVQERLTQQILVALQTLLGTNNVAVSIDAVHYCVKARGIRDATSATTTTSLGGLFKSSQNTRQEFLRAVRHHN

SEQ ID NO: 12433 - protein, 220 aa, unidentified; identical to SEQ ID NO: 12426
  source 1..220: note = Pectobacterium polaris
  REGION 1..220: note = tr|A0A249QFC2|A0A249QFC2_9GAMM GTP cyclohydrolase 1; OS = Pectobacterium polaris OX=2042057 GN=folE PE=3 SV=1

SEQ ID NO: 12434 - protein, 220 aa, unidentified; identical to SEQ ID NO: 12426
  source 1..220: note = Pectobacterium polonicum
  REGION 1..220: note = tr|A0A4U7KG57|A0A4U7KG57_9GAMM GTP cyclohydrolase 1; OS = Pectobacterium polonicum OX=2485124 GN=folE PE=3 SV=1

SEQ ID NO: 12435 - protein, 220 aa, unidentified; identical to SEQ ID NO: 12426
  source 1..220: note = Pectobacterium punjabense
  REGION 1..220: note = tr|A0A2T3VVW6|A0A2T3VVW6_9GAMM GTP cyclohydrolase 1; OS = Pectobacterium punjabense OX=2108399 GN=folE PE=3 SV=1

SEQ ID NO: 12436 - protein, 220 aa, Pectobacterium wasabiae; identical to SEQ ID NO: 12426
  REGION 1..220: note = tr|A0A1D7Z5D0|A0A1D7Z5D0_9GAMM GTP cyclohydrolase 1; OS = Pectobacterium wasabiae CFBP 3304 OX=1175631 GN=folE; PE = 3 SV=1

SEQ ID NO: 12437 - protein, 190 aa, Pediococcus acidilactici
  REGION 1..190: note = tr|A0A1L6HAV2|A0A1L6HAV2_PEDAC GTP cyclohydrolase 1; OS = Pediococcus acidilactici OX=1254 GN=folE PE=3 SV=1
MNLPKIEKAVSDLLEGIGEDPQREGLVETPKRVAKAYAEIFAGLNHQATDFTDYKIFHVDEEPEMVLVQKIPFYSVCEHHLLPFFGNVNVAYVPKDGKVIGISKIPRLVDFVVKRPGMQEKVTTQISTELANILDPQGVAVTVSARHLCMEMRGINQSNLFTYTSKMTGVFKTDQALRANFFQQVGQQNA

SEQ ID NO: 12438 - protein, 197 aa, Pediococcus acidilactici
  REGION 1..197: note = tr|A0A410LBB8|A0A410LBB8_PEDAC GTP cyclohydrolase 1; OS = Pediococcus acidilactici OX=1254 GN=folE PE=3 SV=1
MIQEVKTLNLPKIEKAVSDLLEGIGEDPQREGLVETPKRVAKAYAELFAGLNHQATDFTDYKIFHVDEEPEMVLVQKIPFYSVCEHHLLPFFGNVNVAYVPKDGKVIGISKIPRLVDFVVKRPGMQEKVTTQISTELANILDPQGVAVTVSARHLCMEMRGINQSNLFTYTSKMTGVFKTDQALRANFFQQVGQQNA

SEQ ID NO: 12439 - protein, 189 aa, Pediococcus cellicola
  REGION 1..189: note = tr|A0A0R2ISX3|A0A0R2ISX3_9LACO GTP cyclohydrolase 1; OS = Pediococcus cellicola OX=319652 GN=folE PE=3 SV=1
MNKENSDKIENAVHNIIEAIGDDPNRQSIQETPARVASAYAEIFSETGKKHFHDYKIFNVAENAGMVLVQDIPFYSMCEHHLLPFFGTVNVAYVPQNGKIIGLSKIPRLVDFAAHRPSVQENITVLIANELQRILNPKGIAVSISARHMCMEMRGINKSGLFTYTNKFLGQFSTDQELKNEFLQQTHQR

SEQ ID NO: 12440 - protein, 181 aa, Pediococcus claussenii
  REGION 1..181: note = tr|G8PDL5|G8PDL5_PEDCP GTP cyclohydrolase 1; OS = Pediococcus claussenii (strain ATCC BAA-344 / DSM 14800 / JCM 18046 / KCTC 3811 / P06) OX=701521 GN=folE PE=3 SV=1
MNNSEIEKATASILKAIGDDPERSSVKETPKRVAKAFNEIFAHTNDQQFNDFKLFDIDDDDQTVVVRNIPFYSMCEHHLLPFFGTVDVAYVPNNGKIIGLSKIPRLVDFVAKRPNVQENMTSMLITEMNRILNPKGVAVKITARHMCMEMRGINKQGEETTTTKFQGIFKSDSIMRSEFLN

SEQ ID NO: 12441 - protein, 189 aa, Pediococcus damnosus
  REGION 1..189: note = tr|A0A0R2HM88|A0A0R2HM88_9LACO GTP cyclohydrolase 1; OS = Pediococcus damnosus OX=51663 GN=folE PE=3 SV=1
MNEKNKTKIKNAVTDIIQAIGDDPERASIQETPARVATAYEEIFSATGKKHFEDYKIFNVDENADMVVVQDIPFYSMCEHHLLPFFGTVNVAYIPQNGKIIGLSKIPRLVNFVARRPSVQENITVMIADELQRILNPKGVAVSISARHLCMEMRGINKSGLSTYTNKFSGVFSDDHELKNEFLQQTRQK

SEQ ID NO: 12442 - protein, 189 aa, Pediococcus ethanolidurans
  REGION 1..189: note = tr|A0A0R2K4M6|A0A0R2K4M6_9LACO GTP cyclohydrolase 1; OS = Pediococcus ethanolidurans OX=319653 GN=folE PE=3 SV=1
MIEKDKTKIENAVHNIIEAIGDDPKRTSIQKTPARVASAYEEIFAETGKQHFEDYKIFNVAENAGMVLVQDIPFYSMCEHHLLPFFGTVNVAYVPQNGKIIGLSKIPRLVDFAARRPSVQENITVMIADELQRILKPKGVAVSISARHMCMEMRGINKSGLFTYTNKFLGNFSEDHELKNEFLQQTHQR

SEQ ID NO: 12443 - protein, 189 aa, Pediococcus inopinatus
  REGION 1..189: note = tr|A0A0R2ILM6|A0A0R2ILM6_9LACO GTP cyclohydrolase 1; OS = Pediococcus inopinatus OX=114090 GN=folE PE=3 SV=1
MNEKNKTKIENAVTDIIEAIGDDPKRASIQETPARVATAYSEIFSETGNAHFTDYKIFDVDENADMVVVQDIPFYSMCEHHLLPFFGTVNVAYVPQDGKIIGLSKIPRLVNFVARRPSVQENITVMINDELQRILKPKGVAVSISARHLCMEMRGINKSGLSTYTTKFSGVFKEDHELKNEFLQQTRQK

SEQ ID NO: 12444 - protein, 189 aa, Pediococcus parvulus
  REGION 1..189: note = tr|A0A176TGE7|A0A176TGE7_9LACO GTP cyclohydrolase 1; OS = Pediococcus parvulus OX=54062 GN=folE PE=3 SV=1
MIEKNKKKIENAVHDIIEAIGDDPKRPSIQETPARVATAYEEIFAETGKQHFEDYKIFNVAENAGMVLVQDIPFYSMCEHHILPFFGTVNVAYVPQNGKIIGLSKIPRLVDFASHRPSVQENITVMIADELQRILNPKGVAVSISARHMCMEMRGINKSGLFTYTNKFLGTFADDHELKNEFLQQTHQR

SEQ ID NO: 12445 - protein, 215 aa, Pediococcus pentosaceus; identical to SEQ ID NO: 9977
  REGION 1..215: note = tr|A0A1Y0VRE6|A0A1Y0VRE6_PEDPE GTP cyclohydrolase 1; OS = Pediococcus pentosaceus OX=1255 GN=gch1 PE=3 SV=1

SEQ ID NO: 12446 - protein, 190 aa, Pediococcus stilesii
  REGION 1..190: note = tr|A0A0R2KSB8|A0A0R2KSB8_9LACO GTP cyclohydrolase 1; OS = Pediococcus stilesii OX=331679 GN=folE PE=3 SV=1
MELEQKLTKVYEIEHSLQTLMTLCGQQDGIPDLNETPFRVIKAFLEYTVGYRENPTEHLEKTFDISQNDPIIVKDIEFYSMCEHHFAPFFGVAHVSYIPDKKVTGLSKIARVVEGYARRFQVQERLTNQIADAVQSVLKPKGVIVAIEAKHLCVSSRGVKKEEAKTFTVVSHGVYSDNPQLRSEFMMAIK

SEQ ID NO: 12447 - protein, 199 aa, Pediococcus stilesii
  REGION 1..199: note = tr|A0A0R2KZP1|A0A0R2KZP1_9LACO GTP cyclohydrolase 1; OS = Pediococcus stilesii OX=331679 GN=folE PE=3 SV=1
MNIRWGRRNLNREKIKQAVRDLLEAIGEDTQREGLLETPERVTKAYAEIFSGLNHQPEDFTDYKIFHVEDDPEMVIVQRIPFYSVCEHHLLPFFGYANVAYVPKDGRVIGISKIPRLVEFASKRPGMQEKVTAQIASELTRILEPNGVAVSISARHMCMEMRGINRTNLFTYTSKFTGRFKTDAELKQDFLRQTENKIV

SEQ ID NO: 12448 - protein, 210 aa, Pedobacter africanus
  REGION 1..210: note = tr|A0A1W2B660|A0A1W2B660_9SPHI GTP cyclohydrolase 1; OS = Pedobacter africanus OX=151894 GN=folE PE=3 SV=1
MDNHTNHLDDEDNGYIKIDRYNEGKIAAVADHYKDILGQLGENPEREGLIKTPERVAKALQYLTHGYDVDPAGILRSAMFKEDYSQMVVVKDIEVFSMCEHHMLPFFGKAHVAYIPNGHIVGLSKIPRIVDAFARRLQVQERLTNEIRDCIQDTLMPAGVAVVIECKHLCMAMRGIQKQNSVTTTSAFTGEFAKDKTRAEFLRLITANLH

SEQ ID NO: 12449 - protein, 211 aa, Pedobacter alluvionis
  REGION 1..211: note = tr|A0A497Y160|A0A497Y160_9SPHI GTP cyclohydrolase 1; OS = Pedobacter alluvionis OX=475253 GN=folE PE=3 SV=1
MSNKDVLKGESRDGYVKIDRYNEDKIEAVATHYKDILGQLGENPEREGLLKTPERVAKALQYLTHGYDLKPDEILRSAMFEEDYSQMVVVKDIEVYSMCEHHMLPFFGKAHIAYIPNGHIVGLSKIPRVVDAFARRLQVQERLTNEIRDCIQNTLSPMGVAVVIECKHLCMSMRGVQKQNSVTTTSAFTGTFLSNDKTRAEFLRLITASLD

SEQ ID NO: 12450 - protein, 215 aa, Pedobacter alluvionis
  REGION 1..215: note = tr|A0A497Y9P5|A0A497Y9P5_9SPHI GTP cyclohydrolase 1; OS = Pedobacter alluvionis OX=475253 GN=folE PE=3 SV=1
MPEQNLADYEIDSVHFSTPLKANAFEMDDETKISMISDHFTSILNILGLDLNDDSLKNTPDRIAKMYVKEIFSGLNPANKPVATLFENRYGYSEMLVEKNIAVFSNCEHHFVPITGKAHVAYISKGKVIGLSKLNRIVQYYSKRPQVQERLTIQIAREIKRVMGTDDVAVMIDASHHCVSSRGIQDAGSSTVTSSFSGKFRDAETRNEFLKYIGQ

SEQ ID NO: 12451 - protein, 211 aa, unidentified
  source 1..211: note = Pedobacter antarcticus
  REGION 1..211: note = tr|A0A081PLZ4|A0A081PLZ4_9SPHI GTP cyclohydrolase 1; OS = Pedobacter antarcticus 4BY OX=1358423 GN=folE PE=3 SV=1
MEDHTIDNFGEENEGYIKIDRYNTVKTRSISNHYTDILSQLGENPQREGLIKTPERVAKALQYLTHGYDLDPAKILRSAMFKEDYSQMVVVKDIEVYSMCEHHMLPFFGKAHIAYIPNGHIVGLSKIPRIVDAFARRLQVQERLTNEIRDCIQETLQPAGVAVVIECQHMCMAMRGIQKQNSVTTTSAFTGEFAHDRTRAEFLRLITANLH

SEQ ID NO: 12452 - protein, 211 aa, unidentified; identical to SEQ ID NO: 12451
  source 1..211: note = Pedobacter antarcticus
  REGION 1..211: note = tr|A0A1I2J0T5|A0A1I2J0T5_9SPHI GTP cyclohydrolase 1; OS = Pedobacter antarcticus OX=34086 GN=folE PE=3 SV=1

SEQ ID NO: 12453 - protein, 212 aa, Pedobacter bauzanensis
  REGION 1..212: note = tr|A0A4R1LVW8|A0A4R1LVW8_9SPHI GTP cyclohydrolase 1; OS = Pedobacter bauzanensis OX=653929 GN=folE PE=3 SV=1
MNKSDKPPFDPELLDGYVKIDHYNGDAVNRIADHYGDILKALGENPAREGLLKTPERVAKSLQYLTHGYDIDPAEILRSAMFKEEYSQMVVVKDIEVYSLCEHHMLPFFGKAHIAYIPDGHIVGLSKIPRVVDAFARRLQVQERLTNEIRDCIHDTLKPLGVAVVIECKHLCMSMRGVQKQNSVTTTSAFTGEFAKERTRNEFLRLITASLD

SEQ ID NO: 12454 - protein, 211 aa, Pedobacter borealis
  REGION 1..211: note = tr|A0A4R8P809|A0A4R8P809_9SPHI GTP cyclohydrolase 1; OS = Pedobacter borealis OX=475254 GN=folE PE=3 SV=1
MSSKDILKGESRDGYVKIDRYNENKIEAVASHYKDILSQLGENPEREGLLKTPERVAKALQYLTHGYDLKPDEILRSAMFEEDYSQMVVVKDIEVYSMCEHHMLPFFGKAHIAYIPNGHIVGLSKIPRVVDAFARRLQVQERLTNEIRDCIQNTLSPMGVAVVMECRHLCMSMRGVQKQNSVTTTSAFTGTFLSNDKTRAEFLRLITASLD

SEQ ID NO: 12455 - protein, 226 aa, Pedobacter caeni
  REGION 1..226: note = tr|A0A1M5J9N1|A0A1M5J9N1_9SPHI GTP cyclohydrolase 1; OS = Pedobacter caeni OX=288992 GN=folE PE=3 SV=1
MEDLLAAYEAEGEAHFSANTQTPLRADAFSKTDEEKITAISLHFAAIMEELGLDLTDDSLRGTPHRVAKMYVKELFSGLNPANKPRISIFENKYGYRDMLIEQDIEFISACEHHFLPMPGKAHIAYIPNGKVIGLSKINRIVKYYAKRPQVQERLSKQIYQELQEALGTADIIVVITAHHMCVSMRGVEDQSSKTTTLSYGGKFEEKDRRKEFFQVLNLGTNRMVK

SEQ ID NO: 12456 - protein, 212 aa, Pedobacter caeni
  REGION 1..212: note = tr|A0A1M5P510|A0A1M5P510_9SPHI GTP cyclohydrolase 1; OS = Pedobacter caeni OX=288992 GN=folE PE=3 SV=1
MNNHTDHLDDNETENGYIKIDRYNEGKIASVAHHYSDILTQLGEDPSREGLIKTPERVAKALQYLTHGYDLDPAAILKGAMFKEDYSQMVVVKDIEVFSMCEHHMLPFFGKAHVAYIPNGHIVGLSKIPRIVDAFARRLQVQERLTNEIRDCIQETLNPAGVAVVIECKHLCMAMRGIQKQNSVTTTSAFTGEFAKDKTRAEFLRLITANLH

SEQ ID NO: 12457 - protein, 210 aa, unidentified
  source 1..210: note = Pedobacter chitinilyticus
  REGION 1..210: note = tr|A0A443YRA7|A0A443YRA7_9SPHI GTP cyclohydrolase 1; OS = Pedobacter chitinilyticus OX=2233776 GN=folE PE=3 SV=1
MAHEHDHEEELLGYQKIERYDEDKINGVAVHYKDILERLGEDPEREGLVKTPERVAKALQYLTHGYDIKPEQILKSAMFKEDYSQMVVVKDIEVFSMCEHHMLPFFGKAHIAYIPNGHIVGLSKIPRVVDAFARRLQVQERLTNEIRDCIQNTLSPAGVAVVIECKHLCMAMRGVQKQNSVTTTSAFTGEFMKNDKTRAEFLRLITASLD

SEQ ID NO: 12458 - protein, 211 aa, Pedobacter cryoconitis
  REGION 1..211: note = tr|A0A327S0R1|A0A327S0R1_9SPHI GTP cyclohydrolase 1; OS = Pedobacter cryoconitis OX=188932 GN=folE PE=3 SV=1
MENNTLDAFDEENEGYVKIDRYNTAKTVSISSHYTDILTQLGEDPQREGLLKTPERVAKSLQYLTHGYDIKPAEILRSAMFKEDYSQMVVVKDIEVYSMCEHHMLPFFGKAHVAYIPNGHIVGLSKIPRVVDAFARRLQVQERLTNEIRDCIQETLNPAGVAVVIECQHLCMAMRGIQKQNSVTTTSAFTGEFAKDKTRAEFLRLITARLH

SEQ ID NO: 12459 - protein, 211 aa, Pedobacter cryoconitis
  REGION 1..211: note = tr|A0A127VIR7|A0A127VIR7_9SPHI GTP cyclohydrolase 1; OS = Pedobacter cryoconitis OX=188932 GN=folE PE=3 SV=1
MENNTQDAFDEENEGYVKIDRYNTAKTASISSHYTDILTQLGEDPQREGLLKTPERVAKSLQYLTHGYAIKPAEILRSAMFKEDYSQMVVVKDIEVYSMCEHHMLPFFGKAHIAYIPNGHIVGLSKIPRVVDAFARRLQVQERLTNEIRDCIQETLNPAGVAVVIECQHLCMAMRGIQKQNSVTTTSAFTGEFAKDKTRAEFLRLITARLH

SEQ ID NO: 12460 - protein, 211 aa, Pedobacter duraquae
  REGION 1..211: note = tr|A0A4R6IGF6|A0A4R6IGF6_9SPHI GTP cyclohydrolase 1; OS = Pedobacter duraquae OX=425511 GN=folE PE=3 SV=1
MDKHTQDFTEEENEGYIKIDRYNQEKIGAIAAHYKDILVQIGEDPEREGLLKTPERVAKALQYLTHGYDTKPDEILRSAMFKEDYSQMVVVKDIEVYSMCEHHMLPFFGKAHIAYIPNGHIVGLSKIPRVVDAFARRLQVQERLTNEIRDCIQETLNPAGVAVVIECRHLCMSMRGVQKQNSVTTTSAFTGQFAKDTTRAEFLRLITASLH

SEQ ID NO: 12461 - protein, 209 aa, Pedobacter ginsengisoli
  REGION 1..209: note = tr|A0A2D1U989|A0A2D1U989_9SPHI GTP cyclohydrolase 1; OS = Pedobacter ginsengisoli OX=363852 GN=folE PE=3 SV=1
MNHTDHLDETEDGYIKIDRYNEGKINAVASHYKDILGQLGENPEREGLVKTPERVAKALQYLTHGYDLNPAEILRGAMFKEDYSQMVVVKDIEVFSMCEHHMLPFFGKAHVAYIPNGHIVGLSKIPRIVDAFARRLQVQERLTNEIRDCIQETLQPAGVAVVIECKHLCMAMRGIQKQNSVTTTSAFTGEFAKDKTRAEFLRLITANLH

SEQ ID NO: 12462 - protein, 104 aa, Pedobacter ginsengisoli
  REGION 1..104: note = tr|A0A2D1U201|A0A2D1U201_9SPHI GTP cyclohydrolase 1; OS = Pedobacter ginsengisoli OX=363852 GN=CPT03_03650 PE=3; SV = 1
MIGKVHVAYIPDKQVIGLSKINRLVQYYAKRPQVQERLTIQISEALKEVLQHDDVVVVIEADHLCAASRGIKDTNSATQTAHYSGQFENKAVKQEFLVHIYNKR

SEQ ID NO: 12463 - protein, 211 aa, unidentified
  source 1..211: note = Pedobacter ginsenosidimutans
  REGION 1..211: note = tr|A0A0T5VMP9|A0A0T5VMP9_9SPHI GTP cyclohydrolase 1; OS = Pedobacter ginsenosidimutans OX=687842 GN=folE PE=3 SV=1
MSDKDVLKGESRDGYVKIDRYNEDKIEAVATHYKDILGQLGENPEREGLLKTPERVAKALQYLTHGYDLKPDEILKGAMFEEDYSQMVVVKDIEVYSMCEHHMLPFFGKAHIAYIPNGHIVGLSKIPRVVDAFARRLQVQERLTNEIRDCIQNTLNPMGVAVVMECRHLCMSMRGVQKQNSVTTTSAFTGTFLSNDKTRAEFLRLITASLD

SEQ ID NO: 12464 - protein, 237 aa, Pedobacter glucosidilyticus
  REGION 1..237: note = tr|A0A0B8XRJ4|A0A0B8XRJ4_9SPHI GTP cyclohydrolase 1; OS = Pedobacter glucosidilyticus OX=1122941 GN=folE_1 PE=3; SV = 1
MLHFLKLKETMLSTQLKPLKKDLLTHFEELGDEHIGTSYDTPLRDDAFDLDDDVKIDQIAHHFKHIMDILGLDLTDDSLRGTPQRVAKMYVKEIFKGLNPANKPDMKLFDNKYQYNQMLVEKNITLYSNCEHHFVPIIGRAHVAYISNGKVIGLSKLNRIVQYYAQRPQVQERLTMQIANELKQALGTEDVAVVIDATHLCVSSRGIKDVQSSTVTAEYGGKFLDIDTRNEFLKHIG

SEQ ID NO: 12465 - protein, 211 aa, Pedobacter glucosidilyticus
  REGION 1..211: note = tr|A0A0B8XM51|A0A0B8XM51_9SPHI GTP cyclohydrolase 1; OS = Pedobacter glucosidilyticus OX=1122941 GN=folE_2 PE=3; SV = 1
MSLDNQHDDFTEENGYAKIDRYNSKKINKIAAKYAEILSEIGENPQREGLLKTPERVAKALQFLTHGYDLDAAEVLRSAMFQEDYSQMVIVKDIEVYSMCEHHMLPFFGKAHIAYIPNGHIVGLSKIPRVVDIFARRLQVQERLTNEIRDCIQDTLKPAGVAVVMECKHMCMSMRGIQKQNSVTTTSAFTGQFIIEKTRSEFLRLIAANLA

SEQ ID NO: 12466 - protein, 211 aa, Pedobacter hartonius
  REGION 1..211: note = tr|A0A1H4HI46|A0A1H4HI46_9SPHI GTP cyclohydrolase 1; OS = Pedobacter hartonius OX=425514 GN=folE PE=3 SV=1
MENHTQDPFDEENDGYIKVDRYNKTKIESISSHYTDILSTIGEDPSREGLLKTPERVAKSLQYLTHGYDLDPAEILRSAMFREDYSQMVVVKDIEVYSMCEHHMLPFFGKAHIAYIPNGHIVGLSKIPRVVDAFARRLQVQERLTNEIRDCIQETLNPAGVAVVIECQHLCMAMRGIQKQNSVTTTSAFTGGFASDKTRAEFLRLITAKLH

SEQ ID NO: 12467 - protein, 210 aa, Pedobacter heparinus
  REGION 1..210: note = tr|C6XWQ1|C6XWQ1_PEDHD GTP cyclohydrolase 1; OS = Pedobacter heparinus (strain ATCC 13125 / DSM 2366 / CIP 104194 / JCM 7457 / NBRC 12017 / NCIMB 9290 / NRRL B-14731 /HIM 762-3) OX=485917 GN=folE PE=3 SV=1
MDNHTNHLDEEDNGYIKIDRYNEGKIAAVAHHYKDILGQLGEDPNREGLIKTPERVAKALQYLTHGYDLNPAEILRSAMFKEDYSQMVVVKDIEVFSMCEHHMLPFFGKAHIAYIPNGHIVGLSKIPRIVDAFARRLQVQERLTNEIRDCIQDTLMPAGVAVVIECKHLCMAMRGIQKQNSVTTTSAFTGEFAKDKTRAEFLRLITANLH

SEQ ID NO: 12468 - protein, 211 aa, Pedobacter insulae
  REGION 1..211: note = tr|A0A1I2SX51|A0A1I2SX51_9SPHI GTP cyclohydrolase 1; OS = Pedobacter insulae OX=414048 GN=folE PE=3 SV=1
MKNDKYDHDDEVLGYQKIDRYDDEKISSVAHHYRDILGKLGENPEREGLLKTPERVAKALQYLTHGYDIRPDEILRSAMFKEDYSQMVVVKDIEVFSMCEHHMLPFFGKAHIAYIPNGHIVGLSKIPRVVDAFARRLQVQERLTDEIRDCLQDTLLPAGVAVVVECKHLCMAMRGVQKQNSVTTTSAFTGEFLKNDKTRAEFLRLITADLH

SEQ ID NO: 12469 - protein, 210 aa, unidentified
  source 1..210: note = Pedobacter jejuensis
  REGION 1..210: note = tr|A0A3N0BQ25|A0A3N0BQ25_9SPHI GTP cyclohydrolase 1; OS = Pedobacter jejuensis OX=1268550 GN=folE PE=3 SV=1
MGKDILKGESRDGYVKIDRYNESKIEAVATHYKDILSQLGEDPEREGLLKTPERVAKALQYLTHGYDLKPDEILKSAMFEEDYSQMVVVKDIEVYSMCEHHMLPFFGKAHIAYIPNGHIVGLSKIPRVVDAFARRLQVQERLTNEIRDCIQNTLQPKGVAVVIECRHLCMAMRGVQKQNSVTTTSAFTGSFLSNDKTRAEFLRLITASLD

SEQ ID NO: 12470 - protein, 217 aa, unidentified
  source 1..217: note = Pedobacter jejuensis
  REGION 1..217: note = tr|A0A3N0BSV8|A0A3N0BSV8_9SPHI GTP cyclohydrolase 1; OS = Pedobacter jejuensis OX=1268550 GN=folE PE=3 SV=1
MNMPERDIAEYQIEAEEYFRTPLKSNAFEMNDETKIALISEHFTSILNILGLDLTDDSLKGTPGRIAKMYVKEIFSGLNPDNKPIPTLFENNYRYNEMLVEKNIAVFSNCEHHFVPITGKAHVAYISKGKVIGLSKLNRIVQYYCSRPQVQERLTIQIAEEIKRVMGTDDVAVMIDANHHCVSSRGIRDIGSSTITTSFNGKFKDADTKNEFLKYIA

SEQ ID NO: 12471 - protein, 211 aa, unidentified
  source 1..211: note = Pedobacter kyonggii
  REGION 1..211: note = tr|A0A4Q9HCG0|A0A4Q9HCG0_9SPHI GTP cyclohydrolase 1; OS = Pedobacter kyonggii OX=1926871 GN=folE PE=3 SV=1
MSNKDVLKGESRDGYVKIDRYNEDKIEAVATHYKDILGQLGENPEREGLLKTPERVAKALQYLTHGYDLKPDEILKGAMFEEDYSQMVVVKDIEVYSMCEHHMLPFFGKAHIAYIPNGHIVGLSKIPRVVDAFARRLQVQERLTNEIRDCIQNTLNPMGVAVVMECRHLCMSMRGVQKQNSVTTTSAFTGTFLSNDKTRAEFLRLITASLD

SEQ ID NO: 12472 - protein, 211 aa, unidentified
  source 1..211: note = Pedobacter kyungheensis
  REGION 1..211: note = tr|A0A0C1D6P1|A0A0C1D6P1_9SPHI GTP cyclohydrolase 1; OS = Pedobacter kyungheensis OX=1069985 GN=folE PE=3 SV=1
MSDKDVLKGESIDGYVKIDRYNDDKIEAVATHYKDILGQLGENPEREGLLKTPERVAKALQYLTHGYDLKPDEILKSAMFEEDYSQMVVVKDIEVYSMCEHHMLPFFGKAHIAYIPNGHIVGLSKIPRVVDAFARRLQVQERLTNEIRDCIQNTLNPMGVAVVMECRHLCMAMRGVQKQNSVTTTSAFTGTFLSNDKTRAEFLRLITASLD

SEQ ID NO: 12473 - protein, 211 aa, unidentified
  source 1..211: note = Pedobacter lusitanus
  REGION 1..211: note = tr|A0A0D0GG51|A0A0D0GG51_9SPHI GTP cyclohydrolase 1; OS = Pedobacter lusitanus OX=1503925 GN=folE PE=3 SV=1
MENNTLDAFDEENEGYVKIDRYNTAKTVSISSHYTDILTQLGEDPQREGLLKTPERVAKALQYLTHGYDIKPDEILRSAMFKEDYSQMVVVKDIEVYSMCEHHMLPFFGKAHVAYIPNGHIVGLSKIPRVVDAFARRLQVQERLTNEIRDCIQDTLDPAGVAVVIECQHLCMAMRGIQKQNSVTTTSAFTGEFAKDKTRAEFLRLITARLH

SEQ ID NO: 12474 - protein, 217 aa, unidentified
  source 1..217: note = Pedobacter luteus
  REGION 1..217: note = tr|A0A1T5DVY8|A0A1T5DVY8_9SPHI GTP cyclohydrolase 1; OS = Pedobacter luteus OX=572036 GN=folE PE=3 SV=1
MDHKLKTMDQKQDINEEQIDGYVKIDRYDQARIDRIASHYEAILADLGEDPSREGLLKTPERVAKALQYLTHGYDSKPDEILRSAMFKEDYSQMVVVKDIEVFSMCEHHMLPFFGKAHIAYIPNGYIVGLSKIPRVVDSFARRLQVQERLTNEIRDCIQDTLNPAGVAVVIECKHLCMSMRGVQKQNSVTTTSAFTGEFANETTRGEFLKLITSNLS

SEQ ID NO: 12475 - protein, 207 aa, Pedobacter metabolipauper
  REGION 1..207: note = tr|A0A4R6SYY5|A0A4R6SYY5_9SPHI GTP cyclohydrolase 1; OS = Pedobacter metabolipauper OX=425513 GN=folE PE=3 SV=1
MNDHLDEEEISYTKIDRYNDSKIASVANHYKDILGQLGEDPEREGLLKTPERVAKALQYLTHGYDLNPSEILRSAMFKEDYSQMVVVKDIEVYSMCEHHMLPFFGKAHIAYIPNGHIVGLSKIPRVVDAFARRLQVQERLTNEIRDCIQETLNPVGVAVVIECRHLCMAMRGIQKQNSVTTTSAFTGEFAKDKTRAEFLRLITANLH

SEQ ID NO: 12476 - protein, 211 aa, unidentified
  source 1..211: note = Pedobacter nutrimenti
  REGION 1..211: note = tr|A0A318UJW2|A0A318UJW2_9SPHI GTP cyclohydrolase 1; OS = Pedobacter nutrimenti OX=1241337 GN=folE PE=3 SV=1
MDNQTQKFTEEENEGYIKIDRYNEGKIASIATHYKDILEQLGENPAREGLLKTPERVAKALQYLTHGYDTKPEEILRSAMFKEDYSQMVVVKDIEVFSMCEHHMLPFFGKAHIAYIPNGHIVGLSKIPRVVDAFARRLQVQERLTNEIRDCIQETLNPAGVAVVMECKHLCMAMRGIQKQNSVTTTSAFTGEFAKDKTRAEFLRLITASLH

SEQ ID NO: 12477 - protein, 211 aa, Pedobacter nyackensis
  REGION 1..211: note = tr|A0A1W2E6M0|A0A1W2E6M0_9SPHI GTP cyclohydrolase 1; OS = Pedobacter nyackensis OX=475255 GN=folE PE=3 SV=1
MDNHTNYLDEEEDNGYIKIDRYNESKIASVAHHYKDILGQLGEDPSREGLIKTPERVAKALQYLTHGYDLNPAEILRSAMFKEDYSQMVVVKDIEVFSMCEHHMLPFFGKAHVAYIPNGHIVGLSKIPRIVDAFARRLQVQERLTNEIRDCIQDTLMPAGVAVVIECKHLCMAMRGIQKQNSVTTTSAFTGEFAKDKTRAEFLRLITANLH

SEQ ID NO: 12478 - protein, 204 aa, unidentified
  source 1..204: note = Pedobacter psychrophilus
  REGION 1..204: note = tr|A0A179DEW2|A0A179DEW2_9SPHI GTP cyclohydrolase 1; OS = Pedobacter psychrophilus OX=1826909 GN=folE PE=3 SV=1
MSDKSNNGYQKIDRYDEKVIGEIAGNYKNILASIGEDPNREGLLKTPERVAKALQFLTHGYDLDASEILKSAMFKEDYSQMVIVKDIEVYSMCEHHMLPFFGKAHIAYIPNGHIVGLSKLPRVVDVFARRLQVQERLTNEIRDCIQDTLKPAGVAVVIECKHMCMSMRGIQKQNSVTTTSAFTGEFDHDKTRSEFLRLITANLS

SEQ ID NO: 12479 - protein, 226 aa, unidentified
  source 1..226: note = Pedobacter psychrophilus
  REGION 1..226: note = tr|A0A179DMJ6|A0A179DMJ6_9SPHI GTP cyclohydrolase 1; OS = Pedobacter psychrophilus OX=1826909 GN=folE PE=3 SV=1
MLNTPLNTYPQEDILIDAIGDDHVGTAYDTPLREDAFKLDDATKVEMIEKHFKSIMEIMGLDLTDDSLKGTPKRVAKMYIKEIFSGLNPANKPEVKLFDNKYQYNQMLVEKNITLFSNCEHHFVPIIGKAHVAYISSGKVIGLSKLNRIVQYYSQRPQVQERLNIQIANELKKVLNTEDVAVVIEADHLCVSSRGIRDTGSSTVTSEYGGKFLDYETRNEFLKYIA

SEQ ID NO: 12480 - protein, 211 aa, unidentified
  source 1..211: note = Pedobacter psychrotolerans
  REGION 1..211: note = tr|A0A4R2HFV2|A0A4R2HFV2_9SPHI GTP cyclohydrolase 1; OS = Pedobacter psychrotolerans OX=1843235 GN=folE PE=3 SV=1
MSTKEALNGESRDGYVKIDRYNDEKIEAVAAHYKDILSQLGEDPEREGLVKTPERVAKALQYLTHGYDIKPDEILKSAMFKEDYSQMVVVKDIEVYSMCEHHMLPFFGKAHIAYIPNGHIVGLSKIPRVVDAFSRRLQVQERLTNEIRDCIQNTLSPMGVAVVMECKHLCMSMRGVQKQNSVTTTSAFTGTFLSNDKTRAEFLRLITASLD

SEQ ID NO: 12481 - protein, 211 aa, Pedobacter rhizosphaerae
  REGION 1..211: note = tr|A0A1H9J8U7|A0A1H9J8U7_9SPHI GTP cyclohydrolase 1; OS = Pedobacter rhizosphaerae OX=390241 GN=folE PE=3 SV=1
MENKDVLREESIDGYVKIDRYNDLKISAVADHYKDILGQLGENPEREGLLKTPERVAKALQYLTHGYDLKPDEILRSAMFEEDYSQMVVVKDIEVYSMCEHHMLPFFGKAHIAYIPNGHIVGLSKIPRVVDAFARRLQVQERLTNEIRDCIQNTLNPQGVAVVMECRHLCMAMRGVQKQNSVTTTSAFTGSFLSNDKTRAEFLRLITASLD

SEQ ID NO: 12482 - protein, 210 aa, unidentified
  source 1..210: note = Pedobacter ruber
  REGION 1..210: note = tr|A0A1G9PZK5|A0A1G9PZK5_9SPHI GTP cyclohydrolase 1; OS = Pedobacter ruber OX=990371 GN=folE PE=3 SV=1
MDVKNNSAEEKIDGYTKIDHYDPAKIERIASHYKAILAELGEDPSREGLIQTPIRVAKALQFLTHGYDTKPEDILRSAMFKEDYSQMVVVKDIEVFSMCEHHMLPFFGKAHVAYIPNGYIVGLSKIPRVVDSFARRLQVQERLTNEIRDCIQNTLDAAGVAVVIECKHLCMSMRGIQKQNSVTTTSAFTGAFVNETTRSEFLRLITASLS

SEQ ID NO: 12483 - protein, 228 aa, unidentified
  source 1..228: note = Pedobacter ruber
  REGION 1..228: note = tr|A0A1G9UXE3|A0A1G9UXE3_9SPHI GTP cyclohydrolase 1; OS = Pedobacter ruber OX=990371 GN=folE PE=3 SV=1
MSKNSTLRNLITTEDELLDLISDEHISSSFDTPLRADAFDMDDDTKIQLISKHFTQIMDILGLDLTDDSLKDTPKRVAKMYVKEIFSGLNPKLKPKPTLFENHYKYNQMLVERNISVYSNCEHHFVPITGKAHVAYISNGKVIGLSKLNRIVQYYSQRPQVQERLTIQIANEMKLALGTEDVAVIIDAHHHCVSSRGVRDMNSSTVTAEYCGKFLLPETRNEFLKHIK

SEQ ID NO: 12484 - protein, 211 aa, Pedobacter soli
  REGION 1..211: note = tr|A0A1G6QWT5|A0A1G6QWT5_9SPHI GTP cyclohydrolase 1; OS = Pedobacter soli OX=390242 GN=folE PE=3 SV=1
MSDKDVLKGESIDGYVKIDRYNDDKIEAVATHYKDILGQLGENPEREGLLKTPERVAKALQYLTHGYDLKPDEILRSAMFEEDYSQMVVVKDIEVYSMCEHHMLPFFGKAHIAYIPNGHIVGLSKIPRVVDAFARRLQVQERLTNEIRDCIQNTLSPMGVAVVMECRHLCMAMRGVQKQNSVTTTSAFTGTFLSNDKTRAEFLRLITASLD

SEQ ID NO: 12485 - protein, 211 aa, Pedobacter sp.
  REGION 1..211: note = tr|A0A4R2ZN32|A0A4R2ZN32_9SPHI GTP cyclohydrolase 1; OS = Pedobacter sp. CF074 OX=2135714 GN=folE PE=3 SV=1
MSSKDVLKGESKDGYVKIDRYNEDKIEAVATHYKDILGQLGENPEREGLLKTPERVAKALQYLTHGYDLKPDEILRSAMFEEDYSQMVVVKDIEVYSMCEHHMLPFFGKAHIAYIPNGHIVGLSKIPRVVDAFARRLQVQERLTNEIRDCIQNTLSPMGVAVVIECKHLCMSMRGVQKQNSVTTTSAFTGTFLSNDKTRSEFLRLITASLD

SEQ ID NO: 12486 - protein, 210 aa, Pedobacter sp.
  REGION 1..210: note = tr|A6EK86|A6EK86_9SPHI GTP cyclohydrolase 1; OS = Pedobacter sp. BAL39 OX=391596 GN=folE PE=3 SV=1
MTNHTDHFDEQEDGYIKIDRYNEAKTASIANHYTDILSKLGENPEREGLIKTPERVAKALQYLTHGYDLNPAEILRGAMFKEDYSQMVVVKDIEVFSMCEHHMLPFFGKAHIAYIPNGHIVGLSKIPRVVDAFARRLQVQERLTNEIRDCIQDTLNPVGVAVVIECKHLCMAMRGIQKQNSVTTTSAFTGEFSKDKTRAEFLRLITANLH

SEQ ID NO: 12487 - protein, 212 aa, Pedobacter steynii
  REGION 1..212: note = tr|A0A1D7QDJ7|A0A1D7QDJ7_9SPHI GTP cyclohydrolase 1; OS = Pedobacter steynii OX=430522 GN=folE PE=3 SV=1
MNNHTDHLDENETENGYIKIDRYNEGKIASVAHHYSDILTQLGEDPSREGLIKTPERVAKALQYLTHGYDLDPAAILKGAMFKEDYSQMVVVKDIEVFSMCEHHMLPFFGKAHVAYIPNGHIVGLSKIPRIVDAFARRLQVQERLTNEIRDCIQETLNPAGVAVVIECKHLCMAMRGIQKQNSVTTTSAFTGEFAKDKTRAEFLRLITANLH

SEQ ID NO: 12488 - protein, 211 aa, Pedobacter steynii
  REGION 1..211: note = tr|A0A1H0LX45|A0A1H0LX45_9SPHI GTP cyclohydrolase 1; OS = Pedobacter steynii OX=430522 GN=folE PE=3 SV=1
MNNNHTDHPDETENGYIKIDRYNEGKIASVANHYSDILTQLGEDPSREGLIKTPERVAKALQYLTHGYDLDPAAILKGAMFKEDYSQMVVVKDIEVFSMCEHHMLPFFGKAHVAYIPNGHIVGLSKIPRIVDAFARRLQVQERLTNEIRDCIQETLNPAGVAVVIECKHLCMAMRGIQKQNSVTTTSAFTGEFAKDKTRAEFLRLITANLH

SEQ ID NO: 12489 - protein, 211 aa, Pedobacter suwonensis; identical to SEQ ID NO: 12454
  REGION 1..211: note = tr|A0A1I0TCM4|A0A1I0TCM4_9SPHI GTP cyclohydrolase 1; OS = Pedobacter suwonensis OX=332999 GN=folE PE=3 SV=1

SEQ ID NO: 12490 - protein, 211 aa, Pedobacter terrae
  REGION 1..211: note = tr|A0A1G7XXU3|A0A1G7XXU3_9SPHI GTP cyclohydrolase 1; OS = Pedobacter terrae OX=405671 GN=folE PE=3 SV=1
MSNKDVLKGESRDGYVKIDRYNEDKIEAVAAHYKDILGQLGENPAREGLLKTPERVAKALQYLTHGYDLKPDEILKSAMFEEDYSQMVVVKDIEVYSMCEHHMLPFFGKAHIAYIPNGHIVGLSKIPRVVDAFARRLQVQERLTNEIRDCIQNTLSPMGVAVVMECRHLCMSMRGVQKQNSVTTTSAFTGTFLSNDKTRSEFLRLITASLD

SEQ ID NO: 12491 - protein, 211 aa, Pedobacter terrae
  REGION 1..211: note = tr|A0A561GJ15|A0A561GJ15_9SPHI GTP cyclohydrolase 1; OS = Pedobacter terrae OX=405671 GN=folE PE=3 SV=1
MSNKDVLKGESRDGYVKIDRYNEDKIEAVATHYKDILGQLGENPEREGLLKTPERVAKALQYLTHGYDLKPDEILRSAMFEEDYSQMVVVKDIEVYSMCEHHMLPFFGKAHIAYIPNGHIVGLSKIPRVVDAFARRLQVQERLTNEIRDCIQNTLSPMGVAVVIECRHLCMSMRGVQKQNSVTTTSAFTGTFLSNDKTRAEFLRLITASLD

SEQ ID NO: 12492 - protein, 213 aa, unidentified
  source 1..213: note = Pedobacter tournemirensis
  REGION 1..213: note = tr|A0A543GRS4|A0A543GRS4_9SPHI GTP cyclohydrolase 1; OS = Pedobacter tournemirensis OX=699437 GN=folE PE=3 SV=1
MKEKEINHMAEENELDGYVKIDRYNAVKIERIASHYSEILSDLGEDPSRDGLLKTPERVAKALQFLTHGYDLKPHEILKSAMFKEEYSQMVVVKDIEVYSMCEHHLLPFFGKAHVAYIPNGHIVGLSKIPRVVEAYARRLQVQERLTNEIRDCIQETLQPMGVAVVIECKHLCMSMRGIQKQNSVTTTSAFTGAFANERTRAEFLRLITASLD

SEQ ID NO: 12493 - protein, 205 aa, unidentified
  source 1..205: note = Pedobacter tournemirensis
  REGION 1..205: note = tr|A0A4Q0MFK3|A0A4Q0MFK3_9SPHI GTP cyclohydrolase 1; OS = Pedobacter tournemirensis OX=699437 GN=folE PE=3 SV=1
MAEENELDGYVKIDRYNAVKIERIASHYSEILSDLGEDPSRDGLLKTPERVAKALQFLTHGYDLKPHEILKSAMFKEEYSQMVVVKDIEVYSMCEHHLLPFFGKAHVAYIPNGHIVGLSKIPRVVEAYARRLQVQERLTNEIRDCIQETLQPMGVAVVIECKHLCMSMRGIQKQNSVTTTSAFTGAFANERTRAEFLRLITASLD

SEQ ID NO: 12494 - protein, 211 aa, Pedobacter westerhofensis
  REGION 1..211: note = tr|A0A521CFI6|A0A521CFI6_9SPHI GTP cyclohydrolase 1; OS = Pedobacter westerhofensis OX=425512 GN=folE PE=3 SV=1
MENHIQDPFDEDNDGYIKVDRYNASKITSIANHYTEILSTIGEDPSREGLLKTPERVAKSLQYLTHGYDLDPAEILRSAMFKEDYSQMVVVKDIEVYSMCEHHMLPFFGKAHIAYIPNGHIVGLSKIPRVVDAFARRLQVQERLTNEIRDCIQETLNPAGVAVVIECQHLCMAMRGIQKQNSVTTTSAFTGGFASDKTRAEFLRLITAKLH

SEQ ID NO: 12495 - protein, 211 aa, unidentified
  source 1..211: note = Pedobacter xixiisoli
  REGION 1..211: note = tr|A0A286AEE0|A0A286AEE0_9SPHI GTP cyclohydrolase 1; OS = Pedobacter xixiisoli OX=1476464 GN=folE PE=3 SV=1
MAHNHDHDDEELLGYQKIERYDDDKINSVAVHYKDILERLGENPEREGLLKTPERVAKALQYLTHGYDIKPEEILRSAMFKEDYSQMVVVKDIEVFSMCEHHMLPFFGKAHIAYIPNGHIVGLSKIPRVVDAFARRLQVQERLTNEIRDCIQDTLNPAGVAVVMECKHLCMAMRGVQKQNSVTTTSAFTGGFLNNDKTRAEFLRLITANLH

SEQ ID NO: 12496 - protein, 210 aa, unidentified
  source 1..210: note = Pedobacter yonginense
  REGION 1..210: note = tr|A0A317EMK2|A0A317EMK2_9SPHI GTP cyclohydrolase 1; OS = Pedobacter yonginense OX=651869 GN=folE PE=3 SV=1
MEKDYLNEESRDGYVKIDRYNESKIEAVATHYKDILSQLGENPEREGLLKTPERVAKALQYLTHGYDLKPDEILKSAMFEEDYSQMVVVKDIEVYSMCEHHMLPFFGKAHIAYIPNGHIVGLSKIPRVVDAFARRLQVQERLTNEIRDCIQNTLNPMGVAVVMECRHLCMAMRGVQKQNSVTTTSAFTGTFLSNDKTRAEFLRLITASLD

SEQ ID NO: 12497 - protein, 226 aa, unidentified
  source 1..226: note = Pedobacter yonginense
  REGION 1..226: note = tr|A0A317ESS1|A0A317ESS1_9SPHI GTP cyclohydrolase 1; OS = Pedobacter yonginense OX=651869 GN=folE PE=3 SV=1
MINHSSLQETNSIEEQSISELRAVKPNLDTPLKSDKNKMDDDKKIERIAEHFGHIMEILGLDLNDDSLKDTPKRVAKMYVKEIFSGLNPANMPTPTLFENPYKYNQMLVERNISVFSNCEHHFVPIVGKAHVAYISSGQVIGLSKLNRIVQYCAQRPQVQERLTIQIAAMLKEVLNTEDVAVVIDAHHHCVSSRGIRDAGSSTVTAEYSGKFLSAETKNEFLKYIG

SEQ ID NO: 12498 - protein, 212 aa, unidentified
  source 1..212: note = Pedobacter yulinensis
  REGION 1..212: note = tr|A0A2T3HNI0|A0A2T3HNI0_9SPHI GTP cyclohydrolase 1; OS = Pedobacter yulinensis OX=2126353 GN=folE PE=3 SV=1
MANEKHYLPEESIDGYVKIDRYNDDKIRALSSHYKDILANLGENPEREGLIKTPERVAKALQYLTHGYDLKPDEILRSAMFQEDYSQMVVVKDVEVFSMCEHHMLPFFGKAHIAYIPNGHIVGLSKIPRVVDAFARRLQVQERLTNEIRDCIQKTLNPTGVAVVIECKHLCMSMRGVQKQNSVTTTSAFTGEFINNDKTRAEFLRLITASLD

SEQ ID NO: 12499 - protein, 317 aa, unidentified
  source 1..317: note = Pedosphaera parvula
  REGION 1..317: note = tr|B9XR80|B9XR80_PEDPL GTP cyclohydrolase FolE2; OS = Pedosphaera parvula (strain Ellin514) OX=320771; GN = folE2 PE=3 SV=1
MKKQVAEGFGVEGLRWIMGKNGQIWNDLQNGVGLLLWMMPDGPITMSKSERMVDLKPNHVAKMQDKQNERDHRELRIDKVGVRGLRFPIQIRDKAHVLQNTVATIGMYVDLPKEFKGTHMSRFIEVLNAHGNVVHVENITEILHAMQKKLHADTAHLEMEFPFFLTKKAPVSGMEGLMDYTARFDATASGKEIDFVLTVMAAVTTLCPCSKAISQYSAHNQRGTVTVKIRSKQAIWIEDLIALVESCASSELYSLLKRQDEKAVTERAYENPVFVEDLVRNVALKLNAHQDVTWYKVEAENYESIHNHNAYACIEKG

SEQ ID NO: 12500 - protein, 264 aa, unidentified
  source 1..264: note = Pedosphaera sp.
  REGION 1..264: note = tr|A0A2A2R436|A0A2A2R436_9BACT GTP cyclohydrolase FolE2 OS=Pedosphaera sp. Tous-C6FEB OX=1982324 GN=folE2; PE = 3 SV=1
MSDTPTKAALHDVQSGRDHRELRIDKVGVRGLRFPIQIRDKAHSHQNTIATIAMCVDLPKEFKGTHMSRFIEVLNAHGSIVHVENIEEILHAMQIKLHAATAHLEMEFPFFLTKKAPVTGMAGVMDYTARFSATATGKEIDFVLTVIVGVTTLCPCSKAISKYGAHNQRGNVTVSIRSDKVVWIEDLIALIEASASSELYSLLKREDEKAVTERAYENPVFVEDLVRNVALKLNTRADVTWYQVEAENYESIHNHNAYACIEKG

SEQ ID NO: 12501 - protein, 275 aa, unidentified
  source 1..275: note = Pedosphaera sp.
  REGION 1..275: note = tr|A0A2G4I4E7|A0A2G4I4E7_9BACT GTP cyclohydrolase FolE2 OS=Pedosphaera sp. OX=2024890 GN=folE2 PE=3 SV=1
MIEANDTTVAVTRDSHAKPALHDAQSGHDHRELRIDKVGVRGLRFPVQIRDKAHSHQNTIATISMCVDLPKEFKGTHMSRFIEVLNAHGSIVHVENIEDILHAMQVRLDAATAHLEMEFPFFLTKKAPVTGMEGVMDYTARFAAAACGKEIDFVLTVIVGVTTLCPCSKAISKHGAHNQRGNVTVSIRSDKVVWIEDLIALVEASASSELYSLLKRPDEKAVTERAYENPVFVEDLVRNVALKLNALTDVTWYKVEAENFESIHNHNAYACIEKG

SEQ ID NO: 12502 - protein, 363 aa, unidentified
  source 1..363: note = Pelagibaca abyssi
  REGION 1..363: note = tr|A0A1P8UX20|A0A1P8UX20_9RHOB GTP cyclohydrolase FolE2 OS=Pelagibaca abyssi OX=1250539 GN=folE2 PE=3 SV=1
MNVFTPEIDRKPSQEEAAAALALLRRYTDKAQDAEIAALDPALAVLRDGVAYPDLSRDYPEGFTVDAAYRATLPDLQNGPASLIRGENRAIQHVGISNFRLPIRYRTRDNGELMLETSVTGTVSLDADKKGINMSRIMRSFYAHAEKTFSFEVIEAALDDYKTDLESFDARIEMRFSFPVKVESLRSGLQGYQYYDIALELVETAGVRRKILHLDYVYSSTCPCSLELSEHARRARGQLATPHSQRSVARISVEMKEGGCLWFEDLIGLCRKAVPTETQVMVKREDEQAFAELNAANPIFVEDAARLFAEQLQADPRIGDFRVLASHQESLHSHDAVSVLTEGTTFANDSLDPRLFSTLIHAG

SEQ ID NO: 12503 - protein, 200 aa, unidentified
  source 1..200: note = Pelagibacter sp.
  REGION 1..200: note = tr|F2I2C6|F2I2C6_PELSM GTP cyclohydrolase 1; OS = Pelagibacter sp. (strain IMCC9063) OX=1002672 GN=folE; PE = 3 SV=1
MKNVTDIKDKILEKISKDEAEKAIKTILKFVGENPDREGLVETPKRVIKAFQEYFGGYLINPDDYLEKTFGDVEGYDDMVIQKNITIHSHCEHHMAPIIGTVHVAYVPSEKVVGLSKLARVVDAYARRLQTQERLTMQIANSIYKGLKSHGSAVSIDAEHQCMTTRGVRKEGATTITNYFTGVFRDSQNLQKRFLSYIKD

SEQ ID NO: 12504 - protein, 202 aa, unidentified
  source 1..202: note = Pelagibacter ubique
  REGION 1..202: note = sp|Q4FL89|GCH1_PELUB GTP cyclohydrolase 1; OS = Pelagibacter ubique (strain HTCC1062) OX=335992 GN=folE; PE = 3 SV=1
MKLVEDTDSKILDTKKVSDKEAEEAFKTILTWMGEDPSREGLLETPKRVVKAFKEYFGGYTEDAEKILEKTFGDVEGYDDMVVEKNISVSSHCEHHMAPIVGTAHVAYIPNERVVGLSKLARVVEVFSKRLQTQERLTMQVAQALMTSLDAKGVAVTIDAAHQCMTMRGIKKENATTVTNYFLGEFKKDLSVQNRYLRFISK

SEQ ID NO: 12505 - protein, 202 aa, unidentified
  source 1..202: note = Pelagibacteraceae bacterium
  REGION 1..202: note = tr|A0A3R7SIP3|A0A3R7SIP3_9PROT GTP cyclohydrolase 1; OS = Pelagibacteraceae bacterium TMED195 OX=1986631 GN=folE; PE = 3 SV=1
MTSVITKKNFQPTLDKSISREEAEKAVETLIKWAGDDPSREGLRETPKRVVNAFNEFFSGYNESPESYLSKTFEDVQGYEDIVMLKDISFHSHCEHHMVPIIGKVHLAYIPTKNVVGISKLARVVDIFAKRLQTQETMTQQIANCIEKSLKPKGVAVYIEALHQCMTTRGVQKPNVSTITSCFLGEFKTDKSIGQRFTDFIK

SEQ ID NO: 12506 - protein, 234 aa, unidentified
  source 1..234: note = Pelagibacteraceae bacterium
  REGION 1..234: note = tr|A0A1Z9PY56|A0A1Z9PY56_9PROT GTP cyclohydrolase 1; OS = Pelagibacteraceae bacterium TMED237 OX=1986815 GN=folE; PE = 3 SV=1
MSKDLSVIKKNSDIDKYNQDGDNHFSSNLDSTLLDKAFELSDKEKINIIQEHFRSIMIAMGLDLSDDSLKGTPYRVAKMYVKEIFKGLDPDKKPQAMLFENKFEYGKMLLEKNISFYSFCEHHFLPFYGTAHVGYISSGKVVGLSKIHRIVNYFSKRPQVQERLTVQIFKELKNVLGTEDVAILLEASHLCVSSRGIKDITSTTVTMESGGIFKDDEKWSDFLSIVVPDKVKNK

SEQ ID NO: 12507 - protein, 204 aa, unidentified
  source 1..204: note = Pelagibacterales bacterium
  REGION 1..204: note = tr|A0A2A5V3G7|A0A2A5V3G7_9PROT GTP cyclohydrolase 1; OS = Pelagibacterales bacterium MED-G44 OX=1986252 GN=folE; PE = 3 SV=1
MKLVKDTNIDNQIKKISDKEAEDAFKTILAWMGEDPNREGLLETPKRVVKAFKEYFKGYKEDPHQILDKTFGDVEGYDDMVVQKNISVQSHCEHHMAPIIGKAHVAYIPKERVVGLSKLARVVEVFSKRLQTQERLTMQIANTLMESLDAKGVAVTIDSTHQCMTMRGIKKEQATTVTNYYLGQFKDDLSYQNRYLRFISIAKD

SEQ ID NO: 12508 - protein, 203 aa, unidentified
  source 1..203: note = Pelagibacterales bacterium
  REGION 1..203: note = tr|A0A2E4WFI6|A0A2E4WFI6_9PROT GTP cyclohydrolase 1; OS = Pelagibacterales bacterium OX=2026776 GN=folE PE=3 SV=1
MIKDEIKENKRVVKNKKPTREEAMQAVRTMLAWAGDNPDREGLLETPLRVVKAYEEFFAGYKENSDAILNKTFEEVAGYDEMVIIKNVRLESHCEHHMVPILGKAHVAYIPNKRVVGISKLARVVDVYAKRLQTQETMTAQIAESIQRVLQPKGVGVVIDAGHQCMTTRGVHKPTATTITSQMLGVFRTDYRTRSEFMNLINN

SEQ ID NO: 12509 - protein, 219 aa, Pelagibacterium halotolerans
  REGION 1..219: note = tr|G4RDH1|G4RDH1_PELHB GTP cyclohydrolase 1; OS = Pelagibacterium halotolerans (strain DSM 22347 / JCM 15775 / CGMCC 1.7692 / B2) OX=1082931 GN=folE PE=3 SV=1
MRPSIFKGTPFMDMNVKPKPAQTALDRVIERPTREEAEAAVRTLIAWAGDNPDREGLLDTPRRVADAYREFFAGYEEDARAVLETTFTEVGGYDDIVLVRDIPFHSHCEHHMVPFVGKAHIAYLPHDGVVGLSKLARVTDVFAKRLQTQENLTAQIIEAINEAINPRGAAVMLEAEHMCMSMRGIKKHGSSTVTHRFTGVFAEDRQEQDRFFALIRAGR

SEQ ID NO: 12510 - protein, 209 aa, Pelagibacterium luteolum
  REGION 1..209: note = tr|A0A1G7XH62|A0A1G7XH62_9RHIZ GTP cyclohydrolase 1; OS = Pelagibacterium luteolum OX=440168 GN=folE PE=3 SV=1
MDMNVKPKPVAQTALERVIQRPSREEAEAAVRTLIAWAGDNPNREGLIDTPRRVVDSYREFYSGYDEDAAKILETTFSEVGGYDDIVLVRDIPFNSHCEHHMVPFVGKAHIAYLPHDGVVGLSKLARVTDVFAKRLQTQENLTAQIIEAINEAINPRGAAVMLEAEHMCMSMRGVRKHGSSTITHRFTGVLAEDRQEQDRFFALIRAGR

SEQ ID NO: 12511 - protein, 208 aa, Pelagibacterium sp.
  REGION 1..208: note = tr|A0A1E4E027|A0A1E4E027_9RHIZ GTP cyclohydrolase 1; OS = Pelagibacterium sp. SCN 63-126 OX=1660123 GN=folE PE=3; SV = 1
MDAPVKPLKPATTSQVALPRPTKEEAEAAVRTLIAWAGDDPNREGLLDTPARVAKAYGELFAGYGQDAAAVLSKTFKEVGGYDDLVLVRDIPFYAHCEHHMVPFYGKAHIAYLPHDGVVGLSKLARLVEVFARRLQTQETMTAQIIDAINENLGPRGAAVMLEAEHMCMTMRGIKAHDVKTVTHRFTGVFAEDRVEQDRFFAMVAGRR

SEQ ID NO: 12512 - protein, 269 aa, Pelagibacterium sp.; identical to SEQ ID NO: 10703
  REGION 1..269: note = tr|A0A2E7FVS4|A0A2E7FVS4_9RHIZ GTP cyclohydrolase FolE2 OS=Pelagibacterium sp. OX=1967288 GN=folE2 PE=3 SV=1

SEQ ID NO: 12513 - protein, 184 aa, unidentified
  source 1..184: note = Pelagibaculum spongiae
  REGION 1..184: note = tr|A0A2V1H244|A0A2V1H244_9GAMM GTP cyclohydrolase 1; OS = Pelagibaculum spongiae OX=2080658 GN=folE PE=3 SV=1
MTDQIADHYLKILSAIGEDTTRDGLKDTPQRAAKAFKYLTKGYDQSLDEVVNGAIFESDNDEMVIVRDIELYSMCEHHLLPFIGKAHVAYIPTGKVIGLSKIARIVDMFARRLQIQEQLTKQIADSIMSVTGARGVGVIVEAKHMCMMMRGVEKQNSSMTTSMMTGLFRTDPRTRSEFLKLTNR

SEQ ID NO: 12514 - protein, 366 aa, Pelagicola litoralis
  REGION 1..366: note = tr|A0A4U7N6V7|A0A4U7N6V7_9RHOB GTP cyclohydrolase FolE2 OS=Pelagicola litoralis OX=420403 GN=folE2 PE=3 SV=1
MNIQTNKPQTQPSKDDAIEALAKLRAWAVQATPEEIAALEPAVARLLPDQPLGNYPALTRTYPDDFVADEAYRASLPDLQNGPASLIRGEKQQIQHVGISNFRLPIRFHARDGADMTLETSVTGTVSLDAEKKGINMSRIMRSFYKHAEKTFSFEVMEAALADYVTDLESLDARIQMRFSYPMRIPSLRSGLAGYQYYDIALEKVQVNGELHKVMHLDYVYSSTCPCSLELSEHARQSRGQLATPHSQRSVARISVQVRQDELLWFEDLIDMARKAVPTETQVMVKREDEQAFAELNAANPIFVEDAARLFCEQLKANPRVGDFRVIASHQESLHSHDAVSILTDGPFFAASSLDPKLFNTLFHIG

SEQ ID NO: 12515 - protein, 366 aa, unidentified
  source 1..366: note = Pelagicola litorisediminis
  REGION 1..366: note = tr|A0A1Y5S2V8|A0A1Y5S2V8_9RHOB GTP cyclohydrolase FolE2 OS=Pelagicola litorisediminis OX=1312363 GN=folE2; PE = 3 SV=1
MNIRPSDVKQLPDREEAKTALALLRQWAETATPEEVADLDPAIARLLPSGVVSNYPMLSREYPEGFTTDEGYRATLPDLQNGPSSLIRGAKQHLQHVGISNFRLPIRFHTRDDGDLTLETSVTGTVSLEAGKKGINMSRIMRSFYKHAAKTFSFEVVEAALDDYITDLDSIDARLQMRFSYPAKVQSLRSGLEGYQYYDIALELVESGGLRRKFMHLDYVYSSTCPCSLELSEHARQARGQLATPHSQRSVARISVEVKGGDCLWFEDLIDMARQAVPTETQVMVKREDEQAFAELNAANPIFVEDAARLFCKQLLADPRIGDFRIVASHQESLHSHDAVSVLTEGATFAADSLDPKLFNTLFHVG

SEQ ID NO: 12516 - protein, 366 aa, Pelagicola sp.
  REGION 1..366: note = tr|A0A2U2CWN3|A0A2U2CWN3_9RHOB GTP cyclohydrolase FolE2 OS=Pelagicola sp. LXJ1103 OX=2175247 GN=folE2 PE=3; SV = 1
MNHHNMDLHKMPDRDDAQSALDVLRRWAADASPEEVADLEPAIARLIPGGAVSNYPSLSRKYPDEFEADAAYRATMPDLQNGPTSLIRGSKQQLQHVGISNFRLPIRFHTRDGSDLTLETSVTGTVSLEAEKKGINMSRIMRSFYKHAEKTFSFEVIEAALDDYISDLDTVDARIQMRFSYPAKVKSLRSGLEGYQYYDIALELVETDGVRRKFMHLDYVYSSTCPCSLELSEHARQTRGQLATPHSQRSVARISVEVTEGEVLWFEDLIEHARAAVPTETQVMVKREDEQAFAELNAANPIFVEDAARLFCERLLSDARIGDFRVIASHQESLHSHDAVSILVEGDTFSAQSIDPKLFGTLIHVG

SEQ ID NO: 12517 - protein, 358 aa, unidentified
  source 1..358: note = Pelagimonas varians
  REGION 1..358: note = tr|A0A238KX26|A0A238KX26_9RHOB GTP cyclohydrolase FolE2 OS=Pelagimonas varians OX=696760 GN=folE2 PE=3 SV=1
MNKGAKPMNIQVDIAQKPSREEAEQALALLRNYAGSEAALAELTGAYPDLHNIYPDNFIVDPAYKDTLPDLQNGPASLIRGAQRVIQHVGISNFRLPIPYHTRDNGDLTLETSVTGTVSLEADKKGINMSRIMRSFYTHAEKTFSFEVMEAALDDYKTDLDSFDARIQMRFSFPMKVQSLRSGLTGFQYYDIALELVETAGTRREIVHLDYVYSSTCPCSLELSEHARQTRGQLATPHSQRSVARVSVEVLPGKCLWFEDLIDMCRRAVPTETQVMVKREDEQAFAELNAANPIFVEDAARLFAQVLEDDARVGDFRVVASHQESLHSHDAVSVLTEGTLFADQSLDPKLFSTLFHVG

SEQ ID NO: 12518 - protein, 303 aa, unidentified
  source 1..303: note = Pelagirhabdus alkalitolerans
  REGION 1..303: note = tr|A0A1G6H6C1|A0A1G6H6C1_9BACI GTP cyclohydrolase FolE2 OS=Pelagirhabdus alkalitolerans OX=1612202 GN=folE2; PE = 3 SV=1
MYKKTLPSKPLRHKLFGSVQPGEKTKPTKKSEMPDLQNSNDDFLFDLDAVGITNVKHPIQINSQMKPLNQTSIATFSFSSSLKQDSKGTNMSRFTEELDHQAQSGTLTTDLSDLKDFAKKLTKRLKAEDLHMNITVPWFFERSAPDSNRSGLNHADLTIDIDYTLPNQFTIEVGLSATITTLCPCSKEISEYSAHNQRGVVTTSVQLNADFNEETIDWKKELLDAAESNASAIIHPVLKRPDEKMVTETAYENPRFVEDMVRLVAADLYEMDYVDQFKVKCQNEESIHLHDAIASVTYDKRGS

SEQ ID NO: 12519 - protein, 366 aa, unidentified
  source 1..366: note = Pelagivirga sediminicola
  REGION 1..366: note = tr|A0A2T7G6E4|A0A2T7G6E4_9RHOB GTP cyclohydrolase FolE2 OS=Pelagivirga sediminicola OX=2170575 GN=folE2 PE=3; SV = 1
MTHQPSDIQTPPERGEAQDALALLRRWAAQATPEEVADLDPAISRLLPRGEVANYPALARAYPEDFDADDAYRATMPDLQNGPSSLIKGSRQQLQHVGISNFRLPIRFHTRDGADLTLETSVTGTVSLEANKKGINMSRIMRSFYKHAERTFSFEVMADALDDYISDLGSVDARIQMRFSYPARIKSLRSGLEGYQYYNIALELVETDGVRRKFMHLDYVYSSTCPCSLELSEHARQARGQLATPHSQRSVARISVEVTCDDCLWFEDLIEIARSAVPTETQVMVKREDEQAFAELNAANPIFVEDAARLFCEALLADGRIGDFRIVASHQESLHSHDAVSVLTEGDTFAAQSLDPRLFATLFHVG

SEQ ID NO: 12520 - protein, 265 aa, unidentified
  source 1..265: note = Pelistega indica
  REGION 1..265: note = tr|V8FYF1|V8FYF1_9BURK GTP cyclohydrolase FolE2; OS = Pelistega indica OX=1414851 GN=folE2 PE=3 SV=1
MSENFSNLAVMPDVQSSYDPRQIAIQRVGIRKVKSPLLIKQEAEQVQASVGEWTLTVYLPESEKGTHMSRFVSLLANYRQTAMDVSVFKQMANEMLTLLNAEKGDITVTFPYFINKKAPVSGVESLMDYQVTWQANASKESIEFVMTVVVPVMSLCPCSKAISAYGAHNQRSHITVEVVSEQIYSMDDVIKLIEKQASSELWGLLKRHDEKYVTEYSYDNPKFVEDLIRDVAVAIKTLPGIQRYKIEAENFESIHNHSAYAVIEG

SEQ ID NO: 12521 - protein, 260 aa, Pelobacter acetylenicus
  REGION 1..260: note = tr|A0A1L3GJX9|A0A1L3GJX9_PELAE GTP cyclohydrolase FolE2 OS=Pelobacter acetylenicus OX=29542 GN=folE2 PE=3; SV = 1
MRDMQMERDTRNVAIDKVGVKDIHYPIVVMDKNRDQQHTVARINMYVDLPHHFKGTHMSRFVEILNRYRGEITMRNMGELLQAMKDRLNASCAHIEMDFPYFIEKQAPVSKALSLMEYRCCLRGTLAETKDFVLAVEVPLTALCPCSKEISARGAHNQRSSVRVEVRMNKFIWIEDLISWVEECGSAPVYALLKREDEKAVTEQAYDNPMFVEDIVRAVTLRLKATPEITWFRVECENFESIHNHSAYAMVEFPPRCEEG

SEQ ID NO: 12522 - protein, 266 aa, Pelobacter carbinolicus
  REGION 1..266: note = sp|Q3A091|GCH4_PELCD GTP cyclohydrolase FolE2; OS = Pelobacter carbinolicus (strain DSM 2380 / NBRC 103641 / GraBd1) OX=338963 GN=folE2 PE=3 SV=2
MRDMQMERDTRNIAIDKVGVKDIRYPIVVMDKNKDQQHTVARINMYVDLPHHFKGTHMSRFVEILNQYRGEITMRNMGELLQEMKNRLDASCAHLKMDFPYFIEKQAPVSKARSLMEYRCRLRGTLDKQKDFVLGVEVPLTALCPCSREISERGAHNQRSAVKVEVRMSKFIWIEDLISWIEECGSAPVYALLKREDEKAVTEQAYDNPMFVEDIVRAVTLKLKSAPEITWFRVECENFESIHNHSAYAMVEFPPRTEDAEPAPAP

SEQ ID NO: 12523 - protein, 257 aa, Pelobacter propionicus
  REGION 1..257: note = sp|A1AU47|GCH4_PELPD GTP cyclohydrolase FolE2; OS = Pelobacter propionicus (strain DSM 2379 / NBRC 103807 / OttBd1) OX=338966 GN=folE2 PE=3 SV=2
MPDMQKRPDHRRIPISKVGVKDISYPIVVMDKNRSLQHTVARVNMYVDLPHQFKGTHMSRFVEILNRHREQIALDKLETILEEMKARLGSASAHLEIQFPYFIDKRAPVSGARSLMEYSCEFSASLTDTLDFVLGVRVPLTSLCPCSRELAIHGAHNQRSIMTVRVRYRDFIWIEDLVELIEQCGSSPLYSLLKRVDEKYVTEQAYENPRFVEDMVREAYSRLAGMENITWFSVETENFESIHNHSAYAAVELDRRG

SEQ ID NO: 12524 - protein, 270 aa, Pelobacter sp.
  REGION 1..270: note = tr|A0A1L3GPV4|A0A1L3GPV4_9DELT GTP cyclohydrolase FolE2 OS=Pelobacter sp. SFB93 OX=1842532 GN=folE2 PE=3 SV=1
MNTMRDMQMERDTRNIPIDKVGVKDVNYPIVVMDKNKDQQHTVARINMYVDLPHHFKGTHMSRFIEILNQYRGEITMRNMGSILQDMKDRLEASCAHLEMEFPYFIEKEAPVSKARSLMEYRCRLSGTLDDHKDFVLGVEVPMTSLCPCSKEISERGAHNQRSAVRVEIRSDKFVWIEDLISWIEDCGSAPVYSLLKREDEKAVTEQAYDNPMFVEDIVRAVTEKLKSVESILWFRVECENFESIHNHSAYALVEHPSAYPVPLDTPDEN

SEQ ID NO: 12525 - protein, 204 aa, unidentified
  source 1..204: note = Pelobium manganitolerans
  REGION 1..204: note = tr|A0A419SAI1|A0A419SAI1_9SPHI GTP cyclohydrolase 1; OS = Pelobium manganitolerans OX=1842495 GN=folE PE=3 SV=1
MSEQQETGYQKIDRYNTEVISDIAGHYKQILSDIGEDPNREGIVKTPERAAKALQFLTHGYDLDAAEILKSAMFKEEYSQMVIVKDIEVYSLCEHHLLPFFGKAHIAYIPAGHIVGLSKIPRVVDVFARRLQVQERLTNEIRDCIQNTLNPAGVAVVIECKHMCMSMRGIQKQNSVTTTSAFTGAFSNDKTRSEFLRLISADLA

SEQ ID NO: 12526 - protein, 220 aa, unidentified
  source 1..220: note = Pelobium manganitolerans
  REGION 1..220: note = tr|A0A419S2I7|A0A419S2I7_9SPHI GTP cyclohydrolase 1; OS = Pelobium manganitolerans OX=1842495 GN=folE PE=3 SV=1
MKIYAEKIDKCGEDHFSANIDTPLRPGAFLMDDEEKIEAIAKNFKNIMEILGLDLTDDSLKNTPHRVAKMYVKEVFKGLNPANKPSISMFNNNYQYRQMLVEKNITLYSYCEHHFVPIIGKVHVAYISSGEVIGLSKINRLVQYYANRPQVQERLTQQIANGLKEALNTPHVAVMVDAEHLCVASRGIKDTASSTVTFHFSGDFQEKDVRAEFLATVNAK

SEQ ID NO: 12527 - protein, 216 aa, unidentified
  source 1..216: note = Pelodictyon luteolum
  REGION 1..216: note = tr|Q3B4V2|Q3B4V2_PELLD GTP cyclohydrolase 1; OS = Pelodictyon luteolum (strain DSM 273 / 2530) OX=319225; GN = folE PE=3 SV=1
MHTPIKTPLFTGRGTCCDDDEYPLDPQELCPEAHAALSASVSTMLESVGEDPMREGLLKTPERVARSLAFLTRGYRQDPEEMLKKAVFTESYDEMVLVRDIDIFSMCEHHMLPFFGKAHVAYIPDGKIVGLSKLARVVEVFARRLQVQERLTQQIRDAIQDVLNPKGVGVVIEAKHMCMVMRGVEKLNSVTTTSAMSGQFITSESTRGEFLRLIRQ

SEQ ID NO: 12528 - protein, 231 aa, unidentified
  source 1..231: note = Pelodictyon luteolum
  REGION 1..231: note = tr|A0A165LTF3|A0A165LTF3_PELLU GTP cyclohydrolase 1; OS = Pelodictyon luteolum OX=1100 GN=folE PE=3 SV=1
MKQEKTASATSENNPMHTPINTPLFTGRGTCCDDDEYPLDPQELCPEAHAALSASVSTMLESVGEDPMREGLLKTPERVARSLAFLTRGYRQDPEEMLKKAVFTESYDEMVLVRDIDIFSMCEHHMLPFFGKAHVAYIPDGKIVGLSKLARVVEVFARRLQVQERLTQQIRDAIQDVLNPKGVGVVIEAKHMCMVMRGVEKLNSVTTTSAMSGQFITSESTRGEFLRLIRQ

SEQ ID NO: 12529 - protein, 218 aa, unidentified
  source 1..218: note = Pelodictyon phaeoclathratiforme
  REGION 1..218: note = tr|B4SBX8|B4SBX8_PELPB GTP cyclohydrolase 1; OS = Pelodictyon phaeoclathratiforme (strain DSM 5477 / BU-1) OX=324925 GN=folE PE=3 SV=1
MPSAISESNPLPSGRRSCYDDDDCMAEHVQNDPMIINGISSAVSAMLEGIGEDPQREGLLKTPERVAKSLRFLTKGYREDPEELLKKAVFTEAYDEMVLVRDIDLFSMCEHHMLPFFGKAHVAYIPDGKIVGLSKLARVVEVFARRLQVQERLTQQIRDAIQNVLNPKGVAVVIEAKHLCMVMRGVEKINSVTTTSAMSGQFITSQSTRSEFLRLIKP

SEQ ID NO: 12530 - protein, 217 aa, unidentified
  source 1..217: note = Pelolinea submarina
  REGION 1..217: note = tr|A0A347ZTU0|A0A347ZTU0_9CHLR GTP cyclohydrolase 1; OS = Pelolinea submarina OX=913107 GN=folE PE=3 SV=1
MNDKKLENCEDSPVYEAAELFCDSEIDFQAIEKSVKEILSAVGEDPEREGLLATPGRVARAYGELLEGYRTDPIKLVNNATFTANYDDMVIVRDIEFYSLCEHHMLPFIGRAHVAYMPKGQVIGLSKIPRIVDMFSRRLQIQERMTRQIADFLNTLLEPRGVAVVVEAVHLCGMIRGVRKHDSRMTTSSMLGAFRNNEATRMEFLDNISRGAKPLEF

SEQ ID NO: 12531 - protein, 262 aa, Pelosinus fermentans
  REGION 1..262: note = tr|I9B035|I9B035_9FIRM GTP cyclohydrolase FolE2; OS = Pelosinus fermentans B4 OX=1149862 GN=folE2 PE=3 SV=1
MKDVQNISDNRGIAIQNVGVSDVRLPFLIKTKADSLQSVLATISLTVNLPKEYKGTHMSRFIEILSEWSQKPVSYREMELILMDTVNKLDAEHAQMDIYFKYFIEKTAPISGFKSMLDVDCLFSAQLTKGKPLDFILGVDVPFTSLCPCSKEISAYGAHNQRGLMKVKIKNTDGQFIWIEDLVALMEAEGSCPIYPLLKREDEKYVTEHAYENAKFVEDVLRDLVLSLRQQKSIRWFEVQCENYESIHNHSAYAKHVEHLKA

SEQ ID NO: 12532 - protein, 262 aa, Pelosinus fermentans
  REGION 1..262: note = tr|I8TZB8|I8TZB8_9FIRM GTP cyclohydrolase FolE2; OS = Pelosinus fermentans JBW45 OX=1192197 GN=folE2 PE=3 SV=1
MKDVQNISDDRGIAIQNVGVSDVRLPFLIKTKADSLQSVLATISLTVNLPKEYKGTHMSRFIEILSEWSQKPVSYREMELILMDTVNKLDAEHAQMDIYFKYFIEKTAPISGLKSMLDVDCLFSAQLTKGKPLDFILGVDVPFTSLCPCSKEISAYGAHNQRGLMKVKIKNTNGQFIWIEDLVALMEAEGSCPIYPLLKREDEKYVTEHAYENAKFVEDVLRDLVLSLRQQKSIRWFEVQCENYESIHNHSAYAKHVEHLKA

SEQ ID NO: 12533 - protein, 262 aa, Pelosinus propionicus
  REGION 1..262: note = tr|A0A1I4H9X7|A0A1I4H9X7_9FIRM GTP cyclohydrolase FolE2 OS=Pelosinus propionicus DSM 13327 OX=1123291; GN = folE2 PE=3 SV=1
MKDVQNISDDRGIAIQNVGVSDVRLPFLIKTKAESLQSVLATISLTVDLPKEYKGTHMSRFIEILSEWSQKPVSYREMELILMDTINKLDAEHAQMDIKFKYFIEKIAPISKLRSMLDVDCLFSAQLTKGKSLDFILGVNVPFTSLCPCSKEISRYGAHNQRGLMKVKIKNVDGQFIWIEDLVALMEAEGSCPIYPLLKREDEKYVTEHAYENAKFVEDVLRDLVLSLRQQKSIRWFEVQCENYESIHNHSAYAKHVENLSS

SEQ ID NO: 12534 - protein, 262 aa, Pelosinus sp.
  REGION 1..262: note = tr|A0A075KCH3|A0A075KCH3_9FIRM GTP cyclohydrolase FolE2 OS=Pelosinus sp. UFO1 OX=484770 GN=folE2 PE=3 SV=1
MKDVQNISDDRGIAIQNVGVSGVHLPFLIKTKTDSFQSVLATINLTVDLPKEYKGTHMSRFIEILSEWSQKPISSREMESILIDTLNKLDAEYAQMEIHFKYFIDKVAPISGLKSMLDVDCSFSAKLTKGRPLDFTLGVAVPFTSLCPCSKEISKYGAHNQRGLMKVKIKYTSGKFIWIEDLVALMEAQGSCPIYPLLKREDEKYVTEHAYENAKFVEDILRDLVLALRQQKFISWFEIQCENYESIHNHSAYAKHVEHVNN

SEQ ID NO: 12535 - protein, 214 aa, Pelotomaculum propionicicum
  REGION 1..214: note = tr|A0A4Y7RNU6|A0A4Y7RNU6_9FIRM GTP cyclohydrolase 1; OS = Pelotomaculum propionicicum OX=258475 GN=folE PE=3 SV=1
MQLADIQVKECPQVDHRIRHSAKGEIERVFDDAKIEHAVRMILEAIGEDPDREGLQETPARVARMYREIFYGLAEDPELHLAKTFSEDHDEMVIVKDIPLYSVCEHHLLPFYGKAHVAYIPRKGNVTGLSKLARVVDGFARRPQLQERLTSQIADSIMKRLKAHGVLVVIEAEHMCMTFRGVKKPGSKTVTSAVRGVLHKHQATRAEAFALIKD

SEQ ID NO: 12536 - protein, 186 aa, Pelotomaculum schinkii
  REGION 1..186: note = tr|A0A4Y7RD48|A0A4Y7RD48_9FIRM GTP cyclohydrolase 1; OS = Pelotomaculum schinkii OX=78350 GN=folE PE=3 SV=1
MVDQDKIKKAVRMILEAIGEDPEREGLTETPDRVARMYNEIFSGLWEDPESHLEKIFSEQHEEMIIVKDIPLYSMCEHHLLPFYGKAHVAYIPKDGKVTGLSKLARVVEGYAKRPQLQERLTSQIADSIMNRLNAQGALVVVEAEHMCMTFRGVKKPGSKTVTSAVRGLFRRNKATRAEAFALIKS

SEQ ID NO: 12537 - protein, 186 aa, Pelotomaculum sp.; identical to SEQ ID NO: 12536
  REGION 1..186: note = tr|A0A4Y7S2A8|A0A4Y7S2A8_9FIRM GTP cyclohydrolase 1; OS = Pelotomaculum sp. FP OX=261474 GN=folE PE=3 SV=1

SEQ ID NO: 12538 - protein, 186 aa, Pelotomaculum sp.
  REGION 1..186: note = tr|A0A1V5BR56|A0A1V5BR56_9FIRM GTP cyclohydrolase 1; OS = Pelotomaculum sp. PtaU1.Bin065 OX=1811696 GN=folE PE=3; SV = 1
MYDRQKIEAAVRMIIEAIGEDPEREGLRETPARVARMYEEIFSGLWEEPDAHLEKKFSGDHEEMVIVKDIPLYSMCEHHLLPFYGKAHVAYIPRKGNVTGLSKLARLVEGFARRPQLQERLTSQIADSIMKRLNAQGALVVIEAEHMCMTFRGVKKPGSKTVTSAVRGIFQKSEATRAEAFSLVKD

SEQ ID NO: 12539 - protein, 188 aa, Pelotomaculum thermopropionicum
  REGION 1..188: note = sp|A5D2D8|GCH1_PELTS GTP cyclohydrolase 1; OS = Pelotomaculum thermopropionicum (strain DSM 13744 / JCM 10971 / SI) OX=370438 GN=folE PE=3 SV=1
MFDQHKIEKAVRLILEAIGENPEREGLKGTPARVARMYEEIFSGLQEDPEEHLQKIFSEEHEEMVIVKDIPLYSICEHHLLPFYGKAHVAYIPRKGKVTGLSKLARVVEGFAKRPQLQERLTSQIADTIMRRLNPIGVLVVIEAEHMCMTFRGVKKPGSKTVTSAVRGLFRKNVATRAEAFSLIKGQA

SEQ ID NO: 12540 - protein, 186 aa, Pelotomaculum thermopropionicum
  REGION 1..186: note = tr|A0A101HVV4|A0A101HVV4_9FIRM GTP cyclohydrolase 1; OS = Pelotomaculum thermopropionicum OX=110500 GN=folE PE=3; SV = 1
MIDHEKIKKAVTMILEAIGENPEREGLIETPARVARMYEEIFSGLQEEPEGFLQKIFYEHHEEMILVKDIPLYSMCEHHLLPFYGKAHVAYIPREGKVTGLSKLARVVEGYAKRPQLQERLTSQIADTIMHRLNAKGVIVVLEAEHMCMTFRGVKKPGSKTVTSAVRGLFRKSEATRAEAFSLIKG

SEQ ID NO: 12541 - protein, 185 aa, unidentified
  source 1..185: note = Peptoclostridium acidaminophilum
  REGION 1..185: note = tr|W8T5I5|W8T5I5_PEPAC GTP cyclohydrolase 1; OS = Peptoclostridium acidaminophilum DSM 3953 OX=1286171; GN = folE PE=3 SV=1
MDKEKIKRAFRDIIEAIGEDPDREGLRDTPDRVARMYEEIFVGLNEDPRDYLDVYFEEEKYEEIVLVKDIPFHSVCEHHFVPFFGKAHVAYIPKGGRLTGLSKLARVVDVVAKRPQLQERISQTVADIIMEKLQPYGVVVVIEAEHMCMTMRGVKKPGSTTVTSAIRGIFKNDTAARAEIMSLIK

SEQ ID NO: 12542 - protein, 186 aa, unidentified
  source 1..186: note = Peptoclostridium acidaminophilum
  REGION 1..186: note = tr|Q5XZD5|Q5XZD5_PEPAC GTP cyclohydrolase 1; OS = Peptoclostridium acidaminophilum OX=1731 GN=folE PE=3; SV = 1
MDKEKIQKSVRDIIEAIGEDPDREGLEDTPDRMAKMYEENIFVGLNEDPKRIFGCKIPREEKYEEIVLVKDIPFHSVCEHHFVPFFGKAHVAYIPKGGRLTGLSKLARVVDVVAKRPQLQERISQTVLDIIMKLQPYGVVVVIEAEHMCMTMRGVKKPGSTTVTSAIRGIFKNDTAARAEIMSLIK

SEQ ID NO: 12543 - protein, 187 aa, unidentified
  source 1..187: note = Peptoclostridium litorale
  REGION 1..187: note = tr|A0A069RJI7|A0A069RJI7_PEPLI GTP cyclohydrolase 1; OS = Peptoclostridium litorale DSM 5388 OX=1121324 GN=folE; PE = 3 SV=1
MDRERINKAVIEIIKAVGEDPEREGLKGTPDRIARMYEEIFCGLNEDPKDHLEVYFEEESYEEIVLVKDIPFYSVCEHHFVPFFGKAHVAYIPKGGRLTGLSKLARVVESVAKRPQLQERITQTVADAIVEKLAPYGVVVVIEAEHMCMTMRGVKKPGSKTVTSAIRGIFKNDTAARAEVMSLINQK

SEQ ID NO: 12544 - protein, 194 aa, unidentified
  source 1..194: note = Peptoclostridium sp.
  REGION 1..194: note = tr|A0A416QGK9|A0A416QGK9_9FIRM GTP cyclohydrolase 1; OS = Peptoclostridium sp. AF21-18 OX=2292243 GN=folE PE=3; SV = 1
MELKEGKMDKEKIKRAVRDILEAIGEDPDREGLKETPDRVARMYEEIFCGIFQDPREHLKVTFPEESHEEMVIVKDIPFYSCCEHHLVPFFGKAHVVYIPKGGRLTGLSKLARVVETIAKRPQLQERIAKETADIIMEELRPYGVMVVIEAEHMCMTMRGVKKPGSKTVTSAVRGVFAKDIATRTEAMNLILMK

SEQ ID NO: 12545 - protein, 194 aa, unidentified
  source 1..194: note = Peptococcaceae bacterium
  REGION 1..194: note = tr|A0A3B8NPX3|A0A3B8NPX3_9FIRM GTP cyclohydrolase 1; OS = Peptococcaceae bacterium OX=2052179 GN=folE PE=3 SV=1
MSEQQKRKIDRQKIIEGVRLLLEGIGEDPNREGLRRTPERIAKMYEEIFCGLQYDPKEELNVFFSEKHDEMILVKDIPIYSICEHHLLPFYGKAHVAYIPRQGKITGLSKLARVVEGFAKRPQLQERLTSQIADTIMEALDPLGVMVVIEAEHMCMTMRGVKKAGSKTITSAVRGIFKSNEATRAEAFSLIKGS

SEQ ID NO: 12546 - protein, 188 aa, unidentified
  source 1..188: note = Peptococcaceae bacterium
  REGION 1..188: note = tr|A0A0J1FIT3|A0A0J1FIT3_9FIRM GTP cyclohydrolase 1; OS = Peptococcaceae bacterium CEB3 OX=999898 GN=folE PE=3; SV = 1
MDMAKIEEAVRMILEGIGEDPDREGLVDTPKRVARMYEEVFAGLGEDPSEHLKVQFSEDHEEMVIVKDIPLYSMCEHHLIPFYGFAHVAYIPRKGKITGLSKLARVVEGYAKRPQLQERLTSQIADSIMKMLEPRGVLVVIEAEHMCMTMRGVKKPGSKTLTSAVRGIFKSSEVTRAEGFALIHGNRP

SEQ ID NO: 12547 - protein, 185 aa, Peptococcus niger
  REGION 1..185: note = tr|A0A1G6XBF4|A0A1G6XBF4_PEPNI GTP cyclohydrolase 1; OS = Peptococcus niger OX=2741 GN=folE PE=3 SV=1
MINQEKAEQAVRDLLVALGEDADRDGLVETPKRVASMYAELLAGRDTDPSVHLSKRFPVEHSGLLLEKDIPFYSLCEHHLLPFYGVAHIAYLPGKEVVGLSKLARTVESFARRLQLQEQMGEQIADAMMAELATTGVMVVITAEHLCMTMRGVKKPGSKTTTIATRGCFTDDLARQDQVLALIAR

SEQ ID NO: 12548 - protein, 184 aa, Peptoniphilus asaccharolyticus
  REGION 1..184: note = tr|A0A1W1ULT6|A0A1W1ULT6_PEPAS GTP cyclohydrolase 1; OS = Peptoniphilus asaccharolyticus DSM 20463 OX=573058; GN = folE PE=3 SV=1
MDKNKIEKAVTMILEAIGEDPTREGLVETPQRVARMYEEIFSGLNQTAEKHLSKTFELVENNMVIEKDIPFYSMCEHHLLPFWGKAHIAYIPNGRVAGLSKLARTVELYAKKPQLQERLTMEIADALMEFLSSEGALVVVEAEHMCMNMRGVKKPGTSTMTSVARGKFETDLNLKNEAYRLMGL

SEQ ID NO: 12549 - protein, 184 aa, unidentified
  source 1..184: note = Peptoniphilus grossensis
  REGION 1..184: note = tr|A0A1U7M063|A0A1U7M063_9FIRM GTP cyclohydrolase 1; OS = Peptoniphilus grossensis OX=1465756 GN=folE PE=3 SV=1
MDKQKIEKAVEMIIEAIGEDKNREGLIETPARIARMYEEIFAGIGKTAEEHLSKTFEITEDNIVVVKDINFFSMCEHHFLPFYGKAHIAYIPDQKVAGLSKIARTVETYAKKPQLQERLSIEIADAMMKYLEAKGVLVVIEAEHMCMNMRGVKKPGSKTVTSVSRGVFETDEKQKQEAFRLIKF

SEQ ID NO: 12550 - protein, 184 aa, Peptoniphilus harei
  REGION 1..184: note = tr|E4KWX0|E4KWX0_9FIRM GTP cyclohydrolase 1; OS = Peptoniphilus harei ACS-146-V-Sch2b OX=908338 GN=folE; PE = 3 SV=1
MDKQKIEQAVEMIIEAIGEDKNREGLLETPARVARMYEEIFAGLGKTAEEHLSKTFEITEDNIVVVKDIDFYSMCEHHFLPFYGKAHIAYIPNEKVAGLSKLARTVETYAKKPQLQERLSIEIADAMMKYLEPKGVLVVIEAEHMCMNMRGVKKPGSKTVTSVARGVLETDEKQKQEAFRLIEF

SEQ ID NO: 12551 - protein, 184 aa, Peptoniphilus harei; identical to SEQ ID NO: 12550
  REGION 1..184: note = tr|A0A133PQF3|A0A133PQF3_9FIRM GTP cyclohydrolase 1; OS = Peptoniphilus harei OX=54005 GN=folE PE=3 SV=1

SEQ ID NO: 12552 - protein, 201 aa, Peptoniphilus indolicus
  REGION 1..201: note = tr|G4D6V9|G4D6V9_9FIRM GTP cyclohydrolase 1; OS = Peptoniphilus indolicus ATCC 29427 OX=997350 GN=folE; PE = 3 SV=1
MLEYAGIKVYINVNKNIKEVIMDKNKIETAVTMILEAIGEDPTREGLVETPQRVARMYEEIFGGINQTAEKHLSKTFELVDKNMVIEKDIPFYSMCEHHLLPFWGKAHIAYIPNGRVAGLSKLARTVELYAKKPQLQERLTMEIADALMEFLSSEGALVVIEAEHMCMNMRGVKKPGTSTMTSVARGKFETDLNLKMKLID

SEQ ID NO: 12553 - protein, 205 aa, Peptoniphilus indolicus
  REGION 1..205: note = tr|A0A379D8T3|A0A379D8T3_9FIRM GTP cyclohydrolase 1; OS = Peptoniphilus indolicus OX=33030 GN=folE PE=3 SV=1
MLEYAGIKVYINVNKNIKEVIMDKNKIETAVTMILEAIGEDPTREGLVETPQRVARMYEEIFGGINQTAEKHLSKTFELVDKNMVIEKDIPFYSMCEHHLLPFWGKAHIAYIPNGRVAGLSKLARTVELYAKKPQLQERLTMEIADALMEFLSSEGALVVIEAEHMCMNMRGVKKPGTSTMTSVARGKFETDLNLKNEAYRLMGL

SEQ ID NO: 12554 - protein, 187 aa, Peptoniphilus sp.
  REGION 1..187: note = tr|D7N6W8|D7N6W8_9FIRM GTP cyclohydrolase 1; OS = Peptoniphilus sp. oral taxon 386 str. F0131 OX=575609; GN = folE PE=3 SV=1
MIKIDNKKIEKAVTMILEAIGEDPSREGLVETPQRVARMYEEIFSGLGQTAENHLSKTFELVDGNMVIEKDITFYSMCEHHLLPFWGKVHIAYMPNGRVAGLSKLARTVDVYAKKPQLQERLNLEIANAIMEYLNAQGVLVVVEAEHMCMNMRGVKRPGTKTVTSISRGILETDLNLRNEAYRLMNL

SEQ ID NO: 12555 - protein, 184 aa, Peptoniphilus sp.
  REGION 1..184: note = tr|A0A134AUJ4|A0A134AUJ4_9FIRM GTP cyclohydrolase 1; OS = Peptoniphilus sp. DNF00840 OX=1477000 GN=folE PE=3 SV=1
MDKQKIEKAVEMIIEAIGEDKNREGLLETPARVARMYEEIFAGLGKTAEEHLSKTFEITEDNIVVVKDIDFYSMCEHHFLPFYGKAHIAYIPNEKVAGLSKLARTVETYAKKPQLQERLSIEIADAMMKYLEPKGVLVVIEAEHMCMNMRGVKKPGSKTVTSVARGVLETDEKQKQEAFRLIEF

SEQ ID NO: 12556 - protein, 196 aa, unidentified
  source 1..196: note = Peptostreptococcaceae bacterium
  REGION 1..196: note = tr|A0A544QYQ8|A0A544QYQ8_9FIRM GTP cyclohydrolase 1; OS = Peptostreptococcaceae bacterium ZHW00191 OX=2518162; GN = folE PE=3 SV=1
MACTEVKKSVDKEKIKKAVREILEAIGEDPDREGLINTPDRVARMYEEIFCGMFQDPKEHLKVTFESEKYEEMVVVKDIPFYSCCEHHLVPFFGKAHVVYIPKDGRLTGLSKLARVVETIAKRPQLQERIAKDTADTIMSELKPYGVMVVIEAEHMCMTMRGVKKPGSKTVTSAVRGVFEKNMAVKSEAMSLIMMK

SEQ ID NO: 12557 - protein, 261 aa, unidentified
  source 1..261: note = Peptostreptococcaceae bacterium
  REGION 1..261: note = tr|U2JUW6|U2JUW6_9FIRM GTP cyclohydrolase FolE2; OS = Peptostreptococcaceae bacterium oral taxon 113 str. W5053 OX=1321784 GN=folE2 PE=3 SV=1
MNKMKDVQAQKDFRNVYLNQVGIKNFRTPLILMDPKNATQHTVATASLSVDLNHDIRGTHMSRFVEIMNEVHVLHPHETRSLLTDLIQKMEAESAFLTLDFPYFIDKKAPVSGISSRLDIDCTISARLTQNSFRFSLTVGVPVTTLCPCSKEISDYGAHNQRALAKITVETNDLIWIEDLADMAERNASCAIYPLLKRVDEKKVTEYAYENPRFVEDMTRDIYNELKQMENLSYFKVEVESIESIHNHNAFACAYSGEEKK

SEQ ID NO: 12558 - protein, 184 aa, Peptostreptococcus anaerobius
  REGION 1..184: note = tr|R5IZ73|R5IZ73_9FIRM GTP cyclohydrolase 1; OS = Peptostreptococcus anaerobius CAG:621 OX=1263100; GN = folE PE=3 SV=1
MIDIDKAQKAVRDLLIAIGEDPDREGLVDTPKRVAKMYKEVLAGYDDDPSEYLSRVFKADDADWVLEKDIHFYSMCEHHMLPFFGKVHIAYIPNGKVTGLSKLARLVEVYARRLQLQEQMTVQIADALVKELSPLGVVVIVEAEHMCMTMRGIKKPGTITVTQATRGRFKEDHNLLMSIRELIK

SEQ ID NO: 12559 - protein, 184 aa, Peptostreptococcus anaerobius; identical to SEQ ID NO: 12558
  REGION 1..184: note = tr|D3MT17|D3MT17_9FIRM GTP cyclohydrolase 1; OS = Peptostreptococcus anaerobius 653-L OX=596329 GN=folE; PE = 3 SV=1

SEQ ID NO: 12560 - protein, 185 aa, Peptostreptococcus sp.
  REGION 1..185: note = tr|A0A1I2D1Y9|A0A1I2D1Y9_9FIRM GTP cyclohydrolase 1; OS = Peptostreptococcus sp. D1 OX=72304 GN=folE PE=3 SV=1
MVDFDKAEKAVRLLLEAIGEDPDREGLVETPRRVAKMYEEVLQGYCDDAKAHLSKVFNSERSDIVLEKDITFYSMCEHHLLPFFGKVHIAYIPSDKVVGLSKLGRLVDVFARRLQLQEQMTVQIADSIVEELSPQGVMVIVEGEHTCMTMRGVKKIGSKTITVATRGKFEKNSDLRNTVLGMVKE

SEQ ID NO: 12561 - protein, 184 aa, Perlucidibaca sp.
  REGION 1..184: note = tr|A0A2P6ASK5|A0A2P6ASK5_9GAMM GTP cyclohydrolase 1; OS = Perlucidibaca sp. HR-E OX=2094561 GN=folE PE=3 SV=1
MDRTMDTAYADIIRAVGEDLDRPGLLDTPKRAAKAFKYLCKGYEEDLDVIVNNAIFPSDNDQMVLVKDIELYSLCEHHLLPFIGKVHVAYIPSGKVLGLSKVARIADMYARRLQIQENLTKQIADAIQRVTDAKGVAVTIEAKHMCMMMRGVEKQNSVMKTSIMLGAFRDNAQTRNEFLALIRD

SEQ ID NO: 12562 - protein, 187 aa, unidentified
  source 1..187: note = Permianibacter aggregans
  REGION 1..187: note = tr|A0A4R6UXM2|A0A4R6UXM2_9GAMM GTP cyclohydrolase 1; OS = Permianibacter aggregans OX=1510150 GN=folE PE=3 SV=1
MTDTTAKIAAHYTEILGLLGENVQREGLRDTPMRAAKAMQFLTRGYSQSLDEIVNNAIFESESDEMVIVQDIELYSMCEHHLLPFIGKVHVAYLPSGKVLGLSKIARITDMFARRMQIQETMTKQIAEAVMQVTNAKGVAVVVEAKHLCMMMRGVEKQNSVMTTSVMLGYFRKSQATRNEFLKLIRR

SEQ ID NO: 12563 - protein, 535 aa, Persephonella hydrogeniphila
  REGION 1..535: note = tr|A0A285N0H8|A0A285N0H8_9AQUI GTP cyclohydrolase 1; OS = Persephonella hydrogeniphila OX=198703 GN=folE PE=3 SV=1
MSIDREKLRKSVRLFLEAIGEDPDREGLKDTPDRIVRLWEEFKSHENFNMTVFEDVGDYNEMVVVKDIQFYSLCEHHLLPFFGKAHIAYIPDKKVCGLSKLVRVVNKFAYRPQVQERLTAEIAEFLEKELNPKGVAVVLEAEHLCYSSDTEILTDKGWKLFKDLEPEDKVAQVNPETLKVSFVKPASYIKYPFKGMMINFKNKSVDLLVSPDHKMLYSSEWIFYKSKNKRWLSKPAYQIKDLSKIIIPQAGIMEGKEIEFFELEEEYEVSNSSVITKTKKKVKIKGDTFIKLLAIYLAEGSFYIENGKYYKVRIVQKEGEKAEKIREILEELPFKYFSIKRKNGTIEFVINSKVLTKYMKRFGKSEDKFIPEEIFSASQRQKKLFLEYFILGDGYKKPDGKTFHFVSKSKKLIDGIQAIYATLGIATTVYDHKYKDGKVYYRLEIRKDKKGRDKYYSMVREVKDVPYNDYIYSVTVPEGYIMVRRNGKIAISGNCMSMRGVKNPSSYTVTSKLTGVFMENEKTRNEFLNLIYNGK

SEQ ID NO: 12564 - protein, 185 aa, Persephonella marina
  REGION 1..185: note = sp|C0QPU5|GCH1_PERMH GTP cyclohydrolase 1; OS = Persephonella marina (strain DSM 14350 / EX-H1); OX = 123214 GN=folE PE=3 SV=1
MSIDREKLKRSIRLFLEAIGEDPDREGLKETPDRIVRLWEEFKSYENFNMTVFEDIGDYNEMVVVRDIQFYSFCEHHLLPFFGKAHIAYIPEKKVCGLSKLVRVVNKFAYRPQVQERLTAQIAEFLEKELSPKGVAVVLEAEHLCMSMRGVKNPTSYTITSKLTGAFMEDEKTRNEFLNLIHNGR

SEQ ID NO: 12565 - protein, 187 aa, Persephonella sp.
  REGION 1..187: note = tr|A0A432RZI8|A0A432RZI8_9AQUI GTP cyclohydrolase 1; OS = Persephonella sp. OX=2060922 GN=folE PE=3 SV=1
MSIDREKLKKSVRLFLEAIGEDPDREGLRDTPDRIVRLWEEFKNYENFNMTVFEDIGSYDEMVIVKDIRFYSLCEHHLLPFFGRAHIAYIPEKKVCGLSKLVRVVNKFAYRPQVQERLTSEIAEFLEKELKPKGVAVVLEAEHLCLSMRGVKNPSSYTITSKLTGLFKENEKTRKEFLQLINKDRIL

SEQ ID NO: 12566 - protein, 187 aa, Persephonella sp.
  REGION 1..187: note = tr|A0A432S6C9|A0A432S6C9_9AQUI GTP cyclohydrolase 1; OS = Persephonella sp. OX=2060922 GN=folE PE=3 SV=1
MSIDREKLKKSIRLFLEAIGENPDREGLKDTPDRIVRLWEEFKSYENFNMTVFEDIGEYDEMVIVKDIQFYSLCEHHLLPFFGKAHIAYIPDKKVCGLSKLVRIVNKFSYRPQVQERLTAEIAEFLEKELKPKGVAVVLEAEHLCLSMRGVKNPSSYTITSKLTGLFKENEKTRKEFLQLINRDRII

SEQ ID NO: 12567 - protein, 190 aa, unidentified
  source 1..190: note = Petrimonas mucosa
  REGION 1..190: note = tr|A0A1G4GAJ1|A0A1G4GAJ1_9PORP GTP cyclohydrolase 1; OS = Petrimonas mucosa OX=1642646 GN=folE PE=3 SV=1
MLPEQSEERRSIIADHMREVITLLGEDVARDGLVKTPDRVAKAMQYLTKGYHQDPEEILRSALFRENYRQMVIVKDIDLFSMCEHHLLPFFGKAHVAYIPNGYITGLSKIARVVDVFARRLQVQERLTTQIKECIQKTLNPMGVMVVIEAQHMCMQMRGVEKQNSITTTSDFTGVFQVQKTREEFISLIR

SEQ ID NO: 12568 - protein, 190 aa, Petrimonas sp.
  REGION 1..190: note = tr|A0A3G9E3V4|A0A3G9E3V4_9PORP GTP cyclohydrolase 1; OS = Petrimonas sp. IBARAKI OX=1978337 GN=folE PE=3 SV=1
MSPEETEDRKSIIADHMKEVITLLGEDVARDGLIKTPDRVAKAMQHLTRGYYQDPEEILRSALFRENYRQMVIVKDIDLFSLCEHHLLPFFGKAHVAYIPDGYITGLSKIARVVDVFARRLQVQERLTTQIKECIQKTLNPMGVMVVIEAQHMCMQMRGVEKQNSITTTSDFTGVFKEQKTREEFIALIK

SEQ ID NO: 12569 - protein, 195 aa, unidentified
  source 1..195: note = Petrocella atlantisensis
  REGION 1..195: note = tr|A0A3P7NUD4|A0A3P7NUD4_9FIRM GTP cyclohydrolase 1; OS = Petrocella atlantisensis OX=2173034 GN=folE PE=3 SV=1
MIDKKAIEDHIRGILIALGDDPNREGLRDTPTRVANMYAEVFEGMAYTNDELIEKLGVTFDEEEIYDNSKQDMVLMKDIQLFSYCEHHLALMYNMKVAVAYIPNKRVIGLSKIARIADMVGKRLQLQERIGADIAYIMRKVTDTEDVAIIIEGEHSCMTTRGIKKPNTKTITTTLSGRFEENMEIYQKLMALYKV

SEQ ID NO: 12570 - protein, 367 aa, Phaeobacter gallaeciensis
  REGION 1..367: note = tr|V9WCS0|V9WCS0_9RHOB GTP cyclohydrolase FolE2; OS = Phaeobacter gallaeciensis DSM 26640 OX=1423144 GN=folE2; PE = 3 SV=1
MNSHSRNLTKAPDRADAEEALDLLRQWASAATETEIAQLNPAVARLLPDAPVGNYPDLSRHYPEGFEADISYRATLPDLQNGPSSLIRGAHEQIQHVGISNFRLPIRFHTRDNGDLTLETSVTGTVSLDADKKGINMSRIMRSFYKHAERTFSFEVMEAALDDYLTDLESLDARLQMRFSFPVKVESLRSGLSGYQYYDIALEIVDHDGERTKIIHLDYVYSSTCPCSLELSEHARSSRGQLATPHSQRSVARISLVQEPGASMLWFEDVIDHCRRAVPTETQVMVKREDEQAFAELNAANPIFVEDAARLFCEALQSDPRIGDFRVVASHQESLHSHDAISVLTQGQTFAARSIDPKMFATLIHQG

SEQ ID NO: 12571 - protein, 367 aa, Phaeobacter gallaeciensis
  REGION 1..367: note = tr|A0A1B0ZNJ7|A0A1B0ZNJ7_9RHOB GTP cyclohydrolase FolE2 OS=Phaeobacter gallaeciensis OX=60890 GN=folE2 PE=3; SV = 1
MNIHMRGVDETPDRTEAEAALETLRQWAATATQTEIAQLDPAVARLLPERAVQNYPDLSRNYPEDFVADEGYRATLPDLQNGPSSLIRGANEQIQHVGISNFRLPIRFHTRDNGDLTLETSVTGTVSLEADKKGINMSRIMRSFYKHAEKTFSFEVIEAALEDYLSDLGSMDARIQMRFSFPVKIDSLRSGLSGYQYYDIALELVDRDGVRNKIVHLDYVYSSTCPCSLELSEHARQSRGQLATPHSQRSVARLSVQIDPEAPCLWFEDLIDHCRRAVPTETQVMVKREDEQAFAELNAANPIFVEDAARLFCEALQSDPRIGDFRVVASHQESLHSHDAVSVLTQGPLFAETSLDPGLFSTLIHRG

SEQ ID NO: 12572 - protein, 367 aa, Phaeobacter inhibens
  REGION 1..367: note = tr|A0A135IJB1|A0A135IJB1_9RHOB GTP cyclohydrolase FolE2 OS=Phaeobacter inhibens OX=221822 GN=folE2 PE=3 SV=1
MNSHSRNLTKAPDRADAEDALDLLRKWASTATETEIAQLNPAVARLLPNSPVGNYPDLSRHYPDEFEADSSYRATLPDLQNGPSSLIRGAHEQIQHVGISNFRLPIRFHTRDNGDLTLETSVTGTVSLDADKKGINMSRIMRSFYKHAERTFSFEVMEAALDDYLTDLESLDARLQMRFSFPVKIESLRSGLSGYQYYDIALEIVDHDGERTKIIHLDYVYSSTCPCSLELSEHARSARGQLATPHSQRSVARISLVQEPGAPVLWFEDVIDHCRRAVPTETQVMVKREDEQAFAELNAANPIFVEDAARLFCEALQSDLRIGDFRVVASHQESLHSHDAISVLTQGPTFAARSIDPKMFATLIHQG

SEQ ID NO: 12573 - protein, 367 aa, Phaeobacter inhibens
  REGION 1..367: note = tr|I7EP23|I7EP23_PHAIB GTP cyclohydrolase FolE2; OS = Phaeobacter inhibens (strain ATCC 700781 / DSM 17395 / CIP 105210 / JCM 21319 / NBRC 16654 / NCIMB 13546 / BS107)OX=391619 GN=folE2 PE=3 SV=1
MNSHSRNLTKAPDRADAEDALDLLRKWASTATETEIAQLNPAVARLLPNSPVGNYPDLSRHYPEEFEADSSYRATLPDLQNGPSSLIRGAHEQIQHVGISNFRLPIRFHTRDNGDLTLETSVTGTVSLDADKKGINMSRIMRSFYKHAERTFSFEVMEAALDDYLTDLESLDARLQMRFSFPVKIESLRSGLSGYQYYDIALEIVDHDGERTKIIHLDYVYSSTCPCSLELSEHARSARGQLATPHSQRSVARISLVQEPGAPVLWFEDVIDHCRRAVPTETQVMVKREDEQAFAELNAANPIFVEDAARLFCEALQSDPRIGDFRVVASHQESLHSHDAISVLTQGPTFAARSIDPKMFATLIHQG

SEQ ID NO: 12574 - protein, 367 aa, unidentified
  source 1..367: note = Phaeobacter italicus
  REGION 1..367: note = tr|A0A0H5D9U3|A0A0H5D9U3_9RHOB GTP cyclohydrolase FolE2 OS=Phaeobacter italicus OX=481446 GN=folE2 PE=3 SV=1
MNSHTRNLSKAPDRADAEQALDLLRQWASTATETEIAQLNPAVARLLPNAPLGNYPDLSRNYPDGFEADAAYRATLPDLQNGPSSLIRGAHEQIQHVGISNFRLPIRVHTRDNGDLTLETSVTGTVSLEADKKGINMSRIMRSFYKHAERTFSFEVMEAALDDYLSDLESYDARLMMRFSFPMKVESLRSGLAGYQYYDIALELVDHGGQRTKILHLDYVYSSTCPCSLELSEHARSARGQLATPHSQRSVARISLVVEGDTPCLWFEDVIEHCRRAVPTETQVMVKREDEQAFAELNAANPIFVEDAARLFCEALQSDPRIGDFRVIASHQESLHSHDAISVLTQGDTFAAQSIDPKLFATLIHQG

SEQ ID NO: 12575 - protein, 367 aa, unidentified
  source 1..367: note = Phaeobacter piscinae
  REGION 1..367: note = tr|A0A291G1Q4|A0A291G1Q4_9RHOB GTP cyclohydrolase FolE2 OS=Phaeobacter piscinae OX=1580596 GN=folE2 PE=3 SV=1
MNSHSRNLTKAPDRADAEEALDLLRQWASAATETEIAQLNPAVARLLPDASAGNYPDLSRHYPEGFVADSSYRATLPDLQNGPSSLIRGAHEQIQHVGISNFRLPIRFHTRDNGDLTLETSVTGTVSLDADKKGINMSRIMRSFYKHAERTFSFEVMEAALDDYLTDLESLDARLQMRFSFPVKVESLRSGLSGYQYYDIALEIVDHDGERTKIIHLDYVYSSTCPCSLELSEHARSSRGQLATPHSQRSVARISLVQEPGAPVLWFEDAIDHCRRAVPTETQVMVKREDEQAFAELNAANPIFVEDAARLFCEALQSDPRIGDFRVVASHQESLHSHDAISVLTQGQTFAARSIDPKMFATLIHQG

SEQ ID NO: 12576 - protein, 367 aa, unidentified
  source 1..367: note = Phaeobacter piscinae
  REGION 1..367: note = tr|A0A291FQB0|A0A291FQB0_9RHOB GTP cyclohydrolase FolE2 OS=Phaeobacter piscinae OX=1580596 GN=folE2 PE=3 SV=1
MNSHSRNLTKAPDRADAEEALDLLRQWASAATETEISQLNPAVARLLPDAPAGNYPDLSRHYPEGFVADSSYRATLPDLQNGPSSLIRGAHEQIQHVGISNFRLPIRFHTRDNGDLTLETSVTGTVSLDADKKGINMSRIMRSFYKHAERTFSFEVMEAALDDYLTDLESLDARLQMRFSFPVKVESLRSGLSGYQYYDIALEIVDHDGERTKIIHLDYVYSSTCPCSLELSEHARSSRGQLATPHSQRSVARISLVQEPGAPVLWFEDVIDHCRRAVPTETQVMVKREDEQAFAELNAANPIFVEDAARLFCEALQSDPRIGDFRVVASHQESLHSHDAISVLTQGQTFAARSIDPKMFATLIHQG

SEQ ID NO: 12577 - protein, 367 aa, unidentified
  source 1..367: note = Phaeobacter porticola
  REGION 1..367: note = tr|A0A1L3I679|A0A1L3I679_9RHOB GTP cyclohydrolase FolE2 OS=Phaeobacter porticola OX=1844006 GN=folE2 PE=3; SV = 1
MNSHSRSMTKAPDRADAEEALDLLRQWASAATETEIAQLNPAVARLLPDAPAGNYPDLSRHYPEGFVADSNYRATLPDLQNGPSSLIRGAHEQIQHVGISNFRLPIRFHTRDNGDLTLETSVTGTVSLEADKKGINMSRIMRSFYKHAERTFSFEVMEAALDDYLTDLESVDARLQMRFSFPVKIESLRSGLSGYQYYDIALEIVDHDGERTKIIHLDYVYSSTCPCSLELSEHARSSRGQLATPHSQRSVARISLVQEPGAPVLWFEDVIDHCRCAVPTETQVMVKREDEQAFAELNAANPIFVEDAARLFCEALQSDPRVGDFRVVASHQESLHSHDAISVLTQGATFATRSIDPKLFSTLIHQG

SEQ ID NO: 12578 - protein, 367 aa, Phaeobacter sp.
  REGION 1..367: note = tr|A0A0N7M3C6|A0A0N7M3C6_9RHOB GTP cyclohydrolase FolE2 OS=Phaeobacter sp. CECT 5382 OX=1712645 GN=folE2; PE = 3 SV=1
MNIPTRDLSEAPDRQDAEAALALLRQWADAATPTEVAQLDPAVARLLPDREVGNYPDLSRDYPQDFKSDETYRATLPDLQNGPASLIRGAKEQIQHVGISNFRLPIRFHTRDDGDLTLETSITGSVSLEAGKKGINMSRIMRSFYKHAEKTFSFEVMEAALSDYLTDLDSMDARIQMRFSFPVRIESLRSGLSGYQYYDIALELVQAQGQRHKIMHLDYVYSSTCPCSLELSEHARQSRGQLATPHSQRSVARISVSVDPKAECLWFEDLIGHCRKAVPTETQVMVKREDEQAFAELNAANPIFVEDAARLFCEALQNDGRISDFRIVASHQESLHSHDAISILTQGPLFSNTSLDPRLFSTLIHQG

SEQ ID NO: 12579 - protein, 366 aa, Phaeobacter sp.
  REGION 1..366: note = tr|A0A0P1I2P0|A0A0P1I2P0_9RHOB GTP cyclohydrolase FolE2 OS=Phaeobacter sp. CECT 7735 OX=1715693 GN=folE2; PE = 3 SV=1
MNIHSPETSEINDRLEAKRALAALRAWASKATPTEIAELDPAIARLLPDQPLANYPDLSREYPSDFEITPEYHASLPDLQNGPSSLIRGEKQLIQHVGISNFRLPIKFHIREGDDITLQTSVTGTVSLDAEKKGINMSRIMRSFYRHAEKTFSFEVMEAALADYVTDLESLDARLQMRFSYPMRIDSLRSGLSGYQYYDIALEKVQQNGVLHKIIHLDFVYSSTCPCSLELSEHARQSRGQLATPHSQRSVARISVEVVEGDCLWFEDLIEMARAAVPTETQVMVKREDEQAFAELNAANPIFVEDAARLFCEQLKADPRIGDFRVIASHQESLHSHDAVSVLTDGPLFASTSLDPKLFNTLFHVG

SEQ ID NO: 12580 - protein, 241 aa, unidentified
  source 1..241: note = Phaeodactylibacter luteus
  REGION 1..241: note = tr|A0A5C6RMD7|A0A5C6RMD7_9BACT GTP cyclohydrolase 1; OS = Phaeodactylibacter luteus OX=1564516 GN=folE PE=3 SV=1
MINSKYQGNGNGAVVNGHARSNGHAYIHDMGDAHAASSAETPLRPDAFDLSDEEKMEEISRHFRAIMETLGLDLTDDSLNGTPRRVAKMFVKEIFGGLHPDAKPSISLFENKFGYRQMLVEKGIRVQSFCEHHFLPITGKCHVAYIANGQVIGLSKLNRIVEYYARRPQVQERLTVQIANELKKVLRTEDIAVYIDASHMCVEMRGIKHTHCSTVTTEYGGKFLNENTRNEFLQAIKGELK

SEQ ID NO: 12581 - protein, 198 aa, unidentified
  source 1..198: note = Phaeodactylibacter luteus
  REGION 1..198: note = tr|A0A5C6RK75|A0A5C6RK75_9BACT GTP cyclohydrolase 1; OS = Phaeodactylibacter luteus OX=1564516 GN=folE PE=3 SV=1
MSYTKQENYDGAATEELTSFYGQMLARLGEDPSREGLLKTPERAAKAMQFLTQGYHQDAEEILTSAMFREDYSEMVLVKDIELYSMCEHHMLPFFGKAHVAYIPNGQIVGLSKIPRVIDVFARRLQVQERLTDQILHCIQNTLQPLGVAVVIEARHMCMMMRGVQKQNSVTTTSAFTGEFQRAETRGEFLTLVGANLH

SEQ ID NO: 12582 - protein, 198 aa, unidentified
  source 1..198: note = Phaeodactylibacter xiamenensis
  REGION 1..198: note = tr|A0A098S4T4|A0A098S4T4_9BACT GTP cyclohydrolase 1; OS = Phaeodactylibacter xiamenensis OX=1524460 GN=folE PE=3; SV = 1
MSFHKSEEYDQATTEALTGLYQAAIGQLGEDVSREGLVKTPERAAKAMQFLTQGYEQDAEQILKSAMFREEYSEMVLVKDIELYSLCEHHLLPFFGKAHVAYIPNGYIVGLSKIPRVIDVFARRLQVQERLTDQILHCIHETLNPLGVAVVIEARHMCMMMRGVQKQNSVTTTSAFTGEFQRAETRAEFLNLVSADLH

SEQ ID NO: 12583 - protein, 213 aa, unidentified
  source 1..213: note = Phaeodactylibacter xiamenensis
  REGION 1..213: note = tr|A0A098S1Z3|A0A098S1Z3_9BACT GTP cyclohydrolase 1; OS = Phaeodactylibacter xiamenensis OX=1524460 GN=folE PE=3; SV = 1
MVEELGDMHGATSVDTPMRADAFDRSDEEKMEIISQHFREIMETLGLDLNDDSLNGTPRRVAKMFVKEIFGGLNPESKPAISLFENKFGYRQMLVEKGIQVQSFCEHHFLPIYGKCHIAYIANGKVIGLSKLNRIVEHFARRPQVQERLTVQIAAELKRVLKTEDVAVYMDAKHMCVEMRGIKHTQCSTVTTEYGGRFLNENVRAEFLKTIKD

SEQ ID NO: 12584 - protein, 207 aa, Phaeospirillum fulvum
  REGION 1..207: note = tr|A0A1H6GWH6|A0A1H6GWH6_PHAFV GTP cyclohydrolase 1; OS = Phaeospirillum fulvum OX=1082 GN=folE PE=3 SV=1
MNATTVSIRPERPWSEDRPNRAEAESAVRTLIRWAGDDPDREGLVDTPSRVVRSYEEFFAGYEADPVDILARTFEETDGYDEMVMLRGIRLESHCEHHMVPILGVAHVAYLPDRRVVGISKLARVVEAFSRRLQIQEKLTAQIANAIEEVLQPKGVAVVIDAQHQCMTTRGVHKTGVSMVTSRMIGAFRTDPALRREFLSLTNAHSN

SEQ ID NO: 12585 - protein, 212 aa, Phaeospirillum fulvum
  REGION 1..212: note = tr|S9S8N5|S9S8N5_PHAFV GTP cyclohydrolase 1; OS = Phaeospirillum fulvum MGU-K5 OX=1316936 GN=folE PE=3; SV = 1
MTADDTPRRPLSGVVPTVSNRPSRTEAEAAVRTLIRWAGDDPEREGLVGTPDRVARAYEEFFSGYEQDPVDILHRTFEETDGYDEVVLLRDIRLESHCEHHMVPIIGVAHVAYLPDRRVVGISKLARVVEVYARRLQIQEKLTAQIANTINEVLQPKGVAVVIEAAHQCMTTRGVRKAGVTMVTSRMLGVFRDDSETRREFMALIQSRRGLG

SEQ ID NO: 12586 - protein, 213 aa, Phaeospirillum molischianum
  REGION 1..213: note = tr|H8FTS4|H8FTS4_PHAMO GTP cyclohydrolase 1; OS = Phaeospirillum molischianum DSM 120 OX=1150626 GN=folE; PE = 3 SV=1
MTADDIPPRPLSGACPVVSDRPSRAEAEAAVRTLIRWAGDDPAREGLVGTPDRVVRAYEEFFSGYEQDPVDILHRTFEETDGYDEVVLLRDIRLESHCEHHMVPIIGVAHVAYLPDRRVVGISKLARVVEVYARRLQIQEKLTAQIANTINEVLQPKGVAVVIEAAHQCMTTRGVRKAGVTMVTSRMLGVFRDDSETRREFMALIHNRCGSGS

SEQ ID NO: 12587 - protein, 205 aa, Phaeospirillum molischianum
  REGION 1..205: note = tr|H8FTK6|H8FTK6_PHAMO GTP cyclohydrolase 1; OS = Phaeospirillum molischianum DSM 120 OX=1150626 GN=folE; PE = 3 SV=1
MNATTVSIRPDRPWSEDRPSRTEAESAVRTLIRWAGDDPAREGLIDTPSRVVRSYEEFFAGYEADPVDILARTFEETDGYDEMVMLRGIRLESHCEHHMVPILGVAHVAYLPDRRVVGISKLARVVEAFSRRLQIQEKLTAQIANAIEEVLQPKGVAVVIDAQHQCMTTRGVHKTGVSMVTSRMIGAFRTDQALRREFLSLTNGH

SEQ ID NO: 12588 - protein, 259 aa, Phascolarctobacterium faecium
  REGION 1..259: note = tr|A0A3G9H5S6|A0A3G9H5S6_9FIRM GTP cyclohydrolase FolE2 OS=Phascolarctobacterium faecium OX=33025 GN=folE2; PE = 3 SV=1
MKDVQGELDRRNIPLKHVGIKDLRWPIALKDKEKGTQNTVATVSLAVDLPHDLRGTHMSRFVECLQTLGPVTLGSLENILDHLKDRLQAEKAFLQLNFPYFIYKTAPVSGQRAPLDIDCVYTAEKDEQFSLRISAKIPIQTLCPCSKEISAYGAHNQRALAKLEIRSAEMVWLEELAAIADAGASAPVYGLLKRPDEKFVTEQAYDNPRFVEDAVREIALRLEADKRIIWYKATVESIESIHNHNAFACVEKGWKDVEI

SEQ ID NO: 12589 - protein, 264 aa, Phascolarctobacterium faecium
  REGION 1..264: note = tr|A0A3G9H957|A0A3G9H957_9FIRM GTP cyclohydrolase 1 type 2 OS=Phascolarctobacterium faecium OX=33025; GN = PFJ30894_02021 PE=4 SV=1
MEATVNDIIKVMDGIAPPNLAEPWDNVGLLVGRSSNTVKKLMVALDVSPEVVEQAVEHKVQMLVTHHPVIFDPIKKMTDRSWQHKLLLDCAENKIAVYSAHTSLDSVLGGVNDVLAEKIGLLHTEVLVPAAGGEAGLGRVGCLHEPMTLQEFSEKIKTVLKLDNIIAGDAGRRVSKVAVCGGAGAEFIDEALAAGADTFVTGDVKYHTAQNAVYSGLNIIDATHQGTELPMINTLADRIALRLTSGGFNAQVLVAKESKILQYL

SEQ ID NO: 12590 - protein, 259 aa, Phascolarctobacterium sp.
  REGION 1..259: note = tr|R6IJS9|R6IJS9_9FIRM GTP cyclohydrolase FolE2; OS = Phascolarctobacterium sp. CAG:207 OX=1262914 GN=folE2; PE = 3 SV=1
MKDVQGELDRRNIPLKHVGIKDLRWPIALKDKEKGTQNTVATVSLAVDLPHDLRGTHMSRFVECLQTLGPVTLGSLENILDHLKDRLQAEKAFLQLNFPYFIYKTAPVSGQRAPLDIDCVYTAEKDEQFSLRISAEIPIQTLCPCSKEISAYGAHNQRALAKLEIRSAEMVWLEELAAIADAGASAPVYGLLKRPDEKFVTEQAYDNPRFVEDAVREIALRLEADKRIIWYKATVESIESIHNHNAFACVEKGWKDVEI

SEQ ID NO: 12591 - protein, 256 aa, Phascolarctobacterium sp.
  REGION 1..256: note = tr|A0A316S298|A0A316S298_9FIRM GTP cyclohydrolase FolE2 OS=Phascolarctobacterium sp. OX=2049039 GN=folE2; PE = 3 SV=1
MKDVQSQTDMRRIPLKHVGIKNLRWPVILKDKEQGEQHSVATISLAVDLPHEIRGTHMSRFVECMQTVGAISPTGLEEVLDNLKTHLQAEKAFIRMEFPYFIYKTSPVTGQRAPMDLNCVLTAEKQDEFKLRIMAEVPVQTLCPCSKEISDYGAHNQRALARIEIEADGLVWIEELAEMADAGASAPVYSLLKRPDEKFVTEKAYDNPRFVEDAVREIALRLEADKRIKWYEVTVESIESIHNHNAFACVEKGWQA

SEQ ID NO: 12592 - protein, 261 aa, Phascolarctobacterium succinatutens
  REGION 1..261: note = tr|E8LD20|E8LD20_9FIRM GTP cyclohydrolase FolE2; OS = Phascolarctobacterium succinatutens YIT 12067 OX=626939; GN = folE2 PE=3 SV=1
MNDVKDVQSEKDLRNIPLKHVGIKGLRWPIELRDKARGTQHSVAEVTLAVDLPHDMRGTHMSRFVECLRTLGPVGLADVEAILDQLKQHLQAERAFIELKFPYFVTKKAPVSGMEAPMDIDCVYKAEKGEKLRWRITAVVPVQTLCPCSKEISEYGAHNQRAWAKLEVEAQEMVWLEELVEYAEASASTPLYGLLKRPDEKYVTEHAYENPRFVEDAVREVALRLEADKRITWYRAEVESMESIHNHNAFAVVEKGENECY

SEQ ID NO: 12593 - protein, 258 aa, Phascolarctobacterium succinatutens
  REGION 1..258: note = tr|R6WVI3|R6WVI3_9FIRM GTP cyclohydrolase FolE2; OS = Phascolarctobacterium succinatutens CAG:287 OX=1263101; GN = folE2 PE=3 SV=1
MKDVQSEKDLRNIPLKHVGIKGLRWPIELRDKERGTQHSVAEVTLAVDLPHDMRGTHMSRFVECLRTLGPVGLADVEAILDQLKQHLQAERAFIELKFPYFVTKKAPVSGMEAPMDIDCVYKAEKGEKLRWRITAVVPVQTLCPCSKEISEYGAHNQRAWAKLEVEAQEMVWLEELVEYAEASASTPLYGLLKRPDEKYVTEHAYENPRFVEDAVREVALRLEADKRITWYRAEVESMESIHNHNAFAVVEKGENECY

SEQ ID NO: 12594 - protein, 196 aa, unidentified
  source 1..196: note = Phenylobacterium deserti
  REGION 1..196: note = tr|A0A328AQU2|A0A328AQU2_9CAUL GTP cyclohydrolase 1; OS = Phenylobacterium deserti OX=1914756 GN=folE PE=3 SV=1
MSENKSRPTQADAEAAVRTLIEWAGDDPNREGLLETPKRVAKAYRELFAGYDVDPREYLARTFDEVGGYDELVVLKDIPVVSMCEHHMLPFLGKAHVGYLPRNRVVGISKLARVVHGFARRMQIQEKLTAQVAEAIQDILQPKGVGVVIVSEHSCMTMRGVNTPGTRLTTSHLLGEVRDDSRTRQEFFELVRSGDR

SEQ ID NO: 12595 - protein, 208 aa, unidentified
  source 1..208: note = Phenylobacterium deserti
  REGION 1..208: note = tr|A0A328AS03|A0A328AS03_9CAUL GTP cyclohydrolase 1; OS = Phenylobacterium deserti OX=1914756 GN=folE PE=3 SV=1
MDSVIRPRKLVPAADLEPVQRPTREEAMEAVRTLIAWAGDDPRREGVLDTPKRVVDAYAEWFEGYQADPAKELSRTFEDVQGYDDIVMLRDIEVESHCEHHMAPFLGKAYVAYMPTNRVVGISKLAKVVEIFARRLQTQETMTQQIADAITDSLRPAGVAVLIDAAHQCMTTRGVHHRHVSTITTQFTGVFKTDPTLRQRFLDFVNRK

SEQ ID NO: 12596 - protein, 208 aa, unidentified
  source 1..208: note = Phenylobacterium hankyongense
  REGION 1..208: note = tr|A0A328B062|A0A328B062_9CAUL GTP cyclohydrolase 1; OS = Phenylobacterium hankyongense OX=1813876 GN=folE PE=3; SV = 1
MDAIRDRTLVSSTDLDLEAVKRPSREEAMEAVRTLIAWAGDDPRREGVIDTPKRVVDAYAEWFEGYGLDPAKELSRTFEDVQGYDDIVMLRDIEVESHCEHHMAPFLGKAFVAYMPTNRVVGISKLAKVVEIFARRLQTQETMTQQIADAITDSLRPAGVAVMIDATHQCMTTRGVHHRHVSTLTTQFTGVFKTDPTLRQRFLDFAKR

SEQ ID NO: 12597 - protein, 197 aa, unidentified
  source 1..197: note = Phenylobacterium hankyongense
  REGION 1..197: note = tr|A0A328AVP2|A0A328AVP2_9CAUL GTP cyclohydrolase 1; OS = Phenylobacterium hankyongense OX=1813876 GN=folE PE=3; SV = 1
MSNTPKSPPTQDDAEAAVRTLIEWAGDDPDREGLLDTPARVARAYKELFSGYDTDPRAYLERTFSEVGGYDELVVLKDIRVVSFCEHHMLPFLGKAHVGYLPSHRVVGISKLARVVHGFARRLQIQEKLTAEIAEAIHDILQPKGVGVVIVSEHSCMTMRGVNTPGSRLTTSHLLGEVRDDPRTRQEFFELVRNGEH

SEQ ID NO: 12598 - protein, 268 aa, unidentified
  source 1..268: note = Phenylobacterium kunshanense
  REGION 1..268: note = tr|A0A328BLN5|A0A328BLN5_9CAUL GTP cyclohydrolase FolE2 OS=Phenylobacterium kunshanense OX=1445034 GN=folE2; PE = 3 SV=1
MNAFTPTELPDVQASPDRRGQPIQRVGVRGVTHPVTLLTEQGPCPTVAEVEMYVALPAEQKGTHMSRFVALLQDVRHPLDTVGVSALMSDMLTLLEADGGYLSIAAPVFLTKQAPVSGIPSLMDYRMALRAEHVSGRTTVTLSITAPVTSLCPCSKTISRYGAHNQRSHITIAATLADGVRMLPDDLIRIAENAASCELWGLLKRADEKFVTERAYENPKFVEDLVRDVAARLADDPRVRRYEVSSENFESIHNHSAYAWMDGAGAAA

SEQ ID NO: 12599 - protein, 210 aa, unidentified
  source 1..210: note = Phenylobacterium kunshanense
  REGION 1..210: note = tr|A0A328BM47|A0A328BM47_9CAUL GTP cyclohydrolase 1; OS = Phenylobacterium kunshanense OX=1445034 GN=folE PE=3; SV = 1
MDAPARDRTLIGSEDGSLEPITRPTREEAMEAVRTLIAWAGDDPRREGVIDTPKRVVDAYAEWFEGYRLDPAKELSRTFEDVQGYDDIVMLRDIEVESHCEHHMAPFLGKAYVAYMPTNRVVGISKLAKVVEIFARRLQTQETMTQQIADAITDSLRPAGVAVLIDAAHQCMTTRGVHHRHVSTITTQFTGVFKTDPTLRQRFLDFVNRK

SEQ ID NO: 12600 - protein, 208 aa, Phenylobacterium sp.
  REGION 1..208: note = tr|A0A2D7ZMU4|A0A2D7ZMU4_9CAUL GTP cyclohydrolase 1; OS = Phenylobacterium sp. OX=1871053 GN=folE PE=3 SV=1
MDAPTRDLNLNGPAGLEPIARPTREEAMAAVRTLIAWAGDDPRREGVIDTPKRVVDAYADWFEGYGADPAKELSRTFEDVQGYDDIVMLREIEVESHCEHHMAPFLGKAYVAYMPTNRVVGISKLARVVEIYAKRLQTQETMTQQIADAITDSLRPAGVAVLIDAQHQCMTTRGVHHRHVSTITTQFTGVFKTDNSLRQRFLDFVNKR

SEQ ID NO: 12601 - protein, 196 aa, Phenylobacterium sp.
  REGION 1..196: note = tr|A0A1E4GZ40|A0A1E4GZ40_9CAUL GTP cyclohydrolase 1; OS = Phenylobacterium sp. SCN 70-31 OX=1660129 GN=folE PE=3; SV = 1
MAEDKTGKPTEADALAAVRTLIEWAGDDPDREGLLDTPRRVVKAYGELFAGYGTDPRAYLERTFEEVGGYDELVLLKDIRVVSFCEHHMLPFLGRAHVGYLPNDRVVGISKLARVVHGFARRLQIQEKLTAEIAEAIQEVLKPKGVGVVIVSEHSCMTMRGVNTPGSKLTTSTLLGDVRDDPRTRQEFFDLVRNGD

SEQ ID NO: 12602 - protein, 197 aa, unidentified
  source 1..197: note = Phenylobacterium zucineum
  REGION 1..197: note = tr|B4RA23|B4RA23_PHEZH GTP cyclohydrolase 1; OS = Phenylobacterium zucineum (strain HLK1) OX=450851; GN = folE PE=3 SV=1
MSMSDEKRRPSEAEALAAVRTLIEWAGDDPDREGLLDTPRRVVKSYKELFAGYETDPREYLQRTFDEVGGYDELVILKDIRVVSFCEHHMLPFLGKAHVGYLPRNRVVGISKLARVVHGFARRLQIQEKLTAEIAEAIQDILQPKGVGVVIVSEHSCMTMRGVNTPGSRLTTSHLLGEVRDDPRTRTEFFELVRNGA

SEQ ID NO: 12603 - protein, 260 aa, unidentified
  source 1..260: note = Phenylobacterium zucineum
  REGION 1..260: note = tr|B4RI97|B4RI97_PHEZH GTP cyclohydrolase 1; OS = Phenylobacterium zucineum (strain HLK1) OX=450851; GN = folE PE=3 SV=1
MFALEHGFLSWSFLEMSGDFFLPDPAHSKPDRSSVVEDQFEPRNLHDPRRLKPDDDTSVGQDLPPTAKNVLRPTQAEAEQAVRVLLRWAGDDPDREGLIETPARVARSYREILGGYDTDPRSYLERVFEEIGGYDELVVLRDIPIASFCEHHMLPFTGKAHIGYLPSHRVVGISKLARVVHGFARRLQIQEKLTAQIAETIQEVLQPKGVGVVIISEHSCMTMRGVNTPGSRLITSHLLGAVRDDPRTREEFLALIHSGS

SEQ ID NO: 12604 - protein, 218 aa, Phocoenobacter uteri
  REGION 1..218: note = tr|A0A379CCC9|A0A379CCC9_9PAST GTP cyclohydrolase 1; OS = Phocoenobacter uteri OX=146806 GN=folE PE=3 SV=1
MNTTTFEADNVRNALLEKGIETPMLTPTKNKENRKAEIQQHFQAIMELLGMDLRDDSLEETPHRLAKMYVDEIFSGLDYDTFPKITKIKNQMKVSEMVLVDEITFTSTCEHHFVTIDGSVAVAYYPKDWVIGLSKINRVVQFFAQRPQVQERFTEQVLTAFQTILNTDDVAVFVKATHFCVKCRGVKDTQSKTITSAFGGLFLQDRETRKEFLTLIKK

SEQ ID NO: 12605 - protein, 186 aa, unidentified
  source 1..186: note = Phorcysia thermohydrogeniphila
  REGION 1..186: note = tr|A0A4R1GLA3|A0A4R1GLA3_9BACT GTP cyclohydrolase 1; OS = Phorcysia thermohydrogeniphila OX=936138 GN=folE PE=3; SV = 1
MAFDRERIERAVREILIAIGEDPEREGLKDTPKRVAKMYEEILAGYHDSPDNHLVLFSEKYDEMIIVKDIPIYSLCEHHMLPFFGKAHVAYIPGDNKVTGLSKLARIVDVYSKRLQLQERMTEQIADAIMEKLKAKGVMVIIEAQHLCMIMRGVKKPGSYTVTSAVKGVMRNEPTRMEALFLIKGR

SEQ ID NO: 12606 - protein, 233 aa, unidentified
  source 1..233: note = Phormidesmis priestleyi
  REGION 1..233: note = tr|A0A2T1DG69|A0A2T1DG69_9CYAN GTP cyclohydrolase 1; OS = Phormidesmis priestleyi ULC007 OX=1920490 GN=folE PE=3; SV = 1
MTTASPNGLNTSDLSPAKVANIEPRPDRNTLNGQEAKLHSPSEISQEEMMAAVRTMLLGVGEDPDREGLLKTPKRVAEAMRFLTSGYDTSLEELVNGAIFDEGHNEMVLVRDINAFSLCEHHMLPFMGRVHVAYIPNQKVVGLSKLARIVEMYSRRLQVQERLTRQIAEAVKEILEPRGVAVVMEASHMCMVMRGVQKPGSWTVTSAMVGVFQEDQKTREEFLNLIRHQPSFW

SEQ ID NO: 12607 - protein, 281 aa, unidentified
  source 1..281: note = Phormidesmis priestleyi
  REGION 1..281: note = tr|A0A0P7ZQA4|A0A0P7ZQA4_9CYAN GTP cyclohydrolase 1; OS = Phormidesmis priestleyi Ana OX=1666911 GN=folE PE=3 SV=1
MTISDEMQSPIGGQSQGQSQGQSQGKNQSQNQSQNQSQNQGLVEGADLTTRVLDGESNGKSPHKPKSRPDRETKHSQGVPRQPSAIDPTQDNGPMMEAVRTMLLSVGEDPEREGLLKTPHRVAEAMRFLTQGYSQSLETIVNDAIFDEGHNEMVLVRDINFFSLCEHHMLPFMGRAHVAYIPNQRVVGLSKLARIVEMYARRLQVQERLNRQIAEAVQEILDPLGVAVVMEASHMCMAMRGVQKPGSWTVTSAMVGVFDEDAKTREEFLSLIRHQPGFANY

SEQ ID NO: 12608 - protein, 236 aa, Phormidium ambiguum
  REGION 1..236: note = tr|A0A1U7IE61|A0A1U7IE61_9CYAN GTP cyclohydrolase 1; OS = Phormidium ambiguum IAM M-71 OX=454136 GN=folE PE=3 SV=1
MTIASSNGSNGSQSRSVNTNSTLNVPSRPDRNTLNGREAQLHTPSEEDNQAMMDAVRTMLLGVGEDPEREGLLKTPKRVAEAMRFLTSGYNQSLEELVNNAIFDEGHNEMVLVRDINFFSLCEHHMLPFMGRAHVAYIPNEKVVGLSKLARIVEMYSRRLQVQERLTRQVAEAIQTILEPKGVAVVMEASHMCMVMRGVQKPGSWTVTSAMVGVFQEEQKTREEFLNLIRHQPAFF

SEQ ID NO: 12609 - protein, 224 aa, Phormidium sp.
  REGION 1..224: note = tr|A0A522XB53|A0A522XB53_9CYAN GTP cyclohydrolase 1; OS = Phormidium sp. SL48-SHIP OX=2518363 GN=folE PE=3 SV=1
MTLDSSNNLATNGQSVPASISSVSRSIPPATRARVSQTEMEQAVRTLLIGLGEDPDREGLKDTPKRVVKALQFLTQGYEQSLEELINGAVFHEDTNEMVLIRDIDIFSSCEHHILPIIGRVHVAYIPNGRVIGLSKIARICEMHARRLQVQERLTASIAETLQSVLQPQGVAVVVEATHMCMVMRGVQKPGSWTVSSAMRGIFAEDARTRQEFMSLIRHNPAFH

SEQ ID NO: 12610 - protein, 216 aa, Phormidium sp.
  REGION 1..216: note = tr|A0A0N8KPZ3|A0A0N8KPZ3_9CYAN GTP cyclohydrolase 1; OS = Phormidium sp. OSCR OX=1666905 GN=folE PE=3 SV=1
MTLSNSSELIGTDRLEKQLETNGHKTVSDQEMRNSIRTLLTELGEDPDREGLRDTPKRVSKAWQFLTSGYNQSLEELLNGAIFNENSHEMVLVRDITLFSTCEHHMLPIIGHAHVAYIPNGKVIGLSKIARICEMFARRLQVQERLTGQIADALQEVLKPQGVAVVIEATHMCMVMRGVQKPGSWTTTSAMRGVFVDDARTRQEFMGLIRHSPQFH

SEQ ID NO: 12611 - protein, 235 aa, unidentified
  source 1..235: note = Phormidium tenue
  REGION 1..235: note = tr|A0A1U7JAN4|A0A1U7JAN4_9CYAN GTP cyclohydrolase 1; OS = Phormidium tenue NIES-30 OX=549789 GN=folE PE=3 SV=1
MTIASSNSLNDKTTNGAGLKGKAPEIRPDRTHSYREEAEQYPIPETSQEDMSDAVRTMLLSVGEDPEREGLLKTPKRVAEAMRFLTSGYQQSLEELVNGAIFDEGHNEMVLVRDINLFSLCEHHMLPFMGRAHVAYIPNQRVVGLSKLARIVEMYSRRLQVQERLNRQIAEAVQEILDPKGVAVVVEASHMCMVMRGVQKPGSWTVTSAMLGVFQEDSKTREEFLSLIRHQPSFF

SEQ ID NO: 12612 - protein, 224 aa, unidentified
  source 1..224: note = Phormidium willei
  REGION 1..224: note = tr|A0A168W0J1|A0A168W0J1_9CYAN GTP cyclohydrolase 1; OS = Phormidium willei BDU 130791 OX=399101 GN=folE PE=3 SV=1
MTLDSSNNLATNGQSVPASISSVSRSIPPATRARVSQTEMEQAVRTLLIGLGEDPDREGLKDTPKRVVKALQFLTQGYNQSLEELINGAVFHEDTNEMVLIRDIDIFSSCEHHILPIIGRVHVAYIPNGRVIGLSKIARICEMHARRLQVQERLTASIAETLQSVLQPQGVAVVVEATHMCMVMRGVQKPGSWTVSSAMRGVFAEDARTRQEFMSLIRHNPAFH

SEQ ID NO: 12613 - protein, 216 aa, unidentified
  source 1..216: note = Phormidium willei
  REGION 1..216: note = tr|A0A168VT90|A0A168VT90_9CYAN GTP cyclohydrolase 1; OS = Phormidium willei BDU 130791 OX=399101 GN=folE PE=3 SV=1
MTLSNSSELIGTDRLEKQLETNGHVTVSDQEMRHSIRTLLTELGEDPDREGLRDTPKRVSKAWQFLTSGYDQSLEELLNGAIFNENSHEMVLVRDITLFSTCEHHMLPIIGHAHVAYIPNGKVIGLSKIARICEMFARRLQVQERLTGQIADALQEVLKPQGVAVVIEATHMCMVMRGVQKPGSWTTTSAMRGVFADDARTRQEFMGLIRHSPQFH

SEQ ID NO: 12614 - protein, 38 aa, Photobacterium angustum
  REGION 1..38: note = tr|Q1ZPZ7|Q1ZPZ7_PHOAS GTP cyclohydrolase I; OS = Photobacterium angustum (strain S14 / CCUG 15956); OX = 314292 GN=folE PE=4 SV=1
MGGVIISIWRYSAYVFSAGERKQACFIAFQPVPVGGKE

SEQ ID NO: 12615 - protein, 217 aa, Photobacterium angustum
  REGION 1..217: note = tr|A0A2T3QAU8|A0A2T3QAU8_PHOAN GTP cyclohydrolase 1; OS = Photobacterium angustum OX=661 GN=folE PE=3 SV=1
MTALSESAVLVRDALAARGLETPMVEQNVSREEKKEKIEYHMREILSLLALDLTDDSLVETPHRIAKMYVDEVFSGLDYINFPKITVIENKMKCDEMVRVKDITLTSTCEHHLVTIDGKATVAYIPRGKIIGLSKINRIVRFFAQRPQVQERLTQQVLVALQTLLESDDVAVTIDATHYCVKARGVMDATSVTTTTALGGIFKKNSATRAEFLNGIR

SEQ ID NO: 12616 - protein, 217 aa, Photobacterium aphoticum
  REGION 1..217: note = tr|A0A090QNB3|A0A090QNB3_9GAMM GTP cyclohydrolase 1; OS = Photobacterium aphoticum OX=754436 GN=folE PE=3 SV=1
MTAFSESAQKVRQALIDRGLETPMTDKVVSREEKKEKIEYHMREILELLSLDLSDDSLVETPHRIAKMYVDEVFSGLDYANFPKITVIENKMNCDEMVRVKDITLTSTCEHHLVTIDGKATVAYIPRGKIIGLSKINRIVRFFAQRPQVQERMTQQILVALQTLLESEDVAITIDATHYCVKARGVMDATSVTTTTALGGIFKRNPATRAEFLHGVR

SEQ ID NO: 12617 - protein, 217 aa, unidentified
  source 1..217: note = Photobacterium aquae
  REGION 1..217: note = tr|A0A0J1H664|A0A0J1H664_9GAMM GTP cyclohydrolase 1; OS = Photobacterium aquae OX=1195763 GN=folE PE=3 SV=1
MTTYSESALKVRQALADRGLETPMTEQSISREEKKEKIEHHMREILELLSLDLTDDSLVETPHRIAKMYVDEIFSGLDYANFPKITVIENKMNCDEMVRVKDITLTSTCEHHLVTIDGKATVAYIPRGKIIGLSKINRIVRFFAQRPQVQERMTQQILVALQTLLESEDVAVTIDATHYCVKARGVMDATSETTTTALGGIFKRNPATRAEFLHGIR

SEQ ID NO: 12618 - protein, 217 aa, Photobacterium aquimaris
  REGION 1..217: note = tr|A0A2T3ILH2|A0A2T3ILH2_9GAMM GTP cyclohydrolase 1; OS = Photobacterium aquimaris OX=512643 GN=folE PE=3 SV=1
MTALSVSAIQVRDALAARGLETPMTADVVSREEKKEKIEYHMREVLSLLALDLTDDSLVETPHRIAKMYVDEIFSGLDYTNFPKITVIENKMNCDEMVRVKDITLTSTCEHHLVTIDGQATIAYIPRGKIIGLSKINRIVRFFSQRPQVQERLTQQVLVALQTLLESEDVAVTIDATHYCVKSRGVMDATSVTTTTALGGIFKRNPATRAEFFNGIR

SEQ ID NO: 12619 - protein, 217 aa, Photobacterium aquimaris
  REGION 1..217: note = tr|A0A2T3HTI8|A0A2T3HTI8_9GAMM GTP cyclohydrolase 1; OS = Photobacterium aquimaris OX=512643 GN=folE PE=3 SV=1
MTALSVSAIQVRDALAARGLETPMTADVISREEKKEKIEYHMREVLSLLALDLTDDSLVETPHRIAKMYVDEIFSGLDYTNFPKITVIENKMNCDEMVRVKDITLTSTCEHHLVTIDGKATIAYIPRGKIIGLSKINRIVRFFSQRPQVQERLTQQVLVALQTLLESEDVAVTIDATHYCVKSRGVMDATSVTTTTALGGIFKRNPATRAEFFNGIR

SEQ ID NO: 12620 - protein, 217 aa, unidentified
  source 1..217: note = Photobacterium carnosum
  REGION 1..217: note = tr|A0A2N4USL2|A0A2N4USL2_9GAMM GTP cyclohydrolase 1; OS = Photobacterium carnosum OX=2023717 GN=folE PE=3 SV=1
MTALSVSAIQVRDALAARDLETPMTADVVSREEKKEKIEYHMREILSLLALDLTDDSLVETPHRIAKMYVDEIFSGLDYTNFPKITVIENKMHCDEMVRVKDITLTSTCEHHLITIDGKATVAYIPRSKIIGLSKINRIVRFFSQRPQVQERLTQQILVALQTLLESEDVAVTIDATHYCVKSRGVMDATSVTTTTALGGIFKRNPATRAEFLSGIR

SEQ ID NO: 12621 - protein, 217 aa, unidentified
  source 1..217: note = Photobacterium damsela
  REGION 1..217: note = tr|A0A1Q9H516|A0A1Q9H516_PHODP GTP cyclohydrolase 1; OS = Photobacterium damsela subsp. piscicida OX=38294; GN = folE PE=3 SV=1
MTTLSESALKVREALAARGLETPMTDLVVERNEKKEKIEHHMREILNLLSLDLTDDSLQETPHRIAKMYVDEIFSGLDYANFPKITVIENKMNCDEMVRVKDITLTSTCEHHLVTIDGKATVAYIPRGKIIGLSKINRIVRFFAQRPQVQERLTQQVLVALQTLLESEDVAVRIDATHYCVKSRGVMDATSETTTTALGGIFKRNPATRAEFLHGVC

SEQ ID NO: 12622 - protein, 217 aa, Photobacterium damselae; identical to SEQ ID NO: 12621
  REGION 1..217: note = tr|D0Z1Y6|D0Z1Y6_PHODD GTP cyclohydrolase 1; OS = Photobacterium damselae subsp. damselae CIP 102761; OX = 675817 GN=folE PE=3 SV=1

SEQ ID NO: 12623 - protein, 217 aa, Photobacterium damselae; identical to SEQ ID NO: 12621
  REGION 1..217: note = tr|A0A2T3QP75|A0A2T3QP75_9GAMM GTP cyclohydrolase 1; OS = Photobacterium damselae OX=38293 GN=folE PE=3 SV=1

SEQ ID NO: 12624 - protein, 217 aa, Photobacterium frigidiphilum
  REGION 1..217: note = tr|A0A2T3JHD5|A0A2T3JHD5_9GAMM GTP cyclohydrolase 1; OS = Photobacterium frigidiphilum OX=264736 GN=folE PE=3 SV=1
MTALSESALMVRAALEERGLETPMTSKVVSREEKKEKIEYHMREILELLSLDLTDDSLMETPHRIAKMYVDEVFSGLDYANFPKITVIENKMKCDEMVRVKGITLTSTCEHHLVTIDGKATVAYIPRGKIIGLSKINRIVRFFAQRPQVQERMTQQILVALQTLLESDDVAVTIDATHYCVKARGVMDATSETTTTALGGIFKRIPATRAEFFHGIR

SEQ ID NO: 12625 - protein, 212 aa, Photobacterium gaetbulicola
  REGION 1..212: note = tr|A0A0B9GE91|A0A0B9GE91_9GAMM GTP cyclohydrolase 1; OS = Photobacterium gaetbulicola OX=1295392 GN=folE PE=3 SV=1
MMNIEAKRVKQALIQQGLETPMLPNEMTPDQKYDRIKGLLTEVIGVLGLDLTDDSLARTPHRIAKMYVNEIFSGLDYENFPDICVIENKMRVDEMVKVSDISLTSTCEHHFVTIDGVAKVAYLPDSKVIGLSKINRIVRFFAQRPQVQERLTQQILVAIQTLTETQNVAVTIEATHYCVKSRGVMDVNSCTTTTALGGQFKTDPQTRAEFLQ

SEQ ID NO: 12626 - protein, 217 aa, Photobacterium gaetbulicola
  REGION 1..217: note = tr|A0A0C5WZN6|A0A0C5WZN6_9GAMM GTP cyclohydrolase 1; OS = Photobacterium gaetbulicola Gung47 OX=658445 GN=folE; PE = 3 SV=1
MTAFSESALKVRQALVERGLETPMTDKVVSREEKKEKIEYHMREILELLSLDLTDDSLVETPHRIAKMYVDEVFSGLDYANFPKITVIENKMKCDEMVRVKDITLTSTCEHHLVTIDGTATVAYIPRGKIIGLSKINRIVRFFAQRPQVQERMTQQILVALQTLLESDDVAVTMDATHYCVKARGVMDATSTTTTTALGGIFKRNPATRAEFLHGLR

SEQ ID NO: 12627 - protein, 217 aa, unidentified
  source 1..217: note = Photobacterium galatheae
  REGION 1..217: note = tr|A0A066RUE2|A0A066RUE2_9GAMM GTP cyclohydrolase 1; OS = Photobacterium galatheae OX=1654360 GN=folE PE=3 SV=1
MTALSESALKVRQALESRGLETPMTNKVVDSAEKKERIEYHVREILELMSLDLTDDSLMDTPKRIAKMYVDEIFSGLDYANFPKITVIDNKMNCDELVRVKDITMTSTCEHHLVTIDGKATVAYIPRGKIIGLSKINRIVRFFAQRPQVQERLTQQILVALQTLLESDDVAVRIDAVHYCVKARGVMDQTSETTTTALGGIFKRNPATRAEFLHGLR

SEQ ID NO: 12628 - protein, 210 aa, unidentified
  source 1..210: note = Photobacterium galatheae
  REGION 1..210: note = tr|A0A066RK43|A0A066RK43_9GAMM GTP cyclohydrolase 1; OS = Photobacterium galatheae OX=1654360 GN=folE PE=3 SV=1
MDAPTPAILKKPSVYAPKNGVDKERIERAVREILYAIGDDPQREGLLDTPKRVAKAYEEMFSGLASDPFEVLGTVFHENYRDIVMVRNIEVSSFCEHHLLPFRGTASIGYLPAKEGGVVGLSKLARLVEVFARRPQVQERLTTQIADALEAALDAEGVIVEIECEHSCMSFRGVKKSGSTTVTSTLRGVFRDDPQQQAMVLNLLRGGNKS

SEQ ID NO: 12629 - protein, 217 aa, Photobacterium ganghwense
  REGION 1..217: note = tr|A0A0J1HA55|A0A0J1HA55_9GAMM GTP cyclohydrolase 1; OS = Photobacterium ganghwense OX=320778 GN=folE PE=3 SV=1
MTAYSESALKVRQALIDRGLETPMTDKVVSREEKKERIEYHMREILELLSLDLTDDSLVETPHRIAKMYVDEVFSGLDYANFPKITVIENKMNCDEMVRVKDITLTSTCEHHLVTIDGKATVAYIPRGKIIGLSKINRIVRFFAQRPQVQERMTQQILVALQTLLESDDVAVTMDATHYCVKARGVMDATSVTTTTALGGIFKRNPATRAEFLHGVR

SEQ ID NO: 12630 - protein, 217 aa, Photobacterium halotolerans
  REGION 1..217: note = tr|A0A0F5VAQ5|A0A0F5VAQ5_9GAMM GTP cyclohydrolase 1; OS = Photobacterium halotolerans OX=265726 GN=folE PE=3 SV=1
MTTLSESALKVRQALETRGLETPMTTELVGNAEKKERIEFHMREILGLLSLDLTDDSLMDTPKRIAKMYVDEIFSGLDYANFPKITVIDNKMNCDEMVRVKDITLTSTCEHHLVTIDGKATVAYIPRGKIIGLSKINRIVRFFAQRPQVQERMTQQILVALQTLLESDDVAVRIDATHYCVKARGVMDQTSETTTTALGGIFKRIPATRAEFLHGLR

SEQ ID NO: 12631 - protein, 217 aa, Photobacterium iliopiscarium; identical to SEQ ID NO: 12620
  REGION 1..217: note = tr|A0A0D8PNF0|A0A0D8PNF0_9GAMM GTP cyclohydrolase 1; OS = Photobacterium iliopiscarium OX=56192 GN=folE PE=3 SV=1

SEQ ID NO: 12632 - protein, 217 aa, Photobacterium indicum; identical to SEQ ID NO: 12624
  REGION 1..217: note = tr|A0A2T3L2J5|A0A2T3L2J5_9GAMM GTP cyclohydrolase 1; OS = Photobacterium indicum OX=81447 GN=folE PE=3 SV=1

SEQ ID NO: 12633 - protein, 217 aa, Photobacterium jeanii
  REGION 1..217: note = tr|A0A178KKW8|A0A178KKW8_9GAMM GTP cyclohydrolase 1; OS = Photobacterium jeanii OX=858640 GN=folE PE=3 SV=1
MTVMSESAQLVRDALVARGLETPMTDKVVSREEKKEKIEYHMREILELLSLDLSDDSLTETPHRIAKMYVDEVFSGLDYTNFPKITVIENKMKCDEMVRVKDITLTSTCEHHLVTIDGKATVAYIPRGKIIGLSKINRIVRFFAQRPQVQERLTQQILVALQTLLESDDVAVTIDATHYCVKARGVMDATSETTTTALGGIFKKNPATRAEFLHGIR

SEQ ID NO: 12634 - protein, 217 aa, Photobacterium kishitanii
  REGION 1..217: note = tr|A0A2T3R1Q7|A0A2T3R1Q7_9GAMM GTP cyclohydrolase 1; OS = Photobacterium kishitanii OX=318456 GN=folE PE=3 SV=1
MTALSVSAIQVRDALAARGLETPMTADVVSREEKKEKIEYHMREVLSLLALDLTDDSLVETPHRIAKMYVDEIFSGLDYTNFPKITVIENKMNCDEMVRVKDITLTSTCEHHLVTIDGKATIAYIPRGKIIGLSKINRIVRFFSQRPQVQERLTQQVLVALQTLLESEDVAVTIDATHYCVKSRGVMDATSVTTTTALGGIFKRNPATRAEFLSGIR

SEQ ID NO: 12635 - protein, 217 aa, Photobacterium leiognathi
  REGION 1..217: note = tr|A0A0U1P6D9|A0A0U1P6D9_PHOLE GTP cyclohydrolase 1; OS = Photobacterium leiognathi lrivu.4.1 OX=1248232 GN=folE; PE = 3 SV=1
MTALSESAVLVRDALAARGLETPMVEQVVSREEKKEKIEYHMREILSLLALDLTDDSLVETPHRIAKMYVDEVFSGLDYANFPKITVIENKMNCDEMVRVKDITLTSTCEHHLVTIDGKATVAYIPRGKIIGLSKINRIVRFFAQRPQVQERLTQQVLVALQTLLESDDVAVTIDATHYCVKARGVMDATSVTTTTALGGIFKKNPATRAEFLNGIR

SEQ ID NO: 12636 - protein, 217 aa, Photobacterium leiognathi
  REGION 1..217: note = tr|A0A2T3MHI3|A0A2T3MHI3_PHOLE GTP cyclohydrolase 1; OS = Photobacterium leiognathi OX=553611 GN=folE PE=3 SV=1
MTALSESAVLVRDALAARGLETPMVEQDVSREEKKEKIEYHMREILSLLALDLTDDSLVETPHRIAKMYVDEVFSGLDYANFPKITVIENKMNCDEMVRVKDITLTSTCEHHLVTIDGKATVAYIPRGKIIGLSKINRIVRFFAQRPQVQERLTQQVLVALQTLLESDDVAVTIDATHYCVKARGVMDATSVTTTTALGGIFKKNSATRAEFLNGIR

SEQ ID NO: 12637 - protein, 217 aa, Photobacterium lipolyticum
  REGION 1..217: note = tr|A0A2T3N1C1|A0A2T3N1C1_9GAMM GTP cyclohydrolase 1; OS = Photobacterium lipolyticum OX=266810 GN=folE PE=3 SV=1
MAVLSESALKVRAALEARGLETPMTDKAVSREEKKEKIEYHVREILELLSLDLTDDSLMETPHRVAKMYVDEVFSGLDYANFPKITVIENKMNCDEMVRVKDITLTSTCEHHLVTIDGKATVAYIPRSKIIGLSKINRIVRFFGQRPQVQERMTQQILVALQTLLESDDVAITIDATHYCVKARGVMDATSVTTTTALGGIFKRNPATRAEFLNGIR

SEQ ID NO: 12638 - protein, 217 aa, Photobacterium lutimaris
  REGION 1..217: note = tr|A0A2T3ILU5|A0A2T3ILU5_9GAMM GTP cyclohydrolase 1; OS = Photobacterium lutimaris OX=388278 GN=folE PE=3 SV=1
MTAFSESALMVRQALVERGLETPMTDRVVSREEKKEKIEYHMREILELLSLDLTDDSLVETPHRIAKMYVDELFSGLDYANFPKITVIENKMKCDEMVRVKDITLTSTCEHHLVTIDGTATVAYIPRGKIIGLSKINRIVRFFAQRPQVQERMTQQILVALQTLLESDDVAVTMDATHYCVKARGVMDATSVTTTTALGGIFKRNPATRAEFLHGLR

SEQ ID NO: 12639 - protein, 217 aa, unidentified
  source 1..217: note = Photobacterium marinum
  REGION 1..217: note = tr|L8JI15|L8JI15_9GAMM GTP cyclohydrolase 1; OS = Photobacterium marinum OX=1056511 GN=folE PE=3 SV=1
MTALSESALKVRNALQERGLETPMTDKVMSRDEKKERIEYHMREVLELLSLDLTDDSLVETPHRIAKMYVDEVFSGLDYANFPKITVIENKMNCDEMVRVKDITLTSTCEHHLVTIDGKATVAYIPRGKIIGLSKINRIVRFFAQRPQVQERMTQQILVALQTLLESEDVAITMDATHYCVKARGVMDATSSTTTTALGGIFKRNPATRAEFLNGLR

SEQ ID NO: 12640 - protein, 217 aa, Photobacterium phosphoreum
  REGION 1..217: note = tr|A0A2T3PPE0|A0A2T3PPE0_PHOPO GTP cyclohydrolase 1; OS = Photobacterium phosphoreum OX=659 GN=folE PE=3 SV=1
MTALSVSAIQVRDALAARGLETPMTADVVSREEKKEKIEYHMREILSLLALDLTDDSLVETPHRIAKMYVDEIFSGLDYTNFPKITVIENKMNCDEMVRVKDITLTSTCEHHLVTIDGKATVAYIPRGKIIGLSKINRIVRFFSQRPQVQERLTQQILVALQTLLESEDVAVTIDATHYCVKSRGVMDATSVTTTTALGGIFKRNPATRAEFLSGIR

SEQ ID NO: 12641 - protein, 217 aa, Photobacterium phosphoreum
  REGION 1..217: note = tr|A0A2T3PXQ8|A0A2T3PXQ8_PHOPO GTP cyclohydrolase 1; OS = Photobacterium phosphoreum OX=659 GN=folE PE=3 SV=1
MTALSVSAIQVRDALAARGLETPMTADVISREEKKEKIEYHMREILSLLALDLTDDSLVETPHRIAKMYVDEIFSGLDYTNFPKITVIENKMNCDEMVRVKDITLTSTCEHHLVTIDGKATVAYIPRGKIIGLSKINRIVRFFSQRPQVQERLTQQILVALQTLLESEDVAVTIDATHYCVKSRGVMDATSVTTTTALGGIFKRNPATRAEFLSGIR

SEQ ID NO: 12642 - protein, 252 aa, unidentified
  source 1..252: note = Photobacterium piscicola
  REGION 1..252: note = tr|A0A1T5HZ92|A0A1T5HZ92_9GAMM Putative GTP cyclohydrolase 1 type 2 OS=Photobacterium piscicola; OX = 1378299 GN=CZ809_01569 PE=4 SV=1
MNNLKLEALLNDFLSPQLMKDYCPNGLQVEGKTEVNKVITGVTACQALIDRAIAEHADAILVHHGFFWKGEAAEIRGMKYRRIKALIENGINLYAYHLPLDVHSQVGNNVQLAQRLGLDISGGLEINNPRSIAIYGELDTPLTGEEFAARIAMALQREPLHIGDNAPALIKKVGWCTGGGQDYIELAVEQGCDAFISGEVSERTTHIARELGIHYFAAGHHATERYGVKALGEWLAKEHGCDVEFIDINNPV

SEQ ID NO: 12643 - protein, 217 aa, unidentified
  source 1..217: note = Photobacterium piscicola
  REGION 1..217: note = tr|A0A1T5HZY8|A0A1T5HZY8_9GAMM GTP cyclohydrolase 1; OS = Photobacterium piscicola OX=1378299 GN=folE PE=3 SV=1
MTALSVSAVQVRDALAARDLETPMTADVVSREEKKEKIEYHMREILSLLALDLTDDSLVETPHRIAKMYVDEIFSGLDYTNFPKITVIENKMNCDEMVRVKDITLTSTCEHHLITIDGKATVAYIPRGKIIGLSKINRIVRFFSQRPQVQERLTQQILVALQTLLESEDVAVTIDATHYCVKSRGVMDATSVTTTTALGGIFKRNPATRAEFLSGIR

SEQ ID NO: 12644 - protein, 217 aa, Photobacterium profundum; identical to SEQ ID NO: 12624
  REGION 1..217: note = sp|Q6LQL4|GCH1_PHOPR GTP cyclohydrolase 1; OS = Photobacterium profundum (strain SS9) OX=298386 GN=folE; PE = 3 SV=1

SEQ ID NO: 12645 - protein, 217 aa, Photobacterium profundum; identical to SEQ ID NO: 12624
  REGION 1..217: note = tr|Q1Z948|Q1Z948_9GAMM GTP cyclohydrolase 1; OS = Photobacterium profundum 3TCK OX=314280 GN=folE PE=3; SV = 1

SEQ ID NO: 12646 - protein, 217 aa, unidentified
  source 1..217: note = Photobacterium proteolyticum
  REGION 1..217: note = tr|A0A1Q9GBN9|A0A1Q9GBN9_9GAMM GTP cyclohydrolase 1; OS = Photobacterium proteolyticum OX=1903952 GN=folE PE=3; SV = 1
MTALSESALKVRQALVERGLETPMTDKVVSREEKKERIEYHMREILELLSLDLSDDSLMETPQRIAKMYVDEVFSGLDYANFPKITVIENKMNCDEMVRVKDITLTSTCEHHLVTIDGKATVAYIPRGKIIGLSKINRIVRFFAQRPQVQERMTQQILVALQTLLESDDVAITMDATHYCVKARGVMDATSSTTTTALGGIFKRNPATRAEFLNGLR

SEQ ID NO: 12647 - protein, 212 aa, Photobacterium rosenbergii
  REGION 1..212: note = tr|A0A2T3NG66|A0A2T3NG66_9GAMM GTP cyclohydrolase 1; OS = Photobacterium rosenbergii OX=294936 GN=folE PE=3 SV=1
MMNIEAKLVKQALIQQGLETPMLPNEMNPEQKYERIKGLLTEVIGVLGLDLRDDSLARTPHRIAKMYVNEVFSGLDYDNFPNICVIENKMRVDEMVKVSDISLTSTCEHHFVTIDGIAKVAYLPESKVIGLSKINRIVRFFAQRPQVQERLTQQILVAVQTLTETENVAVTIEATHYCVKSRGVMDVNSKTTTTALGGQFKTNPQTRAEFLQ

SEQ ID NO: 12648 - protein, 217 aa, Photobacterium rosenbergii
  REGION 1..217: note = tr|A0A2T3NFV8|A0A2T3NFV8_9GAMM GTP cyclohydrolase 1; OS = Photobacterium rosenbergii OX=294936 GN=folE PE=3 SV=1
MTALSESALKVRQALVERGLETPMTDKVVSREEKKEKIEYHMREILELLSLDLTDDSLIETPHRIAKMYVDEVFSGLDYANFPKITVIENKMNCDEMVRVKDITLTSTCEHHLVTIDGTATVAYIPRGKIIGLSKINRIVRFFAQRPQVQERMTQQILVALQTLLESDDVAVTMDATHYCVKARGVMDATSTTTTTALGGIFKRNPATRAEFLNGLR

SEQ ID NO: 12649 - protein, 217 aa, unidentified
  source 1..217: note = Photobacterium sanctipauli
  REGION 1..217: note = tr|A0A2T3NPN0|A0A2T3NPN0_9GAMM GTP cyclohydrolase 1; OS = Photobacterium sanctipauli OX=1342794 GN=folE PE=3 SV=1
MTALSESALKVRQALVDRGLETPMTDKQVSREEKKEKIEYHMREILELLSLDLTDDSLVETPHRIAKMYVDEVFSGLDYANFPKITVIENKMNCDEMVRVKDITLTSTCEHHLVTIDGKATVAYIPRGKIIGLSKINRIVRFFAQRPQVQERMTQQILVALQTLLESDDVAVTMDATHYCVKARGVMDATSVTTTTALGGIFKRNPATRAEFLHGVR

SEQ ID NO: 12650 - protein, 217 aa, unidentified
  source 1..217: note = Photobacterium sanguinicancri
  REGION 1..217: note = tr|A0A264T7I1|A0A264T7I1_9GAMM GTP cyclohydrolase 1; OS = Photobacterium sanguinicancri OX=875932 GN=folE PE=3; SV = 1
MTALSESALLVRDALAARGLETPMTEKKVSREEKKEKIEFHMREILELLSLDLSDDSLMETPHRIAKMYVDEVFSGLDYANFPKITVIENKMKCDEMVRVKNITLTSTCEHHLVTIDGKATVAYIPRGKIIGLSKINRIVRFFAQRPQVQERLTQQILVALQTLLESDDVAVTIDATHYCVKSRGVMDATSETTTTALGGIFKKNPATRAEFLNGIR

SEQ ID NO: 12651 - protein, 217 aa, unidentified
  source 1..217: note = Photobacterium sanguinicancri
  REGION 1..217: note = tr|A0A135ZJZ6|A0A135ZJZ6_9GAMM GTP cyclohydrolase 1; OS = Photobacterium sanguinicancri OX=875932 GN=folE PE=3; SV = 1
MTALSESALLVRDALAARGLETPMTEKKVSREEKKEKIEFHLREILELLSLDLSDDSLMETPHRIAKMYVDEVFSGLDYANFPKITVIENKMKCDEMVRVKNITLTSTCEHHLVTIDGKATVAYIPRGKIIGLSKINRIVRFFAQRPQVQERLTQQILVALQTLLESDDVAVTIDATHYCVKSRGVMDATSETTTTALSGIFKKNPATRAEFLHGIR

SEQ ID NO: 12652 - protein, 230 aa, Photobacterium sp.
  REGION 1..230: note = tr|A0A1Y6M8R0|A0A1Y6M8R0_9GAMM GTP cyclohydrolase 1; OS = Photobacterium sp. CECT 9192 OX=2006083 GN=folE PE=3; SV = 1
MSFLFYLGQLEEEMTALSVSAIQVRDALAARGLETPMTADVVSREEKKEKIEYHMREVLSLLALDLTDDSLVETPHRIAKMYVDEIFSGLDYSNFPKITVIENKMNCDEMVRVKDITLTSTCEHHLVTIDGQATIAYIPRGKIIGLSKINRIVRFFSQRPQVQERLTQQVLVALQTLLESEDVAVTIDATHYCVKSRGVMDATSVTTTTALGGIFKRNPATRAEFFNGIR

SEQ ID NO: 12653 - protein, 230 aa, Photobacterium sp.
  REGION 1..230: note = tr|A0A1Y6M8K0|A0A1Y6M8K0_9GAMM GTP cyclohydrolase 1; OS = Photobacterium sp. CECT 9190 OX=2006084 GN=folE PE=3; SV = 1
MSFLFYLGQLEEEMTALSVSAIQVRDALAARGLETPMTADVISREEKKEKIEYHMREVLSLLALDLTDDSLVETPHRIAKMYVDEIFSGLDYTNFPKITVIENKMNCDEMVRVKDITLTSTCEHHLVTIDGKATIAYIPRGKIIGLSKINRIVRFFSQRPQVQERLTQQVLVALQTLLESEDVAVTIDATHYCVKSRGVMDATSVTTTTALGGIFKRNPATRAEFFNGIR

SEQ ID NO: 12654 - protein, 217 aa, Photobacterium swingsii
  REGION 1..217: note = tr|A0A0J8Y4B4|A0A0J8Y4B4_9GAMM GTP cyclohydrolase 1; OS = Photobacterium swingsii OX=680026 GN=folE PE=3 SV=1
MTALSESALLVRDALAARGLETPMTEKAVSREEKKEKIEFHMREILELLSLDLSDDSLMETPHRIAKMYVDEVFSGLDYANFPKITVIENKMKCDEMVRVKNITLTSTCEHHLVTIDGKATVAYIPRGKIIGLSKINRIVRFFAQRPQVQERLTQQILVALQTLLESDDVAVTIDATHYCVKSRGVMDATSETTTTALGGIFKKNPATRAEFLHGIR

SEQ ID NO: 12655 - protein, 217 aa, unidentified
  source 1..217: note = Photobacterium toruni
  REGION 1..217: note = tr|A0A1T4T3S3|A0A1T4T3S3_9GAMM GTP cyclohydrolase 1; OS = Photobacterium toruni OX=1935446 GN=folE PE=3 SV=1
MTALSVSAIQVRDALAARDLETPMTADVVSRDEKKEKIEYHMREILSLLALDLTDDSLVETPHRIAKMYVDEIFSGLDYTNFPKITVIENKMNCDEMVRVKDITLTSTCEHHLITIDGKATVAYIPRGKIIGLSKINRIVRFFSQRPQVQERLTQQILVALQTLLESEDVAVTIDATHYCVKSRGVMDATSVTTTTALGGIFKRNPATRAEFLSGIR

SEQ ID NO: 12656 - protein, 252 aa, unidentified
  source 1..252: note = Photobacterium toruni
  REGION 1..252: note = tr|A0A1T4KMS9|A0A1T4KMS9_9GAMM Putative GTP cyclohydrolase 1 type 2 OS=Photobacterium toruni; OX = 1935446 GN=CZ814_00223 PE=4 SV=1
MNNLKLEALLNDFLSPQLIKDYCPNGLQVEGKAEITKVITGVTACQALIDRAITEHADAILVHHGFFWKGEAAEIRGMKYRRIKALIENGINLYAYHLPLDVHMQVGNNVQLAQRLGLDIIGGLEINNPRSIAIYGELDTALSGDEFAARIAMALQREPLHIGDNAPALIKKVGWCSGGGQDYIELAVSQGCDAFISGEVSERTTHIARELGIHYFAAGHHATERYGVKALGEWLAKEQGFSVEFIDINNPV

SEQ ID NO: 12657 - protein, 222 aa, Photorhabdus asymbiotica
  REGION 1..222: note = tr|C7BR32|C7BR32_PHOAA GTP cyclohydrolase 1; OS = Photorhabdus asymbiotica subsp. asymbiotica (strain ATCC 43949 / 3105-77) OX=553480 GN=folE PE=3 SV=1
MEKIMSSLSKEAELVHSALEARGLETPLRGQTLAPEVRKVRIEEHMTEIMKLLNLDLSDDSLADTPGRIAKMYVDEIFSGLDYSNFPKITLIENKMKVDEMVTVRDITLTSTCEHHFVTIDGKATVAYIPKDKVIGLSKINRIVQFFSQRPQVQERLTQQILIALQTLLGTNNVAVSIDAVHYCVKARGIRDATSTTTTTSLGGLFKSSQNTRQEFLRTTRH

SEQ ID NO: 12658 - protein, 248 aa, unidentified
  source 1..248: note = Photorhabdus australis
  REGION 1..248: note = tr|A0A1C0U1I6|A0A1C0U1I6_9GAMM Putative GTP cyclohydrolase 1 type 2 OS=Photorhabdus australis; OX = 286156 GN=ybgI PE=4 SV=1
MMHNIELESVINEELHIREFQDYAPNGLQVEGRAHIQRVVTGVTACQALLDEAVRYQADAVIVHHGYFWKNEPVVIRNMKRHRLKTLLSNDINLYGYHLPLDAHSLLGNNAQLAHKIGAKVVGLIDTFVPHGEFEQPMTPAELATRIELALGRKALHVGDNAPAEIRTLAWCTGGGQSFIQQAAEFGVDAFITGEASEQTVHIAREMGLHFYAAGHHATERYGIKALGEWLADNYGLDVTFIDIPNPV

SEQ ID NO: 12659 - protein, 219 aa, unidentified
  source 1..219: note = Photorhabdus australis
  REGION 1..219: note = tr|A0A1C0U1T4|A0A1C0U1T4_9GAMM GTP cyclohydrolase 1; OS = Photorhabdus australis OX=286156 GN=folE PE=3 SV=1
MSSLSKEAELVHSALEARGLETPLRGQTLAPEVRKVRIEEHMTEIMKLLNLDLSDDSLSDTPGRIAKMYVDEIFSGLDYSNFPKITLIENKMKVDEMVTVRDITLTSTCEHHFVTIDGKATVAYIPKDKVIGLSKINRIVQFFSQRPQVQERLTQQILIALQTLLGTNNVAVSIDAVHYCVKARGIRDATSTTTTTSLGGLFKSSQNTRQEFLRTTRHS

SEQ ID NO: 12660 - protein, 219 aa, unidentified
  source 1..219: note = Photorhabdus bodei
  REGION 1..219: note = tr|A0A329X984|A0A329X984_9GAMM GTP cyclohydrolase 1; OS = Photorhabdus bodei OX=2029681 GN=folE PE=3 SV=1
MSSLSKEAELVHSALEARGLETPLRGQALAPEVRKARIEEHMTEVMKLLNLDLRDDSLAETPGRIAKMYVDEIFSGLDYSNFPKITLIENKMKVDEMVTVRDITLTSTCEHHFVTIDGKATVAYIPKDKVIGLSKINRIVQFFSQRPQVQERLTQQILIALQTLLGTNNVAVSIDAVHYCVKARGIRDATSTTTTTSLGGLFKSSQNTRQEFLRTIRHV

SEQ ID NO: 12661 - protein, 218 aa, unidentified
  source 1..218: note = Photorhabdus heterorhabditis
  REGION 1..218: note = tr|A0A0M9D0V3|A0A0M9D0V3_9GAMM GTP cyclohydrolase 1; OS = Photorhabdus heterorhabditis OX=880156 GN=folE PE=3 SV=1
MSSLSKEAELVHSALEARGLETPLRGQALAPEVRKVRIEEHMTEIMKLLNLDLSDDSLAETPSRIAKMYVDEIFSGLDYSNFPKITLIENKMKVDEMVTVRDITLTSTCEHHFVTIDGKATVAYIPKDKVIGLSKINRIVQFFSQRPQVQERLTQQILIALQTLLGTNNVAVSIDAVHYCVKARGIRDATSTTTTTSLGGLFKSSQNTRQEFLRTTRH

SEQ ID NO: 12662 - protein, 219 aa, unidentified
  source 1..219: note = Photorhabdus khanii
  REGION 1..219: note = tr|W3V2P2|W3V2P2_9GAMM GTP cyclohydrolase 1; OS = Photorhabdus khanii NC19 OX=1004151 GN=folE PE=3 SV=1
MSSLSKEAELVHSALEARGLETPLRGQALAPEVRKERIEEHMTEIMKLLNLDLNDDSLAETPNRIAKMYVDEIFSGLDYSNFPKITLIENKMKVDEMVTVRDITLTSTCEHHFVTIDGKATVSYIPKDKVIGLSKINRIVQFFSQRPQVQERLTQQILIALQILLGTNNVAVSIDAVHYCVKARGVRDATSTTTTTSLGGLFKSSQNTRQEFLRTTRHL

SEQ ID NO: 12663 - protein, 219 aa, unidentified
  source 1..219: note = Photorhabdus laumondii
  REGION 1..219: note = sp|Q7N6K7|GCH1_PHOLL GTP cyclohydrolase 1; OS = Photorhabdus laumondii subsp. laumondii (strain DSM 15139 / CIP 105565 / TT01) OX=243265 GN=folE PE=3 SV=1
MSSLSKEAELVHSALETRGLETPLRGQALVPEVRKARIEEHMTEVMKLLNLDLRDDSLAETPGRIAKMYVDEIFSGLDYSNFPKITLIENKMKVDEMVTVRDITLTSTCEHHFVTIDGKATVAYIPKDKVIGLSKINRIVQFFSQRPQVQERLTQQILIALQTLLGTNNVAVSIDAVHYCVKARGIRDATSTTTTTSLGGLFKSSQNTRQEFLRTTRHV

SEQ ID NO: 12664 - protein, 219 aa, unidentified
  source 1..219: note = Photorhabdus laumondii
  REGION 1..219: note = tr|A0A329VKH6|A0A329VKH6_9GAMM GTP cyclohydrolase 1; OS = Photorhabdus laumondii subsp. clarkei OX=2029685; GN = folE PE=3 SV=1
MSSLSKEAELVHSALEARGLETPLRGQALVPEVRKARIEEHMTEVMKLLNLDLRDDSLVETPGRIAKMYVDEIFSGLDYSNFPKITLIENKMKVDEMVTVRDITLTSTCEHHFVTIDGKATVAYIPKDKVIGLSKINRIVQFFSQRPQVQERLTQQILIALQTLLGTNNVAVSIDAVHYCVKARGIRDATSTTTTTSLGGLFKSSQNTRQEFLRTTRHV

SEQ ID NO: 12665 - protein, 219 aa, Photorhabdus luminescens
  REGION 1..219: note = tr|A0A5C4RKQ3|A0A5C4RKQ3_PHOLU GTP cyclohydrolase 1; OS = Photorhabdus luminescens subsp. sonorensis OX=1173677; GN = folE PE=3 SV=1
MSSLSKEAELVHSALEARGLETPLRGQALAPEVRKARIEEHMTEIMKLLNLDLRDDSLAETPSRIAKMYVDEIFSGLDYSNFPKITLIENKMRVDEMVTVRDITLTSTCEHHFVTIDGKATVAYIPKDKVIGLSKINRIVQFFSQRPQVQERLTQQILIALQTLLGTNNVAVSIDAVHYCVKARGIRDATSTTTTTSLGGLFKSSQNTRQEFLRTTRHV

SEQ ID NO: 12666 - protein, 219 aa, Photorhabdus luminescens
  REGION 1..219: note = tr|A0A1G5QYR5|A0A1G5QYR5_PHOLU GTP cyclohydrolase 1; OS = Photorhabdus luminescens OX=29488 GN=folE PE=3 SV=1
MSSLSKEAELVHSALEARGLETPLRGQALVPEVRKARIEEHMTEIMKLLNLDLRDDSLAETPSRIAKMYVDEIFSGLDYSNFPKITLIENKMRVDEMVTVRDITLTSTCEHHFVTIDGKATVAYIPKDKVIGLSKINRIVQFFSQRPQVQERLTQQILIALQTLLGTNNVAVSIDAVHYCVKARGIRDATSTTTTTSLGGLFKSSQNTRQEFLRTTRHV

SEQ ID NO: 12667 - protein, 243 aa, unidentified
  source 1..243: note = Photorhabdus namnaonensis
  REGION 1..243: note = tr|A0A1B8YE34|A0A1B8YE34_9GAMM GTP cyclohydrolase 1; OS = Photorhabdus namnaonensis OX=1851568 GN=folE_2 PE=4 SV=1
MKPFSDNNEVPTVEPGDLEITTHGFADGISMQLAKKRALHGPNETLTKTELNLIIDKAAISFGEFLTALGVDWQNDPNSKDTPRRVAKAYVLDLWKGRYKPMGPITTFPADNYDGIVFDGWIALDSMCSHHHQAIRGYVHVAYIPSQYGRVLGLSKLNRIVEHFGRRGLIQERLTATIHNAVNQVCERNQGVAVLIDASHNCVSCRGVRHQKSRMKTQMFSGVFADTDSPAKQDFYELIRGTA

SEQ ID NO: 12668 - protein, 219 aa, unidentified
  source 1..219: note = Photorhabdus namnaonensis
  REGION 1..219: note = tr|A0A1B8YEQ6|A0A1B8YEQ6_9GAMM GTP cyclohydrolase 1; OS = Photorhabdus namnaonensis OX=1851568 GN=folE_1 PE=3 SV=1
MSSLSKEAELVHSALEARGLETPLRGQALVPEVRKARIEEHMTEIMKLLNLDLRDDSLAETPGRIAKMYVDEIFSGLDYSNFPKITLIENKMKVDEMVTVRDITLTSTCEHHFVTIDGKATVAYIPKDKVIGLSKINRIVQFFSQRPQVQERLTQQILIALQTLLGTNNVAVSIDAVHYCVKARGIRDATSTTTTTSLGGLFKSSQNTRQEFLRTTRHV

SEQ ID NO: 12669 - protein, 219 aa, Photorhabdus sp.; identical to SEQ ID NO: 12666
  REGION 1..219: note = tr|A0A4R4JIY8|A0A4R4JIY8_9GAMM GTP cyclohydrolase 1; OS = Photorhabdus sp. MEX47-22 OX=2100167 GN=folE PE=3 SV=1

SEQ ID NO: 12670 - protein, 219 aa, Photorhabdus sp.
  REGION 1..219: note = tr|A0A4R4K7U5|A0A4R4K7U5_9GAMM GTP cyclohydrolase 1; OS = Photorhabdus sp. MEX20-17 OX=2100166 GN=folE PE=3 SV=1
MSSLSKEAELVHSALEARGLETPLRGQALAPEVRKERIEEHMTEIMKLLNLDLNDDSLAETPNRIAKMYVDEIFSGLDYSNFPKITLIENKMKVDEMVTVRDITLTSTCEHHFVTIDGKATVSYIPKDKVIGLSKINRIVQFFSQRPQVQERLTQQILIALQTLLGTNNVAVSIDAVHYCVKARGIRDATSTTTTTSLGGLFKSSQNTRQEFLRTTRHL

SEQ ID NO: 12671 - protein, 219 aa, Photorhabdus temperata
  REGION 1..219: note = tr|T0QHE5|T0QHE5_PHOTE GTP cyclohydrolase 1; OS = Photorhabdus temperata subsp. temperata M1021; OX = 1221520 GN=folE PE=3 SV=1
MSSLSKEAELVHSALEARGLETPLRGQALMPEVRKVRIEEHMTEIMKLLNLDLNDDSLAETPSRIAKMYVDEIFSGLDYSNFPKITLIENKMKVDEMVTVRDITLTSTCEHHFVTIDGKATVSYIPKDKVIGLSKINRIVQFFSQRPQVQERLTQQILIALQTLLGTNNVAVSIDAVHYCVKARGIRDATSTTTTTSLGGLFKSSQNTRQEFLRTTRHL

SEQ ID NO: 12672 - protein, 219 aa, Photorhabdus temperata; identical to SEQ ID NO: 12671
  REGION 1..219: note = tr|A0A081S073|A0A081S073_PHOTE GTP cyclohydrolase 1; OS = Photorhabdus temperata subsp. temperata Meg1 OX=1393735; GN = folE PE=3 SV=1

SEQ ID NO: 12673 - protein, 219 aa, unidentified
  source 1..219: note = Photorhabdus thracensis
  REGION 1..219: note = tr|A0A0F7LRD2|A0A0F7LRD2_9GAMM GTP cyclohydrolase 1; OS = Photorhabdus thracensis OX=230089 GN=folE PE=3 SV=1
MSSLSKEAELVHSALEARGLETPLRGQALTPEVRKVRIEEHMTEIMKLLNLDLNDDSLAETPSRIAKMYVDEIFSGLDYSNFPKITLIENKMKVDEMVTVHDITLTSTCEHHFVTIDGKATVSYIPKDKVIGLSKINRIVQFFSQRPQVQERLTQQILIALQTLLGTNNVAVSIDAVHYCVKARGIRDVTSTTTTTSLGGLFKSSQNTRQEFLRTTRHL

SEQ ID NO: 12674 - protein, 209 aa, unidentified
  source 1..209: note = Phreatobacter cathodiphilus
  REGION 1..209: note = tr|A0A2S0N8W3|A0A2S0N8W3_9PROT GTP cyclohydrolase 1; OS = Phreatobacter cathodiphilus OX=1868589 GN=folE PE=3 SV=1
MDAVVTSLPLQKGSEAPRRRRPTREEAEAAVRTLIEWVGDDPDREGLVATPRRMVKAWEDLFRGYGQSAAKELGTVFEEVGGYGDVVLVRDIPFFSHCEHHIVPISGRAHIAYYPREGVVGLSKLAKVVDIYARRLQTQENMTAEIVGAIEESLKPRGLAVLVEAEHMCMSMRGVQKQGVSTITTGFTGLFKDDASEQARFMQMIRGFR

SEQ ID NO: 12675 - protein, 210 aa, unidentified
  source 1..210: note = Phreatobacter oligotrophus
  REGION 1..210: note = tr|A0A2T4ZIJ7|A0A2T4ZIJ7_9PROT GTP cyclohydrolase 1; OS = Phreatobacter oligotrophus OX=1122261 GN=folE PE=3 SV=1
MDAVVTSLPMAKGLESPRRRRPSREEAEAAVRTLIEWVGDNPPDREGLVDTPRRMVKAWEDLFRGYGQSAAKELGTVFEEVGGYGDVVLVRDIPFFSHCEHHIVPIMGRAHIAYYPREGVVGLSKLAKVVDIYARRLQTQENMTAEIVGAIEESLKPRGLAVLVEAEHMCMSMRGVQKQGVSTITTGFTGLFKDDASEQARFMQMIRGFR

SEQ ID NO: 12676 - protein, 210 aa, unidentified
  source 1..210: note = Phreatobacter sp.
  REGION 1..210: note = tr|A0A4D7QI40|A0A4D7QI40_9PROT GTP cyclohydrolase 1; OS = Phreatobacter sp. NMCR1094 OX=2570229 GN=folE PE=3 SV=1
MDAVVTTLPVGKGSDVKHRRRPSREEAEAAVRTLIEWVGDDPDREGLVDTPRRMAKAWEDLFRGYGQSAEKELGTVFEEVGGYGDIVLVRDIPFFSHCEHHIVPIMGRAHIAYYPREGVVGLSKLAKVVDIFARRLQTQENMTAEISNVIEETLRPRGLAVLVEAEHMCMSMRGVQKQGVSTVTTGFTGLFKDDATEQVRFMTMVRGFRS

SEQ ID NO: 12677 - protein, 210 aa, unidentified
  source 1..210: note = Phreatobacter stygius
  REGION 1..210: note = tr|A0A4D7BBL6|A0A4D7BBL6_9PROT GTP cyclohydrolase 1; OS = Phreatobacter stygius OX=1940610 GN=folE PE=3 SV=1
MDAVVTTLPVHKGPEAKRHRRPTREEAEAAVRTLIEWVGEDPDREGLLDTPRRMVKSWEDLFRGYGQSAADELGTVFEEVGGYGDVVLVRDIPFFSHCEHHIVPIQGKAHIAYYPRDGVVGLSKLARVVDIFARRLQTQENMTAEIVGAIEESLRPRGIAVLVEAEHMCMSMRGVQKQGVSTITTGFTGLFKADATEQVRFMTMIRGFGG

SEQ ID NO: 12678 - protein, 197 aa, Phycicoccus bigeumensis
  REGION 1..197: note = tr|A0A502CT07|A0A502CT07_9MICO GTP cyclohydrolase 1; OS = Phycicoccus bigeumensis OX=433644 GN=folE PE=3 SV=1
MASEAKPHVVDQPRAEAAVRELLIAIGEDPDREGLVETPARVARAYGEFFAGLSLDAGEVLSKTFRIDHEEMILVRDIEVYSMCEHHLVPFHGVAHVGYIPARDGRVTGLSKLARLVEMYARRPQVQERLTTQVADSLVTHLGAQGVMVIVECEHLCMSMRGIRKPGSRTITSAVRGQLRDPATRAEAMALLLGGKR

SEQ ID NO: 12679 - protein, 207 aa, Phycicoccus cremeus
  REGION 1..207: note = tr|A0A1H9WDA2|A0A1H9WDA2_9MICO GTP cyclohydrolase 1; OS = Phycicoccus cremeus OX=587636 GN=folE PE=3 SV=1
MSTPTRTEAEGDAVGARNDIDFARAEAAVRELLIAVGEDPDREGLVDTPARVARAYAETFAGLRMTPEEVLSATFSIEHQEMIIVRDIEVYSTCEHHLVPFHGVAHVGYIPARDGRVTGLSKIARLVEVFARRPQVQERLTTQVADALVEHLEAQGVIVVVECEHLCMSMRGVRKPGSRTITSAVRGQLRDAATRAEAMSLLLGGKR

SEQ ID NO: 12680 - protein, 218 aa, Phycicoccus cremeus
  REGION 1..218: note = tr|A0A1H9VMN0|A0A1H9VMN0_9MICO GTP cyclohydrolase 1; OS = Phycicoccus cremeus OX=587636 GN=folE PE=3 SV=1
MVTTSISGTAAAAGAEPAHPLEKAARGIRAGRPRPHRAPETAVSGARLLLSGLGIDLEGESLRRTPERMAAALAELLTPRPFELTTFPNDGGYDELIVARGIPMRSLCEHHMLPFVGTAHIGYLPGERILGLSKLARVLEHFSHRPQVQERLTTQVAGWLQEQLEPAGVGVVIEAEHLCMTLRGVQAPGTTTITSSLLGTLRDDGRSHAEFLALTYRR

SEQ ID NO: 12681 - protein, 197 aa, Phycicoccus dokdonensis
  REGION 1..197: note = tr|A0A1H0UT94|A0A1H0UT94_9MICO GTP cyclohydrolase 1; OS = Phycicoccus dokdonensis OX=443156 GN=folE PE=3 SV=1
MAADHSQHEVDQARAEAAVRELLIAIGEDPDRDGLVETPARVARAYGEFFAGLRLDAADVLSKTFEIDHEEMILVRDIEVYSMCEHHLVPFHGVAHVGYIPAKDGRVTGLSKLARLVEMYARRPQVQERLTTQVADALCTHVGAQGVIVVVECEHLCMSMRGIRKPGSRTITSAVRGQLRDPATRAEAMALLLGGKR

SEQ ID NO: 12682 - protein, 216 aa, Phycicoccus sp.
  REGION 1..216: note = tr|A0A3S3Q6X2|A0A3S3Q6X2_9MICO GTP cyclohydrolase 1; OS = Phycicoccus sp. CMS6Z-2 OX=2502783 GN=folE PE=3 SV=1
MGVSSPEADLDLAPAATATSTGAATRPPVDVPRAQAAVREFLLAIGEDPDRDGLRDTPARVAKAAHELYAGLWQDPAEVLSATFPIEHEELVIVRDIPMYSTCEHHLLPFHGVAHIGYIPGEDGRVTGLSKLGRLVEVYARRPQVQEQITTQVADALVTHLGVQGAIVVIEAEHLCMSMRGVQKPGSRTITSAVRGQLRDPATRAEAMSLLLAGSR

SEQ ID NO: 12683 - protein, 197 aa, Phycicoccus sp.
  REGION 1..197: note = tr|A0A0Q9SPK0|A0A0Q9SPK0_9MICO GTP cyclohydrolase 1; OS = Phycicoccus sp. Soil802 OX=1736414 GN=folE PE=3 SV=1
MPTERGRHVVDQARAEAAVRELLIAIGEDPDRDGLTETPARVARAYGEFFAGLSLDAAEVLSKTFEIDHEEMILVRDIEVYSMCEHHLVPFHGVAHVGYIPAKDGRVTGLSKIARLVEMYARRPQVQERLTTQVADALCTHLGAQGVIVIVECEHLCMSMRGIRKPGSRTITSAVRGQLRDAATRAEAMALLLGGKR

SEQ ID NO: 12684 - protein, 284 aa, Phycisphaera mikurensis
  REGION 1..284: note = tr|I0IHI4|I0IHI4_PHYMF GTP cyclohydrolase FolE2; OS = Phycisphaera mikurensis (strain NBRC 102666 / KCTC 22515 / FYK2301M01) OX=1142394 GN=folE2 PE=3 SV=1
MLSSPLVDVQGKSDGRRVPIDRVGVKNVRYPISLATPAGGAHAGPRQHTIARIDMYVSLPHHQKGTHMSRFLEVLNEHHDGLPSHDVMNLCRAIRERLEAEDAHLRLEFPYFIDKRAPVTGQPGKLDIEVVLEAHASGSEPGPDAPIGPASPGFTMTVRVPATSLCPCSKEISAYGAHNQRCEMEASVRFFPGKRMWIEDLFAIVEGCASTQVFSTLKRPDEKFVTEAAYDNPKFVEDIVRDLAMAMEADDRVSWYRVGSENFESIHSHNAYAQLEHAKSAEPQ

SEQ ID NO: 12685 - protein, 269 aa, Phycisphaera sp.
  REGION 1..269: note = tr|A0A2G1ZR01|A0A2G1ZR01_9BACT GTP cyclohydrolase FolE2 OS=Phycisphaera sp. OX=2030824 GN=folE2 PE=3 SV=1
MQTSSDSNSIADVQGYEDGRHVAIDKVGVKNIIYPMILKTRDGKTQDTIAKINMYVSLPHHQKGTHMSRFLEVLNDHRSEPLTPDRIPEVTAAIRERLNAETAHFEASFTYFMCKPAPVTGMRGLMDYEVTFACEVNGSPETSSFVIGVAVPATSLCPCSKEISEYGAHNQRCRISAKVKFDGTLWIEDLVEVLEGAASSPVYAVLKRPDEKFVTEAAYDNPKFVEDIIRDLALALDKDERIKWYEIDSENFESIHSHNAYAQITRSRG

SEQ ID NO: 12686 - protein, 185 aa, Phycisphaera sp.
  REGION 1..185: note = tr|A0A3R7ST50|A0A3R7ST50_9BACT GTP cyclohydrolase 1; OS = Phycisphaera sp. TMED9 OX=1986611 GN=folE PE=3 SV=1
MAQIKSLLGYIGEDPEREGLIDTPKRVVKAMNEHYWGYRADPFEPLQKTFGEVENYDELVLLQNMEIQSHCEHHMVPFVGKAHVAYIPNGRVVGLSKLARVVEIFSKRLQVQEKLTAQIANTIQEALQPQGVAVIIQARHFCMCYRGVKQSNAWTTTSKLHGVFLEDPAARMELLTLIGSNPGRD

SEQ ID NO: 12687 - protein, 221 aa, unidentified
  source 1..221: note = Phycisphaeraceae bacterium
  REGION 1..221: note = tr|A0A1Z9Q8Z0|A0A1Z9Q8Z0_9BACT GTP cyclohydrolase 1; OS = Phycisphaeraceae bacterium TMED231 OX=1986831 GN=folE; PE = 3 SV=1
  VARIANT 83: note = Xaa can be any naturally occurring amino acid
MEAATIFDPSLHRRSSVLEPRPYTEFDPESDASIEAMAHVKSLLGFIGDDPEREGLVETPKRVIKAMNEHYWGYRADPFEPLXKTFSEVENYDELVLLQNMEIQSHCEHHMVPFVGKAHVAYIPRGRVVGLSKLARVVEVFSKRLQVQEKLTAQIANTIQEALNPQGVAVIIQARHFCMCYRGVKQSNAWTTTSKLHGVFLEDSAARMELLTLIGSNPGRD

SEQ ID NO: 12688 - protein, 279 aa, unidentified
  source 1..279: note = Phycisphaeraceae bacterium
  REGION 1..279: note = tr|A0A520Q6Z7|A0A520Q6Z7_9BACT GTP cyclohydrolase FolE2 OS=Phycisphaeraceae bacterium OX=2026777 GN=folE2; PE = 3 SV=1
MATTTTEINLPDIQATPDQRATAIAAVGIRGLELPLQLDAGDGRLQTTLGTWDLAVGLAQGVRGTHMSRFVELASRFSADDALPVSRETLEDFSADLLDRLEAEDGRVRIKGRFLLRRSSPVTEIDLPVPFDFAWKLRARRVERKIQTKLVTEVGVLATSLCPCSREISTYGAHNQRARVRIGVTGPVSLSELVEVAESSASCTVFPLLKRPDEKAFTETAYERPRFVEDLVREVATGLRAIPGVGRFKIKAVNEESIHAHDAWAIVKGCGDDPTSQLA

SEQ ID NO: 12689 - protein, 224 aa, unidentified
  source 1..224: note = Phycisphaerae bacterium
  REGION 1..224: note = tr|A0A5C5W634|A0A5C5W634_9BACT GTP cyclohydrolase 1; OS = Phycisphaerae bacterium RAS1 OX=2528034 GN=folE PE=3; SV = 1
MKSKLESKSRFHASASTAPSGDGDAPRGVALSQPAPAPVDQPRIERAVREILLAIGEDPQREGLRKTPARVARMYAELFSGLQEDPERHLEATFDEGHHEMVVLREVAFNSMCEHHLMPFEGHAHIAYIPGGRVLGLSKLARIVDAYSRRPQVQERLTSQIADLLAHKLQVKGCAVVLEAVHTCMTCRGVKKSGSVMVTSALRGLMQTNQSTRSEALSLLHRRA

SEQ ID NO: 12690 - protein, 188 aa, unidentified
  source 1..188: note = Phycisphaerae bacterium
  REGION 1..188: note = tr|A0A0S8HLJ0|A0A0S8HLJ0_9BACT GTP cyclohydrolase 1; OS = Phycisphaerae bacterium SM23_33 OX=1703412 GN=folE PE=3; SV = 1
MNEERVAELVRELLIELGDDPDRDGLRRTPIRVAKAMAFLTQGYRTDPKAIARDAVFESHANNMIIARDIEVYSLCEHHILPFYGRCHIGYIARDKLVGVSKLARIVDCHARRLQIQERLTAQIAQEVMEAVNAAGVGVVMECRHLCMMMRGVEKQNSIMITSSVLGCFHDDAATRGEFLDLIGRPAV

SEQ ID NO: 12691 - protein, 190 aa, unidentified
  source 1..190: note = Phycisphaerales bacterium
  REGION 1..190: note = tr|A0A353P054|A0A353P054_9BACT GTP cyclohydrolase 1; OS = Phycisphaerales bacterium OX=2052180 GN=folE PE=3 SV=1
MAKKKVDIGKIEKAVTDILLAIGEDINREGLKLTPKRVAGMYAELLAGESEDPTQYIKSVFNEKCDEIILLRDIPFYSVCEHHMMPFIGKAHVAYLPQDCVLGVSKLARVVDCFARRLQIQERLTSQIADFLIEHINPQGVAVVIEASHSCMTIRGIKKPGSTMVTSALRGIFKKDPRSRAEVLSLMHNA

SEQ ID NO: 12692 - protein, 210 aa, unidentified
  source 1..210: note = Phycisphaerales bacterium
  REGION 1..210: note = tr|A0A3B8V8E6|A0A3B8V8E6_9BACT GTP cyclohydrolase 1; OS = Phycisphaerales bacterium OX=2052180 GN=folE PE=3 SV=1
MIHDARTCREIEATTDSDDRSTPSFDQPRIEAAVREILLAIGENPDREGLLDTPSRVARAYGEMFGGLDQSPAAHLARQFPQDGSDPVMVTDIPFTSMCEHHLLPFTGVAHIAYQPQHGRVVGLSKLARTVQILARRPQQQERLTQQVREAIEEHLDPAGVLVMLEATHSCMQIRGAKAHGASMKTRSVGGRWERDAATRREIQEMMVGK

SEQ ID NO: 12693 - protein, 213 aa, unidentified
  source 1..213: note = Phyllobacteriaceae bacterium
  REGION 1..213: note = tr|A0A2E1XW08|A0A2E1XW08_9RHIZ GTP cyclohydrolase 1; OS = Phyllobacteriaceae bacterium OX=1871068 GN=folE PE=3; SV = 1
MDAIATNISSLTETTMESPAIERPSREEAEAAVRTLLRWVGDNPDREGLVDTPARVVKAYEEMFSGYAANPSEELGRTFEEVAGYDDLVLVRDIHFHSHCEHHMVPIIGRAHVAYLPDGKVLGLSKIARLVHVFARRLQTQEAMTAQIATSIQDVLNPRGVAVMIEAEHMCMAMRGIRQQGSTTTTSTFTGAFRDNPEEQVRFFTLARDMGRR

SEQ ID NO: 12694 - protein, 201 aa, unidentified; identical to SEQ ID NO: 11936
  source 1..201: note = Phyllobacteriaceae bacterium
  REGION 1..201: note = tr|A0A3A8ACS0|A0A3A8ACS0_9RHIZ GTP cyclohydrolase 1; OS = Phyllobacteriaceae bacterium StC1 OX=2184161 GN=folE; PE = 3 SV=1

SEQ ID NO: 12695 - protein, 208 aa, Phyllobacterium bourgognense
  REGION 1..208: note = tr|A0A368YZF4|A0A368YZF4_9RHIZ GTP cyclohydrolase 1; OS = Phyllobacterium bourgognense OX=314236 GN=folE PE=3 SV=1
MDAIIKVLQSAAAKQDNNRRPTQEEAEAAVRTLLLWAGDNPDREGLLDTPQRVANTYKELFSGYAQDPADVLGRTFEEVAGYEDMILIQDIPFFSHCEHHMVPIIGKAHVAYLPDGEKVVGLSKIARVVDMFAHRLQTQESMTAQIANAIQESLRPRGVAVMIEAEHMCMAMRGIRKAGSTTTTTTFTGSFKTEINEQVRFMTLVRGR

SEQ ID NO: 12696 - protein, 208 aa, Phyllobacterium brassicacearum
  REGION 1..208: note = tr|A0A2P7BMS1|A0A2P7BMS1_9RHIZ GTP cyclohydrolase 1; OS = Phyllobacterium brassicacearum OX=314235 GN=folE PE=3; SV = 1
MDAVIKNLQSAAVKQDNKRRPTQAEAEAAVRTLLLWAGDDPDREGLLDTPERVAKAYRELFSGYSQDPADVLGRTFEEIAGYEDIVLIQDIPFFSHCEHHMVPIIGKAHVAYLPDGEKVVGLSKIARVVDIYAHRLQTQEAMTAQIANAIQESLQPRGVAVMIEAEHMCMSMRGIRKSGSMTTTTTFTGTYKTDVNEQVRFMTLVRGR

SEQ ID NO: 12697 - protein, 208 aa, unidentified
  source 1..208: note = Phyllobacterium endophyticum
  REGION 1..208: note = tr|A0A2P7AV30|A0A2P7AV30_9RHIZ GTP cyclohydrolase 1; OS = Phyllobacterium endophyticum OX=1149773 GN=folE PE=3; SV = 1
MDAIIKVLQSSTGKQDITRRPTQEEAEAAVRTLLLWAGDNPDREGLLDTPQRVANTYKELFSGYAQDPADVLGRTFEEVAGYEDMILIQDIPFFSHCEHHMVPIIGKAHVAYLPDGEKVVGLSKIARVVDIFAHRLQTQESMTAQIAAAIQDSLRPRGVAVMIEAEHMCMAMRGIRKSGSVTTTTTFTGSFKTEVNEQVRFMTLVRGR

SEQ ID NO: 12698 - protein, 208 aa, Phyllobacterium leguminum
  REGION 1..208: note = tr|A0A318T2M4|A0A318T2M4_9RHIZ GTP cyclohydrolase 1; OS = Phyllobacterium leguminum OX=314237 GN=folE PE=3 SV=1
MDAILNLRENAARQGEKTLTRPTREEAEAAVRTLLLWAGENPDREGLLDTPKRVAKSYGELFSGYNESPEEVLGTTFEEVSGYNDPVLVKDIPFFSHCEHHMVPIIGKAHIAYLPDDRVVGLSKIGRLVDVFGRRLQTQESITAQIADAMDTILHPRGVAVMIEAEHLCMSMRGVKKQGSTTITTTFRGTYRDDANAQARFMTMIRLG

SEQ ID NO: 12699 - protein, 208 aa, Phyllobacterium myrsinacearum
  REGION 1..208: note = tr|A0A2S9JZL9|A0A2S9JZL9_9RHIZ GTP cyclohydrolase 1; OS = Phyllobacterium myrsinacearum OX=28101 GN=folE PE=3 SV=1
MDAVIKSLQSPTGNQNNLRRPTQEEAEAAVRTLLLWAGDNPDREGLLDTPQRVAKAYKELFSGYHEDPEEVLGRTFEEVAGYDDIVFIKDIPFFSHCEHHMVPIIGKAHVAYLPDGEKVVGLSKIARVVHIYARRLQTQESMTAQIANAIQGALRPRGVAVMIEAEHMCMAMRGIRVSGSTTTTTTFTGAFKSDVNEQVRFMTLLKGR

SEQ ID NO: 12700 - protein, 207 aa, unidentified
  source 1..207: note = Phyllobacterium salinisoli
  REGION 1..207: note = tr|A0A368K567|A0A368K567_9RHIZ GTP cyclohydrolase 1; OS = Phyllobacterium salinisoli OX=1899321 GN=folE PE=3 SV=1
MDAILNLRGTLARPAKSVVRPTQKEAEAAVRTLLLWAGDDPDREGLLDTPKRVVKSYKELFSGYNESPEEVLGTTFEEVSGFNDAVLVKDIEFHSHCEHHMLPVVGKAHIAYLPDGKVVGLSKIARLVDIFARRLQTQESITAQIADAMDTILRPRGVAVMIEADHMCMSMRGIRKQGSTTITTTFRGAYQEDINEQVRFMTMVRHG

SEQ ID NO: 12701 - protein, 208 aa, unidentified
  source 1..208: note = Phyllobacterium sophorae
  REGION 1..208: note = tr|A0A2P7B9L9|A0A2P7B9L9_9RHIZ GTP cyclohydrolase 1; OS = Phyllobacterium sophorae OX=1520277 GN=folE PE=3 SV=1
MDAVIKNLQSAAVKQNNTRRPTQEEAEAAVRTLLLWAGDNPDREGLLDTPERVAKAYKELFSGYTQEPADVLGRTFEEIAGYEDIVLIQDIPFFSHCEHHMVPIIGKAHVAYLPDGEKVVGLSKIARVVDIYAHRLQTQEAMTAQIANAIQDSLQPRGVAVMIEAEHMCMSMRGIRKSGSTTTTTTFTGAYKTDVNEQVRFMTLVKGR

SEQ ID NO: 12702 - protein, 208 aa, Phyllobacterium sp.
  REGION 1..208: note = tr|A0A1H0VBI3|A0A1H0VBI3_9RHIZ GTP cyclohydrolase 1; OS = Phyllobacterium sp. OV277 OX=1882772 GN=folE PE=3 SV=1
MDAVIKSLQSTTVNQNNLRRPTQEEAEAAVRTLLLWAGDNPDREGLLDTPQRVAKAYKELFSGYDESPDDVLGRTFEEVAGYDDIVFIKDIPFFSHCEHHMVPIIGKAHVAYLPDGEKVVGLSKIARVVHMFARRLQTQESMTAQIANAIQDSLRPRGVAVMIEAEHMCMAMRGIRVSGSTTTTTTFTGAFKADVNEQVRFMTLLKGR

SEQ ID NO: 12703 - protein, 208 aa, Phyllobacterium sp.
  REGION 1..208: note = tr|J3HSV9|J3HSV9_9RHIZ GTP cyclohydrolase 1; OS = Phyllobacterium sp. YR531 OX=1144343 GN=folE PE=3 SV=1
MDAVVKNLQSATAKQNNVRRPTQEEAEAAVRTLLLWAGDNPDREGLLDTPERVVKSYKELFSGYALDPADVLGRTFEEVAGYEDMVLIQDIPFFSHCEHHMVPIIGKAHVAYLPDGEKVVGLSKIARVVDIFAHRLQTQESMTAQIASSIQDSLRPRGVAVMIEAEHMCMAMRGIRKSGSLTTTTTFTGSFRNEVNDQVRFMTMVRGR

SEQ ID NO: 12704 - protein, 208 aa, unidentified
  source 1..208: note = Phyllobacterium zundukense
  REGION 1..208: note = tr|A0A2N9W4D7|A0A2N9W4D7_9RHIZ GTP cyclohydrolase 1; OS = Phyllobacterium zundukense OX=1867719 GN=folE PE=3 SV=1
MDAVIKNLQSAAVKQNNTRRPTQEEAEAAVRTLLLWAGDDPEREGLLDTPERVVKAYKELFSGYSQNPADVLGRTFEEIAGYEDIVLIQDIPFFSHCEHHMVPIIGKAHVAYLPDGEKVVGLSKIARVVDIYAHRLQTQEAMTAQIANAIQDSLQPRGVAVMIEAEHMCMSMRGIRKSGSTTTTTTFTGAYKIDVNEQVRFMTLVKGR

SEQ ID NO: 12705 - protein, 200 aa, unidentified
  source 1..200: note = Phytoactinopolyspora sp.
  REGION 1..200: note = tr|A0A329QGR1|A0A329QGR1_9ACTN GTP cyclohydrolase 1; OS = Phytoactinopolyspora sp. YIM 96934 OX=1981511 GN=folE; PE = 3 SV=1
MTKPARPANSTAGAFDHERVEAAVRELLVAIGEDPEREGLAETPQRVARAYAEMFSGLREDPAQALTTTFELGHDEMILVKDIEITSTCEHHLVPFYGHAHIGYVPGNDGRIAGLSKLARLVDVFAKRPQVQERLTTQVADSLVDLMKPTGVIVVIEAEHLCMTMRGVRKPGSKTVTSAVRGQLRDPATRSEAMSLIIGR

SEQ ID NO: 12706 - protein, 221 aa, unidentified; identical to SEQ ID NO: 8737
  source 1..221: note = Phytobacter diazotrophicus
  REGION 1..221: note = tr|A0A4R4B3V3|A0A4R4B3V3_9GAMM GTP cyclohydrolase 1; OS = Phytobacter diazotrophicus OX=395631 GN=folE PE=3 SV=1

SEQ ID NO: 12707 - protein, 221 aa, unidentified; identical to SEQ ID NO: 8737
  source 1..221: note = Phytobacter ursingii
  REGION 1..221: note = tr|A0A0G3Q7D0|A0A0G3Q7D0_9GAMM GTP cyclohydrolase 1; OS = Phytobacter ursingii OX=1972431 GN=folE PE=3 SV=1

SEQ ID NO: 12708 - protein, 249 aa, unidentified
  source 1..249: note = Phytobacter ursingii
  REGION 1..249: note = tr|A0A508UD33|A0A508UD33_9GAMM Putative GTP cyclohydrolase 1 type 2 OS=Phytobacter ursingii OX=1972431; GN = ybgI PE=4 SV=1
MKNTELEKLINEKLNSAAFSDYGPNGLQVEGRETVKKIITGVTASQALLDEAVRQEADAVIVHHGYFWKNEPAIIRGMKRNRLKTLLANDINLYGWHLPLDAHPELGNNVQLASLLGITVMGTVDGDELLPWGELSMPVPGPELASWIEARLGRRPLWSGDTGPELIKRVAWCTGGGQGFIDNAARFGVDAFITGEVSEQTIHSAREQNLHFYAAGHHATERGGIRALSEWLNENTDLDVTFIDIPNPA

SEQ ID NO: 12709 - protein, 313 aa, unidentified
  source 1..313: note = Pigmentiphaga aceris
  REGION 1..313: note = tr|A0A5C0B4P2|A0A5C0B4P2_9BURK GTP cyclohydrolase FolE2 OS=Pigmentiphaga aceris OX=1940612 GN=folE2 PE=3 SV=1
MIQPLPDVATTESPAVALPLDWVGMDGIDLPIQLGGMRIPASVDVAVDLPRADVKGIHMSRLHRLLNEVAEHRELTPELLAMLLQDMVDSHADCGTTAARAVWRIKLLRARPALVTPGLSGWQAYPVTLTAQWRDGAMSLRLGVEVTYSSTCPCSAALSRQVLQDAFLRDFAGGTNLSPQAVAAWLAEHGSLATPHSQRSVAQVSVDVLGVVEDAVGSHDDDPLEMGRAASDALGIETLIARIEAALGTAVQTAVKRADEQAFAQRNGQNLMYVEDATRRILASLDGAYQHVHVSVRHLESLHPHDAVASGWA

SEQ ID NO: 12710 - protein, 187 aa, unidentified
  source 1..187: note = Pigmentiphaga aceris
  REGION 1..187: note = tr|A0A5C0AZH2|A0A5C0AZH2_9BURK GTP cyclohydrolase 1; OS = Pigmentiphaga aceris OX=1940612 GN=folE PE=3 SV=1
MSTTEFNENDWRRLLETLGEDPSRPGLVETPSRVAKAWQHWTSGYGQEPAEILKVFEDGAEEYNELIMVRNIPVYSHCEHHLAPFFGTATIGYTPNGRIVGLSKLTRLMDCFAKRLQVQERLTIQVANALMEHLQPKSVGVMIRCRHMCMESRGIRTPGEETVTSALLGELQTNLALRTEFLSLARG

SEQ ID NO: 12711 - protein, 181 aa, Pigmentiphaga kullae
  REGION 1..181: note = tr|A0A4Q7N8Q0|A0A4Q7N8Q0_9BURK GTP cyclohydrolase 1; OS = Pigmentiphaga kullae OX=151784 GN=folE PE=3 SV=1
MSLEQNYTSILEQLGEDPGREGLRDTPKRAAKAMKYLCQGYTQNLDEIVNGALFSSDTNEMVLVKNIELYSLCEHHLLPFIGKAHVAYLPNGKVLGLSKVARIVDMYARRLQIQENLCLQIAEAVQEVTDALGVAVVIEAQHMCMMMRGVEKQNSSMVSSVMLGAFRENPSTRAEFLELIR

SEQ ID NO: 12712 - protein, 181 aa, Pigmentiphaga sp.
  REGION 1..181: note = tr|A0A208XK51|A0A208XK51_9BURK GTP cyclohydrolase 1; OS = Pigmentiphaga sp. NML080357 OX=2008675 GN=folE PE=3 SV=1
MSLEQHYTSILEKLGEDPHREGLRDTPKRAAKAMKYLCQGYSQNLDEIVNGALFSSDTNEMVLVKNIELYSLCEHHLLPFIGKAHVAYLPNGRVLGLSKVARIVDMYARRLQIQENLCLQIAEAVQQVTDALGVAVVIEAQHMCMMMRGVEKQNSSMVSSVMLGAFRENPSTRAEFLELIR

SEQ ID NO: 12713 - protein, 181 aa, Pigmentiphaga sp.; identical to SEQ ID NO: 12711
  REGION 1..181: note = tr|A0A3G8GPC5|A0A3G8GPC5_9BURK GTP cyclohydrolase 1; OS = Pigmentiphaga sp. H8 OX=2488560 GN=folE PE=3 SV=1

SEQ ID NO: 12714 - protein, 201 aa, unidentified
  source 1..201: note = Pimelobacter sp.
  REGION 1..201: note = tr|A0A2E0MUE1|A0A2E0MUE1_PIMSR GTP cyclohydrolase 1; OS = Pimelobacter sp. (strain R48) OX=51662 GN=folE PE=3 SV=1
MALPEQDVATVPDFDHERAAAAVRELLHAIGEDPDREGLRETPDRVARAYAELTAGLRERPEDVLTTTFDLGHEEMVLVRDIELWSMCEHHLVPFTGVAHVGYIPAASGKITGLSKLARLVDVYAKRPQVQERLTTQVAEALMRILDARGVIVVIEAEHLCMTMRGVRKAGARTITSAVRGVMLTSSSTRAEAMALIHHHR

SEQ ID NO: 12715 - protein, 221 aa, Pirellula sp.
  REGION 1..221: note = tr|A0A142Y4V3|A0A142Y4V3_9PLAN GTP cyclohydrolase 1; OS = Pirellula sp. SH-Sr6A OX=1632865 GN=folE PE=3 SV=1
MISKPTHPVLDQGEESVAIPLRSSKSHNETKSPVDHKRIERAVREILIAVGEDPDREGLLETPARVARMYAEVFAGLHKDPRVHLSRVFTEGYDEIVLLKDIDFHSMCEHHLLPFHGRAHVGYLPNGKVVGLSKMARVVDEVARKPQVQERMTETIADMMEQELGARGVVVMIEASHSCMTMRGIKKSGGMCVTSAMRGVFRENLSSRAEILGLIMNQRHG

SEQ ID NO: 12716 - protein, 260 aa, Pirellula sp.
  REGION 1..260: note = tr|A0A142Y240|A0A142Y240_9PLAN GTP cyclohydrolase 1 type 2 OS=Pirellula sp. SH-Sr6A OX=1632865 GN=VN12_12050; PE = 4 SV=1
MTNLNEVLDFLDCIAPLRTAEDWDNVGLLLGDPKDKVGKVMTCLTITDSVLQEAVGMGIDLLVTHHPLPFKPLQRITSSTTTGRLLLDAARNRIAIYSPHTAWDNADEGINAQLANMVELTQVQPMVRRMVAGTPIGSGRKGAFTEPASMEEIRERLSRHLPEMQWRCTHESNHSIRSMGIMCGGGGSLIAAAKSEGCEALLTGEATYHQCLEAEASGIALLLIGHFASEAFAMKKLATMIAASFPDLLVQASAMERSTF

SEQ ID NO: 12717 - protein, 191 aa, Pirellula staleyi
  REGION 1..191: note = tr|D2R3Q5|D2R3Q5_PIRSD GTP cyclohydrolase 1; OS = Pirellula staleyi (strain ATCC 27377 / DSM 6068 / ICPB 4128) OX=530564 GN=folE PE=3 SV=1
MKSPVDLQRIERAVREILAAVGEDPDREGLLETPARVARMYAEMFSGLKLDPREHTRKFFTEQYDEVVLVRDISFCSMCEHHLLPFIGHAHVAYIPNGKVIGLSKIARVVEVISRRPQVQERMTEDIANLLVDELHAKGVAVVVEASHSCMTIRGVRKPGSSMVTSAMKGLFRSNLSTRAEVMQLIYGSKR

SEQ ID NO: 12718 - protein, 307 aa, Piscibacillus halophilus
  REGION 1..307: note = tr|A0A1H9IHD9|A0A1H9IHD9_9BACI GTP cyclohydrolase FolE2 OS=Piscibacillus halophilus OX=571933 GN=folE2 PE=3; SV = 1
MNEIKTKKQLPSKEERHKLFGSVEPGPRTKPEEKSKMPDLQNTKKDFLFELDAVGVQNVKHPIVVPSTLNPKEQSTIGNFYFASTISQDSKGTNMSRFTEQLNVYHANGFKVDIKTLKQFVKELQGRLKQKDAELSVEFPWFFEREAPYTGKSGMNHAEAWIKVNYHHENGYDVKVGLKGKITTLCPCSKEISEYSAHNQRGNVIIEVTLDPDYDETNIDWKEVLLEATESNASARIHPVLKRPDEKMVTEQAYENPRFVEDMVRLVSSDLYELDFVKQFHVKCVNEESIHLHDAIASITYDKRKEK

SEQ ID NO: 12719 - protein, 273 aa, unidentified
  source 1..273: note = Piscirickettsia litoralis
  REGION 1..273: note = tr|A0A1E3G9K2|A0A1E3G9K2_9GAMM GTP cyclohydrolase FolE2 OS=Piscirickettsia litoralis OX=1891921 GN=folE2; PE = 3 SV=1
MRNDMPTASIADIQSSEDPRNIPINHVGIRQVRHPIQVSDRSNTVLGTVGTFNMYVDLPAHVKGTHMSRFVALLHESETAYSVQNFNSLALEMAERLQAQKGRIEMQFAYFRKKTAPISQQQSYLDYEVTFLGKANNGKASTHLKVVVPVTSLCPCSKAISKYGAHNQRSHITVEIETCDLVWIDDLIELVEAQASSELYGLIKRADEKYVTETAYENPKFVEDLVRDVAEQLNNDKRITAYKVESENFESIHNHSAYAVIEQRKEEASSTSI

SEQ ID NO: 12720 - protein, 271 aa, Piscirickettsia salmonis
  REGION 1..271: note = tr|A0A0K2L4W7|A0A0K2L4W7_PISSA GTP cyclohydrolase FolE2 OS=Piscirickettsia salmonis OX=1238 GN=folE2 PE=3; SV = 1
MPTSSIADIQNLEDPRNIPINHVGIRQVRHPIQISDRSHAVLGTVGTFKMYVDLPAHIKGTHMSRFIALLHEHEQTAYSVQNFNQLTLAMTERLQAQKGLIEMQFTYFRKKTAPISQQQSYLDYEVTFLGKADGNNAQTNLRVVIPVTSLCPCSKAISKYGAHNQRSHITVEIETCDLVWVDDLIELAEAQASSELYGLIKRADEKYVTETAYENPKFVEDLVRDVAEQLNHDQRISAYKVESENFESIHNHSAYAVIEQRKKPNTDSRRF

SEQ ID NO: 12721 - protein, 252 aa, Piscirickettsia salmonis
  REGION 1..252: note = tr|A0A0K2DUX5|A0A0K2DUX5_PISSA Nif3-like dinuclear metal center hexameric protein OS=Piscirickettsia salmonis; OX = 1238 GN=KW89_659 PE=4 SV=1
MIGLFELVDYLNDLLEVKLFKDYAPNGLQVEGKKQIKRLITGVTATQALIDAAIDEHADAILVHHGFFWKSESPCVTGIKYQRLKKLLENDISLIAYHLPLDGHEKYGNNVMLAERLGLEITGSLPVSMKPAIGNIGQLKKAMQIEAFSGLLHQHLLREPIVVRAGDHAIKTVAWCTGAAESFIEAAATLQADAYVTGEISEPVVHLARELGVHFFAAGHHATERYGVQALGQHVQNHYGIEHLFIDIDSPA

SEQ ID NO: 12722 - protein, 182 aa, unidentified
  source 1..182: note = Piscirickettsiaceae bacterium
  REGION 1..182: note = tr|A0A2A4SPU0|A0A2A4SPU0_9GAMM GTP cyclohydrolase 1; OS = Piscirickettsiaceae bacterium OX=2030828 GN=folE PE=3; SV = 1
MEDLYKKIILEIGEDVERQGLVDTPKRAAKAMTFLTSGYQKNIHDVVNGAVFNSAADDMVIVQNIELYSMCEHHLLPFIGKCHVAYLPSGKVLGLSKVARIVDMFARRLQIQEQLTTQIADSILEVTGAKGVAVVVEAKHLCMMMRGVEKQNSLMTTSSMLGQFRKNAETRAEFLSLLKMSS

SEQ ID NO: 12723 - protein, 316 aa, unidentified
  source 1..316: note = Piscirickettsiaceae bacterium
  REGION 1..316: note = tr|A0A2M7M914|A0A2M7M914_9GAMM GTP cyclohydrolase FolE2 OS=Piscirickettsiaceae bacterium CG_4_10_14_3_um_filter_44_349 OX=1974075 GN=folE2 PE=3 SV=1
MTKHMPDIACQPHQAPQGKLNWVGMSGIELPILIEQAHQKTLTLSSQAQAYVSLDDPLSKGIHMSRLYLLLDEMGSNAPLTPKRILTLLNTFIDSHQGLSQNAFVEFKFDYYERRQSLKTDNSGWKHYPCTLRGQLRNGQYDCEISISVPYSSTCPCSAALSRQLIQEAFQQQFSDQTLDFQQIIDWLGTPEGICATPHSQRSYAQIKLKVTADHALNLSNVINQIEDAVKTPVQSTVKRQDEQEFARLNATNLMFCEDAARRLQSKLESCSDYIDYWVRVNHLESLHPHNAVAIVTKNVPSGYSDEPNFMDAFEH

SEQ ID NO: 12724 - protein, 185 aa, unidentified
  source 1..185: note = Pistricoccus aurantiacus
  REGION 1..185: note = tr|A0A5B8T039|A0A5B8T039_9GAMM GTP cyclohydrolase 1; OS = Pistricoccus aurantiacus OX=1883414 GN=folE PE=3 SV=1
MTEQLAEHYRQIISALGEDPDREGLRDTPKRAAKAMQFLTHGYEQSLETLINGAIFESNTDEMVLVKDIELYSMCEHHLLPFIGKCHIAYMPRGRVLGLSKFARIVDMYARRMQIQEKLTREIAEAVLRVTQARGVAVVIEARHLCMMMRGVEKQNSSMTSSVMLGAFRDNQSTRQEFLTLVRSN

SEQ ID NO: 12725 - protein, 197 aa, unidentified
  source 1..197: note = Planctomicrobium piriforme
  REGION 1..197: note = tr|A0A1I3G749|A0A1I3G749_9PLAN GTP cyclohydrolase 1; OS = Planctomicrobium piriforme OX=1576369 GN=folE PE=3 SV=1
MSEETASQGKPVDQPRIERAVREILAAIGEDPDRNGLLETPARVARMYAELFSGLHLDPARHLKKTFEETYDELVLIRDITFNSMCEHHLLPFIGTAHVGYIPKGSVVGISKLARIVEEISHRPQVQERMTEQIADLLVQELDPKGAIVVIEAEHSCMTIRGVRKPGAMTITSAVRGLFRKNESSRAEAMSLINGHR

SEQ ID NO: 12726 - protein, 196 aa, Planctomyces sp.
  REGION 1..196: note = tr|A0A142YE19|A0A142YE19_9PLAN GTP cyclohydrolase 1; OS = Planctomyces sp. SH-PL62 OX=1636152 GN=folE PE=3 SV=1
MSESTPHHPFDLDRIRRAVREILLAVGEDPNREGLLETPDRVARMYAEVFQGLHQDPRIHLRKAFTHKCDEMVLIRDIRFVSFCEHHLLPVIGQAHVAYIPNGKVVGLSKIPRVIDVLAKRPQLQERLTEEVADLLMRELDARGVAVVIEASHSCMTIRGVQKPDSSFVTSAVRGGFKDDSATRAEVMSLIFGSRR

SEQ ID NO: 12727 - protein, 289 aa, Planctomyces sp.
  REGION 1..289: note = tr|A0A142WXA2|A0A142WXA2_9PLAN Putative GTP cyclohydrolase 1 type 2 OS=Planctomyces sp. SH-PL14; OX = 1632864 GN=VT03_15475 PE=4 SV=1
MSLREADYNQEGVALLATRIGRSRMRRVQDIMTFLEQFAPLQLAESWDNVGLLLGDRERTVSRVMTCLTLTPDVAEEAVDDKAQLIICHHPILFRAVKRLTSDTDEGRMLLQLMESRIAVYSPHTAFDSAAEGINASIAAGLKLEEVRPLRPHAIDPEGAVGGGRCGRLAMPIALRELIARAKKLLSAPAAKVVGDLNYPVQSVAIACGSGAEFLPDAVRAGCDVLITGEARFHACLEARSGPTALVLLGHYATERPGVERLAVQIAEKFAKITCWPSRKETDPVRWVG

SEQ ID NO: 12728 - protein, 217 aa, unidentified
  source 1..217: note = Planctomycetaceae bacterium
  REGION 1..217: note = tr|A0A1Z8MU34|A0A1Z8MU34_9PLAN GTP cyclohydrolase 1; OS = Planctomycetaceae bacterium TMED10 OX=1986833 GN=folE; PE = 3 SV=1
  VARIANT 208: note = Xaa can be any naturally occurring amino acid
MSISKEADQPMEGSLMGELDDREAGPSVGGVDHARIERAVREILWAVGENPDREGLVETPARVARMYAEVFSGLHEDPRPHLQKFFTETYDDIVLVRDISFNSFCEHHLCPFGGKAHIGYVPSGKVVGLSKLARVVEIVARRPQVQERMTETVADLLEDELDARGVAVVIEATHTCMTLRGVRKPGSLCVTSSMKGLFRQNASSRAEXMSLIYTNRR

SEQ ID NO: 12729 - protein, 229 aa, unidentified
  source 1..229: note = Planctomycetaceae bacterium
  REGION 1..229: note = tr|A0A350C7W6|A0A350C7W6_9PLAN GTP cyclohydrolase 1; OS = Planctomycetaceae bacterium OX=2026779 GN=folE PE=3 SV=1
MTMSIAVREMTVGDSWGDDHEQMEELSSRRATESREKTDSKVDHQAIRQAVRMILKAVGEDPDREGLLETPRRVAKMYEEMFAGLHLDPGRHLSVTFEETYDEIVLVKNIEFTSMCEHHLLPFRGVAHVAYIPNGRVTGLSKLARLVEEVARRPQVQERMTKTIADLLEERLGTSAVGVVVQAEHSCMSMRGVRKQGSMTVTSAMRGTFSRNAASRAELLSLIHGNSGR

SEQ ID NO: 12730 - protein, 190 aa, unidentified
  source 1..190: note = Planctomycetales bacterium
  REGION 1..190: note = tr|A0A1W9TB69|A0A1W9TB69_9BACT GTP cyclohydrolase 1; OS = Planctomycetales bacterium 4572_13 OX=1971638 GN=folE; PE = 3 SV=1
MKEVDLERIEKAVLEILEAVGEDPTREGLKDTPARVGRMYAELLEGMRHDPSEHLSSIFHETYDEIVLLRDIPFYSICEHHLMPFIGKAHLAYLPDGKVLGVSKLARIVDAFARRLQVQERLTDQIADFLMTNLKPKGVAVILEASHSCMTIRGIKKPGSMMVTSALRGIFKKDPRSRSEVLTLMHVDRA

SEQ ID NO: 12731 - protein, 195 aa, unidentified
  source 1..195: note = Planctomycetales bacterium
  REGION 1..195: note = tr|A0A1V4QWE5|A0A1V4QWE5_9BACT GTP cyclohydrolase 1; OS = Planctomycetales bacterium 4484_113 OX=1956161 GN=folE; PE = 3 SV=1
MSTKAIDRKRIERAVREILLAIGEDPEREGLRETPRRVAEMYEDILGGVREDGYELIRASLFTEKHSELVLLRGISFFSICEHHLLPFMGVAHIAYIAKGQIVGLSTILRAFSQLCRQPQIQERLTWQMADMMYDTLKPHGVAVVLEARHLCMELIGVKKPGTIVTTSALRGIFHKNEGSRQELFKLIQGRDKVV

SEQ ID NO: 12732 - protein, 280 aa, unidentified
  source 1..280: note = Planctomycetes bacterium
  REGION 1..280: note = tr|A0A5C6EME7|A0A5C6EME7_9BACT GTP cyclohydrolase 1 type 2 OS=Planctomycetes bacterium Poly59 OX=2528013; GN = Poly59_41400 PE=4 SV=1
MATLDAVCTIMARVAPLRLAESWDNVGLLAGDRAAKVEKIMACLTITPDVVDEAIAQNADLIVVHHPLPFKPMAKITTDSIPGAMLWKLIGAKIAIYSAHTAFDSATGGVNQMWAEALGLDRIRPLVELPIAAGTKQVGSSIVAVSSGQTVEGSGRYGRLPSPVTLESLASMAGEVSGGPRPRLVGAADQSVQAVAFACGSGGSFLAAAKRRGCHALVTGEATFHTCLEARSMGIGLVLLGHFHSERFAMERLSEALAAELPDLTVWASRDECDPLQQAD

SEQ ID NO: 12733 - protein, 187 aa, unidentified
  source 1..187: note = Planctomycetes bacterium
  REGION 1..187: note = tr|A0A1G2ZUZ0|A0A1G2ZUZ0_9BACT GTP cyclohydrolase 1; OS = Planctomycetes bacterium RBG_16_41_13 OX=1801966; GN = folE PE=3 SV=1
MIDKEKIQAAIRLFIEGIGEDPNREGLQETPERVAEMCEEIFAGIGQDSHSVIKVLKSEKYDEIVLLKDIPFYSMCEHHLLPFSGVAHVAYIPQGNRVTGISKLARVVNIEARRPQVQERLTTDIAESIMKALKPKGVLTIIEAEHLCMTMRGIKKPGTKVLTSVVRGIFRDNPATRAEVMALIKGH

SEQ ID NO: 12734 - protein, 114 aa, unidentified
  source 1..114: note = Planctomycetia bacterium
  REGION 1..114: note = tr|A0A257TWE8|A0A257TWE8_9BACT GTP cyclohydrolase 1; OS = Planctomycetia bacterium 21-64-5 OX=1970542; GN = B7Z73_07575 PE=3 SV=1
MCEHHMLPFLGEAHIGYLPAGKVIGLSKLARVVEMVARRPQVQERMTETIADLLVDELEAKGVAVVIEATHTCMTIRGIRKPGSLCVTSAMRGVFRSHLSSRSEIMNLIYGDRR

SEQ ID NO: 12735 - protein, 206 aa, unidentified
  source 1..206: note = Planctomycetia bacterium
  REGION 1..206: note = tr|A0A3D3KKF5|A0A3D3KKF5_9BACT GTP cyclohydrolase 1; OS = Planctomycetia bacterium OX=2052181 GN=folE PE=3 SV=1
  VARIANT 179: note = Xaa can be any naturally occurring amino acid
MDQEKIIKAMRLFLEGIGEDPDRPGLQETPKRVADMCKEIFGGLGVDAGKEIKVLQATGHDEIVLLKDLPFYSVCEHHVLPFIGTAHVAYIPQSGRITGISKLARVVELHAKKLQVQERLTTDIADSIMNALRPKGVLVVIQAEHLCMTMRGVKKAGSKVQTSVVRGIFRENPATRAEXRVSLRAKRSNPRLVCRCPIYGAIIMAR

SEQ ID NO: 12736 - protein, 247 aa, unidentified
  source 1..247: note = Planctopirus ephydatiae
  REGION 1..247: note = tr|A0A518GMT5|A0A518GMT5_9PLAN GTP cyclohydrolase 1; OS = Planctopirus ephydatiae OX=2528019 GN=folE PE=3 SV=1
MIMADEYSDDDGDCIHGKATLPHGSGSAIDVLGDSSQTQLLTSCHSSALPPSPRETRAEPDLPRIQRAVREILSAIGENPDREGLQETPARVARMFAELTAGLRCDPARHLERVFPEQYDELVLVKDISFNSMCEHHLLPFMGVAHIGYLPRGKVVGLSKLARIVDEISHQPQVQERMTQQIADLMQSVLDPKGVIVVLEATHTCMTIRGIRKPGSLTITSAVRGLFKTNQASRAEVMSLMQQRRSV

SEQ ID NO: 12737 - protein, 222 aa, unidentified
  source 1..222: note = Planctopirus hydrillae
  REGION 1..222: note = tr|A0A1C3E619|A0A1C3E619_9PLAN GTP cyclohydrolase 1; OS = Planctopirus hydrillae OX=1841610 GN=folE PE=3 SV=1
MPHGSGSAIDVLGDSGQTQLVTSGHSSALPPSPRETRAEPDLPRIQRAVREILSAIGENPDREGLQETPARVARMFAELTAGLRCDPARHLERVFPEQYDELVLVKDISFNSMCEHHLLPFMGVAHIGYLPRGKVVGLSKLARIVDEISHQPQVQERMTQQIADLMQSVLDPKGVIVVLEATHTCMTIRGIRKPGSLTITSAVRGLFKTNQASRAEVMSLMK

SEQ ID NO: 12738 - protein, 227 aa, unidentified
  source 1..227: note = Planctopirus limnophila
  REGION 1..227: note = tr|D5SRR0|D5SRR0_PLAL2 GTP cyclohydrolase 1; OS = Planctopirus limnophila (strain ATCC 43296 / DSM 3776 / IFAM 1008 / 290) OX=521674 GN=folE PE=3 SV=1
MPHGSNSAIDVLGDNSQTQLLTSSHSSALPPSPREMRAEPDLPRIQRAVREILSAIGENPDREGLQETPARVARMFAELTAGLRCDPARHLERVFPEQYDELVLVKDISFNSMCEHHLLPFMGVAHIGYLPRGKVVGLSKLARIVDEISHQPQVQERMTQQIADLMQSVLDPKGVIVVLEATHTCMTIRGIRKPGSLTITSAVRGLFKTNQASRAEVMSLMQQRRSV

SEQ ID NO: 12739 - protein, 188 aa, Planifilum fimeticola
  REGION 1..188: note = tr|A0A2T0LDF9|A0A2T0LDF9_9BACL GTP cyclohydrolase 1; OS = Planifilum fimeticola OX=201975 GN=folE PE=3 SV=1
MGVDHAKIEQAVRMILEAVGEDPDREGLVETPARVARMYEEIFSGLGQDPRDHFTVIFSEDHEELVLVKDIPFFSVCEHHLVPFFGKAHVGYIPRGGRVTGLSKLARAVEAVARRPQLQERITSTVADAIMERLEPHGVVVVVEAEHMCMTMRGVKKPGSKTVTSAVRGVFSQDAAARAEAFSLIGYR

SEQ ID NO: 12740 - protein, 188 aa, Planifilum fulgidum
  REGION 1..188: note = tr|A0A1I2L826|A0A1I2L826_9BACL GTP cyclohydrolase 1; OS = Planifilum fulgidum OX=201973 GN=folE PE=3 SV=1
MGVDHAKIEQAVRMILEAVGEDPDREGLVETPARVARMYEEIFSGLGQDPRDYFSVIFSEDHEELVLVKDIPFFSVCEHHLVPFFGKAHVGYIPRGGRVTGLSKLARAVEAVARRPQLQERITSTVADAIMERLEPHGVVVVVEAEHMCMTMRGVKKPGSKTVTSAVRGIFSRDAAARAEAFSLIGYR

SEQ ID NO: 12741 - protein, 367 aa, unidentified
  source 1..367: note = Planktomarina sp.
  REGION 1..367: note = tr|A0A2E0AF94|A0A2E0AF94_9RHOB GTP cyclohydrolase FolE2 OS=Planktomarina sp. OX=2024851 GN=folE2 PE=3 SV=1
MNIHSKDIDEVPSRLNAEQALKVLKSWSNRPGRDKIDDLDISIQNFFNGSLRNGYPDFVRSYPEDFAVDQAYKDGLPDLQNGPSSSIRGALQQIQHVGVSNFRLPVSFQTRDNGTLQLETSVTGTVSLDAGKKGINMSRIMRTFYRYAEETFSFDVIERALDDYKTDLESFDARIQMRFSFPVLVKSLRSELTGYQYYDLTLELVEINGDRQKIVHLDYVYSSTCPCSLELSEHARSERGQLASPHSQRSVARISVVIQPNQGCLWFEDLIDLCRRAVPTETQVMVKREDEQAFAELNAANPIFVEDAARLFCEQLQVEPRVGDFRVIASHQESLHSHDAISVLTDGVTFSQKSLDPGTFESLFHTG

SEQ ID NO: 12742 - protein, 363 aa, unidentified
  source 1..363: note = Planktotalea frisia
  REGION 1..363: note = tr|A0A1L9NYW7|A0A1L9NYW7_9RHOB GTP cyclohydrolase FolE2 OS=Planktotalea frisia OX=696762 GN=folE2 PE=3 SV=1
MNIQTPVADEIATREEAQAALVALMSWARGASTQELNAIDPKLRALIGSNEYPDLINDYPENFVVDPAYKATLPDLQNGPSSLIRGSQQLIQHVGISNFPLPIRFHTKHGNDLTLETSVTGTVSLDADKKGINMSRIMRTFYRRAEETFSFDVIEAALDDYKSDLESFDARLQMRFSFPVKIESLRSGLSGYQYYDISMELAEQNGVRQKFMHVDYVYSSTCPCSLELSEHARRTRGQLATPHSQRSVARISVELIGKSILWFEDLIDHCRKAVPTETQVMVKREDEQAFAELNAANPIFVEDAARLFCEQLLKDERIGDFRVVASHQESLHSHDAVSILTEGPSFAATSIDPKLFSTLFHVG

SEQ ID NO: 12743 - protein, 236 aa, unidentified
  source 1..236: note = Planktothricoides sp.
  REGION 1..236: note = tr|A0A0M1JRI7|A0A0M1JRI7_9CYAN GTP cyclohydrolase 1; OS = Planktothricoides sp. SR001 OX=1705388 GN=folE PE=3 SV=1
MTIASSHGSNLRFDLSDSLNGDRRIQTRPDRNLANGSNPNLHPPTDEDYERMVGAVKDILLSVGEDPQREGLLKTPKRVAESMRFLTSGYSQSLEELVNGAIFDEGHNEMVLVRDINFFSLCEHHMLPFMGKAHVAYIPNQKVVGLSKLARIVEMFSRRLQVQERLNRQVAEAIQEILEPRGVAVVMEASHMCMVMRGVQKPGSWTVTSAMLGIFSEDQKTREEFLNLIRHQPAFF

SEQ ID NO: 12744 - protein, 229 aa, Planktothrix agardhii
  REGION 1..229: note = tr|A0A2Z6CDF6|A0A2Z6CDF6_PLAAG GTP cyclohydrolase 1; OS = Planktothrix agardhii NIES-204 OX=282423 GN=folE PE=3; SV = 1
MTISTNTNGVKNEDTTGFSIRPDRTLSYSQSTPSQLCTEVSDEEMMGAVRTMLLGVGEDPEREGLLKTPKRVAEAMRFLTSGYSQSLEDLVNGAIFDEGHEEMVLVRDITFFSMCEHHMLPFMGRAHVAYIPNQKVIGLSKLARIVEMYSRRLQVQERLTRQIAEAVQSVLEPQGVAIVMEATHMCMAMRGVQKPGSWTVTSAMVGVFQDEQKTREEFLNLIRHQPSFF

SEQ ID NO: 12745 - protein, 212 aa, Planktothrix agardhii
  REGION 1..212: note = tr|A0A073CM09|A0A073CM09_PLAAG GTP cyclohydrolase 1; OS = Planktothrix agardhii NIVA-CYA 126/8 OX=388467 GN=folE; PE = 3 SV=1
MTSELKFPLIDSSISVKTQGEPVVSEAEMIQAVRTLLLGLGENPDREGLLDTPKRVVKALKFLTQGYNQSLDELLNGAVFTENTDEMVLVRDIDIFSSCEHHILPIIGRAHVAYIPNGKVIGLSKIARICEMYGRRLQVQERLTAQIADALQGLLKPQGVAVVIEATHMCMVMRGVQKPGSWTVTSAMRGAFSEDPKTRQEFMSLIQHKSNF

SEQ ID NO: 12746 - protein, 229 aa, unidentified; identical to SEQ ID NO: 12744
  source 1..229: note = Planktothrix rubescens
  REGION 1..229: note = tr|A0A1J1L639|A0A1J1L639_PLARU GTP cyclohydrolase 1; OS = Planktothrix rubescens OX=59512 GN=folE PE=3 SV=1

SEQ ID NO: 12747 - protein, 212 aa, unidentified
  source 1..212: note = Planktothrix rubescens
  REGION 1..212: note = tr|A0A1J1L3L5|A0A1J1L3L5_PLARU GTP cyclohydrolase 1; OS = Planktothrix rubescens OX=59512 GN=folE PE=3 SV=1
MTSELTFPFIDSSISVKTQGEPVVSEAEMIQAVRTLLLGLGENPDREGLLDTPKRVVKALKFLTQGYNQSLDELLNGAVFTENTDEMVLVRDIDIFSSCEHHILPIIGRAHVAYIPNGKVIGLSKIARICEMYGRRLQVQERLTAQIADALQGLLKPQGVAVVIEATHMCMVMRGVQKPGSWTVTSAMRGAFSEDPKTRQEFMSLIQHKSNF

SEQ ID NO: 12748 - protein, 229 aa, Planktothrix sp.
  REGION 1..229: note = tr|A0A1T4ZC89|A0A1T4ZC89_9CYAN GTP cyclohydrolase 1; OS = Planktothrix sp. PCC 11201 OX=1729650 GN=folE PE=3 SV=1
MTISSNTNGLKNEDKTGFSIRPDRTLSYSQSTHSQLDSEVSDEEMMNAVRTMLLGVGEDPEREGLLKTPKRVAEAMRFLTSGYNQSLEDLVNGAIFDEGHEEMVLVRDITFFSMCEHHMLPFMGRAHVAYIPNQKVIGLSKLARIVEMYSRRLQVQERLTRQIAESIQTVLEPQGVAVVMEATHMCMAMRGVQKPGSWTVTSAMVGVFQDEQKTREEFLNLIRHQPAFF

SEQ ID NO: 12749 - protein, 151 aa, Planktothrix sp.
  REGION 1..151: note = tr|A0A354WFA6|A0A354WFA6_9CYAN GTP cyclohydrolase 1 (Fragment) OS=Planktothrix sp. UBA10369 OX=2055760; GN = DDZ60_13255 PE=3 SV=1
MTSELKFPLIDSSISVKTQGEPVVSEAEMIQAVRTLLLGLGENPDREGLLDTPKRVVKALKFLTQGYNQSLDELLNGAVFTENTDEMVLVRDIDIFSSCEHHILPIIGRAHVAYIPNGKVIGLSKIARICEMYGRRLQVQERLTAQIADAL

SEQ ID NO: 12750 - protein, 239 aa, unidentified
  source 1..239: note = Planktothrix tepida
  REGION 1..239: note = tr|A0A1J1LF19|A0A1J1LF19_9CYAN GTP cyclohydrolase 1; OS = Planktothrix tepida PCC 9214 OX=671072 GN=folE PE=3 SV=1
MTISPSTNGVKNLEISITEAKNEDTSGFPIRPDRTLSHGHSTHSQPCTEVSDEQMMDAVRTMLLGVGEDPEREGLLKTPKRVAEAMRFLTSGYNQSLEDLVNGAIFDEGHEEMVLVRDITFFSMCEHHMLPFMGRAHVAYIPNQKVIGLSKLARIVEMYSRRLQVQERLTRQIAEAIKTILEPQGVAVVMEATHMCMAMRGVQKPGSWTVTSAMVGLFQDEQKTREEFLNLIRHQPAFF

SEQ ID NO: 12751 - protein, 303 aa, Planococcus antarcticus
  REGION 1..303: note = tr|A0A1C7DE92|A0A1C7DE92_9BACL GTP cyclohydrolase FolE2 OS=Planococcus antarcticus DSM 14505 OX=1185653; GN = folE2 PE=3 SV=1
MEGVKKVKFPSKAERLVLFGSKPPGPRNKPVEKEEMKDLQNQSGKYLFPIQAVGVSNVKYPIGISSSLDPAKQQALATFSLTASLSSSMKGTNMSRFIEQLEETRVAGELTADFESLTELSRKLAWRLNQQEVCVRVEFPLLFARKGPSTHLEGLNHAQATMEVNKVESSTRKKAILTCAVTTLCPCSKEISEYSAHNQRGYITMEIELNERYTEGWDWKADLLEAAESNASALIHPVLKRPDEKMVTENAYENPRFVEDMVRLVAADLYEIDYIDRFRVECRNEESIHLHDAYAELTVSKNT

SEQ ID NO: 12752 - protein, 194 aa, Planococcus antarcticus
  REGION 1..194: note = tr|A0A1C7DGY1|A0A1C7DGY1_9BACL GTP cyclohydrolase 1; OS = Planococcus antarcticus DSM 14505 OX=1185653 GN=folE; PE = 3 SV=1
MIDVKAQKVDLDKIEQAVLMILEAVGEDVNREGLKDTPKRVAKMYAEVFAGLKEDPREYFKTIFHEGHEELVLVKDIPFYSMCEHHLVPFFGKAHIAYIPRDGIVTGLSKLARAVETVAKRPQLQERITSTIADSLMETLNPHGVYVMIEAEHMCMTMRGIKKPGSKTVTAVSRGVFETDDVKRSEVITYINMN

SEQ ID NO: 12753 - protein, 194 aa, Planococcus citreus
  REGION 1..194: note = tr|A0A497YHQ4|A0A497YHQ4_9BACL GTP cyclohydrolase 1; OS = Planococcus citreus OX=1373 GN=folE PE=3 SV=1
MIDMKSHNVDLDKIEQAVGMILEAVGEDVGREGLQDTPKRVAKMYAEVFAGLKEDPKEYFRTVFHENHEELVLVKDIPFYSMCEHHLVPFFGKAHIAYIPRDGVVTGLSKLARAVETVAKRPQLQERITSTIADSMMETLNPHGVYVMVEAEHMCMTMRGIKKPGSKTVTAVSRGILETDDIKRSEVITYINMD

SEQ ID NO: 12754 - protein, 175 aa, Planococcus donghaensis
  REGION 1..175: note = tr|A0A1C7ELV9|A0A1C7ELV9_9BACL GTP cyclohydrolase 1; OS = Planococcus donghaensis OX=414778 GN=folE PE=3 SV=1
MILEAVGEDVSREGLQDTPKRVAKMYAEVFSGLKEDPKEYFKTVFHEGHEELVLVKDIPFYSMCEHHLVPFFGKAHIAYIPRDGVVTGLSKLARAVETVSKRPQLQERITSSIAESLMETLNPHGVYVMVEAEHMCMTMRGIKKPGAKTVTAVSRGILETDAVKRSEVITYINMN

SEQ ID NO: 12755 - protein, 194 aa, Planococcus donghaensis
  REGION 1..194: note = tr|E7RHC9|E7RHC9_9BACL GTP cyclohydrolase 1; OS = Planococcus donghaensis MPA1U2 OX=933115 GN=folE PE=3; SV = 1
MIDVKAQKVDLDKIEQAVSMILEAVGEDISREGLQDTPKRVAKMYAEVFSGLKEDPKEYFKTVFHEGHEELVLVKDIPFYSMCEHHLVPFFGKAHIAYIPRDGVVTGLSKLARAVETVSKRPQLQERITSSIAESLMETLNPHGVYVMVEAEHMCMTMRGIKKPGAKTVTAVSRGILETDAVKRSEVITYINMN

SEQ ID NO: 12756 - protein, 175 aa, unidentified
  source 1..175: note = Planococcus halocryophilus
  REGION 1..175: note = tr|A0A1C7DW37|A0A1C7DW37_9BACL GTP cyclohydrolase 1; OS = Planococcus halocryophilus OX=1215089 GN=folE PE=3 SV=1
MILEAVGEDTSREGLQDTPKRVAKMYAEVFSGLKEDPKEYFKTVFHEGHEELVLVKDIPFYSMCEHHLVPFFGKAHIAYIPRDGVVTGLSKLARAVETVSKRPQLQERITSSIAESLMETLNPHGVYVMVEAEHMCMTMRGIKKPGAKTVTAVSRGILETDAVKRSEVITYINMN

SEQ ID NO: 12757 - protein, 204 aa, unidentified
  source 1..204: note = Planococcus halotolerans
  REGION 1..204: note = tr|A0A365L2N3|A0A365L2N3_9BACL GTP cyclohydrolase 1; OS = Planococcus halotolerans OX=2233542 GN=folE PE=3 SV=1
MNSSFTGGTIVTDTELQNVDLEKIEKAVSMILEAVGEDISREGLLDTPKRVAKMYAEVFSGLKEDPKEYFKTVFHEGHEELVLVKDIPFYSMCEHHLVPFFGKAHIAYIPRDGVVTGLSKLARAVETVAKRPQLQERITSTIADSMMETLNPHGVFVMVEAEHMCMTMRGVKKPGATTVTAVARGILETDAIKRSEVITYINKN

SEQ ID NO: 12758 - protein, 194 aa, Planococcus kocurii
  REGION 1..194: note = tr|A0A0U2NAE6|A0A0U2NAE6_9BACL GTP cyclohydrolase 1; OS = Planococcus kocurii OX=1374 GN=folE PE=3 SV=1
MIDVKAQKVDLAKIEKAVSMILEAVGEDVDREGLADTPKRVAKMYAEVFSGLKEDPKEYFKTVFHEGHEELVLVKDIPFYSMCEHHLVPFFGKAHIAYIPRDGIVTGLSKLARAVETVSKRPQLQERITSTIADSLMETLNPHGVYVMVEAEHMCMTMRGIKKPGAKTVTAVSRGVLETDTIKRSEVITYINMN

SEQ ID NO: 12759 - protein, 194 aa, Planococcus maitriensis
  REGION 1..194: note = tr|A0A365KBX8|A0A365KBX8_9BACL GTP cyclohydrolase 1; OS = Planococcus maitriensis OX=221799 GN=folE PE=3 SV=1
MIDIKSHNVDLDKIEQAVGMILEAVGEDVGREGLQDTPKRVAKMYAEVFAGLKEDPKEYFRTVFHENHEELVLVKDIPFYSMCEHHLVPFFGKAHIAYIPRDGVVTGLSKLARAVETVAKRPQLQERITSTIADSMMETLNPHGVYVMVEAEHMCMTMRGIKKPGSKTVTAVARGLLETDDIKRSEVITYINMD

SEQ ID NO: 12760 - protein, 191 aa, Planococcus maritimus
  REGION 1..191: note = tr|A0A150WBD4|A0A150WBD4_PLAMR GTP cyclohydrolase 1; OS = Planococcus maritimus OX=192421 GN=folE PE=3 SV=1
MKSHNVDLEKIEQAVGMILEAVGEDVGREGLQDTPKRVAKMYAEVFAGLKEDPKEYFRTVFHENHEELVLVKDIPFYSMCEHHLVPFFGKAHIAYIPRDGVVTGLSKLARAVETVAKRPQLQERITSTIADSMMETLNPHGVYVMVEAEHMCMTMRGIKKPGSKTVTAVARGVLETDDIKRSEVITYINMD

SEQ ID NO: 12761 - protein, 194 aa, unidentified
  source 1..194: note = Planococcus massiliensis
  REGION 1..194: note = tr|A0A098ELC6|A0A098ELC6_9BACL GTP cyclohydrolase 1; OS = Planococcus massiliensis OX=1499687 GN=folE PE=3 SV=1
MIDLDSQKVDLDKIEKAVTMILEAVGEDPGREGLLDTPKRVAKMYAEIFSGLKEDPKEYFKTVFHEGHEELVLVKDIPFYSTCEHHLVPFFGKAHIAYIPRDGVVTGLSKLARAVETVAKRPQLQERITSTVADSLMETLNPHGVYVMIEAEHMCMTMRGIKKPGAKTVTAVSRGIFEADDVKRAEVMTYINMN

SEQ ID NO: 12762 - protein, 191 aa, Planococcus plakortidis
  REGION 1..191: note = tr|A0A1C7ED52|A0A1C7ED52_9BACL GTP cyclohydrolase 1; OS = Planococcus plakortidis OX=1038856 GN=folE PE=3 SV=1
MKSHNVDLDKIEQAVGMILEAVGEDVGREGLQDTPKRVAKMYAEVFAGLKEDPKEYFRTVFHENHEELVLVKDIPFYSMCEHHLVPFFGKAHIAYIPRDGVVTGLSKLARAVETVAKRPQLQERITSTIADSMMETLNPHGVYVMVEAEHMCMTMRGIKKPGSKTVTAVSRGLLETDDIKRSEVITYINMD

SEQ ID NO: 12763 - protein, 191 aa, Planococcus rifietoensis
  REGION 1..191: note = tr|A0A0U2ZCC7|A0A0U2ZCC7_9BACL GTP cyclohydrolase 1; OS = Planococcus rifietoensis OX=200991 GN=folE PE=3 SV=1
MKSHNVDLDKIEQAVGMILEAVGEDVGREGLQDTPKRVAKMYAEVFAGLKEDPKEYFRTVFHENHEELVLVKDIPFYSMCEHHLVPFFGKAHIAYIPRDGVVTGLSKLARAVETVAKRPQLQERITSTIADSMMETLNPHGVYVMVEAEHMCMTMRGIKKPGSKTVTAVSRGVLETDDIKRSEVITYINMN

SEQ ID NO: 12764 - protein, 191 aa, unidentified
  source 1..191: note = Planococcus salinus
  REGION 1..191: note = tr|A0A3M8PAN1|A0A3M8PAN1_9BACL GTP cyclohydrolase 1; OS = Planococcus salinus OX=1848460 GN=folE PE=3 SV=1
MIKKEVDLEKIELAVSMILEAVGENPGREGLLDTPKRVAKMYAEIFSGLQEDPREYFQTVFHEGHEELVLVKDIPFFSTCEHHLVPFFGKVHIAYIPRDGVVTGLSKLARAVETVSKRPQLQERITSTLADSLMETLNPHGVYVMVEAEHMCMTMRGVKKPGAKTVTAVSRGMLEHDDVKRSEVITYINMN

SEQ ID NO: 12765 - protein, 194 aa, Planococcus sp.
  REGION 1..194: note = tr|A0A5C5T347|A0A5C5T347_9BACL GTP cyclohydrolase 1; OS = Planococcus sp. CPCC 101016 OX=2599617 GN=folE PE=3 SV=1
MIDVKAQKVDLDKIEQAVSMILEAVGEDVSREGLQDTPKRVAKMYAEVFSGLKEDPREYFKTVFHEGHEELVLVKDIPFYSMCEHHLVPFFGKAHIAYIPRDGVVTGLSKLARAVETVAKRPQLQERITSTIADSLMETLNPHGVYVMIEAEHMCMTMRGIKKPGSKTVTAVSRGILETDDIKRSEVITYINMN

SEQ ID NO: 12766 - protein, 194 aa, Planococcus sp.; identical to SEQ ID NO: 12758
  REGION 1..194: note = tr|A0A5B0CUW5|A0A5B0CUW5_9BACL GTP cyclohydrolase 1; OS = Planococcus sp. ANT_H30 OX=2597347 GN=folE PE=3 SV=1

SEQ ID NO: 12767 - protein, 194 aa, unidentified
  source 1..194: note = Planococcus versutus
  REGION 1..194: note = tr|A0A1B1S4H4|A0A1B1S4H4_9BACL GTP cyclohydrolase 1; OS = Planococcus versutus OX=1302659 GN=folE PE=3 SV=1
MIDVNAQKVDLDKIEQAVSMILEAVGEDVNREGLKDTPKRVAKMYAEVFSGLKEDPKEYFKTVFHEGHEELVLVKDIPFYSMCEHHLVPFFGKAHIAYIPRGGVVTGLSKLARAVETVAKRPQLQERITSSVADSLMDTLNPHGVYVMIEAEHMCMTMRGIKKPGAKTVTAVSRGVLETDAVKRSEIITYINMN

SEQ ID NO: 12768 - protein, 194 aa, Planomicrobium glaciei
  REGION 1..194: note = tr|A0A1G8A6G9|A0A1G8A6G9_9BACL GTP cyclohydrolase 1; OS = Planomicrobium glaciei OX=459472 GN=folE PE=3 SV=1
MIDIDSKKVDLDKIEKAVAMILEAVGEDPGREGLLDTPKRVAKMYAEIFSGLKEDPKDYFSTVFHEGHEEMVLVKDIPFYSTCEHHLVPFFGKAHIAYIPRDGVVTGLSKLARAVETVAKRPQLQERITSTLADSLMETLNPHGVFVMVEAEHMCMTMRGIKKPGAKTITAVSRGVLETDDIKRSEIITYINMK

SEQ ID NO: 12769 - protein, 194 aa, unidentified
  source 1..194: note = Planomicrobium soli
  REGION 1..194: note = tr|A0A2P8H710|A0A2P8H710_9BACL GTP cyclohydrolase 1; OS = Planomicrobium soli OX=1176648 GN=folE PE=3 SV=1
MTDMELQNVDLEKIEKAVTMILEAVGEDINREGILDTPKRVAKMYAEVFSGLHEDPKEFFKTVFHEGHEELVLVKDIPFYSMCEHHLVPFFGKAHVAYIPRDGVVTGLSKLARAVETVARRPQLQERITSTIADSLVDTLNPHGVFVMVEAEHLCMTMRGIKKPGAKTVTAVSRGVFEEDAIKRSEVISYIKMD

SEQ ID NO: 12770 - protein, 189 aa, Planomicrobium sp.
  REGION 1..189: note = tr|A0A2I0FIR9|A0A2I0FIR9_9BACL GTP cyclohydrolase 1; OS = Planomicrobium sp. MB-3u-38 OX=2058318 GN=folE PE=3 SV=1
MQNVDLEKIEEAVSMILEAVGEDVTREGLHDTPKRVAKMYAEVFSGLKENPKEYFKTVFHEGHEELVLVKDIPFYSMCEHHLVPFFGKAHIAYIPRDGVVTGLSKLARAVETVAKRPQLQERITSTIADSMMETLNPHGVFVMVEAEHMCMTMRGIKKPGATTVTAVARGILETDAIKRSEVITYITKN

SEQ ID NO: 12771 - protein, 189 aa, Planomicrobium sp.
  REGION 1..189: note = tr|A0A5C5USB1|A0A5C5USB1_9BACL GTP cyclohydrolase 1; OS = Planomicrobium sp. CPCC 101110 OX=2599619 GN=folE PE=3; SV = 1
MQNVDLNKIEKAVAMILEAVGEDVEREGIRDTPKRVAKMYAEVFSGLHEDPKEFFKTVFHEGHEELVLVKDIPFYSMCEHHLVPFFGKAHVAYIPRDGVVTGLSKLARAVETVAKRPQLQERITSTIADSLVDTLNPHGVFVMVEAEHLCMTMRGIKKPGAKTVTAVSRGVFEEDAIKRSEIISYIKMG

SEQ ID NO: 12772 - protein, 195 aa, Planomonospora sphaerica
  REGION 1..195: note = tr|A0A171DIP8|A0A171DIP8_9ACTN GTP cyclohydrolase 1; OS = Planomonospora sphaerica OX=161355 GN=folE PE=3 SV=1
MDAETDINRLAAEEAFRSFLAAFGMKDNEEIMDNTPRRVVEAYAELFTPKAFAPTVFHNEEHYDELVLVRSIPLRSVCEHHFLPFVGTAHVAYLPDEEVIGLSKLARVVETYSRRPQRQERLTVQVAQWLEDTLRPRGVGVLITARHSCMTLRGARADNASTVTSAFRGTLTTESRYRADFFSLLHLGERAAETR

SEQ ID NO: 12773 - protein, 194 aa, Planomonospora sphaerica
  REGION 1..194: note = tr|A0A161LRN1|A0A161LRN1_9ACTN GTP cyclohydrolase 1; OS = Planomonospora sphaerica OX=161355 GN=folE PE=3 SV=1
MEPPLPLQVDHARIERAVREILIAIGEDPDRDGLLETPARVARAYAEQFAGLGQTPEDVLTKVFDVDHDEMILVRDIEVYSTCEHHLVPFHGVAHVGYIPNDKGQVTGLSKLARLVDVYARRPQVQERMTSQVADALMRVLEPRGVIVVIECEHLCMTMRGVRKPGAKTTTSAVRGSFRDSEKTRAEAMALILR

SEQ ID NO: 12774 - protein, 224 aa, Plantactinospora sp.
  REGION 1..224: note = tr|A0A2R4FFJ1|A0A2R4FFJ1_9ACTN GTP cyclohydrolase 1; OS = Plantactinospora sp. BB1 OX=2071627 GN=folE PE=3 SV=1
MSASATEPDGDDELDYLAARLVNGKLGGGPVEDAVDLARIEKAVREILIAVGEDPDRDGLVQTPARVARAYAELFAGLRVDPAQVLSTTFEANHEELILVRDIDVMSLCEHHLLPFRGSAHIGYIPGENGRITGLSKLARLVEVYARRPQVQERLTSQIADLLMTKLEPRGVIVVLECEHMCMAMRGIQKSGAKTITSAVRGALQRDAKSRAEAMALIHASRAA

SEQ ID NO: 12775 - protein, 198 aa, Plantactinospora sp.
  REGION 1..198: note = tr|A0A4Q7WD06|A0A4Q7WD06_9ACTN GTP cyclohydrolase 1; OS = Plantactinospora sp. CNZ321 OX=2512141 GN=folE PE=3 SV=1
MSVVPIRVAHDRPRRDIAAASRAAATFLTALGVDIDKEGLAETPARMARAYAELLTPRAFQLTTFANDGGYDELVLARSIPIRSVCEHHLLPFLGVAHVGYLPGERILGLSKLARVVELFAHGPQVQERLTKQIADWLARQLRPKGVGVVIDAEHLCMTLRGVQAVGASTVTSTLLGALRDDARSRTEFFTLARLGTG

SEQ ID NO: 12776 - protein, 220 aa, unidentified
  source 1..220: note = Plantibacter cousiniae
  REGION 1..220: note = tr|A0A1T5J6R1|A0A1T5J6R1_9MICO GTP cyclohydrolase 1; OS = Plantibacter cousiniae OX=199709 GN=folE PE=3 SV=1
MTHGEHTADDAVAAAQAEPDQGSASRSSVDRERIAAAVLEILEAIGEDPSRDGLADTPTRVADAYAEFFGGVGQDAGVHLARPIPIEEGATSDVVLVRDIAFRSVCEHHLLPFLGTAHIAYLPDELVIGLGALPKLVDTLASRPQVQERLSEQIADTLVERLAPRGVLVVLQAAHGCVSMRGSRQLTSTTVTIASRGALADPAARAELMVLIGASADQAG

SEQ ID NO: 12777 - protein, 220 aa, Plantibacter flavus
  REGION 1..220: note = tr|A0A3N2BZY2|A0A3N2BZY2_9MICO GTP cyclohydrolase 1; OS = Plantibacter flavus OX=150123 GN=folE PE=3 SV=1
MTHGEHTADDAVAAAQAESDQGSASRSSVDRERIAAAVLEILEAIGEDPSRDGLADTPTRVADAYAEFFGGVGQDAGVHLARPIPIEEGATSDVVLVRDIAFRSVCEHHLLPFLGTAHIAYLPDELVIGLGALPKLVDTLASRPQVQERLSEQIADTLVERLAPRGVLVVLQAAHGCVSMRGSRQLTSTTVTIASRGALADPAARAELMVLIGASADQAG

SEQ ID NO: 12778 - protein, 192 aa, Plantibacter flavus
  REGION 1..192: note = tr|A0A1S7BE99|A0A1S7BE99_9MICO GTP cyclohydrolase 1; OS = Plantibacter flavus OX=150123 GN=folE PE=3 SV=1
MDRERIAAAVLEILEAIGEDPSRDGLSDTPSRVADAYAEFFGGVGQDAGVHLARPIPIEEGATSDVVLVRDIAFRSVCEHHLLPFLGTAHIAYLPDELVIGLGALPKLVDTLASRPQVQERLSEQIADTLVERLAPRGVLVVLQAAHGCVSMRGSRQLTSTTVTIASRGALADPAARAELMVLIGASADQAG

SEQ ID NO: 12779 - protein, 220 aa, Plantibacter sp.
  REGION 1..220: note = tr|A0A495BE63|A0A495BE63_9MICO GTP cyclohydrolase 1; OS = Plantibacter sp. YR521 OX=2135468 GN=folE PE=3 SV=1
MTDGEHTADDAVAAAQAEPDQGSASRSSVDRERIAAAVLEILEAIGEDPSRDGLADTPTRVADAYAEFFGGVGQDAGVHLARPIPIEEGATSDVVLVRDIAFRSVCEHHLLPFLGTAHIAYLPDELVIGLGALPKLVDTLASRPQVQERLSEQIADTLVERLAPRGVLVVLQAAHGCVSMRGSRQATSTTVTIASRGALADPAARAELMVLIGASADQAG

SEQ ID NO: 12780 - protein, 220 aa, Plantibacter sp.
  REGION 1..220: note = tr|A0A1Y6FIE0|A0A1Y6FIE0_9MICO GTP cyclohydrolase 1; OS = Plantibacter sp. VKM Ac-1784 OX=199708 GN=folE PE=3 SV=1
MTHGEHTADDAVAAAQAEPDQGSASRSSVDRERIAAAVLEILEAIGEDPSRDGLADTPTRVADAYAEFFGGVGQDAGVHLSRPIPIEEGATSDVVLVRDIAFRSVCEHHLLPFLGTAHIAYLPDELVIGLGALPKLVDTLASRPQVQERLSEQIADTLVERLAPRGVLVVLQAAHGCVSMRGSRQLTSTTVTIASRGALADPAARAELMVLIGASADQAG

SEQ ID NO: 12781 - protein, 274 aa, Plasticicumulans acidivorans
  REGION 1..274: note = tr|A0A317MSM7|A0A317MSM7_9GAMM GTP cyclohydrolase FolE2 OS=Plasticicumulans acidivorans OX=886464 GN=folE2; PE = 3 SV=1
MSKPTSAVSTPELNPIPDVQNSADTRRIPINKVGIKDIRHPIRVRDRSAGEQHTIATFNMYVNLPHNFKGTHMSRFVEIINGREREISVASFGEMLAAMTARLEAGTGHIEMSFPYFVNKTAPVSGVNSLLDYAVTLIGELRDGVATTTVKVLVPVTSLCPCSKEISRYGAHNQRSHVTVTARLRRFVWVEEIIDLVEAEASCQLYGLLKRPDEKYVTEHAYENPKFVEDMVRDIAARLNRDERIGAYTVESENFESIHNHSAYALIECDKDAA

SEQ ID NO: 12782 - protein, 275 aa, unidentified
  source 1..275: note = Plasticicumulans lactativorans
  REGION 1..275: note = tr|A0A4R2LGI2|A0A4R2LGI2_9GAMM GTP cyclohydrolase FolE2 OS=Plasticicumulans lactativorans OX=1133106; GN = folE2 PE=3 SV=1
MTKPNPIVVDTVTAIPDVQSSADTRRIPINKVGIKDIRHPVKVKDRTGREQHTIANFNMYVDLPHNFKGTHMSRFVAILNSHEDEITVESFKIMLAEMTERLEAGTGHIEMSFPYFVNKAAPVSGVRSLLDYEVSFIGMISEGKTSMNVKVVVPVTSLCPCSKEISRYGAHNQRSHVTVNARVRGFVWIEELIDLVENEASCQLYGLLKRPDEKYVTERAYENPKFVEDMVRDIAAHLNADERIEAYAVESENFESIHNHSAYALIEHDKTTHPA

SEQ ID NO: 12783 - protein, 221 aa, Plautia stali
  REGION 1..221: note = tr|U3TXG1|U3TXG1_9ENTR GTP cyclohydrolase 1; OS = Plautia stali symbiont OX=891974 GN=folE PE=3 SV=1
MSTLSQKAALVHEALLARGLETPLRAPVRDMDDASRKREIAGHMTQIMQLLNLDLEDDSLMETPHRIAKMFVDEIFSGLDYANFPKITVIENKMKVDEMVTVRDITLTSTCEHHFVIIDGKVTVAYIPKDKVIGLSKINRIVQFFAQRPQVQERLTQQVLVALQTLLGTNNVAVSIDAVHYCVKARGVKDATSATTTTSLGGLFKSSQNTRQEFLRAVRHS

SEQ ID NO: 12784 - protein, 184 aa, unidentified
  source 1..184: note = Pleionea mediterranea
  REGION 1..184: note = tr|A0A316FK28|A0A316FK28_9GAMM GTP cyclohydrolase 1; OS = Pleionea mediterranea OX=523701 GN=folE PE=3 SV=1
MTEQLAEHYKEILTGLGEDLTRDGLKDTPMRAAKAMKFLTRGYTQSLDEVVNNAIFESDNDEMVIVKDIELYSLCEHHLLPFIGKCQVAYIPTGKVIGLSKIARIVDMFARRLQIQENLTKQIADAVMEVTQAAGVAVIIDAKHMCMMMRGVEKQNSVMTTSVMLGQFRKSQATRTEFLNLVRS

SEQ ID NO: 12785 - protein, 204 aa, unidentified
  source 1..204: note = Pleomorphomonas carboxyditropha
  REGION 1..204: note = tr|A0A2G9X236|A0A2G9X236_9RHIZ GTP cyclohydrolase 1; OS = Pleomorphomonas carboxyditropha OX=2023338 GN=folE PE=3; SV = 1
MDDAIFTAGARTTRRPSREEAEAAVRTLIAYAGEDPEREGLRDTPKRVVKAYAELFSGYSQTDEEVLDRIFTEVAGYEELILVRDIPFYSHCEHHMVPFIGKAHIAYYPTTGVVGLSKLARIVEMYARRLQTQETMTAQVSNAIEKVLKPRGTAVLIEAEHLCMAMRGVQKPGASTVTARFTGCFKTDPTEQARFMMMLRGEGK

SEQ ID NO: 12786 - protein, 204 aa, unidentified
  source 1..204: note = Pleomorphomonas diazotrophica
  REGION 1..204: note = tr|A0A1I4QVL5|A0A1I4QVL5_9RHIZ GTP cyclohydrolase 1; OS = Pleomorphomonas diazotrophica OX=1166257 GN=folE PE=3; SV = 1
MDDAIFTAGARKTRRPSREEAEAAVRTLIAYAGEDPDREGLLDTPKRVVKAYAELFSGYGQTDEEVLDRIFSEVAGYEELILVRDIPFYSHCEHHMVPFIGKAHIAYYPTTGVVGLSKLARIVEMYARRLQTQETMTAQVSNAIDKVLKPRGAAVLIEAEHLCMAMRGVQKPGASTVTARFTGCFKTDPTEQARFMMMVRGEGK

SEQ ID NO: 12787 - protein, 204 aa, Pleomorphomonas sp.
  REGION 1..204: note = tr|A0A4R8FPP2|A0A4R8FPP2_9RHIZ GTP cyclohydrolase 1; OS = Pleomorphomonas sp. CF100 OX=2135722 GN=folE PE=3 SV=1
MDDAIFTASARQARRPSREEAEAAVRTLIAYAGEDPEREGLRDTPKRVVKAYAELFSGYGQTDEEVLDRIFTEVAGYEELILVRDIPFYSHCEHHMVPFIGKAHIAYYPTTGVVGLSKLARIVEMYARRLQTQETMTAQVSNAIEKVLKPRGAAVLIEAEHLCMTMRGVQKPGASTVTARFTGCFKTDPTEQARFMMMVRGEGK

SEQ ID NO: 12788 - protein, 211 aa, Pleomorphomonas sp.; identical to SEQ ID NO: 11873
  REGION 1..211: note = tr|A0A2Z6HVP7|A0A2Z6HVP7_9RHIZ GTP cyclohydrolase 1; OS = Pleomorphomonas sp. SM30 OX=1885025 GN=folE PE=3 SV=1

SEQ ID NO: 12789 - protein, 218 aa, Plesiomonas shigelloides
  REGION 1..218: note = tr|R8AVT9|R8AVT9_PLESH GTP cyclohydrolase 1; OS = Plesiomonas shigelloides 302-73 OX=1315976 GN=folE PE=3; SV = 1
MSSLTEEAIKVRAALEMHGLETPMQQSGLDKNTRKAQIQHHMTEVMRLLELDLGDDSLCETPRRIAKMYMDEIFSGLDYANFPKITTIENKMHVDEMVTVRDIHLTSTCEHHFVTIDGVAHVAYIPKDKVIGLSKLNRIVLFFAQRPQVQERLTQQILVALQTLLETDDVAVSLDAVHYCVKARGIRDSSSSTLTMGLGGVFKTEASRRQEFLSSARR

SEQ ID NO: 12790 - protein, 218 aa, Plesiomonas shigelloides; identical to SEQ ID NO: 12789
  REGION 1..218: note = tr|A0A1A9AX34|A0A1A9AX34_PLESH GTP cyclohydrolase 1; OS = Plesiomonas shigelloides OX=703 GN=folE PE=3 SV=1

SEQ ID NO: 12791 - protein, 241 aa, Pleurocapsa sp.
  REGION 1..241: note = tr|A0A2T1CVF5|A0A2T1CVF5_9CYAN GTP cyclohydrolase 1; OS = Pleurocapsa sp. CCALA 161 OX=2107688 GN=folE PE=3 SV=1
MTTVSSNGYNRSESFGNNSQPLQSSLLDQVASRPDRNTHNGQAAQIKATSEAAKEQMMSAVYTMLESVGEDPEREGLLKTPKRVAEAMEFLTSGYNQSLDDLVNGAIFDEGHNEMVLVRDINFFSLCEHHMLPFMGRAHVAYIPNQKVVGLSKLARIVEMYARRLQVQERLTRQIAEAVQEVLEPQGVAVVMEASHMCMSMRGVQKPGSWTVTSAMIGVFQDEQKTREEFLNLIRHQPNFG

SEQ ID NO: 12792 - protein, 233 aa, Pleurocapsa sp.
  REGION 1..233: note = tr|A0A2T1CLE3|A0A2T1CLE3_9CYAN GTP cyclohydrolase 1; OS = Pleurocapsa sp. CCALA 161 OX=2107688 GN=folE PE=3 SV=1
MTLAKSEPNQIDNINQQLPKLTTTQQHEHLTHLRKPQMTCPPPVSEEEMRQAVRTLLLGLGEDPDREGLRDTPKRVVKALKFLTSGYHQSLDELLNGAVFQENADEMVLVRDIDLFSSCEHHILPILGRAHVAYIPDGKVIGLSKIARICEMYGRRLQVQERLTAQIADALQGLLQPKGVAVVVEASHMCMVMRGVQKPSSWTSTSAVRGVFADDAKTRQEFMSLIRHNPAFR

SEQ ID NO: 12793 - protein, 93 aa, unidentified
  source 1..93: note = Pluralibacter gergoviae
  REGION 1..93: note = tr|A0A0J5NLR9|A0A0J5NLR9_PLUGE GTP cyclohydrolase (Fragment) OS=Pluralibacter gergoviae OX=61647 GN=folE; PE = 4 SV=1
MKSMSLEATLVQEALILKGLETPLRKTDVLRKDKRSELIAGYMTKVMELLQLDLTDDSLRGTPGRIADMFINEVFSGLDYANFPKITLMENKM

SEQ ID NO: 12794 - protein, 221 aa, unidentified
  source 1..221: note = Pluralibacter gergoviae
  REGION 1..221: note = tr|A0A089R211|A0A089R211_PLUGE GTP cyclohydrolase 1; OS = Pluralibacter gergoviae OX=61647 GN=folE PE=3 SV=1
MPSLSKEAALVHEALVARGLETPLRPPVNLDNEARKRLIAGHMTEIMQLLNLDLSDDSLMETPHRIAKMYVDEIFSGLDYANFPKITVIENKMKVDEMVTVRDITLTSTCEHHFVTIDGKATVAYIPKDSVIGLSKINRIVQFFAQRPQVQERLTQQVLTALQTLLGTNNVAVSIDAVHYCVKARGIRDATSATTTTSLGGLFKSSQNTRQEFLRAVRHHG

SEQ ID NO: 12795 - protein, 179 aa, unidentified
  source 1..179: note = Pokkaliibacter plantistimulans
  REGION 1..179: note = tr|A0A318C7T8|A0A318C7T8_9GAMM GTP cyclohydrolase 1; OS = Pokkaliibacter plantistimulans OX=1635171 GN=folE PE=3; SV = 1
MEQAFAHIITSIGENLGREGLRDTPKRAAKAMSYLTRGYQQDLQEIVNNALFPSENSEMVIVRNIELYSLCEHHMLPFIGKAHVAYIPKGKVLGLSKVARIVDMFARRLQIQENLTKEIAEAVFQVTEAAGVGVVIEAQHMCMMMRGVEKQNASMTTSMMLGNFRTDERTRNEFLSLIR

SEQ ID NO: 12796 - protein, 185 aa, unidentified
  source 1..185: note = Pokkaliibacter plantistimulans
  REGION 1..185: note = tr|A0A318CA49|A0A318CA49_9GAMM GTP cyclohydrolase 1; OS = Pokkaliibacter plantistimulans OX=1635171 GN=folE PE=3; SV = 1
MDTELALHYRAILEQLGEDPGREGLRDTPKRAAKAMEFLTRGYQTELDTIINGAIFSSDNDEMVIVRDIELYSLCEHHLLPFIGKAHVAYIPQGKVLGLSKIARIVDMFARRLQIQENLTKQIADCIQTVTQAAGVAVSIEAKHLCMMMRGVEKQNSVMNTSVMLGSFRTNQASRNEFLQLIRGN

SEQ ID NO: 12797 - protein, 229 aa, unidentified
  source 1..229: note = Polaribacter atrinae
  REGION 1..229: note = tr|A0A176TB04|A0A176TB04_9FLAO GTP cyclohydrolase 1; OS = Polaribacter atrinae OX=1333662 GN=folE PE=3 SV=1
MFEFSSKMNDERIEEIGENHVGTSAKTPLRADAFDITDEEKIERIQESVKDILTTLGLDLTDDSLQGTPKRVAKSFVNELFMGLNPKNMPKASTFDNNYNYGEMLVERNIVVYSTCEHHLLPIIGRAHVAYISDGKVIGLSKMNRIVEYFSKRPQVQERLTMQVVQAMQEALGVQDVACVIDAKHLCVNSRGIKDIESSTVTAEFGGKFKEKETKREFLEYLKMNTSFE

SEQ ID NO: 12798 - protein, 229 aa, Polaribacter butkevichii
  REGION 1..229: note = tr|A0A2P6CER5|A0A2P6CER5_9FLAO GTP cyclohydrolase 1; OS = Polaribacter butkevichii OX=218490 GN=folE PE=3 SV=1
MFELSSKMNDERIEEIGENHVGTSAKTPLRADAFDISDEEKIERIQESVKDILTTLGMDLTDDSLQGTPRRVAKSFVNELFMGLNPKNMPKASTFDNNYNYGEMLVERNIVVYSTCEHHLLPIIGRAHVAYISDGKVIGLSKMNRIVEYFSKRPQVQERLTMQIVQAMQEALGVEDVACVIDAKHLCVNSRGIKDIESSTVTAEFGGKFKQKETKREFLEYLKMKTSFE

SEQ ID NO: 12799 - protein, 222 aa, Polaribacter dokdonensis
  REGION 1..222: note = tr|A0A0M9CGU1|A0A0M9CGU1_9FLAO GTP cyclohydrolase 1; OS = Polaribacter dokdonensis DSW-5 OX=1300348 GN=folE PE=3; SV = 1
MNEDRIEEIGENHVGTSAKTPLRADAFDISDDEKIKRIEESVKDILNTLGMDLTDDSLQGTPKRVAKAFVNEIFMGLNPKNKPKASTFDNNYNYGEMLVEKNIVVYSTCEHHLLPIIGRAHVAYISDGKVIGLSKMNRIVEYFAKRPQVQERLTMQVVQAMQEALGTEDVACVIDAKHLCVNSRGIKDIESSTVTAEFGGKFKNKETKREFLDYLKLETDFD

SEQ ID NO: 12800 - protein, 232 aa, Polaribacter dokdonensis
  REGION 1..232: note = tr|A0A0M9CDS3|A0A0M9CDS3_9FLAO GTP cyclohydrolase 1; OS = Polaribacter dokdonensis DSW-5 OX=1300348 GN=folE PE=3; SV = 1
MITDVILKEKQTDQKLNGFSFEEVGDDHLFTGLETPMKKDAFKLSDNEKKEKIAILFEEIMDVMGLDLTDDSLQGTPKRVAKMYIDEIFSGLNPANKPKVALFDNKYQYNQMLVEKNITFYSNCEHHFVPIIGKAHVAYISSGKVIGLSKLNRIVQYYAKRPQVQERLTNQIAEDLKGILGTEDVAVIIDAKHLCVSSRGIKDDTSSTVTSYFGGKFNNQEKIAELQNTLNY

SEQ ID NO: 12801 - protein, 229 aa, Polaribacter filamentus
  REGION 1..229: note = tr|A0A2S7KWT3|A0A2S7KWT3_9FLAO GTP cyclohydrolase 1; OS = Polaribacter filamentus OX=53483 GN=folE PE=3 SV=1
MFELSSKMNDERINEIGENHVGTSAQNPIRPDAFDISDEEKIKKIEESVKDILNTLGMDLTDDSLQGTPKRVAKAFVNELFMGLNPKNMPKPSTFENNYSYGEMLVEKNIVVYSTCEHHLLPIIGRAHVAYISDGKVIGLSKMNRIVEYFSKRPQVQERLTMQVVQAMQEALGTQDVACVIDAKHLCVNSRGIKDIESSTITAEFGGKFKEKDTKREFLDYLKMNTKFD

SEQ ID NO: 12802 - protein, 230 aa, Polaribacter filamentus
  REGION 1..230: note = tr|A0A2S7KZ42|A0A2S7KZ42_9FLAO GTP cyclohydrolase 1; OS = Polaribacter filamentus OX=53483 GN=folE PE=3 SV=1
MITDKLMKRETQGFNSLSFDEIGDDHLFTGLETPMKPNAFDISDEVKKEKIAHLFSQIMDVMGLDLTDDSLQGTPKRVAKMYIDEIFSGLNPANKPKVALFNNKYQYNQMLVEKNITFYSNCEHHFVPIIGKAHVAYISSGKVIGLSKINRIVQYYAKRPQVQERLTNQITEELKAILETENVAVIIDAKHLCVSSRGVKDDTSSTVTSYFGGVFNTPEKIAELQNTLNY

SEQ ID NO: 12803 - protein, 232 aa, Polaribacter gangjinensis
  REGION 1..232: note = tr|A0A2S7WB72|A0A2S7WB72_9FLAO GTP cyclohydrolase 1; OS = Polaribacter gangjinensis OX=574710 GN=folE PE=3 SV=1
MITEVVLKEKETEQKFNGFSFEEIGDDHLYTGIETPMKPNAFDISDEEKKKKITSLFAEIMDVMGLDLTDDSLRGTPNRVAKMYIDEIFSGLNPANKPKIALFDNKYQYNQMLVEKNITFYSNCEHHFVPIIGKAHVAYISSGKVIGLSKLNRIVQYFAKRPQVQERLTNQIAEELKAVLQTENVAVIIDAKHLCVSSRGIKDDTSATVTSYFGGAFNTPEKIAELQNTLNY

SEQ ID NO: 12804 - protein, 229 aa, Polaribacter gangjinensis
  REGION 1..229: note = tr|A0A2S7W9F7|A0A2S7W9F7_9FLAO GTP cyclohydrolase 1; OS = Polaribacter gangjinensis OX=574710 GN=folE PE=3 SV=1
MFELQTNMNDETINEIGENHIGTSATTPLRADAFVLSDQEKIDRIQESVKDILLTLGMDLTDDSLQGTPKRVAKAFVNELFMGLNPKNKPKPSTFQNNYNYGEMLVEKNIVVYSTCEHHLLPIIGRAHVAYISNGKVIGLSKMNRIVEYFAKRPQVQERLTMQVVQAMQEALGTQDVACVIDAKHLCVNSRGIKDIESSTVTAEFGGKFKEKETKREFLDYIKFDTKFE

SEQ ID NO: 12805 - protein, 229 aa, Polaribacter glomeratus
  REGION 1..229: note = tr|A0A2S7WWX8|A0A2S7WWX8_9FLAO GTP cyclohydrolase 1; OS = Polaribacter glomeratus OX=102 GN=folE PE=3 SV=1
MFELSSKMNDERINEIGENHVGTSAQNPIRPDAFDISDEQKIKKIEESVRDILNTLGMDLTDDSLQGTPKRVAKAFVNEIFMGLNPKNMPKPSTFENNYSYGEMLVEKNIVVYSTCEHHLLPIIGRAHVAYISDGKVIGLSKMNRIVEYFSKRPQVQERLTMQVVQAMQEALGTQDVACVIDAKHLCVNSRGIKDIESSTVTAEFGGKFKEKDTKREFLDYLKMNTKFD

SEQ ID NO: 12806 - protein, 230 aa, Polaribacter glomeratus
  REGION 1..230: note = tr|A0A2S7WU71|A0A2S7WU71_9FLAO GTP cyclohydrolase 1; OS = Polaribacter glomeratus OX=102 GN=folE PE=3 SV=1
MITETLTGEKKQTFNSLSFDEIGDDHLFTGLETPMKPNAFDISDDVKKEKIAALFTQIMDVMGLDLTDDSLQGTPKRVAKMYIDEIFSGLNPANKPKVALFDNKYKYNQMLVEKNITFYSNCEHHFVPIMGKAHVAYISSGKVIGLSKLNRIVQYYAKRPQVQERLTNQIAEELKAILETDNVAVIIDAKHLCVSSRGVKDDTSSTVTSYFGGVFNTSEKIAELQNTLNY

SEQ ID NO: 12807 - protein, 228 aa, Polaribacter irgensii
  REGION 1..228: note = tr|A4C1U8|A4C1U8_9FLAO GTP cyclohydrolase 1; OS = Polaribacter irgensii 23-P OX=313594 GN=folE PE=3 SV=1
MFELNSKMNDDRIDELGENHVATSAKNPIRSDAFDISNEEKIAKIEKSVQDILHTLGMDLTDDSIQGTPKRVAKAFINEMFMGLDPKNMPKASTFDNNYNYGEMLVEKNIVVYSTCEHHLLPIIGRAHVAYISSGKVIGLSKMNRIVEYYSKRPQVQERLTMQIVQAMQEALGTKDVACVIDAKHLCVNSRGIKDIESSTVTSEFGGKFKEKETKKEFLQYLQMPTIF

SEQ ID NO: 12808 - protein, 207 aa, Polaribacter irgensii
  REGION 1..207: note = tr|A4C0M2|A4C0M2_9FLAO GTP cyclohydrolase I; OS = Polaribacter irgensii 23-P OX=313594 GN=folE PE=4 SV=1
MKTINPFKNLQLLAILFSVITIIGCSNDDDIAPEEENEIEVITDVTLIFTNTADVNDVIRASAQDPDGTGIQELQILGAITLAADTEYTLTYEILNKLDPADSEDIGDEILEEDNEHQFFFSFTVNVFANPIGNGNIDAAADPINYNDEDENGNPVGLSSTWTTSSTASSGALFTVRLQHQPDVKTATSGSNDGDTDFALTFDLNIQ

SEQ ID NO: 12809 - protein, 222 aa, unidentified
  source 1..222: note = Polaribacter porphyrae
  REGION 1..222: note = tr|A0A2S7WK10|A0A2S7WK10_9FLAO GTP cyclohydrolase 1; OS = Polaribacter porphyrae OX=1137780 GN=folE PE=3 SV=1
MNDERIEELGEDHVGTSAKTPLRADAFAISDEEKISRIQESVKDILQTLGMDLTDDSLQGTPKRVAKAFVNEIFMGLNPKNKPKASTFDNNYNYGEMLVEKNIVVYSTCEHHLLPIIGRAHVAYISDGKVIGLSKMNRIVEYFAKRPQVQERLTMQVVQAMQEALGTQNVACVIDAKHLCVNSRGIKDIESSTVTAEFGGKFKETETKREFLDYLKMDTDFD

SEQ ID NO: 12810 - protein, 217 aa, unidentified
  source 1..217: note = Polaribacter porphyrae
  REGION 1..217: note = tr|A0A2S7WLR8|A0A2S7WLR8_9FLAO GTP cyclohydrolase 1; OS = Polaribacter porphyrae OX=1137780 GN=folE PE=3 SV=1
MDKKSIEILGDNHISTSVETPLRSDAFDKSDVEKITAIQYHFKMIMQELGLDLTDDSLAGTPYRFAKMYVKELFYGLKPDNKPKLSVFENKYGYNKVLIEQNINIDSSCEHHFLPITGKAHIGYIPKDKVIGLSKINRLVDYYAHRPQVQERLSLQILKDLQHILKTEDVIVVINAKHLCVSSRGIKDKNSFTTTIEYGGCFNNDLKRKEFLDIVKG

SEQ ID NO: 12811 - protein, 232 aa, unidentified
  source 1..232: note = Polaribacter reichenbachii
  REGION 1..232: note = tr|A0A1B8U4Q1|A0A1B8U4Q1_9FLAO GTP cyclohydrolase 1; OS = Polaribacter reichenbachii OX=996801 GN=folE PE=3 SV=1
MITEVVLKEKQTDQKLNGFSFEQIGDDHLYTGLETPIKKDAFLLSNDEKKEKIADLFSEIMDVMGLDLTDDSLQGTPKRVAKMYIDEIFSGLNPANKPKVALFDNKYQYNQMLVEKNITFYSNCEHHFVPIIGKAHVAYISSGKVIGLSKLNRIVQYYAKRPQVQERLTNQIAEELKNILETEDVAVIIDAKHLCVSSRGIKDDTSSTVTSYFGGKFNNQDKILELQNTLKY

SEQ ID NO: 12812 - protein, 229 aa, unidentified
  source 1..229: note = Polaribacter reichenbachii
  REGION 1..229: note = tr|A0A1B8TQ07|A0A1B8TQ07_9FLAO GTP cyclohydrolase 1; OS = Polaribacter reichenbachii OX=996801 GN=folE PE=3 SV=1
MFELSSKMNDERIKEIGENHIGTSAKTPLRDDAFDITNEEKINRIQESVKDILNTLGMDLTDDSLQGTPKRVAKAFVNEIFMGLDPKNMPKPSTFDNNYNYGEMLVEKNIVVYSTCEHHLLPIIGRAHVAYISDGKVIGLSKMNRIVEYFSKRPQVQERLTMQVVQAMQEALGTDNVACVIDAKHLCVNSRGIKDIESSTVTAEFGGKFKESETKREFLDYLKMNTDFD

SEQ ID NO: 12813 - protein, 229 aa, unidentified
  source 1..229: note = Polaribacter sejongensis
  REGION 1..229: note = tr|A0A2K8VP26|A0A2K8VP26_9FLAO GTP cyclohydrolase 1; OS = Polaribacter sejongensis OX=985043 GN=folE PE=3 SV=1
MFELSSKMNDERIEEIGENHVGTSAKTPLRADAFDITDEEKIERIQQSVKDILTTLGLDLTDDSLQGTPKRVAKSFVNELFMGLNPKNLPKASTFDNNYNYGEMLVERNIVVYSTCEHHLLPIIGRAHVAYISDGKVIGLSKMNRIVEYFSKRPQVQERLTMQVVQAMQEALGVEDVACVIDAKHLCVNSRGIKDIESSTVTAEFGGKFKEKETKREFLEYLKMNTSFE

SEQ ID NO: 12814 - protein, 221 aa, unidentified
  source 1..221: note = Polaribacter sejongensis
  REGION 1..221: note = tr|A0A2K8VQC5|A0A2K8VQC5_9FLAO GTP cyclohydrolase 1; OS = Polaribacter sejongensis OX=985043 GN=folE PE=3 SV=1
MKNKKEIEIVGDNHFSSSIRTPLRADAFDKSDEEKIENIQYHFKKIMEEMGLDLTDDSLSGTPYRVAKMYVKELFYGLNPVNKPKLSTFENKYGYNKMLVEQNITIDSACEHHFLPIIGYANVAYIPKDKVIGLSKINRLVDYYARRPQVQERLVLQILNDLQTILGTKDVIVSVTAKHLCVSSRGIKDQSSFTTTLEYGGCFTEVEKRNDFLKIIAQEKI

SEQ ID NO: 12815 - protein, 229 aa, Polaribacter sp.
  REGION 1..229: note = tr|A0A1Y0M7N8|A0A1Y0M7N8_9FLAO GTP cyclohydrolase 1; OS = Polaribacter sp. SA4-10 OX=754397 GN=folE PE=3 SV=1
MFELSSKMNDERSEEIGEDHVGTSAKTPLRADAFDISDEEKINRIQESVKDILTTLGMDLTDDSLQGTPKRVAKSFVNELFMGLNPKNMPKASTFDNNYNYGEMLVEKNIVVYSTCEHHLLPIIGRAHVAYISDGKVIGLSKMNRIVEYFAKRPQVQERLTMQVVQAMQEALGTQDVACVIDAKHLCVNSRGIKDIESSTVTAEFGGKFKEKDRKREFLDYLKMETNFD

SEQ ID NO: 12816 - protein, 232 aa, Polaribacter sp.
  REGION 1..232: note = tr|A0A5C6Y532|A0A5C6Y532_9FLAO GTP cyclohydrolase 1; OS = Polaribacter sp. IC066 OX=57032 GN=folE PE=3 SV=1
MITDLQSNGQQIIKKKSSFSVDSSSDDHFSAGLKTPMKPSAFNISEEEKKEKISILFEEIMDVMGLDITDDSLKGTPSRVAKMYVDEIFSGLNPANKPEITLFENSYQYNQMLVEKNITVYSTCEHHFVPIIGKAHVAYISSGKVIGLSKLNRIVQYFAKRPQVQERLTNQIAEELKLVLKTEDVAVIIDAKHLCVSSRGIKDDTSSTTTSYFGGEFKKQSKIAELQNTLKY

SEQ ID NO: 12817 - protein, 228 aa, unidentified
  source 1..228: note = Polaribacter vadi
  REGION 1..228: note = tr|A0A1B8U0U7|A0A1B8U0U7_9FLAO GTP cyclohydrolase 1; OS = Polaribacter vadi OX=1774273 GN=folE PE=3 SV=1
MFELDSKMNDERIEELGENHVGTSAKTPLRADAFDISDEEKISRIQESVKDILFTLGMDLEDDSIQGTPKRVAKAFVNELFMGLNPKNKPVPSTFDNNYSYGEMLVEKNIVVYSTCEHHLLPIIGRAHVAYISDGKVIGLSKMNRIVEYFAKRPQVQERLTMQVVQAMQEALGTKDVACVIDAKHLCVNSRGIKDIESSTVTAEFGGKFKEKDTKNEFLNYIKMDTNF

SEQ ID NO: 12818 - protein, 240 aa, Polaromonas naphthalenivorans
  REGION 1..240: note = tr|A1VKQ1|A1VKQ1_POLNA GTP cyclohydrolase I; OS = Polaromonas naphthalenivorans (strain CJ2) OX=365044; GN = Pnap_0912 PE=4 SV=1
MLMKTTPPSQDLTDEGTPVSVKIRERLVMARKRFHANDNIAEFIEPGEMEKLLDEVEIKMQGVLDSMVIDTVGDHNTGNTARRVAKMYLKEVFNGRYVTAPTITEFPNAEHLNELMIVGPITVRSACSHHFCPVIGKIWIGVLPNEHTNVIGLSKYARLAEWVMGRPQIQEEAVVQLADLIMEKTQPDGLAIVMEASHYCMAWRGVKDMDSKMINSVMRGVFLKDSTLRREFLALIPRKG

SEQ ID NO: 12819 - protein, 240 aa, Polaromonas sp.
  REGION 1..240: note = tr|Q12F67|Q12F67_POLSJ GTP cyclohydrolase I; OS = Polaromonas sp. (strain JS666 / ATCC BAA-500) OX=296591; GN = Bpro_0869 PE=4 SV=1
MLMKSTTHPQGSTDEGTPVSVKIRERLHQARKRFHANDNIAAFIEPGELEKLLDEVEVKMQTVLDSLVIDTAGDHNTNNTARRVAKMYLNEVFKGRYVQPPTITEFPNAEHLNELMIVGPITVRSACSHHFCPVIGKIWIGVMPNEHTNVIGLSKYARLAEWVMGRPQIQEEAVVQLADLIMEKTQPDGLAIVMEASHYCMAWRGVKDMDSKMINSVMRGVFLKDPNLRREFLALIPQKG

SEQ ID NO: 12820 - protein, 203 aa, Polaromonas sp.
  REGION 1..203: note = tr|A0A068YZ53|A0A068YZ53_9BURK GTP cyclohydrolase 1; OS = Polaromonas sp. CG9_12 OX=1504672 GN=folE PE=3 SV=1
MTAPRPELAEVEAAVRTLLRWAGDDPGREGLMDTPRRVARAYGEFFSGYGADPIATLAALAATFEEAGDYDDMVLVRNIRLESHCEHHLVPIIGWAHIAYLPDKRVVGLSKLARVVDLYARRLQIQERLTSQIAQTLADVLQPRGVAVMIEAEHMCMTTRGVYKPGSTTVTQRLLGVFRTDAHLRREALAAISHATPSGAFQV

SEQ ID NO: 12821 - protein, 272 aa, unidentified
  source 1..272: note = [Polyangium] brachysporum
  REGION 1..272: note = tr|A0A0G3BF93|A0A0G3BF93_9BURK GTP cyclohydrolase FolE2 OS=[Polyangium] brachysporum OX=413882 GN=folE2 PE=3; SV = 1
MNDMTDLKSLISAAEVAMPDVQSSRDERRLAIQRVGVKDVRYPIQLRVGGQVQHGVATWDLDVALPADQKGTHMSRFVAWLNEHHLHPIEAATLRQDLVSMLTLLHADEGRIEARFSFFILKTAPVSGVQSLLDYQGKWIAESRGGQVTVWAEVVVPVKSLCPCSKEISEFGAHNQRSHVTIRAELLGDVDWRELVRFAEESASSEIWPLLKRTDEKWITERAYENPKFVEDLVRDVALRVNAEPRVGRYRVEVENFESIHNHSAFAVIERT

SEQ ID NO: 12822 - protein, 180 aa, unidentified
  source 1..180: note = Polycyclovorans sp.
  REGION 1..180: note = tr|A0A2E2J8L5|A0A2E2J8L5_9GAMM GTP cyclohydrolase 1; OS = Polycyclovorans sp. OX=2024852 GN=folE PE=3 SV=1
MEDQFRAILSAIGEDPLREGLLNTPQRAAKAMTFLTKGYQESLEEIVNGAIFETDNQEMVIVRDIEFYSMCEHHILPFFGRAHVAYLPAGKVIGLSKIPRIVDMFGRRLQIQEQLTQQIGECIQGATEARGVAVVIEAKHLCAMMRGVEKQHSQMITSMMLGAFRDDPRTRAEFLGLIRN

SEQ ID NO: 12823 - protein, 207 aa, unidentified
  source 1..207: note = Polymorphobacter sp.
  REGION 1..207: note = tr|A0A4Y9EM34|A0A4Y9EM34_9SPHN GTP cyclohydrolase 1; OS = Polymorphobacter sp. DJ1R-1 OX=2511025 GN=folE PE=3 SV=1
MDHDHDNDSELPAHVHAHFPIPQERAEEAVRELLRWAGDDPEREGLIDTPARVARAFREYYRGYLEDPGTHLSRTFGEVGGYDEIVLLRDIPFQSHCEHHMAPIIGKAHIAYLPKDRVVGISKLARVLHGYARRLQVQERLTAEVADCIQLHLEPRGVAVVIEATHACMSARGVLTSGVTMTTSRMMGVFREDERSRKEVLALMGLG

SEQ ID NO: 12824 - protein, 211 aa, unidentified
  source 1..211: note = Polymorphum gilvum
  REGION 1..211: note = tr|F2J526|F2J526_POLGS GTP cyclohydrolase 1; OS = Polymorphum gilvum (strain LMG 25793 / CGMCC 1.9160 / SL003B-26A1) OX=991905 GN=folE PE=3 SV=1
MDAILKPVGNKAVRKAPHEVARPSREEAEAAVRTLLAWIGDDPEREGLLDTPKRVVKAYTEVLGGYFEDPEEHLQRTFEDVGGYDELIMVRDIPFHSFCEHHMLPFIGTAHIAYYPSGGVVGLSKLARVVDIYARRLQTQEHLTAQIVSAIDSHLAPRGLAVMLEAEHQCMTMRGVQKQGVSTITTQFTGVFQDDPSEQVRFITLVRGGSR

SEQ ID NO: 12825 - protein, 275 aa, unidentified
  source 1..275: note = Polynucleobacter aenigmaticus
  REGION 1..275: note = tr|A0A254Q1Y2|A0A254Q1Y2_9BURK GTP cyclohydrolase FolE2 OS=Polynucleobacter aenigmaticus OX=1743164 GN=folE2; PE = 3 SV=1
MNDINTAFLKPQTMPDVQSSHDERALPIEQVGIRGLRHPLTIRTKTGVMPAVGNFEMDVALPAHVKGTHMSRFIALLQKYNEPIDSASVVSMVREMLPLLDATEGRIQFTYTHFVKKAAPVSGVESLMDYEVTWMAKAKQNAMGSIDVELNLRALVPVMSLCPCSKEISEYGAHNQRSHVTMSVELDSQTKMTVEDLVAAAESQASSELWGLLKRPDEKWVTERAYDNPKFVEDLVRDVAGQLKDDQRILSLVVEAENFESIHNHSAYAKISLAK

SEQ ID NO: 12826 - protein, 272 aa, unidentified
  source 1..272: note = Polynucleobacter asymbioticus
  REGION 1..272: note = sp|A4SZK2|GCH4_POLAQ GTP cyclohydrolase FolE2; OS = Polynucleobacter asymbioticus (strain DSM 18221 / CIP 109841 / QLW-P1DMWA-1) OX=312153 GN=folE2 PE=3 SV=2
MNPAFLKASAMPDVQSSRDERALPIEQVGIRGVRHPLMIRSNTGNFPSVGNFEMDVALPAHVKGTHMSRFMALLQKQDEAIDSTTVVALVRDMLPLLDAKEGHVQFTYTHFVKKAAPVSGVESLMDYEVTWMATAKQNDAGSVEVELGLRAQVPVMSLCPCSKEISEFGAHNQRSHVTMTVVLDTQTKMTVEDLVSAAEREASSELWGLLKRPDEKWVTERSYSNPKFVEDLVRDVAGRLKADTRIQSFVVDAENFESIHNHSAFARISHKK

SEQ ID NO: 12827 - protein, 262 aa, unidentified
  source 1..262: note = Polynucleobacter asymbioticus
  REGION 1..262: note = tr|A4SVK2|A4SVK2_POLAQ GTP cyclohydrolase I; OS = Polynucleobacter asymbioticus (strain DSM 18221 / CIP 109841 / QLW-P1DMWA-1) OX=312153 GN=Pnuc_0295 PE=4 SV=1
MVTKNTKTPAKTQTKAVAKKLSVKKMTPQKIQSKNDDAGLPLSVMIRRRIEAQNARFHANDNISAFIKPGELEGLVDEVAEKMQAVLESLVIDTNSDHNTKNTSRRVAKMYVQEVFNGRYVEQPTLTKFPNVSRLNELMIVGPITIRSACSHHLCPIMGRIWIGVLPSKESALIGLSKYSRLTEWVMCRPQIQEEAVVELADMLEKKIKPIGVAIVMDADHFCMQWRGVKDRDSKMVNSVMRGAFLKDSNLRREFLSLLDKR

SEQ ID NO: 12828 - protein, 275 aa, unidentified
  source 1..275: note = Polynucleobacter campilacus
  REGION 1..275: note = tr|A0A254Q3X2|A0A254Q3X2_9BURK GTP cyclohydrolase FolE2 OS=Polynucleobacter campilacus OX=1743163 GN=folE2; PE = 3 SV=1
MNDMNPAFLKASAMPDVQSTLDERALPIEQVGIRGVRHPLTIRSASGDFPSVGQFEMDVALPAHVKGTHMSRFMALLQKQEMAVDSTTVVAMVCDMLPLLDAKEGHVQFTYTHFVKKAAPVSGVESLMDYEVTWMATAKQNPAGKLDIELGLRAQVPVMSLCPCSKEISEFGAHNQRSHVTMDVVLDSQTKMTVEDLITAAESEASSELWGLLKRPDEKWVTEHSYSNPKFVEDLVRDVAGNLKADQRIRSFVVEAENFESIHNHSAFARISHKK

SEQ ID NO: 12829 - protein, 267 aa, Polynucleobacter cosmopolitanus
  REGION 1..267: note = tr|A0A229FUZ5|A0A229FUZ5_9BURK GTP cyclohydrolase FolE2 OS=Polynucleobacter cosmopolitanus OX=351345; GN = folE2 PE=3 SV=1
MNAPEKIFLPDVQASHDERNIVIQKVGIKSVRHPVQIKTKAGSQASVAMIDMTVKLPSDVKGTHMSRFLEVLQNQHAPLEFDSVKSLMSTMLERLEATEGHIDMKMPLFLNKVAPVSGVESLLDYDLHIKAAFEKGALRYTLQVQVPVTSLCPCSKKISEYGAHNQRSHIVIAAEITENMDAEDLIKIAEQAASCELWGLLKRPDEKYVTEKAYDNPKFVEDLVRDIAVALDHSDKVVAYEVSSENFESIHNHSAYAWLAKDKRHTH

SEQ ID NO: 12830 - protein, 273 aa, Polynucleobacter cosmopolitanus
  REGION 1..273: note = tr|A0A229FUC8|A0A229FUC8_9BURK GTP cyclohydrolase FolE2 OS=Polynucleobacter cosmopolitanus OX=351345; GN = folE2 PE=3 SV=1
MNDINTSFLKTSAMADVQSSVDHRNIVINRVGIRGVRHPIQVTTESGVQPSVAMIDLDVLLPADKKGTHMSRFIALLQDSHAPLNAHEMRSMIGKMLPLLEAQAGQISLKYTHFINKTAPISGVQSLLDYDVTWVANAKNLNGQVEVDLKLQAVVPVTSLCPCSKEISEYGAHNQRSHVTMNVTLQKDIDLSIEDLVRIAEAEASCELWGLLKRPDEKFVTERAYDNPKFVEDLVRDVAGRLKADERIKSFVVEAENFESIHNHSAYALIQSD

SEQ ID NO: 12831 - protein, 259 aa, unidentified
  source 1..259: note = Polynucleobacter duraquae
  REGION 1..259: note = tr|A0A0E3ZIR0|A0A0E3ZIR0_9BURK GTP cyclohydrolase I; OS = Polynucleobacter duraquae OX=1835254 GN=CL55_00003040; PE = 4 SV=1
MPTKKIPAKTVAKSPAKKVSTVNSAKKVAAQKSDVGAPLSVVIRRRIEAQKARFHANDNISKFIQPGELEGLVDEVAEKMQAVLESLVIDTDSDHNTKNTSQRVAKMFVKEVFNGRYIEQPTLTKFPNVSRLNELMIIGPITVRSACSHHLCPIMGRIWIGVLPSKESALIGLSKYSRLTEWVMCRPQIQEEAVVELADMLEKKIKPIGVAIVMDADHFCMQWRGVKDRDSKMVNSVMRGAFLKDSNLRREFLSLLEKR

SEQ ID NO: 12832 - protein, 227 aa, unidentified
  source 1..227: note = Polynucleobacter duraquae
  REGION 1..227: note = tr|A0A0E3ZJ85|A0A0E3ZJ85_9BURK GTP cyclohydrolase I; OS = Polynucleobacter duraquae OX=1835254 GN=CL55_00006090; PE = 4 SV=1
MNDGIPLSEVIRKRIKAKKARFHANDNISAFIQAGELDALVEEVSEKMQAVLESLVIDTQSDHNTKNTSRRVAKMFINEVFNGRYVEQPSLTKFPNVSQLNELMIIGPITVRSACSHHLCPIMGRVWIGILPDKNSALIGLSKYSRLTEWVMCRPQIQEEAVVELADMIEKKVKPTGVAIVMDADHFCMQWRGVKDPDSKMINSVMRGSFLKDSNLRREFLSLISRN

SEQ ID NO: 12833 - protein, 275 aa, unidentified
  source 1..275: note = Polynucleobacter hirudinilacicola
  REGION 1..275: note = tr|A0A210RW84|A0A210RW84_9BURK GTP cyclohydrolase FolE2 OS=Polynucleobacter hirudinilacicola OX=1743166; GN = folE2 PE=3 SV=1
MNDMNPAFLKASAMPDVQSTLDERALPIEQVGIRGVRHPLTIRSASGDFPSVGQFEMDVALPAHVKGTHMSRFMALLQKQAMAIDSTTVVAMVRDMLPLLDAKEGHVQFTYTHFVKKAAPVSGVESLMDYEVTWMARAKQNPAGKLDVELGLRAQVPVMSLCPCSKEISEFGAHNQRSHVTMDVMLDSQTKMTVEDLITAAESEASSELWGLLKRPDEKWVTEHSYSNPKFVEDLVRDVAGNLKADERIRSFVVEAENFESIHNHSAFARISHKK

SEQ ID NO: 12834 - protein, 278 aa, unidentified
  source 1..278: note = Polynucleobacter meluiroseus
  REGION 1..278: note = tr|A0A240DXV6|A0A240DXV6_9BURK GTP cyclohydrolase FolE2 OS=Polynucleobacter meluiroseus OX=1938814 GN=folE2; PE = 3 SV=1
MNDINPSFLQSQAMPDVQSAHDERALPIEQVGIRGLRHPLTIRTRSGILPAVGNFEMDVALPAHVKGTHMSRFIALLQKQEEAIDSASVVSMVREMLPLLNAKEGRIQFTYTHFVKKAAPVSGVESLMDYEVTWTAKAKQGVQDAQDAIDVELNLRAVVPVMSLCPCSKEISEYGAHNQRSHITMSVSLDPRTKMTVEDLVAAAESQASSELWGLLKRPDEKWVTEHAYDNPKFVEDLVRDVAGQLQQDQRVLSLEVEAENFESIHNHSAFARISLTK

SEQ ID NO: 12835 - protein, 275 aa, Polynucleobacter necessarius
  REGION 1..275: note = tr|B1XVZ3|B1XVZ3_POLNS GTP cyclohydrolase FolE2; OS = Polynucleobacter necessarius subsp. necessarius (strain STIR1) OX=452638 GN=folE2 PE=3 SV=1
MNDMNPAFLKSSAMPDVQSTRDERALPIEQVGIRGVRHPLTIRSKTGNFPSVGTFEMDVALPAHVKGTHMSRFMALLQKQDIVVDSTSVVAMAREMLPLLDAKEGHVQFTYTHFVKKAAPVSGVESLMDYKVTWMATVKQNANGNADVELGLRAQVPVMSLCPCSKEISAFGAHNQRSHVTMSVVLDVETKMTVEDLVAAAESEASSELWGLLKRPDEKWVTERSYSNPKFVEDLVRDVAGNLKADQRIRSFVVEAENFESIHNHSAFARISLQK

SEQ ID NO: 12836 - protein, 275 aa, unidentified
  source 1..275: note = Polynucleobacter paneuropaeus
  REGION 1..275: note = tr|A0A2Z4JNQ3|A0A2Z4JNQ3_9BURK GTP cyclohydrolase FolE2 OS=Polynucleobacter paneuropaeus OX=2527775 GN=folE2; PE = 3 SV=1
MNDLNAAFLKPQSMPDVQSTRDERALAIEQVGIRGVRHPLTVRSKAGSFPSVGTFEMNVALPAHVKGTHMSRFIALLQKQEAAVDSTTAVTLVREMLPLLNATEGSVQFTYTHFVKKSAPVSGVESLMDYEVTWTAQARQNVSGTLETQLHLRAVVPVMSLCPCSKEISEFGAHNQRSHVTMSVVLDPQTKMTVEDLVSAAESEASSELWGLLKRPDEKWVTEHSYSNPKFVEDLVRDVAGRLQQDQRIQSLVVEAENFESIHNHSAYAKISLTK

SEQ ID NO: 12837 - protein, 275 aa, unidentified
  source 1..275: note = Polynucleobacter paneuropaeus
  REGION 1..275: note = tr|A0A2Z4JVB8|A0A2Z4JVB8_9BURK GTP cyclohydrolase FolE2 OS=Polynucleobacter paneuropaeus OX=2527775 GN=folE2; PE = 3 SV=1
MNDLNAAFLKPQSMPDVQSTRDERALAIEQVGIRGVRHPLTVRSKAGSFPSVGTFEMNVALPAHVKGTHMSRFIALLQKQEAAVDSTTAVTLVREMLPLLNATEGSVQFTYTHFVKKSAPVSGVESLMDYEVTWTAQARQNVSGTLEAQLHLRAVVPVMSLCPCSKEISEFGAHNQRSHVTMSVVLDPQTKMTVEDLVSAAESEASSELWGLLKRPDEKWVTEHSYSNPKFVEDLVRDVAGRLQQDQRIQSLVVEAENFESIHNHSAYAKISLTK

SEQ ID NO: 12838 - protein, 275 aa, Polynucleobacter sp.
  REGION 1..275: note = tr|A0A258XCU8|A0A258XCU8_9BURK GTP cyclohydrolase FolE2 OS=Polynucleobacter sp. 16-46-70 OX=1970421 GN=folE2; PE = 3 SV=1
MNDINTAFLKPQTMPDVQSSHDERALPIEQVGIRGLRHPLVIRTKSGDMPAVGNFEMDVALPAHVKGTHMSRFIALLQKHQEPVDSTSIVAMVREMLPLLNATEGRIQFTYTHFVKKAAPVSGVESLMDYEVTWTAIAKQSAAGSIGVELNLRALVPVMSLCPCSKEISEYGAHNQRSHVTMSVSLDPHTKMTVEDLVTAAEGQASSELWGLLKRPDEKWVTERAYDNPKFVEDLVRDVAGQLKGDQRILSLVVEAENFESIHNHSAYAKISLTK

SEQ ID NO: 12839 - protein, 275 aa, Polynucleobacter sp.
  REGION 1..275: note = tr|A0A1G3CSY9|A0A1G3CSY9_9BURK GTP cyclohydrolase FolE2 OS=Polynucleobacter sp. GWA2_45_21 OX=1801989; GN = folE2 PE=3 SV=1
MNDINTAFLKPQTMPDIQSSHDERALPIEQVGIRGLRHPLSIRTQTGVMPAVGNFEMDVALPAHVKGTHMSRFIALLQKHNEPIDSASVVAMVREMLPLLNATEGRIQFTYTHFVKKAAPVSGVESLMDYEVTWTAKAKQNAAGAIDVELNLRALVPVMSLCPCSKEISEYGAHNQRSHVTMSVELDPQTKMTVEDLVAAAESQASSELWGLLKRPDEKWVTERAYDNPKFVEDLVRDVAGQLKDDDRILSLVVEAENFESIHNHSAYAKISLAK

SEQ ID NO: 12840 - protein, 275 aa, unidentified
  source 1..275: note = Polynucleobacter sphagniphilus
  REGION 1..275: note = tr|A0A1R0HDR1|A0A1R0HDR1_9BURK GTP cyclohydrolase FolE2 OS=Polynucleobacter sphagniphilus OX=1743169; GN = folE2 PE=3 SV=1
MNDINTAFLQTHAMPDVQSSHDERALPIEQVGIRGLRHPLMIRTKAGTFPAVGNFEMDVALPANVKGTHMSRFVALLQKQTEAIDSEVVVKMVREMLPLLNATEGRIQFSYTHFVKKAAPVSSVESLMDYEVTWIAKGKLLATGNVDVELNLRALVPVMSLCPCSKEISEYGAHNQRSHVTMSVALDSQTKMTVEDLVQAAESQASSELWGMLKRPDEKWVTERAYDNPKFVEDLVRDVAGQLKKDERILSLVVEAENFESIHNHSAYAKISLSK

SEQ ID NO: 12841 - protein, 267 aa, unidentified
  source 1..267: note = Polynucleobacter victoriensis
  REGION 1..267: note = tr|A0A212TDX6|A0A212TDX6_9BURK GTP cyclohydrolase FolE2 OS=Polynucleobacter victoriensis OX=2049319 GN=folE2; PE = 3 SV=1
MNAPENIFLPDVQASLDERNIVIQKVGIKSVRHPVTLQTQTGTQPSVAMIDMTVMLPSNVKGTHMSRFLEVLQNHHEPLNLASVKTMMVNMLNRLEAEEGHLDLKMPLFLKKVAPVSGVESLLDYDLHIKAAFKDGGLKYTLQVQVPVTSLCPCSKKISEYGAHNQRSHIVIAAELTEDMAAEDLIKIAEQAASCELWGLLKRPDEKYVTERAYDNPKFVEDLVRDIAVALEQERKVIAYEVSSENFESIHNHSAYAWLSNDKRNRH

SEQ ID NO: 12842 - protein, 273 aa, unidentified
  source 1..273: note = Polynucleobacter victoriensis
  REGION 1..273: note = tr|A0A212THE0|A0A212THE0_9BURK GTP cyclohydrolase FolE2 OS=Polynucleobacter victoriensis OX=2049319 GN=folE2; PE = 3 SV=1
MNDLNTSFLKTSEMPDVQSSIDHRNIAIDRVGIRGVRHPIQVKTEAGVQPSVAMIDLDVLLPGDKKGTHMSRFMALLQDHDAPLDAAQMRLMVTKMLPLLEADAGQISLKYTHFINKTAPISGVQSLLDYDVTWIAFAKKVNGDTQVELRLQAVVPVTSLCPCSKEIAEYGAHNQRSHVTMNVALQSEADLTIESLVKIAEAEASCELWGLLKRPDEKYVTEKAYDNPKFVEDLVRDVASRLKADNRIKSFVVEAENFESIHNHSAYALIQSN

SEQ ID NO: 12843 - protein, 275 aa, unidentified
  source 1..275: note = Polynucleobacter wuianus
  REGION 1..275: note = tr|A0A191UGZ8|A0A191UGZ8_9BURK GTP cyclohydrolase FolE2 OS=Polynucleobacter wuianus OX=1743168 GN=folE2 PE=3; SV = 1
MNDMNPAFLKASAMPDVQSTLDERALPIEQVGIRGVRHPLTIRSATGNFPSVGTFEMDVALPAHVKGTHMSRFMALLQKQEHAVDSTTVVALVQEMLPLLDAKEGHVQFTYTHFVKKAAPVSGVESLMDYEVTWMATAKQNTAGNTDVELGLRAQVPVMSLCPCSKEISEFGAHNQRSHVTMTVALDSKTQMTVEDLVAAAESEASSELWGLLKRPDEKWVTEHSYSNPKFVEDLVRDVAGNLKADQRIRSFVVEAENFESIHNHSAFARISHKK

SEQ ID NO: 12844 - protein, 367 aa, Pontibaca methylaminivorans
  REGION 1..367: note = tr|A0A1R3WHM4|A0A1R3WHM4_9RHOB GTP cyclohydrolase FolE2 OS=Pontibaca methylaminivorans OX=515897 GN=folE2; PE = 3 SV=1
MNIQNPTLDRAPEDTEARAALELLRAWARRASAEQLAGLDPALRSLAEPDPASPYPAFSREYPADFIVDPEYRAELPDLQNGPASLILGAREQIQHVGISNFRLPIRFHRRDGADLTLETSVTGTVSLEAEKKGINMSRIMRSFYTHSERTFSFEVIEGALDDYKSDLESLDARIQMRFSFPVKMTSLRSGLEGYQYYDIALELVESDGQRQKIMHLDYVYSSTCPCSLELSEHARSARGQLATPHSQRSVARVSVALVPDGPCMWFEDLIEACRRAVPTETQVMVKREDEQAFAELNAANPIFVEDAVRLFCEQLQRDPRIGDFRVVASHQESLHSHDAVSMLVQGDTFASGSIDPRLFPSMFHVG

SEQ ID NO: 12845 - protein, 308 aa, Pontibacillus chungwhensis
  REGION 1..308: note = tr|A0A0A2VH81|A0A0A2VH81_9BACI GTP cyclohydrolase FolE2 OS=Pontibacillus chungwhensis BH030062 OX=1385513; GN = folE2 PE=3 SV=1
MNQTNINTQKQLPSKEERHKLFGSVDPGPRTKPIEKDEMADLQNSREDFLFDLDAVGISNVKHPIRIYSSKKPEMQTTIGTFRFASSIGKGSKGTNMSRFTEQLDRYHNDGFAVDITTLKKFTKELADRLKQEDAEVEVSYPWFFERRGPFSDLAGMNHADATMKVSYHQQTGYDVEVSLTGKITTLCPCSKEISEYSAHNQRGNVTMSVRLTEDFDENDMDWKEALLEAAESNASARIHPVLKRPDEKAVTEQAYENPRFVEDIVRLVAADLYELPYVERFYVACRNEESIHLHDAIAEVTYDKTEE

SEQ ID NO: 12846 - protein, 310 aa, Pontibacillus halophilus
  REGION 1..310: note = tr|A0A0A5GLN0|A0A0A5GLN0_9BACI GTP cyclohydrolase FolE2 OS=Pontibacillus halophilus JSM 076056 = DSM 19796; OX = 1385510 GN=folE2 PE=3 SV=1
MNQTDLNTIKQLPSKEERHKLFGSVDPGPRTKPVEKSEMKDLQNAREDFLFDLDAVGISNVKHPIRINSTMKPEIQTTIGTFKFASSIKQGSKGTNMSRFTEQLDQYHNEGFAIDITTLKRFTKELAGRLKQKDSMVEVSYPWFFERKGPFSDLAGMNHADATIKVNYHEETGFDVEVSLTGKITTLCPCSKEISEYSAHNQRGNVTMSIELTDDFNEDEIDWKHQLLEAAESNASARIHPVLKRPDEKAVTEQAYENPRFVEDIVRLVAADLYELPFVTKFYVACRNEESIHLHDAIAEVTYDKRDETN

SEQ ID NO: 12847 - protein, 308 aa, Pontibacillus litoralis
  REGION 1..308: note = tr|A0A0A5G8Q6|A0A0A5G8Q6_9BACI GTP cyclohydrolase FolE2 OS=Pontibacillus litoralis JSM 072002 OX=1385512; GN = folE2 PE=3 SV=1
MNKTNLNPMKQLPSKEERHKLFGSVEPGPRTKPVEKNKMADLQNSKKDFLFDIDVVGISNVKHPIRIHSSLKPEIQTTIGTFRFSSSIKKGSKGTNMSRFTEQLDKYHNEGFAIDLYTLKAFTKELAERLKQEDAYVEVTFPWFFERKGPFSQLTGLNHANATLKVNYDIHTGYDIEVALQGTITTLCPCSKEISEYSAHNQRGQVTMSVKLTDDFNEQEVDWKAALLEAAESNASARIHPVLKRPDEKAVTEQAYENPRFVEDIVRLVAADLYEMPFVQSFYVACRNEESIHLHDAIAELHYDKTSE

SEQ ID NO: 12848 - protein, 308 aa, Pontibacillus marinus
  REGION 1..308: note = tr|A0A0A5GJZ6|A0A0A5GJZ6_9BACI GTP cyclohydrolase FolE2 OS=Pontibacillus marinus BH030004 = DSM 16465; OX = 1385511 GN=folE2 PE=3 SV=1
MNQTNINANKQLPPKHERHKMFGSVPAGPRTKPVEKEQMVDLQNTKKDFLFDLDAVGITNVKHPIKINSSMKPEIQTTIGTFRFSSSIGKGSKGTNMSRFTEQLDQYHNEGFAIDLETLKRFTKELAARLKQKDAEVEVTYPWFFERKGPFSDLAGMNHADATMKVQYHEDTGYDVEVSLKGTITTLCPCSKEISEYSAHNQRGQVTMSVKLTDDFDENQTDWKAALLEASESNASARIHPVLKRPDEKAVTEQAYENPRFVEDIVRLVAADLYELPYVEKFYVSCQNEESIHLHDAIAEVTYDKTQE

SEQ ID NO: 12849 - protein, 188 aa, Pontibacillus marinus
  REGION 1..188: note = tr|A0A0A5GKV4|A0A0A5GKV4_9BACI GTP cyclohydrolase 1; OS = Pontibacillus marinus BH030004 = DSM 16465 OX=1385511; GN = folE PE=3 SV=1
MKEKEGLVEKNVRSILEEIGEDPQREGLLDTPKRVAKMYKEVFEGVGVDPSVALTTTFESEGYDGMVVVRDIDYYTFCEHHLIPFFGKAHIGYMPENRIVGLSKFARLVELTAKRPQVQERMTEQIASAIHDVLSPKGVIVTVEGQHLCMCARGVKKPGTSTVTTVKRGSFKEDKSLVREFERSIATT

SEQ ID NO: 12850 - protein, 308 aa, Pontibacillus yanchengensis
  REGION 1..308: note = tr|A0A0A2TAC4|A0A0A2TAC4_9BACI GTP cyclohydrolase FolE2 OS=Pontibacillus yanchengensis Y32 OX=1385514; GN = folE2 PE=3 SV=1
MNKTDVNAKKQLPSKEDRHKLFGSVDPGPRTKPVEKDDMADLQNSKKDFLFDLDAVGITNVKHPIRIHSTKKPEIQTTIGTFRFSSSIGKGSKGTNMSRFTEQLDKYHNEGFAIDIYTLKKFTKELAERLKQQDASVEVTFPWFFERKGPFSDLTGMNHADATMNVTYHEELGYDIDVSLKGTITTLCPCSKEISEYSAHNQRGQVTMSVKLTDDFDEQEMDWKEALLEASESNASARIHPVLKRPDEKAVTEQAYENPRFVEDIVRLVAADLYEMPFVQSFYVACQNEESIHLHDAIAEINYDKTTE

SEQ ID NO: 12851 - protein, 222 aa, Pontibacter actiniarum
  REGION 1..222: note = tr|A0A1X9YXI2|A0A1X9YXI2_9BACT GTP cyclohydrolase 1; OS = Pontibacter actiniarum OX=323450 GN=folE PE=3 SV=1
MDNHDLEKEEAMDDHVMSSLETPLRADAFDLSDDEKIAIIEGHFREIMHTLGLDLTDDSLKGTPHRVAKMYVKEIFHGLHPDNKPVARRFENKYKYHKMLVERDITVYSSCEHHFVPIIGKAHVAYIPNEHVIGLSKLNRLVHYYARRPQVQERLTMQIANELKQALQTENVAVLIEADHLCVMSRGVNDVSSSTVTAEYSGLFEQEQYRSEFLGHIRGGKR

SEQ ID NO: 12852 - protein, 230 aa, Pontibacter akesuensis
  REGION 1..230: note = tr|A0A1I7JAU0|A0A1I7JAU0_9BACT GTP cyclohydrolase 1; OS = Pontibacter akesuensis OX=388950 GN=folE PE=3 SV=1
MKQKETLWNIMDNHDLDKEEAMDDHVMSSLDTPLRPDAFDLSDDEKIAIIEQHFHGIMHALGLDLTDDSLKGTPARVAKMYVKEIFHGLHPDNKPYARRFENKYKYNKMLVERNITVYSSCEHHFVPIIGKAHVAYIPNEHVIGLSKLNRIVHYFARRPQVQERLTMQIANELKQALKTDNVAVLIEADHLCVMSRGVNDVSSSTITAEYSGLFEQDQYRNEFLGHIRTK

SEQ ID NO: 12853 - protein, 231 aa, unidentified
  source 1..231: note = Pontibacter chinhatensis
  REGION 1..231: note = tr|A0A1I2VAU8|A0A1I2VAU8_9BACT GTP cyclohydrolase 1; OS = Pontibacter chinhatensis OX=1436961 GN=folE PE=3 SV=1
MRQNETLWNIMDNHDLENQEAMDDHVMGSLETPMRADAFDLSDDEKITIIEGHFREIMHTLGLDLKDDSLKGTPHRVAKMFVKEIFSGLHPDNKPHARRFENKYKYNKMLVERDITVYSSCEHHFVPIIGKAHVAYIPNEHVIGLSKLNRIVQYYARRPQVQERMTMQIANEMKQALQTENVAVLIEADHLCVMSRGVNDVSSSTITAEYSGLFEQESYRAEFLGHIRTKR

SEQ ID NO: 12854 - protein, 226 aa, unidentified
  source 1..226: note = Pontibacter diazotrophicus
  REGION 1..226: note = tr|A0A3D8LI29|A0A3D8LI29_9BACT GTP cyclohydrolase 1; OS = Pontibacter diazotrophicus OX=1400979 GN=folE PE=3 SV=1
MDNHNNDIDIDRDEEAMDDHVMSSLDTPLRADAFKLSNAEKVEIIKGHFHEIMHTLGLDLTDDSLKGTPLRVAKMYVNEIFSGLHPDNKPVARRFENKYKYHKMLVERDITVYSSCEHHFVPIIGKAHVAYIPNEHVIGLSKLNRIVHYYARRPQVQERMTMQIANELKQALQTENVAVMIEADHLCVMSRGVGDVSSSTITAEYSGLFDQQEYRSEFLSHIRSKH

SEQ ID NO: 12855 - protein, 221 aa, unidentified
  source 1..221: note = Pontibacter indicus
  REGION 1..221: note = tr|A0A1R3XJI3|A0A1R3XJI3_9BACT GTP cyclohydrolase 1; OS = Pontibacter indicus OX=1317125 GN=folE PE=3 SV=1
MDNQDLGHGAEEIDDHMMGSLETPLRPDAFALSDAEKIVIIERHFREIMHTMGLDLTDDSLKGTPLRVAKMYVQEIFSGLHPENKPVIRRFENKYKYKQMLVERDITVYSSCEHHFVPIIGKAHVAYMPNEHVIGLSKLNRIVQYYARRPQVQERMTMQIANELKQALQTENVAVLIEADHLCVMSRGVNDVSSSTITAEYSGLFEQDQYRNEFLNHIRQK

SEQ ID NO: 12856 - protein, 222 aa, Pontibacter korlensis
  REGION 1..222: note = tr|A0A0E3ZDW0|A0A0E3ZDW0_9BACT GTP cyclohydrolase 1; OS = Pontibacter korlensis OX=400092 GN=folE PE=3 SV=1
MDNHDLEKEEEMDDHMMSSLETPLRADAFDLSDDEKIAIIEGHFREIMHTLGLDLTDDSLKGTPHRVAKMYVKETFSGLHPDNKPIPRRFENKYKYDKMLVERDITVYSSCEHHFVPIIGKAHVAYIPNEHVIGLSKLNRIVHYYARRPQVQERMTMQIADALKQALRTENVAVLIEADHLCVMSRGVNDVSSSTITAEYSGLFEQENYRAEFLGHIRSSKH

SEQ ID NO: 12857 - protein, 231 aa, unidentified
  source 1..231: note = Pontibacter lucknowensis
  REGION 1..231: note = tr|A0A1N6TFD9|A0A1N6TFD9_9BACT GTP cyclohydrolase 1; OS = Pontibacter lucknowensis OX=1077936 GN=folE PE=3 SV=1
MKLNETLLNIMDNQDLGQEAEEMDDHMMSSLETPLRPDAFDLSDAEKIVIIERHFREIMHTMGLDLTDDSLKGTPLRVAKMYVQEIFSGLHPENKPVIRRFENKYKYNQMLVERDITVYSSCEHHFVPIIGKAHVAYMPNEHVIGLSKLNRIVQYYARRPQVQERMTMQIADELKQALQTENVAVLIEADHLCVMSRGVNDVSSSTITAEYSGLFEQEQYRSEFLSHIRKK

SEQ ID NO: 12858 - protein, 231 aa, unidentified
  source 1..231: note = Pontibacter mucosus
  REGION 1..231: note = tr|A0A2T5YJS7|A0A2T5YJS7_9BACT GTP cyclohydrolase 1; OS = Pontibacter mucosus OX=1649266 GN=folE PE=3 SV=1
MRQNETLWNIMDNHDLENQEAMDDHVMGSLETPLRADAFDLSDDEKITIIEGHFREIMHTLGLDLKDDSLKGTPHRVAKMFVKEIFSGLHPDNKPHARRFENKYKYNKMLVERDITVYSSCEHHFVPIIGKAHVAYIPNEHVIGLSKLNRIVQYYARRPQVQERMTMQIANEMKQALQTENVAVLIEADHLCVMSRGVNDVSSSTITAEYSGLFEQETYRSEFLGHIRTKR

SEQ ID NO: 12859 - protein, 231 aa, unidentified
  source 1..231: note = Pontibacter ramchanderi
  REGION 1..231: note = tr|A0A2N3UB24|A0A2N3UB24_9BACT GTP cyclohydrolase 1; OS = Pontibacter ramchanderi OX=1179743 GN=folE PE=3 SV=1
MKLNETLLNIMDNQDLGHEAEEMDDHMMSSLETPLRPDAFALSDAEKIVIIERHFREIMHTMGLDLTDDSLKGTPLRVAKMYVQEIFSGLHPENKPVIRRFENKYKYNQMLVERDITVYSSCEHHFVPIIGKAHVAYMPNEHVIGLSKLNRIVQYYARRPQVQERMTMQIANELKQALQTENVAVLIEADHLCVMSRGVNDVSSSTITAEYSGLFEQDQYRNEFLSHIRKK

SEQ ID NO: 12860 - protein, 221 aa, Pontibacter sp.
  REGION 1..221: note = tr|A0A364RJM1|A0A364RJM1_9BACT GTP cyclohydrolase 1; OS = Pontibacter sp. 2b14 OX=2080288 GN=folE PE=3 SV=1
MDNHNLPDEEETLHDHMPGSLETPLRPDAFAMPDEEKINIIASHFREIMHTLGLDLTDDSLKGTPNRVAKMYVKEIFHGLNPIHKPVARRFENKYKYNKMLVERDITLYSSCEHHFVPIIGKAHVAYIPNEHVVGLSKLNRIVQYYARRPQVQERMTMQIANELKEALMTDNVAVVIEADHLCVMSRGVNDVSSSTITAEYSGLFEQDQYRNEFLSHIRSK

SEQ ID NO: 12861 - protein, 221 aa, Pontibacter sp.
  REGION 1..221: note = tr|A0A5C8K9U3|A0A5C8K9U3_9BACT GTP cyclohydrolase 1; OS = Pontibacter sp. GY10130 OX=2603253 GN=folE PE=3 SV=1
MDKQDKEHDLEAMEDHLMGSLETPLRPDAFDLPDGEKIAIIAAHFEKIMHTLGLDLTDDSLKGTPLRVAKMYVEEIFSGINPANKPLIRRFENKYNYNQMLVERDITVYSSCEHHFVPIIGKAHVAYMPNEHVIGLSKLNRIVQFYARRPQVQERMTMQIANELKQALKTDNVAVLIEADHLCVMSRGVNDVSSSTITAEYSGLFEENQYRNEFLSHIRQK

SEQ ID NO: 12862 - protein, 221 aa, unidentified
  source 1..221: note = Pontibacter ummariensis
  REGION 1..221: note = tr|A0A239BBH5|A0A239BBH5_9BACT GTP cyclohydrolase 1; OS = Pontibacter ummariensis OX=1610492 GN=folE PE=3 SV=1
MDNHNIDNEEEAMDDHVMSSLETPLRADAFDLTDEEKIKIIEGHFHEIMHTLGLDLTDDSLKGTPHRVAKMYVKEIFNGLHPDNKPVARRFENKYKYHKMLVERDITIYSSCEHHFVPIIGKAHVAYIPNEHVIGLSKLNRIVQYFARRPQVQERMTMQIANELKQALKTENVAVLIEADHLCVMSRGVNDVSSSTVTAEYSGLFEQEHFRSEFLGHIRTK

SEQ ID NO: 12863 - protein, 231 aa, unidentified
  source 1..231: note = Pontibacter virosus
  REGION 1..231: note = tr|A0A2U1AZS7|A0A2U1AZS7_9BACT GTP cyclohydrolase 1; OS = Pontibacter virosus OX=1765052 GN=folE PE=3 SV=1
MKLNETLLNIMDNQELGTEAEEMDDHMMSSLETPLRPDAFALSDAEKIVIIERHFREIMHTMGLDLTDDSLKGTPLRVAKMYVQEIFSGLHPENKPVIRRFENKYKYKQMLVERDITVYSSCEHHFVPIIGKAHVAYMPNEHVIGLSKLNRIVQYYARRPQVQERMTMQIANELKQALQTDDVAVLIEADHLCVMSRGVNDVSSSTITAEYSGLFEQDQYRNEFLSHIRKK

SEQ ID NO: 12864 - protein, 204 aa, Ponticaulis sp.
  REGION 1..204: note = tr|A0A2E0U2W5|A0A2E0U2W5_9RHOB GTP cyclohydrolase 1; OS = Ponticaulis sp. OX=2020902 GN=folE PE=3 SV=1
MDTITTPGSFERAEPIKRPSREEAEEAVRTLLAWAGDDPRREGLLDTPKRVVKAYEEWFSGYKEDPVAYLSRTFDDVQGYDDMVMLRDIDVESHCEHHMAPFIGKAYVAYQPTAAVVGISKLARVVEIFAKRLQTQETMTAQICDAITESLAPMGCAVLIDAKHECMTTRGVHHPNVSTITTQFTGVFKTDKDKRDRFLRLAGK

SEQ ID NO: 12865 - protein, 204 aa, Ponticaulis sp.; identical to SEQ ID NO: 9150
  REGION 1..204: note = tr|A0A2D7KKK2|A0A2D7KKK2_9RHOB GTP cyclohydrolase 1; OS = Ponticaulis sp. OX=2020902 GN=folE PE=3 SV=1

SEQ ID NO: 12866 - protein, 194 aa, unidentified
  source 1..194: note = Ponticoccus gilvus
  REGION 1..194: note = tr|A0A4R6LMC1|A0A4R6LMC1_9ACTN GTP cyclohydrolase 1; OS = Ponticoccus gilvus OX=519423 GN=folE PE=3 SV=1
MLRSMRPFDHERVSAAVRELLLGIGEDPDRNGLRDTPDRVARAYAEMFAGMRQDPADVLGTTFDIAHDEMVLVRDIEVWSCCEHHLVPFTGVAHVGYIPAAEGRITGLSKLARLVDVYAKRPQVQERLTTQIADALVEHLSPRGVIVVIECEHLCMTMRGVRKPGAKTVTSAVRGQLRDQTTRSEAMSLIIDGR

SEQ ID NO: 12867 - protein, 366 aa, unidentified
  source 1..366: note = Ponticoccus marisrubri
  REGION 1..366: note = tr|A0A0W7WNM8|A0A0W7WNM8_9RHOB GTP cyclohydrolase FolE2 OS=Ponticoccus marisrubri OX=1685382 GN=folE2 PE=3; SV = 1
MNIHTPELDRTPSREDAEEALALLRRWAGGAQQDEVAALDPALARLVPGAVAGAYPDLSRAYPHEFSVDTDYKAGLPDLQNGPSSLIRGVPRAIQHVGISNFRLPIRYHTRDNGDLMLETSVTGTVSLEADKKGINMSRIMRSFYAHAEKTFSFGVIEAALDDYKSDLESFDARINMRFSFPVKVDSLRSGLSGYQYYDIALELVETAGVRRKIMHLDYVYSSTCPCSLELSEHARRERGQLATPHSQRSVARISVEVEEGNCLWFEDLIEMCRAAVPTETQVMVKREDEQAFAELNAANPIFVEDAARLFAERLLADQRVGDFRVVASHQESLHSHDAVSVLTEGTLFEQDSLDPRLFASLYHVG

SEQ ID NO: 12868 - protein, 203 aa, unidentified
  source 1..203: note = Pontimonas salivibrio
  REGION 1..203: note = tr|A0A2L2BN11|A0A2L2BN11_9MICO GTP cyclohydrolase 1; OS = Pontimonas salivibrio OX=1159327 GN=folE PE=3 SV=1
MDDQRLQDAVTELLEALGENPERDGLQGTPGRVSKLFQELYRGVGIDPVTVLEEARPLAEAEDQFGDFVALRGIAFSSICEHHLLPFRGTADVGYQPADKLVGLGILADVVEIAASRPQMQERLGDMVADALVRSGVAAGSVVVLRGEHGCVQHRGPKLSESETVTVATAGSFRDPAARREALLSMGSAPLADADPTLPHGSN

SEQ ID NO: 12869 - protein, 211 aa, unidentified
  source 1..211: note = Pontivivens insulae
  REGION 1..211: note = tr|A0A2R8ACY8|A0A2R8ACY8_9RHOB GTP cyclohydrolase 1; OS = Pontivivens insulae OX=1639689 GN=folE PE=3 SV=1
MNAHDPEFNTERDDAPVARPTREQAEEAVRTLLRWAGDDPEREGLLDTPKRVTKAYGDWFRGYDEDPVEMLQRTFEEVEGYDEMVVLRDIRFESYCEHHMAPIIGKAHVGYIPNGRVVGISKLARVVDAFAKRLQVQEKMNAQVAQVLMETLQPHGVAVVLEGEHHCMSTRGVHKPGVSMVTSTMLGAFRDDPATRKEFLSVIGNPTNRMS

SEQ ID NO: 12870 - protein, 206 aa, Porphyrobacter dokdonensis
  REGION 1..206: note = tr|A0A1A7BM21|A0A1A7BM21_9SPHN GTP cyclohydrolase 1; OS = Porphyrobacter dokdonensis DSW-74 OX=1300349 GN=folE; PE = 3 SV=1
MNYVCAHDDEFDPDNPLGKPDVPEHVQDAIRTLLEWAGDDPTREGLLDTPKRVGRAWLEYCEGYKEDPAIHLTRQFEEVGGYDEIVLLKDIPFQSHCEHHMAPITGKAAIAYLPNKKVVGISKLARVLHGFAHRLQIQERLTAEVAQCIWDNLEPHGVAVVIEAQHGCMTGRGVKTHGVEMVTSRILGCFMDDHRSRKEVMSLMGY

SEQ ID NO: 12871 - protein, 202 aa, unidentified
  source 1..202: note = Porphyrobacter mercurialis
  REGION 1..202: note = tr|A0A0B2C0Y0|A0A0B2C0Y0_9SPHN GTP cyclohydrolase 1; OS = Porphyrobacter mercurialis OX=1572751 GN=folE PE=3 SV=1
MSSLLGSDDEEPQGKIVVPEDVQDAVRTLIRWAGDNPEREGLRDTPRRVARAWKEYCQGYGEDPAVHLSRVFREVGGYDEIVLLKDIPFQSHCEHHMAPIIGRAAIAYLPTDRVVGISKLARVLHAYARRLQVQERLTAEVAQCIWDHLQPQGVAVVIEASHACMTARGVRTPGVAMITSKVMGTFRSDPKSRQEVLDLMGY

SEQ ID NO: 12872 - protein, 208 aa, Porphyrobacter neustonensis
  REGION 1..208: note = tr|A0A192D859|A0A192D859_9SPHN GTP cyclohydrolase 1; OS = Porphyrobacter neustonensis OX=1112 GN=folE PE=3 SV=1
MNYISAHDHDETFDPENPLGKPEVPEDVQNAIRTLIAWAGDDPAREGLLDTPKRVGRAWLEYCEGYREDPSIHLTRQFSEVGGYDEIVLLKDIPFQSHCEHHMAPIIGKAAIAYLPRNKVVGISKLARVLHGYARRLQIQERLTAEVAQCIWDHLDPQGVAVVIEAQHGCMTGRGVKTPGVGMITSRMLGCFLDNGSSRKEVMSLMGY

SEQ ID NO: 12873 - protein, 190 aa, Porphyrobacter sanguineus
  REGION 1..190: note = tr|A0A1M7RUG2|A0A1M7RUG2_9SPHN GTP cyclohydrolase 1; OS = Porphyrobacter sanguineus OX=198312 GN=folE PE=3 SV=1
MGKPDVPEHVQDAIRTLLEWAGDDPTREGLLDTPKRVGRAWLEYCEGYKEDPAIHLSRQFSEVGGYDEIVLLKDIPFQSHCEHHMAPITGKAAIAYLPNRKVVGISKLARVLHGFAHRLQIQERLTAEVAQCIWDNLEPHGVAVVIEAQHGCMTGRGVKTHGVEMVTSRILGCFLEDHRSRKEVMSLMGY

SEQ ID NO: 12874 - protein, 206 aa, Porphyrobacter sp.
  REGION 1..206: note = tr|A0A0N1B1B7|A0A0N1B1B7_9SPHN GTP cyclohydrolase 1; OS = Porphyrobacter sp. AAP60 OX=1523423 GN=folE PE=3 SV=1
MNYTSAHDHDFDPENPLGKPEVPDHVQDAIRTLIAWAGDDPDREGLRDTPKRVGRAWLEYCEGYKEDPAIHLSRIFEEVGGYDEIVLLKDIPFQSHCEHHMAPIIGKAAIAYLPNKKVVGISKLARVLHGYAQRLQIQERLTAEVAKCIWDNLEPHGVAVVIEAQHGCMTGRGVKTPGVGMITSRVLGCFLDDDRSRKEVMSLMGY

SEQ ID NO: 12875 - protein, 208 aa, Porphyrobacter sp.
  REGION 1..208: note = tr|A0A2N4WTT8|A0A2N4WTT8_9SPHN GTP cyclohydrolase 1; OS = Porphyrobacter sp. TH134 OX=2067450 GN=folE PE=3 SV=1
MNYVSAHDHDDEFDPENPLGKPEVPEHVQDAIRTLIQWAGDDPAREGLRDTPKRVGRAWLEYCEGYKEDPAIHLSRIFEEVGGYDEIVLLKDIPFQSHCEHHMAPIIGKAAIAYLPNKKVVGISKLARVLHGYAQRLQIQERLTAEVAQCIWDNLDPHGVAVVIEAQHGCMTGRGVKTPGVGMITSRILGCFLDNDSSRKEVMSLMGY

SEQ ID NO: 12876 - protein, 193 aa, unidentified
  source 1..193: note = Porphyromonadaceae bacterium
  REGION 1..193: note = tr|A0A353Q7V5|A0A353Q7V5_9PORP GTP cyclohydrolase 1; OS = Porphyromonadaceae bacterium OX=2049046 GN=folE PE=3; SV = 1
MLSEELQDENGVSALADHMREIITILGEDVEREGLLKTPQRVAKAMQYLTRGYRQDPEKILRSALFKENYRQMVIVKDIDIFSLCEHHMLPFFGKAHVAYIPNEYITGLSKIARVVDVYAHRLQVQERLTTQIKECIQKTLNPMGVMVVIEAQHMCMQMRGVEKQHSVTTTSDFTGVFNQQKTREEFINLIKK

SEQ ID NO: 12877 - protein, 190 aa, unidentified; identical to SEQ ID NO: 12567
  source 1..190: note = Porphyromonadaceae bacterium
  REGION 1..190: note = tr|A0A1I7FKU2|A0A1I7FKU2_9PORP GTP cyclohydrolase 1; OS = Porphyromonadaceae bacterium KHP3R9 OX=1855398 GN=folE; PE = 3 SV=1

SEQ ID NO: 12878 - protein, 207 aa, Porphyromonas asaccharolytica
  REGION 1..207: note = tr|F4KLD2|F4KLD2_PORAD GTP cyclohydrolase 1; OS = Porphyromonas asaccharolytica (strain ATCC 25260 / DSM 20707 / BCRC 10618 / JCM 6326 / LMG 13178 / VPI 4198); OX = 879243GN=folE PE=3 SV=1
MEEPQQILHTNQNYEVNDFLPETQLERMKDHVKELLTELGEDPTREGLLKTPERVSKALHFLTKGYQEDPLAILRAATFREDYQQMVIVRDIDFYSLCEHHMLPFFGKVHVGYIPNKYITGLSKIPRIVEVFARRLQVQERLTTQIKDCIQQALSPLGVIVVIEAQHMCMQMRGVQKQNSLTTTSDFTGAFKESKTREEFFNLVRKG

SEQ ID NO: 12879 - protein, 206 aa, Porphyromonas cangingivalis
  REGION 1..206: note = tr|A0A1T4LM55|A0A1T4LM55_PORCN GTP cyclohydrolase 1; OS = Porphyromonas cangingivalis OX=36874 GN=folE PE=3 SV=1
MSILDTSKGYHTQKTSDEEEEKIISDLAVHYKSTINILGEDINREGLVKTPQRVAKAMRFLTQGYRQDPAAVLRSAMFREDYQQMVIVKDIDFYSMCEHHMLPFFGKAHIAYIPNKYITGLSKLPRVVDIFARRLQVQERLTTEIKDCIQDTLNPMGVMVVIEAQHMCMQMRGVQKQNSITTTSDFTGVFQDQRTREEFMSLIRSK

SEQ ID NO: 12880 - protein, 206 aa, Porphyromonas cangingivalis
  REGION 1..206: note = tr|A0A099WYE6|A0A099WYE6_PORCN GTP cyclohydrolase 1; OS = Porphyromonas cangingivalis OX=36874 GN=folE PE=3 SV=1
MSILDTSKGYHTQKTSDEEEEKIISDLAVHYKSTIDILGEDINREGLVKTPQRVAKAMRFLTQGYRQDPAAVLRSAMFREDYQQMVIVKDIDFYSMCEHHMLPFFGKAHIAYIPNKYITGLSKLPRVVDIFARRLQVQERLTTEIKDCIQDTLNPMGVMVVIEAQHMCMQMRGVQKQNSITTTSDFTGVFQDQRTREEFMSLIRSK

SEQ ID NO: 12881 - protein, 187 aa, Porphyromonas catoniae
  REGION 1..187: note = tr|L1NHG2|L1NHG2_9PORP GTP cyclohydrolase 1; OS = Porphyromonas catoniae F0037 OX=1127696 GN=folE PE=3; SV = 1
MTKDEQLQYHYSQILSLLGEDPQREGLVKTPERVGKAMQFLTQGMAQSPHEILRSAMFKEDYRQMVIVKDIDFYSLCEHHMLPFFGKVHIGYIPNGYITGLSKLPRVVDVFARRLQVQERLTMQIKDCIQEALNPLGVIVVVEAQHMCMQMRGVEKQNSLTTTSDFTGAFREAKTREEFMQLIKRTH

SEQ ID NO: 12882 - protein, 187 aa, Porphyromonas catoniae; identical to SEQ ID NO: 12881
  REGION 1..187: note = tr|Z4WRE6|Z4WRE6_9PORP GTP cyclohydrolase 1; OS = Porphyromonas catoniae ATCC 51270 OX=887901 GN=folE; PE = 3 SV=1

SEQ ID NO: 12883 - protein, 200 aa, Porphyromonas circumdentaria
  REGION 1..200: note = tr|A0A1T4LAC3|A0A1T4LAC3_9PORP GTP cyclohydrolase 1; OS = Porphyromonas circumdentaria OX=29524 GN=folE PE=3 SV=1
MNKQSTFDPQLSPEEMREMIDLNRRIIEILGEDPNREGLIKTPERVTKSLRFLTKGYREDPEEILRSAMFREEYRQMVIVKDIDFFSLCEHHMLPFFGKAHIGYIPNKYVTGLSKIPRVVDVFARRLQVQERLTTQIKDCIQQTLNPLGTIVVIEAQHMCMQMRGVEKQNSLTTTSDFTGAFEEASTREEFMNLIGIRRY

SEQ ID NO: 12884 - protein, 247 aa, Porphyromonas crevioricanis
  REGION 1..247: note = tr|T1CHB1|T1CHB1_9PORP GTP cyclohydrolase 1; OS = Porphyromonas crevioricanis JCM 15906 OX=1305617; GN = folE PE=3 SV=1
MENEGRDTHSPLGRLSHPFSIKDFCFFFSQLFSEYIVGRVCRTPFAHCNRYTQIYMQNEQDLSIQEALQRHYEEVLTLLGEDRSREGLIKTPERVAKAMQFLTSGYQESPEDILLSAKFKEDYRQMVIVKDIDFFSLCEHHMLPFFGKAHVGYIPNKYITGLSKIPRVVNVFSRRLQVQERLTTQIKECIQNTLNPMGVIVVIEAQHMCMQMRGVEKQNALTTTSDFTGAFQEAKTREEFLNLIKQK

SEQ ID NO: 12885 - protein, 192 aa, Porphyromonas crevioricanis
  REGION 1..192: note = tr|A0A0A2FQ44|A0A0A2FQ44_9PORP GTP cyclohydrolase 1; OS = Porphyromonas crevioricanis OX=393921 GN=folE PE=3 SV=1
MQNEQDLSIQEALQRHYEEVLTLLGEDRSREGLIKTPERVAKAMQFLTSGYQESPEDILLSAKFKEDYRQMVIVKDIDFFSLCEHHMLPFFGKAHVGYIPNKYITGLSKIPRVVNVFSRRLQVQERLTTQIKECIQNTLNPMGVIVVIEAQHMCMQMRGVEKQNALTTTSDFTGAFQEAKTREEFLNLIKQK

SEQ ID NO: 12886 - protein, 200 aa, Porphyromonas endodontalis
  REGION 1..200: note = tr|C3JC14|C3JC14_POREA GTP cyclohydrolase 1; OS = Porphyromonas endodontalis (strain ATCC 35406 / BCRC 14492 / JCM 8526 / NCTC 13058 / HG 370) OX=553175 GN=folE; PE = 3 SV =1
MNRQSTFDPQLSPEEMAEMKNLQRRILELIGEDPDREGLIKTPERVAKSLRFLTKGYREDPEEILRSAMFREEYRQMVIVKDIDFFSMCEHHMLPFFGKAHVGYIPNKYITGLSKIPRVVDVFARRLQVQERLTTQIKDCIQATLNPLGTIVVIEAQHMCMQMRGVEKQNSLTTTSDFTGAFEEASTREEFMNLIRIRRN

SEQ ID NO: 12887 - protein, 193 aa, Porphyromonas gingivalis
  REGION 1..193: note = sp|B2RIJ1|GCH1_PORG3 GTP cyclohydrolase 1; OS = Porphyromonas gingivalis (strain ATCC 33277 / DSM 20709 / CIP 103683 / JCM 12257 / NCTC 11834 / 2561) OX=431947; GN = folEPE=3 SV=1
MTEIEKEEACSRLQQHYAQVLSLLGEDPKREGLLKTPLRVAKAMQFLTKGYNEDPEAILRAAMFEEDYQQMVIVKDIDFFSMCEHHMLPFFGKAHVGYIPNRYITGLSKLPRVVDVFARRLQVQERLTTQIKECIQNTLNPLGVIVVIEAQHMCMQMRGVEKQNSLTTTSDFTGAFEESTTREEFLNLIGRRR

SEQ ID NO: 12888 - protein, 193 aa, Porphyromonas gingivalis; identical to SEQ ID NO: 12887
  REGION 1..193: note = tr|A0A134DQ46|A0A134DQ46_PORGN GTP cyclohydrolase 1; OS = Porphyromonas gingivalis OX=837 GN=folE PE=3 SV=1

SEQ ID NO: 12889 - protein, 185 aa, Porphyromonas gingivicanis
  REGION 1..185: note = tr|A0A0A2G6H8|A0A0A2G6H8_9PORP GTP cyclohydrolase 1; OS = Porphyromonas gingivicanis OX=266762 GN=folE PE=3 SV=1
MREMIDLNRRIIELLGEDPAREGLVKTPERVTKSLRFLTKGYREDPEEILRSAMFREEYRQMVIVKDIDFFSLCEHHMLPFFGKAHIGYIPNKYITGLSKIPRVVDVFARRLQVQERLTTQIKDCIQQTLNPLGTIVVIEAQHMCMQMRGVEKQNSLTTTSDFTGAFEEASTREEFMNLIGIRRY

SEQ ID NO: 12890 - protein, 193 aa, Porphyromonas gulae; identical to SEQ ID NO: 12887
  REGION 1..193: note = tr|A0A099WQY3|A0A099WQY3_9PORP GTP cyclohydrolase 1; OS = Porphyromonas gulae OX=111105 GN=folE PE=3 SV=1

SEQ ID NO: 12891 - protein, 202 aa, Porphyromonas levii
  REGION 1..202: note = tr|A0A4Y8WM68|A0A4Y8WM68_9PORP GTP cyclohydrolase 1; OS = Porphyromonas levii OX=28114 GN=folE PE=3 SV=1
MSHHNNPYFTEHIDEAEENALIAELAAHNKEIIQLIGEDPEREGLLKTPERVARALRFLTQGYSQDPAAVLESAKFREDYKQMVIVKDIGFYSMCEHHMLPFFGKVHIAYIPNKYITGLSKLPRVVNILSRRLQVQERLTTQIKECIQDTLKPLGVMVVIEAQHMCMQMRGVQKEGSTTTTSDFTGVFDNIKTREEFMSLIK

SEQ ID NO: 12892 - protein, 193 aa, unidentified
  source 1..193: note = Porphyromonas loveana
  REGION 1..193: note = tr|A0A2U1FSM4|A0A2U1FSM4_9PORP GTP cyclohydrolase 1; OS = Porphyromonas loveana OX=1884669 GN=folE PE=3 SV=1
MTEIEKEEVRLRLQHHYSEVLSLLGENPEREGLLKTPLRVAKAMQFLTKGYNEDPEAILRSAMFEEDYQQMVIVKDIDFFSMCEHHMLPFFGKAHVGYIPNRHITGLSKLPRVVDVFARRLQVQERLTTQIKECIQKTLDPLGVIVVIEAQHMCMQMRGVEKQNSLTTTSDFTGAFEESTTREEFLNLIGRRR

SEQ ID NO: 12893 - protein, 195 aa, Porphyromonas macacae
  REGION 1..195: note = tr|A0A0A2GJA4|A0A0A2GJA4_9PORP GTP cyclohydrolase 1; OS = Porphyromonas macacae OX=28115 GN=folE PE=3 SV=1
MDKYKDLSEEERKSKLEEHYHEALLLLGEDPKREGLIKTPYRMAKAMRFLTKGYDQDPKEILRAAMFKEDYRQMVIVKDIDFYSLCEHHMLPFYGKAHVGYIPNGYITGLSKLPRVVDVFARRLQVQERLTTQIKECIEETLHPLGVIVVLEAQHMCMQMRGVQKQNSITTTSDFTGAFKEAKTREEFLDLIKQK

SEQ ID NO: 12894 - protein, 208 aa, Porphyromonas somerae
  REGION 1..208: note = tr|A0A134B7R1|A0A134B7R1_9PORP GTP cyclohydrolase 1; OS = Porphyromonas somerae OX=322095 GN=folE PE=3 SV=1
MPQKNSLPDPSTLTFVSESEEATEAALRHHYHEILRLLGEDPEREGLVKTPERVAKAMRFLTSGARKDPKEILRSAMFREEYRQMVIVKDIDFYSLCEHHMLPFFGKVHIGYIPNGYITGLSKLPRIVDVFARRLQVQERLTTQIKDCIQEALNPLGVIVVIEAQHMCMQMRGVEKQNSFTTTSDFTGAFREAKTREEFMQLITHSRR

SEQ ID NO: 12895 - protein, 195 aa, Porphyromonas sp.
  REGION 1..195: note = tr|A0A0A2DTQ1|A0A0A2DTQ1_9PORP GTP cyclohydrolase 1; OS = Porphyromonas sp. COT-239 OH1446 OX=1515613 GN=folE; PE = 3 SV=1
MNQDKQQPSVQLELQEHYGQILSLLGEDPQREGLLKTPERVAKALQFLTSGYQQDPEAILRGAMFREDYRQMVIVKDIDFFSMCEHHMLPFFGKAHIGYIPNGYITGLSKLPRVVDVFARRLQVQERLTTQIKSCIQKTLNPLGVIVVIEAQHMCMQMRGVEKQNSLTTTSDFTGAFSEAKTREEFMQLIGHSRR

SEQ ID NO: 12896 - protein, 197 aa, Porphyromonas sp.
  REGION 1..197: note = tr|A0A073IGQ9|A0A073IGQ9_9PORP GTP cyclohydrolase 1; OS = Porphyromonas sp. 31_2 OX=658663 GN=folE PE=3 SV=1
MMSEVNEETLCAREALAGHYKEVLGLLGEDVEREGLLKTPERVAKAMQFLTKGYHEDPEAVLRSAMFQEEDYKQMVIVKDIDFFSLCEHHMLPFFGKAHVAYIPKKYITGLSKIPRVVDIFARRLQIQERMTMQIKDCIQRTLDPLGVMVVIEAQHMCMQMRGVEKQNSLTTTSDFTGFFQQAKTREEFMNLIKHNR

SEQ ID NO: 12897 - protein, 207 aa, Porphyromonas uenonis
  REGION 1..207: note = tr|C2MB05|C2MB05_9PORP GTP cyclohydrolase 1; OS = Porphyromonas uenonis 60-3 OX=596327 GN=folE PE=3 SV=1
MEEPQKILHTNQNYVVSDFLSESQLERMKGHVNALLTELGEDPTREGLLKTPERVSKALHFLTKGYQEDPLAILRAATFREDYQQMVIVRDIDFYSLCEHHMLPFFGKVHVGYIPNKYITGLSKIPRIVDVFARRLQVQERLTTQIKDCIQQALSPLGVIVVIEAQHMCMQMRGVQKQNSFTTTSDFTGAFKESKTREEFFNLVRKS

SEQ ID NO: 12898 - protein, 231 aa, unidentified
  source 1..231: note = Porticoccaceae bacterium
  REGION 1..231: note = tr|A0A2D8WR08|A0A2D8WR08_9GAMM GTP cyclohydrolase 1; OS = Porticoccaceae bacterium OX=2026782 GN=folE PE=3 SV=1
  VARIANT 49: note = Xaa can be any naturally occurring amino acid
MPSTAIARSDTDFQSNLSLEAQLVRNALIEKGLETPMSGIKLSRDEKYXRIRDAMTQVATALGLDLKDDSLQETPHRIAKMYVDEIFSGLNYESFPKISLIKNKMNTEEMIKVKAVKVISTCEHHFVTIDGLANVAYLPGKKIIGLSKINRIVSFFAQRPQVQERLTQQILVALQTLLDTRDVAVFIDATHYCVKARGIMDASSRTETSALGGLFKSDQSLRDNFLNNQRR

SEQ ID NO: 12899 - protein, 185 aa, unidentified
  source 1..185: note = Porticoccaceae bacterium
  REGION 1..185: note = tr|A0A3D3T5T2|A0A3D3T5T2_9GAMM GTP cyclohydrolase 1; OS = Porticoccaceae bacterium OX=2026782 GN=folE PE=3 SV=1
MKDQHSMKDQYAKLIESIGEDLSRPGLVDTPDRAAKAFEFLTGGYHQDLDEVVNEALFPSDSNEMVIVQDIELYSLCEHHLLPFVGKCHVAYIPNGMVLGLSKVARVVDMFARRLQIQENLATQIASTIEKVTGAQGVAVIIEAKHMCMMMRGVEKQNSIMKTSAMLGVFRSSQTTRNEFLSLIK

SEQ ID NO: 12900 - protein, 202 aa, Porticoccus sp.
  REGION 1..202: note = tr|A0A2D5QI60|A0A2D5QI60_9GAMM GTP cyclohydrolase 1; OS = Porticoccus sp. OX=2024853 GN=folE PE=3 SV=1
MEKDAKITNIKTSPIAPTREEAEDAVRTILSWIGENPDREGLVETPRRFIDAYAEYFNGYNINGEDVLKKTFGDVGGYNDIVLLKDIAFNSFCEHHMAPFIGKAHVAYLPSDRVVGISKLARLVDVYAHRLQTQETMTAEISNAIDQSLKPRGVAVILDAEHMCMSLRGVHKHDVSTITTRFTGEFDTNENLRERFMKLTNS

SEQ ID NO: 12901 - protein, 180 aa, Porticoccus sp.
  REGION 1..180: note = tr|A0A2E5C7Y7|A0A2E5C7Y7_9GAMM GTP cyclohydrolase 1; OS = Porticoccus sp. OX=2024853 GN=folE PE=3 SV=1
MTDCYSHIIESTGEKVTRAGLKDTPKRAAKAFEFMTRGYHQNLDDVINGALFPSDANEMVIVKDIELYSLCEHHLLPFIGKCHVAYIPDGKVLGLSKVARIVDMYARRLQIQETLVAQIANTIESVTGANGVAVIIEAKHMCMMMRGVEKQNSVMKTSAMLGSFRDNQATRNEFLSLINC

SEQ ID NO: 12902 - protein, 365 aa, Poseidonocella pacifica
  REGION 1..365: note = tr|A0A1I0V913|A0A1I0V913_9RHOB GTP cyclohydrolase FolE2 OS=Poseidonocella pacifica OX=871651 GN=folE2 PE=3; SV = 1
MNAHTKALDGEEPKREDAEAAIALLRRWAERAEEEDRAALATALAAIRPDAAAYPALRRQYPEEFDANQAYRAGLPDLQNGPASLIRGARQEIQHVGISNFRLPIRFHTRDGGDLTLETSVTGTVSLDAETKGINMSRIMRTFYQHAEETFSFEVIERAVEAYKADLGSFDARIQMRFSFPMKVQSLRSGLWGYQYYDMTMEFVEQDGVQRKFMHLDYVYSSTCPCSLELSEHARQTRGQLATPHSQRSVARISLEVLPGEILWFEDLVEMCRRAVPTETQVMVKREDEQAFAELNAANPIFVEDAARLFCEHLIGDPRIGDFRVIASHQESLHSHDAVSILTEGDTFAQPSHDPKLFATLFHVG

SEQ ID NO: 12903 - protein, 361 aa, Poseidonocella sedimentorum
  REGION 1..361: note = tr|A0A1I6DYG2|A0A1I6DYG2_9RHOB GTP cyclohydrolase FolE2 OS=Poseidonocella sedimentorum OX=871652 GN=folE2; PE = 3 SV=1
MNLHLGELNDTPTRDDARAALDLLRRWAAKVNEGAEDPDTAQLLAAAAGYPALKSDYQGEFIPDAVYKASMPDLQNGPASLIRGARRQIQYVGISNFRLPIAFHTRGGRDLTLETSVTGSVSLDAEKKGINMSRIMRSFYKHAEKTFSFEVIEAALDDYKADLESIDARIQMRFSFPATIQSLRSGLSGYQYYDIALELVEQEGVRRKYLHLDYVYSSTCPCSLELSEHARRARGQLATPHSQRSVARISVEVLPGDCLWFEDLIDLCREAVPTETQVMVKREDEQAFAELNAANPIFVEDAARLFAEKLLSEPRIGDFRVIASHQESLHSHDAVSVLTEGETFAQKSLDPKLFSTLFHTG

SEQ ID NO: 12904 - protein, 188 aa, unidentified
  source 1..188: note = Pradoshia eiseniae
  REGION 1..188: note = tr|A0A2S7N4K5|A0A2S7N4K5_9BACI GTP cyclohydrolase 1; OS = Pradoshia eiseniae OX=2064768 GN=folE PE=3 SV=1
MHEVNKGKIEEAVTMILEALGEDPAREGIADTPKRVARMYEEVFAGLGQDPEEYFETVFGEDHEELVLVKDIPFYSMCEHHLVPFFGVAHVAYIPKGGRVTGLSKLARAVEAVSRRPQLQERITSTVADAIMNKLEPHGVMVVVEAEHMCMTMRGVKKPGSKTVTSAVRGTLATDARTRQEVLSFINK

SEQ ID NO: 12905 - protein, 188 aa, unidentified
  source 1..188: note = Pradoshia sp.
  REGION 1..188: note = tr|A0A5J6XRQ7|A0A5J6XRQ7_9BACI GTP cyclohydrolase I FolE OS=Pradoshia sp. D12 OX=2651284 GN=folE PE=4 SV=1
MSEINRGKIEEAVTMILEALGEDPTREGLLDTPKRVAKMYEEVFSGLRQDPKEYFETVFGEDHEELVLVKDIPFYSMCEHHLVPFFGVAHVAYIPKGGRVTGLSKLARAVEAVSRRPQLQERITSTVADSIMDTLAPHGVMVVVEAEHMCMTMRGVKKPGSKTITSAVRGTLATDSISRQEVLSLINK

SEQ ID NO: 12906 - protein, 222 aa, Pragia fontium
  REGION 1..222: note = tr|A0A0G3CP79|A0A0G3CP79_9GAMM GTP cyclohydrolase 1; OS = Pragia fontium OX=82985 GN=folE PE=3 SV=1
MSSLSKEAILVHAALEARGLETPLRGPVLDATTRKTQIQEHMTSIMQLLNLDLSDDSLMETPKRIAKMYVDEIFSGLDYANFPKITLIENKMKVDEMVTVRDITLTSTCEHHFVTIDGKASVAYIPKDYVIGLSKINRIVQFFSQRPQVQERLTQQILLALQTLLGTTNVAVSIDATHYCVKSRGVCDATSSTSTTSLGGIFKSNPSTRQEFLRAVRYSSHL

SEQ ID NO: 12907 - protein, 222 aa, Pragia fontium
  REGION 1..222: note = tr|A0A379DRB3|A0A379DRB3_9GAMM GTP cyclohydrolase 1; OS = Pragia fontium OX=82985 GN=folE PE=3 SV=1
MSSLSKEAILVHAALEARGLETPLRGPVLDATTRKTQIQEHMTSIMQLLNLDLSDDSLMETPKRIAKMYVDEIFSGLDYANFPKITLIENKMKVDEMVTVRDITLTSTCEHHFVTIDGKASVAYIPKDYVIGLSKINRIVQFFSQRPQVQERLTQQILLALQTLLGTTNVAVSIDATHYCVKSRGVCDATSSTSTTSLGGIFKSNPSTRQEFLRVVRYSSHL

SEQ ID NO: 12908 - protein, 223 aa, Pragia sp.
  REGION 1..223: note = tr|A0A411WKJ5|A0A411WKJ5_9GAMM GTP cyclohydrolase 1; OS = Pragia sp. CF-458 OX=2498113 GN=folE PE=3 SV=1
MSSLSKEAMLVHAALEARGLETPLRGQPVDATTRKQKIEEHMTSIMQLLNLDLSDDSLAETPKRIAKMYVDEIFSGLDYANFPKITLIENKMKVDEMVTVRDITLTSTCEHHFVTIDGKATVAYIPKDYVIGLSKINRIVQFFSQRPQVQERLTQQILLALQTLLGTTNVAVSIDAIHYCVKSRGVCDATSSTSTTSIGGIFKSNPSTRQEFLRAVRHSPHHI

SEQ ID NO: 12909 - protein, 239 aa, unidentified
  source 1..239: note = Prauserella endophytica
  REGION 1..239: note = tr|A0A4U2IPS5|A0A4U2IPS5_9PSEU GTP cyclohydrolase I FolE OS=Prauserella endophytica OX=1592324 GN=folE PE=4; SV = 1
MPRSACAPGHSPEPLLTSFDRFTEPGSEAKSVTNTLDRLVPSDSQDLASPGPVDTERVADLVGQLLAAIGEDPGRVGLSDTPARVAAWWSGFFSPEPSATPTCFTEQHLSGQLVVIGGMSVWSLCEHHLLPMNLDVAVGYVPDGEVMGLSKFGRIAQQCAGRLQVQERFTRQVADEIAVVIGSTNVAVAVRGTHLCMSARGVRMEAARTTTLQASGRFESDPVLSQQFLTLATDRWRAV

SEQ ID NO: 12910 - protein, 229 aa, Prauserella marina
  REGION 1..229: note = tr|A0A1G6PZ12|A0A1G6PZ12_9PSEU GTP cyclohydrolase 1; OS = Prauserella marina OX=530584 GN=folE PE=3 SV=1
MDSPIASGEPVVEADLTTGEEPSENGHALLAERTPVATGRIFDQARAERAVRELLIACGEDPDRNGLVETPARVARAYREMFAGLYSDPDHVLDRTFDESHEELVLVTDIPMYSTCEHHLVPFHGVAHVGYIPNGKGKVTGLSKLARLVDLYAKRPQVQERLTSQIADALERKLKPRGVIVVIEAEHLCMAMRGIRKPGASTTTSAVRGLLKTSASSRAEALDLIKGRR

SEQ ID NO: 12911 - protein, 196 aa, Prauserella muralis
  REGION 1..196: note = tr|A0A2V4BBK5|A0A2V4BBK5_9PSEU GTP cyclohydrolase 1; OS = Prauserella muralis OX=588067 GN=folE PE=3 SV=1
MPVATGRMFDQARAERAVRELLLACGEDPDRDGLQETPARVARAYREMFAGLYNDPDHVLDRTFDESHEELVLVTDIPMFSTCEHHLVPFHGVAHVGYIPNSQGKVTGLSKLARLVDLYAKRPQVQERLTSQIADAIDRKLKPRGVIVVVEAEHLCMAMRGIRKPGARTTTSAVRGLLKTSASSRAEALDLIKGRR

SEQ ID NO: 12912 - protein, 221 aa, Prauserella muralis
  REGION 1..221: note = tr|A0A561EFZ3|A0A561EFZ3_9PSEU GTP cyclohydrolase 1; OS = Prauserella muralis OX=588067 GN=folE PE=3 SV=1
MIPTSRTVNIDSDVEGNGHGILPEDMPVATGRMFDQARAERAVRELLLACGEDPDRDGLQETPARVARAYREMFAGLYNDPDHVLDRTFDESHEELVLVTDIPMFSTCEHHLVPFHGVAHVGYIPNSQGKVTGLSKLARLVDLYAKRPQVQERLTSQIADAIDRKLKPRGVIVVVEAEHLCMAMRGIRKPGARTTTSAVRGLLKTSASSRAEALDLIKGRR

SEQ ID NO: 12913 - protein, 370 aa, unidentified
  source 1..370: note = Prauserella shujinwangii
  REGION 1..370: note = tr|A0A2T0M1T6|A0A2T0M1T6_9PSEU GTP cyclohydrolase 1; OS = Prauserella shujinwangii OX=1453103 GN=folE PE=3 SV=1
MFDQSRAENAVRELLLACGEDPDREGLRETPARVARAYRELFAGLYSEPDRVLDRTFDESHEELVLVTDIPMYSTCVPSEQTVNAVDGRKRARDVAVGDRLWTLANGNVEQTTVVGVSSHRTRELVEVTTAGGTFVVTPDHPLATPHGWMEARDVAGTHIEWTHALGERARQLVGVSGGSPRALHSGALSKADALSWHVRHGFPQDDYATDLIESEYVAVESVRPVSATGTTPYTVYSFTCAPHPTFLVAGHLTHNCEHHLVPFHGVAHVGYIPNAQGKVTGLSKLARLVDLYAKRPQVQERLTSQIADAIDRRLRPRGVIVVIEAEHLCMAMRGVRKPGARTTTSAVRGLLQSSASSRAEALDLIKGRR

SEQ ID NO: 12914 - protein, 193 aa, Prauserella sp.
  REGION 1..193: note = tr|A0A318LTB4|A0A318LTB4_9PSEU GTP cyclohydrolase 1; OS = Prauserella sp. YIM 121212 OX=1477506 GN=folE PE=3 SV=1
MVSPGPVDTERVADLVGQLLAAIGEDPGREGLSDTPARVAAWWRGFFSPEPSAAPTCFPEQHLSGQLVVIGGMSVWSLCEHHLLPMNLDVAIGYVPDGEVMGLSKFGRIAQQYAGRLQVQERFTRQVADEIAVVIGSTDVAVAVRGTHLCMSARGVRMEAARTTTLQARGRFESDPVLSQQFLALATDRWRVA

SEQ ID NO: 12915 - protein, 240 aa, Prauserella sp.
  REGION 1..240: note = tr|A0A365ZT98|A0A365ZT98_9PSEU GTP cyclohydrolase 1; OS = Prauserella sp. PE36 OX=1504709 GN=folE PE=3 SV=1
MSSPHLRAVALSGAAAADVLDPFTTPGSEAKSVTNTLDRLAPSESQDLVSPGPVDTERVADLVGQLLAAIGEDPGREGLSDTPARVAAWWRGFFSPEPSAAPTCFPEQHLSGQLVVIGGMSVWSLCEHHLLPMNLDVAIGYVPDGEVMGLSKFGRIAQQYAGRLQVQERFTRQVADEIAVVIGSTDVAVAVRGTHLCMSARGVRMEAARTTTLQARGRFESDPVLSQQFLALATDRWRVA

SEQ ID NO: 12916 - protein, 201 aa, unidentified
  source 1..201: note = Prevotella aff.
  REGION 1..201: note = tr|A0A1I0NWQ1|A0A1I0NWQ1_9BACT GTP cyclohydrolase 1; OS = Prevotella aff. ruminicola Tc2-24 OX=81582 GN=folE PE=3; SV = 1
MIQNQGIDDKEIYREGLEDLAAHYKQVLSLLGEDTEREGLLKTPMRVAKAMQVLTRGYQMDAHKVLTDALFKEDYSQMVIVKDIDFFSLCEHHMLPFYGKAHVAYIPNGYITGLSKIARVVDIYAHRLQVQERMTQQIKDCIQDTLKPLGVMVVVEAKHMCMQMRGIEKQNSITTTSDFSGAFNQAKTRQEFMNLIHNNQI

SEQ ID NO: 12917 - protein, 195 aa, Prevotella amnii
  REGION 1..195: note = tr|A0A096D4W8|A0A096D4W8_9BACT GTP cyclohydrolase 1; OS = Prevotella amnii DNF00058 OX=1401066 GN=folE PE=3 SV=1
MAKGNEFREGLEELAFHYKKILSLLGEDPSREGLEKTPMRVAKAMQVLTRGYTQDPHKVLTDALFEEKYNQMVIVKDIDFFSMCEHHMLPFYGKAHVAYIPNGKITGLSKVARVIDIFSHRLQVQERLTEQIKDCIQDTLCPLGVMVVLEAKHMCMQMRGVEKQNAITTTSSFSGAFNQAKTREEFMTLLHGKNI

SEQ ID NO: 12918 - protein, 195 aa, Prevotella amnii
  REGION 1..195: note = tr|A0A134B2N2|A0A134B2N2_9BACT GTP cyclohydrolase 1; OS = Prevotella amnii OX=419005 GN=folE PE=3 SV=1
MAKGNEFREGLEELAFHYEKILSLLGEDPSREGLEKTPMRVAKAMQVLTRGYTQDPHKVLTDALFEEKYNQMVIVKDIDFFSMCEHHMLPFYGKAHVAYIPNGKITGLSKVARVIDIFSHRLQVQERLTEQIKDCIQDTLSPLGVMVVLEAKHMCMQMRGVEKQNAITTTSSFSGAFNQAKTREEFMTLLHGKNI

SEQ ID NO: 12919 - protein, 197 aa, Prevotella baroniae
  REGION 1..197: note = tr|U2QF85|U2QF85_9BACT GTP cyclohydrolase 1; OS = Prevotella baroniae F0067 OX=1115809 GN=folE PE=3 SV=1
MNPETEYREGLDQLAAHYHAVLRLLGEDPGRDGLQKTPMRVAKAMQVLTRGYAQNPHKVLTDALFEEKYNQMVIVKDIDFFSMCEHHMLPFYGKVHVAYIPNGYITGLSKIARVVDIFSHRLQVQERLTQQIKDCIQDTLKPMGVMVVVEAKHMCMQMRGVEKQNSITTTSDFSGAFNQAKTREEFMNLLRGESKRI

SEQ ID NO: 12920 - protein, 193 aa, Prevotella bergensis
  REGION 1..193: note = tr|D1PZ83|D1PZ83_9BACT GTP cyclohydrolase 1; OS = Prevotella bergensis DSM 17361 OX=585502 GN=folE PE=3; SV = 1
MNPETEFREGLDELAVHYKEVLRLLGEDPEREGLVKTPLRMAKAMQTLTRGYHQDAHKVLTDALFKEDYNQMVIVKDIGFYSMCEHHLLPFYGKVHVAYIPNGYITGLSKIARVVDIFTHRLQVQERLTQQIKDCIQETLKPLGVMVVIEAQHLCMQMRGVEKQNSITTTSDFSGAFKQAVTRAEFMNLIHQK

SEQ ID NO: 12921 - protein, 197 aa, Prevotella bivia
  REGION 1..197: note = tr|A0A096AAW2|A0A096AAW2_9BACT GTP cyclohydrolase 1; OS = Prevotella bivia DNF00320 OX=1401068 GN=folE PE=3 SV=1
MTTNNEFREGLEELAAHYKEVLTLLGEDPTREGLEKTPMRVAKAMQVLTRGYTQDPHKVLTDALFEEKYNQMVIVKDIDFFSMCEHHMLPFYGKAHVAYIPDGHITGLSKVARVIDIFSHRLQVQERLTEQIKDCIQDTLQPLGVMVVLEAKHMCMQMRGVEKQNSITTTSAFSGAFNQAKTREEFMNLLRGETKRI

SEQ ID NO: 12922 - protein, 197 aa, Prevotella bivia; identical to SEQ ID NO: 12921
  REGION 1..197: note = tr|A0A137SUT2|A0A137SUT2_9BACT GTP cyclohydrolase 1; OS = Prevotella bivia OX=28125 GN=folE PE=3 SV=1

SEQ ID NO: 12923 - protein, 198 aa, Prevotella bryantii
  REGION 1..198: note = tr|D8DVS8|D8DVS8_PREBR GTP cyclohydrolase 1; OS = Prevotella bryantii B14 OX=752555 GN=folE PE=3 SV=1
MNPETEFREGLDELANHYKEVLKLLGENPDREGLAKTPMRVAKAMQILTRGYTQDPHKVLTDALFEEEKYNQMVIVKDIDFFSMCEHHILPFYGKVHVAYIPNKYITGLSKVARVVDIFSHRLQVQERLTQQIKDCIQNTLHPQGVMVVIEAKHMCMQMRGVEKQNSITTTSAFSGAFEQAKTREEFMNLLRGESKRI

SEQ ID NO: 12924 - protein, 198 aa, Prevotella bryantii; identical to SEQ ID NO: 12923
  REGION 1..198: note = tr|A0A255SLW9|A0A255SLW9_PREBR GTP cyclohydrolase 1; OS = Prevotella bryantii OX=77095 GN=folE PE=3 SV=1

SEQ ID NO: 12925 - protein, 197 aa, Prevotella buccae
  REGION 1..197: note = tr|D3I1P7|D3I1P7_9BACT GTP cyclohydrolase 1; OS = Prevotella buccae D17 OX=575611 GN=folE PE=3 SV=1
MNPETEYREGLDQLAAHYKEVLTLLGEDPDRDGLQKTPMRVAKAMQVLTRGYTQDPHKVLTDALFEEKYNQMVIVKDIDFFSMCEHHILPFYGKAHVAYIPNGYITGLSKIARVVDIYSHRLQVQERLTQQIKDCIQETLKPQGVMVVIEAKHMCMQMRGVEKQNSITTTSDFSGVFNSLTTRQEFMSLLRGESKRI

SEQ ID NO: 12926 - protein, 197 aa, Prevotella buccae; identical to SEQ ID NO: 12925
  REGION 1..197: note = tr|E6K387|E6K387_9BACT GTP cyclohydrolase 1; OS = Prevotella buccae ATCC 33574 OX=873513 GN=folE PE=3 SV=1

SEQ ID NO: 12927 - protein, 197 aa, Prevotella buccalis
  REGION 1..197: note = tr|A0A2N6QT11|A0A2N6QT11_9BACT GTP cyclohydrolase 1; OS = Prevotella buccalis OX=28127 GN=folE PE=3 SV=1
MNSDTEFREGLDELASHYEKILSLLGEDPQREGLQKTPMRVAKAMQVLTRGYAQDPKQVLLDALFDEKYNQMVIVKDIDFFSMCEHHMLPFYGKVHVAYIPNGHITGLSKIARVVDIYSHRLQVQERLTQQIGDCIQSALKPLGVMVVIEAKHMCMQMRGVEKQNSITTTSAFSGAFNQAKTREEFMNLLRGESKRI

SEQ ID NO: 12928 - protein, 197 aa, Prevotella buccalis
  REGION 1..197: note = tr|A0A095ZJ96|A0A095ZJ96_9BACT GTP cyclohydrolase 1; OS = Prevotella buccalis DNF00853 OX=1401074 GN=folE PE=3; SV = 1
MNSETEFREGLDELASHYEKILSILGEDPQRDGLQKTPMRVAKAMQVLTRGYAQDAKQVLLDALFDEKYNQMVIVKDIDFFSMCEHHMLPFYGKVHVAYIPNGHITGLSKIARVVDIYSHRLQVQERLTQQIGDCIQSALKPLGVMVVIEAKHMCMQMRGVEKQNSITTTSAFSGAFNQAKTREEFMNLLRGESKRI

SEQ ID NO: 12929 - protein, 193 aa, unidentified
  source 1..193: note = Prevotella colorans
  REGION 1..193: note = tr|A0A2U0TKD0|A0A2U0TKD0_9BACT GTP cyclohydrolase 1; OS = Prevotella colorans OX=1703337 GN=folE PE=3 SV=1
MILEPGYRKGLDELAAHYKEILKLLGEDPSREGLVKTPMRVAKAMQTLTRGYFEDAHQVLRDALFKEDYNQMVIVKDIDFYSMCEHHMLPFYGKAHVAYIPNGYITGLSKVVRVVDILSHKLQVQERLTQQIKDCIQETLQPLGVMVVIEASHMCMQMRGVEKQHSVTTTSDFCGAFNQAKTREEFMNLIRQK

SEQ ID NO: 12930 - protein, 197 aa, Prevotella copri
  REGION 1..197: note = tr|A0A415KY16|A0A415KY16_9BACT GTP cyclohydrolase 1; OS = Prevotella copri OX=165179 GN=folE PE=3 SV=1
MNPETEFREGLDELAEHYTEVLKLLGEDPEREGLVKTPMRVAKAMQILTRGYTQDAHKVLTDALFEEKYNQMVIVKDIDFFSMCEHHMLPFYGKVHVAYIPNGKITGLSKIARVVDIYSHRLQVQERLTQQIKDCIQETLNPQGVMVVIEAKHMCMQMRGVEKQNSITTTSDYSGVFNSLNTRQEFMNLLRGETKRI

SEQ ID NO: 12931 - protein, 197 aa, Prevotella copri
  REGION 1..197: note = tr|A0A3R6GJ61|A0A3R6GJ61_9BACT GTP cyclohydrolase 1; OS = Prevotella copri OX=165179 GN=folE PE=3 SV=1
MNPETEFREGLDELAEHYTEILKLLGEDPEREGLLKTPMRVAKAMQILTRGYTQDAHKVLTDALFKEKYNQMVIVKDIDFFSMCEHHMLPFYGKVHVAYIPNGKITGLSKIARVVDIYSHRLQVQERLTQQIKDCIQETLNPQGVMVVIEAKHMCMQMRGVEKQNSITTTSDYSGVFNSLNTRQEFMSLLRGETKRI

SEQ ID NO: 12932 - protein, 197 aa, Prevotella corporis
  REGION 1..197: note = tr|A0A133QQJ4|A0A133QQJ4_9BACT GTP cyclohydrolase 1; OS = Prevotella corporis OX=28128 GN=folE PE=3 SV=1
MNPETAFREGLDDLAAHYREVLNLLGEDPDREGLEKTPMRVAKAMQILTRGYTQDPRKVLTDALFEEKYNQMVIVKDIDFFSMCEHHMLPFYGKVHVGYIPDGHITGLSKVARVIDIFSHRLQVQERLTEQIKDCIQDTLQPLGTMVIIEAKHMCMQMRGVEKQNSITTTSAFSGAFNQAKTREEFMKLLRSESQRI

SEQ ID NO: 12933 - protein, 193 aa, Prevotella dentalis
  REGION 1..193: note = tr|F9D438|F9D438_PREDD GTP cyclohydrolase 1; OS = Prevotella dentalis (strain ATCC 49559 / DSM 3688 / JCM 13448 / NCTC 12043 / ES 2772) OX=908937 GN=folE PE=3 SV=1
MNPETEFRDGLDELAAHYRQVLALLGEDTQREGLLKTPMRVAKAMQVLTRGYTQDAHKVLTDALFKEDYNQMVIVKDIDFYSMCEHHMLPFFGKTHVAYIPNGYITGLSKIARVVDIFSHRLQVQERLTQQIKDCIQDTLKPLGVMVVVEAQHMCMQMRGVEKQNSITTTSDFSGAFNQAKTREEFMNLLRQR

SEQ ID NO: 12934 - protein, 197 aa, Prevotella denticola
  REGION 1..197: note = tr|F2KYD7|F2KYD7_PREDF GTP cyclohydrolase 1; OS = Prevotella denticola (strain F0289) OX=767031 GN=folE; PE = 3 SV=1
MTPETQFREGLDELAALYKKVLTLLGEDPEREGLEKTPMRVAKAMQVLTRGYTQDPHKVLTDALFEEKYNQMVIVKDIDFFSMCEHHMIPFYGKAHVAYIPNGHITGLSKIARVVDIFSHRLQVQERLTEQVMQCINDTLKPQGVMVVIEAKHMCMQMRGVEKQNAITTTSAYSGVFESSKTRNEFMDLLRGETKRI

SEQ ID NO: 12935 - protein, 197 aa, Prevotella denticola
  REGION 1..197: note = tr|A0A347B0B1|A0A347B0B1_9BACT GTP cyclohydrolase 1; OS = Prevotella denticola OX=28129 GN=folE PE=3 SV=1
MTPETQFREGLDELAAHYRKVLTLLGENPEREGLEKTPMRVAKAMQVLTRGYTQDPHKVLTDALFEEKYNQMVIVKDIDFFSMCEHHMLPFYGKAHVAYIPNGHITGLSKIARVVDIYAHRLQVQERLTEQVMQCINDTLKPQGVMVVVEAKHMCMQMRGVEKQNSITTTSAYSGVFGSSKTRNEFMDLLRGETKRI

SEQ ID NO: 12936 - protein, 197 aa, Prevotella disiens
  REGION 1..197: note = tr|A0A3E4QM05|A0A3E4QM05_9BACT GTP cyclohydrolase 1; OS = Prevotella disiens OX=28130 GN=folE PE=3 SV=1
MNSNIEFREGLDELAGHYRYVLQLLGENPDREGLEKTPIRVAKAMQVLTRGYTQDPHKVLTDALFAEEYNQMVIVKDIDFFSMCEHHMLPFYGKAHVAYIPNGHITGLSKVARVVDIFSHRLQVQERLTQQIKDCIQDTLHPLGTMVVVEAKHMCMQMRGIEKQNSITTTSAFSGAFNQAKTREEFMNLVHSNTMRG

SEQ ID NO: 12937 - protein, 197 aa, Prevotella disiens; identical to SEQ ID NO: 12936
  REGION 1..197: note = tr|A0A096CNZ8|A0A096CNZ8_9BACT GTP cyclohydrolase 1; OS = Prevotella disiens DNF00882 OX=1401075 GN=folE PE=3 SV=1

SEQ ID NO: 12938 - protein, 197 aa, Prevotella enoeca
  REGION 1..197: note = tr|A0A0S2KJ61|A0A0S2KJ61_9BACT GTP cyclohydrolase 1; OS = Prevotella enoeca OX=76123 GN=folE PE=3 SV=1
MNTETEQREGLDELAAHYKRVLELLGEDPERDGLQKTPMRVAKAMQVLTRGYTQDPHKVLTDALFEEKYNQMVIVKDIDFFSMCEHHLLPFYGKAHVAYIPNGYITGLSKIARVVDIFSHRLQVQERLTQQIKDCIENTLHPLGVMVVIEAKHMCMQMRGVEKQNAITTTSDFSGAFNQAKTREEFMNLLRGESKKI

SEQ ID NO: 12939 - protein, 197 aa, Prevotella fusca; identical to SEQ ID NO: 12934
  REGION 1..197: note = tr|A0A0K1NIX0|A0A0K1NIX0_9BACT GTP cyclohydrolase 1; OS = Prevotella fusca JCM 17724 OX=1236517 GN=folE PE=3 SV=1

SEQ ID NO: 12940 - protein, 197 aa, Prevotella histicola
  REGION 1..197: note = tr|A0A095YWW9|A0A095YWW9_9BACT GTP cyclohydrolase 1; OS = Prevotella histicola JCM 15637 = DNF00424 OX=1236504; GN = folE PE=3 SV=1
MTPQTEFREGLDELAVHYKEVLKLLGEDPTREGLEKTPIRVAKAMQVLTRGYTQDPKKVLTDALFEEKYNQMVIVKDIDFFSMCEHHMLPFYGKAHVAYIPNGHITGLSKIARVVDIFSHRLQVQERLTEQIMQCINDTLKPQGVMVVIEAKHMCMQMRGVEKQNSITTTSAYSGVFESSKTRNEFMNLLRGETKRI

SEQ ID NO: 12941 - protein, 197 aa, Prevotella histicola
  REGION 1..197: note = tr|G6ADN4|G6ADN4_9BACT GTP cyclohydrolase 1; OS = Prevotella histicola F0411 OX=857291 GN=folE PE=3 SV=1
MTPQAEFREGLDELAVHYKEVLKLLGEDPTREGLEKTPIRVAKAMQVLTRGYTQDPKKVLTDALFEEKYNQMVIVKDIDFFSMCEHHMLPFYGKTHVAYIPNGHITGLSKIARVVDIFSHRLQVQERLTEQIMQCINDTLKPQGVMVVIEAKHMCMQMRGVEKQNSITTTSAYSGVFESSKTRNEFMNLLRGETKRI

SEQ ID NO: 12942 - protein, 197 aa, Prevotella intermedia
  REGION 1..197: note = tr|A0A1P8JDN0|A0A1P8JDN0_PREIN GTP cyclohydrolase 1; OS = Prevotella intermedia ATCC 25611 = DSM 20706 OX=1122984; GN = folE PE=3 SV=1
MTSNIEFREGLDELAGHYRHVLQLLGEDPSREGLEKTPMRVAKAMQVLTRGYTQDPHKVLTDALFAEKYDQMVIVKDIDFFSMCEHHMLPFYGKAHVAYIPNGYITGLSKVARVVDIFSHRLQVQERLTQQIKDCIQDTLHPLGTMVVVEAKHMCMQMRGIEKQNSITTTSAFSGAFNQAKTREEFMNLVHSDTMRI

SEQ ID NO: 12943 - protein, 197 aa, Prevotella intermedia
  REGION 1..197: note = tr|A0A0D9NGP4|A0A0D9NGP4_PREIN GTP cyclohydrolase 1; OS = Prevotella intermedia ZT OX=1347790 GN=folE PE=3 SV=1
MTSNIEFREGLDDLAGHYRHVLQLLGEDPSREGLEKTPMRVAKAMQVLTRGYTQDPHKVLTDALFAEKYDQMVIVKDIDFFSMCEHHMLPFYGKAHVAYIPNGYITGLSKVARVVDIFSHRLQVQERLTQQIKDCIQDTLHPLGTMVVVEAKHMCMQMRGIEKQNSITTTSAFSGAFNQAKTREEFMNLVHSDTMRI

SEQ ID NO: 12944 - protein, 197 aa, unidentified
  source 1..197: note = Prevotella jejuni
  REGION 1..197: note = tr|A0A2K9H7G0|A0A2K9H7G0_9BACT GTP cyclohydrolase 1; OS = Prevotella jejuni OX=1177574 GN=folE PE=3 SV=1
MIPESPFREGLDELASHYKQVLTLLGEDPEREGLEKTPMRVAKAMQVLTRGYTQDPHKVLTDALFEEKYNQMVIVKDIDFFSMCEHHILPFYGKAHVAYIPKGYITGLSKIARVVDIFSHRLQVQERLTEQVMQCINDTLKPQGVMVVIEAKHMCMQMRGVEKQNSITTTSAYSGVFESSKTRNEFMDLLRGETKRI

SEQ ID NO: 12945 - protein, 193 aa, Prevotella loescheii
  REGION 1..193: note = tr|A0A069QGX1|A0A069QGX1_PRELO GTP cyclohydrolase 1; OS = Prevotella loescheii DSM 19665 = JCM 12249 = ATCC 15930; OX = 1122985 GN=folE PE=3 SV=1
MNLEPEYREGLDQLAAHYKEVLSLLGEDPSREGLEKTPMRVAKAMQVLTRGYTQDARKVLTDALFEEKYNQMVIVKDIDFFSMCEHHMLPFFGKVHVAYIPNGYITGLSKIARVVDIFSHRLQVQERMTQQIKDCIQDTLKPLGVMVVVEAKHLCMQMRGVEKQNSITTTSDFSGAFNQAKTREEFMNLIRPK

SEQ ID NO: 12946 - protein, 213 aa, Prevotella maculosa
  REGION 1..213: note = tr|H1HMN3|H1HMN3_9BACT GTP cyclohydrolase 1; OS = Prevotella maculosa OT 289 OX=999422 GN=folE PE=3 SV=1
MAQNKGQNNDTDNSTAMNPENEFRDGLDDLATHYRHILTLLGEDAQREGLEKTPMRVAKAMQILTRGYTQDPHKVLTDALFKEDYNQMVIVKDIDVFSLCEHHLLPFYGKCHVAYIPNGYITGLSKVARVVDIFSHRLQVQERLTQQIKDCIQQTLKPQGVMVVIEAKHMCMQMRGVEKQNAITTTSDFSGVFNDLTTRQEFMSLLRGESKRI

SEQ ID NO: 12947 - protein, 203 aa, Prevotella marshii
  REGION 1..203: note = tr|E0NUX7|E0NUX7_9BACT GTP cyclohydrolase 1; OS = Prevotella marshii DSM 16973 = JCM 13450 OX=862515; GN = folE PE=3 SV=1
MENKNKMTTEEDFREGLDELSSHYRRILELLGEDPQREGLEKTPMRVAKAMQVLTRGYRQDPSKVLTDALFEESYNQMVIVKDIDFFSLCEHHILPFYGKVHVAYIPNGKITGLSKIARVVDIISHRLQVQERMTQQIKDCIQNTLKPLGVMVIVEAKHMCMQMRGVEKQNSITTTSDFSGAFNQAKTREEFMNLLRGETKRI

SEQ ID NO: 12948 - protein, 197 aa, Prevotella melaninogenica
  REGION 1..197: note = tr|A0A096AG17|A0A096AG17_9BACT GTP cyclohydrolase 1; OS = Prevotella melaninogenica DNF00666 OX=1401073 GN=folE; PE = 3 SV=1
MTPEIPFREGLDELASHYKQVLTLLGENPEREGLQKTPMRVAKAMQVLTRGYTQDPHKVLTDALFEEKYNQMVIVKDIDFFSMCEHHILPFYGKAHVAYIPNGYITGLSKIARVVDIFSHRLQVQERLTEQVMQCINDTLKPQGVMVVIEAKHMCMQMRGVEKQNSITTTSAYSGVFESSKTRNEFMDLLRGETKRI

SEQ ID NO: 12949 - protein, 197 aa, Prevotella melaninogenica
  REGION 1..197: note = tr|D3I6F5|D3I6F5_9BACT GTP cyclohydrolase 1; OS = Prevotella melaninogenica D18 OX=575612 GN=folE PE=3; SV = 1
MTPEIPFREGLDELASHYKQVLTLLGEDPEREGLQKTPMRVAKAMQVLTRGYTQDPHKVLTDALFEEKYNQMVIVKDIDFFSMCEHHILPFYGKAHVAYIPNGYITGLSKIARVVDIFSHRLQVQERLTEQVMQCINDTLKPQGVMVVIEAKHMCMQMRGVEKQNSITTTSAYSGVFESSKTRNEFMDLLRGETKRI

SEQ ID NO: 12950 - protein, 190 aa, Prevotella micans
  REGION 1..190: note = tr|H1Q4R7|H1Q4R7_9BACT GTP cyclohydrolase 1; OS = Prevotella micans F0438 OX=883158 GN=folE PE=3 SV=1
MNPETELREGLDDIAAHYKEIIKLLGEDPKREGLLKTPMRVAKAMQILTRGYTQNPHKVLTDALFSEKYDQMVIVKDIDFFSMCEHHILPFYGKVHVAYIPNGYITGLSKVARVIDIFSHRLQVQERLTEQIKDCIQKTLHPLGTMVIIEANHMCMQMRGVEKQNSITTTSAFSGAFNQAKTREEFMKLL

SEQ ID NO: 12951 - protein, 197 aa, Prevotella multiformis; identical to SEQ ID NO: 12935
  REGION 1..197: note = tr|F0F6J0|F0F6J0_9BACT GTP cyclohydrolase 1; OS = Prevotella multiformis DSM 16608 OX=888743 GN=folE PE=3; SV = 1

SEQ ID NO: 12952 - protein, 197 aa, Prevotella multisaccharivorax
  REGION 1..197: note = tr|F8NC79|F8NC79_9BACT GTP cyclohydrolase 1; OS = Prevotella multisaccharivorax DSM 17128 OX=688246; GN = folE PE=3 SV=1
MNPETEFRDGLDELATHYKAILSLLGENPDREGLVKTPMRVAKAMQILTRGYTQDPHKVLTDALFEEQYDQMVIVKDIDFFSMCEHHMLPFYGKAHIAYIPNGHITGLSKIARVIDIYSHRLQVQERLTEQVMHCINDTLKPQGVMVVIEAKHMCMQMRGVEKQNSITTTSAYSGVFESMKVREEFMSLLRGESKRI

SEQ ID NO: 12953 - protein, 197 aa, Prevotella nigrescens; identical to SEQ ID NO: 12943
  REGION 1..197: note = tr|A0A246EM25|A0A246EM25_9BACT GTP cyclohydrolase 1; OS = Prevotella nigrescens OX=28133 GN=folE PE=3 SV=1

SEQ ID NO: 12954 - protein, 197 aa, Prevotella nigrescens; identical to SEQ ID NO: 12943
  REGION 1..197: note = tr|V8CLI8|V8CLI8_9BACT GTP cyclohydrolase 1; OS = Prevotella nigrescens CC14M OX=1073366 GN=folE PE=3 SV=1

SEQ ID NO: 12955 - protein, 199 aa, Prevotella oralis
  REGION 1..199: note = tr|E7RPT6|E7RPT6_9BACT GTP cyclohydrolase 1; OS = Prevotella oralis ATCC 33269 OX=873533 GN=folE PE=3 SV=1
MIMNSETDTREGLEELAAHYKDILSLLGENPDRDGLQKTPLRMAKAMQILTRGYGQDPHRVLTDALFAETYNQMVIVKDIDFFSMCEHHLLPFYGKAHVAYIPNGYITGLSKIARVVDIYSHRLQVQERMTQQIKDCIQETLKPLGVMVVIEAKHMCMQMRGVEKQNAITTTSDFSGAFNQAKTREEFMNLLRGETKRI

SEQ ID NO: 12956 - protein, 199 aa, Prevotella oralis
  REGION 1..199: note = tr|V8BMN5|V8BMN5_9BACT GTP cyclohydrolase 1; OS = Prevotella oralis CC98A OX=1073367 GN=folE PE=3 SV=1
MIMNSETDIREGLEELAAHYKDILSLLGENPDRDGLQKTPVRMAKAMQILTRGYGQDPHRVLTDALFAETYNQMVIVKDIDFFSMCEHHLLPFYGKAHVAYIPNGYITGLSKIARVVDIYSHRLQVQERMTQQIKDCIQDTLKPLGVMVVIEAKHMCMQMRGVEKQNAITTTSDFSGAFNQAKTREEFMNLLRGETKRI

SEQ ID NO: 12957 - protein, 197 aa, Prevotella oris
  REGION 1..197: note = tr|D1QNM2|D1QNM2_9BACT GTP cyclohydrolase 1; OS = Prevotella oris F0302 OX=649760 GN=folE PE=3 SV=1
MNPETEFREGLDDLATHYRSVLTLLGEDVSREGLEKTPMRVAKAMQILTRGYTQDPHKVLTDALFKEDYNQMVIVKDIDVFSLCEHHMLPFYGKCHVAYIPDGYITGLSKIARVVDIFSHRLQVQERLTQQIKDCIQSTLKPQGVMVVIEAKHMCMQMRGVEKQNSITTTSDFSGVFNDLNTRQEFMSLLRGEFKRI

SEQ ID NO: 12958 - protein, 197 aa, Prevotella oris
  REGION 1..197: note = tr|D7NBA6|D7NBA6_9BACT GTP cyclohydrolase 1; OS = Prevotella oris C735 OX=563008 GN=folE PE=3 SV=1
MNPETEFREGLDDLATHYRSVLTLLGEDVSREGLEKTPMRVAKAMQILTRGYTQDPHKVLTDALFKEDYNQMVIVKDIDVFSLCEHHMLPFYGKCHVAYIPDGYITGLSKIARVVDIFSHRLQVQERLTQQIKDCIQSTLKPQGVMVVIEAKHMCMQMRGVEKQNSITTTSDFSGVFNDLNTRQEFMSLLRGESKRI

SEQ ID NO: 12959 - protein, 197 aa, Prevotella oulorum
  REGION 1..197: note = tr|G1WBW3|G1WBW3_9BACT GTP cyclohydrolase 1; OS = Prevotella oulorum F0390 OX=702438 GN=folE PE=3 SV=1
MNPENEFREGLTDLATHYKSILTLLGEDPQREGLEKTPMRVAKAMQVLTRGYMQDPQQVLTDALFQEDYNQMVIVKDIDVFSLCEHHLLPFYGKCHVAYIPNGYITGLSKIARVVDIFSHRLQVQERLTQQIKECIQATLRPQGVMVVIEAKHMCMQMRGVEKQNSITTTSDFSGVFNDLNTRQEFMSLLRGESKRI

SEQ ID NO: 12960 - protein, 197 aa, Prevotella oulorum; identical to SEQ ID NO: 12959
  REGION 1..197: note = tr|A0A1T4NHS3|A0A1T4NHS3_9BACT GTP cyclohydrolase 1; OS = Prevotella oulorum OX=28136 GN=folE PE=3 SV=1

SEQ ID NO: 12961 - protein, 197 aa, Prevotella pallens
  REGION 1..197: note = tr|F9DIX6|F9DIX6_9BACT GTP cyclohydrolase 1; OS = Prevotella pallens ATCC 700821 OX=997353 GN=folE PE=3; SV = 1
MKSNIEFREGLDELAGHYRHVLQLLGENPDREGLEKTPMRVAKAMQVLTRGYTQDPQKVLTDALFAEEYNQMVIVKDIDFFSMCEHHMLPFYGKAHVAYIPNGYITGLSKVARVVDIFSHRLQVQERLTQQIKDCIQDTLHPLGTMVVIEAKHMCMQMRGVEKQNSITTTSAFSGAFNQAKTREEFMNLVHSDKMRI

SEQ ID NO: 12962 - protein, 197 aa, Prevotella pallens; identical to SEQ ID NO: 12961
  REGION 1..197: note = tr|A0A379F0G6|A0A379F0G6_9BACT GTP cyclohydrolase 1; OS = Prevotella pallens OX=60133 GN=folE PE=3 SV=1

SEQ ID NO: 12963 - protein, 197 aa, Prevotella pleuritidis
  REGION 1..197: note = tr|U2LHZ5|U2LHZ5_9BACT GTP cyclohydrolase 1; OS = Prevotella pleuritidis F0068 OX=1081904 GN=folE PE=3; SV = 1
MNTETEWRDGLDELASHYERVLELLGEDPERDGLQKTPIRVAKAMQVLTRGYTQDPHKVLTDALFEEKYNQMVIVKDIDFFSMCEHHLLPFYGKAHVAYIPNGYITGLSKIARVVDIFSHRLQVQERLTQQIKDCIENTLHPLGVMVVIEAKHMCMQMRGVEKQNAITTTSDFSGAFNQAKTREEFMNLLRGESKKI

SEQ ID NO: 12964 - protein, 201 aa, Prevotella ruminicola
  REGION 1..201: note = tr|A0A1H4BXD1|A0A1H4BXD1_PRERU GTP cyclohydrolase 1; OS = Prevotella ruminicola OX=839 GN=folE PE=3 SV=1
MNIEIKEYDNEKYRDGIEELADHYEKILGLLGEDPTREGLEKTPMRVAKAMQVLTKGYTMDAHKILTDALFKEDYNQMVIVKDIDFFSLCEHHMLPFYGKAHVAYIPNGYITGLSKIARVVDIFAHRLQVQERMTQQIKDCIEQTLHPLGVMVVIEAKHMCMQMRGVEKQNSITTTSDFSGAFNQAKTRQEFMNLIHNNQI

SEQ ID NO: 12965 - protein, 194 aa, Prevotella ruminicola
  REGION 1..194: note = tr|A0A1H5RNS5|A0A1H5RNS5_PRERU GTP cyclohydrolase 1; OS = Prevotella ruminicola OX=839 GN=folE PE=3 SV=1
MIQEVYREGLEELASHYKEVLTLLGEDPTREGLEKTPMRVAKAMQTLTRGYQMDAHKVLTDALFKEDYSQMVIVKDIDFFSLCEHHMLPFYGKAHVAYIPNGYITGLSKIARVVDIFAHRLQVQERMTQQIKDCIQDTLHPLGVMVVVEAKHMCMQMRGIEKQNSITTTSDFSGAFNQAKTRQEFMNLIHNNQI

SEQ ID NO: 12966 - protein, 191 aa, Prevotella saccharolytica
  REGION 1..191: note = tr|L1NI72|L1NI72_9BACT GTP cyclohydrolase 1; OS = Prevotella saccharolytica F0055 OX=1127699 GN=folE PE=3; SV = 1
MNSEPEYREGLNELAEHYKQILGLLGEDAKREGLEKTPLRVAKAMQVLTRGYSQDARKVLTDALFEEKYNQMVIVKDIDFFSMCEHHLLPFYGKVHVAYIPNGYITGLSKIARVVDIFSHRLQVQERMTQQIKNCIQDTLKPLGVMVVVEAQHLCMQMRGVEKQNSITTTSDFSGAFNQAKTREEFMNLLR

SEQ ID NO: 12967 - protein, 197 aa, Prevotella salivae
  REGION 1..197: note = tr|E6MP34|E6MP34_9BACT GTP cyclohydrolase 1; OS = Prevotella salivae DSM 15606 OX=888832 GN=folE PE=3 SV=1
MNPETEFREGLDDLATHYKSILTLLGEDAYREGLEKTPMRVAKAMQILTRGYSQDPHKVLTDALFKEDYNQMVIVKDIDVFSLCEHHMLPFYGKCHVAYIPNGYITGLSKVARVVDIFSHRLQVQERLTQQIKDCIQETLNPQGVMVVIEAKHMCMQMRGVEKQNSITTTSDFSGVFNDLNTRQEFMSLLRGESKRI

SEQ ID NO: 12968 - protein, 197 aa, Prevotella salivae; identical to SEQ ID NO: 12967
  REGION 1..197: note = tr|U2MSZ1|U2MSZ1_9BACT GTP cyclohydrolase 1; OS = Prevotella salivae F0493 OX=1395125 GN=folE PE=3 SV=1

SEQ ID NO: 12969 - protein, 197 aa, Prevotella scopos
  REGION 1..197: note = tr|A0A1B1I8P1|A0A1B1I8P1_9BACT GTP cyclohydrolase 1; OS = Prevotella scopos JCM 17725 OX=1236518 GN=folE PE=3 SV=1
MTPEIPFREGLDELASHYKQVLTLLGEDPEREGLQKTPMRVAKAMQVLTRGYTQDPHKVLTDALFEEKYNQMVIVKDIDFFSMCEHHILPFYGKVHVAYIPNGYITGLSKIARVVDIFSHRLQVQERLTEQVMQCINDTLKPQGVMVVIEAKHMCMQMRGVEKQNSITTTSAYSGVFESSKTRNEFMDLLRGETKRI

SEQ ID NO: 12970 - protein, 219 aa, Prevotella shahii
  REGION 1..219: note = tr|A0A318HYT8|A0A318HYT8_9BACT GTP cyclohydrolase 1; OS = Prevotella shahii DSM 15611 = JCM 12083 OX=1122991; GN = folE PE=3 SV=1
MARKRTFQGTKRTKTSETINNATILIMNLEPEYREGLDQLAAHYKEVLALLGEDPTREGLEKTPMRVAKAMQVLTRGYTQDARKVLTDALFEEKYNQMVIVKDIDFFSMCEHHMLPFFGKVHVAYIPNGYITGLSKIARVVDIFSHRLQVQERMTQQIKDCIQDTLKPLGVMVVVEAKHLCMQMRGVEKQNSVTTTSDFSGAFNQAKTREEFMNLIRPK

SEQ ID NO: 12971 - protein, 197 aa, Prevotella sp.
  REGION 1..197: note = tr|A0A3R6B721|A0A3R6B721_9BACT GTP cyclohydrolase 1; OS = Prevotella sp. AM34-19LB OX=2292364 GN=folE PE=3 SV=1
MNPETEFREGLDELAGHYKEVLKLLGEDTEREGLVKTPMRVAKAMQVLTRGYYQDAHKVLTDALFEEKYDQMVIVKDIDFFSLCEHHMLPFYGKVHVAYIPNGKITGLSKIARVVDIFSHRLQVQERLTQQIKDCIQETLNPQGVMVVVEAKHMCMQMRGVEKQNSITTTSDYSGVFNSLNTRQEFMSLLRGESKRI

SEQ ID NO: 12972 - protein, 196 aa, Prevotella sp.
  REGION 1..196: note = tr|R7HRI5|R7HRI5_9BACT GTP cyclohydrolase 1; OS = Prevotella sp. CAG:279 OX=1262924 GN=folE PE=3 SV=1
MDNKKQLDGLDIEKVNKIAEHYEAILSLLGEDTSREGLVKTPMRAAKAMAFLTSGYRKDADKIVKSAIFSHEGSRMVIVKDIEFHSLCEHHILPFFGKIAIGYIPDGNIVGLSKIARAVDVFARRLQVQERMTRQICDLLTRELSAKGVIVFCEATHMCMRMRGVEKECSTTQTIEYSGVFEKIEYRQEFLSMLKQ

SEQ ID NO: 12973 - protein, 196 aa, Prevotella stercorea
  REGION 1..196: note = tr|A0A415GE87|A0A415GE87_9BACT GTP cyclohydrolase 1; OS = Prevotella stercorea OX=363265 GN=folE PE=3 SV=1
MVTSEFREGLDGLASHYKSIINLLGEDTEREGLQKTPMRVAKAMQVLTRGYSQDPQKVLTDALFKEDYSQMVVVKDIDVFSLCEHHMLPFYGKAHVAYIPNGYITGLSKIARVVDIFSHRLQVQERLTQQIRECIEQTLHPLGVMVVIEAKHMCMQMRGVEKQSSITMTSDFSGAFEQAKTRQEFMNLINSDSHKF

SEQ ID NO: 12974 - protein, 196 aa, Prevotella stercorea
  REGION 1..196: note = tr|R7H6L0|R7H6L0_9BACT GTP cyclohydrolase 1; OS = Prevotella stercorea CAG:629 OX=1263103 GN=folE PE=3; SV = 1
MVTSEFREGLDDLASHYKSIINLLGEDTEREGLQKTPMRVAKAMQVLTRGYSQDPQKVLTDALFKEDYSQMVVVKDIDVFSLCEHHMLPFYGKAHVAYIPNGYITGLSKIARVVDIFSHRLQVQERLTQQIRECIEQTLHPLGVMVVIEAKHMCMQMRGVEKQSSITMTSDFSGAFEQAKTRQEFMNLINSDSHKF

SEQ ID NO: 12975 - protein, 197 aa, Prevotella timonensis
  REGION 1..197: note = tr|A0A2K0XM94|A0A2K0XM94_9BACT GTP cyclohydrolase 1; OS = Prevotella timonensis OX=386414 GN=folE PE=3 SV=1
MNQTNEFREGLDDLASHYQEILQLLGENPDREGLEKTPMRVAKAMQVLTRGYTQDPKRVLLDALFEEKYDQMVIVKDIDFFSLCEHHMLPFYGKAHVAYIPHGHITGLSKVARVVDIYSHRLQVQERLTQQVKDCIQEALQPLGVMVVIEAKHMCMQMRGVEKQNSITTTSAFSGAFNQAKTREEFMNLLRGESRKI

SEQ ID NO: 12976 - protein, 197 aa, Prevotella timonensis
  REGION 1..197: note = tr|A0A098YP60|A0A098YP60_9BACT GTP cyclohydrolase 1; OS = Prevotella timonensis S9-PR14 OX=1401062 GN=folE PE=3; SV = 1
MNQTNEFREGLDELASHYQEILQLLGENPDREGLEKTPMRVAKAMQVLTRGYTQDPKRVLLDALFEEKYDQMVIVKDIDFFSLCEHHMLPFYGKAHVAYIPHGHITGLSKVARVVDIYSHRLQVQERLTQQVKDCIQEALQPLGVMVVIEAKHMCMQMRGVEKQNSITTTSAFSGAFNQAKTREEFMNLLRGESRKI

SEQ ID NO: 12977 - protein, 197 aa, Prevotella veroralis
  REGION 1..197: note = tr|C9MR90|C9MR90_9BACT GTP cyclohydrolase 1; OS = Prevotella veroralis F0319 OX=649761 GN=folE PE=3 SV=1
MTPETQFRDGLDELATHYKEILKLLGENPEREGLEKTPMRVAKAMQVLTRGYTQDPHKVLTDALFEEKYNQMVIVKDIDFFSMCEHHILPFYGKAHVAYIPNGKITGLSKIARVVDIYSHRLQVQERLTEQVMQCINDTLKPQGVMVVIEAKHMCMQMRGVEKQNSITTTSAYSGVFESSKTRNEFMNLLRGETKRI

SEQ ID NO: 12978 - protein, 193 aa, unidentified
  source 1..193: note = Prevotellaceae bacterium
  REGION 1..193: note = tr|A0A239QZ59|A0A239QZ59_9BACT GTP cyclohydrolase 1; OS = Prevotellaceae bacterium MN60 OX=1945887 GN=folE PE=3; SV = 1
MYPENEIFREGLDDLAGHYKEILTLLGEDPSREGLLKTPMRVAKAMQVLTRGYEMDAHQVLRDALFKEDYSQMVIVKDIDFFSLCEHHMLPFYGKVHVAYIPNGYITGLSKIARVVDIYSHRLQVQERMTLQIKECIQETLKPLGVMVVVEARHMCMQMRGVEKQNSITTTSDFCGAFNQAKTREEFMNLINR

SEQ ID NO: 12979 - protein, 194 aa, unidentified
  source 1..194: note = Prevotellaceae bacterium
  REGION 1..194: note = tr|A0A1K1MXR9|A0A1K1MXR9_9BACT GTP cyclohydrolase 1; OS = Prevotellaceae bacterium HUN156 OX=1520830 GN=folE PE=3; SV = 1
MYPENEIFRDGLDDLAGHYKEILTLLGEDPSREGLEKTPMRVAKAMQVLTRGYEMDAHQVLRDALFKEDYSQMVIVKDIDFFSLCEHHMLPFYGKVHVAYIPNGYITGLSKIARVVDIFSHRLQVQERMTLQIKECIQETLKPLGVMVVVEARHMCMQMRGVEKQNSITTTSDFCGAFNQAKTREEFMNLIHNR

SEQ ID NO: 12980 - protein, 226 aa, unidentified
  source 1..226: note = Pricia antarctica
  REGION 1..226: note = tr|A0A1G7DLI3|A0A1G7DLI3_9FLAO GTP cyclohydrolase 1; OS = Pricia antarctica OX=641691 GN=folE PE=3 SV=1
MKIDNTLEKQYEEMGDDHASASEETPLRGDAFVLEDSEKIARIRGNVQEIMMTLGLDLEDDSLKGTPDRVAKMFVQEIFGGLHPDRKPKSSTFANKYKYGEMLVEKNITLYSTCEHHLLPIVGKAHIAYISNGTVVGLSKMNRIVDYFAKRPQVQERLNIQIVRELQQVLDTDDVACVIDAKHLCVNSRGIRDIESSTVTAEYGGKFKNEEVRREFLDYINLDTNF

SEQ ID NO: 12981 - protein, 199 aa, unidentified
  source 1..199: note = Pricia antarctica
  REGION 1..199: note = tr|A0A1G7BAV6|A0A1G7BAV6_9FLAO GTP cyclohydrolase 1; OS = Pricia antarctica OX=641691 GN=folE PE=3 SV=1
MSPYTNLEEYNIEIANDVKKSYSKIIDELGEDVNREGLEKTPERAAKAMMFLTQGYKQDAVEILKSAMFAESYDEMVIIKDIELYSLCEHHLLPFFGKAHVAYIPNGHIVGLSKIPRVVDVFARRLQVQERLTHDILECINNTLKPKGVAVVIEAAHMCMMMRGVQKQNSVTTTSGFRGQFEKIETRNEFLKLISSNLS

SEQ ID NO: 12982 - protein, 363 aa, unidentified
  source 1..363: note = Primorskyibacter insulae
  REGION 1..363: note = tr|A0A2R8AQG3|A0A2R8AQG3_9RHOB GTP cyclohydrolase FolE2 OS=Primorskyibacter insulae OX=1695997 GN=folE2 PE=3; SV = 1
MNVYMPGIKAEPSRDEAETALDLLRQWAARASDDDIASLDPGLTALIGGAGYPDLSRNYPHNFVADAAYRATLPDLQNGPSSLIRGEKRAIQHVGISNFRLPIRYHTRDNGDLNLETSVTGTVSLEADKKGINMSRIMRSFYTHAEKTFSFYVIEHALDDYKSDLESFDARINMRFSFPMKVNSLRSGLTGYQYYDIALEVVELAGVRRRIMHLDYVYSSTCPCSLELSEHARRERGQLATPHSQRSVARISAELKDGKRLWFEDLIDMCRRAVPTETQVMVKREDEQAFAELNAANPIFVEDAARLFAEQLQADDRVGDYRVLASHQESLHSHDAVSVLTEGDLFAQDSLDPKLFSTLFHIG

SEQ ID NO: 12983 - protein, 363 aa, Primorskyibacter sedentarius
  REGION 1..363: note = tr|A0A4R3JNL1|A0A4R3JNL1_9RHOB GTP cyclohydrolase FolE2 OS=Primorskyibacter sedentarius OX=745311 GN=folE2; PE = 3 SV=1
MNLHLADAANDLARKEAETALATLRRWAATASEEELNSLDPDAARFLADGDYPALSNVYPADFDADAAYKTTLPDLQNGPAALIRGARRAIQHVGISNFRLPLRYHTRDNGDLTLETSVTGTVSLEADKKGINMSRIMRSFYGHAEKTFSFEVIEAALDDYKNDLESIDARIQMRFSFPMKVDSLRSGLSGYQYYDIALELIERDGVRLKVVHLDYLYSSTCPCSLELSEHARRTRGQLATPHSQRSVARLSVVVNEGKCLWFEDLIDMCRRAVPTETQVMVKREDEQAFAELNAANPIFVEDAARLFAERLIADPRVGDFRIVASHQESLHSHDAVSILTEGDTFVGKSLDPKLFNTLFHVG

SEQ ID NO: 12984 - protein, 362 aa, Primorskyibacter sp.
  REGION 1..362: note = tr|A0A4R6A9Z6|A0A4R6A9Z6_9RHOB GTP cyclohydrolase FolE2 OS=Primorskyibacter sp. SS33 OX=2547833 GN=folE2; PE = 3 SV=1
MNLHDRDISAEMNRDDAADMLERLRGWAARASEEDLAQLDPQLRALLPGPVPSYPLFSTAYPQGFTVDAAYRAGLPDLQNGTLVRGARRHIQHVGISNFRLPLRVALRDGGEASVQASVTGSVSLAAEMKGINMSRIMRTFYRNAEDSFDLDVIERTLDAYKTDLGSFDARIMMRLSMPLRVDSLRSGLSGWQYYDLAFEVVDLDGTRKRIMHLDYVYSSTCPCSLELAEHARRTRGQLATPHSQRSVARISVELTGGELFVEDLIDHCRAAIPTETQVMVKREDEQAFAELNAANPIFVEDAVRLLAQALASDPAIGDFRVLASHQESLHSHDAVSLLTEGETFAQTSLEPGLFASLHHGG

SEQ ID NO: 12985 - protein, 246 aa, Prochlorococcus marinus
  REGION 1..246: note = tr|A0A0A1ZH54|A0A0A1ZH54_PROMR GTP cyclohydrolase I type 1 OS=Prochlorococcus marinus str. GP2 OX=59925; GN = EU91_0029 PE=4 SV=1
MTSTLPNDNIRNFDDQITNKLISEIIRDRIKNSGKRFSANDNIANFINPGELEILEKEVTSRVKDLLKSLVIDVENDHNTQETAERVSKMYLNEVFKGRYHEQPKVTSFPNDKNLDEIYTVGPISVRSACSHHLVPILGECWIGIKPGNKVIGLSKFARVADWVFSRPHIQEEAVMILADEIEKLCEPKGLGIIVKAQHYCMKWRGVKEPNTSMINSVVRGDFRHDLSLKQEFFELVKQQSATNNY

SEQ ID NO: 12986 - protein, 248 aa, Prochlorococcus marinus
  REGION 1..248: note = tr|A0A0A2A377|A0A0A2A377_PROMR GTP cyclohydrolase I type 1 OS=Prochlorococcus marinus str. MIT 9201 OX=93057; GN = EU95_1397 PE=4 SV=1
MTSTLPNDNIKKTFGDQISNKLISEIIRDRIKLNKKRFHANDNISDFINPGELEILQREVAEKVKDLLKSLVIDIDNDHNSQETAQRVAKMYLQEVFKGRYHKRPNVTDFPNAKKLDEIYTLGPISVRSACSHHMVPIIGDCWIGIKPGNKVIGISKFARVADWVFSRPHIQEEAVMILADEIEKLCEPKGLAILVKAKHYCMCWRGVKEPNTSMINSIVRGDFRHDTSLKQEFFELVKQQPNGLSCY

SEQ ID NO: 12987 - protein, 255 aa, Prochlorococcus sp.
  REGION 1..255: note = tr|A0A0A2CH50|A0A0A2CH50_9PROC GTP cyclohydrolase I type 1 OS=Prochlorococcus sp. MIT 0701 OX=1499502; GN = EV12_2089 PE=4 SV=1
MTSIIPASSKGLGNDTNASPENGQIANTSKISERIRERFIAQGVSFLANDNVSEYIQPGELQELEVEVAGRVRDLLQSLLIDVDNDHNTEETAERVARMYLNEVFKGRYQKQPKITSFPNVKQLDEIYTVGPITMRSACSHHFVPIMGNCWIGIKPGTRVIGLSKFARVADWVFSRPHIQEEAVMILADEIERLCEPQGLGIIVKAEHYCMKLRGVMEPQCTMVNSVVRGVFRHDPSLKQEFFELVRQQEATLAT

SEQ ID NO: 12988 - protein, 248 aa, Prochlorococcus sp.
  REGION 1..248: note = tr|A0A089PE52|A0A089PE52_9PROC GTP cyclohydrolase I type 1 OS=Prochlorococcus sp. MIT 0801 OX=1501269; GN = EW15_1950 PE=4 SV=1
MTSTAPNENVKDNLKDKISCKLVSEIIRERIKANGARFHANDNISDFIQPGELETLEREVATRVRDLLKTLLIDVDNDHNTQETAERVSRMYLNEVFKGRYHPQPKVTNFPNDRNLDEIYTLGPITVRSACSHHFVPILGDCWIGIKPGEKVIGISKFARVADWVFSRPHIQEEAVMILADEIERLCEPKGLAILVKAQHYCMKWRGVKEPETSMINSIVRGDFRHDASLKQEFFELVKQQSNFGKNY

SEQ ID NO: 12989 - protein, 234 aa, unidentified
  source 1..234: note = Prochlorothrix hollandica
  REGION 1..234: note = tr|A0A0M2PV61|A0A0M2PV61_PROHO GTP cyclohydrolase 1; OS = Prochlorothrix hollandica PCC 9006 = CALU 1027; OX = 317619 GN=folE PE=3 SV=1
MTTASASANSASGHPAVTPPSPKVPEVRPDRASRVVTSDDPHEVSQEDMMEAVRTILLGVGEDPDREGLLKTPKRVAEAMRFLTSGYDQSLEDLVNGAIFDEGHNEMVLVRDITAFSLCEHHMLPFMGRVHVAYIPTQKVVGLSKLARIVEMYSRRLQVQERLTRQIAEAVQEILDPQGVAVVMEATHMCMVMRGVQKPGSWTVTSAMLGAFQEDQRTRDEFLSLIRHQPAFMA

SEQ ID NO: 12990 - protein, 184 aa, Prolinoborus fasciculus; identical to SEQ ID NO: 3875
  REGION 1..184: note = tr|A0A2U3MJ19|A0A2U3MJ19_9NEIS GTP cyclohydrolase 1; OS = Prolinoborus fasciculus OX=1056810 GN=folE PE=3 SV=1

SEQ ID NO: 12991 - protein, 105 aa, Prolinoborus fasciculus
  REGION 1..105: note = tr|A0A2U3MEF9|A0A2U3MEF9_9NEIS Putative GTP cyclohydrolase 1 type 2 OS=Prolinoborus fasciculus; OX = 1056810 GN=PFCIP103579_0235 PE=4 SV=1
MLKLIYYVPDENLEDTKNAIFAAGAGGIGEYTNCAWQVLGTGQFKPQEGADPHIGEVGKLEQVEEWRVEILVPDEKAVDVAKALKESHPYEEPAFEFIQLLDIKV

SEQ ID NO: 12992 - protein, 208 aa, unidentified
  source 1..208: note = Prolixibacter denitrificans
  REGION 1..208: note = tr|A0A2P8CFR3|A0A2P8CFR3_9BACT GTP cyclohydrolase 1; OS = Prolixibacter denitrificans OX=1541063 GN=folE PE=3 SV=1
MKFSLNKLDNGGYSKVEHYNTENVEKLATNYQDILGLLGEDPSREGLEKTPVRVAKAMQFLTQGYNMNPEEILSSAKFKEDYRQMVIVKDIELYSLCEHHMLPFFGKAHVAYIPNGYITGLSKIARVVEAFSRRLQVQERLTLQIKECIQNTLNPLGVAVVIEATHMCMVMRGIEKQNSVTTTSDFTGAFEKVATREEFIRLISSDLS

SEQ ID NO: 12993 - protein, 243 aa, unidentified
  source 1..243: note = Prolixibacteraceae bacterium
  REGION 1..243: note = tr|A0A3B9ZMQ9|A0A3B9ZMQ9_9BACT GTP cyclohydrolase 1; OS = Prolixibacteraceae bacterium OX=2053594 GN=folE PE=3; SV = 1
MKVTGFLKTETAKPKYNGTHLPRTNNNNGHDLIGDNHFATSLETPMREDAFLLSDEQKMLLIEDKFRDIMNVLGLDLRDDSLNGTPHRVAKMFVKEIFSGLNPENKPKISVFDNKFKYCEMLVEKNINLNSTCEHHFLPIVGKAHVAYVSSGQVIGLSKINRVVDYFSRRPQVQERLTVQIANELKRILKTEDVAVVIEAKHLCVSSRGIQDESSSTISAEYGGVFKEMHRKDEFLKYLSLDL

SEQ ID NO: 12994 - protein, 169 aa, unidentified
  source 1..169: note = Prolixibacteraceae bacterium
  REGION 1..169: note = tr|A0A350YZK0|A0A350YZK0_9BACT GTP cyclohydrolase 1 (Fragment) OS=Prolixibacteraceae bacterium OX=2053594; GN = folE PE=3 SV=1
MEFSLQNNDGNYRRIEKHDSAKLKKLSKHYKEILDLLGEDTDREGLQKTPLRVAKAMQFLLQGYEMDPVKILESAMFKEDYRQMVIVKDIEIYSMCEHHLLPFIGKAHVAYIPNGYITGLSKIARVVDVYARRLQVQERLTSQIKDCIQSTLNPLGVAVVIEAQHLCMQ

SEQ ID NO: 12995 - protein, 207 aa, Promicromonospora sp.
  REGION 1..207: note = tr|A0A421AIC0|A0A421AIC0_9MICO GTP cyclohydrolase 1; OS = Promicromonospora sp. YR516 OX=2135725 GN=folE PE=3 SV=1
MTDGSITPLSTPLRRAADVPPYDADRAEAAVRELLLAVGEDPEREGLRETPARVARAYREIFAGLRQEPEDVLTTTFDLGHEEMVLVKDIEVYSTCEHHLVPFHGVAHVGYIPNVDGRITGLSKLARLVEVYARRPQVQERMTTQIADSLVEILEPRGVLVVVQCEHLCMSMRGVRKPGSRTITSAVRGVMRDGATRAEAMSLILGK

SEQ ID NO: 12996 - protein, 207 aa, Promicromonospora sp.
  REGION 1..207: note = tr|A0A542K7Y8|A0A542K7Y8_9MICO GTP cyclohydrolase 1; OS = Promicromonospora sp. SLBN-65 OX=1365480 GN=folE PE=3; SV = 1
MTDGSITPLSTPVRRAADVPPYDAARAEAAVRELLLAVGEDPEREGLRETPARVARAYREIFAGLRQEPEDVLTTTFDLGHEEMVLVKDIEVYSTCEHHLVPFHGVAHVGYIPNVDGRITGLSKLARLVEVYARRPQVQERMTTQIADSLVEILEPRGVLVVVQCEHLCMSMRGVRKPGSRTVTSAVRGVMRDGATRAEAMSLILGK

SEQ ID NO: 12997 - protein, 207 aa, Promicromonospora sukumoe
  REGION 1..207: note = tr|A0A2U1ESA5|A0A2U1ESA5_9MICO GTP cyclohydrolase 1; OS = Promicromonospora sukumoe OX=88382 GN=folE PE=3 SV=1
MTDRSITPVVTPVRRAADVPPYDAARAEAAVRELLLAVGEDPEREGLRETPARVARAYREIFAGLRQEPEDVLTTTFDLGHEEMVLVKDIEVYSTCEHHLVPFHGVAHVGYIPNVDGRITGLSKLARLVEVFARRPQVQERMTTQIADSLVEILEPRGVLVVVQCEHLCMSMRGVRKPGSRTVTSAVRGVMRDGATRAEAMSLILGK

SEQ ID NO: 12998 - protein, 207 aa, unidentified
  source 1..207: note = Promicromonospora thailandica
  REGION 1..207: note = tr|A0A397LWU6|A0A397LWU6_9MICO GTP cyclohydrolase 1; OS = Promicromonospora thailandica OX=765201 GN=folE PE=3; SV = 1
MTDRSVTPVTTPARRPADIPPYDAARAEAAVREFLLAVGEDPDREGLRETPARVARAYQEIFAGLRQEAKDVLTTTFDLGHEEMVLVKDIEVYSTCEHHLVPFHGVAHVGYIPNADGRITGLSKLARLVEVYARRPQVQERMTTQIADSLVEILEPRGVLVVVECEHLCMSMRGVRKPGSRTITSAVRGVMRDGATRAEAMSLILGK

SEQ ID NO: 12999 - protein, 208 aa, unidentified
  source 1..208: note = Propionibacteriaceae bacterium
  REGION 1..208: note = tr|A0A255DZ64|A0A255DZ64_9ACTN GTP cyclohydrolase 1; OS = Propionibacteriaceae bacterium NML 160184 OX=2016506; GN = folE PE=3 SV=1
MARRAPPPTNESAVNESGFDEDRVRRGVREILAGIGEDPDRDGLRDTPARVARAYGELFAGLRQDPAEVLETTFELDHNELVLVTDIEVASMCEHHLLPFTGVAHVGYIPGDQGRVTGLSKLARLVEVYARRPQIQERLTTQVADALVDSLKPGGVIVVVDCEHLCMSMRGVHKPGARTVTSAVRGMLRRPATRAEAMSLIQHGAGGR

SEQ ID NO: 13000 - protein, 203 aa, unidentified
  source 1..203: note = Propionibacteriaceae bacterium
  REGION 1..203: note = tr|A0A367YW99|A0A367YW99_9ACTN GTP cyclohydrolase 1; OS = Propionibacteriaceae bacterium 16Sb5-5 OX=2268447; GN = folE PE=3 SV=1
MVERSQSTPPEPAVAPGFDHARVEAAVRELLIGIGEDPDRDGLLDTPARVARAYAEMFSGLHSNPADVLSTTFELSHDEMVLVSDIEVWSCCEHHLVPFTGRAHVGYIPGPDGRITGLSKLARLVDLYAKRPQVQERLTTQIADALVQHLSPRGVIVVIDCEHLCMTMRGVRKPGSRTVTSAVRGQLRDPATRAEAMSLIARS

SEQ ID NO: 13001 - protein, 209 aa, Propionibacterium acidifaciens
  REGION 1..209: note = tr|U2SD09|U2SD09_9ACTN GTP cyclohydrolase 1; OS = Propionibacterium acidifaciens F0233 OX=553198 GN=folE; PE = 3 SV=1
MTEKPSREIDNTPCLGPGARPAPGFDGARIEAAVRELLIGMGEDPDRDGLRDTPARVARAYAEVFSGIGRDPDEVLARTFDISHEEMVLVRDIEVYSTCEHHLMPFHGVAHVCYIPPRNGRVTGLSKIARLVELYARRPQVQERLTGQVADALVHTLQARGALVVVDCEHLCMTMRGVRKPGARTVTSAVRGQLRDPATRAEAMSLINS

SEQ ID NO: 13002 - protein, 201 aa, Propionibacterium acidifaciens
  REGION 1..201: note = tr|A0A3G5HTT4|A0A3G5HTT4_9ACTN GTP cyclohydrolase 1; OS = Propionibacterium acidifaciens OX=556499 GN=folE PE=3; SV = 1
MDNTPCLGPGARPAPGFDGARIEAAVRELLIGMGEDPDRDGLRDTPARVARAYAEVFSGIGRDPDEVLARTFDISHEEMVLVRDIEVYSTCEHHLMPFHGVAHVCYIPPRNGRVTGLSKIARLVELYARRPQVQERLTGQVADALVHTLQARGALVVVDCEHLCMTMRGVRKPGARTVTSAVRGQLRDPATRAEAMSLINS

SEQ ID NO: 13003 - protein, 209 aa, Propionibacterium australiense
  REGION 1..209: note = tr|A0A383S5F2|A0A383S5F2_9ACTN GTP cyclohydrolase 1; OS = Propionibacterium australiense OX=119981 GN=folE PE=3; SV = 1
MTENQPREIDNTPYAVPGTRLAPGFDGARVEAAVRELLIGIGEDPDRDGLRDTPARVARAYAEVFSGIGQDPGEVLARTFDISHEEMILVRDIEVYSTCEHHLMPFHGVAHVCYIPPRDGRVTGLSKIARLVELYARRPQVQERLTGQVADALMGSLNARGALVVIDCEHLCMTMRGVHKPGARTLTSAVRGLLREPATRAEAMSLINA

SEQ ID NO: 13004 - protein, 211 aa, Propionibacterium cyclohexanicum
  REGION 1..211: note = tr|A0A1H9RUA4|A0A1H9RUA4_9ACTN GTP cyclohydrolase 1; OS = Propionibacterium cyclohexanicum OX=64702 GN=folE PE=3; SV = 1
MSGVSSTEIDNSAYLAAESPLPVGFDGARVEAAVRELLIGIGEDPDRQGLRETPARVARACAEIFSGLGKDPAQVLAKTFDISHDEMVLVRDIKFFSTCEHHLMPFFGVAHICYIPPKDGRVTGLSKLARLVELYARRPQVQERLTTEIADALVDVLRARGVMVVVECEHLCMTMRGVHTPSSRTVTSAVRGQLRDPATRAEAMGLINRSH

SEQ ID NO: 13005 - protein, 225 aa, Propionibacterium freudenreichii
  REGION 1..225: note = tr|D7GG63|D7GG63_PROFC GTP cyclohydrolase 1; OS = Propionibacterium freudenreichii subsp. shermanii (strain ATCC 9614 / DSM 4902 / CIP 103027 / NCIMB 8099 / CIRM-BIA1)OX=754252 GN=folE PE=3 SV=1
MSESTRAGRSDETRETDATDHAIDNSAYEQPGLELPPGFDGKRIEAAMREVLIGIGEDPDREGLVETPARIARAYGEIFSGLGKEPDKVLARTFDISHDEMVLVRDIDVHSMCEHHLLPFHGRAHVCYIPAKDGRVTGLSKLARLVDLYARRPQVQERLTTQMANALVDQLGARGVLVVLECEHQCMTMRGVRKPGSTTVTSAVRGVLRDPATRSEAMSLIVRNR

SEQ ID NO: 13006 - protein, 233 aa, Propionibacterium freudenreichii
  REGION 1..233: note = tr|A0A341FB20|A0A341FB20_9ACTN GTP cyclohydrolase 1; OS = Propionibacterium freudenreichii OX=1744 GN=folE PE=3; SV = 1
MPSRKGDPLSESTRAGRSDETRETDATDHAIDNSAYEQPGLELPPGFDGKRIEAAMREVLIGIGEDPDREGLVETPARIARAYGEIFSGLGKEPDKVLARTFDISHDEMVLVRDIDVHSMCEHHLLPFHGRAHVCYIPAKDGRVTGLSKLARLVDLYARRPQVQERLTTQMANALVDQLGARGVLVVLECEHQCMTMRGVRKPGSTTVTSAVRGVLRDPATRSEAMSLIVRNR

SEQ ID NO: 13007 - protein, 194 aa, unidentified
  source 1..194: note = [Propionibacterium] humerusii
  REGION 1..194: note = tr|E4HKW6|E4HKW6_9ACTN GTP cyclohydrolase 1; OS = [Propionibacterium] humerusii HL044PA1 OX=765109; GN = folE PE=3 SV=1
MSFTKLLVDRERVAAATREFLLAIGEDPNREGLRDTPMRVAKAAEELFGGLSQDPGELLATTFDISHDEMVLVRDIELQSMCEHHLLPFIGVAHVGYIPAKDGRVTGLSKIARLVEVYARRPQVQERLTTQVADALVKHLGARGVIVVVEAEHMCMTTRGVRKPGARTVTSAVRGILRNPATRAEAMGLITAGR

SEQ ID NO: 13008 - protein, 194 aa, unidentified; identical to SEQ ID NO: 13007
  source 1..194: note = [Propionibacterium] humerusii
  REGION 1..194: note = tr|F3NX77|F3NX77_9ACTN GTP cyclohydrolase 1; OS = [Propionibacterium] humerusii P08 OX=999892 GN=folE; PE = 3 SV=1

SEQ ID NO: 13009 - protein, 193 aa, unidentified
  source 1..193: note = [Propionibacterium] namnetense
  REGION 1..193: note = tr|F9NVV5|F9NVV5_9ACTN GTP cyclohydrolase 1; OS = [Propionibacterium] namnetense SK182B-JCVI OX=1051006; GN = folE PE=3 SV=1
MSSTKLSVDRERAAAAIREFLLAIGEDPDREGLRDTPMRVAKAAEELFGGLSQDPGELLATTFDICHDEMVLVRDIELQSMCEHHLLPFIGVAHVGYIPAKNGRVTGLSKIARLVEVYARRPQVQERLTTQVANALVDHLDARGVIVVVEAEHMCMTTRGVRKPGARTVTSAVRGILRNSATRAEAMGLITGR

SEQ ID NO: 13010 - protein, 209 aa, Propionibacterium sp.
  REGION 1..209: note = tr|A0A375HZS0|A0A375HZS0_9ACTN GTP cyclohydrolase 1; OS = Propionibacterium sp. JV5 OX=1962131 GN=folE PE=3 SV=1
MTENEPHETDNTPYAVPGGRLAPGFDGARIEAAVRELLIGIGEDPDRDGLRDTPARVARAYAEVFSGIGQDPGDVLARTFDISHEEMILVRDIEVYSTCEHHLMPFHGVAHVCYIPPRDGRVTGLSKIARLVEIYARRPQVQERLTGQIADALMGSLHARGALVVIDCEHLCMTMRGVHKPGARTLTSAVRGLLRDPATRAEAMSLINA

SEQ ID NO: 13011 - protein, 207 aa, Propionibacterium sp.
  REGION 1..207: note = tr|U7J7F8|U7J7F8_9ACTN GTP cyclohydrolase 1; OS = Propionibacterium sp. KPL2000 OX=1203629 GN=folE PE=3; SV = 1
MNETPSELEIPLEPEIASECCVDVVRAQAAVREFLLAVGEDPDREGLRDTPARVARAAGELLGGLYQDPAQILATTFDMSHDELVLVRDIEVQSFCEHHLLPFVGVAHVGYIPAKDGRVTGLSKIARLVDVYARRPQVQERLTTQVADAMVEHLDARGVIVVVECEHMCITMRGVHKPGSRTVTSAVRGMLRNPATRAEAMGLIARG

SEQ ID NO: 13012 - protein, 187 aa, unidentified
  source 1..187: note = Propioniciclava sinopodophylli
  REGION 1..187: note = tr|A0A4Q9KGR8|A0A4Q9KGR8_9ACTN GTP cyclohydrolase 1; OS = Propioniciclava sinopodophylli OX=1837344 GN=folE PE=3; SV = 1
MAVDQERVAAAVREILSAIGEDPDRDGLVGTPERVARAYAEMFSGLDQDPGDPLGVTFDIEHEEMVLVKDIELWSTCEHHLLPFHGVAHVAYIPSRDGKITGLSKLARLVDVFARRPQVQERLTGQIADALVHHLQPQGVMVVVEAEHQCMTMRGVRKPGSSTVTSAVRGALRNAATRAEAMGLIIG

SEQ ID NO: 13013 - protein, 187 aa, Propioniciclava tarda
  REGION 1..187: note = tr|A0A4V2JTH6|A0A4V2JTH6_9ACTN GTP cyclohydrolase 1; OS = Propioniciclava tarda OX=433330 GN=folE PE=3 SV=1
MAVDHDRAARAVREFLFAIGEDPDREGLRDTPGRVARAAVELFAGLDADPADLLATTFDIQHEELVLVKDIEVVSMCEHHLLPFTGVAHVAYIPAKNGHVTGLSKLARLVDVYARRPQVQERLTTQIADALVTHLRAQGVMVVVEAEHQCMTMRGVRKPGSKTVTSAVRGVMHAPATRAETMSLILG

SEQ ID NO: 13014 - protein, 186 aa, Propionicimonas paludicola
  REGION 1..186: note = tr|A0A2A9CUB1|A0A2A9CUB1_9ACTN GTP cyclohydrolase 1; OS = Propionicimonas paludicola OX=185243 GN=folE PE=3 SV=1
MAVDQPRVAAAIRELLIGIGEDPDRDGLVDTPARVAKAYASIFEGMDADPAQILSTTFELGHDELVLVRDIEVWSTCEHHLLPFTGKAHVGYIPSKGRITGLSKLARLVDAYAKRPQVQERLTSQVADALVEHLKPRGAIVVIECEHLCMTMRGVRKPGAKTVTSAVRGVMANPATRAEVMGLIIG

SEQ ID NO: 13015 - protein, 193 aa, Propioniferax innocua
  REGION 1..193: note = tr|A0A542ZCQ1|A0A542ZCQ1_9ACTN GTP cyclohydrolase 1; OS = Propioniferax innocua OX=1753 GN=folE PE=3 SV=1
MTDARRDYDHDRVAAAVREILIGIGEDPDREGLIETPDRVARAYAELFAGLRQDAAEPLATTFAVDHDEMVLVKDIEMVSCCEHHLLPFTGVAHVGYIPALNGRVTGLSKLGRLVDVYARRPQVQERLTGQVADALVDHLEARGVIVVIEAEHQCMTMRGVHKPGSRTITSAVRGQLLNAATRAEAMSLIVGR

SEQ ID NO: 13016 - protein, 204 aa, Propionimicrobium lymphophilum
  REGION 1..204: note = tr|S2W1Y8|S2W1Y8_9ACTN GTP cyclohydrolase 1; OS = Propionimicrobium lymphophilum ACS-093-V-SCH5 OX=883161; GN = folE PE=3 SV=1
MSSNAKARRAVKRVEGGFDYSLIEHGVKEILQGIGEDPNRDGLKETPARIARACAELFAGLSQDPKELLETTFDASHDEMVLVKDIDVHSMCEHHLLPFHGFAHVAYIPPASGRVVGLSKLARLVEVFARRPQVQERLTTQIADELEHTLGAKGVLVVLECEHNCMTMRGVRKPGSKTVTSAVRGQLRNAATRAEAMSLVLGHN

SEQ ID NO: 13017 - protein, 263 aa, Propionispira arboris
  REGION 1..263: note = tr|A0A1H6W2F7|A0A1H6W2F7_9FIRM GTP cyclohydrolase FolE2 OS=Propionispira arboris OX=84035 GN=folE2 PE=3 SV=1
MKDVQSRFDERGIAIQKVGINDVHLPFFIKTKDSSFQSVLAKIKFTVDLPMEYKGTHMSRFLEILSEWSKKPIGSQEMNQILDEALAKLDAQSAYLKINFKYFIDKIAPVSKRQSVLDLDCSFIANKIQGDHIEFTMAVNVPFTSLCPCSKEISKYGAHNQRGLMRVKVKFGNDQQSISIEDLAAIMEQQASCPIYPLLKREDEKYVTETAYENPKFVEDILRDLVIALRQIKGVSWFSIECENYESIHNHSAYASHVEFVEQ

SEQ ID NO: 13018 - protein, 263 aa, Propionispora hippei
  REGION 1..263: note = tr|A0A1M6A6G2|A0A1M6A6G2_9FIRM GTP cyclohydrolase FolE2 OS=Propionispora hippei DSM 15287 OX=1123003; GN = folE2 PE=3 SV=1
MKDVQNTVDQRGIAIQKVGVSEVHLPFLIKTKAGALQSVLAKIRLSVKLHQDYRGTHMSRFIEILSEWSQKPVSSREMEAILHDTLGRLGADKAYLEIRFKYFIEKVAPVSRLKSVLDYDCLFSASLEKEQPIDFYMGVAVPFTSLCPCSKEISAYGAHNQRGLMSVKLKQESGKFIWIEDLVALMEAQGSCPVYPLLKREDEKFVTERAYDNPKFVEDVLRDLVLALRGLQGIAWFEVECENYESIHNHSAYASHTETIKRG

SEQ ID NO: 13019 - protein, 266 aa, Propionispora sp.
  REGION 1..266: note = tr|A0A0K8J9P7|A0A0K8J9P7_9FIRM GTP cyclohydrolase FolE2 OS=Propionispora sp. 2/2-37 OX=1677858 GN=folE2 PE=3; SV = 1
MKDIQKTEDQRGIAIQKVGVSEVHLPFLIKTKSGELQSVLAKIRLTVELPQTFKGTHMSRFIEILSEWSQKPVANREMECILHDTLQRLEADKAYLEIRFKYFLQKTAPVSRLRSMLDYDCLFFANMTRGESIDIAMGVSVPFTSLCPCSKEIAAYGAHNQRGLMTVKLKQSAGRFIWIEDLVALMEAQGSCPLFPLLKREDEKYVTERAYDNPKFVEDVLRDLVLALRSIEDIEWFEVECENYESIHNHNAYASHSETVTSRPEA

SEQ ID NO: 13020 - protein, 263 aa, Propionispora vibrioides
  REGION 1..263: note = tr|A0A1H8PA65|A0A1H8PA65_9FIRM GTP cyclohydrolase FolE2 OS=Propionispora vibrioides OX=112903 GN=folE2 PE=3; SV = 1
MKDVQNTVDQRGIAIQKVGVSEVHLPFLIKTKAGALQSVLAKIRLSVKLHQDYRGTHMSRFIEILSEWSQKPVSSREMEAILHDTLGRLGADKAYLEIRFKYFIEKVAPVSRLKSVLDYDCLFSASLEKEQPIDFYMGVAVPFTSLCPCSKEISAYGAHNQRGLMSVKLKQENGNFIWIEDLVALMEAQGSCPVYPLLKREDEKFVTERAYDNPKFVEDVLRDLVLALRGLQGIAWFEVECENYESIHNHSAYASHTETIKRG

SEQ ID NO: 13021 - protein, 277 aa, Propionivibrio dicarboxylicus
  REGION 1..277: note = tr|A0A1G7ZQN9|A0A1G7ZQN9_9RHOO GTP cyclohydrolase FolE2 OS=Propionivibrio dicarboxylicus OX=83767 GN=folE2; PE = 3 SV=1
MNAAQKAKDNPIADVQNLADTRQIAINRVGIKSIRHPIRVLDRSGGVQHTIAVFNMYVSLPHNFKGTHMSRFVEILNSHEREISVENFPSMLREMVKKLEAETGHIEMNFPYFINKSAPVSGVQSLIDYDVTLIGEICHGDIASTIKVVVPVTSLCPCSKKISERGAHNQRSHVTVTARILDHVWIEEIVQLVEGEASCELYGLLKRPDEKYVTERAYDNPKFVEDMVRDVAARLNAEDRIYSYVIESENFESIHNHSAYALIENTKKAPAHPNIRY

SEQ ID NO: 13022 - protein, 212 aa, Propionivibrio dicarboxylicus
  REGION 1..212: note = tr|A0A1G7ZGF9|A0A1G7ZGF9_9RHOO GTP cyclohydrolase 1; OS = Propionivibrio dicarboxylicus OX=83767 GN=folE PE=3 SV=1
MPDCTDHDTAPTRTSGDEATLGIPRQQAFNAIAFERAVGDLLAACGIAPDAEHMGRTAVRVRELWQKRLLGGYDLDPAQALGDGFEDPRRDMVVVRGIAIHGVCPHHLVPFRGVAHVAYLPGGRLHGFGRIARMVDAIGHRFTYQEWLTRDIADALMRHGKARGAACLIEAEQLCLLLGEDRRGDERVVTQAFAGEFESDPQWRNEFLRACG

SEQ ID NO: 13023 - protein, 265 aa, Prosthecobacter debontii
  REGION 1..265: note = tr|A0A1T4X8B9|A0A1T4X8B9_9BACT GTP cyclohydrolase FolE2 OS=Prosthecobacter debontii OX=48467 GN=folE2 PE=3; SV = 1
MPSSLKDTQNERDDRKIAIDRVGVKNLRFPLRIRDRDQSQQHTVATVTMAVDLPHHYKGTHMSRFVEVLHAHGRELTVASIAAMPRELLSRLNARKAHVEMRFPYFRAKRAPVTKAEGLLDYGVVFEVNAEGDEVDYVVTVEVPVATLCPCSKAISERGAHNQRGLVTLSVRFRQPIWIEDLIELVEASASSQLYSVLKRPDEKYVTEAAYDNPVFVEDLVRSVAQKAYGHKQIKWFRVEAENFESIHNHNAWAVIESHNQPALI

SEQ ID NO: 13024 - protein, 263 aa, Prosthecobacter fusiformis
  REGION 1..263: note = tr|A0A4R7RZA8|A0A4R7RZA8_9BACT GTP cyclohydrolase FolE2 OS=Prosthecobacter fusiformis OX=48464 GN=folE2 PE=3; SV = 1
MPNLKDTQNERDDRKIAIDRVGVKNLRFPLRIRDRDQAQQHTVATVTMAVDLPHHYKGTHMSRFVEILHAHGRELTVASIAAMPKELLSRLNARKAHVEMRFPYFRAKRAPVTKAEGLLDYGVIFAVDAEGDEIDYVVTVEVPVTTLCPCSKAISERGAHNQRGTVTLSVRFRQPVWIEDLIELVEASASSQLYSILKRPDEKFVTEAAYDNPVFVEDLVRSVAQKASAHKKIKWFRVEAENFESIHNHNAWAVIESHNEAES

SEQ ID NO: 13025 - protein, 226 aa, Prosthecochloris aestuarii
  REGION 1..226: note = tr|B4S768|B4S768_PROA2 GTP cyclohydrolase 1; OS = Prosthecochloris aestuarii (strain DSM 271 / SK 413); OX = 290512 GN=folE PE=3 SV=1
MKHEKTLSDTLANNRRSSYSGVSMCEDDDCLDAMTDNEPQIIETLSSAVTTILGGLGENPEREGLLKTPERVAKSLRFLTKGYRENPEELLKKAVFKESYDEMVLVKDIELFSMCEHHMLPFFGKAHVAYIPDGKIVGLSKIARVVEVYARRLQVQERLTQQIRDAIQDVLNPKGVGVIIEAKHMCMVMRGVEKQNSVTTTSAMSGEFISSPSTRSEFLRLIHNRS

SEQ ID NO: 13026 - protein, 223 aa, unidentified
  source 1..223: note = Prosthecochloris marina
  REGION 1..223: note = tr|A0A317T581|A0A317T581_9CHLB GTP cyclohydrolase 1; OS = Prosthecochloris marina OX=2017681 GN=folE PE=3 SV=1
MKQEKTPSDTLVNEPPSYSGYSSCADDECFDDIRNIDTEAISGISNAVYSMIEGIGEDPEREGLLKTPERVARAMRFLTKGYRQNPVEMLQKAVFTESYDEMVLVKDIELFSMCEHHMLPFFGKAHVAYIPNGKIVGISKLARVVEVYARRLQVQERLTQQVRDIIQDVLNPRGVGVVIEAKHMCMVMRGVEKQNSTTTTSAMSGEFLSSQSTRSEFLRLINR

SEQ ID NO: 13027 - protein, 231 aa, Prosthecochloris sp.
  REGION 1..231: note = tr|A0A1B1Q2X0|A0A1B1Q2X0_9CHLB GTP cyclohydrolase 1; OS = Prosthecochloris sp. CIB 2401 OX=1868325 GN=folE PE=3; SV = 1
MKSESMKHAKTPSDILENNNITSYSSFTACADDECFDTMDSTENRIVEQLSGAVTTLLEGLGEDPYREGLVKTPERVAKSLRFLTKGYRQNPEELLRKAVFTESYDEMVLVKDIELFSMCEHHMLPFFGKAHVAYIPDGKIVGLSKIARVVEVYARRLQVQERLTQQIRDAIVDVLNPKGVGVVIEAKHMCMVMRGVEKQNSTTTTSAMSGEFLSSESTRSEFLRLIHNRS

SEQ ID NO: 13028 - protein, 224 aa, Prosthecochloris sp.
  REGION 1..224: note = tr|A0A1W6HSU5|A0A1W6HSU5_9CHLB GTP cyclohydrolase 1; OS = Prosthecochloris sp. HL-130-GSB OX=1974213 GN=folE PE=3; SV = 1
MKHEKTLSDTLANNPAFSGYSVCADDDCLETEHDTEPEVIDKLSGAVTTILEGLGEDPEREGLLKTPERVAKSLRFLTKGYRQDPEELLRKAVFSESYDEMVLVKDIELFSMCEHHMLPFFGKAHVAYIPDGKIVGLSKLARVVEVYARRLQVQERLTQQIRDAIEQVLKPRGVGVVIEAKHMCMVMRGVEKQNSVTTTSAMSGEFITSESTRSEFLRLIHSRS

SEQ ID NO: 13029 - protein, 226 aa, Prosthecochloris vibrioformis
  REGION 1..226: note = tr|A0A5C4RYP7|A0A5C4RYP7_PROVB GTP cyclohydrolase 1; OS = Prosthecochloris vibrioformis OX=1098 GN=folE PE=3 SV=1
MKHAKTPSDILENNNITSYSSFSACADDECFDTMDSTENRIVEQLSGAVTTLLEGLGEDPYREGLVKTPERVAKSLRFLTKGYRQNPEELLRKAVFTESYDEMVLVKDIELFSMCEHHMLPFFGKAHVAYIPDGKIVGLSKIARVVEVYARRLQVQERLTQQIRDAIVDVLNPKGVGVVIEAKHMCMVMRGVEKQNSTTTTSAMSGEFLSSESTRSEFLRLIHNRS

SEQ ID NO: 13030 - protein, 212 aa, Prosthecomicrobium hirschii
  REGION 1..212: note = tr|A0A0P6W132|A0A0P6W132_9RHIZ GTP cyclohydrolase 1; OS = Prosthecomicrobium hirschii OX=665126 GN=folE PE=3 SV=1
MDAIVNLYRRDRDERPAPQDAAGRPSREDAEAAVRTLIRWAGDDPEREGLLDTPKRVVKAYEELFSGYRASEAEVLAKVFEEVEGYGDIVLVRDIPFHSHCEHHMVPFVGKAHIAYYPSRGVVGLSKLARVVDVFAKRLQTQETMTAQIANAIDDFLKPRGVAILVEAEHMCMSMRGVQKGGVSTLTTQFTGVFREDPTEQVRFMTLVRGLR

SEQ ID NO: 13031 - protein, 190 aa, unidentified
  source 1..190: note = Proteiniphilum saccharofermentans
  REGION 1..190: note = tr|A0A1R3T7E7|A0A1R3T7E7_9BACT GTP cyclohydrolase 1; OS = Proteiniphilum saccharofermentans OX=1642647 GN=folE; PE = 3 SV=1
MSSEEIEKNRAVITGHMHDILSLLGEDVAREGLVKTPERVAKAMQNLTKGYWQDPEAILRSALFKENYRQMVIVKDIDLFSLCEHHMLPFFGKAHVAYIPDGYITGLSKIARVVDVFARRLQVQERLTTQIKECIQKTLNPMGVMVVIEAQHMCMQMRGVEKQNSITTTSDFTGVFREQRTREEFIALIK

SEQ ID NO: 13032 - protein, 190 aa, Proteiniphilum sp.
  REGION 1..190: note = tr|A0A3M8EFR5|A0A3M8EFR5_9BACT GTP cyclohydrolase 1; OS = Proteiniphilum sp. X52 OX=2382159 GN=folE PE=3 SV=1
MSSEELEKNRLVIADHMRDILSLLGEDGNREGLMRTPERVAKAMQYLTKGYWQDPEAILRSALFRENYRQMVIVKDIDLFSLCEHHMLPFFGKAHVAYIPDGYITGLSKIARVVDVFARRLQVQERLTTQIKECIQKTLNPMGVMVVIEAQHMCMQMRGVEKQNSITTTSDFTGVFREQRTREEFIALIK

SEQ ID NO: 13033 - protein, 203 aa, unidentified
  source 1..203: note = Proteobacteria bacterium
  REGION 1..203: note = tr|A0A1Z9H8T9|A0A1Z9H8T9_9PROT GTP cyclohydrolase 1; OS = Proteobacteria bacterium TMED154 OX=1986844 GN=folE; PE = 3 SV=1
  VARIANT 52: note = Xaa can be any naturally occurring amino acid
  VARIANT 60: note = Xaa can be any naturally occurring amino acid
MTHSGVANEKVKDLSSAAKSIKHKRIENAVEEILDALGLDLSNDSLRETPTXVAKMYLNXIFGGLNEDISSVLKSFENSYGYKGMVIEKNIPFQSHCEHHLLPILGRAAIAYIPEDRVLGLSKLNRILHHFARRPQVQERLTMQVADMLSETLQTDDVAVILEARHLCVEMRGVRDSGAETSTMVLRGRFEKELKEDFFRQLN

SEQ ID NO: 13034 - protein, 204 aa, unidentified
  source 1..204: note = Proteobacteria bacterium
  REGION 1..204: note = tr|A0A1W9I9S8|A0A1W9I9S8_9PROT GTP cyclohydrolase 1; OS = Proteobacteria bacterium HN_bin10 OX=1827386 GN=folE; PE = 3 SV=1
MSEILKWRSPTEAQAKRPSRDAAMEAVKTLIAWAGDDPEREGLKDTPKRVVDAYREWFGGYDENPADELSRVFEEVGGYDDIVMLKNIDVESHCEHHMAPFLGKAFVAYLPTESVVGISKIARVVEIFAKRLQTQETMTAQIAEAMNDTLKPRGVAVLIDAEHQCMSTRGVHHKDVTTVTTQFTGAFKDDAELRARFLKLAGYG

SEQ ID NO: 13035 - protein, 219 aa, Proteus hauseri
  REGION 1..219: note = tr|A0A410XBU5|A0A410XBU5_PROHU GTP cyclohydrolase 1; OS = Proteus hauseri OX=183417 GN=folE PE=3 SV=1
MSSLSKEAQWVHAALVERGLETPLREPNLSSSESKQQIEHHMTEVMKLLNLDLSDDSLAETPRRIAKMYVDEIFSGLNYLNFPKITLIENKMQVDEMVTVRDITLTSTCEHHFVTIDGKAIVAYIPKDKVIGLSKINRIVQFFAQRPQVQERLTQQILIALQTLLGTKNVAVSIDAVHYCVKARGIRDATSATTTTSLGGLFKSSQNTRQEFLRAVRHL

SEQ ID NO: 13036 - protein, 219 aa, Proteus hauseri
  REGION 1..219: note = tr|V6MLQ3|V6MLQ3_PROHU GTP cyclohydrolase 1; OS = Proteus hauseri ZMd44 OX=1312367 GN=folE PE=3 SV=1
MSSLSKEAQWVHAALVERGLETPLREPKLSPSESKQQIEHHMTEVMKLLNLDLSDDSLAETPRRIAKMYVDEIFSGLDYHNFPKITLIENKMQVDEMVTVRDITLTSTCEHHFVTIDGKAIVAYIPKDKVIGLSKINRIVQFFAQRPQVQERLTQQILIALQTLLGTKNVAVSIDAVHYCVKARGIRDATSATTTTSLGGLFKSSQNTRQEFLRAVRHL

SEQ ID NO: 13037 - protein, 78 aa, Proteus mirabilis
  REGION 1..78: note = tr|A0A379FH62|A0A379FH62_PROMI GTP cyclohydrolase I; OS = Proteus mirabilis OX=584 GN=folE_1 PE=4 SV=1
MVTVRDITLTSTCEHHFVTIDGKATVAYIPKDKVIGLSKINRIVQFFAQRPPSARAFNATNIDCLTNAIGDEKRCCLY

SEQ ID NO: 13038 - protein, 220 aa, Proteus mirabilis
  REGION 1..220: note = tr|A0A1Z1SX11|A0A1Z1SX11_PROMI GTP cyclohydrolase 1; OS = Proteus mirabilis OX=584 GN=folE PE=3 SV=1
MSSTLSKEAQWVHAALVERGLETPLREPKLSPSESKQQIKHHMTEVMKLLNLDLSDDSLAETPHRIAKMYVDEIFSGLDYHNFPKITLIENKMQVDEMVTVRDITLTSTCEHHFVTIDGKATVAYIPKDKVIGLSKINRIVQFFAQRPQVQERLTQQILIALQTLLGTKNVAVSIDAVHYCVKARGIRDATSATTTTSLGGLFKSSQNTRQEFLRAVRHL

SEQ ID NO: 13039 - protein, 219 aa, Proteus penneri
  REGION 1..219: note = tr|A0A379EJQ1|A0A379EJQ1_9GAMM GTP cyclohydrolase 1; OS = Proteus penneri OX=102862 GN=folE PE=3 SV=1
MSSLSKEAQWVHAALVERGLETPLRESKLSPSESKQQIEHHMTEVMKLLNLDLSDDSLAETPRRIAKMYVDEIFSGLDYHNFPKITLIENKMQVDEMVTVRDITLTSTCEHHFVTIDGKAIVAYIPKDKVIGLSKINRIVQFFAQRPQVQERLTQQILIALQTLLGTKNVAVSIDAVHYCVKARGIRDATSATTTTSLGGLFKSSQNTRQEFLRAVRHL

SEQ ID NO: 13040 - protein, 136 aa, Proteus penneri
  REGION 1..136: note = tr|C0B1V7|C0B1V7_9GAMM GTP cyclohydrolase 1; OS = Proteus penneri ATCC 35198 OX=471881 GN=PROPEN_04758; PE = 3 SV=1
MSSLSKEAQWVHAALVERGLETPLRESKLSPSESKQQIEHHMTEVMKLLNLDLSDDSLAETPRRIAKMYVDEIFSGLDYHNFPKITLIENKMQVDEMVTVRDITLTSTCEHHFVTIDGKAIVAYIPKDKVIGLSKN

SEQ ID NO: 13041 - protein, 219 aa, Proteus sp.
  REGION 1..219: note = tr|A0A3D2BJR7|A0A3D2BJR7_9GAMM GTP cyclohydrolase 1; OS = Proteus sp. OX=229037 GN=folE PE=3 SV=1
MSSLSKEAQWVHAALVERGLETPLREPNLSPSESKQQIEHHMTEVMKLLNLDLSDDSLAETPRRIAKMYVDEIFSGLNYLNFPKITLIENKMQVDEMVTVRDITLTSTCEHHFVTIDGKAIVAYIPKDKVIGLSKINRIVQFFAQRPQVQERLTQQILIALQTLLGTKNVAVSIDAVHYCVKARGIRDATSATTTTSLGGLFKSSQNTRQEFLRAVRHL

SEQ ID NO: 13042 - protein, 222 aa, Proteus sp.; identical to SEQ ID NO: 9383
  REGION 1..222: note = tr|A0A1F2HGN3|A0A1F2HGN3_9GAMM GTP cyclohydrolase 1; OS = Proteus sp. HMSC10D02 OX=1581079 GN=folE PE=3 SV=1

SEQ ID NO: 13043 - protein, 219 aa, Proteus vulgaris; identical to SEQ ID NO: 13039
  REGION 1..219: note = tr|A0A094UBB2|A0A094UBB2_PROVU GTP cyclohydrolase 1; OS = Proteus vulgaris OX=585 GN=folE PE=3 SV=1

SEQ ID NO: 13044 - protein, 219 aa, Proteus vulgaris; identical to SEQ ID NO: 13036
  REGION 1..219: note = tr|A0A292CBP4|A0A292CBP4_PROVU GTP cyclohydrolase 1; OS = Proteus vulgaris OX=585 GN=folE PE=3 SV=1

SEQ ID NO: 13045 - protein, 224 aa, unidentified
  source 1..224: note = Protochlamydia amoebophila
  REGION 1..224: note = tr|Q6ME26|Q6ME26_PARUW GTP cyclohydrolase 1; OS = Protochlamydia amoebophila (strain UWE25) OX=264201; GN = folE PE=3 SV=1
MTKKEFPQKKIPPSITNFPSPIRRHQKRLSDQDKIKLIAEHFKAIMETLELDVEDESLARTPERVAKMYVNEIFSGLDEENFPEISFFKDEIHHEHKANMVFVKVGFTSFCEHHFVPMSGFAYVAYIPTNQLIGLSKIPRLVRYFAKRPQLQERLTAQIADSLALLLNTEHVAVSLTAIHSCVQARGIQDECSHTITNVLRGQFGADGNLRREFFEGINRRVFE

SEQ ID NO: 13046 - protein, 219 aa, Providencia alcalifaciens
  REGION 1..219: note = tr|A0A3N2A7U9|A0A3N2A7U9_9GAMM GTP cyclohydrolase 1; OS = Providencia alcalifaciens OX=126385 GN=folE PE=3 SV=1
MSSLSKEAELVHAALEARGLETPLRIQPKSGDERKKLIEGHMTEIMTLLNLDLTDDSLADTPRRIAKMYVDEIFSGLDYANFPKITLIENKMKVDEMVTVRDITLTSTCEHHFVTIDGKATVAYIPKDKVIGLSKINRIVQFFSQRPQVQERLTQQILVALQTLLGTTNVAVCIDAVHYCVKARGIRDATSATTTTSLGGLFKSSQNTRQEFLRAVRHL

SEQ ID NO: 13047 - protein, 219 aa, Providencia alcalifaciens
  REGION 1..219: note = tr|A0A4R3NRU4|A0A4R3NRU4_9GAMM GTP cyclohydrolase 1; OS = Providencia alcalifaciens OX=126385 GN=folE PE=3 SV=1
MSSLSKEAELVHAALEARGLETPLRIQPKSGEDRKQLIEGHMTEIMKLLNLDLTDDSLADTPRRIAKMYVDEIFSGLDYANFPKITLIENKMNVDEMVTVRDITLTSTCEHHFVTIDGKAIVAYIPKDKVIGLSKINRIVQFFSQRPQVQERLTQQILVALQTLLGTMNVAVSIDAVHYCVKARGIRDATSATTTTSLGGLFKSSQNTRQEFLRAVRHL

SEQ ID NO: 13048 - protein, 219 aa, Providencia burhodogranariea
  REGION 1..219: note = tr|K8WP42|K8WP42_9GAMM GTP cyclohydrolase 1; OS = Providencia burhodogranariea DSM 19968 OX=1141662; GN = folE PE=3 SV=1
MSSLSKEAELVHAALEARGLETPLRIQPKSGEERKQLIEGHMTEIMKLLNLDLTDDSLADTPKRIAKMYVDEIFSGLNYANFPKITVIENKMNVDEMVTVRDITLTSTCEHHFVTIDGKATVAYIPKDKVIGLSKINRIVQFFSQRPQVQERLTQQILVALQTLLGTNNVAVSIDAVHYCVKARGIRDATSATTTTSLGGLFKSSQNTRQEFLRAVRHQ

SEQ ID NO: 13049 - protein, 219 aa, Providencia heimbachae
  REGION 1..219: note = tr|A0A4D7JFC0|A0A4D7JFC0_9GAMM GTP cyclohydrolase 1; OS = Providencia heimbachae OX=333962 GN=folE PE=3 SV=1
MSSLSKEAELVHAALEARGLETPLRIQPKSGEDRKQLIEGHMTEIMKLLNLDLTDDSLADTPRRIAKMYVDEIFSGLDYANFPKITLIENKMKVDEMVTVRDITLTSTCEHHFVTIDGKAIVAYIPKDKVIGLSKINRIVQFFSQRPQVQERLTQQILLALQTLLGTNNVAVSIDAVHYCVKARGIRDATSATTTTSLGGLFKSSQNTRQEFLRAVRHN

SEQ ID NO: 13050 - protein, 219 aa, Providencia heimbachae; identical to SEQ ID NO: 13049
  REGION 1..219: note = tr|A0A1B7JZN3|A0A1B7JZN3_9GAMM GTP cyclohydrolase 1; OS = Providencia heimbachae ATCC 35613 OX=1354272 GN=folE; PE = 3 SV=1

SEQ ID NO: 13051 - protein, 219 aa, Providencia rettgeri
  REGION 1..219: note = tr|A0A1J0E4V3|A0A1J0E4V3_PRORE GTP cyclohydrolase 1; OS = Providencia rettgeri OX=587 GN=folE PE=3 SV=1
MPSLSKEAELVHAALEARGLETPLRIQPKSGEERKQLIEGHMTEIMKLLNLDLSDDSLADTPRRIAKMYVDEIFSGLDYTNFPKITLIENKMKVDEMVTVRDITLTSTCEHHFVTIDGKATVAYIPKDKVIGLSKINRIVQFFSQRPQVQERLTQQILVALQTLLGTTNVAVSIDAVHYCVKARGIRDATSATTTTSLGGLFKSSQNTRQEFLRAVRHL

SEQ ID NO: 13052 - protein, 219 aa, Providencia rettgeri; identical to SEQ ID NO: 13046
  REGION 1..219: note = tr|A0A264VPK7|A0A264VPK7_PRORE GTP cyclohydrolase 1; OS = Providencia rettgeri OX=587 GN=folE PE=3 SV=1

SEQ ID NO: 13053 - protein, 219 aa, Providencia rustigianii
  REGION 1..219: note = tr|D1NXG4|D1NXG4_9GAMM GTP cyclohydrolase 1; OS = Providencia rustigianii DSM 4541 OX=500637 GN=folE PE=3; SV = 1
MSSLSKEAELVHAALEARGLETPLRIQPKSGEDRKQLIEGHMTEIMKLLNLDLSDDSLADTPRRIAKMYVDEIFSGLDYANFPKITVIENKMKVDEMVTVRDITLTSTCEHHFVTIDGKATVAYIPKDTVIGLSKINRIVQFFSQRPQVQERLTQQILVALQTLLGTTNVAVSIDAVHYCVKARGVRDATSATTTTSLGGLFKSSQNTRQEFLRAVRHL

SEQ ID NO: 13054 - protein, 219 aa, Providencia rustigianii; identical to SEQ ID NO: 13053
  REGION 1..219: note = tr|A0A379G1R7|A0A379G1R7_9GAMM GTP cyclohydrolase 1; OS = Providencia rustigianii OX=158850 GN=folE PE=3 SV=1

SEQ ID NO: 13055 - protein, 219 aa, Providencia sneebia
  REGION 1..219: note = tr|K8WCN9|K8WCN9_9GAMM GTP cyclohydrolase 1; OS = Providencia sneebia DSM 19967 OX=1141660 GN=folE PE=3; SV = 1
MSSLSKEAELVHAALEARGLETPLRIQPKLDNERKQLIEEHMTEVMKLLNLDLTDDSLADTPKRIAKMYVDEIFSGLDYANFPKITLIENKMSVDEMVTVRDITLTSTCEHHFVTIDGKATVAYIPKDKVIGLSKINRIVQFFSQRPQVQERLTQQILVALQTLLGTMNVAVSIDAVHYCVKARGIRDATSATTTTSLGGLFKSSQNTRQEFLRAVRHQ

SEQ ID NO: 13056 - protein, 219 aa, Providencia sp.; identical to SEQ ID NO: 13046
  REGION 1..219: note = tr|A0A345LW31|A0A345LW31_9GAMM GTP cyclohydrolase 1; OS = Providencia sp. WCHPHu000369 OX=2027290 GN=folE PE=3; SV = 1

SEQ ID NO: 13057 - protein, 219 aa, Providencia sp.
  REGION 1..219: note = tr|A0A356D2J5|A0A356D2J5_PROSP GTP cyclohydrolase 1; OS = Providencia sp. OX=589 GN=folE PE=3 SV=1
MSSLSKEAELVHAALEARGLETPLRIQPKLGEERKQLIEGHMAEVMKLLNLDLTDDSLADTPRRIAKMYVDEIFSGLDYANFPKITLIENKMKVDEMVTVRDITLTSTCEHHFVTIDGKAIVAYIPKDKVIGLSKINRIVQFFSQRPQVQERLTQQILVALQTLLGTNNVAVSIDAVHYCVKARGIRDATSATTTTSLGGLFKSSQNTRQEFLRAVRHN

SEQ ID NO: 13058 - protein, 219 aa, Providencia stuartii
  REGION 1..219: note = tr|A0A140NQA6|A0A140NQA6_PROSM GTP cyclohydrolase 1; OS = Providencia stuartii (strain MRSN 2154) OX=1157951; GN = folE PE=3 SV=1
MSSLSKEAELVHAALEARGLETPLRIQPKSGEERKQLIEGHMTEIMKLLNLDLTDDSLADTPKRIAKMYVDEIFSGLDYANFPKITVIENKMKVDEMVTVRDITLTSTCEHHFVTIDGKATVAYIPKDKVIGLSKINRIVQFFSQRPQVQERLTQQILVALQTLLDTNNVAVSIDAVHYCVKARGIRDATSATTTTSLGGLFKSSQNTRQEFLRAVRHL

SEQ ID NO: 13059 - protein, 219 aa, Providencia stuartii; identical to SEQ ID NO: 13058
  REGION 1..219: note = tr|A0A379GYK6|A0A379GYK6_PROST GTP cyclohydrolase 1; OS = Providencia stuartii OX=588 GN=folE PE=3 SV=1

SEQ ID NO: 13060 - protein, 210 aa, unidentified
  source 1..210: note = Unknown
  REGION 1..210: note = tr|A0A368EJX4|A0A368EJX4_9PROT GTP cyclohydrolase 1; OS = PS1 clade bacterium OX=2175152 GN=folE PE=3 SV=1
MDVRVDDSKTTNDVVNERDVKVAKPSRETAEEAVRTLIAWAGDNPEREGLIDTPKRVVNAYQEFFAGYEEDPEEVLGRTFEDVEGYDDMVMLRDIDLESHCEHHMVAILGKVHIAYMPVERVVGISKLARVIEIFAKRLQTQETMTAQIVDCIQRVLEPAGVALLVDAKHQCMTTRGIKKPDVATITTRFTGVFANDPRMEARFLAMINN

SEQ ID NO: 13061 - protein, 210 aa, unidentified
  source 1..210: note = Unknown
  REGION 1..210: note = tr|A0A368E1I2|A0A368E1I2_9PROT GTP cyclohydrolase 1; OS = PS1 clade bacterium OX=2175152 GN=folE PE=3 SV=1
MDVRVDDSKNVNDVVNERDVKVAKPSRETAEEAVRTLIAWAGDNPEREGLIDTPKRVVNAYQEFFAGYEEDPEEVLGRTFEDVEGYDDMVMLRDIDLESHCEHHMVAILGKVHIAYMPVERVVGISKLARVIEIYAKRLQTQETMTAQIVDCIQRVLEPAGVALLVDAKHQCMTTRGIKKPDVATITTRFTGVFANDPRMEARFLAMINN

SEQ ID NO: 13062 - protein, 361 aa, unidentified
  source 1..361: note = Pseudaestuariivita atlantica
  REGION 1..361: note = tr|A0A0L1JUZ0|A0A0L1JUZ0_9RHOB GTP cyclohydrolase FolE2 OS=Pseudaestuariivita atlantica OX=1317121 GN=folE2; PE = 3 SV=1
MNIHTPGISKSPDRKEAEEALSILRRWAQTATETDLDSLTPDMKALAQVAAPFERVYPDTFAVDTAYKSSLPDLQNGPSSLIRGAKRMIQHVGISNFRLPIRYQTRDNGDVQLETSVTGTVSLEAEKKGINMSRIMRTFYGHAEKTFSFGVIEAALDDYKTDLESFDARIQMRCSFPMKVESLRSGLSGYQYYDIALELIEVEGVRRKVVHLDYVYSSTCPCSLELSEHARATRNQLATPHSQRSVARISVEVTGEECLWFEDLIDLCRNAIPTETQVMVKREDEQAFAELNAANPIFVEDAARLFALSLQGDSRIGDFRVVASHQESLHSHDAVSVLTEGPTFAADSLDPTLFKSLYHVG

SEQ ID NO: 13063 - protein, 209 aa, unidentified
  source 1..209: note = Pseudaminobacter manganicus
  REGION 1..209: note = tr|A0A1V8RRG0|A0A1V8RRG0_9RHIZ GTP cyclohydrolase 1; OS = Pseudaminobacter manganicus OX=1873176 GN=folE PE=3 SV=1
MDAVVKKFVPQVPHQPGVERPSQAEVEAAVRTLIRWTGDNPEREGLLDTPKRVAKAYREMFGGYDMDPVEDLGRTFEETAGYDGIVIVKDIDFHSHCEHHMVPIIGKAHVGYLPDGKVVGLSKIIRVVEIFARRLQTQETMTAQIASTIQNVLKPRGVAVLIEAEHMCIAMRGIRKQGSTTLTSSFTGAFEDSPEEQARFMAMVRNGGK

SEQ ID NO: 13064 - protein, 211 aa, Pseudaminobacter salicylatoxidans
  REGION 1..211: note = tr|A0A316C820|A0A316C820_PSESE GTP cyclohydrolase 1; OS = Pseudaminobacter salicylatoxidans OX=93369 GN=folE PE=3; SV = 1
MDAVLKKPMPKSDYLDKPSTNRPDQAEVESAVRTLLRWTGDDPDREGLIDTPKRVAKAFLEMFNGYDMCPAEELGRTFEEVAGYDDLVLVRDIQFHSHCEHHMVPIIGTAHVGYLPEGKVVGLSKIARVVDIFAHRLQTQEAMTAQIANVIQDVLNPRGVAVMIEAEHMCMAMRGIRKQGSTTLTSTFTGVFKDSPEEQLRFLTMVRHGNK

SEQ ID NO: 13065 - protein, 214 aa, Pseudaminobacter sp.
  REGION 1..214: note = tr|A0A432VBA8|A0A432VBA8_9RHIZ GTP cyclohydrolase 1; OS = Pseudaminobacter sp. CB3 OX=1851146 GN=folE PE=3 SV=1
MDAVIKKLMPKADYMEKPATDRPSQAEVEAAVRTLLRWTGDNPDREGLVDTPKRVAKAFREMFSGYDMCPSEELGRTFEEVAGYDDLVLIKDINFHSHCEHHMVPIIGKAHVGYLPDGKVVGLSKIARVVDIFAHRLQTQEAMTAQIANVIQDVLNPRGVAVMIEAEHMCMAMRGIRKQGSTTLTSTFTGAFKDSPEEQIRFLTMVRSGSAHGF

SEQ ID NO: 13066 - protein, 255 aa, unidentified
  source 1..255: note = Pseudanabaena biceps
  REGION 1..255: note = tr|L8MX05|L8MX05_9CYAN GTP cyclohydrolase I; OS = Pseudanabaena biceps PCC 7429 OX=927668; GN = Pse7429DRAFT_2230 PE=4 SV=1
MTISISRPVSNTSENDSKTAKVRESLSTRKAISQIIRERVIAAGDPFFANDSIAHHISDTEREELKKEIEGKLQGVFDSLIIDTANDHNTKETARRVAKMYVDEVFKGRYHPMPKVTDFPNAKELDEIYTLGPITVRSACSHHFVPIVGQAWIGIVPSDRVIGISKFNRIVDWVMSRPHIQEEAAIMVADTIENLIKPKGLAFVIKAQHMCMTWRGVKEPETKMVNSIVRGSFRHDPHMKKEFFDLIRAHGFGDS

SEQ ID NO: 13067 - protein, 286 aa, Pseudanabaena sp.
  REGION 1..286: note = tr|K9SPB4|K9SPB4_9CYAN GTP cyclohydrolase I; OS = Pseudanabaena sp. PCC 7367 OX=82654 GN=Pse7367_3566; PE = 4 SV=1
MSQVRVPEAFQNENKYKYCITLIIKSKNLKMTTSYRQSKFINPDQDPNRDLTSFTAKENGSVGKPISKVIRERLKSLGVKYFANDSIAEYISDGEREELKLEIEDKLQGLFDALVIDTDNDHNTHETAFRMAKMYVDEVFKGRYHPMPKVTDFPNAKALDEIYVLGPISVRSACSHHFVPIIGHAWLGIVPSDRVIGISKFNRIVDWVLSRPHIQEEAAVMVADTIERLIQPRGLAFVIKAQHMCMSWRGVKEPETQMTNSIVRGTFREDPTAKKEFFDLIRGHGF

SEQ ID NO: 13068 - protein, 233 aa, unidentified
  source 1..233: note = Pseudarcicella hirudinis
  REGION 1..233: note = tr|A0A1I5N2A0|A0A1I5N2A0_9BACT GTP cyclohydrolase 1; OS = Pseudarcicella hirudinis OX=1079859 GN=folE PE=3 SV=1
MKPNEILLNTLLVDKDKIMFSDEEIGDEHIGTSVDTPLREDAFQLSDEEKIAKIELHFKEIMETLGLDLRDDSLKGTPKRVAKMYVQEIFSGLDPKNKPAIALFDNKYKYDEMLVEKNITFYSNCEHHFVPIIGKAHVAYISSGKVIGLSKLNRIVQYFAKRPQVQERLTMQIARELQEVLQTENIAVLIDAKHLCVSSRGIKDDTSTTVTSYYGGKFQEDATRQEFLKYLNL

SEQ ID NO: 13069 - protein, 234 aa, unidentified
  source 1..234: note = Pseudarcicella sp.
  REGION 1..234: note = tr|A0A2S2DVS9|A0A2S2DVS9_9BACT GTP cyclohydrolase 1; OS = Pseudarcicella sp. HME7025 OX=2183547 GN=gch1 PE=3 SV=1
MKQKEILLNSLLIDTENFHFTDDEIGDNHIATSIETPMRSDAFDLSDADKIKKIEGHFKEIMLTLGLDLTDDSLKGTPKRVAKMYVEEIFSGLNPKNEPQVALFENKFGYNEMLIEKNISFYSNCEHHFVPIVGKTHIAYISSGKVIGLSKLNRIVQYYAKRPQVQERLTMQIAKHLQKVLETEHVAIYIDAKHLCVSSRGVKDDATSTITSFYGGKFQEEATKKEFLGSIQSI

SEQ ID NO: 13070 - protein, 214 aa, unidentified
  source 1..214: note = Pseudarthrobacter chlorophenolicus
  REGION 1..214: note = tr|B8H9T1|B8H9T1_PSECP GTP cyclohydrolase 1; OS = Pseudarthrobacter chlorophenolicus (strain ATCC 700700 / DSM 12829 / CIP 107037 / JCM 12360 / KCTC 9906 / NCIMB 13794/ A6) OX=452863 GN=folE PE=3 SV=1
MTSFDDDAVSASAAYPAEDGSAHAPHHKVDRPRIEAAVREILLAIGEDPDRGGLIDTPKRVAKAYAEVFAGLHQDPADVLSTTFELDHEELVLVKDIPFYSTCEHHLVPFHGVAHVGYIPSHDGRVTGLSKLARLVDIYARRPQVQERLTTEIVEALVRHLKPRGAIVVVECEHMCMSMRGIRKPGAKTVTSAVRGQLHDPATRAEAMSLILGR

SEQ ID NO: 13071 - protein, 214 aa, unidentified
  source 1..214: note = Pseudarthrobacter equi
  REGION 1..214: note = tr|A0A1H1U4S6|A0A1H1U4S6_9MICC GTP cyclohydrolase 1; OS = Pseudarthrobacter equi OX=728066 GN=folE PE=3 SV=1
MTSFDDDAVSASAAYPAEDGSTHSPHHKVDRPRIEAAVREILLAIGEDPDRGGLIDTPKRVAKAYAEVFAGLHHDPADVLSTTFELDHEELVLVKDIPFYSTCEHHLVPFHGVAHVGYIPSHDGKVTGLSKLARLVDIYARRPQVQERLTTEIVEALVLHLKPRGAIVVVECEHMCMSMRGIRKPGAKTVTSAVRGQLHDPATRAEAMSLILGR

SEQ ID NO: 13072 - protein, 214 aa, unidentified
  source 1..214: note = Pseudarthrobacter phenanthrenivorans
  REGION 1..214: note = tr|F0M7V5|F0M7V5_PSEPM GTP cyclohydrolase 1; OS = Pseudarthrobacter phenanthrenivorans (strain DSM 18606 / JCM 16027 / LMG 23796 / Sphe3) OX=930171 GN=folE PE=3; SV = 1
MTHFDDDDVPASAGYPAEGGADHSKHQKVDRPRIEAAVREILLAIGEDPDRGGLVDTPKRVAKAYAEVFAGLHHDPADVLSTTFDLDHEELVLVKDIPFYSTCEHHLVPFHGVAHVGYIPSHDGKVTGLSKLARLVDIYARRPQVQERLTTEIVEAMVRYLKPRGAIVVVECEHMCMSMRGIRKPGAKTVTSAVRGQLHDPATRAEAMSLILGR

SEQ ID NO: 13073 - protein, 214 aa, unidentified
  source 1..214: note = Pseudarthrobacter phenanthrenivorans
  REGION 1..214: note = tr|A0A0B4DJ85|A0A0B4DJ85_9MICC GTP cyclohydrolase 1; OS = Pseudarthrobacter phenanthrenivorans OX=361575 GN=folE; PE = 3 SV=1
MTSFDDDDVPASAGHLAEAGAHPSKTEKVDKPRIEAAVREILLAIGEDPDRGGLLDTPKRVAKAYAEMFAGLHHDPADVLSTTFDLDHEELVLVKDIPFYSTCEHHLVPFHGVAHVGYIPSHDGKVTGLSKLARLVDIYARRPQVQERLTTEIVEALVSHLKPRGAIVVVECEHMCMSMRGIRKPGAKTVTSAVRGQLHDPATRAEAMSLILGR

SEQ ID NO: 13074 - protein, 186 aa, unidentified
  source 1..186: note = Pseudarthrobacter siccitolerans
  REGION 1..186: note = tr|A0A024H858|A0A024H858_9MICC GTP cyclohydrolase 1; OS = Pseudarthrobacter siccitolerans OX=861266 GN=folE PE=3; SV = 1
MDRPRIEAAVREILLAIGEDPDRGGLVDTPKRVAKAYAEVFAGLHHDPADVLSTTFDLDHEELVLVKDIPFYSTCEHHLVPFHGVAHVGYIPSHEGKVTGLSKLARLVDIYARRPQVQERLTTEIVEAMVRHLKPRGAIVVVECEHMCMSMRGIRKPGAKTVTSAVRGQLHDPATRAEAMSLILGR

SEQ ID NO: 13075 - protein, 214 aa, unidentified
  source 1..214: note = Pseudarthrobacter sp.
  REGION 1..214: note = tr|A0A365D734|A0A365D734_9MICC GTP cyclohydrolase 1; OS = Pseudarthrobacter sp. AG30 OX=2249742 GN=folE PE=3 SV=1
MTSFDDDDVSASADHLAAGGHRSSKHERVDRPRIEAAVREILLAIGEDPDRGGLVDTPKRVAKAYAEVFAGLHHDPAEVLSTTFDLDHEELVLVKDIPFYSTCEHHLVPFHGVAHVGYIPSHDGKVTGLSKLARLVDIYARRPQVQERLTTEIVEAMVRYLKPRGAIVVVECEHMCMSMRGIRKPGAKTVTSAVRGQLHDPATRAEAMSLILGR

SEQ ID NO: 13076 - protein, 214 aa, unidentified
  source 1..214: note = Pseudarthrobacter sp.
  REGION 1..214: note = tr|A0A3P5WEN9|A0A3P5WEN9_9MICC GTP cyclohydrolase 1; OS = Pseudarthrobacter sp. T11b OX=2483813 GN=folE PE=3 SV=1
MTSFDDDDAYPLSAFPADGGPAGQPGNKVDRPRIEAAVREILLAIGEDPDRGGLLDTPKRVAKAYAEVFAGLHQDPADVLSTTFDLDHEELVLVKDIPFYSTCEHHLVPFHGVAHVGYIPSHEGKVTGLSKLARLVDIYARRPQVQERLTTEIVEALVRHLKPRGAIVVVECEHMCMSMRGVRKPGAKTVTSAVRGQLHDPATRAEAMSLILGR

SEQ ID NO: 13077 - protein, 200 aa, unidentified
  source 1..200: note = Pseudarthrobacter sulfonivorans
  REGION 1..200: note = tr|A0A0U3GQ79|A0A0U3GQ79_9MICC GTP cyclohydrolase 1; OS = Pseudarthrobacter sulfonivorans OX=121292 GN=folE PE=3; SV = 1
MSSVLTTEATVTQGVDGPRVERAVREYLLAIGEDPERPGLVDTPARVARAAAEMFGGLHEDPLAVLDRTFDLGHGEMVIVKDIPFYSTCEHHLVPFHGVAHVGYIPSAEGLVTGLSKLARLVDVFARRPQVQERLTTQVVDALVTSLRPLGAIVVIECEHLCMSMRGVRKPGAKTITSAVRGELRLPAARAEALSLIHGR

SEQ ID NO: 13078 - protein, 213 aa, unidentified
  source 1..213: note = Pseudarthrobacter sulfonivorans
  REGION 1..213: note = tr|A0A0U3QNT2|A0A0U3QNT2_9MICC GTP cyclohydrolase 1; OS = Pseudarthrobacter sulfonivorans OX=121292 GN=folE PE=3; SV = 1
MTHFDDDAPASAGHPAEDGSHHKKHEKVDRPRIEAAVREILLAIGEDPDRGGLLDTPRRVAKAYAEVFSGLHLDPADVLSTKFDLDHEELVLVKDIPFYSTCEHHLVPFHGVAHVGYIPSHDGKVTGLSKLARLVDIYARRPQVQERLTTQIVEAMVSHLKPRGAIVVVECEHMCMSMRGVRKPGAKTVTSAVRGQLHDPATRAEAMSLILGR

SEQ ID NO: 13079 - protein, 221 aa, unidentified
  source 1..221: note = Pseudescherichia vulneris
  REGION 1..221: note = tr|A0A090UXZ9|A0A090UXZ9_PSEVU GTP cyclohydrolase 1; OS = Pseudescherichia vulneris NBRC 102420 OX=1115515; GN = folE PE=3 SV=1
MPSLSKEAALVHEALVAHGLETPLRPPVDLDNETRKRLIAGHMTEIMQLLNLDLSDDSLMETPHRIAKMYVDEIFSGLDYANFPKITVIENKMKVDEMVTVRDITLTSTCEHHFVTIDGKATVAYIPKDAVIGLSKINRIVQFFAQRPQVQERLTQQILIALQTLLGTNNVAVSIDAVHYCVKARGIRDATSATTTTSLGGLFKSSQNTRQEFLRAVRHHN

SEQ ID NO: 13080 - protein, 304 aa, unidentified
  source 1..304: note = Pseudidiomarina sp.
  REGION 1..304: note = tr|A0A443Z856|A0A443Z856_9GAMM GTP cyclohydrolase FolE2 OS=Pseudidiomarina sp. R04H25 OX=2487740 GN=folE2; PE = 3 SV=1
MPDIANQTRAQTEGTLDWVGMSNIEMPLVVGAAQEPERPVSAHVDAFVNLTDPKAKGIHMSRLYLLLEDLSNNDVLSHHSLSKLLHDFIDSHDGLADQAYVKFSFDYHLRRKSLISKKQGWKAYPVTVTGRYDNGKLNLELGVEVPYSSTCPCSAALARQLIQEAFANQFGTDSEVDAEMVHRWLGTTQGIVATPHSQRSIAQVNVIMGEGVSELPIIGLIDTIEDALKTPVQAAVKREDEQEFARLNGQNLMFCEDAARRLQHALNVQKQFSDFWIRVNHYESLHAHDAVSITTKGVPGGFKA

SEQ ID NO: 13081 - protein, 184 aa, unidentified
  source 1..184: note = Pseudoalteromonadaceae bacterium
  REGION 1..184: note = tr|A0A2E9SWZ1|A0A2E9SWZ1_9GAMM GTP cyclohydrolase 1; OS = Pseudoalteromonadaceae bacterium OX=2026783 GN=folE; PE = 3 SV=1
MHDDLKKSYHEIISAVGEDPQREGLLDTPKRAAKAMEYLTKGYRQTLDEITNNAVFTSDADDMVLVQDIELYSMCEHHLLPFVGRCHIAYIPNGKVLGLSKFARIVDMYARRFQIQEQLTHQIAKAVEEVTGAKGVGVIVEAKHMCMMMRGVEKQNSSMRTSVMLGNFRADPKTRNEFLQLVRG

SEQ ID NO: 13082 - protein, 306 aa, unidentified
  source 1..306: note = Pseudoalteromonadaceae bacterium
  REGION 1..306: note = tr|A0A2D7MXJ4|A0A2D7MXJ4_9GAMM GTP cyclohydrolase FolE2 OS=Pseudoalteromonadaceae bacterium OX=2026783; GN = folE2 PE=3 SV=1
MQTNMPDIADTAPALQTGKLDWVGMGEIELPFIFESKDLAPVTVNAKARAFVNLHKEDAKGIHMSRLFLALDLLSTEQQVNPQTLAQALDTFITSHEGLSDKAQIEFKFELPLRRKSLLSGKAGWKSYPITLTSTIENSVISYELSVDVTYSSTCPCSAALARQLIQNAFSEKFNQETLNQKDVLAWLGTTQGIVATPHSQRSIANVKVKLDNTISEFDVVNLIDTLEAELKTPVQAAVKREDEQEFARLNGQNLMFCEDAARKIKAVLENDNFSDYWLQINHYESLHAHDAVAIAVKGIEGGYKA

SEQ ID NO: 13083 - protein, 184 aa, Pseudoalteromonas agarivorans
  REGION 1..184: note = tr|A0A290RN01|A0A290RN01_9GAMM GTP cyclohydrolase 1; OS = Pseudoalteromonas agarivorans DSM 14585 OX=1312369; GN = folE PE=3 SV=1
MHDDLKQSYQNIITAVGEDAGREGLLDTPKRAAKAMEYLTKGYRQTLDEITNNAVFSSDADDMVLVQDIELYSMCEHHLLPFIGRCHIAYIPDGKVLGLSKFARIVDMFARRFQIQEQLTHQIAKAVEEVTGAKGVGVIVEAKHMCMMMRGVEKQNSSMRTSVMLGNFRSDSKTRNEFLQLIKG

SEQ ID NO: 13084 - protein, 184 aa, Pseudoalteromonas agarivorans; identical to SEQ ID NO: 13083
  REGION 1..184: note = tr|N6W2J7|N6W2J7_9GAMM GTP cyclohydrolase 1; OS = Pseudoalteromonas agarivorans S816 OX=1307437 GN=folE; PE = 3 SV=1

SEQ ID NO: 13085 - protein, 184 aa, Pseudoalteromonas aliena
  REGION 1..184: note = tr|A0A1Q2GXW1|A0A1Q2GXW1_9GAMM GTP cyclohydrolase 1; OS = Pseudoalteromonas aliena OX=247523 GN=folE PE=3 SV=1
MHNELKESYQKIITAVGEDVNREGLLDTPKRAAKAMEYLTQGYRQTLDEITNKAVFTSDADDMVLVQDIELYSMCEHHLLPFIGRCHIAYIPNGKVLGLSKFARIVDMFSRRFQIQEQLTHQIAKAVEEVTGAKGVGVIVEAKHMCMMMRGVEKQNSSMRTSVMLGNFRSDPKTRNEFLQLIKG

SEQ ID NO: 13086 - protein, 306 aa, Pseudoalteromonas aliena
  REGION 1..306: note = tr|A0A1Q2GYX9|A0A1Q2GYX9_9GAMM GTP cyclohydrolase FolE2 OS=Pseudoalteromonas aliena OX=247523 GN=folE2 PE=3; SV = 1
MQTNMPDIADTAPALQTGKLDWVGMAEIELPFIFESRDLAPVTVNAKARAFVNLHKEDAKGIHMSRLYLALDVLSTEQQVNPQTLANTLNTFISSHENLSDKAQIEFKFELPLRRKSLLSGKVGWKSYPVTLISTIEHNIISYELTVDVTYSSTCPCSAALARQLIQNAFNEKFDQDTLSQKDVHEWLGTTQGIVATPHSQRSIANVKVKLNNDINEFDVVNLINTLENELKTPVQAAVKREDEQEFARLNGQNLMFCEDAARKIKASLEASNYADYWLQINHYESLHAHDAVAIAVKGIENGYKA

SEQ ID NO: 13087 - protein, 184 aa, unidentified
  source 1..184: note = Pseudoalteromonas amylolytica
  REGION 1..184: note = tr|A0A1S1MZ90|A0A1S1MZ90_9GAMM GTP cyclohydrolase 1; OS = Pseudoalteromonas amylolytica OX=1859457 GN=folE PE=3; SV = 1
MHDNLKDSYKQIIEAVGEDSNREGLLETPKRAAKAMEYLTKGYRETLEDITNNAVFTSDADDMVLIQDIELYSMCEHHLLPFVGRCHIAYIPDGKVLGLSKFARIVDMFSRRFQIQEQLTHQIAKAVEQVTQAKGVGVIVEAKHMCMMMRGVEKQNSQMRTSVMLGNFREDPKTRNEFMQLVKN

SEQ ID NO: 13088 - protein, 306 aa, unidentified
  source 1..306: note = Pseudoalteromonas amylolytica
  REGION 1..306: note = tr|A0A1S1MTV0|A0A1S1MTV0_9GAMM GTP cyclohydrolase FolE2 OS=Pseudoalteromonas amylolytica OX=1859457 GN=folE2; PE = 3 SV=1
MQTIMPDIADTAEALQTGTLNWVGMGNIELPLLFASKGLNDITVTAKADAFVNLQNEQAKGIHMSRLFLALDTLSCEQTLTPQTLKQVLDSFVSSHQGLSNAAKVVLTFELPLRRSSLLSQKQGWKSYPVTVTGTVQGGQFQLEVALDVTYSSTCPCSAALARQLIQQAFSEQFSKQSLSFDQVHQWLGSTEGIVATPHSQRSIANIKVKLASDSQEFDILALINSVEHELKTPVQAAVKREDEQEFARLNGQNLMFCEDAARKLKALFEASHYLDYYIKINHYESLHAHDAVAYAVKGLSHGYQV

SEQ ID NO: 13089 - protein, 184 aa, Pseudoalteromonas arctica
  REGION 1..184: note = tr|A0A290S7Z0|A0A290S7Z0_9GAMM GTP cyclohydrolase 1; OS = Pseudoalteromonas arctica A 37-1-2 OX=1117313 GN=folE; PE = 3 SV=1
MHNELKESYEKIITAVGEDANREGLLDTPKRAAKAMEYLTQGYRQTLDEITNKAVFTSDADDMVLVQDIELYSMCEHHLLPFIGRCHIAYIPNGKVLGLSKFARIVDMFSRRFQIQEQLTHQIAKAVEEVTGAKGVGVIVEAKHMCMMMRGVEKQNSSMRTSVMLGNFRSDPKTRNEFLQLIKG

SEQ ID NO: 13090 - protein, 306 aa, Pseudoalteromonas arctica
  REGION 1..306: note = tr|A0A290S817|A0A290S817_9GAMM GTP cyclohydrolase FolE2 OS=Pseudoalteromonas arctica A 37-1-2 OX=1117313; GN = folE PE=3 SV=1
MQTNMPDIADTAPALQTGKLDWVGMGEIELPFIFESRDLSPVTVNAKACAFVNLHKEDAKGIHMSRLFLALDLLSTEQQVNPQTIAQALDTFITSHEGLSNKAQIEFKFELPLRRKSLLSGKAGWKSYPVVLTSTIENNIISYELTVDVTYSSTCPCSAALARQLIQNAFNEKFNQETLSQKDVHEWLGTTQGIVATPHSQRSIANVKVKLDSNIQEFDVVTLINTLEAELKTPVQAAVKREDEQEFARLNGQNLMFCEDAARKIKALLETDNYSDYWLQINHYESLHAHDAVAIAVKGIEGGYKA

SEQ ID NO: 13091 - protein, 184 aa, Pseudoalteromonas atlantica
  REGION 1..184: note = sp|Q15YG1|GCH1_PSEA6 GTP cyclohydrolase 1; OS = Pseudoalteromonas atlantica (strain T6c / ATCC BAA-1087) OX=342610 GN=folE PE=3 SV=1
MSDDLTQHYSQILSILGEDTQRGGLVDTPKRAAKAMQFLTDGYEKNLNDVVNGAIFEADTDEMVVIQNIEYYSLCEHHILPFIGQCHIAYLPQGKVLGLSKFARIVDMYARRLQIQEGLTKQIADAIQEVTGAAGVGVIMEGKHMCMMMRGVQKQNSSMVTSVMLGAMRKSDATRNEFLRLIGK

SEQ ID NO: 13092 - protein, 306 aa, Pseudoalteromonas atlantica; identical to SEQ ID NO: 13082
  REGION 1..306: note = tr|A0A510ZMI6|A0A510ZMI6_PSEAF GTP cyclohydrolase FolE2 OS=Pseudoalteromonas atlantica OX=288 GN=folE2 PE=3; SV = 1

SEQ ID NO: 13093 - protein, 306 aa, Pseudoalteromonas byunsanensis
  REGION 1..306: note = tr|A0A1S1N309|A0A1S1N309_9GAMM GTP cyclohydrolase FolE2 OS=Pseudoalteromonas byunsanensis OX=327939 GN=folE2; PE = 3 SV=1
MQTIMPDIADTAEALQTGTLNWVGMGDIELPLLFASKGLNDITVTAKADAFVNLQNEQAKGIHMSRLFLALDTLSCEQTLTPKTLKQVLDSFVSSHQGLSNAAKVVLTFELPLRRTSLLSQKQGWKSYPVTITGTLQDDQFQLELAVDVTYSSTCPCSAALARQLIQQAFSEQFSQHSLTFDEVHQWLGSTEGIVATPHSQRSIANIKVKLAPDSQEFDILAVINSVEHELKTPVQAAVKREDEQEFARLNGQNLMFCEDAARKLKALFEASHYLDYYIKINHYESLHAHDAVAYAVKGLPHGYQV

SEQ ID NO: 13094 - protein, 184 aa, Pseudoalteromonas byunsanensis
  REGION 1..184: note = tr|A0A1S1NEF7|A0A1S1NEF7_9GAMM GTP cyclohydrolase 1; OS = Pseudoalteromonas byunsanensis OX=327939 GN=folE PE=3; SV = 1
MHDNLKDSYKQIIEAVGEDSNREGLLETPKRAAKAMEYLTKGYRETLEDITNNAVFTSDADDMVLIQDIELYSMCEHHLLPFVGRCHIAYIPNGKVLGLSKFARIVDMFARRFQIQEQLTHQIAKAVEQVTQAKGVGVIVEAKHMCMMMRGVEKQNSQMRTSVMLGNFREDPKTRNEFMQLVKN

SEQ ID NO: 13095 - protein, 306 aa, Pseudoalteromonas carrageenovora
  REGION 1..306: note = tr|A0A2K4XC85|A0A2K4XC85_PSEVC GTP cyclohydrolase FolE2 OS=Pseudoalteromonas carrageenovora IAM 12662; OX = 1314868 GN=folE PE=3 SV=1
MQTNMPDIADTAPALQTGKLDWVGMGEIELPFIFESKDLAPVTVNAKARAFVNLHKEDAKGIHMSRLFLALDLLSTEQQVNPQTIAQALDTFITSHEGLSDKAQIEFKFELPLRRKSLLSGKAGWKSYPITLTSTIENNVISYELTVDVTYSSTCPCSAALARQLIQNAFNEKFNQETLSQKDVHEWLGTTQGIVATPHSQRSIANVKVKLDSSCDEFDVVNLINTLEAELKTPVQAAVKREDEQEFARLNGQNLMFCEDAARKIKAVLENDNFSDYWLQINHYESLHAHDAVAIAVKGVSGGYKA

SEQ ID NO: 13096 - protein, 184 aa, Pseudoalteromonas carrageenovora
  REGION 1..184: note = tr|A0A2K4XDN7|A0A2K4XDN7_PSEVC GTP cyclohydrolase 1; OS = Pseudoalteromonas carrageenovora IAM 12662 OX=1314868; GN = folE PE=3 SV=1
MHDELKQSYQNIITAVGEDANREGLLDTPKRAAKAMEYLTKGYRQTLDEITNNAVFTSDADDMVLVQDIELYSMCEHHLLPFIGRCHIAYIPDGKVLGLSKFARIVDMFARRFQIQEQLTHQIAKAVEEVTGAKGVGVIVEAKHMCMMMRGVEKQNSSMRTSVMLGNFRSDSKTRNEFLQLIKG

SEQ ID NO: 13097 - protein, 306 aa, Pseudoalteromonas citrea
  REGION 1..306: note = tr|U1JK53|U1JK53_9GAMM GTP cyclohydrolase FolE2; OS = Pseudoalteromonas citrea DSM 8771 OX=1117314 GN=folE2; PE = 3 SV=1
MQTTMPDIAHSADALQTGKLDWVGMGNIELPLLFASKGLSDTHVTAKADAFVNLQKEDAKGIHMSRLFLALDTLSCEQSLTPKTLTQVLDSFISSHQELSNAAKVSITFELPLRRPSLLSKKQGWKSYPITITAILEDGVALIELGVDVTYSSTCPCSAALARQLIQNAFAEKFQQATVDKEQVHAWLGTTEGILATPHSQRSIANIKVLLPADCEEFDILALINQVEDELKTPVQAAVKREDEQEFARLNGQNLMFCEDAARKLKALFEKTSYQDFYIKINHYESLHAHDAVAYAVKGIASGYKA

SEQ ID NO: 13098 - protein, 184 aa, Pseudoalteromonas citrea
  REGION 1..184: note = tr|U1KLU4|U1KLU4_9GAMM GTP cyclohydrolase 1; OS = Pseudoalteromonas citrea DSM 8771 OX=1117314 GN=folE; PE = 3 SV=1
MHEELKNSYHQIIEAVGEDSNREGLLDTPKRAAKAMEYLTKGYRETLDEITNNAVFTSDADDMVLIQDIELYSMCEHHLLPFVGRCHIAYIPNGKVLGLSKFARIVDMYARRFQIQEQLTHQIAKAVEEVTGAKGVGVIVEAKHMCMMMRGVEKQNSKMRTSVMLGNFREDPKTRNEFLQLVKN

SEQ ID NO: 13099 - protein, 184 aa, Pseudoalteromonas denitrificans
  REGION 1..184: note = tr|A0A1I1MGJ6|A0A1I1MGJ6_9GAMM GTP cyclohydrolase 1; OS = Pseudoalteromonas denitrificans DSM 6059 OX=1123010; GN = folE PE=3 SV=1
MHEELENSYQQIIKSVGEDPAREGLLDTPKRAAKAMSYLTQGYNQTLEGITNNAVFTSDADDMVMIQDIELYSMCEHHLLPFVGRCHIAYIPNGKVLGLSKFARIVDMFARRFQIQEQMTHQIAKAVEEVTGAKGVGVIVEAQHMCMMMRGVEKQNSKMRTSVMLGNFREDAKTRNEFLQLLKS

SEQ ID NO: 13100 - protein, 303 aa, Pseudoalteromonas denitrificans
  REGION 1..303: note = tr|A0A1I1STY2|A0A1I1STY2_9GAMM GTP cyclohydrolase FolE2 OS=Pseudoalteromonas denitrificans DSM 6059; OX = 1123010 GN=folE2 PE=3 SV=1
MNKNLPDITSGLNAFTELPLRWVGMEAIAIPLQIPISENQTITTNAKADVFVSLDKQDAKGIHMSRLYLKLKHTLTAHSLNGQVLSQLLNDLITSQQGLSESAKINLQFDLTLYKKALLSDEFGYQSYPITLTREYTYGKTITELSLTIPYSSTCPCSAALSRQALSDVIEQRFNDGYINKQELMHWISSEQSSVATPHSQRSYAYLKLKLNNKNLPNLPSLITEFEQVIGTPVQTAVKRADEQAFAKLNAENLMFCEDAARRLKQSLETNNNFIGYWFKVEHQESLHAHNAVVIDYNEQPYE

SEQ ID NO: 13101 - protein, 184 aa, Pseudoalteromonas distincta; identical to SEQ ID NO: 13089
  REGION 1..184: note = tr|F3BNS6|F3BNS6_9GAMM GTP cyclohydrolase 1; OS = Pseudoalteromonas distincta OX=77608 GN=folE PE=3 SV=1

SEQ ID NO: 13102 - protein, 306 aa, Pseudoalteromonas distincta
  REGION 1..306: note = tr|F3BP49|F3BP49_9GAMM GTP cyclohydrolase FolE2; OS = Pseudoalteromonas distincta OX=77608 GN=folE2 PE=3 SV=1
MQTNMPDIADTAPALQTGKLDWVGMGEIELPFIFESRDLSPVTVNAKARAFVNLHKEDAKGIHMSRLFLALDLLSTEQQVNPQTIAQALDTFITSHEGLSDKAQIEFKFELPLRRKSLLSGKAGWKSYPVVLTSTIENNVISYELTVDVTYSSTCPCSAALARQLIQNAFNEKFNQETLSQKDVHEWLGTTQGIVATPHSQRSIANVKVKLDSNIQEFDVVTLINTLEAELKTPVQAAVKREDEQEFARLNGQNLMFCEDAARKIKALLEANNYSDYWLQINHYESLHAHDAVAIAVKGIKGGYKA

SEQ ID NO: 13103 - protein, 184 aa, Pseudoalteromonas elyakovii; identical to SEQ ID NO: 13089
  REGION 1..184: note = tr|A0A558HTX0|A0A558HTX0_9GAMM GTP cyclohydrolase 1; OS = Pseudoalteromonas elyakovii OX=81037 GN=folE PE=3 SV=1

SEQ ID NO: 13104 - protein, 306 aa, Pseudoalteromonas elyakovii
  REGION 1..306: note = tr|A0A558I0B2|A0A558I0B2_9GAMM GTP cyclohydrolase FolE2 OS=Pseudoalteromonas elyakovii OX=81037 GN=folE2; PE = 3 SV=1
MQTNMPDIADTAPALQTGKLDWVGMGEIELPFIFESRDLSPVTVNAKARAFVNLHKEDAKGIHMSRLFLALDLLSTEQQVNPQTIAQALDTFITSHEGLSNKAQIEFKFELPLRRKSLLSGKAGWKSYPVVLTSTIENNVISYELTVDVTYSSTCPCSAALARQLIQNAFNEKFNQETLSQKDVHEWLGTTQGIVATPHSQRSIANVKVKLDSNIQEFDVVTLINTLEAELKTPVQAAVKREDEQEFARLNGQNLMFCEDAARKIKALLEANHYSDYWLQINHYESLHAHDAVAIAVKGIKGGYKA

SEQ ID NO: 13105 - protein, 306 aa, Pseudoalteromonas espejiana
  REGION 1..306: note = tr|A0A510Y299|A0A510Y299_9GAMM GTP cyclohydrolase FolE2 OS=Pseudoalteromonas espejiana OX=28107 GN=folE2; PE = 3 SV=1
MQTNMPDIADTAPALQTGKLDWVGMGEIELPFIFESKDLAPVNVNAKARAFVNLHKEDAKGIHMSRLFLALDLLSTEQQVNPQTLAQALDTFITSHKGLSDKAQIEFKFELPLRRKSLLSGKAGWKSYPITLTSTIENNVISYELCVDVTYSSTCPCSAALARQLIQNAFSEKFSQETLNQKDVLEWLGTTQGIVATPHSQRSIANVKVKLDSNTQEFDVVNLINTLEAELKTPVQAAVKREDEQEFARLNGQNLMFCEDAARKIKAVLERDNFSDYWLQINHYESLHAHDAVAIAVKGIEGGYKA

SEQ ID NO: 13106 - protein, 184 aa, Pseudoalteromonas espejiana; identical to SEQ ID NO: 13096
  REGION 1..184: note = tr|A0A510XXV4|A0A510XXV4_9GAMM GTP cyclohydrolase 1; OS = Pseudoalteromonas espejiana OX=28107 GN=folE2 PE=3 SV=1

SEQ ID NO: 13107 - protein, 306 aa, unidentified
  source 1..306: note = Pseudoalteromonas fuliginea
  REGION 1..306: note = tr|A0A063KMW9|A0A063KMW9_9GAMM GTP cyclohydrolase FolE2 OS=Pseudoalteromonas fuliginea OX=1872678 GN=folE2; PE = 3 SV=1
MQTNMPDIADTAPALQTGKLDWVGMGEIELPFIFESRDLAPVTVNAKARAFVNLHKEEAKGIHMSRLFLALDMLSTEQQVNPQTIAQALDTFITSHEGLSDKAQIEFKFELPLRRKSLLSGKTGWKSYPITLTSTLENNNIHYELTVDVTYSSTCPCSAALARQLIQNAFSEKFNQETLSQKDVHEWLGTTQGIVATPHSQRSIANVKVKLNSKTDEFDVVNLINMLEEELKTPVQAAVKREDEQEFARLNGQNLMFCEDAARKIKALLEHNNYADYWLQINHYESLHAHDAVAIAVKGLTNGYQA

SEQ ID NO: 13108 - protein, 306 aa, unidentified
  source 1..306: note = Pseudoalteromonas fuliginea
  REGION 1..306: note = tr|A0A5B0U8F6|A0A5B0U8F6_9GAMM GTP cyclohydrolase FolE2 OS=Pseudoalteromonas fuliginea OX=1872678 GN=folE2; PE = 3 SV=1
MQTNMPDIADTAPALQTGKLDWVGMGEIELPFIFESRNLAPVTVNAKARAFVNLHKEEAKGIHMSRLFLALDMLSTEQQVNPQTIAQALDTFITSHEGLSDKAQIEFKFELPLRRKSLLSGKTGWKSYPITLTSTLENNNIHYELTVDVTYSSTCPCSAALARQLIQNAFSEKFNQETLSQKDVHEWLGTTQGIVATPHSQRSIANVKVKLNSKTDEFDVVNLINMLEEELKTPVQAAVKREDEQEFARLNGQNLMFCEDAARKIKALLEHNNYADYWLQINHYESLHAHDAVAIAVKGLTNGYQA

SEQ ID NO: 13109 - protein, 302 aa, Pseudoalteromonas haloplanktis
  REGION 1..302: note = sp|Q3ILJ5|GCH4_PSEHT GTP cyclohydrolase FolE2; OS = Pseudoalteromonas haloplanktis (strain TAC 125); OX = 326442 GN=folE2 PE=3 SV=2
MPDIANTAPALQTGTLDWVGMGEIELPFIFESHGITPVTVNAKARAFVNLHKEDAKGIHMSRLFLALDTLSTEQQVNPQTLAQALDFFISSHEGLSDKALIEFKFELPLRRKSLLSDKAGWKSYPVILTSTIEQGVINYELSVDVTYSSTCPCSAALARQLIQNAFAEKFSQETLSQKEALEWLGTTQGIVATPHSQRSIANVKVKLDSNITQFDVVNLINTIEDELKTPVQAAVKREDEQEFARLNGQNLMFCEDAARKIKALLETQQYSDYWLQINHYESLHAHDALAIAVKGVAGGYRA

SEQ ID NO: 13110 - protein, 184 aa, Pseudoalteromonas haloplanktis
  REGION 1..184: note = sp|Q3IF89|GCH1_PSEHT GTP cyclohydrolase 1; OS = Pseudoalteromonas haloplanktis (strain TAC 125); OX = 326442 GN=folE PE=3 SV=1
MHNELKQGYENIITAVGEDPNREGLLDTPKRAAKAMEYLTQGYRQTLEEITNNAVFTSDADDMVLVQDIELYSMCEHHLLPFTGRCHIAYIPNGKVLGLSKFARIVDMFARRFQIQEQLTHQIAKAVEEVTGATGVGVIVEAKHMCMMMRGVEKQNSSMRTSVMLGNFRADPKTRNEFLQLIKG

SEQ ID NO: 13111 - protein, 306 aa, Pseudoalteromonas issachenkonii
  REGION 1..306: note = tr|A0A290SE87|A0A290SE87_9GAMM GTP cyclohydrolase FolE2 OS=Pseudoalteromonas issachenkonii OX=152297 GN=folE; PE = 3 SV=1
MQKTMPDIANTAAALQTGKLDWVGMGDIELPFIFESLDLAPVTVNAKARAFVNLHKEDAKGIHMSRLFLALDHLSTEQQVNPQTLAQALDTFITSHEGLSDKAHIEFKFELPLRRKSLLSGKAGWKSYPIVLTSTINQGVISFELSVDVTYSSTCPCSAALARQLIQNAFSEKFSQETLTQSEVLEWLGTTQGIVATPHSQRSIANVKVKLANNIKQFDVVNLINLLEGELKTPVQAAVKREDEQEFARLNGQNLMFCEDAARKIKTTLESKEFSDYFLQINHYESLHAHDAVAIAVKGIEGGYKA

SEQ ID NO: 13112 - protein, 184 aa, Pseudoalteromonas issachenkonii
  REGION 1..184: note = tr|A0A290SAV8|A0A290SAV8_9GAMM GTP cyclohydrolase 1; OS = Pseudoalteromonas issachenkonii OX=152297 GN=folE PE=3; SV = 1
MHNELKESYQKIITAVGEDAKREGLLDTPKRAAKAMEYLTQGYRQTLNEITNNAVFTSDADDMVLIQDIELYSMCEHHLLPFIGRCHIAYIPDGKVLGLSKFARIVDMFSRRFQIQEQLTHQIAKAVEEVTGAKGVGVIVEAKHMCMMMRGVEKQNSSMRTSVMLGNFRADPKTRNEFLQLIKG

SEQ ID NO: 13113 - protein, 293 aa, Pseudoalteromonas lipolytica
  REGION 1..293: note = tr|A0A1I6XKD9|A0A1I6XKD9_9GAMM GTP cyclohydrolase FolE2 OS=Pseudoalteromonas lipolytica OX=570156 GN=folE2; PE = 3 SV=1
MYLPDITSHSNSHFQFPLKWVGMEKIALPIKLELAGLNVALNAFADVFVSLDSNAKGIHMSRLYLMLNQMLAQQTLTQHRLAECMNHMLASQQGLSQGAKLVLHFDLPLLKPALLSDNAGYNAYPVVLTITQQAHLTVKLNVTIAYSSTCPCSAALSRQLLSEAVDTHFKEDSIHKHALLGWLASEEGSIATPHSQRSYAYIDATFESEQLPDLSHFIQTCEHAIGTPVQTAVKREDEQAFAALNAENLLFCEDAARRLKACLEAMNGLADYQFKIEHQESLHAHNAVVYEAK

SEQ ID NO: 13114 - protein, 306 aa, Pseudoalteromonas lipolytica
  REGION 1..306: note = tr|Z5XUK1|Z5XUK1_9GAMM GTP cyclohydrolase FolE2; OS = Pseudoalteromonas lipolytica SCSIO 04301 OX=1452721; GN = folE2 PE=3 SV=1
MQTTMPDIADTAPALRTGKLDWVGMGEIELPFIFESRNIAPVNVVAKARAFVNLHKEDAKGIHMSRLFLALDTLSTEQQVNPQTLAQALDTFISSHDDLSDQAQIEFKFELPLRRESLLSGKVGWKNYPIHLIAKINQGVLSFELMVDVTYSSTCPCSAALARQLIQHAFDEKFAEQQIDKQTVLNWLGTTEGIVATPHSQRSIANVKVKLDNALTSFDVVGLIDALEGELKTPVQAAVKREDEQEFARLNGQNLMFCEDAARKIKGLLEEQEYADYWLQINHYESLHAHDAVAIAVKGVAGGYTA

SEQ ID NO: 13115 - protein, 306 aa, Pseudoalteromonas luteoviolacea
  REGION 1..306: note = tr|A0A167CED9|A0A167CED9_9GAMM GTP cyclohydrolase FolE2 OS=Pseudoalteromonas luteoviolacea DSM 6061; OX = 1365250 GN=folE2 PE=3 SV=1
MPTSMPDIAHCADALKTGTLDWVGMGNIELPLQLGSKGLNDTPVTAKADAFVSLDKADAKGIHMSRLFLALDKLSCEQTLTPVTLTALLDQFLTTHKDLSQSAKVVIAFELPLRRASLLSGKQGWKNYPVTITAVLKDNQVKLELAVDVTYSSTCPCSAALARQLIQNAFEEKFAGQQLDHETVINWLGTTEGIVATPHSQRSIANIKVQLPQDEAEFDILGLIDLVEQELKTPVQTAVKREDEQEFARLNGQNLMFCEDAARKLKALFNTQNYLDFYVKINHYESLHAHDAVAYAVKGIQGGYQA

SEQ ID NO: 13116 - protein, 185 aa, Pseudoalteromonas luteoviolacea
  REGION 1..185: note = tr|A0A541BK25|A0A541BK25_9GAMM GTP cyclohydrolase 1; OS = Pseudoalteromonas luteoviolacea OX=43657 GN=folE PE=3; SV = 1
MHDELKNSYKQIINAVGEDIEREGLLDTPKRAAKAMEYLTQGYRQTLSEITNNAVFTSDADDMVLIQDIELYSMCEHHLLPFVGRCHIAYIPDGKVLGLSKFARIVDMFARRFQIQEQLTHQIAKAVEEVTGARGVGVIVEAKHMCMMMRGVEKQNSQMRTSVMLGNFREDAKTRNEFLQLVKNG

SEQ ID NO: 13117 - protein, 306 aa, Pseudoalteromonas marina; identical to SEQ ID NO: 6974
  REGION 1..306: note = tr|U1JQ34|U1JQ34_9GAMM GTP cyclohydrolase FolE2; OS = Pseudoalteromonas marina DSM 17587 OX=1117316 GN=folE2; PE = 3 SV=1

SEQ ID NO: 13118 - protein, 184 aa, Pseudoalteromonas marina
  REGION 1..184: note = tr|U1JZ69|U1JZ69_9GAMM GTP cyclohydrolase 1; OS = Pseudoalteromonas marina DSM 17587 OX=1117316 GN=folE; PE = 3 SV=1
MHNELKDSYQKIITAVGEDAEREGLLDTPKRAAKAMEYLTQGYRQTLDEITNNAVFTSDADDMVLVQDIELYSMCEHHLLPFIGRCHIAYIPNGKVLGLSKFARIVDMFSRRFQIQEQLTHQIAKAVEEVTGAKGVGVIVEAKHMCMMMRGVEKQNSSMRTSVMLGNFRSDPKTRNEFLQLIKG

SEQ ID NO: 13119 - protein, 184 aa, unidentified
  source 1..184: note = Pseudoalteromonas neustonica
  REGION 1..184: note = tr|A0A558IKS9|A0A558IKS9_9GAMM GTP cyclohydrolase 1; OS = Pseudoalteromonas neustonica OX=1840331 GN=folE PE=3; SV = 1
MHDQLKNSYHEIITAVGEDPQREGLLDTPKRAAKAMEYLTKGYRQTLEEITNNAVFTSDADDMVLIQDIELYSMCEHHLLPFVGRCHIAYIPNGKVLGLSKFARIVDMFARRFQIQEQLTHQIAKAVEEVTGAKGVGVIVEAKHMCMMMRGVEKQNSSMRTSVMLGNFRADPKTRNEFLQLVKG

SEQ ID NO: 13120 - protein, 306 aa, unidentified
  source 1..306: note = Pseudoalteromonas neustonica
  REGION 1..306: note = tr|A0A558IQ75|A0A558IQ75_9GAMM GTP cyclohydrolase FolE2 OS=Pseudoalteromonas neustonica OX=1840331 GN=folE2; PE = 3 SV=1
MQSNMPDIADTAPALQTGKLDWVGMADIELPFLFESRELAPINVNAKARAFVNLHKEDAKGIHMSRLFLALDTLSTEQHVNPQTIAQALDSFISSHTGLSDQAKIEFKFELPLRRKSLLSGKAGWKSYPLTIVAKIDRGVLSFELSLDVTYSSTCPCSAALARQLIQQAFVEKFQQHTLSHEEVVNWLGSTDGIIATPHSQRSIANVKVKLDSSIREFDILSLINTLEDELKTPVQAAVKREDEQEFARLNGQNLMFCEDAARKIKAVLEDAQYADYWLQINHYESLHAHDAVAIAVKGIAGGYQP

SEQ ID NO: 13121 - protein, 184 aa, Pseudoalteromonas nigrifaciens
  REGION 1..184: note = tr|A0A379H6D8|A0A379H6D8_9GAMM GTP cyclohydrolase 1; OS = Pseudoalteromonas nigrifaciens OX=28109 GN=folE PE=3; SV = 1
MHNELKQSYENIITAVGEDPNREGLLDTPKRAAKAMEYLTQGYRQTLEEITNNAVFTSDADDMVLVQDIELYSMCEHHLLPFTGRCHIAYIPNGKVLGLSKFARIVDMFARRFQIQEQLTHQIAKAVEEVTGATGVGVIVEAKHMCMMMRGVEKQNSSMRTSVMLGNFRADPKTRNEFLQLIKG

SEQ ID NO: 13122 - protein, 306 aa, Pseudoalteromonas nigrifaciens
  REGION 1..306: note = tr|A0A379HDW0|A0A379HDW0_9GAMM GTP cyclohydrolase FolE2 OS=Pseudoalteromonas nigrifaciens OX=28109 GN=folE2; PE = 3 SV=1
MQTNMPDIANTAPALQTGTLDWVGMGEIELPFIFESHGITPVTVNAKARAFVNLHKEDAKGIHMSRLFLALDTLSTEQQVNPQTLAQALDFFISSHEGLSDKALIEFKFELPLRRKSLLSGKAGWKSYPVILTSTIEQGVINYELSVDVTYSSTCPCSAALARQLIQNAFAEKFSQETLSQKEALEWLGTTQGIVATPHSQRSIANVKVKLDSNITQFDVVNLINTIEDELKTPVQAAVKREDEQEFARLNGQNLMFCEDAARKIKALLETQQYSDYWLQINHYESLHAHDALAIAVKGVAGGYRA

SEQ ID NO: 13123 - protein, 306 aa, Pseudoalteromonas peptidolytica
  REGION 1..306: note = tr|A0A510U8M3|A0A510U8M3_9GAMM GTP cyclohydrolase FolE2 OS=Pseudoalteromonas peptidolytica OX=61150 GN=folE2; PE = 3 SV=1
MQNNMPDIAHSASALQTGTLDWVGMGNIELPLVIEVKGLGQVTVTAKADAFVDLQKEDAKGIHMSRLFLALDSLSCEKVLTPNTLKQLLDNFLSTHNELSTSAKVLFHFELPIRRPSLLSKKMGWKSYPIKLDATLRNGVYTLELALDITYSSTCPCSAALSRQLIQDAFQQAFDGTELDFHSVHKWLGSTEGIVATPHSQRSIANIKIRLGEHIDEFEILDLIELVENELKTPVQAAVKREDEQEFARLNGQNLMFCEDAARKLKALFNQQQLADFYIKINHYESLHAHDAVAYAVKGINGGYQI

SEQ ID NO: 13124 - protein, 184 aa, Pseudoalteromonas peptidolytica
  REGION 1..184: note = tr|A0A510U1Z9|A0A510U1Z9_9GAMM GTP cyclohydrolase 1; OS = Pseudoalteromonas peptidolytica OX=61150 GN=folE2 PE=3; SV = 1
MQDELRQSYKSIIAAVGEDTGREGLLDTPKRAAKAMEYLTQGYRQTLDEITNNAVFTSDADDMVLIQDIELYSMCEHHLLPFVGRCHIAYIPNGKVLGLSKFARIVDMFARRFQIQEQLTHQIAKAVEEVTGAKGVGVIVEAKHMCMMMRGVEKQNSSMRTSVMLGNFRSDPKTRNEFLQLVKG

SEQ ID NO: 13125 - protein, 306 aa, Pseudoalteromonas phenolica
  REGION 1..306: note = tr|A0A0S2K5A2|A0A0S2K5A2_9GAMM GTP cyclohydrolase FolE2 OS=Pseudoalteromonas phenolica OX=161398 GN=folE2; PE = 3 SV=1
MQTTMPDIAHSADALQTGKLDWVGMGNIELPLMLATKDLPEQPVTAKADAFVNLHKEDAKGIHMSRLFLALDTLSCEQALSPNTLKQLLDEFVTTHQDISDAAKVVINFELPLRRPSLLSKKQGWKSYPVSITASLVNQTFSIELALDVTYSSTCPCSAALARQLIQDAFAAKFKDKDISHEEVHAWLGTTEGVLATPHSQRSISNIKIKLDDNCQEFDIVGLVNLVEDELKTPVQAAVKREDEQEFARLNGQNLMFCEDAARKLKALFENAGFADYYIKINHYESLHAHDAVAYAFKGLPGGYSA

SEQ ID NO: 13126 - protein, 184 aa, Pseudoalteromonas phenolica
  REGION 1..184: note = tr|A0A0S2JX27|A0A0S2JX27_9GAMM GTP cyclohydrolase 1; OS = Pseudoalteromonas phenolica OX=161398 GN=folE PE=3 SV=1
MHDDLKKSYHEILTAVGENPEREGLLDTPKRAAKAMEFLTKGYRETLDEITNNAVFSSDADDMVLIQDIELYSMCEHHLLPFVGKCHIAYIPNGKVLGLSKFARIVDMFARRFQIQEQLTHQIAKAVEEVTGAKGVGVIVEAKHMCMMMRGVEKQNSKMRTSVMLGNFRHDPKTRNEFLQLVKN

SEQ ID NO: 13127 - protein, 184 aa, unidentified
  source 1..184: note = Pseudoalteromonas piratica
  REGION 1..184: note = tr|A0A0A7ECJ9|A0A0A7ECJ9_9GAMM GTP cyclohydrolase 1; OS = Pseudoalteromonas piratica OX=1348114 GN=folE PE=3 SV=1
MEKKLAENYLKIIEAVGEDPNREGLLDTPKRAAKAMEYLTKGYRQTLQEITNNAVFSSDADDMVLVQDIELYSMCEHHLLPFVGRCHIAYIPNGKVLGLSKFARIVDMFARRFQIQEQLTHQIAEAVQEVTNAKGVGVIVEAKHMCMMMRGVEKQNSKMRTSVMLGNFREDPKTRNEFLQLVKG

SEQ ID NO: 13128 - protein, 213 aa, unidentified
  source 1..213: note = Pseudoalteromonas piratica
  REGION 1..213: note = tr|A0A0A7EK90|A0A0A7EK90_9GAMM GTP cyclohydrolase 1; OS = Pseudoalteromonas piratica OX=1348114 GN=folE PE=3 SV=1
MISSEAQLVKQALLDAGLETPLKATEFSPEQKYERIKGLFTEIVDTLGLDLEDDSLNETPHRIAKMYVREIFAGLDYENFPKIALIENKMKVDEMVKVNNISLTSTCEHHFVTIDGYAKVAYIPNKKIIGLSKINRIVRFFAQRPQVQERLTQQVLIALQALLETDNVAVSINAVHYCVKSRGVMDATSETATTALGGAFKSNPNTRAEFLAG

SEQ ID NO: 13129 - protein, 306 aa, Pseudoalteromonas piscicida
  REGION 1..306: note = tr|A0A2A5JQ28|A0A2A5JQ28_PSEO7 GTP cyclohydrolase FolE2 OS=Pseudoalteromonas piscicida OX=43662 GN=folE2; PE = 3 SV=1
MQNNMPDIAHSASALQTGTLDWVGMGNIELPLVLESKGLNPATVTAKADAFVNLQKEDAKGIHMSRLFLALDTLSCEQALTPNTLKQLLDNFLSTHNELSTGAKVTFKFELPIRRPSLLSKKMGWKSYPVIIDATLLDGIYKLELAVDITYSSTCPCSAALSRQLIQNAFQHAFDGKELDFHSVHNWLGSTDGIVATPHSQRSIANIKVKLNESHDEFAILDLIELVENELKTPVQAAVKREDEQEFARLNGQNLMFCEDAARKLKALFNKQALADFYIKINHYESLHAHDAVAYAVKGINGGYSV

SEQ ID NO: 13130 - protein, 184 aa, Pseudoalteromonas piscicida
  REGION 1..184: note = tr|A0A0F4NYG9|A0A0F4NYG9_PSEO7 GTP cyclohydrolase 1; OS = Pseudoalteromonas piscicida OX=43662 GN=folE PE=3 SV=1
MQDKLQQSYKTIIEAVGEDADREGLLDTPKRAAKAMEYLTQGYRQTLDEITNNAVFSSDADDMVLVQDIELYSMCEHHLLPFVGRCHIAYIPNGKVLGLSKFARIVDMFARRFQIQEQLTHQIAKAVEEVTGAKGVGVIVEAKHMCMMMRGVEKQNSSMRTSVMLGNFRSDPKTRNEFLQLVKG

SEQ ID NO: 13131 - protein, 184 aa, unidentified
  source 1..184: note = Pseudoalteromonas porphyrae
  REGION 1..184: note = tr|A0A0N1EX47|A0A0N1EX47_9GAMM GTP cyclohydrolase 1; OS = Pseudoalteromonas porphyrae OX=187330 GN=folE PE=3 SV=1
MHNELKNSYQEIISAVGEDPQREGLLDTPKRAAKAMEYLTKGYRQTLDEITNNAVFTSDADDMVLIQDIELYSMCEHHLLPFVGRCHIAYIPNGKVLGLSKFARIVDMYARRFQIQEQLTHQIAKAVEEVTGAKGVGVIVEAKHMCMMMRGVEKQNSSMRTSVMLGNFRADPKTRNEFLQLIKG

SEQ ID NO: 13132 - protein, 304 aa, unidentified
  source 1..304: note = Pseudoalteromonas porphyrae
  REGION 1..304: note = tr|A0A0N0LZN4|A0A0N0LZN4_9GAMM GTP cyclohydrolase FolE2 OS=Pseudoalteromonas porphyrae OX=187330 GN=folE2; PE = 3 SV=1
MKLQLPDIASGQRAGAALPLKWVGMEGIAIPLNIIEQPSSSIAAKADVFVSLDKADAKGIHMSRLYLRVKDILAREQLSVGVLAALLKELVESQQGLSLAARLQLAFELTIRKPALLSDQFGYQTYPVSIRCEYINEQMNMELSLTIPYSSTCPCSAALSRQAMSDAITSQFSQDLISKEQLLDWVTSQQGSVATPHSQRSYAYLKLRLQNNALPNLETLIKNLEEVIGTPVQTAVKREDEQAFAKLNAENLMFCEDAARRLKLALENNGQVIDYWFKVEHQESLHAHNAVVIDHKSSHGYEKL

SEQ ID NO: 13133 - protein, 294 aa, unidentified
  source 1..294: note = Pseudoalteromonas profundi
  REGION 1..294: note = tr|A0A3A3EI59|A0A3A3EI59_9GAMM GTP cyclohydrolase FolE2 OS=Pseudoalteromonas profundi OX=1774956 GN=folE2; PE = 3 SV=1
MQLPDITSHSNVDFQSPLKWVGMEKIALPLKLAQTHVDVHLNTKADVFVSLDSDAKGIHMSRLYLLLNQQLAKQSLTSQRISEFMEAVLRSQKGLSKGAKLVLHFDLPQLKPALLSDHAGYNAYPVVLTITKQQSLTINLKVDVAYSSTCPCSAALSRQLLSEAVDKQFSDDHIDKASLLNWLASEQGSIATPHSQRSYAYIDVTFSSEKLPDISGFITVCEQAIGTPVQTAVKREDEQAFAALNAKNLLFCEDAARRLKQCFETMPGIADYQFKVEHQESLHGHNAVVYESKY

SEQ ID NO: 13134 - protein, 306 aa, unidentified
  source 1..306: note = Pseudoalteromonas profundi
  REGION 1..306: note = tr|A0A3A3ETB1|A0A3A3ETB1_9GAMM GTP cyclohydrolase FolE2 OS=Pseudoalteromonas profundi OX=1774956 GN=folE2; PE = 3 SV=1
MQTTMPDIADTAPALRTGKLDWVGMGEIELPFIFESRNIAPVNVIAKARAFVNLHKEDAKGIHMSRLFLALDTLSTEQQVNPQTLAQALDAFISSHDDLSDQAQIEFKFELPLRRKSLLSGKVGWKNYPIHLIAKINQGVLSFELMVDVTYSSTCPCSAALARQLIQNAFSEKFAEQHVDKQTVLEWLGTTDGIVATPHSQRSIANVKVKLDSQIDSFDVVGLIDALEAELKTPVQAAVKREDEQEFARLNGQNLMFCEDAARKIKGLLEEQNYADYWLQINHYESLHAHDAVAIAVKGIAGGYTA

SEQ ID NO: 13135 - protein, 306 aa, Pseudoalteromonas rubra
  REGION 1..306: note = tr|A0A0F4QHB4|A0A0F4QHB4_9GAMM GTP cyclohydrolase FolE2 OS=Pseudoalteromonas rubra OX=43658 GN=folE2 PE=3; SV = 1
MPTSMPDIAHSADALQEGKLDWVGMGNIELPLLLSSKGINDTPVTAKADAFVSLDREDAKGIHMSRLFLALDTLSCEQTLTPGAIRSVLDSFITSHEGLSHSAKVTFHFELPLRRASLLSGKQGWKNYPVSITASLTDGRFSLELAVDVTYSSTCPCSAALARQLIQNAFEQKFAGQSLDHASVHAWLGTTEGILATPHSQRSVTNIKVKLDENCQAFDILGLVNLVEDELKTPVQAAVKREDEQEFARLNGQNLMFCEDAARKLKALFEAENYQDYYIKINHYESLHAHDAVAYAVKGLKDGYRA

SEQ ID NO: 13136 - protein, 306 aa, Pseudoalteromonas rubra
  REGION 1..306: note = tr|U1LVP9|U1LVP9_9GAMM GTP cyclohydrolase FolE2; OS = Pseudoalteromonas rubra DSM 6842 OX=1117318 GN=folE2; PE = 3 SV=1
MPTSMPDIAHSADALQEGKLDWVGMGNIELPLLLSSKGMNDTPVTAKADAFVSLDREDAKGIHMSRLFLALDSLSCEQTLTPATIRSVLDSFITSHEGLSHSAKVTFHFELPLRRASLLSGKQGWKNYPVVITANLTNGQFNLELAVDVTYSSTCPCSAALARQLIQNAFEEKFADQSLDHASVHAWLGTTEGILATPHSQRSVTNIKVKLDEHCQEFDILGLVNMVEDELKTPVQAAVKREDEQEFARLNGQNLMFCEDAARKLKALFEAENYPDYYIKINHYESLHAHDAVAYAVKGLKDGYRV

SEQ ID NO: 13137 - protein, 184 aa, Pseudoalteromonas ruthenica
  REGION 1..184: note = tr|A0A0F4PUY0|A0A0F4PUY0_9GAMM GTP cyclohydrolase 1; OS = Pseudoalteromonas ruthenica OX=151081 GN=folE PE=3 SV=1
MHDELKQSYQQLISAVGEDPQREGLLDTPKRAAKAMEYLTQGYRQTLAEITNNAVFTSDADDMVLIQDIELYSMCEHHLLPFVGKAHIAYIPDGKVLGLSKFARIVDMFARRFQIQEQLTHQIAQAVEEVTGAKGVGVIVEAKHMCMMMRGVEKQNSKMRTSVMLGNFRTDPKTRNEFLQLVKN

SEQ ID NO: 13138 - protein, 307 aa, Pseudoalteromonas ruthenica
  REGION 1..307: note = tr|A0A0F4PSA0|A0A0F4PSA0_9GAMM GTP cyclohydrolase FolE2 OS=Pseudoalteromonas ruthenica OX=151081 GN=folE2; PE = 3 SV=1
MPHPMPDIANTSASSVHHTLDWVGMSAIEIPLKIATKGMAATVINAKAQAFVNLIDTHAKGIHMSRLFLALDRLSNEASVTPAQLKTTLDAFISSHDDISDRARLSLSFELPLRRSALLSDNSGWKFYPITLDMQLNQGQLRVEAGVEVTYSSTCPCSAALARQLIQENFKRDFDAENLNFEQVLKWLGTTEGISATPHSQRSVAQTKVLLDAQLGEFDFVAIIDEIEQTLKTPVQTAVKREDEQEFARLNGANLMFCEDAARKVKAALDERADVLDFWVRINHYESLHAHDAVAITTKGLPQGYQP

SEQ ID NO: 13139 - protein, 184 aa, Pseudoalteromonas sp.; identical to SEQ ID NO: 13137
  REGION 1..184: note = tr|A0A4Q6Y4Z1|A0A4Q6Y4Z1_9GAMM GTP cyclohydrolase 1; OS = Pseudoalteromonas sp. CO325X OX=1777262 GN=folE PE=3; SV = 1

SEQ ID NO: 13140 - protein, 306 aa, Pseudoalteromonas sp.
  REGION 1..306: note = tr|A0A426VLC8|A0A426VLC8_9GAMM GTP cyclohydrolase FolE2 OS=Pseudoalteromonas sp. J010 OX=998465 GN=folE2; PE = 3 SV=1
MQNNMPDIAHSASALQTGTLDWVGMGNIELPLVIEVKGLGQVTVTAKADAFVDLQKEDAKGIHMSRLFLALDSLSCEKVLTPNTLKQLLDNFLSTHNELSTSAKVLFHFELPIRRPSLLSKKMGWKSYPIKLDATLRNGVYTLELALDITYSSTCPCSAALSRQLIQDAFQQAFDGTDLDFHSVHKWLGSTEGIVATPHSQRSIANIKIRLGEHIDEFEILDLIELVENELKTPVQAAVKREDEQEFARLNGQNLMFCEDAARKLKALFNQQQLADFYIKINHYESLHAHDAVAYAVKGINGGYQI

SEQ ID NO: 13141 - protein, 213 aa, Pseudoalteromonas spongiae
  REGION 1..213: note = tr|A0A290T964|A0A290T964_9GAMM GTP cyclohydrolase 1; OS = Pseudoalteromonas spongiae UST010723-006 OX=1117319; GN = folE PE=3 SV=1
MISKEATLVKEALIAKGLETPLKDVGLSSEQKYDKLKGLFTEVVDTLGLDLNDDSLAETPHRIAKMYVHEIFSGLDYETFPKIALIENKMQVDEMVKVNSISLTSTCEHHFVTIDGYAKVAYIPNEKIIGLSKINRIVRFFAKRPQVQERLTQQILIALQALLETDNVAVSINATHYCVKSRGVMDATSETSTTALGGDFKTNSNTRAEFLAN

SEQ ID NO: 13142 - protein, 184 aa, Pseudoalteromonas spongiae
  REGION 1..184: note = tr|A0A290T6W6|A0A290T6W6_9GAMM GTP cyclohydrolase 1; OS = Pseudoalteromonas spongiae UST010723-006 OX=1117319; GN = folE PE=3 SV=1
MEKKLAENYRQIIEAVGENPEREGLLDTPKRAAKAMEYLTKGYRQTLDEITNNAVFTSDADDMVLIQDIELYSMCEHHLLPFVGRCHIAYIPDGKVLGLSKFARIVDMFARRFQIQEQLTHQIAEAVQQVTNAKGVGVIVEAKHMCMMMRGVEKQNSKMRTSVMLGNFREDPKTRNEFLQLVKG

SEQ ID NO: 13143 - protein, 306 aa, Pseudoalteromonas tetraodonis
  REGION 1..306: note = tr|A0A290TGZ6|A0A290TGZ6_9GAMM GTP cyclohydrolase FolE2 OS=Pseudoalteromonas tetraodonis OX=43659 GN=folE; PE = 3 SV=1
MQKTMPDIANTAAALQTGKLDWVGMGDIELPFIFESLDLAPVTVNAKARAFVNLHKEDAKGIHMSRLFLALDHLSTEQQVNPQTLAQALDTFITSHEGLSDKAHIEFKFELPLRRKSLLSGKAGWKSYPIVLTSTINQGVISFELSVDVTYSSTCPCSAALARQLIQNAFSEKFSQETLTQSEVLEWLGTTQGIVATPHSQRSIANVKVKLANNIKQFDVVNLINLLEDELKTPVQAAVKREDEQEFARLNGQNLMFCEDAARKIKTTLESKEFSDYFLQINHYESLHAHDAVAIAVKGIEGGYKA

SEQ ID NO: 13144 - protein, 184 aa, Pseudoalteromonas tetraodonis
  REGION 1..184: note = tr|A0A1E3X0I8|A0A1E3X0I8_9GAMM GTP cyclohydrolase 1; OS = Pseudoalteromonas tetraodonis OX=43659 GN=folE PE=3 SV=1
MHNELKESYQKIITAVGEDAEREGLLDTPKRAAKAMEYLTQGYRQTLNEITNNAVFTSDADDMVLIQDIELYSMCEHHLLPFIGRCHIAYIPDGKVLGLSKFARIVDMFSRRFQIQEQLTHQIAKAVEEVTGAKGVGVIVEAKHMCMMMRGVEKQNSSMRTSVMLGNFRADPKTRNEFLQLIKG

SEQ ID NO: 13145 - protein, 184 aa, Pseudoalteromonas translucida; identical to SEQ ID NO: 13121
  REGION 1..184: note = tr|A0A0U2VD42|A0A0U2VD42_9GAMM GTP cyclohydrolase 1; OS = Pseudoalteromonas translucida KMM 520 OX=1315283; GN = folE PE=3 SV=1

SEQ ID NO: 13146 - protein, 306 aa, Pseudoalteromonas translucida
  REGION 1..306: note = tr|A0A0U2WWI3|A0A0U2WWI3_9GAMM GTP cyclohydrolase FolE2 OS=Pseudoalteromonas translucida KMM 520 OX=1315283; GN = folE PE=3 SV=1
MQTNMPDIANTAPALQTGTLDWVGMGEIELPFIFESHGITPVTVNAKARAFVNLHKEDAKGIHMSRLFLALDTLSTEQQVNPQTLAQALDFFISSHEGLSDKALIEFKFELPLRRKSLLSGKAGWKSYPVILTSTIEQGVISYELSVDVTYSSTCPCSAALARQLIQNAFAEKFNQETLSQKEALEWLGTTQGIVATPHSQRSIANVKVKLNSNITQFDVVNLINTIEDELKTPVQAAVKREDEQEFARLNGQNLMFCEDAARKIKALLETQQYSDYWLQINHYESLHAHDALAIAVKGVAGGYKA

SEQ ID NO: 13147 - protein, 342 aa, Pseudoalteromonas tunicata
  REGION 1..342: note = tr|A4CCK0|A4CCK0_9GAMM GTP cyclohydrolase FolE2; OS = Pseudoalteromonas tunicata D2 OX=87626 GN=folE2 PE=3; SV = 1
MHKHGFFSLLKNSTAANFIVEWRVFPHRLFWSTPPMQKIMPDIAHTAEALQEGTLDWVGMSQIELPLMVSSKHCAEQHVSAKAEAFVNLTDPQAKGIHMSRLYLALDELSNQTTLTPQSLCGLLDQFISSHNDLSNQAQVNLKFDYHLRRSSLLSGKTGWKAYPVEINATFKDNAVTLELSVAVTYSSTCPCSAALARQLIQQSFEQRFTESAVDKAQVLDWLGTTQGIVATPHSQRSVAQIKVKLANTSSEFDILGLVDALENELKTPVQAAVKREDEQEFARLNGQNLMFCEDAARKVKHVLNQNTSFADFWLRVNHYESLHAHDAVSIAVKGITNGYRA

SEQ ID NO: 13148 - protein, 196 aa, Pseudoalteromonas tunicata
  REGION 1..196: note = tr|A4CF87|A4CF87_9GAMM GTP cyclohydrolase 1; OS = Pseudoalteromonas tunicata D2 OX=87626 GN=folE PE=3 SV=1
MAAATLNEKEQIMHDELKKSYQQIIESIGEDPTREGLLDTPKRAAKAMEYLTKGYKETLEQITNNAVFTSDADDMVLVQDIELYSMCEHHLLPFVGRCHIAYIPNGKVLGLSKFARIVDMYARRFQIQEQLTHQIAKAVEEVTGAKGVGVIVEAKHMCMMMRGVEKQNSSMRTSVMLGNFRQDPKTRNEFLQLVKN

SEQ ID NO: 13149 - protein, 307 aa, Pseudoalteromonas ulvae
  REGION 1..307: note = tr|A0A244CW03|A0A244CW03_9GAMM GTP cyclohydrolase FolE2 OS=Pseudoalteromonas ulvae OX=107327 GN=folE2 PE=3; SV = 1
MQKFMPDIAHSAEALQEGTLDWVGMSQIELPLVVSSKDSPEQHVSALAEAFVNLNDPQAKGIHMSRLYLALDEFSNHQTLTPKTLASVLDQFISSHHSLSDQAQVTLKFDYHLRRRSLLSGKTGWKAYPVEITATYKEQTVVLELSVAVTYSSTCPCSAALARQLIQQAFDQQFTEQAIEKDQVMQWLGSTQGIVATPHSQRSIAQVKVKLNQLDSHFDILSLIDALENELKTPVQAAVKREDEQEFARLNGQNLMFCEDAARKVKHILNQQSDYSDFWLRINHYESLHAHDAVSIAVKGVAMGYTA

SEQ ID NO: 13150 - protein, 184 aa, Pseudoalteromonas ulvae
  REGION 1..184: note = tr|A0A2C9ZZD7|A0A2C9ZZD7_9GAMM GTP cyclohydrolase 1; OS = Pseudoalteromonas ulvae OX=107327 GN=folE PE=3 SV=1
MHDELKKSYKQIIESVGEDANREGLLDTPKRAAKAMEYLTKGYKETLNEITNNAVFTSDADDMVLIQDIELYSMCEHHLLPFVGRCHIAYIPNGKVLGLSKFARIVDMYARRFQIQEQLTHQIAKAVEEVTGAKGVGVIVEAKHMCMMMRGVEKQNSSMRTSVMLGNFRQDPKTRNEFLQLLKN

SEQ ID NO: 13151 - protein, 190 aa, unidentified
  source 1..190: note = Pseudoarcobacter caeni
  REGION 1..190: note = tr|A0A363D2J1|A0A363D2J1_9PROT GTP cyclohydrolase 1; OS = Pseudoarcobacter caeni OX=1912877 GN=folE PE=3 SV=1
MSNEIEFENAIKKILEHIGEDVTREGLIDTPKRVRKAYEFMCSGYNQDPKEILEKALFTSTNDEMVVVKDIEFYSQCEHHMLPIIGKVHVAYIPNGKVVGLSKIPRVVDVFARRLQIQEQLTEQICDALNEHLKPKGVAVMIDARHMCMEMRGVEKICSTTVTSALRGLFKSNKKTKDEFLSIVAPSLHK

SEQ ID NO: 13152 - protein, 198 aa, unidentified
  source 1..198: note = Pseudobacter ginsenosidimutans
  REGION 1..198: note = tr|A0A4Q7MKT4|A0A4Q7MKT4_9BACT GTP cyclohydrolase 1; OS = Pseudobacter ginsenosidimutans OX=661488 GN=folE PE=3; SV = 1
MAYKKTEQYEDKITSGLIDNYREVLNLLGEDPQREGLVKTPERMAKAMQYLTQGYQLDANAILASAMFREEVSEMIIVKDIELYSMCEHHLLPFFGKAHVAYIPNGHITGLSKIARVVDVFSRRLQVQERLTTQILDAIKTTLRPLGVAVVIEASHLCMMMRGVQKQNSVTTTSAFWGEFEKSETRSEFTKLISSRLH

SEQ ID NO: 13153 - protein, 192 aa, unidentified
  source 1..192: note = Pseudobacteriovorax antillogorgiicola
  REGION 1..192: note = tr|A0A1Y6CNI3|A0A1Y6CNI3_9PROT GTP cyclohydrolase 1; OS = Pseudobacteriovorax antillogorgiicola OX=1513793; GN = folE PE=3 SV=1
MDDKTYDQHRQNFTKLLEDLGEKPSRDGLVKTPDRYLQSIQFLTSGYEEDIPTILNDALFDVEYQDMVIVRNIEFYSLCEHHVIPFYGQVHVGYIPGKRVVGLSKIPRLVDVFARRLQVQERMTNQIAACLQEYLEPEGVGVVIDAYHLCMMMRGVEKQKSYTTTSSMHGCFRNVDTRQEFLKLIHSPRRDF

SEQ ID NO: 13154 - protein, 215 aa, unidentified
  source 1..215: note = Pseudobacteriovorax antillogorgiicola
  REGION 1..215: note = tr|A0A1Y6CFU2|A0A1Y6CFU2_9PROT GTP cyclohydrolase 1; OS = Pseudobacteriovorax antillogorgiicola OX=1513793; GN = folE PE=3 SV=1
MMKEEFIEELKGEPGTDLPTANDAFDSRKYKRESGEKAAQLILGMTGEDVRREGLLRTPHRFAKAFDHLFQGYDLNPQTAVGEGVFDSEGKGLVSVENVEFYSMCEHHLLPFWGTATVAYFPDKKILGLSKIPRLLETYARRVQVQERITEQVAAAIQELIAPRAVLVQVKAQHLCMMMRGVEKQTSFTLTEKVEGFDSLQAHEQQQFLSLMGRR

SEQ ID NO: 13155 - protein, 186 aa, unidentified
  source 1..186: note = Pseudobacteroides cellulosolvens
  REGION 1..186: note = tr|A0A0L6JSF3|A0A0L6JSF3_9FIRM GTP cyclohydrolase 1; OS = Pseudobacteroides cellulosolvens ATCC 35603 = DSM 2933; OX = 398512 GN=folE PE=3 SV=1
MVDKERVKAAVREILIAIGDDPDREGLKETPDRVARMYDEIFAGLHKDPREYVKVFQEENHEEIVLVKDIPTYSICEHHLLPFVGVAHVVYIPRKGKVMGLSKLARIVDTVAKKPQLQERLTSQVADVLMDTINPIGAAVVMEAEHLCMTMRGIKKPGSRTITSALRGIIKTDARTRAEVMALIKD

SEQ ID NO: 13156 - protein, 190 aa, Pseudobutyrivibrio ruminis
  REGION 1..190: note = tr|A0A285RIV2|A0A285RIV2_9FIRM GTP cyclohydrolase 1; OS = Pseudobutyrivibrio ruminis DSM 9787 OX=1123011 GN=folE; PE = 3 SV=1
MAINKELIKESIRNIIIALGDDPERAGLKETPDRVARMYEEVFEGMNYTNEQIAEMFNKTFDEDYYDETNQDLVFVKDIEVFSYCEHHLALMYDMKVSVAYIPNGKVIGLSKIARIADMAAKRLQLQERIGNDIAEIIQMVTGSEDVAVFIEASHSCMTARGIKNASAKTHTQTLRGRFKTDRDLLQRLL

SEQ ID NO: 13157 - protein, 190 aa, Pseudobutyrivibrio ruminis; identical to SEQ ID NO: 13156
  REGION 1..190: note = tr|A0A1H7G815|A0A1H7G815_9FIRM GTP cyclohydrolase 1; OS = Pseudobutyrivibrio ruminis OX=46206 GN=folE PE=3 SV=1

SEQ ID NO: 13158 - protein, 190 aa, Pseudobutyrivibrio sp.
  REGION 1..190: note = tr|A0A1I5D5B0|A0A1I5D5B0_9FIRM GTP cyclohydrolase 1; OS = Pseudobutyrivibrio sp. JW11 OX=1855302 GN=folE PE=3 SV=1
MAINKELIKESIRNIIIALGDDPERAGLKETPDRVARMYEEVFEGMNYTNGQIAEMFNKTFDEDYYDETNQDLVFVKDIEVFSYCEHHLALMYDMKVSVAYIPNGKVIGLSKIARIADMAAKRLQLQERIGNDIAEIIQMVTGSEDVAVFIEASHSCMTARGIKNASAKTHTQTLRGRFKTDRDLLQRLL

SEQ ID NO: 13159 - protein, 190 aa, Pseudobutyrivibrio sp.
  REGION 1..190: note = tr|A0A1H3ZY21|A0A1H3ZY21_9FIRM GTP cyclohydrolase 1; OS = Pseudobutyrivibrio sp. ACV-2 OX=1520801 GN=folE PE=3; SV = 1
MAINKELIKESIRNIIIALGDDPERPGLIETPDRVARMYEEVFEGMNYSNQEIADMFNKTFDEDYYDADSQDLVFVKDIEVFSYCEHHLALMYDMKVSVAYIPNGKVIGLSKIARIADMAAKRLQLQERIGNDIAEIIQLVTGSEDVAVFIEASHSCMTARGIKNAGARTHTQTLRGKFKTDRDLLGRLL

SEQ ID NO: 13160 - protein, 190 aa, Pseudobutyrivibrio xylanivorans
  REGION 1..190: note = tr|A0A1G5S2K1|A0A1G5S2K1_PSEXY GTP cyclohydrolase 1; OS = Pseudobutyrivibrio xylanivorans OX=185007 GN=folE PE=3; SV = 1
MAINKDLIKESIRNIIIALGDDPDRAGLIETPDRVARMYEEVFEGMNYSNQEIADMFNKTFDEDYYDENSQDLVFVKDIEVFSYCEHHLALMYDMKVSVAYIPNGKVIGLSKIARIADMAAKRLQLQERIGNDIAEILQMVTGSEDVAVFIEASHSCMTARGIKNAGARTQTQTLRGKFRTNRDLLARLL

SEQ ID NO: 13161 - protein, 190 aa, Pseudobutyrivibrio xylanivorans
  REGION 1..190: note = tr|A0A1M6FN82|A0A1M6FN82_PSEXY GTP cyclohydrolase 1; OS = Pseudobutyrivibrio xylanivorans DSM 14809 OX=1123012; GN = folE PE=3 SV=1
MAINKDLIKESIRNIIIALGDDPDRAGLIETPDRVARMYEEVFEGMNYSNQEIADMFNKTFDEDYYDENSQDLVFVKDIEVFSYCEHHLALMYDMKVSVAYIPNGKVIGLSKIARIADMAAKRLQLQERIGNDIAEILQIVTGSEDVAVFIEASHSCMTARGIKNAGARTQTQTLRGKFKNDKDLLARLR

SEQ ID NO: 13162 - protein, 203 aa, Pseudochrobactrum asaccharolyticum
  REGION 1..203: note = tr|A0A366EBR4|A0A366EBR4_9RHIZ GTP cyclohydrolase 1; OS = Pseudochrobactrum asaccharolyticum OX=354351 GN=folE; PE = 3 SV=1
MNKHIADTKNNDVIRPTQAEAEAAVKTLLLWLGEDTSREGLIETPKRVAKAYKELFSGYQQSPEEELGTVFEEVAGYKDMVLIKDISFFSHCEHHMVPIIGKAHVGYLPNGSVVGLSKIARVVDMFAHRLQTQESMTAQIAHSIQNILKPLGVAVLIEAEHMCMAMRGIRKQGSTTLTTTFTDAFETDIANQVRFMTMLRSGS

SEQ ID NO: 13163 - protein, 222 aa, unidentified
  source 1..222: note = Pseudocitrobacter faecalis
  REGION 1..222: note = tr|A0A366FN15|A0A366FN15_9ENTR GTP cyclohydrolase 1; OS = Pseudocitrobacter faecalis OX=1398493 GN=folE PE=3 SV=1
MSSLSKEAALVHEALVARGLETPLRPPVREMDNETRKRLISGHMTEIMQLLNLDLSDDSLMETPHRIAKMYVDEIFSGLDYANFPKITVIENKMKVDEMVTVRDITLTSTCEHHFVTIDGKATVAYIPKESVIGLSKINRIVQFFAQRPQVQERLTQQILTALQTLLGTNNVAVSIDAVHYCVKARGIRDATSATTTTSLGGLFKSSQNTRQEFLRAVRHHN

SEQ ID NO: 13164 - protein, 222 aa, unidentified; identical to SEQ ID NO: 13163
  source 1..222: note = Pseudocitrobacter sp.
  REGION 1..222: note = tr|A0A5B0KH64|A0A5B0KH64_9ENTR GTP cyclohydrolase 1; OS = Pseudocitrobacter sp. 73 OX=2605731 GN=folE PE=3 SV=1

SEQ ID NO: 13165 - protein, 690 aa, Pseudoclavibacter sp.
  REGION 1..690: note = tr|A0A2S5WVT9|A0A2S5WVT9_9MICO GTP cyclohydrolase 1; OS = Pseudoclavibacter sp. RFBB5 OX=2080574 GN=folP PE=3 SV=1
MAPLRLGRTPSRRRATRASAAGMRAGFVSREDGDRPALRALRSEDLQMNDVGSGSSERVDLARAQAAVREFLAAIGEDPDRPGLARTPERVAEAALELFGGIGVEAITPLAGARFPVADTQQPLAAVSGAAGSAAPLSASASAVASESASARESASAAPSADNATAPVSQPVVLRDLAFRSMCEHHLLPFSGRVHLAYVPGDSIVGFGRLHALLETLSARPTLQERLGDELVDAMMTALDARGALAIIVASHACAGLRGSRQQAGVVVTVSARGELSEPIARAEIISLIGAQPIVAADEAAATPAASGQSAPPAAPIVGHVLRGARFDPRLGTQASSASADEDDTAGAPEAAEPEAAGTAAAAPASHAPAEVTERDAQLDAATGEQWAEDSGPVNTRPFELPQRFTNLLQPAIPKRPRILGILNITPDSFSDGGKFEDLFSQNRRTKRALRRARELVAQGADIIDVGGESTRPGAVRVPQEEEAARVLPVIKELAGLGVLVSIDTMYAKTAEAALELGAEYVNDVSGGLADPAMLGLVAESGNPFILSHWRGHSVRMNELADYRDPAAEILSELAGARDRAVDAGLDPSQIVLDPGLGFAKRRDDNWAVLRELEQFVALGHPLLVGASRKRFTGEMLGPDADVTERDLPTAIITALAAKAGVWGVRVHNVEANRVALDVVDAWREGAQDD

SEQ ID NO: 13166 - protein, 634 aa, Pseudoclavibacter sp.
  REGION 1..634: note = tr|A0A2S5UWQ0|A0A2S5UWQ0_9MICO GTP cyclohydrolase 1; OS = Pseudoclavibacter sp. AY1F1 OX=2080583 GN=folP PE=3 SV=1
MHGGFVSREDGPMPASRAVQSEDVLMNDVDSGSADRVDLERARAAVREFLAAIGEDPDRPGLARTPERVADAALELFGGIGVDAVTPLSAARFPVSDAAASAGAGAPAPAAAGAAAPVSQPVVLRDLAFRSMCEHHLLPFSGRVHLAYVPSDSIVGFGRLHTLLETLSARATLQERLGDELVDAMMTALDARGALAVIEASHACAGLRGSRQQAGVVVTVSARGELAEPIARSEIIALIGAQPVVAESVVADETHAAAPGIAPIIGHVLRGARFDPMSGTLASAAVPLEDDASLEQSAAAEARTPTQVNDREVEEDAEGAAQLDALTDEQWAEDSGPVHTRPFELPQRFTNLLQPAIPKRPRLLGILNITPDSFSDGGKFEDLFSQNRRTTRALRRARELVAQGADIIDVGGESTRPGAVRVPQEEEAARVLPVVKELAALGVLVSIDTMYARTAEAALALGAEYVNDVSGGQADPAMLGLVADSGNPFILSHWRGHSIRMNELADYRDPASEILAELAGARDRAVDAGLDPSQIVLDPGLGFAKRRDDNWAVLRELEQFVALGHPLLVGASRKRFTGEVLQPDADVIERDMPTAVITALAAKAGIWGVRVHNVEANRVALDVVDAWREGAQDD

SEQ ID NO: 13167 - protein, 186 aa, unidentified
  source 1..186: note = Pseudoclostridium thermosuccinogenes
  REGION 1..186: note = tr|A0A2K2EY85|A0A2K2EY85_9FIRM GTP cyclohydrolase 1; OS = Pseudoclostridium thermosuccinogenes OX=84032 GN=folE; PE = 3 SV=1
MDKERIKKAVRELLAAIGDDPDREGLRETPDRVARMCEEIFAGMYMNPKDVVKIFQEENHEEMVLVKDIPVYSVCEHHLLPFIGVAHVAYIPRKGRVMGLSKLARIVDIIAKKPQLQERLGSQVADTIMETLEPLGVAVVIEAEHLCMTMRGIKKPGAKTVTSALRGIMKTDARTRAETMSLINGR

SEQ ID NO: 13168 - protein, 256 aa, unidentified
  source 1..256: note = Pseudodesulfovibrio aespoeensis
  REGION 1..256: note = tr|E6VSS1|E6VSS1_PSEA9 GTP cyclohydrolase FolE2; OS = Pseudodesulfovibrio aespoeensis (strain ATCC 700646 / DSM 10631 / Aspo-2) OX=643562 GN=folE2 PE=3 SV=1
MEDVQKQQADIAMPIDRVGVKGLRLPIIVRDRESGIQHTVAEVSLSVDLPAEFKGTHMSRFVEALEHWSGELDYNTFLTLLEDIVVRLQARSAHVRFVFPFFLRRNSPVSGANGMMDYTCRVDGEFRDGTLTFTLGADVPVMTVCPCSKAISDEGAHSQRAEVRIRTRFTGFLWLEDLIEIGEQAGSCQVYSLLKREDEKYVTERAFANPAFVEDVVRAAAHGLDKHPKIHWYRVEVESFESIHNHSAFAVIESRE

SEQ ID NO: 13169 - protein, 256 aa, unidentified
  source 1..256: note = Pseudodesulfovibrio hydrargyri
  REGION 1..256: note = tr|A0A1J5NDP6|A0A1J5NDP6_9DELT GTP cyclohydrolase FolE2 OS=Pseudodesulfovibrio hydrargyri OX=2125990; GN = folE2 PE=3 SV=1
MEDVQKSQASIAMPIDRVGVKGLRLPITVRHRESGVQHTVAQVSMSVDLPAEFKGTHMSRFVEALEHWEGTLDYNSFLSLLDDVVDRLQARSAHLRFVFPYFLRRKSPVTKTGGMMDYTCRVDGYLKDGKLTFTLGADVPVMTVCPCSKAISDEGAHSQRAEVRIRTRFDGFLWLEDLIEIGERAGSCQVYSLLKREDEKYVTETAFAHPTFVEDVVREAAKGLDEHPKVTWYKVEVESFESIHNHSAFAVIESDG

SEQ ID NO: 13170 - protein, 257 aa, unidentified
  source 1..257: note = Pseudodesulfovibrio indicus
  REGION 1..257: note = tr|A0A126QQ19|A0A126QQ19_9DELT GTP cyclohydrolase FolE2 OS=Pseudodesulfovibrio indicus OX=1716143 GN=folE2; PE = 3 SV=1
MEDVQKSQASIAMPIDRVGVKGLRLPIVVRDRESGTQHTVAEVSLSVDLPAQFKGTHMSRFIEALEHWEHALDYNSFRTLLDDVAERLQARNAHVRFEFPYFLRRRSPVSGANGMMDYACRVDGYLKDGRLTFTLGADVPVMTVCPCSKAISDEGAHSQRAEVRIRTRFDGFVWLEDLIEIAERAGSCQVYSLLKREDEKYVTETAFANPTFVEDVVRETAKGLSEHPKIKWFKVEVESFESIHNHSAFAVIESQPA

SEQ ID NO: 13171 - protein, 258 aa, unidentified
  source 1..258: note = Pseudodesulfovibrio piezophilus
  REGION 1..258: note = tr|M1WUZ2|M1WUZ2_PSEP2 GTP cyclohydrolase FolE2; OS = Pseudodesulfovibrio piezophilus (strain DSM 21447 / JCM 15486 / C1TLV30) OX=1322246 GN=folE PE=3 SV=1
MEDVQKHQAAIAMPIDRVGVKGLKLPIIVRDRESGIQHTVAEVSLSVDLPAEFKGTHMSRFIEALEHWSGELDYNSFRSLLDDIVVRLQARSAHVRFVFPFFLRRNSPVSGANGLMDYTCRVDGMLKEGKLTFTLGADVPVMTVCPCSKAISNEGAHSQRAEVRIRTRFNGFVWLEDLIEIGERSGSCQVYSLLKREDEKYVTETAFANPTFVEDVVREAAKGLAEHEQIHWYKVEVESFESIHNHSAFAVIESASLA

SEQ ID NO: 13172 - protein, 256 aa, unidentified
  source 1..256: note = Pseudodesulfovibrio profundus
  REGION 1..256: note = tr|A0A2C8F562|A0A2C8F562_9DELT GTP cyclohydrolase FolE2 OS=Pseudodesulfovibrio profundus OX=57320 GN=folE; PE = 3 SV=1
MEDVQKHQAAIAMPIDRVGVKGLRLPIIVRDRESGIQHTVAQVSLSVDLPAEFKGTHMSRFIEALEHWSGELDYHSFRTLLDDVVVRLQARSAHVRFVFPFFLRRPSPKSGANGLMDYTCRVDGYLKEGKLRFTLGADVPVMTVCPCSKAISEEGAHSQRAEVRIRTRFDGFVWLEDLIEIAEKSGSCQVYSLLKREDEKFVTEAAFANPTFVEDVVREAAKGLDEHEQINWYKVEVESFESIHNHSAFAIIEGGE

SEQ ID NO: 13173 - protein, 257 aa, unidentified
  source 1..257: note = Pseudodesulfovibrio sp.
  REGION 1..257: note = tr|A0A443YTJ3|A0A443YTJ3_9DELT GTP cyclohydrolase FolE2 OS=Pseudodesulfovibrio sp. S3 OX=2283629 GN=folE2; PE = 3 SV=1
MEDVQKHQAAIAMPIDRVGVKGLRLPIIVRDRESGVQHTVAQVSLSVDLPAEFKGTHMSRFVEALEHWSGDLDYASFRTLLDDVVVRLQARSAHVRFVFPYFLRRRSPVSKANGLMDYTCRVDGYLKNGRLTFTLGADVPVMTVCPCSKAISEEGAHSQRAEVRIRTRFDGFVWLEDLIEIGERSGSSQVYSLLKREDEKFVTETSFANPTFVEDVVREAAKGLSEHPKINWYKVEVESFESIHNHSAFAIIESHPD

SEQ ID NO: 13174 - protein, 198 aa, unidentified
  source 1..198: note = Pseudoflavitalea sp.
  REGION 1..198: note = tr|A0A3B7N713|A0A3B7N713_9BACT GTP cyclohydrolase 1; OS = Pseudoflavitalea sp. 5GH32-13 OX=2315862 GN=folE PE=3; SV = 1
MAYTRSEEYDEKITSGLIETYRSALSLLGEDPNREGLTKTPERMAKAMQFLTQGYSLDAHAILNSAKFHENVSEMIIVKDIELYSMCEHHMLPFYGKAHVAYIPNGYITGLSKIARVVDVFARRLQVQERLTTQIRDAIKDTLRPLGVAVVIEASHLCMMMRGVQKQNSVTTTSAFWGEFEKNETRSEFTKLISSDLH

SEQ ID NO: 13175 - protein, 197 aa, Pseudofulvimonas gallinarii
  REGION 1..197: note = tr|A0A4R3LBP7|A0A4R3LBP7_9GAMM GTP cyclohydrolase 1; OS = Pseudofulvimonas gallinarii OX=634155 GN=folE PE=3 SV=1
MSQPDSPVTREQAEDAVRTLLRWAGDDPTREGLLDTPKRVVKAYSDWFSGYSEDAEGFLRRTFEEVEGYDEMIILRDIAFESHCEHHMAPIIGRAHVGYLPTNKVVGISKLARVVEAFARRFQVQEKLTAQIAHCIDDVLKPRGVGVVIEAAHECMTTRGVHKRGVSMVTSQMLGSFRDDPSTRNEFLAFIDLRGRR

SEQ ID NO: 13176 - protein, 315 aa, Pseudofulvimonas gallinarii
  REGION 1..315: note = tr|A0A4R3LNS0|A0A4R3LNS0_9GAMM GTP cyclohydrolase FolE2 OS=Pseudofulvimonas gallinarii OX=634155 GN=folE2; PE = 3 SV=1
MSNSARSLPDVAYVAQPGLSGRLDWVGMDDIQAPVMLVGEDDQPMRFPARVGAFVDLARPDQRGIHMSRLYLHVDQALSTQAVKPALLRTLLDGFLASHRDLSSRALLRIRFDYLVRRRALVSDNAGWKSYPVVLTAKLEGGRFDLELGLEVLYSSTCPASAALARQLIQQRFRADFSTQDLLAREQVAEWLGSEQGICATPHSQRSSAEVKVRLREDVESLPFVDLIDCIESALQTPVQTAVKREDEQAFAGLNGGNLMFCEDAARRMQSALDRDARITDFWLRASHFESLHPHNAVAVASKGVPGGYLGGSTV

SEQ ID NO: 13177 - protein, 199 aa, unidentified
  source 1..199: note = Pseudoglutamicibacter albus
  REGION 1..199: note = tr|A0A2I1J8R5|A0A2I1J8R5_9MICC GTP cyclohydrolase 1; OS = Pseudoglutamicibacter albus OX=98671 GN=folE PE=3 SV=1
MVENSDAVAGQVDQPRIERAVREILLAVGEDPDRDGLVDTPARVARAYAEVFSGLHMDPAELLSTTFDIDHSEMVLVKDIPFYSTCEHHLVPFHGRAHIGYIPGVSGKVTGLSKLARLVDLFARRPQVQERLTTQIVEALEEHLQPCGAIVVIEAEHLCMSMRGVRKPGSTTTTSAVRGQLREPATRAEAMGLIMGHGR

SEQ ID NO: 13178 - protein, 204 aa, unidentified
  source 1..204: note = Pseudoglutamicibacter cumminsii
  REGION 1..204: note = tr|A0A2U3AU63|A0A2U3AU63_9MICC GTP cyclohydrolase 1; OS = Pseudoglutamicibacter cumminsii OX=156979 GN=folE PE=3; SV = 1
MGENSDAVAGQVDQSQVDQPRIERAVREILLAVGEDPDRDGLVDTPARVARAYAEVFSGLHMDPAELLSTTFDIDHSEMVLVKNIPFYSTCEHHLVPFHGRAHIGYIPGVSGKVTGLSKLARLVDLFARRPQVQERLTTQIVEALEEHLQPCGAIVVIEAEHLCMSMRGVRKPGSTTTTSAVRGQLREPATRAEAMGLIMGHGR

SEQ ID NO: 13179 - protein, 310 aa, unidentified
  source 1..310: note = Pseudogracilibacillus auburnensis
  REGION 1..310: note = tr|A0A2V3VU12|A0A2V3VU12_9BACI GTP cyclohydrolase FolE2 OS=Pseudogracilibacillus auburnensis OX=1494959; GN = folE2 PE=3 SV=1
MSKVKTSSYIDLPNKKERHKLFGSVEPGRKTKPTIKEEMADLQNSKEDFLFAINAVGISNVKYPIVVSSRLNPTTQTTIGTFKLTANVERTSKGTNMSRFLEEIEQSDDDNGFQIDFGSLTQFAKNLQKRLKQENVSIEVSFPWFYERRGPSSDKRGLNYADVTLQIDYFDDETIHFSATLSALITTLCPCSKEISEYSAHSQRGRVTMEVTFTNDYTDDTTIDWKEALLHAAESNASAMIHPVLKRPDEKFVTETAYENPRFVEDIVRLVAADLYELPFIQKFTVTCENEESIHMHDAIATIHYTKENE

SEQ ID NO: 13180 - protein, 206 aa, unidentified
  source 1..206: note = Pseudogulbenkiania ferrooxidans
  REGION 1..206: note = tr|U0Z6J2|U0Z6J2_9NEIS GTP cyclohydrolase 1; OS = Pseudogulbenkiania ferrooxidans EGD-HP2 OX=1388764; GN = O166_14890 PE=3 SV=1
MSFIDDHDHSACQRPLDRVRPFDAAAFEKAVADMLTASGIAIDPIHTGKTAQRVRELWQKRLLDGYDTVPAEALGCGFADDRRDMVVIRSLAVHGMCPHHLLPFRGVAHVAYLPGGRLHGFGRIARMVDAISHRYTYQEWITHEISRTLVEHGGARGAACLIEAEQLCLLMGENRRGDERVITQCYAGDFETDANARNEFLRAIER

SEQ ID NO: 13181 - protein, 264 aa, unidentified
  source 1..264: note = Pseudogulbenkiania ferrooxidans
  REGION 1..264: note = tr|B9Z580|B9Z580_9NEIS GTP cyclohydrolase FolE2; OS = Pseudogulbenkiania ferrooxidans 2002 OX=279714 GN=folE2; PE = 3 SV=1
MNQTTIPDVQSSHDSRNIPINKVGIKSIRHPIKVAERDNGVQHTIGLFNMYVHLPAHFKGTHMSRFVEILNQHEREISVASFEQIVREMVQRLEAVSGYVEMSFPYFVNKTAPVSGVQSLLDYEVTYVGELRDGEYHFTMKVVVPVTSLCPCSKKISQYGAHNQRSHVTLTASTHEHVWIEELIDIAEDQASCELYGLLKRPDEKFVTERAYENPKFVEDMVRDVAAAMDRDERIHAYVVESENFESIHNHSAYALIERDKRQG

SEQ ID NO: 13182 - protein, 264 aa, Pseudogulbenkiania sp.; identical to SEQ ID NO: 13181
  REGION 1..264: note = tr|G2IVM5|G2IVM5_PSEUL GTP cyclohydrolase FolE2; OS = Pseudogulbenkiania sp. (strain NH8B) OX=748280 GN=folE2; PE = 3 SV=1

SEQ ID NO: 13183 - protein, 264 aa, Pseudogulbenkiania subflava
  REGION 1..264: note = tr|A0A1Y6BII7|A0A1Y6BII7_9NEIS GTP cyclohydrolase FolE2 OS=Pseudogulbenkiania subflava DSM 22618 OX=1123014; GN = folE2 PE=3 SV=1
MNQTAIPDVQSSHDSRNIPINKVGIKSIRHPIKVAERDNGVQHTVGLFNMYVHLPAHFKGTHMSRFVEILNQHEREISVSSFESIVREMVQRLEAVSGYVEMTFPYFVNKTAPVSGVQSLLDYEVTYVGELRDGEYHFTMKVVVPVTSLCPCSKKISQYGAHNQRSHVTLTASTHEHVWIEELIDIAEDQASCELYGLLKRPDEKFVTERAYENPKFVEDMVRDVAAAMDRDERIHAYVVESENFESIHNHSAYALIERDKRQG

SEQ ID NO: 13184 - protein, 226 aa, unidentified
  source 1..226: note = Pseudohaliea rubra
  REGION 1..226: note = tr|A0A095VSW2|A0A095VSW2_9GAMM GTP cyclohydrolase 1; OS = Pseudohaliea rubra DSM 19751 OX=1265313 GN=folE PE=3; SV = 1
MEATALNPRAHADHDLSAEAIAVRTALENAGLETPMVPTGLSRDEKYARLRAAFTDVAKTLGLDLADDSLAETPHRIAKMYLDESFSGLDYRSFPSISVIENKMQVDEIVRVDAIELTSTCEHHFVTIDGSARVAYLPRERVIGLSKINRVVRFFARRPQVQERLTRQVLVALQTLLDTPDVAVSINAVHYCVKSRGVMDGTSSTHTTAMDGAFRQDPALRAEFLR

SEQ ID NO: 13185 - protein, 182 aa, unidentified
  source 1..182: note = Pseudohaliea rubra
  REGION 1..182: note = tr|A0A095VQQ6|A0A095VQQ6_9GAMM GTP cyclohydrolase 1; OS = Pseudohaliea rubra DSM 19751 OX=1265313 GN=folE PE=3; SV = 1
MKAHWAAIIEDMGEDLERPGLKDTPERAAKAYQFLTRGYHQSVAEVVNDALFPSESSEMVVVQDIELYSLCEHHILPFIGKCHVGYIPTGQVLGLSKIARIVDIFARRLQIQESLTTEIAETIMAVTDAAGVGVIIEAQHMCMMMRGVEKQNSVMKTSSMLGSFREDLKTRDEFLGLLRLRH

SEQ ID NO: 13186 - protein, 205 aa, unidentified
  source 1..205: note = Pseudohoeflea suaedae
  REGION 1..205: note = tr|A0A4R5PRF6|A0A4R5PRF6_9RHIZ GTP cyclohydrolase 1; OS = Pseudohoeflea suaedae OX=877384 GN=folE PE=3 SV=1
MDAFAKRNDKLQSDIERPSRQEAEDAVRTLLRFIGEDVDREGLLDTPKRVVKAYSEMFGGYDKDPEDALGRTFEEVAGYDDIVLVRDIPFHSHCEHHMVPIIGKAHVAYLPDGKVLGLSKIARVVDIFANRLQTQEALTAQVAHAIHNTLRPLGVAVMIEAEHMCMAMRGIRKQGSTTLTTTFTGQFKGDAAAQARFISMIRDRG

SEQ ID NO: 13187 - protein, 182 aa, unidentified
  source 1..182: note = Pseudohongiella acticola
  REGION 1..182: note = tr|A0A1E8CGG2|A0A1E8CGG2_9GAMM GTP cyclohydrolase 1; OS = Pseudohongiella acticola OX=1524254 GN=folE PE=3 SV=1
MTIESAYSEIISAIGEDLSRPGLRDTPLRAAKAIQFLTRGYQQDIDDVINNAMFPSDSEEMVIVKNIELYSMCEHHMLPFIGKCHVAYLPKGKVIGLSKIARIVDVFARRLQIQENLTKEIAEVIIHKTGAAGAAVIIEAQHMCMMMRGVEKQNSVMTTSCMLGAFRSSQNTRNEFLSLIQR

SEQ ID NO: 13188 - protein, 41 aa, unidentified
  source 1..41: note = Pseudohongiella sp.
  REGION 1..41: note = tr|A0A355VA36|A0A355VA36_9GAMM GTP cyclohydrolase I FolE (Fragment) OS=Pseudohongiella sp. OX=1979412; GN = DD407_09535 PE=4 SV=1
HMCMMMRGVEKQNSVMTTSCMLGGFRTSQSTRNEFLSLVHR

SEQ ID NO: 13189 - protein, 188 aa, unidentified
  source 1..188: note = Pseudohongiella sp.
  REGION 1..188: note = tr|A0A2D9DQ84|A0A2D9DQ84_9GAMM GTP cyclohydrolase 1; OS = Pseudohongiella sp. OX=1979412 GN=folE PE=3 SV=1
MSKAPLENMEQAFRDIIQSIGEDLNRDGLRDTPLRAAKAMQFLTRGYQQNIDEVINNALFPSSSEEMVIVKNIELYSMCEHHMLPFIGKCHVAYLPKGKVIGLSKIARIVDMYARRLQIQENLTKEIAEVIIQKTGAAGAAVIIEAQHMCMMMRGVEKQNSVMTTSCMLGGFRNSQSTRNEFLSLVHR

SEQ ID NO: 13190 - protein, 194 aa, unidentified
  source 1..194: note = Pseudohongiella spirulinae
  REGION 1..194: note = tr|A0A0S2KDW3|A0A0S2KDW3_9GAMM GTP cyclohydrolase 1; OS = Pseudohongiella spirulinae OX=1249552 GN=folE PE=3 SV=1
MSKTPLQPADKLSGMTQAYREIIADIGENLNRPGLVDTPLRAAKAMQFLTRGYQQNIDEVINNAMFPSSSEEMVIVKNIELYSMCEHHMLPFIGKCHVAYLPKGKVIGLSKIARIVDMFARRLQIQENLTKEIAEVIIEKTGAAGAGVIIEAQHMCMMMRGVEKQNSVMTTSCMLGAFRNSQSTRNEFLSLIQR

SEQ ID NO: 13191 - protein, 210 aa, Pseudokineococcus lusitanus
  REGION 1..210: note = tr|A0A3N1HLS0|A0A3N1HLS0_9ACTN GTP cyclohydrolase 1; OS = Pseudokineococcus lusitanus OX=763993 GN=folE PE=3 SV=1
MGAGAPSRIGPLETAALTGPSSRPFDAARAEAAVRELLIAVGEDPDRDGLLDTPARVARMYAEVLGGLREDPAEVLRTSFDLGHDELVLVRDIEVYSLCEHHLVPFHGVAHVGYVPAADGRITGLSKLARLVDVFARRPQVQERLTSQVADALVEHLQPRGVIVVVECEHLCMSMRGVRKTGARTVTSAMRGQLRDPATRAEALALLHGR

SEQ ID NO: 13192 - protein, 217 aa, Pseudolabrys sp.
  REGION 1..217: note = tr|A0A0Q7TKB1|A0A0Q7TKB1_9RHIZ GTP cyclohydrolase 1; OS = Pseudolabrys sp. Root1462 OX=1736466 GN=folE PE=3 SV=1
MDAKSKIVKPWDKQGLSDHVSAAPTPAGPRPSREEAEAAVRVLIAYAGDDAKREGVLDTPKRVVDAYEELFQGYRECPAEALDRTFSETSGYDDFVLVKDITFNSHCEHHMMPFFGKAHVAYKPTERVVGLSKLARLVDVYAKRLQTQENMTAQIATALEEVLKPKGVAVMIEAEHTCMSLRGVTKPGSMTLTTHFSGTFRDDPNELVRFMSLVREK

SEQ ID NO: 13193 - protein, 216 aa, Pseudolabrys sp.
  REGION 1..216: note = tr|A0A371BCQ6|A0A371BCQ6_9RHIZ GTP cyclohydrolase 1; OS = Pseudolabrys sp. GY_H OX=2292256 GN=folE PE=3 SV=1
MDAKNTVIKPWQQGLSDHVRTAPAASAPRPSREEAEAAVRTLIAYAGDDATREGVLDTPKRVVDAYDELFQGYREVPADSLDRTFSETSGYNDFVLVKDIPFNSHCEHHMMPFFGLAHIAYKPTDRVVGLSKLARLVDTYAKRLQTQENMTAQIATALEEVMKPKGVAVMLEAEHTCMTMRGVAKPGSLTMTTHFSGTFRDDPNELVRFMSLLRGK

SEQ ID NO: 13194 - protein, 219 aa, Pseudolabrys taiwanensis
  REGION 1..219: note = tr|A0A345ZRD7|A0A345ZRD7_9RHIZ GTP cyclohydrolase 1; OS = Pseudolabrys taiwanensis OX=331696 GN=folE PE=3 SV=1
MDAKNANVKAWPLQGLSDHVRAAPTPAVPRPAREEAEAAVRTLLAYIGDDPNREGLLDTPKRVIGAFDELYQGYRECPAEVLDRTFGETAGYDDFVLVKDISFNSHCEHHMMPFTGRAHIAYMPVERVVGLSKLGRLVDVYAKRLQTQEHMTSQIATAINEILKPRGVAVLIEAEHTCMAHRGVAKQGATTVTTHFTGVFRDDPKELVRFMTMLRGAHG

SEQ ID NO: 13195 - protein, 185 aa, unidentified
  source 1..185: note = Pseudomonadaceae bacterium
  REGION 1..185: note = tr|A0A3T0SGS1|A0A3T0SGS1_9GAMM GTP cyclohydrolase 1; OS = Pseudomonadaceae bacterium SI-3 OX=2079806 GN=folE PE=3; SV = 1
MNELPGHFHQILLGVGEDPQREGLLDTPKRAAKAMQYLCNGYGKSLEEVVNGALFASDSDEMIIVRDIELYSLCEHHMLPFIGKAHVAYIPTGKVLGLSKIARIVDMYARRLQIQENLTRQIAEAIQEVTRAAGVAVVIEAKHMCMMMRGVEKQNSLMNTSVMLGAFRESCTTRMEFLQLIGGNR

SEQ ID NO: 13196 - protein, 186 aa, unidentified
  source 1..186: note = Pseudomonadaceae bacterium
  REGION 1..186: note = tr|A0A2D5CFA7|A0A2D5CFA7_9GAMM GTP cyclohydrolase 1; OS = Pseudomonadaceae bacterium OX=1914538 GN=folE PE=3 SV=1
MTDLLTGNYREILLGVGENPEREGLLDTPKRAAKAMQYLCHGYQQSLEEVVNGALFASDNDEMVIVKDVELYSLCEHHLLPFIGKAHVAYIPTGKVLGLSKIARIVDMYARRLQIQENLTRQIAEAIQQVTNAAGVAVVIEAKHMCMMMRGVEKQNSVMNTSVMLGAFRESCNTRHEFLQLIGRSN

SEQ ID NO: 13197 - protein, 181 aa, unidentified
  source 1..181: note = Pseudomonadales bacterium
  REGION 1..181: note = tr|A0A1G3D4I2|A0A1G3D4I2_9GAMM GTP cyclohydrolase 1; OS = Pseudomonadales bacterium GWC2_63_15 OX=1817754 GN=folE; PE = 3 SV=1
MSLEQHYTAILGQLGEDVSREGLLDTPKRAAKAMQYLCKGYQQTLEEVTNGALFTSDNSEMVLVKNIELYSLCEHHMLPFIGKAHVAYLPNGKVLGLSKVARIVDMYARRLQIQENLTREIAEAMQQVTGASGVAVVIEAQHMCMMMRGVEKQNSSMVTSVMLGQFRDNAATRSEFLGLVK

SEQ ID NO: 13198 - protein, 187 aa, unidentified
  source 1..187: note = Pseudomonadales bacterium
  REGION 1..187: note = tr|A0A2D6QQR6|A0A2D6QQR6_9GAMM GTP cyclohydrolase 1; OS = Pseudomonadales bacterium OX=1891229 GN=folE PE=3 SV=1
MSLENLTNNYREILTNLGEQPQRDGLKGTPERAAKAMQFLCRGYTQSLDEIVNGALFDSDNDEMVIVKDIELYSLCEHHMLPFIGKAHVAYIPTGKVIGLSKVARIVDMFARRLQIQENLTRQIAEAIQQVTNAAGVAVVIEAKHMCMMMRGVEKQNSSMHSSVMLGAFRESVNTRQEFLQLISRSN

SEQ ID NO: 13199 - protein, 181 aa, Pseudomonas abietaniphila
  REGION 1..181: note = tr|A0A1G8IPN3|A0A1G8IPN3_9PSED GTP cyclohydrolase 1; OS = Pseudomonas abietaniphila OX=89065 GN=folE PE=3 SV=1
MTLEQNYTAILGQLGEDVSREGLLDTPKRAAKAMKYLCRGYEQTLEEVTNGALFSSDNSEMVVVKNIELYSLCEHHLLPFIGKAHVAYIPSGKVLGLSKVARIVDMFARRLQIQENLSRQIAEAIQQVTGALGVAVVIEAQHMCMMMRGVEKQNSSMITSVMLGEFRENAATRTEFLSLIK

SEQ ID NO: 13200 - protein, 186 aa, Pseudomonas abietaniphila
  REGION 1..186: note = tr|A0A1G8F5V8|A0A1G8F5V8_9PSED GTP cyclohydrolase 1; OS = Pseudomonas abietaniphila OX=89065 GN=folE PE=3 SV=1
MTLSLPQHYREILVGLGEDPEREGLLDTPKRAAKAMQYLCHGYDQTLEEIVNGALFASDNDEMVIVKDIELYSLCEHHLLPFIGKAHVAYIPTGKVLGLSKIARIVDMFARRLQIQENLTRQIADAIQGVTSAAGVAVVIEAQHMCMMMRGVEKQNSTMNTSVMLGAFRESTTTRMEFLQLIGRSK

SEQ ID NO: 13201 - protein, 187 aa, unidentified; identical to SEQ ID NO: 13198
  source 1..187: note = Pseudomonas abyssi
  REGION 1..187: note = tr|A0A2A3MNG4|A0A2A3MNG4_9PSED GTP cyclohydrolase 1; OS = Pseudomonas abyssi OX=170540 GN=folE PE=3 SV=1

SEQ ID NO: 13202 - protein, 299 aa, unidentified
  source 1..299: note = Pseudomonas abyssi
  REGION 1..299: note = tr|A0A2A3MFS8|A0A2A3MFS8_9PSED GTP cyclohydrolase FolE2 OS=Pseudomonas abyssi OX=170540 GN=folE2 PE=3 SV=1
MSSLTLPDVSLTDTAATPGALQWVGMQGIDLPLSLARDQVQVHARADVQVDLPDPAIKGVHMSRLYRLLERLVPPAVLTPARIRTALQDMVDSQADCRSTRARIGLHFDLLCRRPALLSPDLAGWKRYPVQLDASLQQGQFSLEVQVQIGYASTCPCSAALARQRVAEGFAQAFADGEAPTPAAVSDWLARHASLATPHSQRSEAQVTVALDASDAELPLLALIDQVEAALGTPLQTAVKRADEQAFAELNGQNLMFVEDAARRIQAALQKGQWREPRAQVCHMESLHPHDAVAWAGGV

SEQ ID NO: 13203 - protein, 220 aa, unidentified
  source 1..220: note = Pseudomonas acidophila
  REGION 1..220: note = tr|A0A2A4EU40|A0A2A4EU40_9PSED GTP cyclohydrolase 1; OS = Pseudomonas acidophila OX=1912599 GN=folE PE=3 SV=1
MNSKTGKVRAIRTTAKTKSVEAPVRPTREEAEAAVRTLLRWAGDDPQREGLLDTPARVVRSYEEFFAGYSVDPREILARTFSEVDGYDEMIVLKDIRFESYCEHHMVPIIGRAHVAYLPGHRVVGISKLARLVDAFAKRLQIQEKMTAQIADTLNEVLQPRGVGVILEASHQCMSTRGVHKAGVAMVTSRMLGAFRSDPSTRREFLSIVNAPPSVGIANT

SEQ ID NO: 13204 - protein, 268 aa, unidentified
  source 1..268: note = Pseudomonas acidophila
  REGION 1..268: note = tr|A0A2A4EPX2|A0A2A4EPX2_9PSED GTP cyclohydrolase FolE2 OS=Pseudomonas acidophila OX=1912599 GN=folE2 PE=3; SV = 1
MNQMNPAFVMPDVQSTLDTRQIPIQRVGVKAVRHPVIVRTQTGEAQPTVGTWNLDVHLPADQKGTHMSRFVALLEENRVPLDTTAFRTMLASMLEKLEAEAGRIEVSFPYFVSKVAPVSGVQSLLDYEVTLTGETRHGVTRVFLKVLVPVTSLCPCSKKISQYGAHNQRSHVTIDAELAGDVAVEELIRIAEEEASCELWGLLKRPDEKFVTERAYENPKFVEDLVRDVAQRLNADERIVAYVLEAENFESIHNHSAYALIEHDKRVR

SEQ ID NO: 13205 - protein, 298 aa, Pseudomonas aeruginosa
  REGION 1..298: note = sp|B7V776|GCH4_PSEA8 GTP cyclohydrolase FolE2; OS = Pseudomonas aeruginosa (strain LESB58) OX=557722; GN = folE2 PE=3 SV=1
MNALTLPDIARQTTTADLPLDWVGMQGIALPVQIGGQRVAAEADAGVSLDDPQARGIHMSRLYLALAELEQGELDLSCLRAVLQRFLDSHAGLSRRAYLRLRLAPLLRRPALVSPLSGWKRYPLVLDTRLEGDDFQAEVHLELTYSSTCPCSAALARQLIQERFDQDFAGQPLDHASVLAWLGSSAGIVATPHSQRSSAHLRIGLAEDCIGLPLEELADLGESALGTAVQTAVKRADEQAFALANGQNLMFCEDAVRRLHRALQGYPQASRFSIRVVHAESLHAHDAVAESHWQRGAA

SEQ ID NO: 13206 - protein, 181 aa, Pseudomonas aeruginosa
  REGION 1..181: note = tr|A6V7B7|A6V7B7_PSEA7 GTP cyclohydrolase 1; OS = Pseudomonas aeruginosa (strain PA7) OX=381754 GN=folE1; PE = 3 SV=1
MSLEQHYSSILTQLGEDVNREGLLDTPKRAAKAMKYLCRGYEQSLEEVVNGALFSSDNSEMVLVKDIELYSLCEHHLLPFIGKAHVAYIPNGKVLGLSKVARIVDMYARRLQIQENMSRQIAEAVQQVTGALGVAVVIQAQHMCMMMRGVEKQNSSMVTSVMLGEFRDNAATRSEFLSLIR

SEQ ID NO: 13207 - protein, 187 aa, unidentified
  source 1..187: note = Pseudomonas aestusnigri
  REGION 1..187: note = tr|A0A1H5S526|A0A1H5S526_9PSED GTP cyclohydrolase 1; OS = Pseudomonas aestusnigri OX=857252 GN=folE PE=3 SV=1
MSLEKLTKNYLDVLTNLGEQPERDGLKGTPERAAKAMQFLCHGYNQSLDEIVNGALFDSDNDEMVIVKDIELYSLCEHHMLPFIGKAHVAYIPTGKVIGLSKVARIVDMFARRLQIQENLTRQIAEAVQQVTNAKGVAVVIEAKHMCMMMRGVEKQNSSMHSSVMLGAFRESVNTRQEFLQLISRSN

SEQ ID NO: 13208 - protein, 301 aa, unidentified
  source 1..301: note = Pseudomonas aestusnigri
  REGION 1..301: note = tr|A0A1H6C1I7|A0A1H6C1I7_9PSED GTP cyclohydrolase FolE2 OS=Pseudomonas aestusnigri OX=857252 GN=folE2 PE=3; SV = 1
MTAALPDVSLTDLSADPAALDWVGMQGIDLPITLNETGQRQTVHARADLQVDLPRPEVKGIHMSRLYTLLDRLGQDRALAPTVLQALLQAMVESHADCGSRNARLVLQFSLLCRRPALVTPQLSGWKAYPVKLEATLVDGCFRARVELTVSYSSTCPCSAALSRQLLVSAFDRAFAGQQRLDPVAVSQWLGRNGSLATPHSQRSEARVAVDLNAAAEGLGLLVLIDRIEQALATPVQTAVKRADEQAFAALNGVNLMFVEDAARRLGAALSAAGAQHAAVHVRHIESLHPHDAVASVGAHP

SEQ ID NO: 13209 - protein, 181 aa, Pseudomonas agarici
  REGION 1..181: note = tr|A0A0X1SZN2|A0A0X1SZN2_PSEAA GTP cyclohydrolase 1; OS = Pseudomonas agarici OX=46677 GN=folE PE=3 SV=1
MSLEQNYTAILGQLGEDVSREGLLDTPKRAAKAMQYLCRGYEQTLEEVTNGALFSSDNSEMVLVKDIELYSLCEHHLLPFIGKAHVAYIPSGKVLGLSKVARIVDMYARRLQIQENLSRQIADAVQQVTGALGVAVVIEAQHMCMMMRGVEKQNSSMITSVMLGEFRENAATRSEFLALIK

SEQ ID NO: 13210 - protein, 186 aa, Pseudomonas agarici
  REGION 1..186: note = tr|A0A0X1SX13|A0A0X1SX13_PSEAA GTP cyclohydrolase 1; OS = Pseudomonas agarici OX=46677 GN=folE PE=3 SV=1
MSATLPEHYREILLGLGEDPDREGLLDTPKRAAKAMQYLCHGYSVNLDEVVNGALFASDNDEMVIVKDIELYSLCEHHLLPFIGRAHVAYIPTGKVLGLSKIVRIVDMFARRLQIQENLTREIADAIQQVTSAPGVAVVIEAQHMCMMMRGVEKQNSTMNTSVMLGALRDSNTTRMEFLQLIGRSK

SEQ ID NO: 13211 - protein, 186 aa, Pseudomonas alcaligenes
  REGION 1..186: note = tr|A0A142IUC1|A0A142IUC1_PSEAC GTP cyclohydrolase 1; OS = Pseudomonas alcaligenes OX=43263 GN=folE PE=3 SV=1
MNTQLPHHYREILVGLGENPEREGLLDTPKRAAKAMQYLCHGYQQSLEEIVNGALFASDNDEMVIVKDIELYSLCEHHLLPFIGKAHVAYIPTGKVLGLSKVARIVDMYARRLQIQENLTKQIADAIQQVTNAAGVAVVIEAKHMCMMMRGVEKQNSVMSSSVMLGAFRESCNTRHEFLQLIGRNK

SEQ ID NO: 13212 - protein, 182 aa, Pseudomonas alcaligenes
  REGION 1..182: note = tr|A0A1N6WXH8|A0A1N6WXH8_PSEAC GTP cyclohydrolase 1; OS = Pseudomonas alcaligenes OX=43263 GN=folE PE=3 SV=1
MSLEQQYTAILGQLGEDVSREGLLDTPKRAAKAMQYLCKGYQQTLEEVTNGALFSSDNSEMVLVKNIELYSLCEHHLLPFIGKAHVAYIPSGKVLGLSKVARIVDMYARRLQIQENLSRQIAEAVQQVTGALGVAVVIEAQHMCMMMRGVEKQNSSMVTSVMLGEFRENAATRSEFLNLIRD

SEQ ID NO: 13213 - protein, 181 aa, Pseudomonas alcaliphila
  REGION 1..181: note = tr|A0A1G7IW14|A0A1G7IW14_9PSED GTP cyclohydrolase 1; OS = Pseudomonas alcaliphila OX=101564 GN=folE PE=3 SV=1
MSLEQQYTAILGQLGEDVSREGLLDTPKRAAKAMQYLCRGYQQTLEEVTNGALFSSDNSEMVLVKNIELYSLCEHHLLPFIGKAHVAYIPNGKVLGLSKVARIVDMYARRLQIQENLSRQIAEAVEQVTGALGVAVVIEAQHMCMMMRGVEKQNSSMVTSVMLGEFRSNPATRGEFLNLVR

SEQ ID NO: 13214 - protein, 296 aa, Pseudomonas alcaliphila
  REGION 1..296: note = tr|A0A1L7G6F2|A0A1L7G6F2_9PSED GTP cyclohydrolase FolE2 OS=Pseudomonas alcaliphila JAB1 OX=741155 GN=folE2; PE = 3 SV=1
MNEQPLPDIAAQATHHDLPLDWVGMAGIALPLRLADAAVTACVDIGVSLDDAGARGIHMSRLYLAAQRLVHQPLNVPAVLQVLDDCLSSHQELSDSATLTLRGEVPLKRPALVSPLHGWKTYPFELHARQDGRGVNIELQVEVSYSSTCPCSAALARQLIQQRFAWDFPDQQVDYSSVLDWLGSTQGIVATPHSQRSTATLQLRLAPGCIELPVLELIDSAEQALGTPVQTAVKRADEQAFALANGQNLMFCEDAARRLHRALRQLPQASAFRLKVVHAESLHAHDAVAESSWNWC

SEQ ID NO: 13215 - protein, 295 aa, unidentified
  source 1..295: note = Pseudomonas alkylphenolica
  REGION 1..295: note = tr|A0A443ZZI5|A0A443ZZI5_9PSED GTP cyclohydrolase FolE2 OS=Pseudomonas alkylphenolica OX=237609 GN=folE2; PE = 3 SV=1
MTALTLPDIAAQATQSSLPLNWVGMCNIALPVQFDGSRLRASADAGVDLDDGNSRGIHMSRLYLALEVFEQQPLTPQLIHQVLGTFLESHAGLSTGAYLQLRFELMLKRPALISPLAGWKAYPVTLSAQLKDEVFHVELNVQLDYSSTCPCSAALARQLIQQQFLADFSDRGLNHEAVFNWLGSAEGVVATPHSQRSSAQLQVRLKEGMNELPIKALIDQAEAALGTAVQTAVKRTDEQAFALANGQNLMFCEDAARRLHRALQQLPWLTGFTLRVEHAESLHAHDAVAHSQWYW

SEQ ID NO: 13216 - protein, 295 aa, unidentified
  source 1..295: note = Pseudomonas alkylphenolica
  REGION 1..295: note = tr|A0A077FIP5|A0A077FIP5_9PSED GTP cyclohydrolase FolE2 OS=Pseudomonas alkylphenolica OX=237609 GN=folE2; PE = 3 SV=1
MTALTLPDIAAQAIHTSLPLDWVGMCNIALPVLFDGSTLRASADAGVSLDDGSSRGIHMSRLYLALEVFEQQPLTPLLIHQVLDTFLESHAGISAGAYLNLHFELMLKRPALISPLAGWKAYPVSLSAQLKDEVFHVELKVQLDYSSTCPCSAALARQLIQQQFLTDFGNRSLSHEAVLDWLGSAQGVVATPHSQRSVAQLQIRLKQGVSELPIKALIDQAETALGTAVQTAVKRADEQAFALANGQNLMFCEDAARRLHLALQHLTWLSGFSLRVEHAESLHAHDAVAHSQWHW

SEQ ID NO: 13217 - protein, 187 aa, Pseudomonas amygdali
  REGION 1..187: note = tr|A0A2S4IJD6|A0A2S4IJD6_PSEA0 GTP cyclohydrolase 1; OS = Pseudomonas amygdali pv. morsprunorum OX=129138 GN=folE; PE = 3 SV=1
MSSSLPQHYRDILLELGENPDREGLLDTPKRASKAMQYLCHGYTQTVEEIVNGALFASDNDEMVIVQNIELYSLCEHHLLPFIGKAHVAYIPTGKVVGLSKIARIVDMFARRLQIQENLTKQIADAIQEVTGAAGVAVVIEAQHMCMMMRGVEKQNSTMNTSVMLGAFRESSTTRMEFLQLIGRSRT

SEQ ID NO: 13218 - protein, 187 aa, Pseudomonas amygdali
  REGION 1..187: note = tr|A0A0P9UEN8|A0A0P9UEN8_PSEA0 GTP cyclohydrolase 1; OS = Pseudomonas amygdali pv. hibisci OX=251723 GN=folE PE=3; SV = 1
MSSSLPQHYRDILLGLGEDPDREGLLDTPKRASKAMQYLCHGYTQSVAEIVNGALFASDNDEMVIVQNIELYSLCEHHLLPFIGKAHVAYIPTGKVLGLSKIARIVDMFARRLQIQENLTKQIADAIQQVTGAAGVAVVIEAKHMCMMMRGVEKQNSTMNTSVMLGAFRDSSTTRMEFLQLIGRSRQ

SEQ ID NO: 13219 - protein, 186 aa, Pseudomonas anguilliseptica
  REGION 1..186: note = tr|A0A1H4NII3|A0A1H4NII3_PSEAG GTP cyclohydrolase 1; OS = Pseudomonas anguilliseptica OX=53406 GN=folE PE=3 SV=1
MTPELPNHYREILLGVGENPEREGLLDTPKRAAKAMQYLCNGYHKSLEDVVNGALFESDNDEMVIVRDIELYSLCEHHMLPFIGKAHVAYIPTGKVLGLSKVARIVDMFARRLQIQENLTKQIADAIQQVTNAAGVAVVIEAKHMCMMMRGVEKQNSVMTSSVMLGAFRESCNTRHEFLQLIGRSK

SEQ ID NO: 13220 - protein, 182 aa, Pseudomonas anguilliseptica
  REGION 1..182: note = tr|A0A1H5EQ94|A0A1H5EQ94_PSEAG GTP cyclohydrolase 1; OS = Pseudomonas anguilliseptica OX=53406 GN=folE PE=3 SV=1
MSLEQNYTAILGQLGEDVSREGLLDTPKRAAKAMQYLCKGYQQTLEEVTNGALFSSDNSEMVLVKNIELYSLCEHHLLPFIGKAHVAYIPNGKVLGLSKVARIVDMYTRRLQIQENLSRQIAEAIQQVTGALGVAVVIEAQHMCMMMRGVEKQNSSMVTSVMLGEFRENAATRSEFLSLVNS

SEQ ID NO: 13221 - protein, 186 aa, Pseudomonas antarctica
  REGION 1..186: note = tr|A0A1G9XFA2|A0A1G9XFA2_9PSED GTP cyclohydrolase 1; OS = Pseudomonas antarctica OX=219572 GN=folE PE=3 SV=1
MTLSLPQHYREILKGLGEDPEREGLLDTPKRAAKAMQYLCHGYEQNLDEIVNGALFASDNDEMVILKDIELYSLCEHHLLPFIGKAHVAYIPTGKVLGLSKLARIVDMYARRLQIQENLTRQIADAVQQVTQAAGVAVVIEAKHMCMMMRGVEKQNSTMNTSVMLGAFRESNTTRMEFLQLIGRSK

SEQ ID NO: 13222 - protein, 186 aa, Pseudomonas antarctica
  REGION 1..186: note = tr|A0A1H0ALA0|A0A1H0ALA0_9PSED GTP cyclohydrolase 1; OS = Pseudomonas antarctica OX=219572 GN=folE PE=3 SV=1
MNASLAEHYREILVGVGENPEREGLLDTPKRAAKAMQYLCNGYTMSLEELINGALFESQNDEMVIVRDIELYSLCEHHMLPFIGKAHVAYIPTGRVLGLSKVARVVDMFARRLQIQENLTKQIADAIQHITDAAGVAVVIEAKHMCMMMRGVEKQNSVMTSSVMLGAFRESSATRHEFLQLIGRLG

SEQ ID NO: 13223 - protein, 186 aa, Pseudomonas argentinensis
  REGION 1..186: note = tr|A0A1I3JYK4|A0A1I3JYK4_9PSED GTP cyclohydrolase 1; OS = Pseudomonas argentinensis OX=289370 GN=folE PE=3 SV=1
MNPLLPNHYREILLGLGEDPEREGLLDTPKRAAKAMQYLCNGYEKSLEEVVNGALFSSDSDEMVIVKDVELYSLCEHHLLPFIGKAHVAYIPTGKVLGLSKIARIVDMYARRLQIQENLTRQIASAIQEVTQAAGVAVVIEAQHMCMMMRGVEKQNSVMSTSVMLGAFRESYNTRHEFLQLIGRSK

SEQ ID NO: 13224 - protein, 187 aa, Pseudomonas argentinensis
  REGION 1..187: note = tr|A0A1I3L5W2|A0A1I3L5W2_9PSED GTP cyclohydrolase 1; OS = Pseudomonas argentinensis OX=289370 GN=folE PE=3 SV=1
MDSSRNTLEQQYTEILGQLGEDVSREGLLDTPKRAAKAMQYLCNGYQKTLEEVTNGALFSSDASEMVVVKNIELYSLCEHHLLPFIGKAHVAYIPNGKVLGLSKVARIVDMYARRLQIQESLSRQIAEAVQQVTGALGVAVVIEAKHMCMMMRGVEKQNSSMVTSVMLGEFRENAATRSEFLSLVNG

SEQ ID NO: 13225 - protein, 181 aa, Pseudomonas arsenicoxydans
  REGION 1..181: note = tr|A0A1H0JFH3|A0A1H0JFH3_9PSED GTP cyclohydrolase 1; OS = Pseudomonas arsenicoxydans OX=702115 GN=folE PE=3 SV=1
MSLEQNYTAILGQLGEDVSREGLLDTPKRAAKAMQYLCRGYEQTLEEVTNGALFSSDNSEMVLVKDIELYSLCEHHLLPFIGKAHVAYIPSGKVLGLSKVARIVDMYARRLQIQENLSRQIADAVQQVTGALGVAVVIEAKHMCMMMRGVEKQNSSMITSVMLGEFRENAATRSEFLSLIK

SEQ ID NO: 13226 - protein, 191 aa, Pseudomonas arsenicoxydans
  REGION 1..191: note = tr|A0A1H0AJ89|A0A1H0AJ89_9PSED GTP cyclohydrolase 1; OS = Pseudomonas arsenicoxydans OX=702115 GN=folE PE=3 SV=1
MTLSLHQNALSQSYREILIGLGENPDREGLQDTPTRAAKAMQYLCHGYEQSVEEIVNGALFASDNDEMIIVDNIELYSLCEHHMLPFIGKAHVAYIPTGKVLGLSKIARLVDMFARRLQIQENLTRQIADAVQQVTGAAGVAVVIEAKHMCMMMRGVEKQNSTMNTSVMLGAFRESSNTRQEFLQLIGRSK

SEQ ID NO: 13227 - protein, 186 aa, Pseudomonas asplenii
  REGION 1..186: note = tr|A0A3S3C7Q2|A0A3S3C7Q2_9PSED GTP cyclohydrolase 1; OS = Pseudomonas asplenii OX=53407 GN=folE PE=3 SV=1
MSATLPEHYREILLGLGENPDREGLLDTPKRAAKAMQYLCHGYEQSLDEVVNGALFASDNDEMVIVKDIELYSLCEHHLLPFIGKAHVAYMPTGKVLGLSKIARIVDMFARRLQIQENLTRQIADAIEQVTQAAGVAVVIEAQHMCMMMRGVEKQNSTMNTSVMLGALRDSSTTRMEFLQLIGRSK

SEQ ID NO: 13228 - protein, 181 aa, Pseudomonas asplenii
  REGION 1..181: note = tr|A0A3S3D8J5|A0A3S3D8J5_9PSED GTP cyclohydrolase 1; OS = Pseudomonas asplenii OX=53407 GN=folE PE=3 SV=1
MSLEQNYTAILGQLGEDVSREGLLDTPKRAAKAMQYLCRGYEQTLEEVTNGALFSSDNSEMVLVKDIELYSLCEHHLLPFIGKAHVAYIPSGKVLGLSKVARIVDMYARRLQIQENLSRQIADAVQQVTGALGVAVVIEAKHMCMMMRGVEKQNSSMITSVMLGEFRENAATRSEFLALIK

SEQ ID NO: 13229 - protein, 301 aa, unidentified
  source 1..301: note = Pseudomonas asturiensis
  REGION 1..301: note = tr|A0A1M7KUM0|A0A1M7KUM0_9PSED GTP cyclohydrolase FolE2 OS=Pseudomonas asturiensis OX=1190415 GN=folE2 PE=3; SV = 1
MNSSLPDVAVTHASSALIALDWVGMQAIEVPIRLSEEGASQSVHAHVDLHVDLADPSIKGIHMSRLYRLLDRFAEERALNVAALSDLLEAMVESHADCHSTRARIKLNFNLLCRRPALVTDGLSGWKSYPIVIEGLWEAGRLCLDFSAGITYSSTCPCSAALSRQLLESAFIAHFDRQTFVDTMQVANWLRTNGSLATPHSQRSVATVQVRVPEHATELGLMALIDTAERALGTPVQTAVKRADEQAFARLNGQNLMYVEDAARKVQQALEGLYTASRVSVRHFESLHPHDAAAQTSTYPS

SEQ ID NO: 13230 - protein, 187 aa, unidentified
  source 1..187: note = Pseudomonas asturiensis
  REGION 1..187: note = tr|A0A1M7LCP9|A0A1M7LCP9_9PSED GTP cyclohydrolase 1; OS = Pseudomonas asturiensis OX=1190415 GN=folE PE=3 SV=1
MSLSLPQHYRDILVGLGEDPDREGLLDTPKRAAKAMQYLCHGYTQSVEEIVNGALFASDNDEMVIVQNIELYSLCEHHLLPFIGKAHVAYIPTGKVLGLSKIARIVDMFARRLQIQENLTRQIAEAIKDVTGASGVAVVIEAKHMCMMMRGVEKQNSTMNTSVMLGAFRESSTTRMEFLQLIGRSKQ

SEQ ID NO: 13231 - protein, 187 aa, Pseudomonas avellanae; identical to SEQ ID NO: 13217
  REGION 1..187: note = tr|A0A2S3TJC5|A0A2S3TJC5_9PSED GTP cyclohydrolase 1; OS = Pseudomonas avellanae OX=46257 GN=folE PE=3 SV=1

SEQ ID NO: 13232 - protein, 301 aa, Pseudomonas avellanae
  REGION 1..301: note = tr|A0A3M5SST4|A0A3M5SST4_9PSED GTP cyclohydrolase FolE2 OS=Pseudomonas avellanae OX=46257 GN=folE2 PE=3 SV=1
MNSPLPDVALTEVSSALIALDWVGMQGVEVPLTLGEPGATHPVHAYADLQVDLTDPSVKGIHMSRLYRLLDGFAEHQVLTPETLSALLEAMVESHVDCHSSGARITLTFNLLCRRPALVTEGLSGWKSYPVKLEAVWRAGRLCLDVSADITYSSTCPCSAALSRQLLEETFVTRFGRQSFVDPMQVAAWLRDNASYATPHSQRSVATVQVRVAEQATEMGLMALIDTVEQALGTPVQTAVKRADEQAFARLNGQNLMYVEDAARKIQQALEGRYPASSVSVRHFESLHPHDAAAQTSNYLS

SEQ ID NO: 13233 - protein, 300 aa, Pseudomonas azotoformans
  REGION 1..300: note = tr|A0A3M5MLZ0|A0A3M5MLZ0_PSEAZ GTP cyclohydrolase FolE2 OS=Pseudomonas azotoformans OX=47878 GN=folE2 PE=3; SV = 1
MDLLMNALTLPDIAAQASRQALPLDWVGMRGIALPILIDGQHLTATADAGVSLDDGTARGIHMSRLYLALEMLDQQPLTSALLRNVLQRFLDTHEGLSKNAYLRIHTQLLLKRPALVSPLAGWKTYPVSIEARLENQMFHVELKIDVTYSSTCPCSAALARQLIQQQFVDDFANTPLQHEAVLAWLGTADGIVATPHSQRSSAQLHVQLQGTDLPIVGLINAAEAALGTAVQTAVKRADEQAFALANGQNLMFCEDAARRLNLALKRSDAIKAFHLKVIHAESLHAHDAVAESRWTRDFA

SEQ ID NO: 13234 - protein, 186 aa, Pseudomonas azotoformans
  REGION 1..186: note = tr|A0A4Q0HS39|A0A4Q0HS39_PSEAZ GTP cyclohydrolase 1; OS = Pseudomonas azotoformans OX=47878 GN=folE PE=3 SV=1
MTLSLPHHYREILKGLGEDPQREGLLDTPKRAAKAMQYLCHGYEQNLEEIVNGALFASDNDEMVILKDIELYSLCEHHLLPFIGKAHVAYIPTGKVLGLSKLARIVDMFARRLQIQENLTRQIADAIQDVTQAAGVAVVIEAKHMCMMMRGVEKQNSTMNTSVMLGAFRESNTTRMEFLQLIGRSK

SEQ ID NO: 13235 - protein, 181 aa, Pseudomonas baetica
  REGION 1..181: note = tr|A0A2T4F454|A0A2T4F454_9PSED GTP cyclohydrolase 1; OS = Pseudomonas baetica OX=674054 GN=folE PE=3 SV=1
MTLEQNYTAILGQLGEDVSREGLLDTPKRAAKAMQYLCRGYEQTLEEVTNGALFSSDNSEMVLVKDIELYSLCEHHLLPFIGKAHVAYIPSGKVLGLSKVARIVDMYARRLQIQENLSRQIADAVQQVTGALGVAVVIEAKHMCMMMRGVEKQNSSMITSVMLGEFRENAATRSEFLSLIK

SEQ ID NO: 13236 - protein, 186 aa, Pseudomonas baetica
  REGION 1..186: note = tr|A0A2N0DN30|A0A2N0DN30_9PSED GTP cyclohydrolase 1; OS = Pseudomonas baetica OX=674054 GN=folE PE=3 SV=1
MTRSLPENYREILIGLGENPDREGLLDTPVRAAKAMQYLCHGYGQSVDEIVNGALFASDSDEMIIVADIELYSLCEHHLLPFIGKAHVAYIPTGKVLGLSKIARLVDMFARRLQIQENLTRQIADAVQQVTDAAGVAVVIEARHMCMMMRGVEKQNSTMNTSVMLGAFRDSSNTRQEFLQLIGRSK

SEQ ID NO: 13237 - protein, 186 aa, Pseudomonas balearica
  REGION 1..186: note = tr|A0A1G9RWM7|A0A1G9RWM7_9PSED GTP cyclohydrolase 1; OS = Pseudomonas balearica DSM 6083 OX=1123016 GN=folE PE=3; SV = 1
MDTLSSQYRDILQGLGEDPEREGLRDTPLRAAKAMRYLCNGYTKSLEEVVNGALFASDNDEMVIVKDIELYSLCEHHLLPFIGRAHVAYIPTGRVLGLSKVARIVDMYARRLQIQENLTRQIAEAIQEVTSAAGVAVVIEARHMCMMMRGVEKQNSVMNTSVMLGAFRSSCNTRMEFMQLIGRDRA

SEQ ID NO: 13238 - protein, 181 aa, Pseudomonas balearica
  REGION 1..181: note = tr|A0A1G9RBM0|A0A1G9RBM0_9PSED GTP cyclohydrolase 1; OS = Pseudomonas balearica DSM 6083 OX=1123016 GN=folE PE=3; SV = 1
MSLEHNYTQILTQLGEDVSREGLLDTPKRAAKAMQYLCKGYQQTLEEVTNGALFSSDNSEMVLVKNIELYSLCEHHMLPFIGKAHVAYLPAGKVLGLSKVARIVDMYARRLQIQENLTREIAEAVQQVTGAAGVAVVIEAQHMCMMMRGVEKQNSSMVTSVMLGQFRDNAATRSEFLGLVK

SEQ ID NO: 13239 - protein, 297 aa, unidentified
  source 1..297: note = Pseudomonas batumici
  REGION 1..297: note = tr|A0A0C2I1E7|A0A0C2I1E7_9PSED GTP cyclohydrolase FolE2 OS=Pseudomonas batumici OX=226910 GN=folE2 PE=3 SV=1
MNALTLPDIAAQSSRQALPLEWVGMCGIALPISIDGQRLSAKADAGVSLDDGEARGIHMSRLYLALERLEQEDLTPELIRETLQQFLGSHDGLSSNAYLRIHTDLLLKRPALVSPLAGWKTYPVSVLVELKNGVFHVELKIDVAYSSTCPCSAALARQLIQQQFIDDFADKPLEHSDILGWLGGQGVVATPHSQRSIAQLHIRLDEKIGRFPLEPLINEAEAALGTAVQTAVKRADEQAFALANGQNLMFCEDAARRLNLALKRSDAVSAFHLRVVHAESLHAHDAVAESRWNWRQA

SEQ ID NO: 13240 - protein, 186 aa, unidentified
  source 1..186: note = Pseudomonas batumici
  REGION 1..186: note = tr|A0A0C2F2G7|A0A0C2F2G7_9PSED GTP cyclohydrolase 1; OS = Pseudomonas batumici OX=226910 GN=folE PE=3 SV=1
MSATLPEHYREILLGLGENPDREGLQDTPKRAAKAMQYLCRGYAQTLEDVVNGALFASDNDEMIIVKDIELYSLCEHHLLPFIGKVHVAYVPTGKVLGLSKIARIVDMFARRLQIQENLTREIADAIEQVTQAAGVAVVIEAQHMCMMMRGVEKQNSTMNTSVMLGALRDSSRTRMEFLQLIGRSK

SEQ ID NO: 13241 - protein, 185 aa, Pseudomonas bauzanensis
  REGION 1..185: note = tr|A0A4U0YF00|A0A4U0YF00_9PSED GTP cyclohydrolase 1; OS = Pseudomonas bauzanensis OX=653930 GN=folE PE=3 SV=1
MSLENLTQNYESILLNLGENPKRGGLLDTPLRAAKAMQFLCLGYELSLGEIVNNALFESDSDEMVIVKDIELYSLCEHHMLPFIGKAHVAYMPTGKVIGLSKIARIVDMFSRRLQIQENLTRQIAEAIQEVTDAGGVAVVIEAKHMCMMMRGVEKQNSSMYTSVMLGAFRESGNTRQEFLQLIGK

SEQ ID NO: 13242 - protein, 186 aa, Pseudomonas bauzanensis
  REGION 1..186: note = tr|A0A1H9U2I7|A0A1H9U2I7_9PSED GTP cyclohydrolase 1; OS = Pseudomonas bauzanensis OX=653930 GN=folE PE=3 SV=1
MSTENIALQYEAILRGIGEDPQRGGLAETPLRAAKAMQFLCKGYEQSLEEIVNNALFDAKGDEMVIVKDIELYSLCEHHMLPFVGKAHVAYLPKGKVIGLSKVARIVDMFARRLQIQENLTRQIAEALQEVTQAEGVAVVIEAKHMCMMMRGVEKQNSTMFTSVMLGAFRASGNTRQEFLQLIGRG

SEQ ID NO: 13243 - protein, 186 aa, Pseudomonas benzenivorans
  REGION 1..186: note = tr|A0A1G7UYE2|A0A1G7UYE2_9PSED GTP cyclohydrolase 1; OS = Pseudomonas benzenivorans OX=556533 GN=folE PE=3 SV=1
MSQELPRFFREILIGVGEDPEREGLLDTPKRAAKAMQYLCHGYQKSLEEVVNGALFVSDNDEMVIVKDVELYSLCEHHLLPFIGKAHVAYIPTGKVLGLSKVARIVDMYARRLQIQENLTRQIAEAVQQVTKAAGVAVVVEAKHMCMMMRGVEKQNSVMSTSVMLGAFRESSNTRHEFLQLIGRSH

SEQ ID NO: 13244 - protein, 182 aa, Pseudomonas benzenivorans
  REGION 1..182: note = tr|A0A1G7ZU61|A0A1G7ZU61_9PSED GTP cyclohydrolase 1; OS = Pseudomonas benzenivorans OX=556533 GN=folE PE=3 SV=1
MSLEQHYTAILGQLGEDASREGLLDTPKRAAKAMQYLCRGYQQTLEEVTNGALFSSDNSEMVLVKHIELYSLCEHHLLPFIGKAHVAYIPNGKVLGLSKVARIVDMFARRLQIQENLSRQIAEAIQEVTGALGVAVVIEAQHMCMMMRGVEKQNSSMVTSVMLGEFRNNAATRSEFLSLINS

SEQ ID NO: 13245 - protein, 298 aa, Pseudomonas borbori
  REGION 1..298: note = tr|A0A1I5R7B8|A0A1I5R7B8_9PSED GTP cyclohydrolase FolE2 OS=Pseudomonas borbori OX=289003 GN=folE2 PE=3 SV=1
MNALTLPDIAAQATLYQQTLDWVGMGEIALPLLFAGQRINARADAGVSLDDGGARGIHMSRLYLALQVLETDNLSPPLLRQLLGEFLDSHKGLSRQAHISLRGEALLSRPALVSPLSGWKAYPFEVRARQDSWGFHVELQAQLDYSSTCPCSAALARQLIQQRFIEDFADQSLEHQQLLTWLGSTQGILATPHSQRSTATLQVRLSPQADELPLIELIDRAEQALGTAVQTAVKRADEQAFALANGQNLMFCEDAARRLHSALLLQPGLSAFHLRVVHAESLHAHDAVATSSWNWSPA

SEQ ID NO: 13246 - protein, 186 aa, Pseudomonas borbori
  REGION 1..186: note = tr|A0A1I5X2R5|A0A1I5X2R5_9PSED GTP cyclohydrolase 1; OS = Pseudomonas borbori OX=289003 GN=folE PE=3 SV=1
MSQELPSFFREILIGVGEDPEREGLLDTPKRAAKAMQYLCHGYQKSLEEVVNGALFASDNDEMVIVKDVELYSLCEHHLLPFIGKAHVAYIPTGKVLGLSKVARIVDMYARRLQIQENLTRQIAEAVQQVTNAAGVAVVIEAKHMCMMMRGVEKQNSVMSTSVMLGVFRESSNTRHEFLQLIGRSH

SEQ ID NO: 13247 - protein, 186 aa, Pseudomonas brassicacearum
  REGION 1..186: note = tr|W8PEL1|W8PEL1_9PSED GTP cyclohydrolase 1; OS = Pseudomonas brassicacearum OX=930166 GN=folE PE=3 SV=1
MTLSLPENYREILIGLGENPEREGLLDTPMRAAKAMQYLCHGYEQSVEQIVNGALFASDSDEMVIVADIELYSLCEHHLLPFIGKAHVAYIPTGKVLGLSKIARLVDMFARRLQIQENLTRQIADAVQQVTQAAGVAVVIEAQHMCMMMRGVEKQNSTMNTSVMLGAFRESSTTRQEFLQLIRRSQ

SEQ ID NO: 13248 - protein, 191 aa, Pseudomonas brassicacearum
  REGION 1..191: note = tr|A0A423GSE1|A0A423GSE1_9PSED GTP cyclohydrolase 1; OS = Pseudomonas brassicacearum OX=930166 GN=folE PE=3 SV=1
MTLSLPQNSLSQSYREILIGLGEDPDREGLLDTPARAAKAMQYLCHGYEQSVDEIVNGALFASDNDEMVIVDDIELYSLCEHHLLPFIGKAHVAYIPTGKVLGLSKIARIVDMFARRLQIQENLTREIAEAVQRVTQAAGVAVVIEAQHMCMMMRGVEKQNSTMNTSVMLGAFRESSNTRQEFLQLIGRSK

SEQ ID NO: 13249 - protein, 298 aa, Pseudomonas brenneri
  REGION 1..298: note = tr|A0A4R6YZ51|A0A4R6YZ51_9PSED GTP cyclohydrolase FolE2 OS=Pseudomonas brenneri OX=129817 GN=folE2 PE=3 SV=1
MNALTLPDIAAQASRQALPLDWVGMCGIALPILIDGQRLSAKADAGVSLDDGEARGIHMSRLYLALEMLESQDLQPALLRQVLQRFLDSHEGLSSSAYLRIHTDLLLKRPALVSPLAGWKSYPVSIEARLEKQMFHVELKIDVTYSSTCPCSAALARQLIQQQFIDDFANTTLQHEDVLAWLGSAKGIIATPHSQRSTAQLLVALQAGQPTLPLTELIDHAEAALGTAVQTAVKRADEQAFALANGQNLMFCEDAARRLNLVLQRSIAVQAFHVKVIHAESLHAHDAVAETRWTRTTA

SEQ ID NO: 13250 - protein, 185 aa, Pseudomonas brenneri
  REGION 1..185: note = tr|A0A4V3DLN7|A0A4V3DLN7_9PSED GTP cyclohydrolase 1; OS = Pseudomonas brenneri OX=129817 GN=folE PE=3 SV=1
MNPLLARHYREILVGVGENPEREGLLDTPERAAKAMQYLCNGYALSLEDVTNGALFESPSDEMVIVSDIELYSLCEHHMLPFIGKVHVAYIPTGRVLGLSKVTRVVDMFARRLQIQENLTRQIAEAIEQITDAAGVAVVIEAKHMCMMMRGVEKQNSVMTSSVMLGVFRDSSTTRQEFLQLIGRR

SEQ ID NO: 13251 - protein, 184 aa, unidentified
  source 1..184: note = Pseudomonas canadensis
  REGION 1..184: note = tr|A0A423EZ21|A0A423EZ21_9PSED GTP cyclohydrolase 1; OS = Pseudomonas canadensis OX=915099 GN=folE PE=3 SV=1
MTLPHHYREILKGLGEDPEREGLLDTPKRAAKAMQYLCHGYEQNLEEIINGALFTSDNDEMVILKDIELYSLCEHHLLPFIGKAHVAYIPTGKVLGLSKLARIVDMFARRLQIQENLTRQIADAIQDVTQAAGVAVVIEAKHMCMMMRGVEKQNSTMNTSVMLGAFRESNTTRMEFLQLIGRSK

SEQ ID NO: 13252 - protein, 296 aa, unidentified
  source 1..296: note = Pseudomonas canadensis
  REGION 1..296: note = tr|A0A423EX90|A0A423EX90_9PSED GTP cyclohydrolase FolE2 OS=Pseudomonas canadensis OX=915099 GN=folE2 PE=3; SV = 1
MNALTLPDIAAQASRQALPLDWVGMCGIALPILIDGQRLTATADAGVSLDDGAARGIHMSRLYLALEMLDQQPLTPALLRNVLQRFLDSHEDLSNNAYLRIHTDLLLKRPALVSPLAGWKGYPVSIEARMENQMFHVELKIDVTYSSTCPCSAALARQLIQQQFLDDFANTPLQHEDVLTWLGSANGIVATPHSQRSSAQLHVELQGEQLPLTALIDTVETALGTAVQTAVKRADEQAFALANGQNLMFCEDAARRLNLALKRSDAVKAFHLKVVHAESLHAHDAVAESRWTRHPA

SEQ ID NO: 13253 - protein, 209 aa, Pseudomonas cannabina
  REGION 1..209: note = tr|A0A3M3K1A7|A0A3M3K1A7_PSECA GTP cyclohydrolase 1; OS = Pseudomonas cannabina OX=86840 GN=folE PE=3 SV=1
MWKRSSLVQNRYTPKKRTALKPTRKHSPVTLEQNYTAILGQLGEDVSREGLLDTPKRAAKAMQYLCRGYAQTLEEVTNGALFSSDASEMVMVKDIELYSLCEHHLLPFIGKAHVAYIPKGKVLGLSKVARIVDMYARRLQIQENLSRQIAEAIQQVTGALGVAVVIEAKHMCMMMRGVEKQNSAMITSVMLGEFRENAATRSEFLSLIK

SEQ ID NO: 13254 - protein, 301 aa, Pseudomonas cannabina
  REGION 1..301: note = tr|A0A0P9M9E5|A0A0P9M9E5_PSECA GTP cyclohydrolase FolE2 OS=Pseudomonas cannabina OX=86840 GN=folE2 PE=3 SV=1
MNSPLPDVALTEVSSALIALDWVGMQGVEVPLMLGEPGATHPVHAYADLQVDLADPSVKGIHMSRLYRLLDGFAEHQLLTPDSLSALLEAMVESHADCHSSGARITLTFNLLCRRPALITEGLSGWKSYPVRLEAIWRAGRLCLDVSADITYSSTCPCSAALSRQLLEEAFAARFGRQSFVDRMQVAAWLRENASYATPHSQRSVATVRVRAAEQASELGLMALIDAVEQALGTPVQTAVKRADEQAFARLNGQNLMYVEDAARKIQQALEGHYAASSVSVRHFESLHPHDAAAQTSNYLS

SEQ ID NO: 13255 - protein, 181 aa, unidentified
  source 1..181: note = Pseudomonas capeferrum
  REGION 1..181: note = tr|A0A084CAK8|A0A084CAK8_9PSED GTP cyclohydrolase 1; OS = Pseudomonas capeferrum OX=1495066 GN=folE PE=3 SV=1
MSLEQNYTEILSQIGEDVSREGLLDTPKRAAKAMKYLCRGYEQTLEEVTNGALFTSDNSEMVLVRDIELYSMCEHHMLPFIGKAHVAYLPKGKVLGLSKVARIVDMYARRLQIQENLSRQVAEAVEKVTGAAGVAVVIEAKHMCMMMRGVEKQNSSMITSVMLGEFRENAATRSEFLSLIK

SEQ ID NO: 13256 - protein, 301 aa, unidentified
  source 1..301: note = Pseudomonas capeferrum
  REGION 1..301: note = tr|A0A084C978|A0A084C978_9PSED GTP cyclohydrolase FolE2 OS=Pseudomonas capeferrum OX=1495066 GN=folE2 PE=3; SV = 1
MTQLKLPDIASQAQQHALPLDWVGMCGIDLPVQFEGRIAAAKVDAGVSLVDGSSRGIHMSRLYLALESLEGQPLTALVIRQLLADFLNSHEGLSSAAYLRLSFDHLLKRPALVSPLAGWKSYPVTLDARIESEMFHVELFVSVPYSSTCPCSAALARQLIQQQFQADFAEQQVDKDRVMAWLGSSQGIVATPHSQRSSAQIHVRLKSNVLELPVTELINRVEASLGTAVQTAVKRADEQAFALANGQNLMFCEDAARRLHQSLRQLKWATAFKLRVEHAESLHAHDAVATSQWQWQISYAV

SEQ ID NO: 13257 - protein, 301 aa, Pseudomonas caricapapayae
  REGION 1..301: note = tr|A0A0P9KB51|A0A0P9KB51_9PSED GTP cyclohydrolase FolE2 OS=Pseudomonas caricapapayae OX=46678 GN=folE2 PE=3; SV = 1
MNNPLPDVALTEVSSALVSLDWVGMQGVEVPVRLAEAGVRYPVHAYVDLQVDLADPSVKGIHMSRLYRLLDRYAEHQILSPDTLSALMEAMVESHVDCHSSRARLTLSFNLLCRRPALVTEGLSGWKSYPVKLDAIWHAGRLCLDVSAEITYSSTCPCSAALSRQLLEGAFTERFGRQSFVDPMQVATWLRENASFATPHSQRSVATVQVRVAEQASELGLMRLIDTVEQALGTPVQTAVKRADEQAFARLNGQNLMYVEDAARKVQQALEGRYAASSVSVRHFESLHPHDAAAQTSNYLS

SEQ ID NO: 13258 - protein, 187 aa, Pseudomonas caricapapayae
  REGION 1..187: note = tr|A0A0P9JZ55|A0A0P9JZ55_9PSED GTP cyclohydrolase 1; OS = Pseudomonas caricapapayae OX=46678 GN=folE PE=3 SV=1
MSSSLPQHYREILLGLGEDPDREGLLDTPKRASKAMQYLCHGYTQSVEEIVNGALFASDNDEMVIVQNIELYSLCEHHLLPFIGKAHVAYIPTGKVLGLSKIARIVDMFARRLQIQENLTKQIADAIQAVTGAAGVAVVIEAKHMCMMMRGVEKQNSTMNTSVMLGAFRDSSTTRMEFLQLIGRSRQ

SEQ ID NO: 13259 - protein, 191 aa, unidentified
  source 1..191: note = Pseudomonas caspiana
  REGION 1..191: note = tr|A0A502J7L1|A0A502J7L1_9PSED GTP cyclohydrolase 1; OS = Pseudomonas caspiana OX=1451454 GN=folE PE=3 SV=1
MTLSLPQNALSQSYREILIGLGENPDREGLQDTPVRAAKAMQYLCRGYEQSVEEIVNGALFASDNDEMIIVDNIELYSLCEHHMLPFIGKAHVAYIPTGKVLGLSKIARLVDMFARRLQIQENLTRQIAEAVQQVTGAAGVAVVIEAKHMCMMMRGVEKQNSTMNTSVMLGAFRESSNTRQEFLQLIGRSK

SEQ ID NO: 13260 - protein, 298 aa, unidentified
  source 1..298: note = Pseudomonas caspiana
  REGION 1..298: note = tr|A0A502JEG8|A0A502JEG8_9PSED GTP cyclohydrolase FolE2 OS=Pseudomonas caspiana OX=1451454 GN=folE2 PE=3 SV=1
MNALTLPDIAAQASRQALPLDWVGMCGIALPVLFDGQRLSAKADAGVSLDDGEARGIHMSRLYLALEMLEQENLTPALLRRVLQRFLKTHEGLSNSAYLKIHTDLLLKRPALVSPLAGWKTYPVSIEAHLKNAMFHVELKIDVPYSSTCPCSAALSRQLIQQQFVDDFANKPLQHADVLAWLGSTKGIVATPHSQRSTARLRLRVDDYLEDLPLIALINDAEAALGTAVQTAVKRADEQAFALANGQNLMFCEDAVRRLNLALKRSPGINAFHIRVVHAESLHAHDAVAESRWNWEAA

SEQ ID NO: 13261 - protein, 181 aa, Pseudomonas cedrina
  REGION 1..181: note = tr|A0A1V2K495|A0A1V2K495_PSECE GTP cyclohydrolase 1; OS = Pseudomonas cedrina subsp. cedrina OX=76762 GN=folE; PE = 3 SV=1
MTLEQNYTAILGQLGEDVSREGLLDTPKRAAKAMQYLCRGYAQTLEEVTNGALFSSDNSEMVLVKDIELYSLCEHHLLPFIGKAHVAYIPSGKVLGLSKVARIVDMYARRLQIQENLSRQIADAVLQVTGALGVAVVIEAKHMCMMMRGVEKQNSSMITSVMLGEFRENAATRSEFLSLIK

SEQ ID NO: 13262 - protein, 186 aa, Pseudomonas cedrina
  REGION 1..186: note = tr|A0A1V2KJ30|A0A1V2KJ30_PSECE GTP cyclohydrolase 1; OS = Pseudomonas cedrina subsp. cedrina OX=76762 GN=folE; PE = 3 SV=1
MTLSLPQHYREILKGLGEDPEREGLLDTPKRAAKAMQYLCHGYEQNLEEIVNGALFASDNDEMVILKDIELYSLCEHHLLPFIGKAHVAYIPTGKVLGLSKLARIVDMFARRLQIQENLTRQIADAIQDVTQAAGVAVVIEARHMCMMMRGVEKQNSTMNTSVMLGAFRESTTTRMEFLQLIGRSK

SEQ ID NO: 13263 - protein, 187 aa, unidentified
  source 1..187: note = Pseudomonas cerasi
  REGION 1..187: note = tr|A0A193SK09|A0A193SK09_9PSED GTP cyclohydrolase 1; OS = Pseudomonas cerasi OX=1583341 GN=folE1 PE=3 SV=1
MSSSLPQHYRDILLGLGEDPDREGLLDTPKRASKAMQCLCHGYTQSVEEIVNGALFASDNDEMVIVQNIELYSLCEHHLLPFIGKAHVAYIPTGKVLGLSKIARIVDMFARRLQIQENLTKQIADAIQKVTGAAGVAVVIEAQHMCMMMRGVEKQNSTMNTSVMLGAFRDSSTTRMEFLQLIGRSRQ

SEQ ID NO: 13264 - protein, 301 aa, unidentified
  source 1..301: note = Pseudomonas cerasi
  REGION 1..301: note = tr|A0A193SRG8|A0A193SRG8_9PSED GTP cyclohydrolase FolE2 OS=Pseudomonas cerasi OX=1583341 GN=folE2 PE=3 SV=1
MNKPLPDVALTEISPALVSLDWVGMQGVEVPIRLAEAGIRHPVHTHVDLQVDLADPSVKGIHMSRLYRLLDGYAEHQIVSPYTLSALLEAMVESHLDCHSSHARLTLSFNLLCRRPALITEALSGWKSYPVKLDATWHAGRLCLDSSVDITYSSTCPCSAALSRQLLEEAFAARFGRQSFVDPMQVASWLRENASFATPHSQRSVATVQVRVADQATELGLMTLIDLVEQALGTPVQTAVKRADEQAFARLNGQNLMYVEDAARKVQQALEGRYAASSVSVRHFESLHPHDAAAQTSNYLS

SEQ ID NO: 13265 - protein, 186 aa, unidentified
  source 1..186: note = Pseudomonas chengduensis
  REGION 1..186: note = tr|A0A1G6KVT6|A0A1G6KVT6_9PSED GTP cyclohydrolase 1; OS = Pseudomonas chengduensis OX=489632 GN=folE PE=3 SV=1
MSQPLSQQYREILVGLGENPEREGLLDTPKRAAKAMQYLCHGYQQSLDEIVNGALFESDNDEMVIVKDIELYSLCEHHLLPFIGKAHVAYIPTGKVLGLSKVARIVDMYARRLQIQENLTKQIADAIQRVTNAAGVAVVIEAKHMCMMMRGVEKQNSVMSSSVMLGAFRESCNTRHEFLQLIGRNN

SEQ ID NO: 13266 - protein, 296 aa, unidentified
  source 1..296: note = Pseudomonas chengduensis
  REGION 1..296: note = tr|A0A1G6I752|A0A1G6I752_9PSED GTP cyclohydrolase FolE2 OS=Pseudomonas chengduensis OX=489632 GN=folE2 PE=3; SV = 1
MNEQPLPDIAAQATHHDLPLDWVGMAGIALPIRLADAAVTASVDIGVSLDDAGARGIHMSRLYLAAQRLVHQPLNVPAVLQVLDDCLSSHQELSDSATLTLRGEVPLKRPALVSPLNGWKGYPFELRARQDGRGVNIELQVEVGYSSTCPCSAALARQLIQQRFAWDFPDQQVDYSSVLDWLGSTQGIVATPHSQRSTATLQLRLAPGCVELPVLALIDSAEHALGTPVQTAVKRADEQAFALANGQNLMFCEDAARRLHKALYQLPQVSALRLRVVHAESLHAHDAVAESSWNWS

SEQ ID NO: 13267 - protein, 185 aa, unidentified
  source 1..185: note = Pseudomonas chloritidismutans
  REGION 1..185: note = tr|V4S911|V4S911_PSECO GTP cyclohydrolase 1; OS = Pseudomonas chloritidismutans AW-1 OX=1263865 GN=folE; PE = 3 SV=1
MNDLPGHYREILSGVGENPEREGLRDTPQRAAKAMQYLCGGYNRSLEEIVNGALFASDNDEMVIVKDIELYSLCEHHMLPFIGKAHVAYIPTGRVLGLSKIARIVDMFARRLQIQENLTRQIAEAIQEVTGAAGVAVVIEAKHMCMMMRGVEKQNSVMNTSVMLGAFRSSCNTRMEFLQLIGRGQ

SEQ ID NO: 13268 - protein, 181 aa, unidentified; identical to SEQ ID NO: 13197
  source 1..181: note = Pseudomonas chloritidismutans
  REGION 1..181: note = tr|V4S489|V4S489_PSECO GTP cyclohydrolase 1; OS = Pseudomonas chloritidismutans AW-1 OX=1263865 GN=folE; PE = 3 SV=1

SEQ ID NO: 13269 - protein, 186 aa, Pseudomonas chlororaphis
  REGION 1..186: note = tr|A0A1E1FR16|A0A1E1FR16_9PSED GTP cyclohydrolase 1; OS = Pseudomonas chlororaphis subsp. aurantiaca OX=86192; GN = folE PE=3 SV=1
MTLSLPQHYREILKGLGEDPEREGLLDTPQRAAKAMQYLCHGYSQSVDEVVNGALFASDNDEMVIVADIELYSLCEHHLLPFIGKAHVAYIPTGKVLGLSKIARIVDMFARRLQIQENLTREIADAVQRVTQAAGVAVVIEAQHMCMMMRGVEKQNSTMHTSVMLGAFRESSTTRQEFLQLIGRSK

SEQ ID NO: 13270 - protein, 186 aa, Pseudomonas chlororaphis
  REGION 1..186: note = tr|A0A3G7BYU4|A0A3G7BYU4_9PSED GTP cyclohydrolase 1; OS = Pseudomonas chlororaphis subsp. piscium OX=1513890; GN = folE PE=3 SV=1
MTLSLPQHYREILKDLGEDPEREGLLDTPQRAAKAMQYLCHGYSQSVDEVVNGALFASDNDEMVIVADIELYSLCEHHLLPFIGKAHVAYIPTGKVLGLSKIARIVDMFARRLQIQENLTREIADAVQRVTQAAGVAVVVEAQHMCMMMRGVEKQNSTMHTSVMLGAFRESSTTRQEFLQLIGRSK

SEQ ID NO: 13271 - protein, 181 aa, Pseudomonas cichorii
  REGION 1..181: note = tr|A0A3M4LJH3|A0A3M4LJH3_PSECI GTP cyclohydrolase 1; OS = Pseudomonas cichorii OX=36746 GN=folE PE=3 SV=1
MTLEQNYTAILSQLGEDVSREGLLDTPKRAAKAMQYLCRGYEQTLEEVTNGALFSSDASEMVMVRNIELYSLCEHHLLPFIGKAHVAYIPNGKVLGLSKVARIVDMFARRLQIQENLSRQIAEAIQTVTGAMGVAVVIEAQHMCMMMRGVEKQNSSMITSVMLGEFRENAATRSEFLSLIK

SEQ ID NO: 13272 - protein, 315 aa, Pseudomonas cichorii
  REGION 1..315: note = tr|A0A3M4MA94|A0A3M4MA94_PSECI GTP cyclohydrolase FolE2 OS=Pseudomonas cichorii OX=36746 GN=folE2 PE=3 SV=1
MPAAVKLDNEIPPDMNSPLPDVALTETSAALIALDWVGMQGIEVPILLSEPGVQHPVHAYVDLQVDLADPGVKGIHMSRLYTLLDSFAEHQLFTPGAMAALLEAMVSSHADCHSSRARFRMSFNLLCRRAALKTRGLSGWKSYPVVLDAVWVDGKLSLDASVEVTYSSTCPCSAALSRQLLEEAFLAQFGEQSELTPAHAALWLRENGSFATPHSQRSVATVQVRIPEQASELGLMSLIDVTERALGTPVQTAVKRADEQAFARLNGQNLMYVEDAARKIQQALEGRFAASSVGVRHLESLHPHDAVAYTSNYMS

SEQ ID NO: 13273 - protein, 186 aa, Pseudomonas citronellolis
  REGION 1..186: note = tr|A0A127MYY9|A0A127MYY9_9PSED GTP cyclohydrolase 1; OS = Pseudomonas citronellolis OX=53408 GN=folE_2 PE=3 SV=1
MTDSLSANYREILLGLGENPEREGLLDTPKRAAKAMRYLCHGYELSLEEVVNGALFASDNDEMVIVRDIELYSLCEHHLLPFIGKAHVAYIPTGRVLGLSKVARIVDMFARRLQIQENLTRQIAEAVERITGAAGVAVVIEAQHMCMMMRGVEKQNSQMFTSVMLGAFRDSSNTRQEFLQLIGRSK

SEQ ID NO: 13274 - protein, 297 aa, Pseudomonas citronellolis
  REGION 1..297: note = tr|A0A4Z0IMG1|A0A4Z0IMG1_9PSED GTP cyclohydrolase FolE2 OS=Pseudomonas citronellolis OX=53408 GN=folE2 PE=3; SV = 1
MTAFLPDVASQAASDTLALDWVGMQGIALPLRLHGERLNALADAGVSLDAAAARGIHMSRLYLALARLEQAELGPQLLREVLDDFLASHAGLSRRASLRLAFDALLSRPALVSPLSGWKQYPCEVHARLDDQDLRLELRLRLAYSSTCPCSAALARQLIQQRFAEEFADRSPSHQEVHTWLGSSAGIVATPHSQRSFADLHLHLREGLDGLPLRELLDCAEAALGTAVQTAVKRADEQAFALANGQNLMFCEDAARRLHRALAQRGELEAFALSVVHAESLHAHDAVARSQWRREAP

SEQ ID NO: 13275 - protein, 181 aa, unidentified
  source 1..181: note = Pseudomonas coleopterorum
  REGION 1..181: note = tr|A0A1H5JJ59|A0A1H5JJ59_9PSED GTP cyclohydrolase 1; OS = Pseudomonas coleopterorum OX=1605838 GN=folE PE=3 SV=1
MSLEQNYTEILGQLGEDVTREGLLDTPKRAAKAMKYLCRGYEQTLDEVTNGALFSSDASEMVMVRDIELYSLCEHHLLPFIGRAHVAYIPNGKVLGLSKVARIVDMYARRLQIQENLGRQIADAVQQVTGALGVAVVIEAKHMCMMMRGVEKQNSSMITSVMLGEFRDNAATRSEFLSLIK

SEQ ID NO: 13276 - protein, 181 aa, Pseudomonas composti
  REGION 1..181: note = tr|A0A1I5SJ89|A0A1I5SJ89_9PSED GTP cyclohydrolase 1; OS = Pseudomonas composti OX=658457 GN=folE PE=3 SV=1
MSLEQHYTAILGQLGEDVSREGLLDTPKRAAKAMQYLCRGYQQTLEEVTNGALFSSDNSEMVLVKNIELYSLCEHHLLPFIGKAHVAYIPNGKVLGLSKVARIVDMFARRLQIQENLSRQIAEAVEQVTGALGVAVVIEAQHMCMMMRGVEKQNSSMVTSVMLGEFRSNPATRGEFLNLVR

SEQ ID NO: 13277 - protein, 296 aa, Pseudomonas composti
  REGION 1..296: note = tr|A0A1I5MA91|A0A1I5MA91_9PSED GTP cyclohydrolase FolE2 OS=Pseudomonas composti OX=658457 GN=folE2 PE=3 SV=1
MNEQPLPDIAAQATHHDLPLDWVGMAGIALPIRLADVAVTATVDIGVSLDDAGARGIHMSRLYLAAQRLVHQELNVPALLQVLDDCLGSHQALSDSATLTLRGEVPLKRPALVSPLHGWKTYPFELRARQDGRGVSIELQVEVGYSSTCPCSAALARQLIQQRFAWDFPDQQVDYSSVLDWLGSTQGIIATPHSQRSTATLQLRLAPGCVDLPLLTLIDSAEQALGTPLQTAVKRADEQAFALANGQNLMFCEDAARRLHRALRQLPQASAFHLKVVHAESLHAHDAVAQSHWNWS

SEQ ID NO: 13278 - protein, 187 aa, Pseudomonas congelans
  REGION 1..187: note = tr|A0A0P9RN35|A0A0P9RN35_9PSED GTP cyclohydrolase 1; OS = Pseudomonas congelans OX=200452 GN=folE PE=3 SV=1
MSSSLPQNYRDILLGLGEDPDREGLLDTPKRASKAMQYLCHGYTQSVEEIVNGALFASDNDEMVIVQNIELYSLCEHHLLPFIGKAHVAYIPTGKVLGLSKIARIVDMFARRLQIQENLTKQIADAIQKVTGAAGVAVVIEAQHMCMMMRGVEKQNSTMNTSVMLGAFRDSSTTRMEFLQLIGRSRQ

SEQ ID NO: 13279 - protein, 181 aa, Pseudomonas congelans
  REGION 1..181: note = tr|A0A0P9MIM3|A0A0P9MIM3_9PSED GTP cyclohydrolase 1; OS = Pseudomonas congelans OX=200452 GN=folE PE=3 SV=1
MTLEQNYTAILGQLGEDVSREGLLDTPKRAAKAMQYLCRGYAQTLEEVTNGALFSSDASEMVMVKDIELYSLCEHHLLPFIGKAHVAYIPQGKVLGLSKVARIVDMYARRLQIQENLSRQIAEAIQQVTGALGVAVVIEAKHMCMMMRGVEKQNSAMITSVMLGEFRENAATRSEFLSLIK

SEQ ID NO: 13280 - protein, 187 aa, unidentified
  source 1..187: note = Pseudomonas coronafaciens
  REGION 1..187: note = tr|A0A0M0V0W1|A0A0M0V0W1_9PSED GTP cyclohydrolase 1; OS = Pseudomonas coronafaciens pv. porri OX=83964 GN=folE; PE = 3 SV=1
MSSSLPQHYRDILLGLGENPDREGLLDTPKRASKAMQYLCHGYNQSVEEIVNGALFASDNDEMVIVQNIELYSLCEHHLLPFIGKAHVAYIPTGKVLGLSKIARIVDMFARRLQIQENLTKQIADAIQNVTGAAGVGVVIEAQHMCMMMRGVEKQNSTMNTSVMLGAFRESSTTRMEFLQLIGRSRQ

SEQ ID NO: 13281 - protein, 301 aa, unidentified
  source 1..301: note = Pseudomonas coronafaciens
  REGION 1..301: note = tr|A0A0Q0KF41|A0A0Q0KF41_9PSED GTP cyclohydrolase FolE2 OS=Pseudomonas coronafaciens pv. zizaniae OX=251700; GN = folE2 PE=3 SV=1
MNNPLPDVALTEVSSALISLDWVGMQGVEVPIRLAEAGIRHPVHAHVDLQVDLADPSVKGIHMSRLYRLLDRYAEHQILSPDTLAALMEAMVESHLDCHSSRARLTLSFNLLCRRPALITEGLSGWKSYPVKLDATWHAGHLCLNVSADITYSSTCPCSAALSRQLLEEAFTMRFGRQSFVDPMVVAAWLRENASHATPHSQRSVATVQVRVAEQAAELGLMSLIDAVEQALGTPVQTAVKRADEQAFARLNGQNLMYVEDAARKIQQALEGRYAASSVSVRHFESLHPHDAAAQTSNYLS

SEQ ID NO: 13282 - protein, 186 aa, Pseudomonas corrugata
  REGION 1..186: note = tr|A0A3M3EYD5|A0A3M3EYD5_9PSED GTP cyclohydrolase 1; OS = Pseudomonas corrugata OX=47879 GN=folE PE=3 SV=1
MALSLPQNYREILIGLGEDPEREGLLDTPARAAKAMQYLCHGYEQSVEQIVNGALFDSDSDEMVIVADIELYSLCEHHLLPFIGKAHVAYIPTGKVLGLSKIARLVDMFARRLQIQENLTRQIAAAVQQVTQAAGVAVVIEAQHMCMMMRGVEKQNSTMNTSVMLGAFRESSTTRQEFLQLIRRSK

SEQ ID NO: 13283 - protein, 300 aa, Pseudomonas corrugata
  REGION 1..300: note = tr|A0A3M3E6B0|A0A3M3E6B0_9PSED GTP cyclohydrolase FolE2 OS=Pseudomonas corrugata OX=47879 GN=folE2 PE=3 SV=1
MIMNAFALPDIAAQASRQALPLDWVGMCGVALPVLIEGQQLSAIADLGVSLDDVDARGIHMSRLYLALEMLENSPLSPPLLQRVLLHFLNSHEGLSQAASLTLHTELLLKRPALVSPLSGWKRYPVSIEAHLKHAVFHVELNIQIPYSSTCPCSAALARQLIQQQFVDDFANKSLEHAEVLAWLGSSKGIVATPHSQRSIASLNIRLSAGTSQLPLPRIINQAEAALGTAVQTAVKRADEQAFALANGQNLMFCEDAARRLSQALRQSPDVMALNVRVVHAESLHAHDAVAQSRWTREAA

SEQ ID NO: 13284 - protein, 298 aa, Pseudomonas costantinii
  REGION 1..298: note = tr|A0A1S2UYM0|A0A1S2UYM0_9PSED GTP cyclohydrolase FolE2 OS=Pseudomonas costantinii OX=168469 GN=folE2 PE=3; SV = 1
MNALTLPDIAAQASRQALPLDWVGMCGIALPILIDGQRLTATADAGVSLDDGEARGIHMSRLYLALEMLDQQPLTPALLRTLLERFLESHEGLSKNAYLRIHTNLLLKRQALISPLAGWKGYPVCIEARLENQMFHVELKIDVTYSSTCPCSAALARQLIQQQFLADFANTPLQHEDVLTWLGSANGIVATPHSQRSSAQLSIQLENNQVSLPLTDLIDNVEAALGTAVQTAVKRADEQAFALANGQNLMFCEDAARRLNLALKRSDAVKAFHLKVIHAESLHAHDAVAESRWTRHSA

SEQ ID NO: 13285 - protein, 186 aa, Pseudomonas costantinii
  REGION 1..186: note = tr|A0A1S2UTL0|A0A1S2UTL0_9PSED GTP cyclohydrolase 1; OS = Pseudomonas costantinii OX=168469 GN=folE PE=3 SV=1
MTLSLPQHYREILKGLGEDPEREGLLDTPKRAAKAMQYLCHGYEQNLEEIVNGALFSSDNDEMVILKDIELYSLCEHHLLPFIGKAHVAYIPTGKVLGLSKLARIVDMFARRLQIQENLTRQIADAIQQVTQAAGVAVVIEAKHMCMMMRGVEKQNSTMNTSVMLGAFRESNTTRMEFLQLIGRSK

SEQ ID NO: 13286 - protein, 296 aa, Pseudomonas cremoricolorata
  REGION 1..296: note = tr|A0A089YAG9|A0A089YAG9_9PSED GTP cyclohydrolase FolE2 OS=Pseudomonas cremoricolorata OX=157783 GN=folE2; PE = 3 SV=1
MTSLSLPDIAAQTVPHATALEWVGMCGIALPVVFEQQRVSAVADAGVSLDDAQARGIHMSRLYLALKQLESAPLDCSALRRLLDSFLASHTGLSNRASVRIAFNHLLKRSALVSPLAGWKHYPVEIKAHLSGEMFHVELFMDIAYSSTCPCSAALARQLIQESFAKRFMDESAVDPKAVLSWLGTTEGVVATPHSQRSRARLQVRLGEGADALPFTALIDAAEQALGTAVQTAVKRADEQAFALANGQNLMFCEDAARRLHQALRQEEQLSGFHIRVEHAESLHAHDAVAASQWRW

SEQ ID NO: 13287 - protein, 181 aa, Pseudomonas cremoricolorata
  REGION 1..181: note = tr|A0A089WMV2|A0A089WMV2_9PSED GTP cyclohydrolase 1; OS = Pseudomonas cremoricolorata OX=157783 GN=folE PE=3 SV=1
MSLEQNYTEILGQIGEDVSREGLRDTPKRAAKAMKYLCRGYEQTLEEVTNNALFSSDNSEMVVVRDIELYSMCEHHMLPFIGKAHVAYLPKGKVLGLSKVARIVDMFARRLQIQENLSRQIAEAIEKVTGAAGVAVVIEAKHMCMMMRGVEKQNSSMITSVMLGEFRANAATRTEFLSLIR

SEQ ID NO: 13288 - protein, 180 aa, Pseudomonas cuatrocienegasensis
  REGION 1..180: note = tr|A0A1H8ZTZ0|A0A1H8ZTZ0_9PSED GTP cyclohydrolase 1; OS = Pseudomonas cuatrocienegasensis OX=543360 GN=folE PE=3; SV = 1
MSLEQQYTAILGKLGEDVTREGLRDTPKRAAKAMQYLCQGYQQNLEEVTNGALFSSDASEMVLVRDIELYSLCEHHLLPFIGKAHVAYLPNGKVLGLSKVARIVDMYARRLQIQENLSRQIAEAVQQVTGALGVAVVVEAQHMCMMMRGVEKQNSSMVTSVMLGEFRDNAATRSEFLSLI

SEQ ID NO: 13289 - protein, 298 aa, Pseudomonas cuatrocienegasensis
  REGION 1..298: note = tr|A0A1H9N3F1|A0A1H9N3F1_9PSED GTP cyclohydrolase FolE2 OS=Pseudomonas cuatrocienegasensis OX=543360; GN = folE2 PE=3 SV=1
MNALTLPDIAAQATHHAQALTWVGMADIALPLHLAEQRIAGRADAGVSLDDGEARGIHMSRLYLALHAFEQQPVTPALLQQVLGHFLDSHLQLSNSAYLTLRGEVLLNRPALVSPLSGWKSYPLEIRARQDTRGFHVELQVSVGYSSTCPCSAALARRLIQQRFSADFADQPLDHADVLAWLGSTQGILATPHSQRSTATLQVRLDASAAELPLLTLIDDAERALGTALQTAVKRADEQAFALANGQNLMFCEDAARRLHRCLAALPLVAGFHLRVVHAESLHAHDAVAESQQHWQPS

SEQ ID NO: 13290 - protein, 187 aa, unidentified
  source 1..187: note = Pseudomonas daroniae
  REGION 1..187: note = tr|A0A4Q9QHV1|A0A4Q9QHV1_9PSED GTP cyclohydrolase 1; OS = Pseudomonas daroniae OX=2487519 GN=folE PE=3 SV=1
MDSSRNTLEQHYTAILGQLGEDVSREGLLDTPKRAAKAMQYLCNGYEKTLEEVTNGALFSSDASEMVLVKNIELYSLCEHHLLPFIGKAHVAYIPNGKVLGLSKVARIVDMYARRLQIQESLSRQIAEAVQQVTGALGVAVVIEAKHMCMMMRGVEKQNSSMVTSVMLGEFRENAATRSEFLSLVNN

SEQ ID NO: 13291 - protein, 302 aa, unidentified
  source 1..302: note = Pseudomonas daroniae
  REGION 1..302: note = tr|A0A4Q9QGU6|A0A4Q9QGU6_9PSED GTP cyclohydrolase FolE2 OS=Pseudomonas daroniae OX=2487519 GN=folE2 PE=3 SV=1
MTTSMKHRSNLPDIAAQRSDDSAATLDWVGMRCIALPVRIEEQAVSARIDAGVSLDDGQTRGIHMSRLYLALAELRREPLSPVLLRQVLERFLDSHRDLSLCAYLDLQGEWLIERPALVSPLSGYKAYPLTIRSRLDPGGFHLELGLQLGYSSTCPCSAALARQLIQQRFAEDFAERQPDFDELHAWLGSSAGIVATPHSQRSEAAILVRLKNEATALPFIDLLDRAEAALGTAVQTAVKRADEQAFALANGQNLMFCEDAARRLHGALLAMPGISAFHIQVTHAESLHAHDAVASASHGWR

SEQ ID NO: 13292 - protein, 186 aa, Pseudomonas deceptionensis
  REGION 1..186: note = tr|A0A0J6GDM4|A0A0J6GDM4_PSEDM GTP cyclohydrolase 1; OS = Pseudomonas deceptionensis OX=882211 GN=folE PE=3 SV=1
MNPSIAEHYREILVGLGENPEREGLRDTPTRAAKAMQYLCCGYAMSLKEVINGALFESQSDEMVIVRDIELYSMCEHHMLPFIGKAHVAYIPTGRVLGLSKIARVVDMFARRLQIQENLTKQIADAIQHSTDAAGVAVVIEAKHMCMMMRGVEKQNSVMTTSVMLGAFRESSATRLEFLQLIGRIG

SEQ ID NO: 13293 - protein, 186 aa, Pseudomonas deceptionensis
  REGION 1..186: note = tr|A0A0J6G670|A0A0J6G670_PSEDM GTP cyclohydrolase 1; OS = Pseudomonas deceptionensis OX=882211 GN=folE PE=3 SV=1
MSVLLPGYYRDILIGLGENPDREGLVDTPKRAAKAMQYLCQGYDQSLETIVNGALFASDSDEMVIVANIELYSLCEHHLLPFIGKAHVAYIPTGKVLGLSKIARIVDMFARRLQIQENLTREIADAIEGVTQAAGVAVVIEAKHMCMMMRGVEKQNSTMNTSVMLGAFREPSTRMEFLQLIGRSKS

SEQ ID NO: 13294 - protein, 297 aa, Pseudomonas delhiensis
  REGION 1..297: note = tr|A0A239L8K8|A0A239L8K8_9PSED GTP cyclohydrolase FolE2 OS=Pseudomonas delhiensis OX=366289 GN=folE2 PE=3; SV = 1
MTAFLPDVASQAASDTLALDWVGMQGIALPLRLHGERLGALADAGVSLDDAAARGIHMSRLYLALSRLERAELGPRLLREVLDDFLASHAGLSRRASLRLAFDALLERPALVSPLSGWKRYPCEVHAQLDEQGLRLELRLRLAYSSTCPCSAALARQLIQQRFAADFAGGEPSHRDVHTWLGSSAGIVATPHSQRSFADLRLHLREGLDSLPLRELLDCAEAALGTAVQTAVKRADEQAFALANGQNLMFCEDAARRLHRALAQRDELDAFGLTVVHAESLHAHDAVARSQWRREAP

SEQ ID NO: 13295 - protein, 186 aa, Pseudomonas delhiensis
  REGION 1..186: note = tr|A0A239DZ81|A0A239DZ81_9PSED GTP cyclohydrolase 1; OS = Pseudomonas delhiensis OX=366289 GN=folE PE=3 SV=1
MTDSLSANYREILLGLGENPDREGLLDTPKRAAKAMRYLCHGYELSLEEIVNGALFASDNDEMVIVRDIELYSLCEHHLLPFIGKAHVAYIPTGRVLGLSKVARIVDMFARRLQIQENLTRQIAEAIERITGAAGVAVVIEAQHMCMMMRGVEKQNSQMFTSVMLGAFRDSSNTRQEFLQLIGRSK

SEQ ID NO: 13296 - protein, 181 aa, unidentified
  source 1..181: note = Pseudomonas denitrificans
  REGION 1..181: note = tr|A0A5J6QVU6|A0A5J6QVU6_PSEDE GTP cyclohydrolase I FolE OS=Pseudomonas denitrificans OX=43306 GN=folE PE=4; SV = 1
MSLEQNYSAILSQLGEDVTREGLVDTPKRAAKAMQYLCRGYQQTLEEIVNGALFSSDNSEMVLVKDIELYSLCEHHLLPFIGKAHVAYIPNGKVLGLSKVARIVDMYARRLQIQENMSRQIAEAVQQVTGALGVAVVIEAKHMCMMMRGVEKQNSSMVTSVMLGEFRENAATRSEFLSLIR

SEQ ID NO: 13297 - protein, 186 aa, unidentified
  source 1..186: note = Pseudomonas denitrificans
  REGION 1..186: note = tr|A0A5J6R431|A0A5J6R431_PSEDE GTP cyclohydrolase I FolE OS=Pseudomonas denitrificans OX=43306 GN=folE PE=4; SV = 1
MIEDLSHHYREILQGIGEDPTREGLLDTPKRAAKAMQYLCHGYGQTLDEIVNGALFASDNDEMVIVKDIELYSLCEHHLLPFIGKAHVAYIPTGKVLGLSKVARIVDMFARRLQIQESLTRQIAEAVQQVTSAAGVAVVIEAQHMCMMMRGVEKQNSVMNTSVMLGAFRASTNTRQEFLQLIGRSK

SEQ ID NO: 13298 - protein, 295 aa, unidentified
  source 1..295: note = Pseudomonas donghuensis
  REGION 1..295: note = tr|A0A2M9VSP8|A0A2M9VSP8_9PSED GTP cyclohydrolase FolE2 OS=Pseudomonas donghuensis OX=1163398 GN=folE2 PE=3; SV = 1
MSAFTLPDIAAQATNSQLPLDWVGMCGIALPLQINGQILRASADAGVSLDDGASRGIHMSRLYLALEALEHQALSPVLLNAVLECFLDSHIGLSASAFLTLRFELMLKRPALISPLAGWKAYPVTLNAQLKDGVFHVELFVDVEYSSTCPCSAALARQLIQQQFLTDFGNRTLSHEAVLSWLGSAQGIVATPHSQRSVAKLQARLRQGINELPIEALIDHAEKALGTAVQTAVKRADEQAFALANGQNLMFCEDAARRLHVALKTLPWLGGFNLRVEHAESLHAHDAVAHSQWHW

SEQ ID NO: 13299 - protein, 186 aa, unidentified
  source 1..186: note = Pseudomonas donghuensis
  REGION 1..186: note = tr|A0A2M9VR01|A0A2M9VR01_9PSED GTP cyclohydrolase 1; OS = Pseudomonas donghuensis OX=1163398 GN=folE PE=3 SV=1
MESAPVTLEQNYTAILGQLGEDISREGLLDTPKRAAKAMQYLCRGYEQTLEEVTNGALFSSDNSEMVLVKDIELYSLCEHHMLPFIGKAHVAYIPDGKVLGLSKVARIVDMYARRLQIQENLSRQIAEAIQKVTGALGVAVVIEAKHMCMMMRGVEKQNSTMITSVMLGEFRENAATRSEFLSLIK

SEQ ID NO: 13300 - protein, 182 aa, unidentified
  source 1..182: note = Pseudomonas dryadis
  REGION 1..182: note = tr|A0A4Q9QT12|A0A4Q9QT12_9PSED GTP cyclohydrolase 1; OS = Pseudomonas dryadis OX=2487520 GN=folE PE=3 SV=1
MSLEQHYTAILGQLGEDVSREGLLDTPKRAAKAMQYLCRGYQQTLEEVTNGALFSSDASEMVLVKNIELYSLCEHHLLPFIGKAHVAYIPSGKVLGLSKVARIVDMYARRLQIQENLSRQIAEAVQRVTGAMGVAVVIEAQHMCMMMRGVEKQNSSMVTSVMLGEFRENAATRSEFLSLINP

SEQ ID NO: 13301 - protein, 186 aa, unidentified
  source 1..186: note = Pseudomonas dryadis
  REGION 1..186: note = tr|A0A4Q9QXN2|A0A4Q9QXN2_9PSED GTP cyclohydrolase 1; OS = Pseudomonas dryadis OX=2487520 GN=folE PE=3 SV=1
MNPSLPDHYRDILLGLGENPDREGLLDTPKRAAKAMQYLCNGYEKSLEEVVNGALFSSDSDEMVIVKDVELYSLCEHHLLPFIGKAHVAYIPTGKVLGLSKIARIVDMYARRLQIQENLTRQIADAIAQVTQAAGVAVVIEAQHMCMMMRGVEKQNSVMNTSVMLGAFRESYNTRHEFLQLIGRSK

SEQ ID NO: 13302 - protein, 182 aa, Pseudomonas duriflava
  REGION 1..182: note = tr|A0A562Q7R0|A0A562Q7R0_9PSED GTP cyclohydrolase 1; OS = Pseudomonas duriflava OX=459528 GN=folE PE=3 SV=1
MSLEQHYSAILSQLGEDVSREGLLDTPKRAAKAMQYLCRGYNQTLEEVVGDALFTSDNSEMVLVKNIELYSLCEHHMLPFIGKAHVAYMPSGKVLGLSKVARIVDMYARRLQIQENMTREIAEAIQKVTQAAGVAVVIEAQHMCMMMRGVEKQNSSMVTSVMLGQFRSNDATRAEFMGLINR

SEQ ID NO: 13303 - protein, 181 aa, unidentified
  source 1..181: note = Pseudomonas endophytica
  REGION 1..181: note = tr|A0A0Q1CCH9|A0A0Q1CCH9_9PSED GTP cyclohydrolase 1; OS = Pseudomonas endophytica OX=1563157 GN=folE PE=3 SV=1
MSLEQNYTAILGQLGEDVSREGLLDTPKRAAKAMQYLCRGYEQTLEEVTNGALFSSDNSEMVLVKDIELYSLCEHHLLPFIGKAHVAYIPSGKVLGLSKVARIVDMYARRLQIQENLSRQIADAVMQVTGALGVAVVIEAKHMCMMMRGVEKQNSSMITSVMLGEFRENAATRSEFLSLIK

SEQ ID NO: 13304 - protein, 187 aa, unidentified
  source 1..187: note = Pseudomonas endophytica
  REGION 1..187: note = tr|A0A0N8VSE6|A0A0N8VSE6_9PSED GTP cyclohydrolase 1; OS = Pseudomonas endophytica OX=1563157 GN=folE PE=3 SV=1
MSTSLPEHYREILVGLGENPEREGLLDTPKRAAKAMQYLCHGYNQSVEEIVNGALFASDSDEMVIVADIELYSLCEHHLLPFVGKAHVAYIPTGKVLGLSKVARIVDMFARRLQIQENLTREIADAIQNITQAAGVAVVIEAKHMCMMMRGVEKQNSTMNTSVMLGAFRESSSTRMEFLQLIGRSKS

SEQ ID NO: 13305 - protein, 293 aa, unidentified
  source 1..293: note = Pseudomonas entomophila
  REGION 1..293: note = sp|Q1I2L2|GCH4_PSEE4 GTP cyclohydrolase FolE2; OS = Pseudomonas entomophila (strain L48) OX=384676 GN=folE2; PE = 3 SV=1
MTSLTLPDIAAQSAQQPLPLDWVGMCGIAMPVQFEGRQLSALADAGVSLDDGASRGIHMSRLYLALEALERDTLTPRLIHQVLEQFLFSHEGLSASAHLRLQFDHLLKRPALVSPLAGWKHYPVAIDARLKAEMFHVELSVEIPYSSTCPCSAALARQLIQERFDQDFTGQAVDRQGVRAWLGSSSGIVATPHSQRSMAKLQVRLVGDELPVTVLIDKAEAALGTAVQTAVKRADEQAFALANGQNLMFCEDAARRLNLALRQLDWVAGFTVRVEHAESLHAHDAVAVSRFQR

SEQ ID NO: 13306 - protein, 202 aa, unidentified
  source 1..202: note = Pseudomonas entomophila
  REGION 1..202: note = tr|Q1IAJ6|Q1IAJ6_PSEE4 GTP cyclohydrolase 1; OS = Pseudomonas entomophila (strain L48) OX=384676 GN=folE; PE = 3 SV=1
MQNDKERSHAKARQGVIDILEYLGEDTNRQGLHETPERFLKSMVAQTVGYSQDPYRVLEKFFEEVAGYKNLIMLQNIHFESMCEHHLAPIVGNATVGYIPNGRVVGLSKLARVVDIFAKRLQIQERLTSEIGLALDEVLRPKGVGVIIRAKHNCLCTRGAYKPNANMTTTYFSGVLDSDAIKRGEFYTAAALPWGNGVHHSQ

SEQ ID NO: 13307 - protein, 296 aa, Pseudomonas extremaustralis
  REGION 1..296: note = tr|A0A5C5QDF1|A0A5C5QDF1_9PSED GTP cyclohydrolase FolE2 OS=Pseudomonas extremaustralis OX=359110 GN=folE2; PE = 3 SV=1
MNALTLPDIAAQASRQALPLDWVGMCGIALPILIDDQRLTATADAGVSLDDGSARGIHMSRLYLALEMLEQQPLTPALLRNVLQRFLDSHEDLSKNAYLRIHTDLLLKRPALVSPLTGWKAYPVSIEARVENQMFHVELKIDVAYSSTCPCSAALARQLIQQQFLQDFGNTPLRHEDVLTWLGSANGIVATPHSQRSSAQLHVHLQGDHLALVELINDAEAALGTAVQTAVKRADEQAFALANGQNLMFCEDAARRLNLALKRSDAVKAFHLKVIHAESLHAHDAVAESRWTRHSV

SEQ ID NO: 13308 - protein, 181 aa, Pseudomonas extremaustralis
  REGION 1..181: note = tr|A0A5C5Q7L8|A0A5C5Q7L8_9PSED GTP cyclohydrolase 1; OS = Pseudomonas extremaustralis OX=359110 GN=folE PE=3 SV=1
MTLEQNYTAILGQLGEDVTREGLLDTPKRAAKAMQYLCRGYEQTLEEVTNGALFSSDNSEMVLVKDIELYSLCEHHLLPFIGKAHVAYIPSGKVLGLSKVARIVDMYARRLQIQENLSRQIADAVMQVTGALGVAVVIEAKHMCMMMRGVEKQNSSMITSVMLGEFRENAATRSEFLSLIK

SEQ ID NO: 13309 - protein, 298 aa, Pseudomonas extremorientalis
  REGION 1..298: note = tr|A0A1H0SZJ3|A0A1H0SZJ3_9PSED GTP cyclohydrolase FolE2 OS=Pseudomonas extremorientalis OX=169669 GN=folE2; PE = 3 SV=1
MNALTLPDIAAQASRQALPLDWVGMCGIALPILIDGERLAATADAGVSLDDGAARGIHMSRLYLALEMLDQQPLTPARLRNVLQRFLDSHEGLSNNAYLRIHTDLLLKRSALVSPLAGWKGYPVSIQARLENQMFHVELKIDVTYSSTCPCSAALARQLIQQQFLEDFGNTPLQHEDVLTWLGSANGIVATPHSQRSSAQLLIELDGDQPSLPITELIDNVEAALGTAVQTAVKRADEQAFALANGQNLMFCEDAARRLNLALKRSDAVNAFHLKVIHAESLHAHDAVAESRWTRNPA

SEQ ID NO: 13310 - protein, 186 aa, Pseudomonas extremorientalis
  REGION 1..186: note = tr|A0A1H0QLV6|A0A1H0QLV6_9PSED GTP cyclohydrolase 1; OS = Pseudomonas extremorientalis OX=169669 GN=folE PE=3 SV=1
MTLSLPHHYREILKGLGEDPEREGLLDTPKRAAKAMQYLCHGYEQNLEEIVNGALFASDNDEMVILKDIELYSLCEHHLLPFIGKAHVAYIPTGKVLGLSKLARIVDMFARRLQIQENLTRQIADAIQEVTQAAGVAVVIEAKHMCMMMRGVEKQNSTMNTSVMLGAFRESNTTRMEFLQLIGRSK

SEQ ID NO: 13311 - protein, 181 aa, Pseudomonas ficuserectae
  REGION 1..181: note = tr|A0A0P9RFF1|A0A0P9RFF1_9PSED GTP cyclohydrolase 1 (Fragment) OS=Pseudomonas ficuserectae OX=53410; GN = ALO69_04710 PE=3 SV=1
MQRCRAPALLRKLLCAPSATGLPSHPSKPTRKHTPVTLEQNYTAILGQLGEDVSREGLLDTPKRAAKAMQYLCRGYAQTLEEVTNGALFSSDASEMVMVKDIELYSLCEHHLLPFIGKAHVAYIPNGKVLGLSKVARIVDMYARRLQIQENLSRQIAEAIQQVTGALGVAVVIEAKHMCMM

SEQ ID NO: 13312 - protein, 301 aa, Pseudomonas ficuserectae
  REGION 1..301: note = tr|A0A3M5C2Y3|A0A3M5C2Y3_9PSED GTP cyclohydrolase FolE2 OS=Pseudomonas ficuserectae OX=53410 GN=folE2 PE=3; SV = 1
MNNPLPDVALTEVSSALVSLDWVGMQGVEVPVRLAEAGVRYPVHAHVDLQVDLADPSVKGIHMSRLYRLLDRYAEHQILSPDTLGALMEAMVESHLDCHSSRARLTLSFNLLCRRPALITEGLSGWKSYPVKLDATWHAGRLCLDVSADITYSSTCPCSAALSRQLLEGAFTARFGRQSFVDPMQVATWLRENASFATPHSQRSVATVQVRVAEQATELGLMTLIDAVEQALGTPVQTAVKRADEQAFARLNGQNLMYVEDAARKVQQALEGRYVASSVSVRHFESLHPHDAAAQTSNYLS

SEQ ID NO: 13313 - protein, 298 aa, Pseudomonas flavescens
  REGION 1..298: note = tr|A0A1G8QKY4|A0A1G8QKY4_9PSED GTP cyclohydrolase FolE2 OS=Pseudomonas flavescens OX=29435 GN=folE2 PE=3 SV=1
MNHQTHLPDIAAQRSAGPAATLDWVGMRGIALPVRIAEQTLNARIDAGVSLDDGHTRGIHMSRLYLALAELQREPLSPASLRQVLHGFLDSHQGLSLCAYLDLRGEWLIERPALVSPLSGYKAYPLTIRAHLDPGGFHLQLGLQLGYSSTCPCSAALARQLIQQRFSDDFAACPPDFEQVLAWLGSSSGIVATPHSQRSEAKIRIRLPGDASTLPLIDLLDRAESALGTAVQTAVKRADEQAFALANGQNLMFCEDAARRLHEAVLAMPGVSGLHIQVTHAESLHAHDAVACASHNWR

SEQ ID NO: 13314 - protein, 187 aa, Pseudomonas flavescens
  REGION 1..187: note = tr|A0A1G7ZAD4|A0A1G7ZAD4_9PSED GTP cyclohydrolase 1; OS = Pseudomonas flavescens OX=29435 GN=folE PE=3 SV=1
MDSSRNTLEQHYTAILGQLGEDVSREGLLDTPKRAAKAMQYLCNGYAKTLEEVTNGALFSSEASEMVVVRNIELYSLCEHHLLPFIGKAHVAYIPNGKVLGLSKVARIVDMYARRLQIQESLSRQIAEAVQQVTGALGVAVVIEAKHMCMMMRGVEKQNSSMVTSVMLGEFRENAATRSEFLSLVNN

SEQ ID NO: 13315 - protein, 181 aa, unidentified
  source 1..181: note = Pseudomonas flexibilis
  REGION 1..181: note = tr|A0A0B2D6W3|A0A0B2D6W3_9PSED GTP cyclohydrolase 1; OS = Pseudomonas flexibilis OX=706570 GN=folE PE=3 SV=1
MSLEQHYSSILEQLGEDVAREGLRDTPKRAAKAMQFLCRGYEQTLEDVTNGALFSSDNSEMVLVKNIELYSLCEHHILPFIGKAHVAYMPNGKVLGLSKVARIVDMYARRLQIQENLTRQIAEAIEQVTDAAGVAVVIEAQHMCMMMRGVEKQNSSMVTSVMLGQFRSNAATRSEFLSLIR

SEQ ID NO: 13316 - protein, 301 aa, unidentified
  source 1..301: note = Pseudomonas floridensis
  REGION 1..301: note = tr|A0A1X0N324|A0A1X0N324_9PSED GTP cyclohydrolase FolE2 OS=Pseudomonas floridensis OX=1958950 GN=folE2 PE=3; SV = 1
MNSSLPDVALTEASSALIALDWVGMRAIEVPIRLSEEGVSHPVHAYVDLHVDLADPSVKGIHMSRLYRLLDRFAEDRVLNVASLSDLLEAMVESHASCRSTRARIKLDFNLLCRRPALVTEGLSGWTSYPITLEGVWEAGRLSLDLAADITYSSTCPCSAALSRQALEQAFIARFDRQTFVDTMQVATWLRENGSLATPHSQRSVATVQVRVPEHATDLGLMALIDTTERALGTPVQTAVKRADEQAFARLNGQNLMYVEDAARKVQQALESTYAASSVSVRHFESLHPHDAAAQTSNYLT

SEQ ID NO: 13317 - protein, 119 aa, unidentified
  source 1..119: note = Pseudomonas floridensis
  REGION 1..119: note = tr|A0A1X0MLQ2|A0A1X0MLQ2_9PSED GTP cyclohydrolase 1 (Fragment) OS=Pseudomonas floridensis OX=1958950; GN = BZK31_28400 PE=3 SV=1
MSLSLPQHYRDILVGLGEDPDREGLLDTPKRAAKAMQYLCHGYTQSVEEIVNGALFASDNDEMVIVQDIELYSLCEHHLLPFIGKAHVAYIPTGKVLGLSKIARIVDMFARRLQIQENL

SEQ ID NO: 13318 - protein, 297 aa, Pseudomonas fluorescens
  REGION 1..297: note = sp|Q4K3E8|GCH4_PSEF5 GTP cyclohydrolase FolE2; OS = Pseudomonas fluorescens (strain ATCC BAA-477 / NRRL B-23932 / Pf-5) OX=220664 GN=folE2 PE=3 SV=1
MNALTLPDIAAQASRQTLPLEWVGMCGIALPVVINNQPSAAKADAGVSLDDGEARGIHMSRLYLALEMLEQENLTPALLRRILQRFLDSHEGLAHSAYLRIQLDLLLKRPALVSPLAGWKSYPLSIEARLKNAMFHVELKIDVPYSSTCPCSAALARQLIQQQFIEDFANRPLQHADVLAWLGSPQGVVATPHSQRSNAALHLRLDDFIDELPLIALINDAENALGTAVQTAVKRADEQAFALANGQNLMFCEDAARRLNLALRRSPGINAFQLRVVHAESLHAHDAVAESRWNWEA

SEQ ID NO: 13319 - protein, 252 aa, Pseudomonas fluorescens
  REGION 1..252: note = tr|A0A109L392|A0A109L392_PSEFL Nif3-like dinuclear metal center hexameric protein OS=Pseudomonas fluorescens; OX = 294 GN=C7A09_23380 PE=4 SV=1
MAVPLTTLVEEADRYLGSAKIADYCPNGLQVEGRPQVMRIVSGVTASQALLDAAVEAKADLVLVHHGYFWKGENPCITGMKQRRLKTLLKHDISLLAYHLPLDLHADVGNNVQLARHLDITVEGPLDPGNPKIVGLVGSLAEPLSPRDFARRVQDVMGREPLLIEGSEMIRRVGWCTGGGQGYIDQAIAAGVDLYLSGEASEQTFHSARENDISFIAAGHHATERYGVQALGDYLARRFALEHLFIDCPNPI

SEQ ID NO: 13320 - protein, 187 aa, unidentified
  source 1..187: note = Pseudomonas formosensis
  REGION 1..187: note = tr|A0A1I5ZKA0|A0A1I5ZKA0_9PSED GTP cyclohydrolase 1; OS = Pseudomonas formosensis OX=1002526 GN=folE PE=3 SV=1
MSLEKLTSNYHDILTNLGENPEREGLKGTPQRAAKAMQFLCRGYQQSLEEIVNGALFESSSDEMVIVKNIELYSLCEHHMLPFIGKAHVAYLPAGKVIGLSKVARIVDMFARRLQIQESLTRQIAEAVQTVTDARGVAVVIEARHMCMMMRGVEKQNSSMMTSVMLGAFRESFNTRQEFLQLIGRDN

SEQ ID NO: 13321 - protein, 186 aa, unidentified
  source 1..186: note = Pseudomonas formosensis
  REGION 1..186: note = tr|A0A1I6C886|A0A1I6C886_9PSED GTP cyclohydrolase 1; OS = Pseudomonas formosensis OX=1002526 GN=folE PE=3 SV=1
MSTENIALQYEAILRGIGEDPQRGGLAETPLRAAKAMQFLCKGYEQSLEEIVNNALFDAKGDEMVVVKDIELYSLCEHHMLPFVGKAHVAYLPKGKVIGLSKVARIVDMFARRLQIQENLTRQIAEALQEVTQAEGVAVVIEAKHMCMMMRGVEKQNSTMFTSVMLGAFRASGNTRQEFLQLIGRG

SEQ ID NO: 13322 - protein, 297 aa, Pseudomonas fragi
  REGION 1..297: note = tr|A0A0X8F0N1|A0A0X8F0N1_PSEFR GTP cyclohydrolase FolE2 OS=Pseudomonas fragi OX=296 GN=folE2 PE=3 SV=1
MNALTLPDIASQNARQSLPLEWVGMCGIALPVLINAQRHTATADAGVSLDDGEARGIHMSRLYLALEVLESQELNPLLLKIILQRFLDSHDDLSICAYLRIHTQLLLKRPALVSPLSGWKSYPVSIDASLKNGMFHVELKIEVTYSSTCPCSAALARQLIQQQFVSDFANQPLHHADVLTWLGSSQGIVATPHSQRSTACLQLNLSSELQSLPIEMIIDEAERALGTAVQTAVKRADEQAFALANGQNLMFCEDAARRLNVALKTAPGVKGFMLKVVHAESLHSHDAVAESRWNWRV

SEQ ID NO: 13323 - protein, 297 aa, Pseudomonas fragi
  REGION 1..297: note = tr|A0A267B212|A0A267B212_PSEFR GTP cyclohydrolase FolE2 OS=Pseudomonas fragi OX=296 GN=folE2 PE=3 SV=1
MNALTLPDVAAQSSQQAIALEWVGMCGIASPVLINGQRLSAKIDAGVNLVDATARGIHMSRLYLALDQLETENLTPALLRQLLQCFLDSHEGLSNKAYVRIHSDVLLKRSALVSPLAGWKSYPTSIEASLKNGMFHVELKILVSYSSTCPCSAALARQLIQRQFIDDFANTSLQHADVLAWLGSSKGIVATPHSQRSAAHLTIRLGHQFPQLPLETIINNAEGALGTAVQTAVKRADEQAFALANGQNLMFCEDAARRLNTVLQKTSGVEAFKLKVVHAESLHSHDAVAESFWNWEA

SEQ ID NO: 13324 - protein, 191 aa, Pseudomonas frederiksbergensis
  REGION 1..191: note = tr|A0A423KLG1|A0A423KLG1_9PSED GTP cyclohydrolase 1; OS = Pseudomonas frederiksbergensis OX=104087 GN=folE PE=3; SV = 1
MPLSLPQNALSQSYREILIGLGENPDREGLQDTPMRAAKAMQYLCHGYEQSVEEIVNGALFSSDTDEMIIVADIELYSLCEHHLLPFIGKAHVAYIPTGKVLGLSKIARLVDMFARRLQIQENLTRQIADAVQQVTDAAGVAVVIEAKHMCMMMRGVEKQNSTMNTSVMLGAFRESSNTRQEFLQLIGRSK

SEQ ID NO: 13325 - protein, 191 aa, Pseudomonas frederiksbergensis
  REGION 1..191: note = tr|A0A1H4UVP6|A0A1H4UVP6_9PSED GTP cyclohydrolase 1; OS = Pseudomonas frederiksbergensis OX=104087 GN=folE PE=3; SV = 1
MTFSLPQNALSQSYREILIGLGENPDREGLQDTPVRAAKAMQYLCRGYEQSVEEIVNGALFASDNDEMIIVDNIELYSLCEHHMLPFIGKAHVAYIPTGKVLGLSKIARLVDMFARRLQIQENLTRQIAEAVQQVTGAAGVAVVIEAKHMCMMMRGVEKQNSTMNTSVMLGAFRESSNTRQEFLQLIGRSK

SEQ ID NO: 13326 - protein, 296 aa, Pseudomonas fulva
  REGION 1..296: note = tr|F6ADE6|F6ADE6_PSEF1 GTP cyclohydrolase FolE2; OS = Pseudomonas fulva (strain 12-X) OX=743720 GN=folE2 PE=3; SV = 1
MNSQPLPDIAAQRSAHANVPLDRVGMGGIALPVLLGEQPINAQVDAGVSLDDGQSRGIHMSRLYLALAALQGEPLSPALLRYVLENFLVSHYGLSHCAYLELCGDWLLSRPALVSPLAGYKAYPLTINARLDPAGFHLELGLRVTYSSTCPCSAALARQLIQQRFAADFADRPLDFDALHAWLGSTGIVATPHSQRSDAHIRVRLPDEANALPFLALLDGAEAALGTAVQSAVKRADEQAFALANGQNLMFCEDAARRLCQALLKMPGIDAFHIQVTHAESLHAHDAVASASHGWC

SEQ ID NO: 13327 - protein, 187 aa, Pseudomonas fulva
  REGION 1..187: note = tr|F6A9V5|F6A9V5_PSEF1 GTP cyclohydrolase 1; OS = Pseudomonas fulva (strain 12-X) OX=743720 GN=folE PE=3; SV = 1
MDSSRNTLEQHYTAILGQLGEDVSREGLLDTPKRAAKAMQYLCNGYQKTLEEVTNGALFSSDASEMVVVKDIELYSLCEHHLLPFIGKAHVAYIPNGKVLGLSKVARIVDMYARRLQIQESLSRQIAEAVQQVTGALGVAVVIEAKHMCMMMRGVEKQNSSMVTSVMLGEFRENAATRSEFLSLVSG

SEQ ID NO: 13328 - protein, 186 aa, unidentified
  source 1..186: note = Pseudomonas furukawaii
  REGION 1..186: note = tr|L8MP31|L8MP31_PSEFK GTP cyclohydrolase 1; OS = Pseudomonas furukawaii OX=1149133 GN=folE PE=3 SV=1
MNEDLSPHYREILLGLGEDPQREGLRDTPRRAAKAMRYLCHGYEQSLEEIVNGALFSSDNDEMVTVKDIELYSLCEHHLLPFIGKAHVAYIPTGKVLGLSKVARIVDMYARRLQIQENLTRQIAEAVQRVTGAAGVAVVIEAKHMCMMMRGVEKQNSVMSTSVMLGAFRQSQSTRHEFLKLIGRSN

SEQ ID NO: 13329 - protein, 297 aa, unidentified
  source 1..297: note = Pseudomonas furukawaii
  REGION 1..297: note = tr|L8MTQ8|L8MTQ8_PSEFK GTP cyclohydrolase FolE2; OS = Pseudomonas furukawaii OX=1149133 GN=folE2 PE=3 SV=1
MNAISLPDIAVQTQSGSLPLDWVGMCGIALPVRLDGQRIRVSADAGVSLDDGQARGIHMSRLYLALEMLEEEELSGDLMRRLLVRFLDSHRALSSRASLTLRGEALLGRAALVSPLKGWKAYPFEVHASLEGERFHVELRLELDYSSTCPCSAALARQLIQQRFDDDFRDRPLDHERILAWLGSQQGIVATPHSQRSRAHLRVRLEQVGTIPLRSLADLAEQALGTPVQTAVKRVDEQAFALANGQNLMFCEDAARRLAGALRQRSDVHGFGVRVVHAESLHAHDAVAEYRWNYSAE

SEQ ID NO: 13330 - protein, 181 aa, Pseudomonas fuscovaginae
  REGION 1..181: note = tr|A0A0N0E2M3|A0A0N0E2M3_9PSED GTP cyclohydrolase 1; OS = Pseudomonas fuscovaginae OX=50340 GN=folE PE=3 SV=1
MSLEQNYTAILGQLGEDVSREGLLDTPKRAAKAMQYLCRGYQQTLEEVTNGALFSSDNSEMVLVKDIELYSLCEHHLLPFIGKAHVAYIPSGKVLGLSKVARIVDMYARRLQIQENLSRQIADAVQQVTGALGVAVVIEAKHMCMMMRGVEKQNSSMITSVMLGEFRENAATRSEFLALIK

SEQ ID NO: 13331 - protein, 186 aa, Pseudomonas fuscovaginae
  REGION 1..186: note = tr|A0A1H6MS44|A0A1H6MS44_9PSED GTP cyclohydrolase 1; OS = Pseudomonas fuscovaginae OX=50340 GN=folE PE=3 SV=1
MSASLPEHYREILQGLGEDPDREGLLDTPKRAAKAMQYLCHGYTESIESVVNGALFASDNDEMVIVKDIELYSLCEHHLLPFIGKAHVAYIPTGKVLGLSKVARIVDMFARRLQIQENLTREIAEAIQQVTHAAGVAVVIEAQHMCMMMRGVEKQNSTMNTSVMLGAFRDSNTTRMEFLQLIGRSK

SEQ ID NO: 13332 - protein, 187 aa, unidentified
  source 1..187: note = Pseudomonas gallaeciensis
  REGION 1..187: note = tr|A0A395R3G2|A0A395R3G2_9PSED GTP cyclohydrolase 1; OS = Pseudomonas gallaeciensis OX=857227 GN=folE PE=3 SV=1
MSLENLTNNYREILTNLGEQPQRDGLKGTPERAAKAMQFLCRGYTQSLDEIVNGALFDSDNDEMVIVKDIELYSLCEHHMLPFIGKAHVAYIPTGKVIGLSKVARIVDMFARRLQIQENLTRQIAEAIQQMTNAAGVAVVIEAKHMCMMMRGVEKQNSSMHSSVMLGAFRESVNTRQEFLQLISRSN

SEQ ID NO: 13333 - protein, 301 aa, unidentified
  source 1..301: note = Pseudomonas gallaeciensis
  REGION 1..301: note = tr|A0A395R2G3|A0A395R2G3_9PSED GTP cyclohydrolase FolE2 OS=Pseudomonas gallaeciensis OX=857227 GN=folE2 PE=3; SV = 1
MNAVLPDVSRTEVSSRLLPLDWVGMQGIDLPVVLDESGERQTVHARADVHVDLPQPQVKGIHMSRLYRLLDSLGEGAPLAPGRLRAVLQEMVDSHADCGSQSARLALQFDFLTRRPALVTEGLAGWKSYPVRLQASLSRGVFQLNLRVTVGYSSTCPCSAALARQLVQQAFLQTFAGQTLSAAQVASWLETHATLATPHSQRSEAEVDVTLEEAASGLGLLSLVDEIEQALGTPVQTAVKRADEQAFAALNGQNLMFVEDAARRIQSAPGLAGLQPQVFVRHIESLHPHDAVAWASGPSSL

SEQ ID NO: 13334 - protein, 203 aa, unidentified; identical to SEQ ID NO: 5274
  source 1..203: note = [Pseudomonas] geniculata
  REGION 1..203: note = tr|A0A0L8AFX8|A0A0L8AFX8_9GAMM GTP cyclohydrolase 1; OS = [Pseudomonas] geniculata N1 OX=1167641 GN=folE PE=3 SV=1

SEQ ID NO: 13335 - protein, 181 aa, Pseudomonas gessardii
  REGION 1..181: note = tr|A0A1V2J057|A0A1V2J057_9PSED GTP cyclohydrolase 1; OS = Pseudomonas gessardii OX=78544 GN=folE PE=3 SV=1
MSLEQNYTEILGQIGEDVSREGLLDTPKRAAKAMQYLCRGYEQTLEEVTNGALFSSDSSEMVLVKDIELYSLCEHHLLPFIGKAHVAYIPSGKVLGLSKVARIVDMYARRLQIQENLSRQIADAVQQVTGALGVAVVIEAKHMCMMMRGVEKQNSSMITSVMLGEFRENAATRSEFLSLIK

SEQ ID NO: 13336 - protein, 185 aa, Pseudomonas gessardii
  REGION 1..185: note = tr|A0A1V2JQY9|A0A1V2JQY9_9PSED GTP cyclohydrolase 1; OS = Pseudomonas gessardii OX=78544 GN=folE PE=3 SV=1
MNEEMTKNYREILQHVGEDPQREGLLKTPERAAKAMRYLCHGYRQTLEEIVNGALFESDNDEMVIVREIELYSLCEHHLLPFIGKAHVAYIPTGKVLGLSKVARIIDMFARRLQIQENLTRQIADAIAQVTNAAGVAVVIEAKHMCMMMRGVEKQNSVMSTSVMLGAFRESYNTRQEFLQLIRSR

SEQ ID NO: 13337 - protein, 186 aa, unidentified
  source 1..186: note = Pseudomonas gingeri
  REGION 1..186: note = tr|A0A2K1FG82|A0A2K1FG82_9PSED GTP cyclohydrolase 1; OS = Pseudomonas gingeri NCPPB 3146 = LMG 5327 OX=707248; GN = folE PE=3 SV=1
MSATLPEHYREILLGLGEDPDREGLLDTPKRAAKAMQYLCHGYAEDLAGVVNGALFASDNDEMVIVKDIELYSLCEHHLLPFIGKAHVAYIPTGKVLGLSKIARIVDMFARRLQIQENLTREIADAIQQVTSAAGVAVVIEAQHMCMMMRGVEKQNSTMNTSVMLGAFRDSNTTRMEFLQLIGRSK

SEQ ID NO: 13338 - protein, 181 aa, unidentified; identical to SEQ ID NO: 13228
  source 1..181: note = Pseudomonas gingeri
  REGION 1..181: note = tr|A0A2K1FJJ8|A0A2K1FJJ8_9PSED GTP cyclohydrolase 1; OS = Pseudomonas gingeri NCPPB 3146 = LMG 5327 OX=707248; GN = folE PE=3 SV=1

SEQ ID NO: 13339 - protein, 181 aa, Pseudomonas graminis
  REGION 1..181: note = tr|A0A1C2DY65|A0A1C2DY65_9PSED GTP cyclohydrolase 1; OS = Pseudomonas graminis OX=158627 GN=folE PE=3 SV=1
MTLEQNYTAILGQLGEDVSREGLRDTPKRAAKAMQYLCRGYEQTLEEVTNGALFSSDNSEMVVVKDIELYSLCEHHLLPFIGKAHVAYIPSGKVLGLSKVARIVDMYARRLQIQENLSRQIAEAIQQVTGALGVAVVIEAKHMCMMMRGVEKQNSSMITSVMLGEFRENAATRTEFLSLIK

SEQ ID NO: 13340 - protein, 186 aa, Pseudomonas graminis
  REGION 1..186: note = tr|A0A1C2D8F4|A0A1C2D8F4_9PSED GTP cyclohydrolase 1; OS = Pseudomonas graminis OX=158627 GN=folE PE=3 SV=1
MTLSLPQHYREILVGLGEDPEREGLLDTPKRAAKAMQYLCHGYEQTLERIVNGALFASASDEMVIVKDIELYSLCEHHLLPFIGKAHVAYIPTGKVLGLSKIARIVDMFARRLQIQENLTRQIADAIQDVTKAAGVAVVIEAQHMCMMMRGVEKQNSTMNTSVMLGAFRESTTTRMEFLQLIGRSK

SEQ ID NO: 13341 - protein, 186 aa, Pseudomonas grimontii
  REGION 1..186: note = tr|A0A1H1BYT1|A0A1H1BYT1_9PSED GTP cyclohydrolase 1; OS = Pseudomonas grimontii OX=129847 GN=folE PE=3 SV=1
MTLSLPHHYREILKSLGEDPEREGLLDTPKRAAKAMQYLCHGYEQNLETIVNGALFASDNDEMVILKDIELYSLCEHHLLPFIGKAHVAYIPTGKVLGLSKLARIVDMFARRLQIQENLTRQIADAIQEVTQAAGVAVVIEAKHMCMMMRGVEKQNSTMNTSVMLGAFRESNTTRMEFLQLIGRSK

SEQ ID NO: 13342 - protein, 296 aa, Pseudomonas grimontii
  REGION 1..296: note = tr|A0A1H1DPG4|A0A1H1DPG4_9PSED GTP cyclohydrolase FolE2 OS=Pseudomonas grimontii OX=129847 GN=folE2 PE=3 SV=1
MNALTLPDIAAQASRQALPLDWVGMCGIALPILIDGQRLTATADAGVSLDDGTARGIHMSRLYLALEMLDQQPVTPAVLRNVLQRFLDSHEDLSKNAYLRLHTNLLLKRPALVSPLAGWKGYPVSIEARLENQMFHVELKIDVTYSSTCPCSAALARQLIQQQFIQDFGNTPLQHEDVLTWLGSANGIVATPHSQRSSAQLHVHLQGEHLALTDLINAAEAALGTAVQTAVKRADEQAFALANGQNLMFCEDAARRLNLALKRSDAVKAFHLKVIHAESLHAHDAVAESRWTRNPS

SEQ ID NO: 13343 - protein, 299 aa, unidentified
  source 1..299: note = Pseudomonas guangdongensis
  REGION 1..299: note = tr|A0A1H2FB82|A0A1H2FB82_9PSED GTP cyclohydrolase FolE2 OS=Pseudomonas guangdongensis OX=1245526 GN=folE2; PE = 3 SV=1
MNASLLPDIAAQTSTACLPLQRVGMAGIAQPLRLHGERLAARIDAGVSLDDAGARGIHMSRLYLALEALEHEELTPALLARLLDAFLDSHAGLSQRAHLDIHCEALLRRPALVSPLAGWKGYPLRISASRVRGAALRLGLRVEIGYSSTCPCSAALARQLIQQRFAADFAGRELRQEAVLDWLGSSAGILATPHSQRSRAILDVQLGAACHELPLLALIDGAEAALGTALQTAVKRADEQAFALANGQNLMFCEDAARRLHRALRALPQLDAFSVRVEHAESLHAHDAVAESRWSREAA

SEQ ID NO: 13344 - protein, 181 aa, unidentified
  source 1..181: note = Pseudomonas guangdongensis
  REGION 1..181: note = tr|A0A1H2H4H4|A0A1H2H4H4_9PSED GTP cyclohydrolase 1; OS = Pseudomonas guangdongensis OX=1245526 GN=folE PE=3 SV=1
MSLEQHYTEILGLLGEDVNREGLRDTPKRAAKAMQYLCRGYAQSLEEVTNGALFSSDNSEMVVVRDIELYSLCEHHLLPFIGKAHVAYIPNGKVLGLSKVARIVDMYARRLQIQENLSRQIAEAIEQVTGALGVAVVIEAQHMCMMMRGVEKQNSAMVTSVMLGEFRANPATRGEFLSLIG

SEQ ID NO: 13345 - protein, 295 aa, unidentified
  source 1..295: note = Pseudomonas guariconensis
  REGION 1..295: note = tr|A0A2N5QIW0|A0A2N5QIW0_9PSED GTP cyclohydrolase FolE2 OS=Pseudomonas guariconensis OX=1288410 GN=folE2; PE = 3 SV=1
MTSLTLPDVATQSLPEAVPLEWVGMCGIAVPLQFEGHTLNAQADAGVNLEDGAARGIHMSRLYLALEALENTELSPLLLRRLLASFLDTHVGLSSKAQVSLRFEHLLKRPALVSPLAGWKSYPVSLDATTDNEMFHVELSVVIPYSSTCPCSAALARQLIQQQFLKDFPEQVPDQSTLLEWLGSNQGIVATPHSQRSEAQVRVRLRENLQHLPLSELIDTLERALGTAVQTAVKRADEQAFALANGQNLMFCEDAARRLHQALRQVRWVEGFSLRVEHAESLHAHDAVAISRYRF

SEQ ID NO: 13346 - protein, 181 aa, unidentified
  source 1..181: note = Pseudomonas guariconensis
  REGION 1..181: note = tr|A0A1G6MHK9|A0A1G6MHK9_9PSED GTP cyclohydrolase 1; OS = Pseudomonas guariconensis OX=1288410 GN=folE PE=3 SV=1
MSLEQNYTAILSQLGEDVSREGLRDTPKRAAKAMKYLCRGYEQTLEEVTNDALFTSDNSEMVLVRDIELYSMCEHHMLPFIGKAHVAYLPKGKVLGLSKVARIVDMFARRLQIQENLSRQIAEAVEKVTGAAGVAVVIEAKHMCMMMRGVEKQNSTMITSVMLGEFRSNAATRSEFLSLIK

SEQ ID NO: 13347 - protein, 296 aa, unidentified
  source 1..296: note = Pseudomonas guguanensis
  REGION 1..296: note = tr|A0A1H0WZ89|A0A1H0WZ89_9PSED GTP cyclohydrolase FolE2 OS=Pseudomonas guguanensis OX=1198456 GN=folE2 PE=3; SV = 1
MNEQPLPDIAAQATHHDLPLQWVGMAGIALPIRLAGAAVTASVDIGVSLDDAGARGIHMSRLYLALQHLAGKPLTLAALQHLLDGCLSSHHELSDSASLTVRGALPLQRPALVSQLSGWKHYPFEIHARQDGRGLHTELQVELDYSSTCPCSAALARQLIQQRFAETFAQESLDYLEVLDWLGSTQGIVATPHSQRSTATLRLRLAPDCAELPLLALIDSAERALGTPVQTAVKRADEQAFALANGQNLMFCEDAARRLHRALRQLPQASAFCLRVVHAESLHAHDAVAESRWNWS

SEQ ID NO: 13348 - protein, 181 aa, unidentified
  source 1..181: note = Pseudomonas guguanensis
  REGION 1..181: note = tr|A0A1H0W2I1|A0A1H0W2I1_9PSED GTP cyclohydrolase 1; OS = Pseudomonas guguanensis OX=1198456 GN=folE PE=3 SV=1
MSLEQQYTAILGQLGEDVSREGLLDTPKRAAKAMQYLCRGYQQTLEEVTNGALFSSDNSEMVLVKNIELYSLCEHHMLPFIGKAHVAYLPNGKVLGLSKVARIVDMYARRLQIQENLSRQIAEAVAQVTGALGVAVVIEAQHMCMMMRGVEKQNSSMVTSVMLGEFRSNPATRGEFLNLVR

SEQ ID NO: 13349 - protein, 186 aa, Pseudomonas guineae
  REGION 1..186: note = tr|A0A1I3PB74|A0A1I3PB74_9PSED GTP cyclohydrolase 1; OS = Pseudomonas guineae OX=425504 GN=folE PE=3 SV=1
MNPEMNNHYREIILGVGENPEREGLLDTPKRAAKAMQYLCNGYHKSLEEVVNGALFESDNDEMVIVRDIELYSLCEHHMLPFIGKAHVAYIPTGKVLGLSKVARIVDMFARRLQIQENLTKQIADAIQQVTNAAGVAVVIEAKHMCMMMRGVEKQNSVMTSSVMLGAFRESCNTRHEFLQLIGRGK

SEQ ID NO: 13350 - protein, 298 aa, Pseudomonas guineae
  REGION 1..298: note = tr|A0A1I3FP67|A0A1I3FP67_9PSED GTP cyclohydrolase FolE2 OS=Pseudomonas guineae OX=425504 GN=folE2 PE=3 SV=1
MNALTLPDIATQIPAHEQALDWVGMQGIALPINLAGQRINTRADVGVSLDDGNARGIHMSRLYLALHALEHNALNPATLQQLLGEFLDSHQGLSQQASITLRGETLLSRPALVSPLAGWKAYPFEVRARQGSWGFHVELQVEVAYSSTCPCSAALARQLIQQRFIEDFANQPLDHAHLLAWLGSPQGIVATPHSQRSYATLQVRLHEDCAELPLVELIDAAEQALGTAVQTAVKRADEQAFALANGQNLMFCEDAARRLHSALREQTAFNAFHLRVVHAESLHAHDAVAVSRWNWSNT

SEQ ID NO: 13351 - protein, 181 aa, unidentified
  source 1..181: note = Pseudomonas helleri
  REGION 1..181: note = tr|A0A0J6J678|A0A0J6J678_9PSED GTP cyclohydrolase 1; OS = Pseudomonas helleri OX=1608996 GN=folE PE=3 SV=1
MSLEQNYTAILGQLGEDVSREGLLDTPKRAAKAMKYLCRGYEQTLEEVTNGALFSSDNSEMVLVKDIELYSLCEHHLLPFIGKAHVAYIPSGKVLGLSKVARIVDMYARRLQIQENLSRQIADAVMQVTGALGVAVVIEAKHMCMMMRGVEKQNSSMITSVMLGEFRENAATRSEFLSLIK

SEQ ID NO: 13352 - protein, 298 aa, unidentified
  source 1..298: note = Pseudomonas helleri
  REGION 1..298: note = tr|A0A0J6HXA7|A0A0J6HXA7_9PSED GTP cyclohydrolase FolE2 OS=Pseudomonas helleri OX=1608996 GN=folE2 PE=3 SV=1
MNALTLPDIASQNARQIVPLDWVGMCGIALPIVIEGQRLTATADAGVSLDDGEARGIHMSRLYLALEMLESQDLNPLLLKKILQQFLDSHDDLSICAYLRIHTQMLLKRPALVSPLSGWKTYPVSIDASLKNGMFHVELKIEVNYSSTCPCSAALARQLIQQQFVNDFANKPLEHADVLAWLGSSQGIVATPHSQRSTAILQTLLSSDQRALPIEVIIDEAEAALGTAVQTAVKRADEQAFALANGQNLMFCEDAARRLNVALKTVPGVQGFNLKVVHAESLHSHDAVAESRWNWKAH

SEQ ID NO: 13353 - protein, 181 aa, unidentified; identical to SEQ ID NO: 13225
  source 1..181: note = Pseudomonas helmanticensis
  REGION 1..181: note = tr|A0A4R7VLT9|A0A4R7VLT9_9PSED GTP cyclohydrolase 1; OS = Pseudomonas helmanticensis OX=1471381 GN=folE PE=3 SV=1

SEQ ID NO: 13354 - protein, 186 aa, unidentified
  source 1..186: note = Pseudomonas helmanticensis
  REGION 1..186: note = tr|A0A4R7VPQ2|A0A4R7VPQ2_9PSED GTP cyclohydrolase 1; OS = Pseudomonas helmanticensis OX=1471381 GN=folE PE=3 SV=1
MTRSLPENYREILIGLGEDPDREGLLDTPVRAAKAMQYLCHGYEQSVDDIVNGALFASDSDEMIIVADIELYSLCEHHLLPFIGKAHVAYIPTGKVLGLSKIARLVDMFARRLQIQENLTRQIADAVQQVTDAAGVAVVIEARHMCMMMRGVEKQNSTMNTSVMLGAFRESSNTRQEFLQLIGRSK

SEQ ID NO: 13355 - protein, 186 aa, unidentified
  source 1..186: note = Pseudomonas hunanensis
  REGION 1..186: note = tr|A0A2I0CC83|A0A2I0CC83_9PSED GTP cyclohydrolase 1; OS = Pseudomonas hunanensis OX=1247546 GN=folE PE=3 SV=1
MSHSLAEHYHEILVGIGENPQREGLLDTPQRAAKAMQYLCNGYAQDLHEVVNGALFESENDEMIVVRDIELYSLCEHHMLPFIGKAHVAYLPTGRVLGLSKVARVVDMFARRLQIQENLTRQIAYAVQEVTDAAGVAVVIEAKHMCMMMRGVEKQNSVMMTSVMLGEFRDDPSTRHEFLNLIGRHS

SEQ ID NO: 13356 - protein, 181 aa, unidentified
  source 1..181: note = Pseudomonas hunanensis
  REGION 1..181: note = tr|A0A2I0C6V2|A0A2I0C6V2_9PSED GTP cyclohydrolase 1; OS = Pseudomonas hunanensis OX=1247546 GN=folE PE=3 SV=1
MSLEQNYTEILSQIGEDVSREGLLDTPKRAAKAMKYLCRGYEQTLEEVTNNALFSSDNSEMVLVRDIELYSMCEHHMLPFIGKAHVAYLPKGKVLGLSKVARIVDMYARRLQIQENLSRQIAEAVQQVTGAAGVAVVVEAKHMCMMMRGVEKQNSTMITSVMLGEFRDNAATRSEFLSLIK

SEQ ID NO: 13357 - protein, 296 aa, unidentified
  source 1..296: note = Pseudomonas hussainii
  REGION 1..296: note = tr|A0A1H7FDA5|A0A1H7FDA5_9PSED GTP cyclohydrolase FolE2 OS=Pseudomonas hussainii OX=1429083 GN=folE2 PE=3; SV = 1
MTAALPDIAAQLHPHAQPLDWVGMQGIALPIQLLGHTLAAKVDAGVSLDTPGVRGIHMSRLYLALESLSEQPLDVGGLRAVLQQFLDYHQGMAQRAYIRLHGEVLIQRPALVSPLSGWRAYPLSIAAELGANGLQLSLTLDIGYSSTCPCSAALARQLIQQQFARYFAGKSFDHAAISTWLGSAEGIVATPHSQRSTATLQLQLAPTLSNLPIAQLLDSAEKALGTALQTAVKRADEQAFALANGQNLMFCEDAARRLHNALENHPALLGFDLTVVHAESLHAHDAVARSRWQAPL

SEQ ID NO: 13358 - protein, 182 aa, unidentified
  source 1..182: note = Pseudomonas hussainii
  REGION 1..182: note = tr|A0A1H7H0D7|A0A1H7H0D7_9PSED GTP cyclohydrolase 1; OS = Pseudomonas hussainii OX=1429083 GN=folE PE=3 SV=1
MSLEQHYSAILTQLGEDVQREGLLDTPKRAAKAMQFLCRGYQQTLDEVVGSALFSSDNSELVLVKNIELYSLCEHHLLPFIGKVHVGYLPNGKVLGLSKVARIVDMFGRRLQIQENLTRQIAEAIEQVTGALGVGVVIEAQHMCMMMRGVEKQNSSMVSSVMLGELRANPATRSEFLSLIGK

SEQ ID NO: 13359 - protein, 186 aa, Pseudomonas indica
  REGION 1..186: note = tr|A0A1G9MHE9|A0A1G9MHE9_9PSED GTP cyclohydrolase 1; OS = Pseudomonas indica OX=137658 GN=folE PE=3 SV=1
MSEQLSHHYREILRGLGENPEREGLLDTPKRAAKAMQYLCHGYGQTLEEIVNGALFESDNDEMVIVREIELYSLCEHHLLPFIGKAHVAYIPTGKVLGLSKVARIVDMYARRLQIQENLTRQIAEAVQSVTQAAGVAVVIEAKHMCMMMRGVEKQNSVMSTSVMLGAFRESSNTRHEFLKLIGRSN

SEQ ID NO: 13360 - protein, 181 aa, Pseudomonas indica
  REGION 1..181: note = tr|A0A1G9KUK7|A0A1G9KUK7_9PSED GTP cyclohydrolase 1; OS = Pseudomonas indica OX=137658 GN=folE PE=3 SV=1
MSLEQHYTAIIGQLGEDTSREGLIDTPKRAAKAMQYLCRGYQQTLDEIVNGALFSSDNSEMVLVKNIELYSLCEHHLLPFIGKAHVAYIPNGKVLGLSKVARIVDMYARRLQIQENLSRQIAEAVQQVTGALGVAVVIEAQHMCMMMRGVEKQNSSMVTSVMLGEFRESAATRSEFLSLIG

SEQ ID NO: 13361 - protein, 181 aa, unidentified
  source 1..181: note = Pseudomonas indoloxydans
  REGION 1..181: note = tr|A0A2T5PI54|A0A2T5PI54_9PSED GTP cyclohydrolase 1; OS = Pseudomonas indoloxydans OX=404407 GN=folE PE=3 SV=1
MSLEQQYTAILGQLGEDVSREGLLDTPKRAAKAMQYLCRGYQQTLEEVTNGALFSSDNSEMVLVKNIELYSLCEHHLLPFIGKAHVAYIPNGKVLGLSKVARIVDMYARRLQIQENLSRQIAEAIEQVTGALGVAVVIEAQHMCMMMRGVEKQNSSMVTSVMLGEFRSNPATRGEFLNLVR

SEQ ID NO: 13362 - protein, 186 aa, unidentified
  source 1..186: note = Pseudomonas indoloxydans
  REGION 1..186: note = tr|A0A2T5PJD5|A0A2T5PJD5_9PSED GTP cyclohydrolase 1; OS = Pseudomonas indoloxydans OX=404407 GN=folE PE=3 SV=1
MSQPLSQQYREILVGLGENPEREGLLDTPKRAAKAMQYLCHGYQQSLDEIVNGALFESDNDEMVIVKDIELYSLCEHHLLPFIGKAHVAYIPTGKVLGLSKVARIVDMYARRLQIQENLTKQIADAIQQVTNAAGVAVVIEAKHMCMMMRGVEKQNSVMSSSVMLGAFRESCNTRHEFLQLIGRNN

SEQ ID NO: 13363 - protein, 181 aa, Pseudomonas japonica
  REGION 1..181: note = tr|A0A239HC50|A0A239HC50_9PSED GTP cyclohydrolase 1; OS = Pseudomonas japonica OX=256466 GN=folE PE=3 SV=1
MSLEQHYTAILGQLGEDVSREGLLDTPKRAAKAMQYLCRGYNQTLEEVTNGALFSSDNSEMVLVRDIELYSLCEHHLLPFIGKAHVAYIPSGKVLGLSKVARIVDMYARRLQIQENLSREIAEAVQQVTGAVGVAVVIEAKHMCMMMRGVEKQNSSMITSVMLGEFRENAATRSEFLSLIK

SEQ ID NO: 13364 - protein, 299 aa, Pseudomonas japonica
  REGION 1..299: note = tr|A0A239BCB7|A0A239BCB7_9PSED GTP cyclohydrolase FolE2 OS=Pseudomonas japonica OX=256466 GN=folE2 PE=3 SV=1
MVRSMTSLTLPDIAAQASRHSLPLDWVGMCGIALPVRLDQHVLNATADAGVDLSDGHSRGIHMSRLYLALAAFNDEALSISLIRRVLRQFLDSHEGLSTCAYLTLRFEVLLERPALVSSESGFKRYPVILEARLSNEMFHVELSTDVVYSSTCPCSAALARQLIQQQFLTDFGNRSLTHEEVLSWLGGAHGIVATPHSQRSTAKLRIRLKDDCDDLPIRELIDQAEAALGTAVQTAVKRADEQAFALANGQNLMFCEDAARRLHLAVRALASVDGFQLRVEHAESLHAHDAVAQSQWNW

SEQ ID NO: 13365 - protein, 186 aa, Pseudomonas jessenii
  REGION 1..186: note = tr|A0A370S282|A0A370S282_9PSED GTP cyclohydrolase 1; OS = Pseudomonas jessenii OX=77298 GN=folE PE=3 SV=1
MESAPVTLEQNYTAILGQLGEDVSREGLLDTPKRAAKAMQYLCRGYEQTLEEVTNGALFSSDNSEMVLVKDIELYSLCEHHLLPFIGKAHVAYIPSGKVLGLSKVARIVDMYARRLQIQENLSRQIADAVQQVTGALGVAVVIEAKHMCMMMRGVEKQNSSMITSVMLGEFRENAATRSEFLSLIK

SEQ ID NO: 13366 - protein, 181 aa, Pseudomonas jessenii; identical to SEQ ID NO: 13303
  REGION 1..181: note = tr|A0A2V4JTM5|A0A2V4JTM5_9PSED GTP cyclohydrolase 1; OS = Pseudomonas jessenii OX=77298 GN=folE PE=3 SV=1

SEQ ID NO: 13367 - protein, 181 aa, Pseudomonas jinjuensis
  REGION 1..181: note = tr|A0A1G9YSC9|A0A1G9YSC9_9PSED GTP cyclohydrolase 1; OS = Pseudomonas jinjuensis OX=198616 GN=folE PE=3 SV=1
MSLEQNYSAILTQLGEDVTREGLVDTPKRAAKAMQYLCRGYQQTLEEIVNGALFSSDNSEMVLVKDIELYSLCEHHLLPFIGKAHVAYIPNGKVLGLSKVARIVDMFARRLQIQENMSRQIAEAVQQVTGALGVAVVIEAKHMCMMMRGVEKQNSSMVTSVMLGEFRDNAATRSEFLSLIR

SEQ ID NO: 13368 - protein, 186 aa, Pseudomonas jinjuensis
  REGION 1..186: note = tr|A0A1H0H755|A0A1H0H755_9PSED GTP cyclohydrolase 1; OS = Pseudomonas jinjuensis OX=198616 GN=folE PE=3 SV=1
MNESLTQHYRGILQGLGENPEREGLRDTPKRAAKAMRYLCHGYELTLEEIVNGALFASDNDEMVMVKDIELYSLCEHHLLPFIGKAHVAYIPTGKVLGLSKVARIVDMYARRLQIQENLTREIAEAVQSVTGAAGVAVVIEAQHMCMMMRGVEKQNSVMNTSVMLGAFRASNTTRQEFLQLIGRSK

SEQ ID NO: 13369 - protein, 186 aa, unidentified
  source 1..186: note = Pseudomonas kairouanensis
  REGION 1..186: note = tr|A0A4Z0AR92|A0A4Z0AR92_9PSED GTP cyclohydrolase 1; OS = Pseudomonas kairouanensis OX=2293832 GN=folE PE=3 SV=1
MTLSLPQHYREILKGLGEDPEREGLLDTPKRAAKAMQYLCHGYEQSLDEIVNGALFTSDNDEMVILKDIELYSLCEHHLLPFIGKAHVAYIPTGKVLGLSKLARIVDMYARRLQIQENLTRQIADAIQQVTQAAGVAVVIEAKHMCMMMRGVEKQNSTMNTSVMLGAFRESNTTRMEFLQLIGRSK

SEQ ID NO: 13370 - protein, 181 aa, unidentified
  source 1..181: note = Pseudomonas kairouanensis
  REGION 1..181: note = tr|A0A4Z0AR94|A0A4Z0AR94_9PSED GTP cyclohydrolase 1; OS = Pseudomonas kairouanensis OX=2293832 GN=folE PE=3 SV=1
MSLEQNYTAILGQLGEDVSREGLLDTPKRAAKAMQYLCRGYEQTLEEVTNGALFSSDNSEMVLVKDIELYSLCEHHLLPFIGKAHVAYIPSGKVLGLSKVARIVDMYARRLQIQENLSRQIADAVLQVTGALGVAVVIEAKHMCMMMRGVEKQNSSMITSVMLGEFRENAATRSEFLSLIK

SEQ ID NO: 13371 - protein, 186 aa, Pseudomonas kilonensis
  REGION 1..186: note = tr|A0A0F4XNZ5|A0A0F4XNZ5_9PSED GTP cyclohydrolase 1; OS = Pseudomonas kilonensis OX=132476 GN=folE PE=3 SV=1
MTLSLPQNYREILIGLGENPEREGLLDTPVRAAKAMQYLCHGYEQSVEQIVNGALFASDSDEMVIVADIELYSLCEHHLLPFIGKAHVAYIPTGKVLGLSKIARLVDMFARRLQIQENLTRQIADAVQQVTQAAGVAVVIEAQHMCMMMRGVEKQNSTMNTSVMLGAFRDSSTTRQEFLQLIRRSN

SEQ ID NO: 13372 - protein, 181 aa, Pseudomonas kilonensis; identical to SEQ ID NO: 13225
  REGION 1..181: note = tr|A0A0F4XGU4|A0A0F4XGU4_9PSED GTP cyclohydrolase 1; OS = Pseudomonas kilonensis OX=132476 GN=folE PE=3 SV=1

SEQ ID NO: 13373 - protein, 297 aa, Pseudomonas knackmussii
  REGION 1..297: note = tr|A0A024HA01|A0A024HA01_PSEKB GTP cyclohydrolase FolE2 OS=Pseudomonas knackmussii (strain DSM 6978 / LMG 23759 / B13) OX=1301098 GN=folE2 PE=3 SV=1
MTAFLPDIATQAAPAQLALDWVGMQGIALPLRLYGERLSALADAGVSLDDSNARGIHMSRLYLALARLAQDELTPSLLRQVLDDFLASHTGLSHRASLRLGFDLLLERAALVSRLHGWKTYPCEVHAQLDDQGLRLELQLRLPYSSTCPCSAALARQLIQQRFAADFAERTPSREAVHAWLGSSAGIVATPHSQRSFAELRIELRDDLEQLPLKALIDLAEASLGTAVQTAVKRADEQAFALANGQNPMFCEDAARRLHLALAGHADVRAFSLQVVHAESLHAHDAVARSQWRREVA

SEQ ID NO: 13374 - protein, 186 aa, Pseudomonas knackmussii
  REGION 1..186: note = tr|A0A024HN51|A0A024HN51_PSEKB GTP cyclohydrolase 1; OS = Pseudomonas knackmussii (strain DSM 6978 / LMG 23759 / B13) OX=1301098 GN=folE1 PE=3 SV=1
MSDSLSAHYREILLGLGEDPAREGLLDTPKRAAKAMRYLCHGYELSLEEIVNGALFASDNDEMVIVRDIELYSLCEHHLLPFIGKAHVAYIPTGKVLGLSKVARIVDMFARRLQIQENLTRQIAEAIERITGAAGVAVVIEAQHMCMMMRGVEKQNSQMFTSVMLGAFRESANTRQEFLQLIKRSH

SEQ ID NO: 13375 - protein, 298 aa, Pseudomonas koreensis
  REGION 1..298: note = tr|A0A4Q4L832|A0A4Q4L832_9PSED GTP cyclohydrolase FolE2 OS=Pseudomonas koreensis OX=198620 GN=folE2 PE=3 SV=1
MNALTLPDIAAQSARQAMPLDWVGMREIALPVLLEGQRLSARVDAGVSLDDSEARGIHMSRLYLALEALEQRSLSPALLHQVLECFLASHRGLSECAYLNVHTDLLLKRPALVSPLAGWKSYPASISASLKQQMFHVELKIELPYSSTCPCSAALARQLIQQQFIDDFANKTLQHEDVLAWLGSTKGIVATPHSQRSYAQLHLQLDNFIDELPLTAIINDAEAALGTAVQTAVKRPDEQAFALANGQNLMFCEDAARRLNLALQRTPGINQFHIRVIHAESLHAHDAVAESSWQREQP

SEQ ID NO: 13376 - protein, 181 aa, Pseudomonas koreensis
  REGION 1..181: note = tr|A0A1E8PIC1|A0A1E8PIC1_9PSED GTP cyclohydrolase 1; OS = Pseudomonas koreensis OX=198620 GN=folE PE=3 SV=1
MSLEQNYTAILGQLGEDVSREGLLDTPKRAAKAMQYLCRGYAQTLEEVTNGALFSSDNSEMVLVKDIELYSLCEHHLLPFIGKAHVAYIPSGKVLGLSKVARIVDMYARRLQIQENLSRQIADAVMQVTGALGVAVVIEAKHMCMMMRGVEKQNSSMITSVMLGEFRENAATRSEFLSLIK

SEQ ID NO: 13377 - protein, 298 aa, unidentified
  source 1..298: note = Pseudomonas kribbensis
  REGION 1..298: note = tr|A0A4Y8V7A3|A0A4Y8V7A3_9PSED GTP cyclohydrolase FolE2 OS=Pseudomonas kribbensis OX=1628086 GN=folE2 PE=3; SV = 1
MNALTLPDIAAQAARQALPLDWVGMRGIALPVFIEGQRLAAKADAGVSLDDGEARGIHMSRLYLALEMLEQQNLTPALLQQVLQRFIDSHEGLANSAYLNIHTDLLLRRPALVSLLAGWKTYPVTIAATLKNAVFHVELNIEVAYSSTCPCSAALARQLIQQQFVDDFANKPLQHAEVLAWLGSTQGIIATPHSQRSTAQLHLHLDEFVDGLPLTSTINDAEAALGTAVQTAVKRADEQAFALANGQNLMFCEDAARRLNLALRRSPGIREFHLRVIHAESLHAHDAVAESHWRRETA

SEQ ID NO: 13378 - protein, 186 aa, unidentified
  source 1..186: note = Pseudomonas kribbensis
  REGION 1..186: note = tr|A0A345RKK5|A0A345RKK5_9PSED GTP cyclohydrolase 1; OS = Pseudomonas kribbensis OX=1628086 GN=folE PE=3 SV=1
MTRSLPENYREILIGLGEDPDREGLLDTPVRAAKAMQYLCHGYEQSVDEIVNGALFASDSDEMIIVADIELYSLCEHHLLPFIGKAHVAYIPTGKVLGLSKIARLVDMFARRLQIQENLTRQIAEAVQQVTDAAGVAVVIEARHMCMMMRGVEKQNSTMNTSVMLGAFRESSNTRQEFLQLIGRSK

SEQ ID NO: 13379 - protein, 185 aa, unidentified
  source 1..185: note = Pseudomonas kunmingensis
  REGION 1..185: note = tr|A0A2N8SCD7|A0A2N8SCD7_9PSED GTP cyclohydrolase 1; OS = Pseudomonas kunmingensis OX=1211807 GN=folE PE=3 SV=1
MNEDMIQHYRGILEGVGENPGREGLVDTPKRAAKAMQYLCQGYGQTVEQVVNGALFESDNDEMVIVRDIELYSMCEHHMLPFIGKAHVAYIPTGKVLGLSKVARIVDMFARRLQIQENMTKQIADAIMQVTNAAGVAVVIEAQHMCMMMRGCEKQNSVMTTSVMLGEFRDSYNTRQEFLQLIRGR

SEQ ID NO: 13380 - protein, 181 aa, unidentified; identical to SEQ ID NO: 13197
  source 1..181: note = Pseudomonas kunmingensis
  REGION 1..181: note = tr|A0A1I3WRT4|A0A1I3WRT4_9PSED GTP cyclohydrolase 1; OS = Pseudomonas kunmingensis OX=1211807 GN=folE PE=3 SV=1

SEQ ID NO: 13381 - protein, 181 aa, unidentified
  source 1..181: note = Pseudomonas kuykendallii
  REGION 1..181: note = tr|A0A2W5CUK2|A0A2W5CUK2_9PSED GTP cyclohydrolase 1; OS = Pseudomonas kuykendallii OX=1007099 GN=folE PE=3 SV=1
MSLEKNYTEILAEIGEDVNREGLLDTPKRAAKAMQYLCRGYQQTLEEVTNGALFSSDNSEMVLVKNIELYSMCEHHMLPFIGKAHVAYLPSGKVLGLSKVARIVDMYARRLQIQENLTRQIADAVQSITQAAGVAVVIEAQHMCMMMRGVEKQNSSMVTSVMLGEFRENSDTRAEFLSLVN

SEQ ID NO: 13382 - protein, 181 aa, unidentified
  source 1..181: note = Pseudomonas kuykendallii
  REGION 1..181: note = tr|A0A1H3E1G8|A0A1H3E1G8_9PSED GTP cyclohydrolase 1; OS = Pseudomonas kuykendallii OX=1007099 GN=folE PE=3 SV=1
MSLEKNYTEILAEIGEDVNREGLLDTPKRAAKAMQYLCRGYQQTLEEVTNGALFSSDNSEMVLVKNIELYSMCEHHMLPFIGKAHVAYLPSGKVLGLSKVARIVDMYARRLQIQENLTRQIADAVQSITHAAGVAVVIEAQHMCMMMRGVEKQNSSMVTSVMLGEFRENSDTRAEFLSLVN

SEQ ID NO: 13383 - protein, 181 aa, unidentified
  source 1..181: note = Pseudomonas lactis
  REGION 1..181: note = tr|A0A0R3C8A5|A0A0R3C8A5_9PSED GTP cyclohydrolase 1; OS = Pseudomonas lactis OX=1615674 GN=folE PE=3 SV=1
MSLEQNYTAILGQLGEDVSREGLLDTPKRAAKAMQYLCRGYEQTLEEVTNGALFSSDNSEMVLVKDIELYSLCEHHLLPFIGKAHVAYIPSGKVLGLSKVARIVDMYARRLQIQENLSRQIADAVLEVTGALGVAVVIEAKHMCMMMRGVEKQNSSMITSVMLGEFRENAATRSEFLSLIK

SEQ ID NO: 13384 - protein, 181 aa, unidentified
  source 1..181: note = Pseudomonas lactis
  REGION 1..181: note = tr|I4KGD7|I4KGD7_9PSED GTP cyclohydrolase 1; OS = Pseudomonas lactis OX=1615674 GN=folE PE=3 SV=1
MSLEQNYTEILGQLGEDVSREGLLDTPKRAAKAMQYLCRGYEQTLEEVTNGALFSSDNSEMVLVKDIELYSLCEHHLLPFIGKAHVAYIPSGKVLGLSKVARIVDMYARRLQIQENLSRQIADAVLEVTGALGVAVVIEAKHMCMMMRGVEKQNSSMITSVMLGEFRENAATRSEFLSLIK

SEQ ID NO: 13385 - protein, 186 aa, unidentified
  source 1..186: note = Pseudomonas laurylsulfatiphila
  REGION 1..186: note = tr|A0A2S6FFB2|A0A2S6FFB2_9PSED GTP cyclohydrolase 1; OS = Pseudomonas laurylsulfatiphila OX=2011015 GN=folE PE=3; SV = 1
MTLSLPQNYREILIGLGENPDREGLLDTPVRAAKAMQYLCHGYEQSVEEIVNGALFASDNDEMVIVDNIELYSLCEHHMLPFIGKAHVAYIPTGKVLGLSKIARLVDMFARRLQIQENLTRQIADAVQQVTGAAGVAVVIEAQHMCMMMRGVEKQNSTMNTSVMLGAFRESSNTRQEFLQLIGRSK

SEQ ID NO: 13386 - protein, 298 aa, unidentified
  source 1..298: note = Pseudomonas laurylsulfatiphila
  REGION 1..298: note = tr|A0A2S6FIP2|A0A2S6FIP2_9PSED GTP cyclohydrolase FolE2 OS=Pseudomonas laurylsulfatiphila OX=2011015; GN = folE2 PE=3 SV=1
MNALTLPDIAAQASLQALPLEWVGMCGIALPVLFDGQRLNAKADAGVSLDDGNARGIHMSRLYLALELLEQESLSPALLRRVLQRFLESHEGLSRSAHLTIHAEVLLKRPALISPLSGWKSYPVSIEARLKNAMFHVELKIDVPYSSTCPCSAALSRQLIQQQFVDDFANKSLQHADVLAWLGSTNGIVATPHSQRSSAKLRVRLADFLDELPLIAIINDAEAALGTAVQTAVKRADEQAFALANGQNLMFCEDAARRLNLALKRSTGINAFHIRVIHAESLHAHDAVAESRFNWEIA

SEQ ID NO: 13387 - protein, 298 aa, unidentified
  source 1..298: note = Pseudomonas laurylsulfativorans
  REGION 1..298: note = tr|A0A2S3VME4|A0A2S3VME4_9PSED GTP cyclohydrolase FolE2 OS=Pseudomonas laurylsulfativorans OX=1943631; GN = folE2 PE=3 SV=1
MNALTLPDIAAQASRQALPLEWVGMCGIALPVLFDGQRLNAKADAGVSLDDGNVRGIHMSRLYLALELLEQESLSPALLRRVLQRFLESHEGLSSSAHLTIHTDVLLKRPALISPLAGWKSYPVSIEARLKNAMFHVELKIELPYSSTCPCSAALSRQLIQQQFVDDFANKSLQHADVLAWLGSTNGIVATPHSQRSSALLCVRLADFLDDLPLIAIINDAEAALGTAVQTAVKRADEQAFALANGQNLMFCEDAARRLNLALKRSTGINAFHIRVIHAESLHAHDAVAESRFNWEVA

SEQ ID NO: 13388 - protein, 186 aa, unidentified
  source 1..186: note = Pseudomonas laurylsulfativorans
  REGION 1..186: note = tr|A0A2S3VS12|A0A2S3VS12_9PSED GTP cyclohydrolase 1; OS = Pseudomonas laurylsulfativorans OX=1943631 GN=folE PE=3; SV = 1
MTLSLPQNYREILIGLGENPDREGLLDTPMRAAKAMQYLCHGYEQSVEDIVNGALFASDNDEMVIVDNIELYSLCEHHILPFIGKAHVAYIPTGKVLGLSKIARLVDMFARRLQIQENLTRQIADAVQQVTGAAGVAVVIEAQHMCMMMRGVEKQNSTMNTSVMLGAFRESSNTRQEFLQLIGRSK

SEQ ID NO: 13389 - protein, 186 aa, Pseudomonas libanensis
  REGION 1..186: note = tr|A0A0R2YD45|A0A0R2YD45_9PSED GTP cyclohydrolase 1; OS = Pseudomonas libanensis OX=75588 GN=folE PE=3 SV=1
MTLSLPHHYREILKGLGEDPQREGLLDTPKRAAKAMQYLCHGYGQNLEEIVNGALFASDNDEMVILKDIELYSLCEHHLLPFIGKAHVAYIPTGKVLGLSKLARIVDMFARRLQIQENLTRQIADAIQDVTQAAGVAVVIEARHMCMMMRGVEKQNSTMNTSVMLGAFRESNTTRMEFLQLIGRSK

SEQ ID NO: 13390 - protein, 296 aa, Pseudomonas libanensis
  REGION 1..296: note = tr|A0A0R2YMH6|A0A0R2YMH6_9PSED GTP cyclohydrolase FolE2 OS=Pseudomonas libanensis OX=75588 GN=folE2 PE=3 SV=1
MNALTLPDIAAQASRQALPLDWVGMCGIALPILIDDQRLTATADAGVSLDDGTARGIHMSRLYLALEMLDQQPLTPALLRNVLLRFLDSHEGLSKNAYLRIHTDLLLKRPALVSPLAGWKSYPVSIEARLENQMFHVELKIDVTYSSTCPCSAALARQLIQQQFLEDFANSPLQHEDVLAWLGSANGIVATPHSQRSSAQLHVHLQGNELTIVDLINGAEAALGTAVQTAVKRADEQAFALANGQNLMFCEDAARRLNLALKRSDAVKAFHLKVIHAESLHAHDAVAESRWTRDLA

SEQ ID NO: 13391 - protein, 191 aa, Pseudomonas lini
  REGION 1..191: note = tr|A0A0J6K1S9|A0A0J6K1S9_9PSED GTP cyclohydrolase 1; OS = Pseudomonas lini OX=163011 GN=folE PE=3 SV=1
MTLFPPHNSLSESYREILIGLGENPDREGLQDTPVRAAKAMQYLCHGYEQSVEEIVNGALFASDNDEMIIVDNIELYSLCEHHMLPFIGKAHVAYIPTGKVLGLSKIARLVDMFARRLQIQENLTRQIADAVQQVTDAAGVAVVIEAQHMCMMMRGVEKQNSTMNTSVMLGAFRESSNTRQEFLQLIGRSK

SEQ ID NO: 13392 - protein, 181 aa, Pseudomonas lini
  REGION 1..181: note = tr|A0A0J6HJM0|A0A0J6HJM0_9PSED GTP cyclohydrolase 1; OS = Pseudomonas lini OX=163011 GN=folE PE=3 SV=1
MSLEQNYTEILGQLGEDASREGLLDTPKRAAKAMQYLCRGYEQTLEEVTNGALFSSDNSEMVLVKDIELYSLCEHHMLPFIGKAHVAYIPSGKVLGLSKVARIVDMYARRLQIQENLSRQIADAVQQVTGALGVAVVIEAKHMCMMMRGVEKQNSTMITSVMLGEFRENAATRSEFLSLIK

SEQ ID NO: 13393 - protein, 189 aa, unidentified
  source 1..189: note = Pseudomonas linyingensis
  REGION 1..189: note = tr|A0A1H6XTY9|A0A1H6XTY9_9PSED GTP cyclohydrolase 1; OS = Pseudomonas linyingensis OX=915471 GN=folE PE=3 SV=1
MSDQLSQITHHYHEILKGLGEDPEREGLLDTPKRAAKAMQYLCRGYEQSLDEIVNGALFASDNDEMVIVRDIELYSLCEHHLLPFIGKAHVAYIPTGKVLGLSKVARIVDMFARRLQIQENLTRQIAEAVQQVTSAAGVAVVIEAKHMCMMMRGVEKQNSVMTSSVMLGAFRQSTNTRQEFLQLIGRSK

SEQ ID NO: 13394 - protein, 304 aa, unidentified
  source 1..304: note = Pseudomonas linyingensis
  REGION 1..304: note = tr|A0A1H7AHC2|A0A1H7AHC2_9PSED GTP cyclohydrolase FolE2 OS=Pseudomonas linyingensis OX=915471 GN=folE2 PE=3; SV = 1
MNSLTLPDIAAQTTTARLPLERVGMAGIAQPVVLLGQRLAARVAAGVSLDDAAARGIHMSRLYLALAALESEELAPALLARVLGEFLASHRGLSARAQLEIRGEALLRRPALVSPLAGWKGYPFLVDAQLDADGLRVELEVAIGYSSTCPCSAALARQLFQQRFAADFAGQALEPGAVLEWLGSSAGSLATPHSQRSTATLRVTLAREATTLPLLELIERAETALGTALQTAVKRADEQAFALANGQNLMFCEDAARRLHVALLRQPVLDAFSVRVVHAESLHAHDAVAESRWRSATGATPTAR

SEQ ID NO: 13395 - protein, 186 aa, Pseudomonas litoralis
  REGION 1..186: note = tr|A0A1H1VZY2|A0A1H1VZY2_9PSED GTP cyclohydrolase 1; OS = Pseudomonas litoralis OX=797277 GN=folE PE=3 SV=1
MMSIENLTHSYESILLNLGENPQRGGLLGTPLRAAKAMQFLCRGYDQSLDEIVNNALFDADSDEMVIVKDIELYSLCEHHMLPFIGKAHVAYIPTGKVIGLSKIARIVDMFARRLQIQENLTRQIAEAIQEVTDAGGVAVVIEAKHMCMMMRGVEKQNSSMYTSVMLGAFRESGNTRQEFLQLIGR

SEQ ID NO: 13396 - protein, 187 aa, Pseudomonas litoralis
  REGION 1..187: note = tr|A0A1H1LH23|A0A1H1LH23_9PSED GTP cyclohydrolase 1; OS = Pseudomonas litoralis OX=797277 GN=folE PE=3 SV=1
MSLEKLTSNYHDILTNLGENPEREGLKGTPLRAAKAMQFLCRGYDQSLEEIVNGALFESSSDEMVIVKNIELYSLCEHHMLPFIGKAHVAYMPNGKVVGLSKIARIVDMFARRLQIQESLTRQIAEAVQSVTDAQGVAVVIEAKHMCMMMRGVEKQNSSMLTSVMLGSFRESVNTRQEFLQLIGRSN

SEQ ID NO: 13397 - protein, 297 aa, Pseudomonas lundensis
  REGION 1..297: note = tr|A0A2C8F1P0|A0A2C8F1P0_9PSED GTP cyclohydrolase FolE2 OS=Pseudomonas lundensis OX=86185 GN=folE PE=3 SV=1
MTSLTLPDIASQTALHDIPLDWVGMCGIALPVVINGQRLAATADAGVSLDDGEARGIHMSRLFLALEVLDSQAVNPALLKKILQRFLDSHDELSTCAYLNLNTQMLLKRPALISPLSGWKSYPVEIKASLENGMFHVELNVEVEYSSTCPCSAALARQLIQQKFVDDYANKTLQHAEVLAWLGSTRGIVATPHSQRSTAHLQLHIREDGDNFPIEYVIDKAEKALGTAVQTAVKREDEQAFALANGQNLMFCEDAVRRLHVALKSTSAVKGFNLKVVHAESLHSHDAVAKSRWNWRR

SEQ ID NO: 13398 - protein, 181 aa, Pseudomonas lundensis
  REGION 1..181: note = tr|A0A1D9ISZ5|A0A1D9ISZ5_9PSED GTP cyclohydrolase 1; OS = Pseudomonas lundensis OX=86185 GN=folE PE=3 SV=1
MTLEQNYTAILGQLGEDVSREGLLDTPKRAAKAMQYLCRGYEQTLEEVTNGALFSSDNSEMVLVKDIELYSLCEHHLLPFIGKAHVAYIPSGKVLGLSKVARIVDMYARRLQIQENLSRQIADAVLQVTGALGVAVVIEAKHMCMMMRGVEKQNSSMITSVMLGEFRDNAATRSEFLSLIK

SEQ ID NO: 13399 - protein, 298 aa, Pseudomonas lurida
  REGION 1..298: note = tr|A0A2R3I3W9|A0A2R3I3W9_9PSED GTP cyclohydrolase FolE2 OS=Pseudomonas lurida OX=244566 GN=folE2 PE=3 SV=1
MNALTLPDIAAQASRQALPLEWVGMCGIALPILIDGQRLAATADAGVSLNDGTARGIHMSRLYLALEMLDQQALTPALLRNVLQRFLDSHEGLSNNAYLRIHTDVLLKRPALVSPLAGWKGYPVSIEARLENQMFHVELKIDVAYSSTCPCSAALARQLIQQQFLQDFANTPLQHEDVLTWLGSASGIVATPHSQRSSAQLLIQLDGDQSGLPITDLIDDVEAALGTAVQTAVKRADEQAFALANGQNLMFCEDAARRLNLALKRSDAVKAFHLKVIHAESLHAHDAVAESRWTRNPA

SEQ ID NO: 13400 - protein, 298 aa, Pseudomonas lurida
  REGION 1..298: note = tr|A0A2A9DJM9|A0A2A9DJM9_9PSED GTP cyclohydrolase FolE2 OS=Pseudomonas lurida OX=244566 GN=folE2 PE=3 SV=1
MNALTLPDIAAQASRQALPLDWVGMCGIALPILIDGQRLAATADAGVSLNDGTARGIHMSRLYLALEMLDQQALTPALLRNLLQRFLDSHEGLSNNAYLRIHTDVLLKRPALVSPLAGWKGYPVSIEARLENQMFHVELKIDVAYSSTCPCSAALARQLIQQQFLQDFANTPLQHEDVLTWLGSASGIVATPHSQRSSAQLLIQLDGDQSGLPITDLIDDVEAALGTAVQTAVKRADEQAFALANGQNLMFCEDAARRLNLALKRSDAVKAFHLKVIHAESLHAHDAVAESRWTRNPA

SEQ ID NO: 13401 - protein, 181 aa, Pseudomonas lutea
  REGION 1..181: note = tr|A0A098SXE1|A0A098SXE1_9PSED GTP cyclohydrolase 1; OS = Pseudomonas lutea OX=243924 GN=folE PE=3 SV=1
MTLEQNYTAILGQLGEDVSREGLRDTPKRAAKAMQYLCRGYEQTLEDVTNGALFSSDNSEMVVVKDIELYSLCEHHLLPFIGKAHVAYIPSGKVLGLSKVARIVDMYARRLQIQENLSRQIAEAIQQVTGALGVAVVIEAKHMCMMMRGVEKQNSSMITSVMLGEFRENAATRTEFLSLIK

SEQ ID NO: 13402 - protein, 186 aa, Pseudomonas lutea
  REGION 1..186: note = tr|A0A098SVK2|A0A098SVK2_9PSED GTP cyclohydrolase 1; OS = Pseudomonas lutea OX=243924 GN=folE PE=3 SV=1
MTLSLPQHYREILVGLGEDPEREGLLDTPKRAAKAMQYLCHGYEQTLEEIVNGALFASESDEMVIVKDIELYSLCEHHLLPFIGKAHVAYIPTGKVLGLSKIARIVDMFARRLQIQENLTRQIADAIQDVTKAAGVAVVIEAQHMCMMMRGVEKQNSTMNTSVMLGAFRESTTTRMEFLQLIGRSK

SEQ ID NO: 13403 - protein, 182 aa, Pseudomonas luteola
  REGION 1..182: note = tr|A0A2X2D2D9|A0A2X2D2D9_PSELU GTP cyclohydrolase 1; OS = Pseudomonas luteola OX=47886 GN=folE PE=3 SV=1
MSLEQHYSAILSQLGEDVSREGLLDTPKRAAKAMQYLCKGYNQTLEEVVGDALFTSDNSEMVLVKNIELYSLCEHHMLPFIGKAHVAYMPSGKVLGLSKVARIVDMYARRLQIQENMTREIAEAIQKVTNAAGVAVVIEAQHMCMMMRGVEKQNSSMVTSVMLGQFRSNDATRAEFMGLINR

SEQ ID NO: 13404 - protein, 191 aa, Pseudomonas mandelii
  REGION 1..191: note = tr|A0A255XSY4|A0A255XSY4_9PSED GTP cyclohydrolase 1; OS = Pseudomonas mandelii OX=75612 GN=folE PE=3 SV=1
  VARIANT 96: note = Xaa can be any naturally occurring amino acid
  VARIANT 98: note = Xaa can be any naturally occurring amino acid
  VARIANT 100: note = Xaa can be any naturally occurring amino acid
MTLSLHQNALSQSYREILINLGENPDREGLQDTPVRAAKAMQYLCHGYDQSVEEIVNGALFASDTDEMIIVADIELYSLCEHHLLPFIGKAHVAYXPXGXVLGLSKIARLVDMFARRLQIQENLTRQIAEAVQQVTDAAGVAVVIEAKHMCMMMRGVEKQNSTMNTSVMLGAFRESNTTRMEFLQLIGRSK

SEQ ID NO: 13405 - protein, 185 aa, Pseudomonas mandelii
  REGION 1..185: note = tr|A0A5C5QI84|A0A5C5QI84_9PSED GTP cyclohydrolase 1; OS = Pseudomonas mandelii OX=75612 GN=folE PE=3 SV=1
MNEELAKNYRGILQAVGEDPQREGLLDTPKRAAKAMHYLCHGYRQTLEEIVNGALFESDNDEMIIVRDIELYSLCEHHLLPFIGKAHVAYMPTGKVLGLSKVARIVDMFARRLQIQENLTRQIAEAIAQVSRAAGVAVVIEAKHMCMMMRGVEKQNSTMTTSVMLGTFRESYNTRQEFLQLIRSR

SEQ ID NO: 13406 - protein, 181 aa, Pseudomonas marginalis
  REGION 1..181: note = tr|A0A3M4FK21|A0A3M4FK21_PSEMA GTP cyclohydrolase 1; OS = Pseudomonas marginalis pv. marginalis OX=97473 GN=folE; PE = 3 SV=1
MSLEQNYTDILGQLGEDVSREGLLDTPKRAAKAMQYLCRGYAQTLEEVTNGALFSSDNSEMVLVKDIELYSLCEHHLLPFIGKAHVAYIPSGKVLGLSKVARIVDMYARRLQIQENLSRQIADAVMQVTGALGVAVVIEAKHMCMMMRGVEKQNSSMITSVMLGEFRENAATRSEFLSLIK

SEQ ID NO: 13407 - protein, 181 aa, Pseudomonas marginalis; identical to SEQ ID NO: 13303
  REGION 1..181: note = tr|A0A3M5PX09|A0A3M5PX09_PSEMA GTP cyclohydrolase 1; OS = Pseudomonas marginalis pv. marginalis OX=97473 GN=folE; PE = 3 SV=1

SEQ ID NO: 13408 - protein, 185 aa, Pseudomonas marincola
  REGION 1..185: note = tr|A0A1I7B4J2|A0A1I7B4J2_9PSED GTP cyclohydrolase 1; OS = Pseudomonas marincola OX=437900 GN=folE PE=3 SV=1
MSEELANHYHAILQGLGEDPQREGLQDTPKRAAKAMQYLCHGYQQDIDQIVNGALFESDNDEMVIVRDIELYSLCEHHLLPFTGKAHIAYIPTGRVLGLSKVARIVEMFARRLQIQENLTRQIAEAIAEITQAAGVAVVIEAKHMCMMMRGVEKQNSDMCTSVMLGCFRESYNTRQEFLQLIRSR

SEQ ID NO: 13409 - protein, 182 aa, Pseudomonas marincola
  REGION 1..182: note = tr|A0A1I6XER4|A0A1I6XER4_9PSED GTP cyclohydrolase 1; OS = Pseudomonas marincola OX=437900 GN=folE PE=3 SV=1
MSLEQNYTEILGQLGEDASREGLLDTPKRAAKAMQYLCRGYQQTLEEVTNGALFSSDNSEMVLVKNIELYSLCEHHLLPFIGKAHVAYIPSGKVLGLSKVARIVDMFARRLQIQENLSRQIADAVQQVTGAMGVAVVIEAQHMCMMMRGVEKQNSSMVTSVMLGEFRSNAATRSEFLSLINN

SEQ ID NO: 13410 - protein, 181 aa, Pseudomonas mediterranea; identical to SEQ ID NO: 13235
  REGION 1..181: note = tr|A0A0A4GNH3|A0A0A4GNH3_9PSED GTP cyclohydrolase 1; OS = Pseudomonas mediterranea CFBP 5447 OX=1348058 GN=folE; PE = 3 SV=1

SEQ ID NO: 13411 - protein, 298 aa, Pseudomonas mediterranea
  REGION 1..298: note = tr|A0A0A4HIF7|A0A0A4HIF7_9PSED GTP cyclohydrolase FolE2 OS=Pseudomonas mediterranea CFBP 5447 OX=1348058; GN = folE2 PE=3 SV=1
MNAFTLPDIAAQASRQALPLDWVGMCGVALPVLIDGQQLSATADLGVSLDDEEARGIHMSRLYLALETLENSPLSPPLLHRTLQQFLESHEGLSQAASLIIHTELMLKRPALVSPLSGWKRYPISIEAQLKHEVFHVELNIQLPYSSTCPCSAALARQLIQQQFVEDFANKAVEHGEVLAWLGSTEGIAATPHSQRSFASLKVRLDPGINHLPLSAFINQAEAALGTAVQTAVKRADEQAFALANGQNLMFCEDAARRLSLALRQSPDVMALNVRVVHAESLHAHDAVAQSRWAREAA

SEQ ID NO: 13412 - protein, 216 aa, unidentified
  source 1..216: note = Pseudomonas meliae
  REGION 1..216: note = tr|A0A0N8S5C8|A0A0N8S5C8_9PSED GTP cyclohydrolase 1; OS = Pseudomonas meliae OX=86176 GN=folE PE=3 SV=1
MQRCRAPALLRKLLCAPSATGQPSHPSKPTRKHTPVTLEQNYTAILGQLGEDVSREGLLDTPKRAAKAMQYLCRGYAQTLEEVTNGALFSSDASEMVMVKDIELYSLCEHHLLPFIGKAHVAYIPNGKVLGLSKVARIVDMYARRLQIQENLSRQIAEAIQQVTGALGVAVVIEAKHMCMMMRGVEKQNSAMITSVMLGEFRENAATRSEFLSLIK

SEQ ID NO: 13413 - protein, 301 aa, unidentified
  source 1..301: note = Pseudomonas meliae
  REGION 1..301: note = tr|A0A0P9UXH9|A0A0P9UXH9_9PSED GTP cyclohydrolase FolE2 OS=Pseudomonas meliae OX=86176 GN=folE2 PE=3 SV=1
MNNPLPDVALTEVSSALVSLDWVGMQGVEVPVRLAEAGVRHPVHAHVDLQVDLADPSVKGIHMSRLYRLLDRFAEHQILSPDTLSALMEAMVESHLDCHSSRARLTLSFNLLCRRPALITEGLSGWKSYPVKLDATWHAGRLCLDVSADITYSSTCPCSAALSRQLLEGAFTARFGRQSFVDPMQVATWLRENASFATPHSQRSVATVQVRVAEQATELGLMTLIDAVEQALGTPVQTAVKRADEQAFARLNGQNLMYVEDAARKVQQALEGRYAASSVSVRHFESLHPHDAVAQTSNYLS

SEQ ID NO: 13414 - protein, 296 aa, Pseudomonas mendocina
  REGION 1..296: note = sp|A4Y119|GCH4_PSEMY GTP cyclohydrolase FolE2; OS = Pseudomonas mendocina (strain ymp) OX=399739 GN=folE2; PE = 3 SV=1
MNEQLLPDIAAQATHHDLPLHWVGMAGIALPIQLAGQALNASVDIGVSLDDAGARGIHMSRLYLALQGLAGKPLTLAALQHLLDDCLSSHHELSDSASLTVRGALPLQRPALVSQLSGWKHYPFEIHARQDGRGLHMELQVELDYSSTCPCSAALARQLIQQRFAESFAQQPLNYLDVLDWLGSTQGIVATPHSQRSTATLQLRLAADCIDLPLLALLEAAERALGTPVQTAVKRADEQAFALANGQNLMFCEDAARRLHRALRQLPQASAFRVRVVHAESLHAHDAVAESRWNWS

SEQ ID NO: 13415 - protein, 181 aa, Pseudomonas mendocina
  REGION 1..181: note = tr|A0A550FPM1|A0A550FPM1_PSEME GTP cyclohydrolase 1; OS = Pseudomonas mendocina OX=300 GN=folE PE=3 SV=1
MSLEQHYTAILGQLGEDVSREGLLDTPKRAAKAMQYLCRGYQQTLEEVTNGALFSSDNSEMVLVKNIELYSLCEHHLLPFIGKAHVAYIPNGKVLGLSKVARIVDMYARRLQIQENLSRQIAEAVEQVTGALGVAVVIEAQHMCMMMRGVEKQNSSMVTSVMLGEFRSNPATRGEFLNLVR

SEQ ID NO: 13416 - protein, 209 aa, unidentified
  source 1..209: note = [Pseudomonas] mesoacidophila
  REGION 1..209: note = tr|A0A2A4F9Y2|A0A2A4F9Y2_9BURK GTP cyclohydrolase 1; OS = [Pseudomonas] mesoacidophila OX=265293 GN=folE PE=3 SV=1
MGKKSSRPEPAASRPSRSEAEEAVRVLLRWAGDDPAREGLVDTPARVVRAYEEFFSGYGHEPRDILARTFSEVDGYDEMIVLKDIRFESYCEHHMVPIIGRAHVAYLPNHRVVGISKLARLVDAFAKRLQIQEKMTVQIADTLFDVLQPKGVGVILEAAHQCISTRGIHKPGVEMVTSRMLGTFRTDPSTRREFLSIVANPSSVNLTNT

SEQ ID NO: 13417 - protein, 269 aa, unidentified
  source 1..269: note = [Pseudomonas] mesoacidophila
  REGION 1..269: note = tr|A0A2A4FMP6|A0A2A4FMP6_9BURK GTP cyclohydrolase FolE2 OS=[Pseudomonas] mesoacidophila OX=265293 GN=folE2; PE = 3 SV=1
MNQMNPAFVMPDVQSTVDTRQIPIQRVGVKAVRHPLTVRTESGDVQPSVGLWNLDVHLPAEQKGTHMSRFVALLEEHRAPLTTGLFRTMLASMLEKLEAEAGRIEVTFPYFVNKTAPVSGVQSLLDYEVTLAGESRGGATRLFLKVLVPVTSLCPCSKKISQYGAHNQRSHVTIDAELAADVPVEALIRMAEEEASCELWGLLKRPDEKFVTERAYENPKFVEDLVRDVAQRLDADERIVAYVLEAENFESIHNHSAYALIERDKRQAA

SEQ ID NO: 13418 - protein, 298 aa, Pseudomonas migulae
  REGION 1..298: note = tr|A0A1H5NKY2|A0A1H5NKY2_9PSED GTP cyclohydrolase FolE2 OS=Pseudomonas migulae OX=78543 GN=folE2 PE=3 SV=1
MNALTLPDIAAQASRQALPLEWVGMCGIALPVLFDGQRLSAKADAGVSLDDGEARGIHMSRLYLALEMLEQENLTPALLRRVLQQFLDTHEGLSNNAYLNIHADLLLKRPALISPLSGWKSYPVSIEARLKNAMFHVELKIDISYSSTCPCSAALSRQLIQQQFVDDFANKSLQHADVLAWLGSTKGIVATPHSQRSNAQLKLRLDDYLDDLPLIALINDAEAALGTAVQTAVKRADEQAFALANGQNLMFCEDAVRRLNLALKRSPGINAFHLKVVHAESLHAHDAVAESRWNWEAA

SEQ ID NO: 13419 - protein, 186 aa, Pseudomonas migulae
  REGION 1..186: note = tr|A0A1H5LIW5|A0A1H5LIW5_9PSED GTP cyclohydrolase 1; OS = Pseudomonas migulae OX=78543 GN=folE PE=3 SV=1
MESASVTLEQNYTAILGQLGEDVSREGLLDTPKRAAKAMQYLCRGYEQTLEEVTNGALFSSDNSEMVLVKDIELYSLCEHHLLPFIGKAHVAYIPSGKVLGLSKVARIVDMYARRLQIQENLSRQIADAVQQVTGALGVAVVIEAKHMCMMMRGVEKQNSSMITSVMLGEFRENAATRSEFLSLIK

SEQ ID NO: 13420 - protein, 298 aa, Pseudomonas mohnii
  REGION 1..298: note = tr|A0A1H4V3E4|A0A1H4V3E4_9PSED GTP cyclohydrolase FolE2 OS=Pseudomonas mohnii OX=395600 GN=folE2 PE=3 SV=1
MNALTLPDIAAQAARQALPLEWVGMCGIALPVLFDGQRLVATADAGVSLDDGEARGIHMSRLYLALEQLAQETLSPPVLQRVLQRFLDSHRGLSSSASIKIHTDLLLKRPALISPLAGWKSYPVTIEARLKNAMFHVELKIDLPYSSTCPCSAALARQLIQQQFITDFANTSLQHADVLAWLGSTNGIVATPHSQRSSAQLRLRLDDYLDELPLVAIINDAEAALGTAVQTAVKRADEQAFALANGQNLMFCEDAARRLNQALKRAPGINAFHIRVVHAESLHAHDAVADSRWNWEAA

SEQ ID NO: 13421 - protein, 186 aa, Pseudomonas mohnii
  REGION 1..186: note = tr|A0A1H5A1E9|A0A1H5A1E9_9PSED GTP cyclohydrolase 1; OS = Pseudomonas mohnii OX=395600 GN=folE PE=3 SV=1
MNPSLAEHYREILVGVGENPEREGLLDTPKRAAKAMQYLCNGYTTRLEDVINGALFESQNDEMVIVRDIELYSLCEHHMLPFIGKAHVAYLPTGRVLGLSKVARVVDMFARRLQIQENLTRQIADAIQHITDAAGVAVVIEAKHMCMMMRGVEKQNSVMTSSVMLGAFRESSTTRQEFLQLIGRRP

SEQ ID NO: 13422 - protein, 181 aa, Pseudomonas monteilii
  REGION 1..181: note = tr|V9UWN4|V9UWN4_9PSED GTP cyclohydrolase 1; OS = Pseudomonas monteilii SB3101 OX=1435058 GN=folE PE=3; SV = 1
MSLEQNYTEILSQIGEDVSREGLLDTPKRAAKAMKYLCRGYEQTLEEVTNNALFSSDNSEMVLVRDIELYSMCEHHMLPFIGKAHVAYLPKGKVLGLSKVARIVDMYARRLQIQENLSRQVAEAVQKVTGAAGVAVVIEAKHMCMMMRGVEKQNSTMITSVMLGEFRENAATRSEFLSLIK

SEQ ID NO: 13423 - protein, 301 aa, Pseudomonas monteilii
  REGION 1..301: note = tr|A0A399LXP5|A0A399LXP5_9PSED GTP cyclohydrolase FolE2 OS=Pseudomonas monteilii OX=76759 GN=folE2 PE=3 SV=1
MTPLKLPDIAAQTQKYTLPLSWVGMCGIALPVQFEGRTAAAKVDAGVSLVGGSSRGIHMSRLYLALESLEHQPLTPLAMRQLLADFLSSHDGLSSAAYLQISFEHLLKRPALVSPLAGWKSYAVTVNARIENEMFHVELSVSVPYSSTCPCSAALARQLIQQQFQANFSDQQVDQSAVLQWLGSAEGIVATPHSQRSNAQIHVRLHSNQQVLPITELIDRIEASLGTAVQTAVKRADEQAFALANGQNLMFCEDAARRLHKALRQVEWSTAFKLRVEHAESLHAHDAVATSQWQWDLSCAV

SEQ ID NO: 13424 - protein, 181 aa, Pseudomonas moorei; identical to SEQ ID NO: 13225
  REGION 1..181: note = tr|A0A1H1H4D6|A0A1H1H4D6_9PSED GTP cyclohydrolase 1; OS = Pseudomonas moorei OX=395599 GN=folE PE=3 SV=1

SEQ ID NO: 13425 - protein, 298 aa, Pseudomonas moorei
  REGION 1..298: note = tr|A0A1H1IIU3|A0A1H1IIU3_9PSED GTP cyclohydrolase FolE2 OS=Pseudomonas moorei OX=395599 GN=folE2 PE=3 SV=1
MNALTLPDIAVQASRQALPLEWVGMCGIALPVLFDGQRLVAKADAGVSLDDGEARGIHMSRLYLALEQLEQETLSPPVLRRVLQRFLDSHPGISSRASVKIHTDLLLKRPALISPLAGWKTYPVTIEAHLKNAMFHVELKIDVPYSSTCPCSAALSRQLIQQQFITDFANTSLQHADVLAWLGSTKGIVATPHSQRSIAQLHLRLDDFLDELPLIAIINDAEAALGTAVQTAVKRADEQAFALANGQNLMFCEDAARRLNQALKRAPGINAFHIRVVHAESLHAHDAVAESRWNWEVA

SEQ ID NO: 13426 - protein, 298 aa, Pseudomonas moraviensis
  REGION 1..298: note = tr|V8R271|V8R271_9PSED GTP cyclohydrolase FolE2; OS = Pseudomonas moraviensis R28-S OX=1395516 GN=folE2 PE=3; SV = 1
MNALTLPDIAAQSARLALPLDWVGMRGIALPVVLEGQCLSARVDAGVSLDDGEARGIHMSRLYLALETLEQRSLSPALLHQVLKCFLTSHQGLSACAYLNIHTELLLKRPALVSPLAGWKSYPASISASLKQQMFHVELKIELPYSSTCPCSAALARQLIQQQFVDDFANKALQHADVLAWLGSTKGIVATPHSQRSYAQLHLQLDNFIDELPLTAIIDDAEAALGTAVQTAVKRPDEQAFALANGQNLMFCEDAARRLNLALQRTPGINQFHIRVIHAESLHAHDAVAECSWRREQK

SEQ ID NO: 13427 - protein, 181 aa, Pseudomonas moraviensis; identical to SEQ ID NO: 13376
  REGION 1..181: note = tr|A0A1H2J362|A0A1H2J362_9PSED GTP cyclohydrolase 1; OS = Pseudomonas moraviensis OX=321662 GN=folE PE=3 SV=1

SEQ ID NO: 13428 - protein, 181 aa, Pseudomonas mosselii
  REGION 1..181: note = tr|A0A1X1P0S1|A0A1X1P0S1_9PSED GTP cyclohydrolase 1; OS = Pseudomonas mosselii OX=78327 GN=folE PE=3 SV=1
MSLEQNYTAILSQIGEDVSREGLLDTPKRAAKAMKYLCRGYEQTLEEVTNGALFTSDNSEMVLVRDIELYSMCEHHMLPFIGKAHVAYLPKGKVLGLSKVARIVDMYARRLQIQENLSRQIAEAVQQVTGAAGVAVVIEAKHMCMMMRGVEKQNSTMLTSVMLGEFRENAATRSEFLSLIK

SEQ ID NO: 13429 - protein, 181 aa, Pseudomonas mosselii
  REGION 1..181: note = tr|A0A2V4L0H8|A0A2V4L0H8_9PSED GTP cyclohydrolase 1; OS = Pseudomonas mosselii OX=78327 GN=folE PE=3 SV=1
MSLEQNYTAILSQIGEDVSREGLLDTPKRAAKAMKYLCRGYEQTLEEVTNGALFTSDNSEMVLVRDIELYSMCEHHMLPFIGKAHVAYLPKGKVLGLSKVARIVDMYARRLQIQENLSRQIAEAVQQVTGAAGVAVVIEAKHMCMMMRGVEKQNSTMLTSVMLGEFRDNASTRSEFLSLIK

SEQ ID NO: 13430 - protein, 186 aa, Pseudomonas mucidolens
  REGION 1..186: note = tr|A0A1H2NGY4|A0A1H2NGY4_9PSED GTP cyclohydrolase 1; OS = Pseudomonas mucidolens OX=46679 GN=folE PE=3 SV=1
MTLSLPHHYREILKDLGEDPDREGLLDTPKRAAKAMQYVCHGYSQSVEDIVNGALFTSDSDEMVIVANIELYSMCEHHLLPFIGKAHVAYIPTGKVLGLSKIARLVDMFARRLQIQENLTQQIAEAIQSVTQAAGVAVVIEAQHMCMMMRGVAKQNSTMNTSVMLGAFRESNTTRMEFLQLIGRSK

SEQ ID NO: 13431 - protein, 181 aa, Pseudomonas mucidolens
  REGION 1..181: note = tr|A0A1H2N2Q1|A0A1H2N2Q1_9PSED GTP cyclohydrolase 1; OS = Pseudomonas mucidolens OX=46679 GN=folE PE=3 SV=1
MTLEQNYTAILGQLGEDVSREGLLDTPKRAAKAMQYLCRGYEQTLEEVTNGALFSSDNSEMVLVKDIELYSLCEHHLLPFIGKAHVAYIPSGKVLGLSKVARIVDMYARRLQIQENLSRQIADAVLQVTGALGVAVVIEAKHMCMMMRGVEKQNSSMITSVMLGEFRENAATRSEFLSLIK

SEQ ID NO: 13432 - protein, 184 aa, unidentified
  source 1..184: note = Pseudomonas nabeulensis
  REGION 1..184: note = tr|A0A4Z0AR44|A0A4Z0AR44_9PSED GTP cyclohydrolase 1; OS = Pseudomonas nabeulensis OX=2293833 GN=folE PE=3 SV=1
MTLPHHYREILKGLGEDSEREGLLDTPKRAAKAMQYLCHGYEQSLDEIVNGALFTSDNDEMVILKDIELYSLCEHHLLPFIGKAHVAYIPTGKVLGLSKLARIVDMYARRLQIQENLTRQIADAIQSVTQAAGVAVVIEAQHMCMMMRGVEKQNSTMNTSVMLGAFRESNTTRMEFLQLIGRSK

SEQ ID NO: 13433 - protein, 181 aa, unidentified; identical to SEQ ID NO: 13370
  source 1..181: note = Pseudomonas nabeulensis
  REGION 1..181: note = tr|A0A4Z0B2K7|A0A4Z0B2K7_9PSED GTP cyclohydrolase 1; OS = Pseudomonas nabeulensis OX=2293833 GN=folE PE=3 SV=1

SEQ ID NO: 13434 - protein, 295 aa, Pseudomonas nitroreducens
  REGION 1..295: note = tr|A0A246FD94|A0A246FD94_9PSED GTP cyclohydrolase FolE2 OS=Pseudomonas nitroreducens OX=46680 GN=folE2 PE=3; SV = 1
MTALLPDIACQSTRLLIPLDWVGMQGIAVPLRIAGERVAAYADASVSLDEAEARGIHMSRLYLALEALAEAELSPALLRDLLKRFLRSHAQLSRRARLALRFELMLRRPALVSPLSGWKRYPCEIHAQLEDDALQLELRLSLPYSSTCPCSAALARQLIQERFDSDFAGRPLKASEVRAWLGSPLGIVATPHSQRSEAQLKVQLGPTAQAFAFSELIDLAEEALGTAVQTAVKRADEQAFALANGQNLMFCEDAARRLHRALLQREEVSGFEVRVVHAESLHAHDAVAVSRWRRD

SEQ ID NO: 13435 - protein, 181 aa, Pseudomonas nitroreducens; identical to SEQ ID NO: 13296
  REGION 1..181: note = tr|A0A246FAP0|A0A246FAP0_9PSED GTP cyclohydrolase 1; OS = Pseudomonas nitroreducens OX=46680 GN=folE PE=3 SV=1

SEQ ID NO: 13436 - protein, 301 aa, unidentified
  source 1..301: note = Pseudomonas oceani
  REGION 1..301: note = tr|A0A2P4ES26|A0A2P4ES26_9PSED GTP cyclohydrolase FolE2 OS=Pseudomonas oceani OX=1708783 GN=folE2 PE=3 SV=1
MTAALPDVSLSDLSADPAALDWVGMQGIDLPITLNETGQRQTVHACADLQVDLPRPEVKGIHMSRLYTLLDRLGQDRALAPTVLQALLQAMVESHADCGSRNARLVLQFSLLCRRPALVTPQLSGWKAYPVKLEATLVEGRFRARVELTVSYSSTCPCSAALSRQLLVSAYDKAFAGRQRLDPVAVSQWLGRNGSLATPHSQRSEAKVAVDLQAAEESLGLLALIDQIEQALATPVQTAVKRADEQAFAALNGANLMFVEDAARRLGAALSAAGAQHAAVHVRHIESLHPHDAVASVGAHP

SEQ ID NO: 13437 - protein, 187 aa, unidentified
  source 1..187: note = Pseudomonas oceani
  REGION 1..187: note = tr|A0A2P4ETC1|A0A2P4ETC1_9PSED GTP cyclohydrolase 1; OS = Pseudomonas oceani OX=1708783 GN=folE PE=3 SV=1
MSLEKLTKNYLDVLTNLGEQPERDGLKGTPERAAKAMQFLCHGYNQSLDEIVNGALFDSDNDEMVIVKDIELYSLCEHHMLPFIGKAHVAYIPTGKVIGLSKVARIVDMFARRLQIQENLTRQIAEAIQQVTNARGVAVVIEAKHMCMMMRGVEKQNSSMHSSVMLGAFRESVNTRQEFLQLISRGN

SEQ ID NO: 13438 - protein, 206 aa, Pseudomonas oleovorans
  REGION 1..206: note = tr|A0A2W5WVD2|A0A2W5WVD2_PSEOL Putative GTP cyclohydrolase OS=Pseudomonas oleovorans OX=301 GN=folE2; PE = 4 SV=1
MNEQPLPDIAAQATHHDLPLDWVGMAGIALPIRLADAAVNACVDIGVSIELQVEVAYSSTCPCSAALARQLIQQRFAWDFPDQQVDYSSVLDWLGSTQGIVATPHSQRSTATLQLRLAPGCVELPVLALIDSAEQALGTPVQTAVKRADEQAFALANGQNLMFCEDAARRLHRTLRQLPQASAFRLKVVHAESLHAHDAVAQSRWS

SEQ ID NO: 13439 - protein, 296 aa, Pseudomonas oleovorans
  REGION 1..296: note = tr|A0A3R8X083|A0A3R8X083_PSEOL GTP cyclohydrolase FolE2 OS=Pseudomonas oleovorans OX=301 GN=folE2 PE=3 SV=1
MNEQPLPDIAAQATHHDLPLDWVGMAGIALPIRLASAAVTASVDIGVSLDDAGARGIHMSRLYLAAQRLVHQELDVPAVLQVLDDCLSSHQELSDSATLTLRGEVPLKRPALVSPLSGWKGYPFELRARQDGRGVNIELQVEVSYSSTCPCSAALARQLIQQRFAESFAQEPLDYLEVLDWLGSTQGIVATPHSQRSTATLQLRLASGCVELPVLALIDSAEHALGTPVQTAVKRADEQAFALANGQNLMFCEDAARRLHRALRQLPQASAFRLRVIHAESLHAHDALAESRWNWS

SEQ ID NO: 13440 - protein, 296 aa, Pseudomonas orientalis
  REGION 1..296: note = tr|A0A3G7X9V7|A0A3G7X9V7_9PSED GTP cyclohydrolase FolE2 OS=Pseudomonas orientalis OX=76758 GN=folE2 PE=3 SV=1
MNALTLPDIAAQASRQALPLDWVGMCGVALPVLLDGQRLPATADAGVSLDDGSARGIHMSRLYLALEMFDQQPLTPALLRNVLQRFLDTHEDLSNNAYLRIHTHLLLKRPALVSPLDGWKRYPISIEARLENQMFHVELKIDVTYSSTCPCSAALARQLIQQQFLNDFAHAPLQHADVLTWLGSANGIVATPHSQRSSAQLHVHLQGEQLPIVDLINSAEAALGTAVQTAVKRADEQAFALANGQNLMFCEDAARRLNLALKRSNAVKAFHLKVVHAESLHAHDAVAESRWTRPST

SEQ ID NO: 13441 - protein, 181 aa, Pseudomonas orientalis
  REGION 1..181: note = tr|A0A2L0S039|A0A2L0S039_9PSED GTP cyclohydrolase 1; OS = Pseudomonas orientalis OX=76758 GN=folE PE=3 SV=1
MSLEQNYTEILGQLGEDVSREGLLDTPKRAAKAMQYLCRGYEQTLEEVTNGALFSSDNSEMVLVKDIELYSLCEHHLLPFIGKAHVAYIPSGKVLGLSKVARIVDMYARRLQIQENLSRQIADAVLEVTGALGVAVVIEAKHMCMMMRGVEKQNSSMITSVMLGEFRDNAATRSEFLSLIK

SEQ ID NO: 13442 - protein, 186 aa, unidentified
  source 1..186: note = Pseudomonas oryzae
  REGION 1..186: note = tr|A0A1H1Q6D4|A0A1H1Q6D4_9PSED GTP cyclohydrolase 1; OS = Pseudomonas oryzae OX=1392877 GN=folE PE=3 SV=1
MNDYLSDHYRGILVGLGENPEREGLLDTPGRAAKAMQYLCRGYRQSLDEIVNGALFASDNDEMVIVRDVELYSLCEHHLLPFIGKAHVAYIPTGKVLGLSKVARIVDMYARRLQIQENLTRQIAEAIQSVTNAAGVAVVIEAQHMCMMMRGVEKQNSVMNTSVMLGAFRESCNTRHEFLQLIGRRH

SEQ ID NO: 13443 - protein, 181 aa, unidentified
  source 1..181: note = Pseudomonas oryzae
  REGION 1..181: note = tr|A0A1H1SDE3|A0A1H1SDE3_9PSED GTP cyclohydrolase 1; OS = Pseudomonas oryzae OX=1392877 GN=folE PE=3 SV=1
MSVEQHYTAILSLLGEDVEREGLRDTPKRAAKAMQYLCRGYQQSLEEVTNGALFSSDNSEMVLVKDIELYSLCEHHLLPFIGKAHVAYIPNGKVLGLSKVARIVDMYARRLQIQENLTRQIAEAVEQVTGALGVAVVIEAKHMCMMMRGVEKQNSAMITSVMLGEFRANTATRGEFLSLIR

SEQ ID NO: 13444 - protein, 182 aa, Pseudomonas oryzihabitans
  REGION 1..182: note = tr|A0A0U4VNH2|A0A0U4VNH2_9PSED GTP cyclohydrolase 1; OS = Pseudomonas oryzihabitans OX=47885 GN=folE PE=3 SV=1
MSLEQHYSSILTGLGEDISREGLVDTPKRAAKAMQYLCRGYNQTLEEVVGDALFTSDNSEMVLVKNIELYSLCEHHMLPFIGKAHVAYMPKGKVLGLSKVARVVDMFARRLQIQENMTRQIAEAIEQVTGAAGVAVVIEAQHMCMMMRGVEKQNSSMVTSVMLGQFRANDATRAEFLGLINR

SEQ ID NO: 13445 - protein, 182 aa, Pseudomonas oryzihabitans
  REGION 1..182: note = tr|A0A2Z5AAF7|A0A2Z5AAF7_9PSED GTP cyclohydrolase 1; OS = Pseudomonas oryzihabitans OX=47885 GN=folE PE=3 SV=1
MSLEQHYSSILTGLGEDIGREGLVDTPKRAAKAMQYLCRGYTQTLEEVVGEALFTSDNSEMVLVKNIELYSLCEHHMLPFIGKAHVAYMPKGKVLGLSKVARIVDMFARRLQIQENMTRQIAEAIEKVTGAAGVAVVIEAQHMCMMMRGVEKQNSSMVTSVMLGQFRASDATRAEFLSLISR

SEQ ID NO: 13446 - protein, 296 aa, Pseudomonas otitidis
  REGION 1..296: note = tr|A0A1I0U3H6|A0A1I0U3H6_9PSED GTP cyclohydrolase FolE2 OS=Pseudomonas otitidis OX=319939 GN=folE2 PE=3 SV=1
MNDLSLPDVASQTQATLAPLDRVGMAGIRLPLQVAGQAVQARVEASVSLDTPGVRGIHMSRLYLALEALAGEELTLTALQALLQHFLDSHQGLSLSAHLRVAGELLLKRPALVSPLSGHKAYPFEIALSLDPRGFHVELMLELGYSSTCPCSAALSRQMTQRAFSERFAGQAPTWEALHEWLGSEAAMPATPHSQRSKARLWLRPADPLQAPDWIELVDRCEAALGTALQTAVKRADEQAFALANGHNLMFCEDAARRLAEPLRALPDLAAFKVRVEHEESLHAHDAVAEIHWLWT

SEQ ID NO: 13447 - protein, 185 aa, Pseudomonas otitidis
  REGION 1..185: note = tr|A0A1I0UCN1|A0A1I0UCN1_9PSED GTP cyclohydrolase 1; OS = Pseudomonas otitidis OX=319939 GN=folE PE=3 SV=1
MNDDLSSHYREILMGVGENPEREGLLDTPKRAAKAMRYLCRGYEQSLEEVVNGALFSSDNDEMVTVKDIELYSLCEHHLLPFIGKAHVAYIPTGKVLGLSKVARIVDMFARRLQIQENLTRQIAEAIQRVTGAAGVAVVIEAKHMCMMMRGVEKQNSVMTTSVMLGAFRESPSTRQEFLKLIGRS

SEQ ID NO: 13448 - protein, 205 aa, Pseudomonas pachastrellae
  REGION 1..205: note = tr|A0A1S8DDK8|A0A1S8DDK8_9PSED GTP cyclohydrolase 1; OS = Pseudomonas pachastrellae OX=254161 GN=folE PE=3 SV=1
MPAIERRPAPQVSRRDTAMSLENLTNNYREILTNLGEQPQRDGLKGTPERAAKAMQFLCRGYTQSLEEIVNGALFDSDNDEMVIVKDIELYSLCEHHMLPFIGKAHVAYIPTGKVIGLSKVARIVDMFARRLQIQENLTRQIAEAIQQVTNAAGVAVVIEAKHMCMMMRGVEKQNSSMHSSVMLGAFRESVNTRQEFLQLISRSN

SEQ ID NO: 13449 - protein, 296 aa, Pseudomonas palleroniana
  REGION 1..296: note = tr|A0A0X7JYE2|A0A0X7JYE2_9PSED GTP cyclohydrolase FolE2 OS=Pseudomonas palleroniana OX=191390 GN=folE2 PE=3; SV = 1
MNALTLPDIAAQASRQALPLDWVGMCGIALPILIDGQRLTAIADAGVSLDDGAARGIHMSRLYLALEMLDQQLLTPALLRNVLQRFLDSHEGLSKNAYLRIHTDLLLKRPALVSPLAGWKSYPVSIEARLENQMFHVELKIDVTYASTCPCSAALARQLIQQQFLQDFANTQLQHADVLTWLGSASGIVATPHSQRSSAQLHVQLQGEHLPFTDLINDAEAALGTAVQTAVKRADEQAFALANGQNLMFCEDAARRLNLALKRSDAVKAFHLKVIHAESLHAHDAVAESRWTRPSA

SEQ ID NO: 13450 - protein, 181 aa, Pseudomonas palleroniana; identical to SEQ ID NO: 13431
  REGION 1..181: note = tr|A0A0X7K2C3|A0A0X7K2C3_9PSED GTP cyclohydrolase 1; OS = Pseudomonas palleroniana OX=191390 GN=folE PE=3 SV=1

SEQ ID NO: 13451 - protein, 181 aa, Pseudomonas panacis
  REGION 1..181: note = tr|A0A1H4VDA0|A0A1H4VDA0_PSEPA GTP cyclohydrolase 1; OS = Pseudomonas panacis OX=307251 GN=folE PE=3 SV=1
MSLEQNYTAILGQLGEDVTREGLLDTPKRAAKAMQYLCRGYEQTLEEVTNGALFSSDNSEMVLVKDIELYSLCEHHLLPFIGKAHVAYIPSGKVLGLSKVARIVDMYARRLQIQENLSRQIADAVMQVTGALGVAVVIEAKHMCMMMRGVEKQNSSMITSVMLGEFRENAATRSEFLSLIK

SEQ ID NO: 13452 - protein, 186 aa, Pseudomonas panacis
  REGION 1..186: note = tr|A0A1H4ILH7|A0A1H4ILH7_PSEPA GTP cyclohydrolase 1; OS = Pseudomonas panacis OX=307251 GN=folE PE=3 SV=1
MTLSLPHHYREILKGLGEDPEREGLLDTPKRAAKAMQYLCHGYEQNLEEIVNGALFASDNDEMVILKDIELYSLCEHHLLPFIGKAHVAYIPTGRVLGLSKLARIVDMFARRLQIQENLTRQIADAIQDVTQASGVAVVIEAKHMCMMMRGVEKQNSTMNTSVMLGAFRESNTTRMEFLQLIGRSK

SEQ ID NO: 13453 - protein, 181 aa, Pseudomonas panipatensis
  REGION 1..181: note = tr|A0A1G8F648|A0A1G8F648_9PSED GTP cyclohydrolase 1; OS = Pseudomonas panipatensis OX=428992 GN=folE PE=3 SV=1
MSLEQHYSAILSQLGEDVTREGLVDTPKRAAKAMQYLCRGYQQTLDEIVNGALFSSDNSEMVLVKDIELYSLCEHHLLPFIGKAHVAYIPNGKVLGLSKVARIVDMYARRLQIQENMSRQIAEAVQQVTGALGVAVVIEAKHMCMMMRGVEKQNSSMVTSVMLGEFRDNAATRSEFLSLIR

SEQ ID NO: 13454 - protein, 298 aa, Pseudomonas panipatensis
  REGION 1..298: note = tr|A0A1G8J0C9|A0A1G8J0C9_9PSED GTP cyclohydrolase FolE2 OS=Pseudomonas panipatensis OX=428992 GN=folE2 PE=3; SV = 1
MTALPLPDIARQMTTAPLALDWVGMQGIAVPLRLHGERLAAQADAGVSLDKADARGIHMSRLYLALQRLAHEELRPALLRALIDDFLASHTELSQRASVRLHFEALLQRPALVSHLSGWKGYPCELLAEGDARHMRLELRLQLAYSSTCPCSAALARQLIQQRFASDFGGRALEHADLHAWLGGSAGIAATPHSQRSLADLRLQLRGDLAELPLLALLDCAERSLGTAVQTAVKRADEQAFALANGQNPMFCEDAARRLHHALAQREELLAFELTVVHAESLHAHDAVARSRWQREAA

SEQ ID NO: 13455 - protein, 295 aa, Pseudomonas parafulva
  REGION 1..295: note = tr|A0A0A7JVU0|A0A0A7JVU0_9PSED GTP cyclohydrolase FolE2 OS=Pseudomonas parafulva OX=157782 GN=folE2 PE=3 SV=1
MTSLTLPDIAAQTSPTLQPLDWVGMRGIALPVQLGGRTLSAWADAGVSLDDGESRGIHMSRLYLALEALEHTELTPLALRQLLAHFLDTHDGLSSSAYVRLKFDCMLKRPALISPLEGWKRYPVILDARIENEMFHVEQYVEIPYSSTCPCSAALARQLIQQQFLNDFANQPADIQAVLQWLGSTAGIVATPHSQRSQAAVRVRLQDTLQTLPVEALIDAVESALGTAVQTAVKRADEQAFALANGQNLMFCEDAARRIHHALRGLAWCSGFDLRVEHAESLHAHDAVAESRWQW

SEQ ID NO: 13456 - protein, 186 aa, Pseudomonas parafulva
  REGION 1..186: note = tr|A0A497UMH0|A0A497UMH0_9PSED GTP cyclohydrolase 1; OS = Pseudomonas parafulva OX=157782 GN=folE PE=3 SV=1
MNPLLASHYREILVGVGENPEREGLLDTPKRAAKAMQYLCNGYTMSLEDVTNGALFESQSDEMVIVSDIELYSLCEHHMLPFIGKAHVAYIPTGRVLGLSKVARVVDMFARRLQIQENLTRQIAEAIQQITDAAGVAVVIEARHMCMMMRGVEKQNSIMTSSVMLGAFRDSTTTRQEFLQLIGRRS

SEQ ID NO: 13457 - protein, 296 aa, unidentified
  source 1..296: note = Pseudomonas paralactis
  REGION 1..296: note = tr|A0A0R3AJ76|A0A0R3AJ76_9PSED GTP cyclohydrolase FolE2 OS=Pseudomonas paralactis OX=1615673 GN=folE2 PE=3; SV = 1
MNALTLPDIAAQASRQALPLDWVGMCGIALPVLLEGQRLAAIADAGVSLDDGTARGIHMSRLYLALEMLEQQPLTPALLRNVLQRFLDTHEDLSKDAYLRIHTNLLLKRPALVSPLEGWKSYPVSIEARLENQMFHVELKIDVTYSSTCPCSAALARQLIQQQFLQDFAHTPLQHEAVLTWLGSANGIVATPHSQRSSAQLNVQLQGDDLAIVDLINAAEAALGTAVQTAVKRADEQAFALANGQNLMFCEDAARRLNLALKRSDAVKAFHLKVVHAESLHAHDAVAESRWTRDFA

SEQ ID NO: 13458 - protein, 186 aa, unidentified
  source 1..186: note = Pseudomonas paralactis
  REGION 1..186: note = tr|A0A0R3AJY5|A0A0R3AJY5_9PSED GTP cyclohydrolase 1; OS = Pseudomonas paralactis OX=1615673 GN=folE PE=3 SV=1
MTFSLPHHYREILKGLGEDPEREGLLDTPKRAAKAMQYLCHGYEQNLEEIVNGALFASDNDEMVILKDIELYSLCEHHLLPFIGKAHVAYIPTGKVLGLSKLARIVDMFARRLQIQENLTRQIADAIQDVTQAAGVAVVIEAKHMCMMMRGVEKQNSTMNTSVMLGAFRESNTTRMEFLQLIGRSK

SEQ ID NO: 13459 - protein, 186 aa, Pseudomonas pelagia
  REGION 1..186: note = tr|A0A2A4AVB3|A0A2A4AVB3_9PSED GTP cyclohydrolase 1; OS = Pseudomonas pelagia OX=553151 GN=folE PE=3 SV=1
MSLEKLTDCYRGILTELDEEPGRDGLVGTPLRAAKAMQFMCRGYGQSLDEIVNNALFDSDNDEMVIVKDIELYSLCEHHMLPFIGKAHVAYIPTGKVIGLSKVARIVDMFARRLQIQENLTRQIAEALQQVTQAGGVAVVIEAKHMCMMMRGVEKQNSTMFSSVMLGAFRESGNTRQEFLQLISRG

SEQ ID NO: 13460 - protein, 195 aa, Pseudomonas pelagia
  REGION 1..195: note = tr|A0A2A4AXB3|A0A2A4AXB3_9PSED GTP cyclohydrolase 1; OS = Pseudomonas pelagia OX=553151 GN=folE PE=3 SV=1
MTHDETPEMSLENLTQNYQEILTNLGENPQREGLKGTPLRAAKAMQFLCRGYDQSLEEIVNGALFDSTNDEMVIVKDIELYSLCEHHLLPFIGKAHVAYIPTGKVIGLSKVARIVDMFARRLQIQENLTRQIADALLSVTNAKGVAVVIEAKHMCMMMRGVEKQNSSMHSSVMLGAFRDSVNTRQEFLQLIARSS

SEQ ID NO: 13461 - protein, 296 aa, Pseudomonas peli
  REGION 1..296: note = tr|A0A1G4R5K8|A0A1G4R5K8_9PSED GTP cyclohydrolase FolE2 OS=Pseudomonas peli OX=592361 GN=folE2 PE=3 SV=1
MNALTLPDIATQAPAHALALDWVGMQGIALPIKLAEQHIHARADIGVSLDYGNARGIHMSRLYLALHALEQRELNPTTLRELMGEFLDSHQGLSQQASITLRGEALLNRPALVSPLSGWKAYPFEVRARQDSWGFHVELQVEVTYSSTCPCSAALARQLIQQRFVEDFANQPLDHAQLLAWLGSTQGIVATPHSQRSTATLQVRLHGDSAKLPLVALIDAAEQALGTAVQTAVKRADEQAFALANGQNLMFCEDAARRLHSALREQPAFSAFHLRVVHAESLHAHDAVAASTWNWR

SEQ ID NO: 13462 - protein, 182 aa, Pseudomonas peli
  REGION 1..182: note = tr|A0A1G4PD89|A0A1G4PD89_9PSED GTP cyclohydrolase 1; OS = Pseudomonas peli OX=592361 GN=folE PE=3 SV=1
MSLEQQYTEILGQLGEDVSREGLLDTPKRAAKAMQYLCKGYQQTLEEVTNGALFSSDNSEMVLVKNIELYSLCEHHLLPFIGKAHVAYIPNGKVLGLSKVARIVDMYARRLQIQENLSRQIAEAIQQVTGALGVAVVIEAQHMCMMMRGVEKQNSSMVTSVMLGEFRENAATRSEFLSLINN

SEQ ID NO: 13463 - protein, 315 aa, Pseudomonas plecoglossicida
  REGION 1..315: note = tr|A0A495PES9|A0A495PES9_9PSED GTP cyclohydrolase FolE2 OS=Pseudomonas plecoglossicida OX=70775 GN=folE2; PE = 3 SV=1
MMSSALPDVSVTDLAPSLSPLQWVGMQGIDLPVRIQEPTYQRELHARADVQVDLPAPHVKGIHMSRLYRLLDAWGQAAAVSPASLFALLQEMIDSHQDCESRNARLRLDFDLLVRRPALVTEGLSGWKSYPVHVLATKVGGALNLSIEVRIGYSSTCPCSAALSRQLIEDGFLRTFKDQPLLEASAVAQWLRSNASLATPHSQRSEARVRVTVPADAPDLGLLALIDHIEGALRTPVQTAVKRADEQAFAALNGQNLMFVEDAARRIQANLHGYRDSQVHVRHLESLHPHDASAWSAPQAAAPDQQESFATGNER

SEQ ID NO: 13464 - protein, 301 aa, Pseudomonas plecoglossicida
  REGION 1..301: note = tr|A0A099N8R3|A0A099N8R3_9PSED GTP cyclohydrolase FolE2 OS=Pseudomonas plecoglossicida OX=70775 GN=folE2; PE = 3 SV=1
MTQLKLPDIAAQTHEYALPLNWVGMCGIAQPVQFEGRTAAATVDAGVSLVDGSSRGIHMSRLYLALESLEHQPLTPLTIRQLLGNFLSSHEGLSSAAYLRLRFEHLLKRPALISPLEGWKSYAVTVDARIENEMFHVELSVSVPYSSTCPCSAALARQLIQQQFQAHFSTEQVDKSAVLQWLGSAEGIVATPHSQRSSALIQVRLRSNQQVLPITELIDCIEASLGTAVQTAVKRADEQAFALANGQNLMFCEDAARRLHKALRQIEWSTAFKLRVEHAESLHAHDAVATSQWQWDVSCAA

SEQ ID NO: 13465 - protein, 181 aa, Pseudomonas poae
  REGION 1..181: note = tr|A0A1H0MKW9|A0A1H0MKW9_9PSED GTP cyclohydrolase 1; OS = Pseudomonas poae OX=200451 GN=folE PE=3 SV=1
MSLEQNYTAILGQIGEDVSREGLLDTPKRAAKAMQYLCRGYEQTLEEVTNGALFSSDNSEMVLVKDIELYSLCEHHLLPFIGKAHVAYIPSGKVLGLSKVARIVDMYARRLQIQENLSRQIADAVLQVTGALGVAVVIEAKHMCMMMRGVEKQNSSMITSVMLGEFRENAATRSEFLSLIK

SEQ ID NO: 13466 - protein, 181 aa, Pseudomonas poae; identical to SEQ ID NO: 13303
  REGION 1..181: note = tr|A0A2A9H5X0|A0A2A9H5X0_9PSED GTP cyclohydrolase 1; OS = Pseudomonas poae OX=200451 GN=folE PE=3 SV=1

SEQ ID NO: 13467 - protein, 186 aa, Pseudomonas pohangensis
  REGION 1..186: note = tr|A0A1H2E7D5|A0A1H2E7D5_9PSED GTP cyclohydrolase 1; OS = Pseudomonas pohangensis OX=364197 GN=folE PE=3 SV=1
MNTQLSDHYQQILVGLGENPSREGLIDTPMRAAKAMQYLCNGYSKSLEEVVNGALFESDNDEMVIVRDIELYSLCEHHLLPFIGKAHVAYIPTGKVLGLSKVARIVDMFARRLQIQENLTRQIAEAIQQVTNAAGVAVVIEAKHMCMMMRGVEKQNSVMSSSVMLGAFRESCNTRHEFLQLIGRGR

SEQ ID NO: 13468 - protein, 181 aa, Pseudomonas pohangensis
  REGION 1..181: note = tr|A0A1H2EVV5|A0A1H2EVV5_9PSED GTP cyclohydrolase 1; OS = Pseudomonas pohangensis OX=364197 GN=folE PE=3 SV=1
MPMEQHYTAILSQLGEDVSREGLIDTPKRAAKAMQFLCRGYQQTLEEVTNNALFSSDNSEMVLVKNIELYSLCEHHLLPFIGKAHVAYIPSGKVLGLSKVARIVDMYARRLQIQENLSRQIADAIQQVTGALGVAVVIEAQHMCMMMRGVEKQNSSMVTSVMLGEFRENAATRSEFLSLIG

SEQ ID NO: 13469 - protein, 189 aa, unidentified
  source 1..189: note = Pseudomonas prosekii
  REGION 1..189: note = tr|A0A1H1SXZ9|A0A1H1SXZ9_9PSED GTP cyclohydrolase 1; OS = Pseudomonas prosekii OX=1148509 GN=folE PE=3 SV=1
MTLSRNALSESYREILIGLGENPDREGLQDTPMRAAKAMQYLCHGYQQSVEEIVNGALFSSDTDEMIIVADIELYSLCEHHLLPFIGKAHVAYMPTGKVLGLSKIARLVDMFARRLQIQENLTRQIADAVQQVTGAAGVAVVIEARHMCMMMRGVEKQNSTMNTSVMLGAFRDSSNTRQEFLQLIGRSK

SEQ ID NO: 13470 - protein, 181 aa, unidentified
  source 1..181: note = Pseudomonas prosekii
  REGION 1..181: note = tr|A0A3L8CFG1|A0A3L8CFG1_9PSED GTP cyclohydrolase 1; OS = Pseudomonas prosekii OX=1148509 GN=folE PE=3 SV=1
MSLEQNYTAILGQLGEDVSREGLRDTPKRAAKAMQYLCRGYEQTLEEVTNGALFSSDNSEMVLVKDIELYSLCEHHLLPFIGKAHVAYIPSGKVLGLSKVARIVDMYARRLQIQENLSRQIADAVQQVTGALGVAVVIEAKHMCMMMRGVEKQNSSMITSVMLGEFRENAATRSEFLSLIK

SEQ ID NO: 13471 - protein, 186 aa, unidentified
  source 1..186: note = Pseudomonas protegens
  REGION 1..186: note = tr|A0A2C9EKC4|A0A2C9EKC4_PSEPH GTP cyclohydrolase 1; OS = Pseudomonas protegens (strain DSM 19095 / LMG 27888 / CHA0) OX=1124983 GN=folE2 PE=3 SV=1
MHDPLSQHFHGILQGLGEDPTREGLRDTPQRASKALRYLCHGYETSLEELVNGALFSSTSDEMVMVQNIELYSLCEHHLLPFIGQAHVAYIPTGKVLGLSKVARIVDMYARRLQIQENLTRQIAEAIQEVTRAAGVAVVIEARHMCMMMRGVEKQNSLMNTSVMLGAFRESASTRQEFLQLLRRQP

SEQ ID NO: 13472 - protein, 181 aa, unidentified
  source 1..181: note = Pseudomonas protegens
  REGION 1..181: note = tr|A0A2K2X0A9|A0A2K2X0A9_9PSED GTP cyclohydrolase 1; OS = Pseudomonas protegens OX=380021 GN=folE PE=3 SV=1
MSLEQNYTAILGQLGEDVSREGLLDTPKRAAKAMQYLCRGYAQTLEEVTNGALFSSDNSEMVLVKDIELYSLCEHHLLPFIGKAHVAYIPSGKVLGLSKVARIVDMYARRLQIQENLSRQIADAVQQVTGALGVAVVIEAKHMCMMMRGVEKQNSSMITSVMLGEFRENAATRSEFLSLIK

SEQ ID NO: 13473 - protein, 181 aa, Pseudomonas pseudoalcaligenes; identical to SEQ ID NO: 13361
  REGION 1..181: note = tr|W6R421|W6R421_PSEP5 GTP cyclohydrolase 1; OS = Pseudomonas pseudoalcaligenes (strain CECT 5344); OX = 1182590 GN=folE3 PE=3 SV=1

SEQ ID NO: 13474 - protein, 186 aa, Pseudomonas pseudoalcaligenes; identical to SEQ ID NO: 13362
  REGION 1..186: note = tr|W6QUW3|W6QUW3_PSEP5 GTP cyclohydrolase 1; OS = Pseudomonas pseudoalcaligenes (strain CECT 5344); OX = 1182590 GN=folE1 PE=3 SV=1

SEQ ID NO: 13475 - protein, 186 aa, Pseudomonas psychrophila
  REGION 1..186: note = tr|S6I321|S6I321_9PSED GTP cyclohydrolase 1; OS = Pseudomonas psychrophila OX=122355 GN=folE PE=3 SV=1
MSASLPGHYREILIDIGEDPDREGLLDTPKRAAKAMQYLCHGYEQSLETLVNGALFASDSDEMVIVANIELYSLCEHHLLPFIGKAHVAYIPTGKVLGLSKIARIVDMYARRLQIQENLTREIADAIQSVTQAAGVAVVIEAQHMCMMMRGVEKQNSTMNTSVMLGEFRESSTRMEFLQLIGRSKS

SEQ ID NO: 13476 - protein, 181 aa, Pseudomonas psychrophila
  REGION 1..181: note = tr|S6I0B7|S6I0B7_9PSED GTP cyclohydrolase 1; OS = Pseudomonas psychrophila OX=122355 GN=folE PE=3 SV=1
MTLEQNYTAILGQLGEDVSREGLLDTPKRAAKAMQYLCRGYEQTLEEVTNGALFSSDNSEMVLVKDIELYSLCEHHLLPFIGKAHVAYIPSGKVLGLSKVARIVDMYARRLQIQENLSRQIADAVMQVTGALGVAVVIEAKHMCMMMRGVEKQNSSMITSVMLGEFRENAATRSEFLSLIK

SEQ ID NO: 13477 - protein, 182 aa, Pseudomonas psychrotolerans
  REGION 1..182: note = tr|A0A147H3U1|A0A147H3U1_9PSED GTP cyclohydrolase 1; OS = Pseudomonas psychrotolerans OX=237610 GN=folE PE=3 SV=1
MSLEQHYSSILTGLGEDIGREGLVDTPKRAAKAMQYLCRGYNQTLEEVVGDALFTSDNSEMVLVKNIELYSLCEHHMLPFIGKAHVAYMPNGKVLGLSKVARIVDMFARRLQIQENMTRQIAEAIEKVTQAAGVAVVIEAQHMCMMMRGVEKQNSSMVTSVMLGQFRANDATRAEFLGLINR

SEQ ID NO: 13478 - protein, 182 aa, Pseudomonas psychrotolerans
  REGION 1..182: note = tr|A0A4Y5W1J0|A0A4Y5W1J0_9PSED GTP cyclohydrolase 1; OS = Pseudomonas psychrotolerans OX=237610 GN=folE PE=3 SV=1
MSLEQHYSSILTGLGEDIGREGLVDTPKRAAKAMQYLCRGYNQTLEEVVGDALFTSDNSEMVLVKNIELYSLCEHHMLPFIGKAHVAYMPNGKVLGLSKVARIVDMFARRLQIQENMTRQIAEAIEKVTHAAGVAVVIEAQHMCMMMRGVEKQNSSMVTSVMLGQFRANDATRAEFLGLINR

SEQ ID NO: 13479 - protein, 187 aa, unidentified
  source 1..187: note = Pseudomonas punonensis
  REGION 1..187: note = tr|A0A1M7MC34|A0A1M7MC34_9PSED GTP cyclohydrolase 1; OS = Pseudomonas punonensis OX=1220495 GN=folE PE=3 SV=1
MDSSRNTLEQQYTAILGQLGEDVSREGLLDTPKRAAKAMQYLCNGYQKTLEEVTNGALFSSDASEMVVVKDIELYSLCEHHLLPFIGKAHVAYIPNGKVLGLSKVARIVDMYARRLQIQESLSRQIAEAVQQVTGALGVAVVIEAKHMCMMMRGVEKQNSSMVTSVMLGEFRENAATRSEFLSLVNG

SEQ ID NO: 13480 - protein, 186 aa, unidentified
  source 1..186: note = Pseudomonas punonensis
  REGION 1..186: note = tr|A0A1M7FIG0|A0A1M7FIG0_9PSED GTP cyclohydrolase 1; OS = Pseudomonas punonensis OX=1220495 GN=folE PE=3 SV=1
MNPLLPNHYREILLGLGEDPEREGLLDTPKRAAKAMQYLCNGYEKSLEEVVNGALFSSDNDEMVIVKDVELYSLCEHHLLPFIGKAHVAYIPTGKVLGLSKIARIVDMYARRLQIQENLTRQIANAIEQVTKAAGVAVVIEAQHMCMMMRGVEKQNSVMSTSVMLGAFRESYNTRHEFLQLIGRSK

SEQ ID NO: 13481 - protein, 190 aa, Pseudomonas putida
  REGION 1..190: note = sp|Q88LV4|GCH11_PSEPK GTP cyclohydrolase 1 1; OS = Pseudomonas putida (strain ATCC 47054 / DSM 6125 / NCIMB 11950 / KT2440) OX=160488 GN=folE1 PE=3 SV=1
MRFFPTGRSMSLEQNYTEILSQIGEDVSREGLLDTPKRAAKAMKYLCRGYEQTLEEVTNNALFSSDNSEMVLVRDIELYSMCEHHMLPFIGKAHVAYLPKGKVLGLSKVARIVDMYARRLQIQENLSRQIAEAVQQVTGAAGVAVVVEAKHMCMMMRGVEKQNSTMITSVMLGEFRDNAATRSEFLSLIK

SEQ ID NO: 13482 - protein, 185 aa, Pseudomonas putida
  REGION 1..185: note = tr|A0A0P7C947|A0A0P7C947_PSEPU GTP cyclohydrolase 1; OS = Pseudomonas putida OX=303 GN=folE PE=3 SV=1
MNEELTRNYREILQGIGENPQREGLLDTPRRAAKAMQYLCHGYQQSLEQIVNGALFDSDNDEMVIVRDIELYSLCEHHLLPFIGKAHVAYIPTGKVLGLSKVARIVDMFARRLQIQENLTRQVAEAIAQVTHAAGVAVVIEAKHMCMMMRGVEKQNSVMSTSVMLGCMRDSYNTRQEFLQLIRNR

SEQ ID NO: 13483 - protein, 295 aa, unidentified
  source 1..295: note = Pseudomonas reidholzensis
  REGION 1..295: note = tr|A0A383RMF7|A0A383RMF7_9PSED GTP cyclohydrolase FolE2 OS=Pseudomonas reidholzensis OX=1785162 GN=folE2; PE = 3 SV=1
MTLATLPDIATQTHQRNQPLDWVGMQGIALPVRFADTRLSASASAGVNLDDGQSRGIHMSRLYLALACLEQQELNPQALRRLLAQFLDSHEGLSSAASVRIDFELLLKRPALVSPLSGWKSYPVTVEARIKNEMFHVELFVRIPYSSTCPCSAALARQLIQAQFQADFEGADVDRDSVLAWLGSSQGIVATPHSQRSEAQIKVRLLDGGSELPVIDLIERVEAALGTAVQTAVKRADEQAFALANGQNLMFCEDAARRVDEALRKAAWASGFTLRVEHAESLHAHDAVAVSQWRW

SEQ ID NO: 13484 - protein, 181 aa, unidentified
  source 1..181: note = Pseudomonas reidholzensis
  REGION 1..181: note = tr|A0A383RSH8|A0A383RSH8_9PSED GTP cyclohydrolase 1; OS = Pseudomonas reidholzensis OX=1785162 GN=folE1 PE=3 SV=1
MSLEQNYTEILSQIGEDVSREGLLDTPKRAAKAMKYLCRGYEQTLEEVTNGALFSSDNSEMVLVRDIELYSMCEHHMLPFIGKAHVAYLPKGKVIGLSKVARIVDMYARRLQIQENLSRQIAEAIEKVTGAAGVAVVVEAKHMCMMMRGVEKQNSSMITSVMLGEFRENAATRSEFLSLIK

SEQ ID NO: 13485 - protein, 186 aa, Pseudomonas reinekei; identical to SEQ ID NO: 13365
  REGION 1..186: note = tr|A0A1H0T0P7|A0A1H0T0P7_9PSED GTP cyclohydrolase 1; OS = Pseudomonas reinekei OX=395598 GN=folE PE=3 SV=1

SEQ ID NO: 13486 - protein, 186 aa, Pseudomonas reinekei
  REGION 1..186: note = tr|A0A1H0M108|A0A1H0M108_9PSED GTP cyclohydrolase 1; OS = Pseudomonas reinekei OX=395598 GN=folE PE=3 SV=1
MTLSLPQNFREILIGLGENPDREGLRDTPMRAAKAMQYLCHGYEQSVEQIVNGALFASDNDEMVIVDNIELYSLCEHHMLPFIGKAHVAYIPTGKVLGLSKIARLVDMFARRLQIQENLTRQIADAVQAVTGAAGVAVVIEARHMCMMMRGVEKQNSTMNTSVMLGAFRESSNTRQEFLQLIGRSK

SEQ ID NO: 13487 - protein, 296 aa, Pseudomonas resinovorans
  REGION 1..296: note = tr|S6B2D0|S6B2D0_PSERE GTP cyclohydrolase FolE2; OS = Pseudomonas resinovorans NBRC 106553 OX=1245471; GN = folE2 PE=3 SV=1
MNARHLPDIAAQDADLDLPLDWVGMHGIAQPLLLDGQRIAARADAGVSLDDSSARGIHMSRLYLALQALEGEELSIPLLRRVLASFLESHQGLSSSASLRLQGETLLQRPALVSALSGWKAYPFEVLAHQDRWGFHVELWVQLAYSSTCPCSAALARQLVQQAFTEDFAAEIPLEREQILAWLGSDRGMLATPHSQRSTASLQARLGDVDGIPLGRLVDLAEQALGTPVQTAVKRADEQAFALANGQNLMFCEDAARRLGAVLREQEWLAGFRLRVVHAESLHAHDAVAEYAWRYR

SEQ ID NO: 13488 - protein, 185 aa, Pseudomonas resinovorans
  REGION 1..185: note = tr|S6AF70|S6AF70_PSERE GTP cyclohydrolase 1; OS = Pseudomonas resinovorans NBRC 106553 OX=1245471 GN=folE; PE = 3 SV=1
MSEPMTQHYREILLGVGENPAREGLLDTPKRAAKAMQFLCNGYQKTLAEIVNGALFESDNDEMVIVREIELYSLCEHHLLPFIGKAHVAYIPTGKVLGLSKVARIVDMYARRLQIQENLTRQIAEAIQQVTGAAGVAVVIEAQHMCMMMRGVEKQNSVMSTSVMLGAFRESQNTRSEFLQLIGRK

SEQ ID NO: 13489 - protein, 181 aa, Pseudomonas rhizosphaerae; identical to SEQ ID NO: 13275
  REGION 1..181: note = tr|A0A089YKH9|A0A089YKH9_9PSED GTP cyclohydrolase 1; OS = Pseudomonas rhizosphaerae OX=216142 GN=folE PE=3 SV=1

SEQ ID NO: 13490 - protein, 181 aa, Pseudomonas rhodesiae
  REGION 1..181: note = tr|A0A5C5NSV3|A0A5C5NSV3_9PSED GTP cyclohydrolase 1; OS = Pseudomonas rhodesiae OX=76760 GN=folE PE=3 SV=1
MSLEQNYTAILGQLGEDVSREGLLDTPKRAAKAMQYLCRGYEQTLEEVTNGALFSSDNSEMVLVKDIELYSLCEHHLLPFIGKAHVAYVPSGKVLGLSKVARIVDMYARRLQIQENLSRQIADAVLQVTGALGVAVVIEAKHMCMMMRGVEKQNSSMITSVMLGEFRENAATRSEFLSLIK

SEQ ID NO: 13491 - protein, 186 aa, Pseudomonas rhodesiae
  REGION 1..186: note = tr|A0A5C5NS41|A0A5C5NS41_9PSED GTP cyclohydrolase 1; OS = Pseudomonas rhodesiae OX=76760 GN=folE PE=3 SV=1
MTFSLPHHYREILMGLGEDPEREGLLDTPKRAAKAMQYLCHGYEQNLEEIVNGALFASDNDEMVILKDIELYSLCEHHLLPFIGKAHVAYIPTGRVLGLSKLARIVDMFARRLQIQENLTRQIADAIQEVTQAAGVAVVIEAQHMCMMMRGVEKQNSTMNTSVMLGAFRESNTTRMEFLQLIGRSK

SEQ ID NO: 13492 - protein, 186 aa, Pseudomonas sabulinigri
  REGION 1..186: note = tr|A0A1H1WGC5|A0A1H1WGC5_9PSED GTP cyclohydrolase 1; OS = Pseudomonas sabulinigri OX=472181 GN=folE PE=3 SV=1
MSLEKLSQNYLEILTNLGEQPERDGLKGTPERAAKAMQFLCRGYDQSLEQIVNGALFDSDNDEMVIVKDIELYSLCEHHMLPFIGKAHVAYIPTGKVIGLSKVARIVDMFARRLQIQENLTRQIAEALQQVTNAAGVAVVIEAKHMCMMMRGVEKQNSSMHSSVMLGAFRDSFNTRQEFLQLIARS

SEQ ID NO: 13493 - protein, 186 aa, Pseudomonas sabulinigri
  REGION 1..186: note = tr|A0A1H1VXP2|A0A1H1VXP2_9PSED GTP cyclohydrolase 1; OS = Pseudomonas sabulinigri OX=472181 GN=folE PE=3 SV=1
MNIEKLTRHYANIIEELDENPTRDGLKNTPERAAKAMQFLCRGYEQSLDELVNNALFESDNDEMVIVKDIELYSLCEHHMLPFIGKAHVAYIPTGKVVGLSKIARIVDMFARRLQIQENLTRQIAEAIQTVTNAEGVAVVIEAKHMCMMMRGVEKQNSTMYSSVMLGAFRESGNTRQEFLQLIGRH

SEQ ID NO: 13494 - protein, 189 aa, unidentified
  source 1..189: note = Pseudomonas sagittaria
  REGION 1..189: note = tr|A0A1I5V081|A0A1I5V081_9PSED GTP cyclohydrolase 1; OS = Pseudomonas sagittaria OX=1135990 GN=folE PE=3 SV=1
MSDQLSQITQHYREILKGIGEDPEREGLQDTPKRAAKAMQYLCRGYEQSLDEIVNGALFASDNDEMVIVRDIELYSLCEHHLLPFIGKAHVAYIPTGKVLGLSKVARIVDMFARRLQIQENLTRQIAEAVQQVTNAAGVAVVIEAQHMCMMMRGVEKQNSVMSSSVMLGAFRQSTNTRQEFLQLIGRSR

SEQ ID NO: 13495 - protein, 303 aa, unidentified
  source 1..303: note = Pseudomonas sagittaria
  REGION 1..303: note = tr|A0A1I5WVL3|A0A1I5WVL3_9PSED GTP cyclohydrolase FolE2 OS=Pseudomonas sagittaria OX=1135990 GN=folE2 PE=3; SV = 1
MNSLSLPDIAAQTTTARLPLERVGMAGIAQPVVLLGQRLAARVSAGVSLDDAAARGIHMSRLYLALAALETEELTPALLARVLGEFLASHRELSARAQLEIRGEALLRRPALVSPLAGWKGYPLVVDAQLYAGGLRVELEVAIGYSSTCPCSAALARQLLQQRFAADFAGRELEQGAVLEWLGSSAGSLATPHSQRSTATLRVQLSTAAVHLPLLELIERAEAALGTALQTAVKRADEQAFALANGQNLMFCEDAARRLHAALLRQPGLEAFSVRVEHAESLHAHDAVAQSFWRRAAEGCSTT

SEQ ID NO: 13496 - protein, 308 aa, unidentified
  source 1..308: note = Pseudomonas salegens
  REGION 1..308: note = tr|A0A1H2HTN8|A0A1H2HTN8_9PSED GTP cyclohydrolase FolE2 OS=Pseudomonas salegens OX=1434072 GN=folE2 PE=3 SV=1
MNAPLPDVSLTDRVTNGCPLDWVGMQGIDIPVTLKESGYQRDLHARADLAVDLQQPEVKGIHMSRLYRLLDAWSEREALTPASLQQLLQTMIDSHLDCASQNARVVLQFDLLTRRPALITPDLSGWTAYPVQMTAMLRQGVFSLEMQVTACYSSTCPCSAALARQLVEQGFRQAFAGQQHLDATVVADWLRQHATLATPHSQRSEAEVRVQLGAESGSLGLFELIDRVEQALGTPVQTAVKRADEQAFAAMNGQNLMFVEDAARRIQAALDGHYHQPRVQVRHLESLHPHDAVASAGVRRAPRPVEPV

SEQ ID NO: 13497 - protein, 184 aa, unidentified
  source 1..184: note = Pseudomonas salegens
  REGION 1..184: note = tr|A0A1H2E9Z9|A0A1H2E9Z9_9PSED GTP cyclohydrolase 1; OS = Pseudomonas salegens OX=1434072 GN=folE PE=3 SV=1
MSLEKLTDNYHQILCNLGEDPERGGLKDTPKRAAKAMQFLCHGYQQTLEEIVNGALFDSDNDEMVIVQDIELYSMCEHHMLPFIGKAHVAYLPQGKVVGLSKVARIVDMYARRLQIQENLTLQIANAVQSVTNAKGVAVIIEAKHMCMMMRGVQKQNSLMRTSVMLGMFRESVNTRQEFLQLIS

SEQ ID NO: 13498 - protein, 298 aa, Pseudomonas salomonii
  REGION 1..298: note = tr|A0A1H3TL35|A0A1H3TL35_9PSED GTP cyclohydrolase FolE2 OS=Pseudomonas salomonii OX=191391 GN=folE2 PE=3 SV=1
MNALTLPDIAAQASRQALPLDWVGMCGIALPIVIDGQRLTATADAGVSLDDGEARGIHMSRLYLALEMLDQQLLTPALLRNVLQRFLESHEGLSKNAYLRIHTDLLLKRPALVSPLAGWKGYPVCIEARLENQMFHVELKIDVTYSSTCPCSAALARQLIQQQFLQDFANTPLQHEDVLTWLGSANGIVATPHSQRSSAQLSIQLDASHNTLPLTDLIDTVEAALGTAVQTAVKRADEQAFALANGQNLMFCEDAARRLNLALKRSDAVKAFHLKVIHAESLHAHDAVAESRWTRDSA

SEQ ID NO: 13499 - protein, 186 aa, Pseudomonas salomonii
  REGION 1..186: note = tr|A0A1H3US09|A0A1H3US09_9PSED GTP cyclohydrolase 1; OS = Pseudomonas salomonii OX=191391 GN=folE PE=3 SV=1
MTLSLPQHYREILKGLGEDPEREGLLDTPKRAAKAMQYLCHGYEQNLETIVNGALFASDNDEMVILKDIELYSLCEHHLLPFIGKAHVAYIPTGKVLGLSKLARIVDMYARRLQIQENLTRQIADAIQQVTQAAGVAVVIEAKHMCMMMRGVEKQNSTMNTSVMLGAFRESNTTRMEFLQLIGRSK

SEQ ID NO: 13500 - protein, 186 aa, Pseudomonas saponiphila
  REGION 1..186: note = tr|A0A1H4X1L9|A0A1H4X1L9_9PSED GTP cyclohydrolase 1; OS = Pseudomonas saponiphila OX=556534 GN=folE PE=3 SV=1
MSLSLPQHYREILKDLGEDPEREGLLDTPKRAAKAMQYLCHGYSQSLEGIVNGALFASDSDEMVIVADIELYSLCEHHLLPFIGKAHVAYIPTGKVLGLSKIARIVDMFARRLQIQENLTREIADAVQNVTQAAGVAVVIEAKHMCMMMRGVEKQNSTLHTSVMLGAFRDSSTTRQEFLQLIGRSK

SEQ ID NO: 13501 - protein, 297 aa, Pseudomonas saponiphila
  REGION 1..297: note = tr|A0A1H4UXQ4|A0A1H4UXQ4_9PSED GTP cyclohydrolase FolE2 OS=Pseudomonas saponiphila OX=556534 GN=folE2 PE=3; SV = 1
MNALTLPDIAAQASRQALPLEWVGMCGIALPVVIDGQRTAAKADAGVSLDDGEARGIHMSRLYLALEMLEQENLNPALLHRVLQRFLDSHDGLAHSAYLRLHFDLLLKRPALVSPLTGWKRYPLSIEARLKNAMFHVELKIDVPYSSTCPCSAALSRQLIQQQFVEDFANRPLQHADVLAWLGSTQGIVATPHSQRSTAELRLRLDDFLDELPLIALINDAESALGTAVQTAVKRADEQAFALANGQNLMFCEDAARRLNQALRRSPGVNAFHLRVVHAESLHAHDAVAESRWNWEV

SEQ ID NO: 13502 - protein, 187 aa, unidentified
  source 1..187: note = Pseudomonas saudimassiliensis
  REGION 1..187: note = tr|A0A078M352|A0A078M352_9PSED GTP cyclohydrolase 1; OS = Pseudomonas saudimassiliensis OX=1461581 GN=folE1 PE=3; SV = 1
MSLEKLTSNYHDILSNLGEDPQREGLKGTPLRAAKAMQFLCRGYDQSLEDIVNGALFESSSDEMVIVKNIELYSLCEHHMLPFIGKAHVAYMPDGKVIGLSKVARIVDMFARRLQIQESLTRQIAEAVQSVTGAKGVAVVIEARHMCMMMRGVEKQNSSMMTSVMLGSFRESFNTRQEFLQLIGRSN

SEQ ID NO: 13503 - protein, 181 aa, unidentified
  source 1..181: note = Pseudomonas saudiphocaensis
  REGION 1..181: note = tr|A0A078LUG0|A0A078LUG0_9PSED GTP cyclohydrolase 1; OS = Pseudomonas saudiphocaensis OX=1499686 GN=folE PE=3 SV=1
MSLEQHYTAILGQLGEDVNREGLLDTPKRAAKAMQYLCKGYQQTLEEVTNNALFSSDNSEMVLVKNIELYSLCEHHMLPFIGKAHVAYLPNGKVLGLSKVARIVDMYARRLQIQENLTREIAEAIQQVTGAWGVAVVIEAQHMCMMMRGVEKQNSSMVTSVMLGQFRENPATRSEFLGLVK

SEQ ID NO: 13504 - protein, 301 aa, Pseudomonas savastanoi
  REGION 1..301: note = sp|Q48HN1|GCH4_PSE14 GTP cyclohydrolase FolE2; OS = Pseudomonas savastanoi pv. phaseolicola (strain 1448A / Race 6) OX=264730 GN=folE2 PE=3 SV=1
MNNPLPDVALTEVSSALVSLDWVGMQGVEVPVRLAEAGVRYPVHAHVDLQVDLADPSVKGIHMSRLYRLLDRYAEHQILSPDTLGALLEAMVESHLDCHSSRARLTLSFNLLCRRPALITEGLSGWKSYPVKLDATWHAGRLCLDVSADITYSSTCPCSAALSRQLLEGAFTARFGRQSFVDPMQVATWLRENASFATPHSQRSVATVQVRVAEQATELGLMTLIDAVEQALGTPVQTAVKRADEQAFARLNGQNLMYVEDAARKVQQALEGRYAASSVSVRHFESLHPHDAAAQTSNYLS

SEQ ID NO: 13505 - protein, 150 aa, Pseudomonas savastanoi
  REGION 1..150: note = tr|A0A3M3GHR0|A0A3M3GHR0_PSESG GTP cyclohydrolase 1 (Fragment) OS=Pseudomonas savastanoi pv. glycinea OX=318; GN = ALQ75_05141 PE=3 SV=1
MLMSSSLPQHYRDILLGLGEDPDREGLLDTPKRASKAMQYLCHGYTQSVDEIVNGALFASDNDEMVIVQNIELYSLCEHHLLPFIGKAHVAYIPTGKVLGLSKIARIVDMFARRLQIQENLTKQIADAIQQVTGAAGVAVVIEAKHMCMM

SEQ ID NO: 13506 - protein, 186 aa, Pseudomonas segetis
  REGION 1..186: note = tr|A0A239CPK3|A0A239CPK3_9PSED GTP cyclohydrolase 1; OS = Pseudomonas segetis OX=298908 GN=folE PE=3 SV=1
MNDQLSEHYREILIAVGENPEREGLLDTPKRAAKAMQYLCHGYDKSLEEVVNGALFASDNDEMVIVKDIELYSLCEHHLLPFIGKAHVAYIPTGKVLGLSKIARIVDMYARRLQIQENLTRQIADSIQAVTQAAGVAVVIEAQHMCMMMRGVEKQNSIMNTSVMLGAFRESYNTRHEFLQLIGRSK

SEQ ID NO: 13507 - protein, 182 aa, Pseudomonas segetis
  REGION 1..182: note = tr|A0A239I0H9|A0A239I0H9_9PSED GTP cyclohydrolase 1; OS = Pseudomonas segetis OX=298908 GN=folE PE=3 SV=1
MSLEQNYTQILGQLGEDVSREGLLDTPKRAAKAMQYLCRGYQQTLEEVTNGALFSSDASEMVLVKNIELYSLCEHHLLPFIGKAHVAYIPSGKVLGLSKIARIVDMYARRLQIQENLSRQIAEAIQQVTGALGVAVVIEAQHMCMMMRGVEKQNSSMVTSVMLGEFRKNAATRSEFLSLINN

SEQ ID NO: 13508 - protein, 186 aa, Pseudomonas seleniipraecipitans
  REGION 1..186: note = tr|A0A1G7GXA7|A0A1G7GXA7_9PSED GTP cyclohydrolase 1; OS = Pseudomonas seleniipraecipitans OX=640205 GN=folE PE=3; SV = 1
MNPLLPNHYREILLGIGENPEREGLLDTPKRAAKAMQYLCNGYEKSLQEVVNGALFSSESDEMVIVKDVELYSLCEHHLLPFIGKAHVAYIPTGKVLGLSKIARIVDMYARRLQIQENLTRQIASAIEEVTQAAGVAVVIEAQHMCMMMRGVEKQNSVMSTSVMLGAFRESYNTRHEFLQLIGRSK

SEQ ID NO: 13509 - protein, 298 aa, Pseudomonas seleniipraecipitans
  REGION 1..298: note = tr|A0A1G7UEC7|A0A1G7UEC7_9PSED GTP cyclohydrolase FolE2 OS=Pseudomonas seleniipraecipitans OX=640205; GN = folE2 PE=3 SV=1
MNQQTDMPDIAAQRSSGSTAMLDWVGMRGIALPVRIDTQAVSARIDAGVSLDDGQTRGIHMSRLYLAVAELQREAVSPALLREVLERFLNSHDGLSLRAYLELRGEWLIERPALISPLSGYKAYPLTLKAHLAPSGFHLELGLQLSYSSTCPCSAALARQLIQQRFADDFCERQPDFDTMHAWLGSSAGIIATPHSQRSEADIRVRLQADATSLPFIGLLDRAEAALGTAVQTAVKRADEQAFALANGQNLMFCEDAARRLHGALLSMPEVEGFRLHVTHAESLHAHDAAASASHNWR

SEQ ID NO: 13510 - protein, 186 aa, unidentified; identical to SEQ ID NO: 13265
  source 1..186: note = Pseudomonas sihuiensis
  REGION 1..186: note = tr|A0A1H2LYA7|A0A1H2LYA7_9PSED GTP cyclohydrolase 1; OS = Pseudomonas sihuiensis OX=1274359 GN=folE PE=3 SV=1

SEQ ID NO: 13511 - protein, 296 aa, unidentified
  source 1..296: note = Pseudomonas sihuiensis
  REGION 1..296: note = tr|A0A1H2MPE1|A0A1H2MPE1_9PSED GTP cyclohydrolase FolE2 OS=Pseudomonas sihuiensis OX=1274359 GN=folE2 PE=3; SV = 1
MNEQPLPDIAAQATHHDLPLDWVGMAGIALPIRLADAVVTASVDIGVSLDDAGARGIHMSRLYLAAQRLVHQPLNVPAVLQVLDDCLSSHQELSDSATLTLRGEVPLKRPALVSPLHGWKTYPFELRARQNGRGVNIELQVEVSYSSTCPCSAALARQLIQQRFAWDFPDQQVDYSSVLDWLGSTQGILATPHSQRSTATLQLRLAPGCIDLPVLALIDSAEQALGTPVQTAVKRADEQAFALANGQNLMFCEDAARRLHRALRQLPLASAFRVRVVHAESLHAHDAVAESSWNWC

SEQ ID NO: 13512 - protein, 186 aa, unidentified
  source 1..186: note = Pseudomonas silesiensis
  REGION 1..186: note = tr|A0A191YZN8|A0A191YZN8_9PSED GTP cyclohydrolase 1; OS = Pseudomonas silesiensis OX=1853130 GN=folE PE=3 SV=1
MTLSLSQSYREILIGLGENPDREGLRDTPVRAAKAMQYLCHGYEQSVEEIVNGALFMSDNDEMIIVDNIELYSLCEHHMLPFIGKAHVAYIPTGKVLGLSKIARLVDMFARRLQIQENLTRQIAEAVQHVTGAAGVAVVIEARHMCMMMRGVEKQNSTMNTSVMLGAFRESSNTRQEFLQLIGRSK

SEQ ID NO: 13513 - protein, 181 aa, unidentified
  source 1..181: note = Pseudomonas silesiensis
  REGION 1..181: note = tr|A0A191YQC0|A0A191YQC0_9PSED GTP cyclohydrolase 1; OS = Pseudomonas silesiensis OX=1853130 GN=folE PE=3 SV=1
MSLEQNYTEILGQLGEDASREGLLDTPKRAAKAMQYLCRGYEQTLEEVTNGALFSSDNSEMVLVKDIELYSLCEHHLLPFIGKAHVAYIPSGKVLGLSKVARIVDMYARRLQIQENLSRQIADAVQEVTGAIGVAVVIEAKHMCMMMRGVEKQNSTMITSVMLGEFRENAATRSEFLSLIK

SEQ ID NO: 13514 - protein, 181 aa, Pseudomonas simiae; identical to SEQ ID NO: 13370
  REGION 1..181: note = tr|A0A1N7UKY2|A0A1N7UKY2_9PSED GTP cyclohydrolase 1; OS = Pseudomonas simiae OX=321846 GN=folE PE=3 SV=1

SEQ ID NO: 13515 - protein, 184 aa, Pseudomonas simiae
  REGION 1..184: note = tr|A0A1N7UH79|A0A1N7UH79_9PSED GTP cyclohydrolase 1; OS = Pseudomonas simiae OX=321846 GN=folE PE=3 SV=1
MTLPHHYREILKGLGEDPEREGLLDTPKRAAKAMQYLCHGYEQSLEDIVNGALFTSDNDEMVILKDIELYSLCEHHLLPFIGKAHVAYIPTGKVLGLSKLARIVDMYARRLQIQENLTRQIADAIQDVTQAAGVAVVIEAQHMCMMMRGVEKQNSTMNTSVMLGAFRESNTTRMEFLQLIGRSK

SEQ ID NO: 13516 - protein, 293 aa, unidentified
  source 1..293: note = Pseudomonas soli
  REGION 1..293: note = tr|A0A1H9HFU2|A0A1H9HFU2_9PSED GTP cyclohydrolase FolE2 OS=Pseudomonas soli OX=1306993 GN=folE2 PE=3 SV=1
MTSLSLPDVAAQSNQQALPLDWVGMNGIAVALQLDGRTVTAFADAGVSLDDGASRGIHMSRLYLALEALEQQPLSPPLLRHILRSFLLSHTGLSNNAYLRLTFDHLLKRSALISPLAGWKRYPVTVDAKLEDEMFHVELSVNVPYSSTCPCSAALARQLIQEQFDRDFAHRPLDRCGIRQWLGSSDGIVATPHSQRSMARLQVRLAGEALNLTGLIDAAEAALGTAVQTAVKRADEQAFALANGQNLMFCEDAARRLHLALMQIEEVLGFSVRVEHAESLHAHDAVAVTQHRW

SEQ ID NO: 13517 - protein, 181 aa, unidentified; identical to SEQ ID NO: 13428
  source 1..181: note = Pseudomonas soli
  REGION 1..181: note = tr|A0A1H9FNS9|A0A1H9FNS9_9PSED GTP cyclohydrolase 1; OS = Pseudomonas soli OX=1306993 GN=folE PE=3 SV=1

SEQ ID NO: 13518 - protein, 185 aa, unidentified
  source 1..185: note = Pseudomonas songnenensis
  REGION 1..185: note = tr|A0A482UA58|A0A482UA58_9PSED GTP cyclohydrolase 1; OS = Pseudomonas songnenensis OX=1176259 GN=folE PE=3 SV=1
MNDLPGHYREILSGVGENPEREGLRDTPLRAAKAMQYLCGGYNRSLEEVVNGALFASDNDEMVIVKDIELYSLCEHHILPFIGKAHVAYIPTGRVLGLSKVARIVDMFARRLQIQENLTRQIAEAIQEVTGAAGVAVVIEAKHMCMMMRGVEKQNSVMNTSVMLGAFRSSCNTRMEFLQLIGRGQ

SEQ ID NO: 13519 - protein, 181 aa, unidentified
  source 1..181: note = Pseudomonas songnenensis
  REGION 1..181: note = tr|A0A482U1G9|A0A482U1G9_9PSED GTP cyclohydrolase 1; OS = Pseudomonas songnenensis OX=1176259 GN=folE PE=3 SV=1
MSLEQHYTAILGQLGEDVSREGLLDTPKRAAKAMQYLCKGYQQTLEEVTNGALFSSDNSEMVLVKNIELYSLCEHHMLPFIGKAHVAYLPNGKVLGLSKVARIVDMYARRLQIQENLTREIAEAMQQVTGASGVAVVIEAQHMCMMMRGVEKQNSSMVTSVMLGQFRENAATRSEFLGLVK

SEQ ID NO: 13520 - protein, 297 aa, Pseudomonas sp.
  REGION 1..297: note = tr|A0A1S1GP97|A0A1S1GP97_9PSED GTP cyclohydrolase FolE2 OS=Pseudomonas sp. HMSC75E02 OX=1608908 GN=folE2; PE = 3 SV=1
MTAFLPDVASQAASDTLALDWVGMQGIALPLRLHGERLNALADAGVSLDAAAARGIHMSRLYLALARLEQAELGPQLLREVLDDFLASHAGLSRRASLRLAFDALLSRPALVSPLSGWKQYPCEVHARLDDQGLRLELRLRLAYSSTCPCSAALARQLIQQRFAEDFADRSPSHQEVHTWLGSSAGIVATPHSQRSFADLHLHLRAGLDGLPLRELLDCAEAALGTAVQTAVKRADEQAFALANGQNLMFCEDAARRLHRALAQRGELEAFALSVVHAESLHAHDAVARSQWRREAP

SEQ ID NO: 13521 - protein, 181 aa, Pseudomonas sp.
  REGION 1..181: note = tr|S2FAY0|S2FAY0_9PSED GTP cyclohydrolase 1; OS = Pseudomonas sp. G5(2012) OX=1268068 GN=folE PE=3 SV=1
MSLEQNYTAILGQLGEDPSREGLLDTPKRAAKAMQYLCRGYEQTLEEVTNGALFSSDNSEMVLVKDIELYSLCEHHLLPFIGKAHVAYIPSGKVLGLSKVARIVDMYARRLQIQENLSRQIADAVQQVTGALGVAVVIEAKHMCMMMRGVEKQNSTMITSVMLGEFRENAATRSEFLSLIK

SEQ ID NO: 13522 - protein, 297 aa, Pseudomonas straminea
  REGION 1..297: note = tr|A0A1I1Y7C2|A0A1I1Y7C2_PSEOC GTP cyclohydrolase FolE2 OS=Pseudomonas straminea OX=47882 GN=folE2 PE=3 SV=1
MNNSTTLPDIAAQRSAHANVPLDWVGMGGIALPVLLGEQPINAQVDAGVSLDDGQSRGIHMSRLYLALAALQGEPLSPALLRYVLENFLVSHYGLSHCAYLELRGDWLLSRPALVSPLAGYKAYPLTINARLDPAGFHLELGLRVAYSSTCPCSAALARQLIQQRFAADFANRPLDFDGLHAWLGSTGIAATPHSQRSDANIRVRLPDEANDLPFLALLDSAEATLGTAVQTAVKRADEQAFALANGQNLMFCEDAARRLYQALLKMPGIDAFHIQVTHAESLHAHDAVARVSHGLC

SEQ ID NO: 13523 - protein, 186 aa, Pseudomonas straminea
  REGION 1..186: note = tr|A0A1I1Z950|A0A1I1Z950_PSEOC GTP cyclohydrolase 1; OS = Pseudomonas straminea OX=47882 GN=folE PE=3 SV=1
MNPLLPNHYREILVGLGENPEREGLLDTPKRAAKAMQYLCNGYEKSLEEVVNGALFSSESDEMVIVKDIELYSLCEHHLLPFIGKAHVAYIPTGKVLGLSKIARIVDMYARRLQIQENLTRQIATAIEQVTQAAGVAVVIEAQHMCMMMRGVEKQNSVMSTSVMLGAFRESYNTRHEFLQLIGRSK

SEQ ID NO: 13524 - protein, 185 aa, Pseudomonas stutzeri; identical to SEQ ID NO: 13379
  REGION 1..185: note = tr|I4JKB1|I4JKB1_PSEST GTP cyclohydrolase 1; OS = Pseudomonas stutzeri TS44 OX=477228 GN=folE PE=3 SV=1

SEQ ID NO: 13525 - protein, 181 aa, Pseudomonas stutzeri
  REGION 1..181: note = tr|I4JIQ3|I4JIQ3_PSEST GTP cyclohydrolase 1; OS = Pseudomonas stutzeri TS44 OX=477228 GN=folE PE=3 SV=1
MSLEQQYTEILAQLGEDVTREGLLDTPKRAAKAMQYLCKGYQQTLEEVTNDALFSSDNSEMVLVKNIELYSLCEHHMLPFIGKAHVAYLPNGKVLGLSKVARIVEMYARRLQIQENLTREIAEAVQQVTGASGVAVVIEAQHMCMMMRGVEKQNSSMVTSVMLGQFRANAATRAEFLGLVK

SEQ ID NO: 13526 - protein, 186 aa, Pseudomonas synxantha
  REGION 1..186: note = tr|I4L3Y2|I4L3Y2_9PSED GTP cyclohydrolase 1; OS = Pseudomonas synxantha BG33R OX=96901 GN=folE PE=3 SV=1
MTLSLPHHYREILKGLGEDPEREGLLDTPKRAAKAMQYLCHGYAQNLEEIVNGALFASDNDEMVILKDIELYSLCEHHLLPFIGKAHVAYIPTGKVLGLSKLARIVDMFARRLQIQENLTRQIADAIQDVTQAAGVAVVIEAKHMCMMMRGVEKQNSTMNTSVMLGAFRESNTTRMEFLQLIGRSK

SEQ ID NO: 13527 - protein, 181 aa, Pseudomonas synxantha
  REGION 1..181: note = tr|A0A0R2Z3I9|A0A0R2Z3I9_9PSED GTP cyclohydrolase 1; OS = Pseudomonas synxantha OX=47883 GN=folE PE=3 SV=1
MSLEQNYTEILGQLGEDVSREGLLDTPKRAAKAMQYLCRGYAQTLEEVTNGALFSSDNSEMVLVKDIELYSLCEHHLLPFIGKAHVAYIPSGKVLGLSKVARIVDMYARRLQIQENLSRQIADAVLEVTGALGVAVVIEAKHMCMMMRGVEKQNSSMITSVMLGEFRDNAATRSEFLSLIK

SEQ ID NO: 13528 - protein, 187 aa, Pseudomonas syringae
  REGION 1..187: note = sp|Q887V1|GCH11_PSESM GTP cyclohydrolase 1 1; OS = Pseudomonas syringae pv. tomato (strain ATCC BAA-871 / DC3000) OX=223283 GN=folE1 PE=3 SV=1
MSSSLPQHYRDILLELGENPEREGLLDTPKRASKAMQYLCHGYTQTVEEIVNGALFASDNDEMVIVQNIELYSLCEHHLLPFIGKAHVAYIPTGKVLGLSKIARIVDMFARRLQIQENLTKQIADSIQQVTGAAGVAVVIEAQHMCMMMRGVEKQNSTMNTSVMLGAFRESSTTRMEFLQLIGRSRT

SEQ ID NO: 13529 - protein, 301 aa, Pseudomonas syringae
  REGION 1..301: note = tr|A0A2S3TZ09|A0A2S3TZ09_9PSED GTP cyclohydrolase FolE2 OS=Pseudomonas syringae group genomosp. 3 OX=251701; GN = folE2 PE=3 SV=1
MNSPLPDVALTEVSSALIALDWVGMQGVEVPLTLGEPGATHPVHAYADLQVDLTDPSVKGIHMSRLYRLLDGFAEHQVLTPETLSALLEAMVESHVDCHSSGARITLTFNLLCRRPALVTEGLSGWKSYPVKLEAVWRAERLCLDVSADITYSSTCPCSAALSRQLLEEAFVARFGRQSFVDPMQVAAWLRDNASYATPHSQRSVATVQVRVAEQATEMGLMALIDTVEQALGTPVQTAVKRADEQAFARLNGQNLMYVEDAARKIQQALEGRYPASSVSVRHFESLHPHDAAAQTSNYLS

SEQ ID NO: 13530 - protein, 182 aa, Pseudomonas taeanensis
  REGION 1..182: note = tr|A0A0A1YHB2|A0A0A1YHB2_9PSED GTP cyclohydrolase 1; OS = Pseudomonas taeanensis MS-3 OX=1395571 GN=folE PE=3 SV=1
MSLEQNYTAILGQIGEDASREGLLDTPKRAAKAMQYLCRGYQQTLEDVTNGALFSSDNSEMVLVKHIELYSLCEHHLLPFIGKAHVAYIPNGKVLGLSKVARIVDMYARRLQIQENLSRQIAEAVQEVTGALGVAVVIEAQHMCMMMRGVEKQNSSMVTSVMLGEFRENAATRSEFLSLINN

SEQ ID NO: 13531 - protein, 186 aa, Pseudomonas taeanensis
  REGION 1..186: note = tr|A0A0A1YEG8|A0A0A1YEG8_9PSED GTP cyclohydrolase 1; OS = Pseudomonas taeanensis MS-3 OX=1395571 GN=folE PE=3 SV=1
MNHLLSNHYREILIGVGEDPEREGLLDTPKRAAKAMQYLCHGYQSSLEEVVNGALFASDNDEMVMVKDVELYSLCEHHLLPFIGKAHVAYIPTGKVLGLSKIARIVDMYARRLQIQENLTRQIADAIQQVTSAAGVAVVIEAQHMCMMMRGVEKQNSLMSTSVMLGAFRESSNTRQEFLQLIGRSK

SEQ ID NO: 13532 - protein, 181 aa, Pseudomonas taetrolens
  REGION 1..181: note = tr|A0A0J6GNP9|A0A0J6GNP9_PSETA GTP cyclohydrolase 1; OS = Pseudomonas taetrolens OX=47884 GN=folE PE=3 SV=1
MSLEQNYTAILGQLGEDVSREGLLDTPKRAAKAMQYLCRGYEQTLEEVTNGALFSSDNSEMVLVKDIELYSLCEHHMLPFIGKAHVAYIPSGKVLGLSKVARIVDMYARRLQIQENLSRQIADAVMQVTGALGVAVVIEAKHMCMMMRGVEKQNSSMITSVMLGEFRENAATRSEFLSLIK

SEQ ID NO: 13533 - protein, 298 aa, Pseudomonas taetrolens
  REGION 1..298: note = tr|A0A0J6GRF3|A0A0J6GRF3_PSETA GTP cyclohydrolase FolE2 OS=Pseudomonas taetrolens OX=47884 GN=folE2 PE=3 SV=1
MNALTLPDVASQNTLQALPLEWVGMCGIALPVVIDGQRLSATADAGVSLDDSEARGIHMSRLYLALEVLESQELNPLLLKKILQRFLDSHDDLSISAYLRIHTHVLLKRPALVSPLSGWKSYPVSIDAAVKNGMFHVELKTEVIYSSTCPCSAALARQLIQQKFMDDFANKSLQHAEVLSWLGSSRGIVATPHSQRSTAYLQLRMNTELPDIPLIPIIDMAESALGTAVQTAVKRADEQAFALANGQNLMFCEDAARRLNVALKASPGVIGFDLKVVHAESLHSHDAVAESRWNWESQ

SEQ ID NO: 13534 - protein, 305 aa, Pseudomonas taiwanensis
  REGION 1..305: note = tr|V7DIM4|V7DIM4_9PSED GTP cyclohydrolase FolE2; OS = Pseudomonas taiwanensis SJ9 OX=1388762 GN=folE2 PE=3; SV = 1
MEYQMTQLKLPDIAAQTHEYALPLNWVGMCGIAQPVQFEGRTAAATVDAGVSLVDGSSRGIHMSRLYLALESLEHQPLTPLTIRQLLGNFLSSHEGLSSAAYLRLRFEHLLKRPALISPLEGWKSYAVTVDARIENEMFHVELSVSVPYSSTCPCSAALARQLIQQQFQAHFSTEQVDKSAVLQWLGSAEGIVATPHSQRSSALIQVRLRSNQQVLPITELIDCIEASLGTAVQTAVKRADEQAFALANGQNLMFCEDAARRLHKALRQIEWSTAFKLRVEHAESLHAHDAVATSQWQWDVSCAA

SEQ ID NO: 13535 - protein, 181 aa, Pseudomonas taiwanensis
  REGION 1..181: note = tr|V7DCW3|V7DCW3_9PSED GTP cyclohydrolase 1; OS = Pseudomonas taiwanensis SJ9 OX=1388762 GN=folE PE=3 SV=1
MSLEQNYTEILSQIGEDVSREGLLDTPKRAAKAMKYLCRGYEQTLEEVTNNALFSSDNSEMVLVRDIELYSMCEHHMLPFIGKAHVAYLPKGKVLGLSKVARIVDMYARRLQIQENLSRQVAEAVQQVTGAAGVAVVIEAKHMCMMMRGVEKQNSTMITSVMLGEFRENAATRSEFLSLIK

SEQ ID NO: 13536 - protein, 181 aa, Pseudomonas thivervalensis; identical to SEQ ID NO: 13235
  REGION 1..181: note = tr|A0A176NSG3|A0A176NSG3_9PSED GTP cyclohydrolase 1; OS = Pseudomonas thivervalensis OX=86265 GN=folE PE=3 SV=1

SEQ ID NO: 13537 - protein, 186 aa, Pseudomonas thivervalensis
  REGION 1..186: note = tr|A0A176NQN5|A0A176NQN5_9PSED GTP cyclohydrolase 1; OS = Pseudomonas thivervalensis OX=86265 GN=folE PE=3 SV=1
MTLSLPQNYREILIGLGENPEREGLLDTPVRAAKAMQYLCHGYEQSVEQIVNGALFASDSDEMVIVADIELYSLCEHHLLPFIGKAHVAYIPTGKVLGLSKIARLVDMFARRLQIQENLTRQIADAVQQVTQAAGVAVVIEAQHMCMMMRGVEKQNSTMNTSVMLGAFRDSSTTRQEFLQLIRRSK

SEQ ID NO: 13538 - protein, 181 aa, Pseudomonas tolaasii; identical to SEQ ID NO: 13303
  REGION 1..181: note = tr|A0A2N0E8Z4|A0A2N0E8Z4_PSETO GTP cyclohydrolase 1; OS = Pseudomonas tolaasii NCPPB 2192 OX=564423 GN=folE PE=3; SV = 1

SEQ ID NO: 13539 - protein, 298 aa, Pseudomonas tolaasii
  REGION 1..298: note = tr|A0A2N0E382|A0A2N0E382_PSETO GTP cyclohydrolase FolE2 OS=Pseudomonas tolaasii NCPPB 2192 OX=564423; GN = folE2 PE=3 SV=1
MNALTLPDIAAQASRQAMPLDWVGMCGIALPILIDGQRLTATADAGVSLDDGAARGIHMSRLYLALEMLDQQPLTPALLRTLLERFLESHEGLSKNAYLRIHTDLLLKRAALVSPLAGWKGYPVCIEARLENRMFHVELKIDVTYSSTCPCSAALARQLIQQQFIDDFANTPLQHEDVLTWLGSANGIVATPHSQRSSAQISVQLDETLPSLPLTDLIDNVELALGTAVQTAVKRADEQAFALANGQNLMFCEDAARRLNLALKRSDAVKAFHLKVIHAESLHAHDAVAESRWTRNAE

SEQ ID NO: 13540 - protein, 186 aa, Pseudomonas toyotomiensis
  REGION 1..186: note = tr|A0A1I5W700|A0A1I5W700_9PSED GTP cyclohydrolase 1; OS = Pseudomonas toyotomiensis OX=554344 GN=folE PE=3 SV=1
MSQPLSQQYREILVGLGENPEREGLLDTPKRAAKAMQYLCHGYQQSLDEIVNGALFESDNDEMVIVKDIELYSLCEHHLLPFIGKAHVAYIPTGKVLGLSKVARIVDMYARRLQIQENLTKQIADAIQRVTNAAGVAVVIEAKHMCMMMRGVEKQNSVMSSSVMLGAFRQSCNTRHEFLQLIGRNN

SEQ ID NO: 13541 - protein, 181 aa, Pseudomonas toyotomiensis
  REGION 1..181: note = tr|A0A1I5UFY7|A0A1I5UFY7_9PSED GTP cyclohydrolase 1; OS = Pseudomonas toyotomiensis OX=554344 GN=folE PE=3 SV=1
MSLEQQYTAILGQLGEDVSREGLLDTPKRAAKAMQYLCRGYQQTLEEVTNGALFSSDNSEMVLVKNIELYSLCEHHLLPFIGKAHVAYIPNGKVLGLSKVARIVDMYARRLQIQENLSRQIAEAVEQVTGALGVAVVIEAQHMCMMMRGVEKQNSSMVTSVMLGEFRNNPATRGEFLNLVR

SEQ ID NO: 13542 - protein, 187 aa, Pseudomonas tremae; identical to SEQ ID NO: 13280
  REGION 1..187: note = tr|A0A0Q0F1H8|A0A0Q0F1H8_9PSED GTP cyclohydrolase 1; OS = Pseudomonas tremae OX=200454 GN=folE PE=3 SV=1

SEQ ID NO: 13543 - protein, 181 aa, Pseudomonas tremae
  REGION 1..181: note = tr|A0A0Q0C3A0|A0A0Q0C3A0_9PSED GTP cyclohydrolase 1; OS = Pseudomonas tremae OX=200454 GN=folE PE=3 SV=1
MTLEQNYTAILGQLGEDVSREGLLDTPKRAAKAMQYLCRGYAQTLEEVTNGALFSSEASEMVMVKDIELYSLCEHHLLPFIGKAHVAYIPQGKVLGLSKVARIVDMYARRLQIQENLSRQIAEAIQQVTGALGVAVVIEAKHMCMMMRGVEKQNSAMITSVMLGEFRENAATRSEFLSLIK

SEQ ID NO: 13544 - protein, 181 aa, Pseudomonas trivialis
  REGION 1..181: note = tr|A0A0R2ZL19|A0A0R2ZL19_9PSED GTP cyclohydrolase 1; OS = Pseudomonas trivialis OX=200450 GN=folE PE=3 SV=1
MSLEQNYTAILGQLGEDVSREGLLDTPKRAAKAMQYLCRGYEQTLEEVTNGALFSSDNSEMVLVKDIELYSLCEHHLLPFIGKAHVAYIPRGKVLGLSKVARIVDMYARRLQIQENLSRQIADAVLEVTGALGVAVVIEAKHMCMMMRGVEKQNSSMITSVMLGEFRENAATRSEFLSLIK

SEQ ID NO: 13545 - protein, 296 aa, Pseudomonas trivialis
  REGION 1..296: note = tr|A0A0H5ABA1|A0A0H5ABA1_9PSED GTP cyclohydrolase FolE2 OS=Pseudomonas trivialis OX=200450 GN=folE2 PE=3 SV=1
MNALTLPDIAAQASRQALPLDWVGMCGIALPILIDGQRLSATADAGVSLDDGNARGIHMSRLYLALEMLDQQSLTPAHLRNVLQRFLDSHEGLSKNAYLRIHTDLLLKRAALVSTLAGWKRYPISIEARLENQMFHVELKIDVTYSSTCPCSAALARQLIQQQFLQDFANTPLRHDDVLTWLGSANGIVATPHSQRSNAQLHVQLQGEQLPITELIDKVEAALGTAVQTAVKRADEQAFALANGQNLMFCEDAARRLNLALKRSDAVKAFHLKVIHAESLHAHDAVAESRWTRNPA

SEQ ID NO: 13546 - protein, 191 aa, Pseudomonas umsongensis
  REGION 1..191: note = tr|A0A1H1P842|A0A1H1P842_9PSED GTP cyclohydrolase 1; OS = Pseudomonas umsongensis OX=198618 GN=folE PE=3 SV=1
MTLSLHQNCLSQSYREILIGLGENPEREGLRDTPLRAAKAMQYLCHGYEQSVEEIINGALFASDNDEMVIVDNIELYSLCEHHLLPFIGKAHVAYIPTGKVLGLSKIARLVDMFARRLQIQENLTRQIADAVQQVTGAAGVAVVIEAQHMCMMMRGVEKQNSTMNTSVMLGAFRESSNTRQEFLQLIGRSK

SEQ ID NO: 13547 - protein, 186 aa, Pseudomonas umsongensis
  REGION 1..186: note = tr|A0A1H1YUY7|A0A1H1YUY7_9PSED GTP cyclohydrolase 1; OS = Pseudomonas umsongensis OX=198618 GN=folE PE=3 SV=1
MNPSIAEHYREILVAIGENPDREGLLDTPKRAAKAMQYLCNGYTMNLEEVINGALFESLNDEMVIVRDIELYSLCEHHMLPFIGKAHVAYIPTGRVLGLSKVARVVDMFARRLQIQENLTKQIADALQHMTDAAGVAVVIEAKHMCMMMRGVEKQNSVMTTSVMLGAFRDSSATRHEFLQLIGRIG

SEQ ID NO: 13548 - protein, 188 aa, Pseudomonas vancouverensis
  REGION 1..188: note = tr|A0A1H2NZW0|A0A1H2NZW0_9PSED GTP cyclohydrolase 1; OS = Pseudomonas vancouverensis OX=95300 GN=folE PE=3 SV=1
MNEQLTRNYREILQGVGENPQREGLLDTPARAAKAMQYLCHGYQQNLEQVVNGALFESDNDEMVIVRDIELYSLCEHHLLPFIGKAHVAYLPTGKVLGLSKIARIVDMFARRLQIQENLTRQVADAIARVTDAAGVAVVIEAKHMCMMMRGVEKQNSVMSTSVMLGVFRDSYNTRQEFLQLIRNSQGQ

SEQ ID NO: 13549 - protein, 191 aa, Pseudomonas vancouverensis
  REGION 1..191: note = tr|A0A1H2P8W3|A0A1H2P8W3_9PSED GTP cyclohydrolase 1; OS = Pseudomonas vancouverensis OX=95300 GN=folE PE=3 SV=1
MTLTLPQQALSESYREILIGVGEDPEREGLLDTPKRAAKAMQYLCHGYAQSVEEIVNGALFASDNDEMVIVDNIELYSLCEHHLLPFIGKAHVAYIPTGKVLGLSKIARLVDMFARRLQIQENLTRQIAEAVQQVTGAAGVAVVIEAQHMCMMMRGVEKQNSTMNTSVMLGAFRESSNTRQEFLQLIGRSK

SEQ ID NO: 13550 - protein, 181 aa, Pseudomonas veronii; identical to SEQ ID NO: 13451
  REGION 1..181: note = tr|A0A1D3K1E0|A0A1D3K1E0_9PSED GTP cyclohydrolase 1; OS = Pseudomonas veronii 1YdBTEX2 OX=1295141 GN=folE2 PE=3; SV = 1

SEQ ID NO: 13551 - protein, 185 aa, Pseudomonas veronii
  REGION 1..185: note = tr|A0A0R3B0T0|A0A0R3B0T0_9PSED GTP cyclohydrolase 1; OS = Pseudomonas veronii OX=76761 GN=folE PE=3 SV=1
MNEELARNYREILHGVGEDPEREGLLDTPKRAAKAMQYLCHGYQQSLEQIVNGALFESDNDEMVIVRDIELYSLCEHHLLPFIGKAHVAYIPTGKVLGLSKVARIVDMFARRLQIQENLTRQIADAISLVTDAAGVAVVIEAKHMCMMMRGVEKQNSVMSTSVMLGAFRESYNTRQEFLQLIRGR

SEQ ID NO: 13552 - protein, 186 aa, unidentified
  source 1..186: note = Pseudomonas versuta
  REGION 1..186: note = tr|A0A0M4QT93|A0A0M4QT93_9PSED GTP cyclohydrolase 1; OS = Pseudomonas versuta OX=1788301 GN=folE PE=3 SV=1
MSATLPEQYREILIGLGENPDREGLLDTPKRAAKAMQYLCHGYEQSVETIVNGALFASDSDEMVIVSDIELYSLCEHHLLPFIGKAHVAYIPTGKVLGLSKIARIVDMFARRLQIQENLTREIADAIQGITQAAGVAVVIEARHMCMMMRGVEKQNSTMNTSVMLGAFREPSTRMEFLQLIGRSKS

SEQ ID NO: 13553 - protein, 181 aa, unidentified; identical to SEQ ID NO: 13303
  source 1..181: note = Pseudomonas versuta
  REGION 1..181: note = tr|A0A0M5LVU9|A0A0M5LVU9_9PSED GTP cyclohydrolase 1; OS = Pseudomonas versuta OX=1788301 GN=folE PE=3 SV=1

SEQ ID NO: 13554 - protein, 301 aa, Pseudomonas viridiflava
  REGION 1..301: note = tr|A0A3M5P9N6|A0A3M5P9N6_PSEVI GTP cyclohydrolase FolE2 OS=Pseudomonas viridiflava OX=33069 GN=folE2 PE=3; SV = 1
MNSSLPDVALTEASSALIALDWVGMQAIEVPIRLSEEGVSHSVHAFVDLHVDLADPSVKGIHMSRLYRLLDRFAEERLLNVAALSDLLEAMVESHASCRSTRARIKLNFNLLCRRPALVTEGLSGWKSYPITIDALWEAGRLRLDLSVGITYSSTCPCSAALSRQLLESAFIAHFDRQTFVDTMQVANWLRDNGSLATPHSQRSLATVQVRVPEHATELGLMALIDTTERALGTPVQTAVKRADEQAFARLNGQNLMYVEDAARKIQQALEGLYAASSVSVRHFESLHPHDAAAQTSNYLT

SEQ ID NO: 13555 - protein, 181 aa, Pseudomonas viridiflava
  REGION 1..181: note = tr|A0A0N8GJD4|A0A0N8GJD4_PSEVI GTP cyclohydrolase 1; OS = Pseudomonas viridiflava OX=33069 GN=folE2 PE=3 SV=1
MTLEQNYTAILGQLGEDVSREGLLDTPKRAAKAMQYLCRGYAQTLEEVTNEALFSSDASEMVMVKDIELYSLCEHHLLPFIGKAHVAYIPNGKVLGLSKVARIVDMYARRLQIQENLSRQIAEAIQQVTGALGVAVVIEAQHMCMMMRGVEKQNSAMITSVMLGEFRENAATRSEFLSLIK

SEQ ID NO: 13556 - protein, 181 aa, Pseudomonas vranovensis
  REGION 1..181: note = tr|A0A423D4N6|A0A423D4N6_9PSED GTP cyclohydrolase 1; OS = Pseudomonas vranovensis OX=321661 GN=folE PE=3 SV=1
MSLEQNYTAILGQLGEDVSREGLLDTPKRAAKAMQYLCRGYEQTLEEVTNGALFSSDNSEMVLVKDIELYSLCEHHMLPFIGKAHVAYIPDGKVLGLSKVARIVDMYARRLQIQENLSRQVAEAIQQVTGALGVAVVIEAKHMCMMMRGVEKQNSTMITSVMLGEFRENAATRSEFLSLIK

SEQ ID NO: 13557 - protein, 295 aa, Pseudomonas vranovensis
  REGION 1..295: note = tr|A0A423D7K0|A0A423D7K0_9PSED GTP cyclohydrolase FolE2 OS=Pseudomonas vranovensis OX=321661 GN=folE2 PE=3; SV = 1
MSAFTLPDIAAQATTSQLPLDWVGMCGIALPLQINGQISPATADAGVSLDDGASRGIHMSRLYLALQALEHQPLSPALINEVLQGFLDSHIGLSASAFLTLRFELMLKRPALISPLAGWKAYPVTLDAQIKDGVFHVELFVDVAYSSTCPCSAALARQLIQQQFISDFGNCSLSHEAVLSWLGSAEGIVATPHSQRSAAKLQVRLRPGVNELPIETLINQAESALGTAVQTAVKRADEQAFALANGQNLMFCEDAARRLNVTLKTLPWLSGFNLRVEHAESLHAHDAVAHSQWRW

SEQ ID NO: 13558 - protein, 271 aa, unidentified
  source 1..271: note = Pseudomonas wadenswilerensis
  REGION 1..271: note = tr|A0A380STV9|A0A380STV9_9PSED GTP cyclohydrolase FolE2 OS=Pseudomonas wadenswilerensis OX=1785161 GN=folE2; PE = 4 SV=1
MSGIALPLRINGQNLPASADAGVSLDDGASRGIHMSRLYLALEALEQQALSPALVNGVLERFLDSHIGLSASAFLTLRFELMLKRPALISPLAGWKAYPVTLDAQIKDGVFHVELFVDVEYSSTCPCSAALARQLIQQQFLTDFGNRSLSHEAVLSWLGSAEGIVATPHSQRSVAKLQVRLRQGINELPLEALINQAENALGTAVQTAVKRADEQAFALANGQNLMFCEDAARRLHVALKTLPWLGGFNLRVEHAESLHAHDAVAHSQWRW

SEQ ID NO: 13559 - protein, 186 aa, unidentified
  source 1..186: note = Pseudomonas wadenswilerensis
  REGION 1..186: note = tr|A0A380SX47|A0A380SX47_9PSED GTP cyclohydrolase 1; OS = Pseudomonas wadenswilerensis OX=1785161 GN=folE2 PE=3; SV = 1
MESAPVTLEQNYTAILGQLGEDVSREGLLDTPKRAAKAMQYLCRGYEQTLEEVTNGALFSSDNSEMVLVKDIELYSLCEHHMLPFIGKAHVAYIPDGKVLGLSKVARIVDMYARRLQIQENLSRQIAEAIQQVTGALGVAVVIEAKHMCMMMRGVEKQNSTMITSVMLGEFRENAATRSEFLSLIK

SEQ ID NO: 13560 - protein, 298 aa, unidentified
  source 1..298: note = Pseudomonas weihenstephanensis
  REGION 1..298: note = tr|A0A0J6LHS6|A0A0J6LHS6_9PSED GTP cyclohydrolase FolE2 OS=Pseudomonas weihenstephanensis OX=1608994; GN = folE2 PE=3 SV=1
MNALTLPDIASQNARQTVPLEWVGMCGIALPVVINGQRLAATADAGVSLDDGEARGIHMSRLYLALEVLDSQALNPLLLKKILQQFLDSHDDLSICAYLKIHTQVLLKRPALVSALSGWKSYPVSIEASLKNGMFHVELKIDVDYSSTCPCSAALARQLIQQQFVDDFANKPLHHAEVLTWLGSTQGIVATPHSQRSTAHLQLHLGRELQNFPINNIIDEAETALGTAVQTAVKRADEQAFALANGQNLMFCEDAARRLNVALKSTAGVKGFSLKVVHAESLHSHDAVAQSRWNWRNA

SEQ ID NO: 13561 - protein, 186 aa, unidentified
  source 1..186: note = Pseudomonas weihenstephanensis
  REGION 1..186: note = tr|A0A0J6IRA5|A0A0J6IRA5_9PSED GTP cyclohydrolase 1; OS = Pseudomonas weihenstephanensis OX=1608994 GN=folE PE=3; SV = 1
MSTSLPEHYREILLGLGENPDREGLLDTPKRAAKAMQYLCHGYDQSVDDIVNGALFASDSDEMVIVADIELYSLCEHHLLPFIGKAHVAYIPTGKVLGLSKVARIVDMFARRLQIQENLTREIADAIQNVTQAAGVAVVIEAKHMCMMMRGVEKQNSTMNTSVMLGAFREPSTRMEFLQLIGRSKS

SEQ ID NO: 13562 - protein, 185 aa, Pseudomonas xanthomarina
  REGION 1..185: note = tr|A0A3R8VQD2|A0A3R8VQD2_9PSED GTP cyclohydrolase 1; OS = Pseudomonas xanthomarina OX=271420 GN=folE PE=3 SV=1
MSESMPQHYREILLGIGENPAREGLLDTPKRAAKAMQYLCHGYRQTLEEVTNGALFSSDNSEMVLVKNIELYSLCEHHLLPFIGKAHVAYIPNGKVLGLSKVARIVDMFARRLQIQENLSRQIAEAIEQVTGALGVAVVIEAQHMCMMMRGVEKQNSSMVTSVMLGEFRNNPATRSEFLQLIGRK

SEQ ID NO: 13563 - protein, 181 aa, Pseudomonas xanthomarina; identical to SEQ ID NO: 13197
  REGION 1..181: note = tr|A0A098FRK6|A0A098FRK6_9PSED GTP cyclohydrolase 1; OS = Pseudomonas xanthomarina OX=271420 GN=folE PE=3 SV=1

SEQ ID NO: 13564 - protein, 185 aa, Pseudomonas xinjiangensis
  REGION 1..185: note = tr|A0A1H1VU65|A0A1H1VU65_9PSED GTP cyclohydrolase 1; OS = Pseudomonas xinjiangensis OX=487184 GN=folE PE=3 SV=1
MSLENLTRHYHEILSDLGENPEREGLQGTPLRAAKAMQFLCRGYNESLEDIVNGALFESENDEMVIVKDIELYSMCEHHMLPFIGKAHVAYIPTGRVIGLSKVARIVDMYARRLQIQENLTRQIAEALQSVTHAKGVAVVIEAKHMCMMMRGVEKQNSSMHTSVMLGAFRNSGTTRQEFLQLITR

SEQ ID NO: 13565 - protein, 298 aa, unidentified
  source 1..298: note = Pseudomonas yamanorum
  REGION 1..298: note = tr|A0A145XN33|A0A145XN33_9PSED GTP cyclohydrolase FolE2 OS=Pseudomonas yamanorum OX=515393 GN=folE2 PE=3 SV=1
MNALTLPDIAAQASRQALPLDWVGMCGIALPIQIDGQRLSAKADAGVSLDDGEARGIHMSRLYLALEMLEQQPLTPALLRSVLQRFLDSHEGLSTNAYLRIHTDLLLKRPALVSPLAGWKSYPVSIEARLENQMFHVELKIDVTYSSTCPCSAALARQLIQQQFIEDFAGTPLQHEDVLTWLGSANGIVATPHSQRSSALLQVRLQGDQPTLPLTQLIDETEAALGTAVQTAVKRADEQAFALANGQNLMFCEDAARRLNLALKRSDAVIAFHLKVIHAESLHAHDAVAESRWTRPSE

SEQ ID NO: 13566 - protein, 181 aa, unidentified; identical to SEQ ID NO: 13225
  source 1..181: note = Pseudomonas yamanorum
  REGION 1..181: note = tr|A0A1H2F0F1|A0A1H2F0F1_9PSED GTP cyclohydrolase 1; OS = Pseudomonas yamanorum OX=515393 GN=folE PE=3 SV=1

SEQ ID NO: 13567 - protein, 185 aa, unidentified
  source 1..185: note = Pseudomonas yangmingensis
  REGION 1..185: note = tr|A0A1I4NAA1|A0A1I4NAA1_9PSED GTP cyclohydrolase 1; OS = Pseudomonas yangmingensis OX=1720063 GN=folE PE=3 SV=1
MSLENLTRNYHEILENLGENPQREGLTGTPLRAAKAMQFLCHGYQQSLEEIVNGALFESDNDEMVIVKDIELYSLCEHHLLPFIGKAHVAYIPTGKVIGLSKVARIVDMFARRLQIQENLTRQIAEALQSVTNAKGVAVVIEAKHMCMMMRGVEKQNSSMHSSVMLGAFRDSVNTRQEFLQLIRN

SEQ ID NO: 13568 - protein, 182 aa, unidentified; identical to SEQ ID NO: 13403
  source 1..182: note = Pseudomonas zeshuii
  REGION 1..182: note = tr|A0A1M6L690|A0A1M6L690_9PSED GTP cyclohydrolase 1; OS = Pseudomonas zeshuii OX=1076620 GN=folE PE=3 SV=1

SEQ ID NO: 13569 - protein, 185 aa, unidentified; identical to SEQ ID NO: 13195
  source 1..185: note = Pseudomonas zhaodongensis
  REGION 1..185: note = tr|A0A365PQW9|A0A365PQW9_9PSED GTP cyclohydrolase 1; OS = Pseudomonas zhaodongensis OX=1176257 GN=folE PE=3 SV=1

SEQ ID NO: 13570 - protein, 185 aa, unidentified
  source 1..185: note = Pseudomonas zhaodongensis
  REGION 1..185: note = tr|A0A3M2HTY4|A0A3M2HTY4_9PSED GTP cyclohydrolase 1; OS = Pseudomonas zhaodongensis OX=1176257 GN=folE PE=3 SV=1
MNDLPNHFREILLGVGEDPQREGLLDTPKRAAKAMQYLCNGYDKSIEEVVNGALFASDNDEMVIVRDIELYSLCEHHMLPFIGKAHVAYIPTGKVLGLSKVARIVDMYARRLQIQENLTRQIAEAIQEVTQAAGVAVVIEAKHMCMMMRGVEKQNSLMNTSVMLGAFRESCTTRMEFLQLIGGNR

SEQ ID NO: 13571 - protein, 199 aa, Pseudonocardia alni
  REGION 1..199: note = tr|A0A2N0IDA7|A0A2N0IDA7_9PSEU GTP cyclohydrolase 1; OS = Pseudonocardia alni OX=33907 GN=folE PE=3 SV=1
MAAGVTRAVPGGIDLDRAERAVRELLIAVGEDPDREGLKETPARVARAYGEIFAGLFVDPDTVLEKTFDEGHGELVLVKDIPMFSTCEHHLVPFHGVAHVGYIPAVDGQVTGLSKLARVVDLYAKRPQVQERLTAQIADALVRKLNPRAVIVVLEAEHLCMAMRGIRKPGSRTTTSAVRGLFKSSATSRAEALSLIRGR

SEQ ID NO: 13572 - protein, 199 aa, Pseudonocardia ammonioxydans
  REGION 1..199: note = tr|A0A1I4SKP9|A0A1I4SKP9_9PSEU GTP cyclohydrolase 1; OS = Pseudonocardia ammonioxydans OX=260086 GN=folE PE=3 SV=1
MSAGVTQAVPEGVDLERAERAVRELLIAVGENPDREGLKETPARVARAYGEIFSGLFVDPDQVLEKTFDEGHGELVLVKDIPMFSTCEHHLVPFHGVAHVGYIPAVDGQVTGLSKIARVVDLYAKRPQVQERLTAQVADALVRKLDPRAVIVVMEAEHLCMAMRGIRKPGSRTTTSAVRGLFKSSASSRAEALSLIRGA

SEQ ID NO: 13573 - protein, 220 aa, Pseudonocardia asaccharolytica
  REGION 1..220: note = tr|A0A511CZ40|A0A511CZ40_9PSEU GTP cyclohydrolase 1; OS = Pseudonocardia asaccharolytica DSM 44247 = NBRC 16224; OX = 1123024 GN=folE PE=3 SV=1
MVADVTASPRQPPSSPAPPAAPRLRVVSDRTAVDVAAAERAVADLLRALGKDPDSVHLADTPRRVAGSFVELLTPRQFDLTTFPNDEGYDELVVATHLPVQSLCEHHLLPFHGVAHVGYLPGQRILGLSKLARVVELFGHDLQVQERLTKQVADWLQEHLAPRGVGVVIEAEHMCMSLRGVRAAGSRTITSALHGVLREDARSRNEFFALTGTSSRPVSA

SEQ ID NO: 13574 - protein, 193 aa, Pseudonocardia asaccharolytica
  REGION 1..193: note = tr|A0A511CY27|A0A511CY27_9PSEU GTP cyclohydrolase 1; OS = Pseudonocardia asaccharolytica DSM 44247 = NBRC 16224; OX = 1123024 GN=folE PE=3 SV=1
MNGRRRVDRPRAEAAVRELLVALGEDPDREGLRETPARVARAYEEIFAGLYVDADSVLDKTFDEDHQELILVREIPLFSTCEHHLVPFHGFAHVGYIPNKSGRVTGLSKIARVVENYARRPQVQERLTGQIADAIVRKLEPRGVIVVIDAEHLCMAIRGINKPGARTTTSAVRGLFQTSPSSRAEALALIRGG

SEQ ID NO: 13575 - protein, 204 aa, Pseudonocardia autotrophica
  REGION 1..204: note = tr|A0A1Y2MXV5|A0A1Y2MXV5_PSEAH GTP cyclohydrolase 1; OS = Pseudonocardia autotrophica OX=2074 GN=folE PE=3 SV=1
MRSAAVAAGIADAAPEGMDLERAARAVRELLIAIGEDPDREGLRETPARVARAYGEIFAGMFVDPDTVLEKTFDEGHGELVLVKDIPMFSTCEHHLVPFHGVAHVGYIPAIDGQVTGLSKIARVVDLYAKRPQVQERLTAQVADALVRKLNPRAVIVVMEAEHLCMAMRGIRKPGSRTTTSAVRGLFKSSASSRAEALSLIRGS

SEQ ID NO: 13576 - protein, 215 aa, unidentified
  source 1..215: note = Pseudonocardia cypriaca
  REGION 1..215: note = tr|A0A543GC81|A0A543GC81_9PSEU GTP cyclohydrolase 1; OS = Pseudonocardia cypriaca OX=882449 GN=folE PE=3 SV=1
MTSPARAFPPTTPLRVVPPADGVDLPGAERAAAAFLAALGVQTDTAAGGAAAGTPRRMARAYAEMLSPRSFDLTTFANDEHYDELVLARGIPVHSVCEHHMLPFLGTAHVGYLPGQRILGLSKLARVVELFARRPQVQERLTKQVADWLQTHLEPRGVGVVIEAEHMCMTLRGVRAGGANTITSTLLGTLREDPRSRAEFLALTTSTPTTARGRN

SEQ ID NO: 13577 - protein, 205 aa, Pseudonocardia dioxanivorans
  REGION 1..205: note = tr|F4CLU6|F4CLU6_PSEUX GTP cyclohydrolase 1; OS = Pseudonocardia dioxanivorans (strain ATCC 55486 / DSM 44775 / JCM 13855 / CB1190) OX=675635 GN=folE PE=3 SV=1
MSSASAAAPTSSVNGHRGVDRARAEAAVRELLIAIGEDPDREGLRDTPARVARAYEEIFAGLYTDADAVLDRTFDEQHQELILVKDIPMFSTCEHHLVPFHGVAHVGYIPNVTGRVTGLSKIARVVENYARRPQVQERLTGQVADALVRKLEPRGVIVVIDAEHLCMAMRGVRKPGSRTTTSAVRGLFSTSSTSRAEAMSLIRSG

SEQ ID NO: 13578 - protein, 211 aa, Pseudonocardia dioxanivorans
  REGION 1..211: note = tr|F4D0V4|F4D0V4_PSEUX GTP cyclohydrolase 1; OS = Pseudonocardia dioxanivorans (strain ATCC 55486 / DSM 44775 / JCM 13855 / CB1190) OX=675635 GN=folE PE=3 SV=1
MNGDSALAEAVVRPLRVVPPDSGIDLGRAERAARDFLVALGVPVDGDATAGTPGRMARAYAEMLAPRSFDLTTFANDEGYDELVLARSIPVQSVCEHHMLPFVGVAHVGYLPGERILGLSKLARVVELFARRPQVQERLTKQVADWLDSQLAPRGVGVVVEAEHMCMSLRGVRADGTSTITSTLLGTLREDPRSRAEFLALTMPRPGGGHV

SEQ ID NO: 13579 - protein, 191 aa, Pseudonocardia endophytica
  REGION 1..191: note = tr|A0A4R1HI27|A0A4R1HI27_9PSEU GTP cyclohydrolase 1; OS = Pseudonocardia endophytica OX=401976 GN=folE PE=3 SV=1
MPEGVDIDRAEAAVRELLLACGEDPDREGLKETPARVARAYGEIFAGLFVDPASVLEKTFDEGHGELVLVRDIPMFSTCEHHLVPFHGVAHVGYIPAVDGQVTGLSKIARVVDLYAKRPQVQERLTGQIADALVRKLDPRAVIVVIDAEHLCMAMRGIRKPGSRTTTSAVRGLFKNSASSRAEALSLIRQG

SEQ ID NO: 13580 - protein, 178 aa, unidentified
  source 1..178: note = Pseudonocardia hierapolitana
  REGION 1..178: note = tr|A0A561SSL1|A0A561SSL1_9PSEU GTP cyclohydrolase 1; OS = Pseudonocardia hierapolitana OX=1128676 GN=folE PE=3; SV = 1
MRELLLAIGEDPDREGLRDTPARVARSYAEIFQGLYSDPDEVLDRTFDEHHQELILVKDIPMFSMCEHHLVPFHGVAHVGYIPNPDGRVTGLSKIARLVDLYARRPQVQERLTAQVADALVRKLEPKGVIVVIEAEHLCMGMRGIRKPGSRTTTSAVRGMLRSSPTSRAEVLALIRNG

SEQ ID NO: 13581 - protein, 214 aa, unidentified
  source 1..214: note = Pseudonocardia hierapolitana
  REGION 1..214: note = tr|A0A561T041|A0A561T041_9PSEU GTP cyclohydrolase 1; OS = Pseudonocardia hierapolitana OX=1128676 GN=folE PE=3; SV = 1
MTSPARAFPPPTPLRVVPPVEGVDLVGAERAAAAFLTALGVATDGGATADTPRRMAHAYAEMLSPRSFDLTTFANDEDYDELVLARGIPVHSVCEHHMLPFLGTAHVGYLPGQRILGLSKLARVVELFARRPQVQERLTKQVADWLQTHLKPRGVGVVIEAEHMCMTLRGVRAGGTSTVTSSLLGGLRDDPRSRAEFLALTTGAGSAATGSRRG

SEQ ID NO: 13582 - protein, 155 aa, Pseudonocardia hydrocarbonoxydans
  REGION 1..155: note = tr|A0A4Y3WU07|A0A4Y3WU07_9PSEU GTP cyclohydrolase 1; OS = Pseudonocardia hydrocarbonoxydans OX=76726 GN=folE PE=3; SV = 1
MARAYEEIFAGLYTDPDTVLEKTFDESHRELILVRDIPMFSTCEHHLVPFHGMAHVGYIPGVSGRVTGLSKIARVVDLYARRPQVQERLTAQVADALVRKLAPTGVIVVMEAEHLCMGMRGIRKPGSRTMTSAVRGQFQTSPSSRAEAYSLIRGT

SEQ ID NO: 13583 - protein, 178 aa, Pseudonocardia kunmingensis
  REGION 1..178: note = tr|A0A543E2L4|A0A543E2L4_9PSEU GTP cyclohydrolase 1; OS = Pseudonocardia kunmingensis OX=630975 GN=folE PE=3 SV=1
MRELLIAVGEDPDREGLRETPARVARAYEEIFQGLYSDPDEVLDRTFDEHHQELILVKDIPMFSMCEHHLVPFHGVAHVGYIPNIDGRVTGLSKLARLVDLYARRPQVQERLTAQVADALRRKLEPQGVIVVIEAEHLCMGMRGIRKPGSRTITSAVRGMLQSSPTSRAEALSLIRSG

SEQ ID NO: 13584 - protein, 196 aa, Pseudonocardia oroxyli
  REGION 1..196: note = tr|A0A1G7PG39|A0A1G7PG39_9PSEU GTP cyclohydrolase 1; OS = Pseudonocardia oroxyli OX=366584 GN=folE PE=3 SV=1
MNGRVTATGVDHARAEAAVRELLLAIGEDPDREGLRDTPGRVARAYEELFAGLYTDPAAVLEKTFDEGHGELVMVKDIPIYSTCEHHLVPFHGVAHIGYIPSLDGKVTGLSKLARVVDLYAKRPQVQERLTGQVADALVAKLNPRGVIVVIDAEHLCMAMRGIRKPGSRTTTSAVRGMFETSPSSRAEALALIRGS

SEQ ID NO: 13585 - protein, 204 aa, Pseudonocardia sp.
  REGION 1..204: note = tr|A0A1Q8LAB7|A0A1Q8LAB7_9PSEU GTP cyclohydrolase 1; OS = Pseudonocardia sp. Ae706_Ps2 OX=1885035 GN=folE PE=3; SV = 1
MESAAVAAGVTQAVPGGIDLDRAERAVRELLIAVGEDPDREGLKETPARVARAYGEIFAGLFVDPDSVLEKTFDEGHGELVLVKDIPMFSTCEHHLVPFHGVAHVGYIPAVDGQVTGLSKLARVVDLYAKRPQVQERLTAQIADALVRKLNPRAVIVVLEAEHLCMAMRGIRKPGSRTTTSAVRGLFKSSASSRAEALSLIRGR

SEQ ID NO: 13586 - protein, 208 aa, Pseudonocardia sp.
  REGION 1..208: note = tr|A0A1Q4DTQ4|A0A1Q4DTQ4_9PSEU GTP cyclohydrolase 1; OS = Pseudonocardia sp. 73-21 OX=1895809 GN=folE PE=3 SV=1
MSATAPGDQVVPTVAGNGHRGVDHARAQAAVRELLIAVGEDPDREGLRDTPARVARAYEEIFAGLYTEPDSVLEKTFNEHHNELVLVKDIPIFSTCEHHLVPFHGMAHVGYIPGTSGRVTGLSKIARVVDLYARRPQVQERLTAQVADAIVRKLEPRGVIVVIEAEHLCMGMRGVRKPGSRTFTSAVRGLFQSSPSSRAEALSLIRGS

SEQ ID NO: 13587 - protein, 216 aa, Pseudonocardia sulfidoxydans
  REGION 1..216: note = tr|A0A511DAR9|A0A511DAR9_9PSEU GTP cyclohydrolase 1; OS = Pseudonocardia sulfidoxydans NBRC 16205 OX=1223511; GN = folE PE=3 SV=1
MTTPDISLVPAGADAVVRPLRVTAPEAGVDLAGAERAARDFLTALGVPTDGEATAGTPGRMARAYAEMLAPRSFDLTTFDNDEGYDELVLARRIPVASVCEHHMLPFVGVAHVGYLPGKRILGLSKLARVVELFARRPQVQERLTKQVADWLDEHLAPRGVGVVVEAEHMCMSLRGVRSEGTSTITSTLLGTLREDPRSRSEFLALTMPRPGGVHG

SEQ ID NO: 13588 - protein, 204 aa, Pseudonocardia sulfidoxydans
  REGION 1..204: note = tr|A0A511DQ84|A0A511DQ84_9PSEU GTP cyclohydrolase 1; OS = Pseudonocardia sulfidoxydans NBRC 16205 OX=1223511; GN = folE PE=3 SV=1
MASTPASARTTTNGHRGIDHARAEAAVRELLIAVGEDPDREGLRETPARVARAYAELFAGLYTDADAVLDKTFDEDHQELILVKDIPLFSTCEHHLVPFHGIAHVGYIPNVTGRVTGLSKIARVVENYARRPQVQERLTGQVADALVRKLEPRGVIVVMDAEHLCMAMRGVRKPGARTTTSAVRGLFATSSTSRAEALSLIRGG

SEQ ID NO: 13589 - protein, 205 aa, Pseudonocardia thermophila
  REGION 1..205: note = tr|A0A1M6UL57|A0A1M6UL57_PSETH GTP cyclohydrolase 1; OS = Pseudonocardia thermophila OX=1848 GN=folE PE=3 SV=1
MDGELNGDVPGLRPGARGVDRARAEAAVRELLIAIGEDPDREGLRDTPARVARAYEEIFAGLYVEPDEVLERTFDEHHQELILVRDIPLFSTCEHHLVPFHGFAHVGYIPNAEGKVTGLSKIARVVDLYARRPQVQERLTAQVADALVRKLDPRGVIVVMEAEHLCMGMRGIRKPGSTTTTSAVRGLFQSSPSSRAEALALIRRG

SEQ ID NO: 13590 - protein, 204 aa, unidentified
  source 1..204: note = Pseudonocardiaceae bacterium
  REGION 1..204: note = tr|A0A431NCB9|A0A431NCB9_9PSEU GTP cyclohydrolase 1; OS = Pseudonocardiaceae bacterium OX=1873463 GN=folE PE=3; SV = 1
MTSTSANAQASTNGHRGIDHARAEAAVRELLIAVGEDPEREGLRETPARVARAYGELFAGLYTDPDAVLDKTFDEQHQELILVRDIPLFSTCEHHLVPFHGVAHVGYIPNVTGRVTGLSKIARVVDNYARRPQVQERLTGQVADALVRKLEPRGVIVVMDAEHLCMAMRGVRKPGARTTTSAVRGIFATSSTSRAEALSLIREG

SEQ ID NO: 13591 - protein, 199 aa, unidentified
  source 1..199: note = Pseudonocardiaceae bacterium
  REGION 1..199: note = tr|A0A419HQ04|A0A419HQ04_9PSEU GTP cyclohydrolase 1; OS = Pseudonocardiaceae bacterium YIM PH 21723 OX=2340915; GN = folE PE=3 SV=1
MSNTAEGTERPAFDQERAQAAVRELLIACGEDPDREGLLETPARVARAYQELFAGLYTDPSAVLDKTFDESHEELILVTGIPVYSTCEHHLLPFHGEAHVGYIPNKEGRVTGLSKLARLVDLYAKRPQVQERLTSQVADAIEGKLRARGVIVVIEAEHLCMGMRGIRKPGARTTTSAVRGLLRTQASSRAEALSLIKGR

SEQ ID NO: 13592 - protein, 193 aa, unidentified
  source 1..193: note = Pseudonocardiales bacterium
  REGION 1..193: note = tr|A0A2W6C1A2|A0A2W6C1A2_9PSEU GTP cyclohydrolase 1; OS = Pseudonocardiales bacterium OX=2201155 GN=folE PE=3 SV=1
MAHEAQPARIVDLEAATLAASDFLCALGISIDGESMRETPRRMARAYAEFFSVPSFALTTFPNDENYDELVVARGIPVRSVCEHHLLPFVGVAHVGYLPGGRILGLSKMARVVTHFASRPQVQERLTKQIANWLDEQLAPKGVGVVIDAEHTCMTLRGVRAVGSSTITSALVGVLRDDPRSRQEFLSLTARAG

SEQ ID NO: 13593 - protein, 196 aa, unidentified
  source 1..196: note = Pseudonocardiales bacterium
  REGION 1..196: note = tr|A0A2W6C772|A0A2W6C772_9PSEU GTP cyclohydrolase 1; OS = Pseudonocardiales bacterium OX=2201155 GN=folE PE=3 SV=1
MNESEPTGRVDLDRAEAAVRELLIAVGENPDREGLKSTPARVARTYAEVFAGLFVDPDDVLQTTFDENHDELVLVKDIALYSTCEHHLVPWHGSAAVGYIPGESGRITGLSKLARVVDLYARRPQVQERLTGQVADAVMRRLEPRGVIVVIQAEHLCMAMRGVRKPGSITMTSAVRGIFKSDQRTRAEALSLILGR

SEQ ID NO: 13594 - protein, 364 aa, unidentified
  source 1..364: note = Pseudooceanicola antarcticus
  REGION 1..364: note = tr|A0A285ITR8|A0A285ITR8_9RHOB GTP cyclohydrolase FolE2 OS=Pseudooceanicola antarcticus OX=1247613 GN=folE2; PE = 3 SV=1
MNVHPNELKPKTDEARDALALLRDWAAKASDSEIAALDPAIARLLPGQTDYPQLSDEYPADFKAGSNYRSTMPDLQNGPSSLIRGAHARIQHVGISNFRLPISFHSRDGGDRTLEASVTGTVSLEAEKKGINMSRIMRSFYGHSEKRFSFEAIEAALEDYKSDLGSLDARIMMRFSYPVKRESLRSGLVGYQYYDLALEVVEEGGERKRFIHLDYVYSSTCPCSLELSEHARRERGQLATPHSQRSVARISVQEAPVPGQCLWFEDLIDMARRAVPTETQVMVKREDEQAFAELNAANPIFVEDAARLFCEELENDPRIGDFRVAASHQESLHSHDAVSVLTKGETFASHSLDPRFFTTLHKVG

SEQ ID NO: 13595 - protein, 364 aa, unidentified
  source 1..364: note = Pseudooceanicola atlanticus
  REGION 1..364: note = tr|A0A0A0ECR4|A0A0A0ECR4_9RHOB GTP cyclohydrolase FolE2 OS=Pseudooceanicola atlanticus OX=1461694 GN=folE2; PE = 3 SV=1
MNIHPNDMQPQPDRDEAKAALDKLRKWAAQASDRQINDLDPAIARLLSNSDYPTLARDYPEEFTVDPDYRATLPDLQNGPASLIRGARRAIQHVGISNFRLPIRYETRDGDAIMLESSVTGTVSLEADKKGINMSRIMRSFYAHAEKTFSFAVIEAALDDYKADLESFDARIQMRFSYPMKVPSLRSGLQGYQYYDIALELVESAGQRLRIVHLDYVYSSTCPCSLELSEHARRDRGQLATPHSQRSVARLSVVLDDDDKRLWFEDLIDMARRAVPTETQVMVKREDEQAFAELNAANPIFVEDAARLFAAQLEADERVGDFRIAASHQESLHSHDAVSVLTEGETFASASLDPNFFSTLIHRG

SEQ ID NO: 13596 - protein, 363 aa, unidentified
  source 1..363: note = Pseudooceanicola batsensis
  REGION 1..363: note = tr|A3TTQ1|A3TTQ1_PSEBH GTP cyclohydrolase FolE2; OS = Pseudooceanicola batsensis (strain ATCC BAA-863 / DSM 15984 / KCTC 12145 / HTCC2597) OX=252305 GN=folE2 PE=3 SV=1
MNIHPNDMQALPDRDEAEAALSRLRQWAAAASDSEINDLDPALARLLSDEGYPLLSRRYPAGFDADEGYRASLPDLQNGPASLIRGSRRTIQHVGISNFRLPIRYRTRAGGEISLESAVTGTVSLEADKKGINMSRIMRSFYAHAEKTFSFEVIEAALDDYKADLGTLDARIQMRFSYPLRVDSLRSGLSGYQYYDIALELVERGGERLRIVHLDYVYSSTCPCSLELSEHARRERRQLATPHSQRSVARISVVLAGTDRLWFEDLIDMARRAVPTETQVMVKREDEQAFAELNAANPIFVEDAARLFSAELEQDERIGDFRIVASHQESLHSHDAVSILTEGPTFEAASLDPGLFGTLHHVR

SEQ ID NO: 13597 - protein, 363 aa, unidentified
  source 1..363: note = Pseudooceanicola flagellatus
  REGION 1..363: note = tr|A0A1W2CUI8|A0A1W2CUI8_9RHOB GTP cyclohydrolase FolE2 OS=Pseudooceanicola flagellatus OX=1387277 GN=folE2; PE = 3 SV=1
MNVHLSDVPTDLTREEAQAALAALRLWAANASKEDLSSMDPAVARLIGEADQPQMSNLYPQDFVVDEAYKASLPDLQNGPAALIRGAKRAIQHVGISNFRLPLRYHTRDNGDLTLETSVTGTVSLEADKKGINMSRIMRSFYGHAEKTFSFEVIEAALDDYKTDLESFDARIQMRFSFPVKIESLRSGLSGYQYYDLALELVERDGVRNKIMHLDYLYSSTCPCSLELSEHARRARGQLATPHSQRSVARISVEVRKGDCLWFEDLIDMCRRAVPTETQVMVKREDEQAFAELNAANPIFVEDAARLFAEQLTADARIGDYRVIASHQESLHSHDAVSILTEGETFKADSLDPKLFNTLFHVG

SEQ ID NO: 13598 - protein, 371 aa, unidentified
  source 1..371: note = Pseudooceanicola lipolyticus
  REGION 1..371: note = tr|A0A2M8IYN0|A0A2M8IYN0_9RHOB GTP cyclohydrolase FolE2 OS=Pseudooceanicola lipolyticus OX=2029104 GN=folE2; PE = 3 SV=1
MNIQTSRPGTSPDKAPDRDAAAAALDLLRRWARTASEAELNTLDPAIARLLPDRTPSNYPALSRSYPEDFVVDAAYKASLPDLQNGPSSLIRGARQQIQHVGISNFRLPIRFHTRDDGDLTLETSVTGTVSLEADKKGINMSRIMRSFYAHADRTFSFEVIEAALDDYKSDLESFDARIQMRFSFPVRVHSLRSGLSGFQYYDIALELVEIAGVRQKILHLDYVYSSTCPCSLELSEHARQARGQLATPHSQRSVARISVVDAGGAECLWFEDLIDACRRAVPTETQVMVKREDEQAFAELNAANPIFVEDAARLFCAELKADPRIGDFRVIASHQESLHSHDAVSVLYEGATFAATSMDPRLFSTLIHVG

SEQ ID NO: 13599 - protein, 362 aa, unidentified
  source 1..362: note = Pseudooceanicola marinus
  REGION 1..362: note = tr|A0A1X6YZP9|A0A1X6YZP9_9RHOB GTP cyclohydrolase FolE2 OS=Pseudooceanicola marinus OX=396013 GN=folE2 PE=3; SV = 1
MNIHPNDLKPETEEAKAALALLRDWVAKASDAEINALDPAVAQLLPGQGGYPVLSRDYPQDFAVDAAYRATLPDLQNGPASLIRGAHAPIQHVGISNFRLPIRFHTRDGGDQTLESSVTGTVSLEADKKGINMSRIMRSFYGHAEKCFSFGVIEAALDDYKSDLDSLDARIMMRFSYPVKRESLRSGLAGYQYYDIALEVVDEGGQRNRYIHLDYVYSSTCPCSLELSEHARRARGQLATPHSQRSVARISVQVLPGDCLWFEDLIDMARVAVPTETQVMVKREDEQAFAELNAANPIFVEDAARLFCEELQGDARIGDFRVAASHQESLHSHDAVSILTEGPTFAASSLDPRFLATLHHAG

SEQ ID NO: 13600 - protein, 363 aa, unidentified
  source 1..363: note = Pseudooceanicola nitratireducens
  REGION 1..363: note = tr|A0A1I1JTR3|A0A1I1JTR3_9RHOB GTP cyclohydrolase FolE2 OS=Pseudooceanicola nitratireducens OX=517719; GN = folE2 PE=3 SV=1
MNIHPSDMQPMPDRDEAKDALARLRQWASAASDAEINALDPAVARLLNDSEYPLLNRVYPADFTSDPAYRATLPDLQNGPSSLIRGAHRTIQHVGISNFRLPIRYKTRDGGEVMLESSVTGTVSLEADKKGINMSRIMRSFYAHAEKTFSFEVIEAALDDYKSDLETLDARIQMRLSYPLRVPSLRSGLSGYQYYDISLELVDTAGSRLRVLHLDYVYSSTCPCSLELSEHAREQRGQLATPHSQRSVARISVVLQGDDPLWFEDLIEIARKAVPTETQVMVKREDEQAFAELNAANPIFVEDAARLFAQGLEADDRIGDFRVVASHQESLHSHDAVSILTDGPTFEAASLDPRLFGTLHHVR

SEQ ID NO: 13601 - protein, 363 aa, unidentified
  source 1..363: note = Pseudooceanicola sp.
  REGION 1..363: note = tr|A0A2E3H079|A0A2E3H079_9RHOB GTP cyclohydrolase FolE2 OS=Pseudooceanicola sp. OX=1914328 GN=folE2 PE=3 SV=1
MNIHPNDMLTQPNRDDAAEALRKLREWAGTATDSEINELDPAIARLLQPTGYPLLSDAYPEDLKTDADYRATLPDLQNGPASLIRGSRRAIQHVGISNFRLPIRYLTRAGGDIMLESAVTGTVSLEADKKGINMSRIMRSFYAHADKTFSFSVIEAALDDYITDLDSLDARIQMRLSYPLKVESLRSGLAGYQYYDIALELIESAGERLRVLHLDYVYSSTCPCSLELAEHARRERGQLATPHSQRSVARMSVVLTGEGRLWFEDLIDMARRAVPTETQVMVKREDEQAFAELNAANPIFVEDAARLFSRELESDARVGDFRVVASHQESLHSHDAVSILTEGPTFAAASLDPRLFGTLHHVR

SEQ ID NO: 13602 - protein, 369 aa, unidentified
  source 1..369: note = Pseudooceanicola sp.
  REGION 1..369: note = tr|A0A2E2PBH6|A0A2E2PBH6_9RHOB GTP cyclohydrolase FolE2 OS=Pseudooceanicola sp. OX=1914328 GN=folE2 PE=3 SV=1
MNVHLPPSALPEPDMDDAADALALLRRWAQKSTDEELSALDPALARLLPGRDLGNYPPLSRDYPEGFHADSAYRATLPDLQNGPASLIRGARKPIQHVGISNFRLPIRFHTRDGGDLTLETSVTGTVGLDADKKGINMSRIMRSFYAHADKTFSFEVIEAALDDYKSDLESLDARIQMRFSFPVRLGSLRSGLSGYQYYDIALELVESDGQRRKFMHLDYVYSSTCPCSLELSEHARATRGQLATPHSQRSVARISVALDRVEGDCLWFEDLIGHCRRAVPTETQVMVKREDEQAFAELNAANPMFVEDAARLFSGVLLEDPRIGDFRVVASHQESLHSHDAVSVLTEGETFAAQSLDPRLFASLFHVG

SEQ ID NO: 13603 - protein, 391 aa, unidentified
  source 1..391: note = Pseudooctadecabacter jejudonensis
  REGION 1..391: note = tr|A0A1Y5RNY1|A0A1Y5RNY1_9RHOB GTP cyclohydrolase FolE2 OS=Pseudooctadecabacter jejudonensis OX=1391910; GN = folE2 PE=3 SV=1
MCKRETDNETAVVAVSRGATEGAGMNIHSKDLDRDLSREEAEAALALLRQWAADKTDEEVASLDPLVSRLVPGKEVSNYPALARAYPEDFAVDEDYKASMPDLQNGPSSLIRGAKRAIQHVGISNFRLPIGFHTRDNGDLTLETSVTGTVSLEAEKKGINMSRIMRTFYKHAEEVFSFEVIARALDAYKSDLESFDARIMMRMSFPMKVDSLRSGLAGYQYYDIALELIEADGVRKKIVHLDYVYSSTCPCSLELSEHARQYRGQLATPHSQRSVARVSVELDPTADVLWFEDLIDMCRAAVPTETQVMVKREDEQAFAELNAANPIFVEDAARLFAEQLQADARVADYRVIASHQESLHSHDAVSVLTEGATFDAESLDPRLFQSLFHVG

SEQ ID NO: 13604 - protein, 196 aa, unidentified
  source 1..196: note = Pseudopedobacter saltans
  REGION 1..196: note = tr|A0A2W5FFR5|A0A2W5FFR5_9SPHI GTP cyclohydrolase 1; OS = Pseudopedobacter saltans OX=151895 GN=folE PE=3 SV=1
MAYRKIEEYDEETTQKLQEQYKTVLETLGEDPTREGLVKTPYRVAKAMQFLTQGYDQDAVAILNSAKFTAPKSEIVIVKDIELYSLCEHHMLPFVGKAHVAYIPNGYITGLSKIARVVDVFARRLQVQERLTMQIMNAIDEALKPLGVAVVVEANHMCMMMRGVQKQNSLTTTSTFSGEFENDVTRSEFLRLIQMK

SEQ ID NO: 13605 - protein, 211 aa, unidentified
  source 1..211: note = Pseudopedobacter saltans
  REGION 1..211: note = tr|F0S8F9|F0S8F9_PSESL GTP cyclohydrolase 1; OS = Pseudopedobacter saltans (strain ATCC 51119 / DSM 12145 / JCM 21818 / LMG 10337 / NBRC 100064 / NCIMB 13643); OX = 762903GN=folE PE=3 SV=1
MIHSDNDDFFEDSGYIKIDRYNQERTTKIASHYKEILNEIGEDTSRDGLLKTPERYAKALQFLTHGYDLNAEEILRSAMFEEEYSQMVIVKDIEVYSLCEHHIIPFFGKAHIAYIPNGHIVGLSKIPRIVDVFARRLQVQERLTNEIRDCIQNTLNPAGVAVVLECKHMCMSMRGIQKQNSVTTTSAFTGEFANDRTRSEFLRLIAADLYK

SEQ ID NO: 13606 - protein, 366 aa, unidentified
  source 1..366: note = Pseudopelagicola gijangensis
  REGION 1..366: note = tr|A0A1M6D3U3|A0A1M6D3U3_9RHOB GTP cyclohydrolase FolE2 OS=Pseudopelagicola gijangensis OX=1470563 GN=folE2; PE = 3 SV=1
MNIYSADSKDDQARREAVEALRRLRAWAASATPTEIAELDSAIARLLPDQPLANYPDLNRDYPEDFTVTEVYRDSLPDLQNGPASLIKGEKQQIQHVGISNFRLPIRFHSRDNSDVTLETSVTGTVSLDAEKKGINMSRIMRSFYKHAEKTFSFDVMEQALADYVSDLESVDARIQMRFSYPMQIQSLRSGLSGYQYYDIAMEKVQVSGELHKVMHLDYVYSSTCPCSLELSEHARQSRGQLATPHSQRSVARISVQVLPGGKLWFEDLIDMCRLAVPTETQIMVKREDEQAFAELNAANPIFVEDAARLFCEQLKADPRIGDFQVVASHQESLHSHDAVSVLTDGPFFASASLDPKLFNTLFHVG

SEQ ID NO: 13607 - protein, 188 aa, unidentified
  source 1..188: note = Pseudopropionibacterium propionicum
  REGION 1..188: note = tr|A0A3S4UT29|A0A3S4UT29_9ACTN GTP cyclohydrolase 1; OS = Pseudopropionibacterium propionicum OX=1750 GN=folE; PE = 3 SV=1
MSHVDQPRIEEAVREILLAVGEDPDRDGLSETPGRVARAYRELFSGLAQDPAELLSTTFDIDHEELVLVRDIELTSCCEHHLLPFFGVAHVGYIPGGGRVTGLSKLARLVDIYARRPQVQERLTTQVADALVTHLGAQGVIVVIEAEHTCMTMRGVRKPGSRTITSAVRGQLRNAATRAEAMSLIMAR

SEQ ID NO: 13608 - protein, 190 aa, unidentified
  source 1..190: note = Pseudopropionibacterium propionicum
  REGION 1..190: note = tr|A0A3P1WQS8|A0A3P1WQS8_9ACTN GTP cyclohydrolase 1; OS = Pseudopropionibacterium propionicum OX=1750 GN=folE; PE = 3 SV=1
MSVDRGRIESAVREILLAVGEDPDRDGLRDTPARVARAYEELFVGLRQDPAEILATTFDIDHEELVLVRDIELTSCCEHHLLPFVGVAHVGYIPGGGQVTGLSKLARLVDAYARRPQVQERLTSQVADALVEHLGARGVIVVIEAEHMCMTMRGVRKRGSRTITSAVRGQLRDPATRAEAMSLIHGGGTS

SEQ ID NO: 13609 - protein, 363 aa, unidentified
  source 1..363: note = Pseudopuniceibacterium sediminis
  REGION 1..363: note = tr|A0A399IXI9|A0A399IXI9_9RHOB GTP cyclohydrolase FolE2 OS=Pseudopuniceibacterium sediminis OX=2211117; GN = folE2 PE=3 SV=1
MNIHPSDLKPETQEARDALDTLRDWAAKASDEEINALDPAVARLLPGQADYPVMSHVYPTGFVSDEAYRATLPDLQNGPASLIRGARAQIQHVGISNFRLPIRFHTRDGGELTLETSVTGSVSLEADKKGINMSRIMRSFYAHSEKCFSFSVIEAALEDYMSDLESLDARIMMRFSYPVKILSLRSGLQGYQYYDIALELVDEGGVRNRYIHLDYVYSSTCPCSLELSEHARRTRNQLATPHSQRSVARIAVQSVPNEDCLWFEDLIDKARAAVPTETQVMVKREDEQAFAELNAANPIFVEDAARLFCEQLQDDPRIGDFRVAASHQESLHSHDAVSVLTQGDTFRASSLDPHFFATLHHAG

SEQ ID NO: 13610 - protein, 204 aa, unidentified
  source 1..204: note = Pseudorhizobium pelagicum
  REGION 1..204: note = tr|A0A081MPP8|A0A081MPP8_9RHIZ GTP cyclohydrolase 1; OS = Pseudorhizobium pelagicum OX=1509405 GN=folE PE=3 SV=1
MDAIVKNFPTSGHAESRPTREQAEEAVRVLLRWAGEDPQREGLLDTPKRVATAYRELFSGYDLSHEEVLGRTFEEVSGYGDPVLVRDIPFYSHCEHHMLPIIGKAHVAYLPNDRVLGLSKIARVVDIFGRRLQTQENMTAQIAQAIDETLKPRGVAVMIEAEHMCMAMRGVQKQGSTTLTTTFKGEFKSNAAEQARFLTLVRNR

SEQ ID NO: 13611 - protein, 355 aa, unidentified
  source 1..355: note = Pseudorhodobacter antarcticus
  REGION 1..355: note = tr|A0A1H8AXJ3|A0A1H8AXJ3_9RHOB GTP cyclohydrolase FolE2 OS=Pseudorhodobacter antarcticus OX=1077947 GN=folE2; PE = 3 SV=1
MKPNAVPTRDEAEAALALLQRWAGDAPAGEVAALGAQAFLAGGYPELSAHYPADFVVDAAYKASLPDLQNGPASLIKGEKTLIQHVGISNFRLPIRYHVRDGADVVLETSVTGSVSLEAEKKGINMSRIMRSFYSHAEQAFSHKVIERALEDYKRDLDSFDARIQMRFSFPVKIESLRSGLAGWQYYDIALELVDQGGVRKTIMHLDYVYSSTCPCSLELSEHARRTRGQLATPHSQRSVARISVELVGDNCLWFEDLINLARAAVPTETQVMVKREDEQAFAELNAANPIFVEDAARSFCAQLQADPRVGDFRIVASHQESLHSHDAVSVLTIGDTFAATSLDPKLFTTLFHIG

SEQ ID NO: 13612 - protein, 349 aa, unidentified
  source 1..349: note = Pseudorhodobacter antarcticus
  REGION 1..349: note = tr|A0A1H8N4S0|A0A1H8N4S0_9RHOB GTP cyclohydrolase FolE2 OS=Pseudorhodobacter antarcticus OX=1077947 GN=folE2; PE = 3 SV=1
MTMISGPILTPTTQNSKPIQPVTPDVDAILATQAEAYPVFSTKFPEGFEVDGDYIASLPDLQNESEGLINGAGQRIQHVGISNFRLPVRFQSRDSSKLQLEAAVSGTVSLDASKRGINMSRIMRTFYRHAEREFDFAVIEGVLDEYKSDLESFDARIQMKFSYPREVRSLRSGLYGYQYYEVAFELSEIDGVRQRIIHIDYVYSSTCPCSLELSEHARKNRRQLATPHSQRSVARISVVETPGVDKIWIEDLVDLCLRAVPTETQVMVKREDEQAFAELNAANPIFVEDAARLFCEHLRLDSRIGDFRVIASHQESLHSHDAVSILTEGRTFAQSSLDPNLFKTLFHVG

SEQ ID NO: 13613 - protein, 351 aa, Pseudorhodobacter sp.
  REGION 1..351: note = tr|A0A4P8EIU6|A0A4P8EIU6_9RHOB GTP cyclohydrolase FolE2 OS=Pseudorhodobacter sp. S12M18 OX=2500533 GN=folE2; PE = 3 SV=1
MNIHSKGTQPDRSDAEAALAVLQSWAAHAPAAEVAALGLYPALSAEYPADFVVDADYKAGLPDLQNGPSSLIKGERTVIQHVGISNFRLPIRYHTRDGADVILETSVTGSVSLEAEKKGINMSRIMRSFYAYAEKSFSYKVIERALEDYKRDLDSFDARIQMRFSFPMKIESLRSGLSGWQYYDIALELVDAGGARKTIMHLDYVYSSTCPCSLELSEHARRSRNQLATPHSQRSVARISVELVGDKCLWFEDLIDLARAAVPTETQVMVKREDEQAFAELNAANPIFVEDAARSFCAQLQADRRVGDFRIIASHQESLHSHDAVSVLTIGDTFAATSLDPKLFTTLFHVG

SEQ ID NO: 13614 - protein, 362 aa, Pseudorhodobacter sp.
  REGION 1..362: note = tr|A0A2M8N225|A0A2M8N225_9RHOB GTP cyclohydrolase FolE2 OS=Pseudorhodobacter sp. MZDSW-24AT OX=2052957; GN = folE2 PE=3 SV=1
MNIHTPEIDRKPSRDEAEAALALLQKWARHSSDDEIATLEPGVGYLLPGQFAPALSRAYPQNFAVTPAYKDSLPDLQNGPSSLIRGERQRIQHVGISNFRLPIRYQTRDAAPVMLETSVTGTVSLEAEKKGINMSRIMRSFYAHAERTFGFSVIEAALDDYKADLGSFDARIQMRFSYPMQVPSLRSGLAGWQYYEVAFELVETAGLRKKIVHLDYVYSSTCPCSLELSEHARNTRGQLATPHSQRSVARLSVEVLDAALTVEDLVEIARAGVVTETQVMVKREDEQAFAELNAANPIFVEDAARLFCAVLKRDPRIGDFRVLASHQESLHSHDAVSLLTEGPTFAQDSLDPRLFQSLFHIG

SEQ ID NO: 13615 - protein, 212 aa, unidentified
  source 1..212: note = Pseudorhodoplanes sinuspersici
  REGION 1..212: note = tr|A0A1W6ZVU9|A0A1W6ZVU9_9RHIZ GTP cyclohydrolase 1; OS = Pseudorhodoplanes sinuspersici OX=1235591 GN=folE PE=3; SV = 1
MDAIIKPWPKTGQQTADTSDIARPTREQAEEAVRTLIAFAGDNPARDGVLDTPGRVVEAYEEMFRGYRENPKEVLDRTFSESEAYDDFVLVRDITFNSHCEHHMMPFYGRAHVAYRPVDRVVGLSKLARLVDIYAHRLQTQEHMTAQIVTAIDEILKPKGVAVMIEAEHMCMSIRGVTKPGALTVTTQFRGTFREDPNEQVRFLTSIRAGQR

SEQ ID NO: 13616 - protein, 363 aa, unidentified
  source 1..363: note = Pseudoroseicyclus aestuarii
  REGION 1..363: note = tr|A0A318SYY6|A0A318SYY6_9RHOB GTP cyclohydrolase FolE2 OS=Pseudoroseicyclus aestuarii OX=1795041 GN=folE2; PE = 3 SV=1
MTDHATALPERAEAEAALATLRHWAAGASPEEVAALDPRIARLLPGAPLANYPALARAYPEDFTADEAYRAALPDLQNGPASLIRGAPRPIQHVGISNFRLPIRFETKGGSDLTLETSVTGTVSLDAGRKGINMSRIMRSFYRHAEESFSFEVIERALAAYQSDLDSFDARIQMRFSFPLRMASLRSGLAGFQYYDLALELVEQGGAAKRIIHLDYVYSSTCPCSLELSEHARQSRGQLATPHSQRSVARLSVVCAPGPRLWFEDLIDLARGAVPTETQVMVKREDEQAFAELNAANPVFVEDAVRLFSERLLADPRIGDFRVLASHQESLHSHDAVSLLTEGPTFHAESLDPRLFAGLRHPG

SEQ ID NO: 13617 - protein, 367 aa, Pseudoruegeria aquimaris
  REGION 1..367: note = tr|A0A1Y5SIN8|A0A1Y5SIN8_9RHOB GTP cyclohydrolase FolE2 OS=Pseudoruegeria aquimaris OX=393663 GN=folE2 PE=3; SV = 1
MNMQVSRQHETPTREEAEKALATLRDWAAKASYTEVAELDPSVSRLLPSGDRPNYPALARAYPEEFRVDDAYKASLPDLQNGPESLIKGARRAIQHVGISNFRLPIRFHTRDNGDVTLETSVTGTVSLEAEKKGINMSRIMRTFYKHAERTFSFEVIEAALDDYKADLESFDARIQMRFSFPLKVKSLRSGLEGFQYYDIALELVEVDGVRRRMVHLDYVYSSTCPCSLELSEHARQFRGQLATPHSQRSVARISVELAAGQPCLWFEDLVDLCRAAVPTETQVMVKREDEQAFAELNAANPIFVEDAARLFAEQLSADSRIGDFRVIASHQESLHSHDAVSVLTEGRTFASESLDPKLFNTLFHVG

SEQ ID NO: 13618 - protein, 366 aa, Pseudoruegeria sp.
  REGION 1..366: note = tr|A0A1X4J222|A0A1X4J222_9RHOB GTP cyclohydrolase FolE2 OS=Pseudoruegeria sp. SK021 OX=1933035 GN=folE2 PE=3; SV = 1
MTVHSSKIDRLPTCDEAAQALALLQRWAGAVSAADAAALAPDLARVLAAQTGATYPELTREYPDGFQVSPEYMNSLPDLQNGPSSLIRGAHQPIQHVGISNFRLPVRYRTRGKGDLTLETSVTGTVSLDAEKKGINMSRIMRSFYRHADETFSFDLMRRAIDAYKADLDSFDARIQMRLSFPMRTESLRSGLTGYQYYDLTLELVEQGGVAQQILHLDYVYSSTCPCSLELSEHARRTRGQLATPHSQRSIARISVEILGGACLWFEDVIDMCRAAVPTETQVMVKREDEQAFAELNAANPIFVEDAVRLFCAGLQGDPRIGDFRIVASHQESLHSHDAVSVLAHGPTFASGSLEPRLFSSLYLTG

SEQ ID NO: 13619 - protein, 222 aa, unidentified
  source 1..222: note = Pseudoscardovia radai
  REGION 1..222: note = tr|A0A261EZ17|A0A261EZ17_9BIFI GTP cyclohydrolase 1; OS = Pseudoscardovia radai OX=987066 GN=folE PE=3 SV=1
MVTQNDDVARETAIETATEAASAPETSDLVSADGSRHYDEEGVRRAVYDFLVAIGEDPQREGLLDTPDRIARAGKELFGGLYKSPQEPLSRQFKTDTDEMVLVRDIELYSVCEHHLMPFHGVAHIAYIPSNGMVVGLSKLARLVEVYARRPQVQERLTKQIADALMTELGAKGCLVVIDCEHLCMSMRGVKKSQARTTTSAVRGIMKNAATRAEAMQLICRG

SEQ ID NO: 13620 - protein, 243 aa, unidentified
  source 1..243: note = Pseudoscardovia suis
  REGION 1..243: note = tr|A0A261EWA6|A0A261EWA6_9BIFI GTP cyclohydrolase 1; OS = Pseudoscardovia suis OX=987063 GN=folE PE=3 SV=1
MATMICTVCCMVSVDCSERQCMDRMDIDDNDFPTPTQQTQGARTSVGSELVSPDGRRHYDEEGVRKAVRDFLVAIGEDPNREGLLDTPDRIARAGKELFGGLYQSPKEPLSRRFKTDTDEMVLVRNIELYSVCEHHLMPFLGVAHIAYIPSNGMVVGLSKLARLVEVYARRPQVQERLTKQIADALMEELDARGCLVVIDCEHLCMSMRGIKKSQARTTTSAVRGIMKNAATRAEAMQLICRE

SEQ ID NO: 13621 - protein, 214 aa, Pseudosphingobacterium domesticum
  REGION 1..214: note = tr|A0A1H7S443|A0A1H7S443_9SPHI GTP cyclohydrolase 1; OS = Pseudosphingobacterium domesticum OX=407022 GN=folE; PE = 3 SV=1
MNVTNNDALYDDDEQLDGYIKIDRYNTDKVESIAHHYHDILDKLGENPNRQGLLKTPERVAKALQYLTHGYDLDPAAILKSAMFEEDYSQMVVVKDIEVYSMCEHHMLPFFGKAHIAYIPNGHIVGLSKIPRVVDAFARRLQVQERLTNEIRDCIQETLNPAGVAVVMECKHLCMAMRGIQKQNSVTTTSAFTGEFAHERTRAEFLRLITASLD

SEQ ID NO: 13622 - protein, 184 aa, Pseudospirillum japonicum
  REGION 1..184: note = tr|A0A1H6QQ41|A0A1H6QQ41_9GAMM GTP cyclohydrolase 1; OS = Pseudospirillum japonicum OX=64971 GN=folE PE=3 SV=1
MTEELTQLYSQVISLLGEDVEREGLKDTPKRTAKAMQFLTQGYQQSLEAVVNGAVFSSENDEMVIVKDIELYSLCEHHILPFIGKCHIGYLPNGQVLGLSKFARIVDMYARRLQIQENLTREIAQAVQEVTGAKGVAVIIEAQHMCMMMRGVEKQNSWMQSSVMLGAFRNSQNTRQEFLQLLQR

SEQ ID NO: 13623 - protein, 137 aa, Pseudosporangium ferrugineum
  REGION 1..137: note = tr|A0A2T0S6K0|A0A2T0S6K0_9ACTN GTP cyclohydrolase 1; OS = Pseudosporangium ferrugineum OX=439699 GN=CLV70_107218; PE = 3 SV=1
MLTTTFEANHEELVLVRDIELMSLCEHHLLPFKGVAHIGYIPGVDGRITGLSKLARLVEVYARRPQVQERLTSQIADLLMEKLDPRGVIVVLECEHLCMEMRGIRKVGARTVTSAVRGAFQRDGKVRAEAMALINAR

SEQ ID NO: 13624 - protein, 258 aa, unidentified
  source 1..258: note = Pseudothermotoga hypogea
  REGION 1..258: note = tr|A0A0X1KP60|A0A0X1KP60_9THEM GTP cyclohydrolase FolE2 OS=Pseudothermotoga hypogea DSM 11164 = NBRC 106472; OX = 1123384 GN=folE2 PE=3 SV=1
MKDVQNQKDDRNVYLQRVGIRNLSYPITVMDKTNGYQDTVAKINMYVDLPEHFRGTHMSRFVEVLNKYRLGIDPKLIRQMLEELRTKLKASTARVEIEFPYFLVKEAPVSGQKSFLSYTCRIEGQKTFEKYDFLVGVGVPILTLCPCSKEISEYGAHNQRAVAWINIRSRKLVWFEELIEYAEQAASAPVYTILKRSDEKYITERAYENPRFVEDVAREIALKLNADERIFWYRVEVESFESIHAHNAYACVTKYKEE

SEQ ID NO: 13625 - protein, 258 aa, unidentified
  source 1..258: note = Pseudothermotoga lettingae
  REGION 1..258: note = sp|A8F7Q8|GCH4_PSELT GTP cyclohydrolase FolE2; OS = Pseudothermotoga lettingae (strain ATCC BAA-301 / DSM 14385 / NBRC 107922 / TMO) OX=416591 GN=folE2 PE=3 SV=1
MKDVQNQPDNRNIYLQRVGIRNLQYPVTVMDRNNGYQDTVATINMYVDLPVNFRGTHMSRFVEVLNRYRLGIDPKIIKNMLEELRNNLNASVARVEIEFPYFILKKAPVSSIESFLKYTCRIEGQKTEKLYEFTMSVGVPIMTLCPCSKEISERGAHNQRAMAWIHIKSKKMIWFEELIDAAEQAASSPVFTILKRVDEKFVTEHAYDNPRFVEDVAREIAVRLNRDERISWYRVEVESFESIHDHSAYACVMKDKED

SEQ ID NO: 13626 - protein, 258 aa, unidentified
  source 1..258: note = Pseudothermotoga sp.
  REGION 1..258: note = tr|A0A3D3V303|A0A3D3V303_9THEM GTP cyclohydrolase FolE2 OS=Pseudothermotoga sp. OX=2033661 GN=folE2 PE=3 SV=1
MKDVQSQKDDRNIYLQRVGIRNLYYPITVMDRTNGYQDTVAKINMYVDLPEHFRGTHMSRFVEVLNKYRLGIDPKLIRQMLEELRTKLKASTARVEIEFPYFLAKKAPVSGQKSFLSYTCRIEGQKTFEKYDFLVGVGVPILTLCPCSKEISERGAHNQRAVAWVHIRSRKLVWFEELIEYAEQAASAPVYTILKRPDEKYITERAYDNPRFVEDVAREIALKLNADKRIFWYRVEVESFESIHAHNAYACVTKYKEE

SEQ ID NO: 13627 - protein, 267 aa, unidentified
  source 1..267: note = Pseudothermotoga thermarum
  REGION 1..267: note = tr|F7YU57|F7YU57_9THEM GTP cyclohydrolase FolE2; OS = Pseudothermotoga thermarum DSM 5069 OX=688269 GN=folE2; PE = 3 SV=1
MKDVQSQPDRRNIYLQRVGIKGLLYPITVMDRQKGFQDTVATINMYVDLPVQFRGTHMSRFVEVLNKYHLGIDPRVLGELLEELRKKLKAKTAVVEIEFPYFMTKKAPVTNAEGFVSYTCRIFGQKTEEGCDFTFSVGVPVMTLCPCSKEISDRGAHNQRAVAWVHVKSKRLIWFEELIQIAEESASAPVFTVLKRPDEKFLTEHAYDNPRFVEDLAREIALRLKSDKRIEWYKVEVESFESIHTHNAYACVISEKEDFSNDDTSLG

SEQ ID NO: 13628 - protein, 210 aa, unidentified
  source 1..210: note = Pseudovibrio axinellae
  REGION 1..210: note = tr|A0A161VAY9|A0A161VAY9_9RHOB GTP cyclohydrolase 1; OS = Pseudovibrio axinellae OX=989403 GN=folE PE=3 SV=1
MDAVLRPVTDTDPTATEDNKLPNRPSRAEAEAAARVLLHWIGDDPEREGLLDTPKRVVKAYEDLFSGYKEDPREHMERTFEEVGGYNDIVLLKDISFTSFCEHHVLPFTGKAHIAYYPNHAVVGLSKIARVVDIFARRLQTQEHLTVQISTAIEKYLAPRGVAVMIEAEHQCMSMRGIQKQGVSTLTNRFSGAFENDASEQVRFMTMVRS

SEQ ID NO: 13629 - protein, 207 aa, Pseudovibrio denitrificans
  REGION 1..207: note = tr|A0A1I7ANF5|A0A1I7ANF5_9RHOB GTP cyclohydrolase 1; OS = Pseudovibrio denitrificans OX=258256 GN=folE PE=3 SV=1
MLLSETPTKEQARKRPTREDAEAAVRTLIEWSGDDPEREGLLDTPARVARAYEDFFAGYETDPKQLLTQTFEETDGYDDLIVLRNMRLESHCEHHIVPIIGKAHVAYLPAGRVVGISKLARVVEAYSKRLQIQETLTAQIGDAIWEALQPRGVAVIVEAAHMCMTTRGIRKPGVSMVTRYFEGDFKTNTTMRQEFLSLLHAPSGNFG

SEQ ID NO: 13630 - protein, 210 aa, Pseudovibrio denitrificans
  REGION 1..210: note = tr|A0A1I6ZT91|A0A1I6ZT91_9RHOB GTP cyclohydrolase 1; OS = Pseudovibrio denitrificans OX=258256 GN=folE PE=3 SV=1
MDAVLRPVTETDPTATEDNKLPNRPSRAEAEAAARVLLQWIGDDPEREGLLDTPKRVVKAYEDLFSGYKEDPREHLERTFEEVGGYNDIVLLKDITFTSFCEHHVLPFTGKAHIAYYPNHAVVGLSKIARVVEIYARRLQTQEHLTVQIATALEEYLAPRGVAVMIEAEHQCMSMRGIQKQGVSTLTNRFSGVFEDNASEQVRFMTMVRS

SEQ ID NO: 13631 - protein, 210 aa, Pseudovibrio sp.
  REGION 1..210: note = tr|A0A1H1ILD5|A0A1H1ILD5_9RHOB GTP cyclohydrolase 1; OS = Pseudovibrio sp. Tun.PSC04-5.I4 OX=1798213 GN=folE PE=3; SV = 1
MDAVLRPVIETDPTATEDNKLPNRPSRAEAEAAAHVLLQWIGDNPEREGLLDTPKRLVKAYEDLFSGYNDDPREHLERTFEEVGGYNDIVLLKDISFTSFCEHHVLPFTGKAHIAYYPDHAVVGLSKIARVVDIFARRLQTQEHLTVQISNALETYLAPRGVAVMIEAEHQCMSMRGIQKQGVSTLTNRFSGIFKDNAAEQVRFMTMIRS

SEQ ID NO: 13632 - protein, 210 aa, Pseudovibrio sp.
  REGION 1..210: note = tr|A0A165T997|A0A165T997_9RHOB GTP cyclohydrolase 1; OS = Pseudovibrio sp. Ad26 OX=989410 GN=folE_2 PE=3 SV=1
MDAVLRPVTETDPTATEDNKLPNRPSRAEAEAAARVLLQWIGDDTEREGLLDTPKRVVKAYEDLFSGYKEDPREHLERTFEEVGGYNDIVLLKDISFTSFCEHHVLPFTGKAHIAYYPDHAVVGLSKIARVVEIYARRLQTQEHLTVQIATALEEYLAPRGVAVMIEAEHQCMSMRGIQKQGVSTLTNRFSGVFEDNASEQVRFMTMVRS

SEQ ID NO: 13633 - protein, 209 aa, Pseudoxanthobacter soli
  REGION 1..209: note = tr|A0A1M7ZCT6|A0A1M7ZCT6_9RHIZ GTP cyclohydrolase 1; OS = Pseudoxanthobacter soli DSM 19599 OX=1123029 GN=folE; PE = 3 SV=1
MDAVVKSLSDRRERDATAPARPSREEAEAAVRTLIQWAGDDPDREGLLDTPRRVTAAYDEFFRGYRDDVAAVLDRTFEEVSGYSDMVLVRDIPFYSHCEHHIVPFIGKAYIAYYPSKGVVGLSKLARLVDVFARRLQTQENLTAQVVQAMEDYLHPRGAAVLFEAEHQCMSLRGVQKAGVSTVTSQFTGVFKDNPAEQVRFMTMIRGTR

SEQ ID NO: 13634 - protein, 200 aa, unidentified
  source 1..200: note = Pseudoxanthomonas composti
  REGION 1..200: note = tr|A0A4Q1JWQ8|A0A4Q1JWQ8_9GAMM GTP cyclohydrolase 1; OS = Pseudoxanthomonas composti OX=2137479 GN=folE PE=3 SV=1
MSDSDNTRGGVSRDQAEEAVRTLLRWAGEDPQREGLLDTPKRVAKAYGDWFSGYQRDPREYLARTFEEVAGYDELIVLRDIEYESHCEHHMAPIIGRVHVGYLPDGKVVGISKLARVVDAYARRFQVQEKMTAQIAQCIQDVLQPRGVGVVVEGAHECMTTRGVHKRGVSMVTSKMLGAFREDARTRAEFLRFIEAGGKR

SEQ ID NO: 13635 - protein, 305 aa, Pseudoxanthomonas dokdonensis
  REGION 1..305: note = tr|A0A0R0D0K1|A0A0R0D0K1_9GAMM GTP cyclohydrolase FolE2 OS=Pseudoxanthomonas dokdonensis OX=344882 GN=folE2; PE = 3 SV=1
MSTPRPVLADVADQSVPHARALDWVGMEGIALPIRLADVDGQPVMVPASIDLSVNLTNPDARGIHMSRLYLQLQQGLASEVITPAGLRHLLSNSVASQQGLASQARLVIRYEALLQRRALESEFAGWKRYPVEIEATLVDEHLQLALSLAVEYSSTCPASAALSRQANAARFDTDFADATPLSPQVVSDWLASERGMAATPHAQRSRASVRVQLRPQFDELPLVALIDALEAVLATPVQTAVKRVDEQAFARLNAENLMFCEDAARRVASVLSTDPRVEAFDATVAHFESLHPHDAVARVSGRGP

SEQ ID NO: 13636 - protein, 203 aa, Pseudoxanthomonas dokdonensis
  REGION 1..203: note = tr|A0A0R0CH83|A0A0R0CH83_9GAMM GTP cyclohydrolase 1; OS = Pseudoxanthomonas dokdonensis OX=344882 GN=folE PE=3; SV = 1
MTDSSKSPVDPAVTQQQAEDAVRVLLRWAGEDVAREGLQDTPKRVAKAYRDWFSGYQIDPREYLQRTFEEVAGYDEMIVLRDIEYESHCEHHMAPIIGKVHVGYLPDGKVVGISKLARVVDAYARRFQVQEKMTAQIAQCIQDVLQPRGVAVVVEGAHECMTTRGVHKRGVSMVTSKMLGEFREDARTRTEFLRFIEAGGSRR

SEQ ID NO: 13637 - protein, 310 aa, Pseudoxanthomonas indica
  REGION 1..310: note = tr|A0A1T5LVV6|A0A1T5LVV6_9GAMM GTP cyclohydrolase FolE2 OS=Pseudoxanthomonas indica OX=428993 GN=folE2 PE=3; SV = 1
MATVPPAAPRADLPDVAHQSVPLARALDWVGMEGIALPIRIADGEGGQLQVPANIDVFVNLTNPDARGIHMSRLYLHLQDGLAREVITPAGLRHLLQEGVASQQGLADQARIVLRYEALLRRKALESDYSGWKRYPVEIEATLVEGHLHLALSVAVEYSSTCPASAALSRQANAERFAGDFAAAHPLSVGVVRDWLASERGLAATPHAQRSRASVRVELRPQFDELPLVALIDGIEAALGTPVQTAVKRVDEQAFARLNAENLMFCEDAARRVAGALSQDPRVARFEATVAHFESLHPHDAVARVSGTNA

SEQ ID NO: 13638 - protein, 199 aa, Pseudoxanthomonas indica
  REGION 1..199: note = tr|A0A1T5KPI0|A0A1T5KPI0_9GAMM GTP cyclohydrolase 1; OS = Pseudoxanthomonas indica OX=428993 GN=folE PE=3 SV=1
MSEPNDPSGKISQAQAEDAIRVLLEWAGENPQREGLLDTPKRVAKAYRDWFSGYQMDPREYLARTFEEVAGYDEMIVLRDIEFESHCEHHMAPIIGRAHVGYLPSGKVVGISKLARVVDVYARRFQVQEKLTAQIAQAIQDVLQPRGVGVVIEATHECMTTRGVHKRGVSMVTSKMLGEFREDARTRSEFLRFLESGKR

SEQ ID NO: 13639 - protein, 200 aa, Pseudoxanthomonas sp.
  REGION 1..200: note = tr|A0A4Q8LBQ3|A0A4Q8LBQ3_9GAMM GTP cyclohydrolase 1; OS = Pseudoxanthomonas sp. NML171200 OX=2480816 GN=folE PE=3; SV = 1
MSDSDNIRGGVSRDQAEDAVRTLLRWAGEDPQREGLLDTPKRVAKAYGDWFSGYQRDPREYLARTFEEVAGYDELIVLRDIEYESHCEHHMAPIIGKVHVGYLPDGKVVGISKLARVVDAYARRFQVQEKMTAQIAQCIQDVLQPRGVGVVVEGAHECMTTRGVHKRGVSMVTSKMLGAFREDARTRAEFLRFIEVGGKR

SEQ ID NO: 13640 - protein, 304 aa, Pseudoxanthomonas sp.
  REGION 1..304: note = tr|A0A4Q8LF12|A0A4Q8LF12_9GAMM GTP cyclohydrolase FolE2 OS=Pseudoxanthomonas sp. NML171202 OX=2480817; GN = folE2 PE=3 SV=1
MSLPLPDVCLDESPSQPAPLSWVGMSGIDLPLRLDESGCQRLLDARVDAQVDLPDARAKGIHMSRLHRQLDHLGVEAPLSPARVQALLSAMIHSHADCGSRRARVQLGLALPVRRPALRTPGLAGWKTYPVRIAARLDGGGLALRVQVAVTYSSTCPCSAALARAVVAEAFLRDFQARASVDTQEVTRWLSANASLATPHSQRSVAQVAIDVPAEAAGFGLLALIDRVEAALGTPVQTAVKREDEQAFAIANGANLMFVEDAARRILAALEGRYARPGVQVTHAESLHAHDAVAWAGAPLEQAA

SEQ ID NO: 13641 - protein, 201 aa, Pseudoxanthomonas spadix
  REGION 1..201: note = tr|G7UV24|G7UV24_PSEUP GTP cyclohydrolase 1; OS = Pseudoxanthomonas spadix (strain BD-a59) OX=1045855; GN = folE PE=3 SV=1
MSDSDNTRGGVSRDQAEDAVRTLLRWAGEDPAREGLLDTPKRVAKAYGDWFSGYRSDPHEYLARTFEEVAGYDELIVLRDIEYESHCEHHMAPIIGRVHVGYLPNGKVVGISKLARVVDAYARRFQVQEKMTAQIAQCIQDVLAPCGVGVVVEGAHECMSTRGVHKRGVSMVTSKMLGQFRKDARTRAEFLRFIEVGSARR

SEQ ID NO: 13642 - protein, 201 aa, Pseudoxanthomonas spadix
  REGION 1..201: note = tr|A0A3M6PR44|A0A3M6PR44_9GAMM GTP cyclohydrolase 1; OS = Pseudoxanthomonas spadix OX=415229 GN=folE PE=3 SV=1
MSDSDNTRGGVSRDQAEDAVRTLLRWAGEDPAREGLLDTPKRVAKAYGDWFSGYRSDPHEYLARTFEEVAGYDELIVLRDIEYESHCEHHMAPIIGRVHVGYLPNGKVVGISKLARVVDAYARRFQVQEKMTAQIAQCIQDVLAPCGVGVVVEGAHECMTTRGVHKRGVSMVTSKMLGQFRKDARTRAEFLRFIEVGSARR

SEQ ID NO: 13643 - protein, 197 aa, Pseudoxanthomonas suwonensis
  REGION 1..197: note = tr|E6WXI4|E6WXI4_PSEUU GTP cyclohydrolase 1; OS = Pseudoxanthomonas suwonensis (strain 11-1) OX=743721; GN = folE PE=3 SV=1
MTSSVPTPQVTREQAEEAVRTLLRWAGEDPSREGLLDTPRRVAEAYGDWFSGYRDDPREYLARTFKEVAGYDEMIVLRDIEYESHCEHHMAPIIGRVHVGYLPAGKVVGISKLARVVDAYARRFQVQEKMTAQIAQCIQETLHPLGVGVVVEGAHECMTTRGVHKRGVSMVTSCMLGSFREDARTRSEFLRFIEGRR

SEQ ID NO: 13644 - protein, 313 aa, Pseudoxanthomonas suwonensis
  REGION 1..313: note = tr|A0A0E3YYW5|A0A0E3YYW5_9GAMM GTP cyclohydrolase FolE2 OS=Pseudoxanthomonas suwonensis OX=314722 GN=folE2; PE = 3 SV=1
MSVPAPAAPHVASLPDVAHQPATLARPLDWVGMEGIALPVRVSDGAGGHVQVAARVDLSVDLKQAGERGIHMSRLYLRLQEELARNEVTPAGLRHVLQGSVDSQAGLSSRARLRLRYEALLLRRALRSDNAGWKRYPVEIEAVLEHGHLKLVLGFGVEYSSTCPCSAALSRQANAERFAEDFADARPISTGVVRDWLASERGMAATPHAQRSEARVKVELRPQFDELPLVALVDALEAALGTPVQTAVKREDEQAFAMLNAENLMFCEDAARRVASVLSADPRIERYEATVSHFESLHPHDAVASVSGTNPAR

SEQ ID NO: 13645 - protein, 197 aa, Pseudoxanthomonas taiwanensis
  REGION 1..197: note = tr|A0A562DID6|A0A562DID6_9GAMM GTP cyclohydrolase 1; OS = Pseudoxanthomonas taiwanensis J19 OX=935569 GN=folE; PE = 3 SV=1
MTSSSPTPAVTREQAEEAVRTLLRWAGEDPGREGLLDTPRRVAEAYGDWFSGYREDPREYLARTFEEVAGYDEMIVLRDIEYESHCEHHMAPIIGRVHVGYLPAGKVVGISKLARVVDAYARRFQVQEKMTAQIAHTIQDVLQPQGVGVVVVGAHECMTTRGVHKRGVSMVTSCMLGSFREDARTRSEFLRFIEGRR

SEQ ID NO: 13646 - protein, 314 aa, Pseudoxanthomonas taiwanensis
  REGION 1..314: note = tr|A0A562D8Z4|A0A562D8Z4_9GAMM GTP cyclohydrolase FolE2 OS=Pseudoxanthomonas taiwanensis J19 OX=935569; GN = folE2 PE=3 SV=1
MSLPAPDLSRAGDLLPDVAYQPAALARPLDWVGMEGIAIPVRVPDGAGGHVQVAAQADLSVNLHRAGERGIHMSRLYLRLQQELARHEVTPAGLRHILQDSVESQAGLATRARLRLRYDALLLRRALRSDNAGWKRYPVEIEALLEDGHLKLVLGFSLEYSSTCPCSAALSRQANAARLRADFGDAEALRVEEIAQWLSSERGMAATPHAQRSEARVRVELRPQFDELPLVALIDALEASLGTPVQTAVKREDEQAFAELNAANLMFCEDAARRVASVLSADPRIERYEATVSHFESLHPHDAVASVSGSGPAA

SEQ ID NO: 13647 - protein, 309 aa, unidentified
  source 1..309: note = Pseudoxanthomonas wuyuanensis
  REGION 1..309: note = tr|A0A286CW50|A0A286CW50_9GAMM GTP cyclohydrolase FolE2 OS=Pseudoxanthomonas wuyuanensis OX=1073196 GN=folE2; PE = 3 SV=1
MSSPPSAPRADLPDVADHSVPFARPLDWVGMDNIALPIRISDGVGGQLQVAASIDLSVNLVNPDARGIHMSRLYLQLQDGLAREAITPAGLRHLLQDGIASQNGLASQARLTLRYEALLQRRALESDYAGWKRYPVGIEATLSDGHLHLALSFAVEYSSTCPASAALSRQANAERFADDFAAATDLSVEGVHDWLASERGLAATPHAQRSRAQIRVELRPQFDELPLVPLIDAVEAVLATPVQTAVKRVDEQAFARLNAENLMFCEDAARRVASVLSSDARIARYQATVAHYESLHPHDAVARVSGSNP

SEQ ID NO: 13648 - protein, 200 aa, unidentified
  source 1..200: note = Pseudoxanthomonas wuyuanensis
  REGION 1..200: note = tr|A0A286DEX1|A0A286DEX1_9GAMM GTP cyclohydrolase 1; OS = Pseudoxanthomonas wuyuanensis OX=1073196 GN=folE PE=3; SV = 1
MSKSKPTHPHVTQEQAEDAVRVLLEWAGENPQREGLLDTPKRVAKAYRDWFSGYQIDPREYLARTFEEVAGYDEMIVLRDIEYESHCEHHMAPIIGKVHVGYLPDGKVVGISKLARVVDAYARRFQVQEKMTAQIAQCIQDVLQPRGVAVVVEGAHECMTTRGVHKRGVSMVTSKMLGEFREDVRTRTEFLRFIEANGKR

SEQ ID NO: 13649 - protein, 226 aa, Pseudozobellia sp.; identical to SEQ ID NO: 7998
  REGION 1..226: note = tr|A0A2E5BCR0|A0A2E5BCR0_9FLAO GTP cyclohydrolase 1; OS = Pseudozobellia sp. OX=2024854 GN=folE PE=3 SV=1

SEQ ID NO: 13650 - protein, 199 aa, Pseudozobellia sp.; identical to SEQ ID NO: 7999
  REGION 1..199: note = tr|A0A2E5BDV7|A0A2E5BDV7_9FLAO GTP cyclohydrolase 1; OS = Pseudozobellia sp. OX=2024854 GN=folE PE=3 SV=1

SEQ ID NO: 13651 - protein, 199 aa, Pseudozobellia thermophila
  REGION 1..199: note = tr|A0A1M6F077|A0A1M6F077_9FLAO GTP cyclohydrolase 1; OS = Pseudozobellia thermophila OX=192903 GN=folE PE=3 SV=1
MAPYRNLEEYNLEVTSEVKDRYSKIISEIGEDVSRDGLIKTPERAAKAMLFLTQGYKQDAVEILKSAMFKEDYDDMVIIKDIELYSLCEHHMLPFFGKAHVAYIPNGHIVGLSKIPRVVDVFARRLQVQERLTHDILECINNTLKPQGVAVVIEASHMCMMMRGVQKQNSVTTTSGFRGQFEKIETRNEFLKLISSDLS

SEQ ID NO: 13652 - protein, 261 aa, Pseudozobellia thermophila
  REGION 1..261: note = tr|A0A1M6HHH4|A0A1M6HHH4_9FLAO GTP cyclohydrolase 1; OS = Pseudozobellia thermophila OX=192903 GN=folE PE=3 SV=1
MLSVLFQVALEVARDRFTGRNFVVLNDLGRKRIQQMKIDSTLDKQFEEMGNDHVSTSEDTPLRSDAFVLSDKEKIERIQENIREVMLTLGLDLDDDSLKGTPNRVAKMFVNEIFGGLHPDRKPKSSTFSNKYKYGEMLVEKNITLYSTCEHHLLPIVGKAHIAYISSGNVVGLSKMNRIVDYFAKRPQVQERLTIQIVRELQRVLKTEDVACVIDAKHLCVNSRGIRDIDSSTVTAEYGGKFKQEAVRREFLDYINIDTNF

SEQ ID NO: 13653 - protein, 186 aa, Psychrilyobacter sp.
  REGION 1..186: note = tr|A0A369Y0V3|A0A369Y0V3_9FUSO GTP cyclohydrolase 1; OS = Psychrilyobacter sp. S5 OX=2283384 GN=folE PE=3 SV=1
MDKKKIMDGVKLILEGMGEDINREGLIDTPDRVARMFGEICGGLHKDPADEISVFFHVEHNDMVLVKDIQFYSLCEHHLLPFYGKVHIAYIPEDGKVTGLSKLARVVDVASKKPQLQERLNSEIVEALMSKLSAKGVLVVIEAEHMCMTMRGIQKTGSKTITSGVRGIFRTNLATREEGLSLIKHM

SEQ ID NO: 13654 - protein, 189 aa, Psychrobacillus insolitus
  REGION 1..189: note = tr|A0A2W7MV69|A0A2W7MV69_9BACI GTP cyclohydrolase 1; OS = Psychrobacillus insolitus OX=1461 GN=folE PE=3 SV=1
MTNVDLKKIEEAVKMILEAVGEDPTREGLLDTPKRVSKMYAEMFEGLHLDPKEYFKTVFNEDHEELVLVKDIPFYSMCEHHLVPFYGKAHVAYIPRDGVVTGLSKLARAVETTARRPQLQERITSTIADDIMEMLNPHGVYVVIEAEHMCMTMRGIKKPGAKTITAVARGILETDQIKRAEILSFIQMK

SEQ ID NO: 13655 - protein, 189 aa, unidentified
  source 1..189: note = Psychrobacillus lasiicapitis
  REGION 1..189: note = tr|A0A544THN6|A0A544THN6_9BACI GTP cyclohydrolase 1; OS = Psychrobacillus lasiicapitis OX=1636719 GN=folE PE=3; SV = 1
MTNVDLKKIEEAVKMILEAVGENPEREGLLETPKRVSKMYAEMFEGLHQDPKEYFKTVFNEDHEELVLVKDIPFHSMCEHHLVPFYGKAHVAYIPRDGVVTGLSKLARAVETTARRPQLQERITSSIADDIMEMLNPHGVYVVIEAEHMCMTMRGIKKPGAKTVTAVARGILETDEVKRSEILSFIQMK

SEQ ID NO: 13656 - protein, 189 aa, Psychrobacillus psychrodurans; identical to SEQ ID NO: 12111
  REGION 1..189: note = tr|A0A1I4RC96|A0A1I4RC96_9BACI GTP cyclohydrolase 1; OS = Psychrobacillus psychrodurans OX=126157 GN=folE PE=3; SV = 1

SEQ ID NO: 13657 - protein, 189 aa, Psychrobacillus psychrotolerans
  REGION 1..189: note = tr|A0A1I5VWV8|A0A1I5VWV8_9BACI GTP cyclohydrolase 1; OS = Psychrobacillus psychrotolerans OX=126156 GN=folE PE=3; SV = 1
MTNVDLNKIEEAVKMILEAVGEDPNREGLLDTPKRVSKMYAEMFEGLHQDPKEYFKTVFNEDHEELVLVKDIPFYSMCEHHLVPFYGKAHVAYIPRNGVVTGLSKLARAVETTARRPQLQERITSSVADDIMQMLNPHGVYVVVEAEHMCMTMRGIKKPGAKTITAVARGILETDDVKRSEILSFIKMK

SEQ ID NO: 13658 - protein, 189 aa, unidentified
  source 1..189: note = Psychrobacillus soli
  REGION 1..189: note = tr|A0A544TD67|A0A544TD67_9BACI GTP cyclohydrolase 1; OS = Psychrobacillus soli OX=1543965 GN=folE PE=3 SV=1
MTNVDLKKIEEAVKMILEAVGEDPEREGLLETPKRVSKMYAEMFEGLHQDPKEYFKTVFNEDHEELVLVKDIPFHSMCEHHLVPFYGKAHVAYIPRDGVVTGLSKLARAVETTARRPQLQERITSSIAEDIMEMLNPHGVYVVIEAEHMCMTMRGIKKPGAKTVTAVARGILETDEVKRSEILTFIQMQ

SEQ ID NO: 13659 - protein, 189 aa, Psychrobacillus sp.
  REGION 1..189: note = tr|A0A0Q3S0F7|A0A0Q3S0F7_9BACI GTP cyclohydrolase 1; OS = Psychrobacillus sp. FJAT-21963 OX=1712028 GN=folE PE=3; SV = 1
MTNVDLKKIEKAVTMILEAVGEDPSREGLLDTPKRVSKMYAEMFEGLHQDPKEYFKTVFNEDHEELVLVKDIPFYSMCEHHLVPFYGKAHVAYIPRDGVVTGLSKLARAVETTARRPQLQERITSTIAESIMDMLNPHGVYVVIEAEHMCMTMRGIKKPGAKTITAVAKGILEKDEVKRSEILSFIQMK

SEQ ID NO: 13660 - protein, 189 aa, Psychrobacillus sp.
  REGION 1..189: note = tr|A0A5J6SLC7|A0A5J6SLC7_9BACI GTP cyclohydrolase I FolE OS=Psychrobacillus sp. PB01 OX=2283160 GN=folE PE=4; SV = 1
MKNVDLEKIEEAVKMILEAVGENPSREGLLDTPKRVAKMYAEMFEGLQQDPKEYFQTVFNEEHEELVLVKDIPFYSMCEHHLVPFYGKAHVAYIPRNGVVTGLSKLARAVETTAKRPQLQERITSTVADDIMEMLNPHGVYVVVEAEHMCMTMRGIKKPGSKTVTAVARGILETNDIKRSEILSFIQMS

SEQ ID NO: 13661 - protein, 198 aa, Psychrobacter alimentarius
  REGION 1..198: note = tr|A0A144PAE6|A0A144PAE6_9GAMM GTP cyclohydrolase 1; OS = Psychrobacter alimentarius OX=261164 GN=folE PE=3 SV=1
MSNTPTITSDYQESVESYRQLIGSTGEDLERPGLEETPMRAAKAFAHLTQGYHQSLDEVVNDALFPSSNRELVLVQNIEFYSLCEHHMLPFHGIAHIGYLPNGQVLGLSKFARIVDMFARRLQVQENLSDQIAQTIMDVTGCRGVAVVMDASHMCMMMRGVNKQQSTTRTTSMLGEFVHDNQARMEFLTAIPRRQPAF

SEQ ID NO: 13662 - protein, 203 aa, Psychrobacter aquaticus
  REGION 1..203: note = tr|U4T3F1|U4T3F1_9GAMM GTP cyclohydrolase 1; OS = Psychrobacter aquaticus CMS 56 OX=1354303 GN=folE PE=3; SV = 1
MAAKLMSNTPIITSDYQESVESYRQLILSTGEDLERPGLAETPLRAAKAFAHLTQGYHQSLDEVVNDALFPSNNRELVLVQNIEFYSLCEHHMLPFHGVAHVGYLPNGQVLGLSKFARIVDMFARRLQVQENLSDQVAQTIMDVTGCRGVAIVMDAAHMCMMMRGVNKQHSTTRTTSMLGEFVHDNQARTEFLSAIPRRQPAF

SEQ ID NO: 13663 - protein, 203 aa, Psychrobacter arcticus
  REGION 1..203: note = tr|Q4FSW1|Q4FSW1_PSYA2 GTP cyclohydrolase 1; OS = Psychrobacter arcticus (strain DSM 17307 / 273-4); OX = 259536 GN=folE2 PE=3 SV=1
MAAKLMSNTATIASDYQESIESYRQLIASTGEDLHRPGLEDTPTRAAKAFAHLTKGYHQSLDEVVNGAVFPSTNRELVLVQNIEFYSLCEHHMLPFHGVAHIGYLPNGQVLGLSKFARIVDMFARRLQIQENLSEQVAQTIMDVTGCRGVAVVMDAAHMCMMMRGVNKQHSTTRSTAMLGEYVHDNQARNEFLDAVPKRRPAF

SEQ ID NO: 13664 - protein, 203 aa, Psychrobacter cryohalolentis
  REGION 1..203: note = tr|Q1QAU9|Q1QAU9_PSYCK GTP cyclohydrolase 1; OS = Psychrobacter cryohalolentis (strain K5) OX=335284; GN = folE PE=3 SV=1
MAAKLMSNTATIASDYQESIESYRQLIASTGEDLHRPGLEDTPTRAAKAFAHLTKGYHQSLDEVVNDALFPSTNRELVLVQNIEFYSLCEHHMLPFHGVAHIGYLPNGQVLGLSKFARIVDMFSRRLQVQENLSEQIAQTIMDVTGCRGVAVVMDAAHMCMMMRGVNKQHSTTRTMSMLGEYVHDNQARNEFLDAVPKRKPAF

SEQ ID NO: 13665 - protein, 198 aa, Psychrobacter fozii
  REGION 1..198: note = tr|A0A2V4UDZ4|A0A2V4UDZ4_9GAMM GTP cyclohydrolase 1; OS = Psychrobacter fozii OX=198480 GN=folE PE=3 SV=1
MSNTLTITSNYQESAESYRQLISSTGEDLHRPGLEDTPMRAAKAFAHLTQGYHQNLDEVVNDALFPSSNRELVLVQNIEFYSLCEHHMLPFHGIAHVGYLPNGQVLGLSKFARIVDMFSRRLQVQENLSEQIAQTIMEVTGCRGVAVVMDAAHMCMMMRGVNKQHSTTRTMSMLGEFVHDNQARTEFLSAIPKRQPAF

SEQ ID NO: 13666 - protein, 203 aa, Psychrobacter frigidicola
  REGION 1..203: note = tr|A0A5C7A8C6|A0A5C7A8C6_9GAMM GTP cyclohydrolase 1; OS = Psychrobacter frigidicola OX=45611 GN=folE PE=3 SV=1
MAANLMSNTPIITTDYQESVESYRQLISSTGENLERPGLEDTPIRAAKAFAHLTRGYCQNLDAVVNDALFPSTNRELVLVQNIEFYSLCEHHMLPFHGIAHIGYLPNGQVLGLSKFARIVDMFARRLQVQENLSEQVAQTIMDVTGCRGVAVVMDAAHMCMMMRGVNKQHSTTRTTSMLGEYVHDNQARNEFLGAIPKRQPAF

SEQ ID NO: 13667 - protein, 198 aa, Psychrobacter immobilis
  REGION 1..198: note = tr|A0A2V2A5K8|A0A2V2A5K8_PSYIM GTP cyclohydrolase 1; OS = Psychrobacter immobilis OX=498 GN=folE PE=3 SV=1
MSNTPTIASDYQESVESYRQLILSTGEDLQRPGLEETPMRAAKAFAHLTQGYHQSLDEVVNDALFPSSNRELVLVQNIEFYSLCEHHMLPFHGIAHVGYLPNGQVLGLSKFARIVDMFARRLQVQENLSEQVAQTIMDVTGCRGVAVVMDAAHMCMMMRGVNKQHSTTRTTSMLGEFVHDNQARNEFLSAIPRRQPAF

SEQ ID NO: 13668 - protein, 198 aa, Psychrobacter pacificensis
  REGION 1..198: note = tr|A0A1G6Z586|A0A1G6Z586_9GAMM GTP cyclohydrolase 1; OS = Psychrobacter pacificensis OX=112002 GN=folE PE=3 SV=1
MSNTPIITPDYKESIESYRQLIGSTGEDLDRPGLLDTPVRAAKAFAHLTKGYHQSIEEVVNDAVFPSANRELVLVQNIEFYSLCEHHMLPFHGVAHIGYLPDGQVLGLSKFARIVDMFARRLQIQENLSEQIAQTIMDVTGCRGVAVVMDASHMCMMMRGVSKQHSTTRSTAMLGEYQHNNQARNEFLGAVPKRQPAF

SEQ ID NO: 13669 - protein, 103 aa, unidentified
  source 1..103: note = Psychrobacter pasteurii
  REGION 1..103: note = tr|A0A1R4EFP0|A0A1R4EFP0_9GAMM Putative GTP cyclohydrolase 1 type 2 OS=Psychrobacter pasteurii; OX = 1945520 GN=A1019T_01252 PE=4 SV=1
MYKLAVFIPEPDLEPVKQALFSAGAGHIGNYSHCCWQVKGTGQFMPRAGSQPHIGEQDTIEQVTEWRVEMVVAKDKISEVIKTLKQAHPYETPAYDVIEVIDL

SEQ ID NO: 13670 - protein, 253 aa, unidentified
  source 1..253: note = Psychrobacter pasteurii
  REGION 1..253: note = tr|A0A1R4EHM2|A0A1R4EHM2_9GAMM Putative GTP cyclohydrolase 1 type 2 OS=Psychrobacter pasteurii; OX = 1945520 GN=A1019T_01935 PE=4 SV=1
MTELSPLALEQWCNDYLKAKEFKDYCPNGLQVDADTPIKKIVTGVTATKNLIDAAIAQNADALLVHHGYFWKGEPEPLTGMKGKRIRSLFQNNISLFAYHLPLDAHPVVGNNAVLADLLDLEVVGALYPEEKHPVGNIAQCEPISIEAFIEKVTQKLQRTPTHISAGNSMISKVGICTGGAQDMIEQAANMGCQLYISGEISERTTHSARELGIDYLACGHHATEMGGIQALGEVIASTLEVQVSFIDDPNPA

SEQ ID NO: 13671 - protein, 201 aa, Psychrobacter phenylpyruvicus
  REGION 1..201: note = tr|A0A379LLU2|A0A379LLU2_9GAMM GTP cyclohydrolase 1; OS = Psychrobacter phenylpyruvicus OX=29432 GN=folE PE=3 SV=1
MCDSNSNASISNLDPRLPSPDLYAKLIASTGEDLNRPGLVDTPTRAAKAFGYLTQGYHQTLEEVTNNAVFPTDNPELVLIHNIEFYSLCEHHLLPFYGVAHVGYLPDGKVIGLSKVARIIDMYARRLQIQENLSKQIADAIMEVTNCRGVAVVMDASHMCMMMRGVNKQLSSTRTTAMLGDFKTDIQARNEFLAAVPASKI

SEQ ID NO: 13672 - protein, 102 aa, unidentified
  source 1..102: note = Psychrobacter piechaudii
  REGION 1..102: note = tr|A0A1R4GXH7|A0A1R4GXH7_9GAMM Putative GTP cyclohydrolase 1 type 2 OS=Psychrobacter piechaudii; OX = 1945521 GN=A1232T_01783 PE=4 SV=1
MYKLTVFIPEPNLEPVKQALFDAGAGHIGNYSHCCWQVKGTGQFMPRAGSQPHIGEQDSIEQVTEWRVEMVVAKEKISEVIKTLKQAHPYETPAYDVIEIIT

SEQ ID NO: 13673 - protein, 253 aa, unidentified
  source 1..253: note = Psychrobacter piechaudii
  REGION 1..253: note = tr|A0A1R4GWF7|A0A1R4GWF7_9GAMM Putative GTP cyclohydrolase 1 type 2 OS=Psychrobacter piechaudii; OX = 1945521 GN=A1232T_01778 PE=4 SV=1
MTELSPVALEQWCNDYLKAKEFKDYCPNGLQVDADAPIKKIITGVTATQNLIDAAIEQNADAILVHHGYFWKGEPEPLTGMKGKRIRSLLQNNISLLAYHLPLDAHPVVGNNAVLANLLDLQIMGALYPDEKHPVGNIAQCDPISIEDFIKKVSEKLQRTPTHISAGNSVISKVGICTGGAQDMIEQAAHMGCQLYISGEISERTTHSARELGIDYLACGHHATEMGGIQALGEVIESTLGVQVSFVDDPNPA

SEQ ID NO: 13674 - protein, 203 aa, Psychrobacter piscatorii
  REGION 1..203: note = tr|A0A0T6DSP5|A0A0T6DSP5_9GAMM GTP cyclohydrolase 1; OS = Psychrobacter piscatorii OX=554343 GN=folE PE=3 SV=1
MAAKLMSNTPIITPDYKDSTESYRQLIGSTGEDLNRPGLLDTPVRAAKAFAHLTKGYHQSIEEVVNDAVFPSANRELVLVQNIEFYSLCEHHMLPFHGVAHIGYLPDGQVLGLSKFARIVDMFARRLQIQENLSEQIAQAIMDVTGCRGVAVVMDASHMCMMMRGVSKQHSTTRSTAMLGEYQHNNQARNEFLGAVPKRQPAF

SEQ ID NO: 13675 - protein, 203 aa, Psychrobacter sp.
  REGION 1..203: note = tr|A0A1D9CWC5|A0A1D9CWC5_9GAMM GTP cyclohydrolase 1; OS = Psychrobacter sp. AntiMn-1 OX=1720344 GN=folE PE=3 SV=1
MAAKLMSNTPIITPDYKESIESYRQLIGSTGEDLDRPGLLDTPVRAAKAFAHLTKGYHQSIEEVVNDAVFPSANRELVLVQNIEFYSLCEHHMLPFHGVAHIGYLPDGQVLGLSKFARIVDMFARRLQIQENLSEQIAQTIMDVTGCRGVAVVMDASHMCMMMRGVSKQHSTTRSTAMLGEYQHNNQARNEFLGAVPKRQPAF

SEQ ID NO: 13676 - protein, 300 aa, Psychrobacter sp.
  REGION 1..300: note = tr|A0A3D4WKT0|A0A3D4WKT0_9GAMM GTP cyclohydrolase FolE2 OS=Psychrobacter sp. OX=56811 GN=folE2 PE=3 SV=1
MINDLPDISENLNVAPHSSCLDWVGMENIALPIYIENTLCPSQVNAFVSLDDPAVKGIHMSRLYIRLLELVKLKILNFSHLKDTLQDFLKSHEGLSSNAKLHIKSQLYVERPALISPLTGWKSYPFELVCQLIDQQFFFEVQVEIPYSSTCPCSAALSRSLIQQQFQKALSEKRFDLTNSEEVIDWLGTTEAIVATPHSQRSVAQLRFKVSTELAELPLIAIIDQAEHALATPVQTAVKRVDEQAFALANGQNLMFCEDAVRRLRHTFLDYANILGFKFKVIHAESLHAHDAVAEGSWQW

SEQ ID NO: 13677 - protein, 203 aa, Psychrobacter urativorans
  REGION 1..203: note = tr|A0A0M4T0N7|A0A0M4T0N7_9GAMM GTP cyclohydrolase 1; OS = Psychrobacter urativorans OX=45610 GN=folE PE=3 SV=1
MAAKLMSNTPTVTLDYQESTESYRQLISSTGEDLERPGLQDTPIRAAKAFAHLTRGYCQNLDEVVNDALFPSTNRELVLVQNIEFYSLCEHHMLPFHGVAHIGYLPNGHVLGLSKFARIVDMFARRLQVQENLSEQIAQSIMDVTGCRGVAVVMDAAHMCMMMRGVNKQHSTTRTTSMLGEYVHDNQARNEFLGAIPKRQPAF

SEQ ID NO: 13678 - protein, 194 aa, Psychroflexus gondwanensis
  REGION 1..194: note = tr|N1WRG3|N1WRG3_9FLAO GTP cyclohydrolase 1; OS = Psychroflexus gondwanensis ACAM 44 OX=1189619 GN=folE; PE = 3 SV=1
MSYKTYEEYSQPYVDEIKSSYESILKNIGEDTTRNGIVKTPERAAKAMQFLTQGYNMDPKEILLGAMFEEPYDDMVLIKDIELYSLCEHHMLPFFGKVHVGYIPNGKIVGLSKIPRIIDVFARRLQVQERLTHDILECINDTLQPKGVGVVIEAQHMCMMMRGVQKQNSATTTSGFRGEFKNQETRSEFLKLIG

SEQ ID NO: 13679 - protein, 225 aa, Psychroflexus gondwanensis
  REGION 1..225: note = tr|N1WSF1|N1WSF1_9FLAO GTP cyclohydrolase 1; OS = Psychroflexus gondwanensis ACAM 44 OX=1189619 GN=folE; PE = 3 SV=1
MSDQNKENLIEELGDNHIATSYENPIREDAFEMSDDEKIEKIKGHVHQIMETLGMDMTDDSLQGTPNRVAKMYVNETFGGLHPNKKPKASTFQNNYKYGEMLVEKNITVYSTCEHHLLPIIGRAHVAYISSGRVIGLSKMNRIVNYYAKRPQVQERLTMQVVKELQKALKTEDVACVIDAKHLCVNSRGINDIESSTVTSEYGGKFKDENVRRELLNYIKLDTKF

SEQ ID NO: 13680 - protein, 225 aa, unidentified
  source 1..225: note = Psychroflexus halocasei
  REGION 1..225: note = tr|A0A1H4C9Q1|A0A1H4C9Q1_9FLAO GTP cyclohydrolase 1; OS = Psychroflexus halocasei OX=908615 GN=folE PE=3 SV=1
MSDNKNTEFNDNIGDNHVATCTENPLKPDAFAISDDKKIELIQDDVKKILDTLGMDLNDDSLKGTPKRVAKMFVNEIFSGLNPKNKPKASTFENNYQYGEMLVEKNITVYSTCEHHLLPIIGRAHVAYISSGRVIGLSKMNRIVNYFAKRPQVQERLTMQIVKEMQEALQTEDVACVIDAKHLCVNSRGISDIESSTVTSEYGGKFKDKLVKKEFLDYIKLDTKF

SEQ ID NO: 13681 - protein, 198 aa, unidentified
  source 1..198: note = Psychroflexus salarius
  REGION 1..198: note = tr|A0A1M4W8W6|A0A1M4W8W6_9FLAO GTP cyclohydrolase 1; OS = Psychroflexus salarius OX=1155689 GN=folE PE=3 SV=1
MSFKLFEEYNQEFITDVKESYHTILDRVGEDPKREGIVKTPERAAKAMQFLTQGYEMDPKQILEGAMFKEDYSDMVLIKDIELYSLCEHHMLPFFGKAHIAYIPNGHIVGLSKIPRVVDVFSRRLQVQERLTHDILECINSTLQPKGVAVVIEARHMCMMMRGVQKQNSATTTSGFRGEFKHSETRNEFLRLIGKDLA

SEQ ID NO: 13682 - protein, 225 aa, unidentified
  source 1..225: note = Psychroflexus salarius
  REGION 1..225: note = tr|A0A1M4WXE1|A0A1M4WXE1_9FLAO GTP cyclohydrolase 1; OS = Psychroflexus salarius OX=1155689 GN=folE PE=3 SV=1
MSKDKNTDFIEDIGDNHVATSTENPIRKDAFSISNDTKIEQIESHVNSILDILGMDLTDDSLRGTPKRVAKMFVNEIFSGLHPDNKPKASTFDNKYKYGEMLVEKNITVYSTCEHHLLPIVGRAHVAYISTGKVIGLSKMNRIVNYYSKRPQVQERLTMQIVKEMQEALNTEDVACVIDAKHLCVNSRGISDIESSTVTSEFGGKFKNETTKKEFLDYIKLETKF

SEQ ID NO: 13683 - protein, 194 aa, Psychroflexus sediminis
  REGION 1..194: note = tr|A0A1G7XT98|A0A1G7XT98_9FLAO GTP cyclohydrolase 1; OS = Psychroflexus sediminis OX=470826 GN=folE PE=3 SV=1
MSYKTYEEYTQPFVGEIKSNYLSILENIGEDPSRSGILKTPERAAKAMQFLTQGYEMDPQKILLGAMFEEDYDDMVLIKDIELYSLCEHHMLPFFGKVHIAYIPNGKIVGLSKIPRVVDVFARRLQVQERLTRDILECINNTLQPKGVAIVIEAQHMCMMMRGVQKQNSATTTSGFRGAFRNQETRNEFLKLIS

SEQ ID NO: 13684 - protein, 225 aa, Psychroflexus sediminis
  REGION 1..225: note = tr|A0A1G7VSZ3|A0A1G7VSZ3_9FLAO GTP cyclohydrolase 1; OS = Psychroflexus sediminis OX=470826 GN=folE PE=3 SV=1
MSEQKQKKLIDEIGDNHIATSYENPVREDAFDMTEDEKIEKIKGHVHEIMHTLGMDMTDDSLMGTPKRVAKMYVNEIFGGLDPAKKPKASTFENNYKYGEMLVEKNITVYSTCEHHLLPIVGRAHVAYISSGRVVGLSKMNRIVNYYANRPQVQERLTMQIVKELQNALDTEDVACIIDAKHLCVNSRGINDIESSTVTSEFGGKFKDENVRKELLSYVNMDTKF

SEQ ID NO: 13685 - protein, 194 aa, Psychroflexus sp.
  REGION 1..194: note = tr|A0A2I0D5H2|A0A2I0D5H2_9FLAO GTP cyclohydrolase 1; OS = Psychroflexus sp. MES1-P1E OX=2058320 GN=folE PE=3 SV=1
MSYKTDEEHSQPYVDEIESSYESILKNIGEDTTRNGIVKTPERAAKAMQFLTQGYNMNPEEILLGAMFEEPYEDMVLIKDIELYSLCEHHMLPFFGKVHVGYIPNGKIVGLSKIPRIVDVFARRLQVQERLTHDILECINDTLQPKGVGVVIEAQHMCMMMRGVQKQNSATTTSGFRGEFKNQETRSEFLKLIG

SEQ ID NO: 13686 - protein, 225 aa, Psychroflexus sp.
  REGION 1..225: note = tr|A0A2I0D4W1|A0A2I0D4W1_9FLAO GTP cyclohydrolase 1; OS = Psychroflexus sp. MES1-P1E OX=2058320 GN=folE PE=3 SV=1
MSDHNKEDLTEELGDNHIATSYENPIREDAFDMSDDEKIEKIKGHVHEIMETLGMDMTDDSLQGTPNRVAKMYVNETFGGLRPHKKPKVSTFENNYKYGQMLVEKNITVYSTCEHHLLPIIGRAHVAYISSGRVIGLSKMNRIVNYYAKRPQVQERLTMQVVKELQKALETEDVACVIDAKHLCVNSRGINDIESSTVTSEYGGKFKDEDVRKELLSYIKLDTKF

SEQ ID NO: 13687 - protein, 194 aa, Psychroflexus torquis
  REGION 1..194: note = tr|K4IIW6|K4IIW6_PSYTT GTP cyclohydrolase 1; OS = Psychroflexus torquis (strain ATCC 700755 / ACAM 623); OX = 313595 GN=folE PE=3 SV=1
MPYKTDEEHSQPYVDEIKSSYESILKNIGEDTTRNGIVKTPERAAKAMRFLTQGYNMNPEEILLGAMFEEPYEDMVLIKDIELYSLCEHHMLPFFGKVHVGYIPNGKIVGLSKIPRIVDVFARRLQVQERLTHDILECINDTLQPKGVGVVIEAQHMCMMMRGVQKQNSATTTSGFRGEFKNQETRSEFLKLIG

SEQ ID NO: 13688 - protein, 225 aa, Psychroflexus torquis
  REGION 1..225: note = tr|K4IH45|K4IH45_PSYTT GTP cyclohydrolase 1; OS = Psychroflexus torquis (strain ATCC 700755 / ACAM 623); OX = 313595 GN=folE PE=3 SV=1
MSDQNKEDLTEELGDNHIATSYENPIREDAFDMSDDEKIEKIKGHVHEIMETLGMDMTDDSLQGTPNRVAKMYVNETFGGLRPHKKPKVSTFENNYKYGQMLVEKNITVYSTCEHHLLPIIGRAHVAYISSGRVIGLSKMNRIVNYYAKRPQVQERLTMQVVKELQKALETEDVACVIDAKHLCVNSRGINDIESSTVTSEYGGKFKDEDVRKELLSYIKLDTKF

SEQ ID NO: 13689 - protein, 186 aa, unidentified
  source 1..186: note = Psychromicrobium lacuslunae
  REGION 1..186: note = tr|A0A0D4C1C0|A0A0D4C1C0_9MICC GTP cyclohydrolase 1; OS = Psychromicrobium lacuslunae OX=1618207 GN=folE PE=3 SV=1
MDLPRIERAVREILLAIGEDPDRSGLADTPARVARAYAEVFSGLQQDPADVLSRTFDISHQELVLVKDIPFYSTCEHHLVPFHGFAHVGYIPSHDGKVTGLSKLARLVDVFAKRPQVQERLTTQIVDALVEHLKPRGAIVVVECEHMCMSMRGVRKPGAKTVTSAVRGILHEPATRAEAMSLILGK

SEQ ID NO: 13690 - protein, 304 aa, Psychromonas ingrahamii
  REGION 1..304: note = sp|A1STF0|GCH4_PSYIN GTP cyclohydrolase FolE2; OS = Psychromonas ingrahamii (strain 37) OX=357804 GN=folE2; PE = 3 SV=2
MPDIANSAQAQTEGKLDRVGMSNIELPLMVQTDDCPPQQVSANAEVFVNLGDAQAKGIHMSRLYLQLDELSTESELNISTLTALLQGFITSHHELSQRAFVKFSFDYHLRRKSLISEKRGWKAYPVIIIGRLSEGNFEVELQVNVPYSSTCPCSAALARQLIQQAFSQKYDQQTEVNKEEIFAWLGSTKGIVATPHSQRSIVEVKVKLNSLNQSFPIIELIDLIEKTLKTPVQAAVKREDEQEFALLNGQNLMFCEDAARHLQHSLHQETKFDDFWLRVNHYESLHAHDAVAMTTKGIEGGYLA

SEQ ID NO: 13691 - protein, 306 aa, Psychromonas sp.
  REGION 1..306: note = tr|A0A4Y7ZUQ9|A0A4Y7ZUQ9_9GAMM GTP cyclohydrolase FolE2 OS=Psychromonas sp. RZ22 OX=2555643 GN=folE2 PE=3; SV = 1
MAMPDIANSAQAQTEGTLDRVGMSNIELPLMVQTDNCPAQQVSASVEVFVNLGDPQAKGIHMSRLYLQLDELSTESELTLETLTALLTGFIESHNDLSSEAFVKIAFDYNLRRKSLISEKRGWKAYPVVIIGRLINGKFDFQLQVDVPYSSTCPCSAALARQLIQDAFSKQYEQQASIDKEDILTWLGSTQGIVATPHSQRSVAQVKVKLGKSASNFPIIALIDLIEATLKTPVQAAVKREDEQEFARLNGQNLMFCEDAARQLQYALNQQTQFDDFWLRVNHYESLHAHDAVSITTKGIKDGYQA

SEQ ID NO: 13692 - protein, 306 aa, Psychromonas sp.
  REGION 1..306: note = tr|A0A366W2L6|A0A366W2L6_9GAMM GTP cyclohydrolase FolE2 OS=Psychromonas sp. B3M02 OX=2267226 GN=folE2 PE=3; SV = 1
MAMPDIANSAQAQTEGTLDRVGMSNIELPLMVQTDDCPAQQVSAKAEVFVNLGDPQAKGIHMSRLYLQLDQLSTESELTLGTLTTLLSGFIESHHDLSSEAYVKVAFDYNLRRKSLISEKRGWKAYPVVIVGRLIDGEFDFELKVDVPYSSTCPCSAALARQLIQDAFSKQYEEQANIAKEDILTWLGSTQGIVATPHSQRSVAEVKVKLSNEADNFPIIALIDLIEATLKTPVQAAVKREDEQEFARLNGQNLMFCEDSARQLKFALNQQELFDDFWLRVNHYESLHAHDAVSVTTKGIKDGYQA

SEQ ID NO: 13693 - protein, 225 aa, Psychroserpens burtonensis
  REGION 1..225: note = tr|A0A5C7B642|A0A5C7B642_9FLAO GTP cyclohydrolase 1; OS = Psychroserpens burtonensis OX=49278 GN=folE PE=3 SV=1
MKIEKDIQDYDAIGDDHVGSSSETPLRHDAFELTSSEKINIIKEDVKHIMETLGLDLADDSLKGTPNRVAKMFVNEIFGGLDPDKKPKASTFDNKYKYGEMLVEKNITVYSTCEHHLLPIVGKAHIAYISNGTVVGLSKMNRIVDYFAKRPQVQERLTIQVVKELQKVLNTEDVACIIDAKHLCVNSRGIRDVASSTITSEFGGVFKSKETKREFLDYVSLDTAF

SEQ ID NO: 13694 - protein, 231 aa, Psychroserpens burtonensis
  REGION 1..231: note = tr|A0A5C7B6A8|A0A5C7B6A8_9FLAO GTP cyclohydrolase 1; OS = Psychroserpens burtonensis OX=49278 GN=folE PE=3 SV=1
MNTDTLKIKQNGHSLNDFNITDIGDDHLFTGLETPMKADAFKISDEEKKQRIAILFEEIMDVMGLDLTDDSLKGTPKRVAKMYIDEIFSGLNPANKPKVALFDNKYQYNQMVVEKNITFYSNCEHHFVPIIGKAHVSYISSGKVIGLSKLNRIVQYYAKRPQVQERLTNQIAEDLKAILETEDVAVIIDAKHLCVSSRGIKDDTSATVTTYYGGQFNTPAKIAELHNYINN

SEQ ID NO: 13695 - protein, 225 aa, Psychroserpens sp.
  REGION 1..225: note = tr|A0A4P7WWV3|A0A4P7WWV3_9FLAO GTP cyclohydrolase 1; OS = Psychroserpens sp. NJDZ02 OX=2570561 GN=folE PE=3 SV=1
MKIENNIDENDAIGENHIGTNHDTPLRADAFDLSDADKIESIKKDVTKILETLGLDLTDDSLKGTPNRVAKMFVNEIFGGLHPDKKPKASTFDNKYQYGEMLVEKNITVYSTCEHHLLPIVGRAHVAYISNGTVVGLSKMNRIVDYYAKRPQVQERLTIQIVKELQKALGTDDVACIIDAKHLCVNSRGIRDIESSTVTSEFGGQFKKESTRREFLEYIKLETKF

SEQ ID NO: 13696 - protein, 198 aa, Psychroserpens sp.
  REGION 1..198: note = tr|A0A4P7X0N7|A0A4P7X0N7_9FLAO GTP cyclohydrolase 1; OS = Psychroserpens sp. NJDZ02 OX=2570561 GN=folE PE=3 SV=1
MPYKQFEEYSIKVTDDVKERYKNIIEDLGEDTNREGLIKTPERAAKAMQFLTQGYDQDAAEILKGAMFKEEYNDMVIVKDIEFYSLCEHHILPFFGKAHIAYIPNGHIVGLSKLPRIVDVFSRRLQVQERLTHQILDCINDTLKPEGVAVVIEASHMCMQMRGVQKQNSVTTTSGFRGAFENIETRTEFLNLISSKLS

SEQ ID NO: 13697 - protein, 306 aa, Psychrosphaera saromensis
  REGION 1..306: note = tr|A0A2S7UU87|A0A2S7UU87_9GAMM GTP cyclohydrolase FolE2 OS=Psychrosphaera saromensis OX=716813 GN=folE2 PE=3; SV = 1
MTTKMPDIANQAQAQTEGVLDWVGMSNIEMPIMVEMQGETRQVSALVEAFVNLKDPKAKGIHMSRLYLMLDELSVEGSLNKATLTDLLTNFIQSHEDLSDSAHLKFEFDYHMRRKSLISGKRGWKAYPVVITGNLTNGVLDIELAVKVPYSSTCPCSAALARQLIQNAFNDKFTGDVSAEEIHQWLGTTEGIVATPHSQRSIAEVKVKLADDITEFPLVDLVDAIENVLQTPVQAAVKREDEQEFARLNGQNLMFCEDAGRRIKHTLDAISGYKDFWLRVNHYESLHAHDAVSVASKGIANGYASK

SEQ ID NO: 13698 - protein, 189 aa, unidentified
  source 1..189: note = Pueribacillus theae
  REGION 1..189: note = tr|A0A2U1K642|A0A2U1K642_9BACI GTP cyclohydrolase 1; OS = Pueribacillus theae OX=2171751 GN=folE PE=3 SV=1
MARFDSEKIEQAVKMIIEAIGEDPNREGLIDTPKRVARMYEEVFQGLNQNPKDYFATIFGEEHEELVLVKNIPFYSMCEHHLVPFFGEAHVAYIPKDGKVTGLSKLARAVESVARRPQLQERITSTVANSIVETLSPHGVMVVVEAEHMCMTMRGIKKPGAITVTSAVRGCFENDPASRAEVLNLMIKK

SEQ ID NO: 13699 - protein, 366 aa, unidentified
  source 1..366: note = Puniceibacterium antarcticum
  REGION 1..366: note = tr|A0A2G8R9K9|A0A2G8R9K9_9RHOB GTP cyclohydrolase FolE2 OS=Puniceibacterium antarcticum OX=1206336 GN=folE2; PE = 3 SV=1
MNIHTPEMDRKPSREEAEQALALLRQWAGKAHDAEIEALDPVLARLVPDAPVDSYPVLSRRYPEAFGVTSAYKDTLPDLQNGPSALIKGANRSIQHVGISNFRLPIQYHTRDNGDLTLETSVTGTVSLDADKKGINMSRIMRSFYVYAEETFSFGVIEAALEDYKTDLESFDARINMRIKFPVKVSSLRSGLSGYQYYDIALELVESNGVRRKIMHLDYVYSSTCPCSLELSEHARRTRGQLATPHSQRSVARISVVLNEGECLWFEDLIDMCRRAVPTETQVMVKREDEQAFAELNAANPIFVEDAARLFAEQLQGDPRVGDFRVLASHQESLHSHDAVSVLTEGDTFANDSLDPKLFSTLFHVG

SEQ ID NO: 13700 - protein, 367 aa, unidentified
  source 1..367: note = Puniceibacterium sediminis
  REGION 1..367: note = tr|A0A238UX21|A0A238UX21_9RHOB GTP cyclohydrolase FolE2 OS=Puniceibacterium sediminis OX=1608407 GN=folE2; PE = 3 SV=1
MNMHTPEMDRKPSREEAAAALAVLRKWAGKAHDSEIESLDPVLARLAPDAPVDAYPLLSRAYEADFDASPAYKDTLPDLQNGPSALIKGANRAIQHVGISNFRLPIQYHTRDKGDLSLETSVTGTVSLEADKKGINMSRIMRSFYEYAEETFSFGVIEAALDDYKTDLESFDARINMRLKFPVKVQSLRSGLSGYQYYDIALELIEIDGVRRKIMHLDYVYSSTCPCSLELSEHARRTRGQLATPHSQRSVARISVELTADGKCLWFEDLIDMCRRAVPTETQVMVKREDEQAFAELNAANPIFVEDAARLFAEALQNDPRIGDYRVLASHQESLHSHDAVSVLTEGTTFASDSLDPKLFSTLFHVG

SEQ ID NO: 13701 - protein, 366 aa, unidentified
  source 1..366: note = Puniceibacterium sp.
  REGION 1..366: note = tr|A0A0J5QCR2|A0A0J5QCR2_9RHOB GTP cyclohydrolase FolE2 OS=Puniceibacterium sp. IMCC21224 OX=1618204; GN = folE2 PE=3 SV=1
MNIHTPEIDRVPSREEAAKALALLRLWAGKVPDSEIEALDPVLARLAPDAPADEYPVLSRDYPQSFAVTGAYKATLPDLQNGSATLIRGADRAIQHVGISNFRLPLQYRTRDSGALTLETSVTGTVSLDAGKKGINMSRIMRSFYKHAEKTFSFGVIEAALDDYKKDLESFDARINMRLSFPVRVESLRSGLSGYQYYDIALELVETAGVRREIMHLDYVYSSTCPCSLELAEHARRTRGQLATPHSQRSVARISVEVLDGKCLWFEDLIEMCRNAVPTETQVMVKREDEQAFAELNAANPIFVEDAARLFAEQVQKDRRIGDFRVLASHQESLHSHDAVSVLTEGALFADESLDPKLFSTLFHVG

SEQ ID NO: 13702 - protein, 363 aa, unidentified; identical to SEQ ID NO: 13609
  source 1..363: note = Puniceibacterium sp.
  REGION 1..363: note = tr|A0A5B3BLU8|A0A5B3BLU8_9RHOB GTP cyclohydrolase FolE2 OS=Puniceibacterium sp. HSS470 OX=2541729 GN=folE2; PE = 3 SV=1

SEQ ID NO: 13703 - protein, 326 aa, unidentified
  source 1..326: note = Puniceicoccaceae bacterium
  REGION 1..326: note = tr|A0A368B6J8|A0A368B6J8_9BACT GTP cyclohydrolase FolE2 OS=Puniceicoccaceae bacterium OX=2026784 GN=folE2; PE = 3 SV=1
MKSESSSTTPNQSSASAAKLSKVYDRDFVLTDEYRAALPDMQNTDSQQIFGANVPILKVGISNFRLPLSYITSNSDTMTLETSVTGTVSLEANQKGINMSRIMRVFYTYQERVFTPDLLKEILLQYKEEINAHRAQLKLSFEYPILKPSLRSGLEGWQYYRAAYEGRVDELSRFRKYIHFDFIYSSACPCSSELSEHARGNRDVYGIPHSQRSTARVSVEVTEDQHLSLERLQELCLKALQTETQVMVKREDEQAFAEMNGAFTKFVEDAARLLYEQLDDEPKIVDFQVACAHLESLHSHDAVAVINKGVPGGFTGHFDDYKSLIR

SEQ ID NO: 13704 - protein, 326 aa, unidentified; identical to SEQ ID NO: 7010
  source 1..326: note = Puniceicoccaceae bacterium
  REGION 1..326: note = tr|A0A2A5VYW8|A0A2A5VYW8_9BACT GTP cyclohydrolase FolE2 OS=Puniceicoccaceae bacterium MED-G30 OX=1986244; GN = folE2 PE=3 SV=1

SEQ ID NO: 13705 - protein, 213 aa, unidentified
  source 1..213: note = Puniceispirillum marinum
  REGION 1..213: note = tr|D5BQG8|D5BQG8_PUNMI GTP cyclohydrolase 1; OS = Puniceispirillum marinum (strain IMCC1322) OX=488538; GN = folE PE=3 SV=1
MMTPYDANDDAVSHDTDTGNSDITATPSREEAEAAVEVLLRWAGDDPTREGLVGTPGRVARAWKEFCVGYTEDPMEMLERTFDEVEGYDDMVMLRNIRMESHCEHHMVPILGVAHIAYMPDKRVVGISKLARVLDSFARRLQTQETLTAQVANCIQTALKPKGVAILMDAQHQCMTTRGVRKPDVSMLTTRFTGVFENDADLRGRFLDQAKRG

SEQ ID NO: 13706 - protein, 277 aa, Pusillimonas ginsengisoli
  REGION 1..277: note = tr|A0A4U5LEY2|A0A4U5LEY2_9BURK GTP cyclohydrolase FolE2 OS=Pusillimonas ginsengisoli OX=453575 GN=folE2 PE=3; SV = 1
MNILIDSAVAMPDVQSSVDVRHIAIERVGVRGVRHPMLIAAAGETQPTVANWEMTVALPASEKGTHMSRFVALLEQYRRQAMTPVLFCDMAQAMLPLLNAEKGDISASFAYFVNKVAPVSGVASLMDYEVTWTAKAQAQAAEGAGHAAPGSVEFELSVLVPVTSLCPCSKAISDYGAHNQRSHVTVSAMFDDPAHVDLDGLIKSVEKQASCELWGLLKRTDEKYVTERAYENPKFVEDLVRDVAGQLKQMTGVQRFRVVAENFESIHNHSAYAVVEG

SEQ ID NO: 13707 - protein, 267 aa, Pusillimonas noertemannii
  REGION 1..267: note = tr|A0A2U1CHZ7|A0A2U1CHZ7_9BURK GTP cyclohydrolase FolE2 OS=Pusillimonas noertemannii OX=305977 GN=folE2 PE=3; SV = 1
MNSVTDSVVAMPDVQSSVDTRRLPIQRVGVRGVRHPMLVACSNGEALPTVANWELTVALPAEEKGTHMSRFVAQLEQYRRLPMTPALFCEMTEKMLPLLNAKQGDITAVFPYFIDKVAPVSGVSSLMDYEVKWLARAAEGEATVFELTVVVPVTSLCPCSKAISEYGAHNQRSHVTVNAVLSDPAIDMPAFIQSIEQQASCELWGLLKRGDEKYVTERAYENPKFVEDLVRDVAMAVKGFEAVQGFRIEAENFESIHNHSAYAVVEG

SEQ ID NO: 13708 - protein, 266 aa, Pusillimonas sp.
  REGION 1..266: note = tr|A0A368WD68|A0A368WD68_9BURK GTP cyclohydrolase FolE2 OS=Pusillimonas sp. EA3 OX=2183983 GN=folE2 PE=3 SV=1
MNSITDSVAVMPDVQSSADTRRMPIQRVGVRGVRHPMLVQAAGAALPTVAQWELTVALPAEEKGTHMSRFVALLEQYHSTAMTPALFCEMAQEMLPLLNAEKGDICARFPYFMKKVAPVSEVESLMDYEVTWKAVATSDDVQFYLTVQVPVTSLCPCSKAISQYGAHNQRSHVTVDVVYDDVGHICVDDLIQRVEQQASCELWGLLKRGDEKFVTERAYENPKFVEDLVRDVAVQLQALPGVQRFRIEAENFESIHNHSAYAVVEG

SEQ ID NO: 13709 - protein, 266 aa, Pusillimonas sp.; identical to SEQ ID NO: 13708
  REGION 1..266: note = tr|A0A3A1YTK3|A0A3A1YTK3_9BURK GTP cyclohydrolase FolE2 OS=Pusillimonas sp. L52-1-41 OX=2026684 GN=folE2; PE = 3 SV=1

SEQ ID NO: 13710 - protein, 226 aa, unidentified
  source 1..226: note = Pustulibacterium marinum
  REGION 1..226: note = tr|A0A1I7FQG5|A0A1I7FQG5_9FLAO GTP cyclohydrolase 1; OS = Pustulibacterium marinum OX=1224947 GN=folE PE=3 SV=1
MKIDKALEQHYEEYGDNHVGSSADTPIRKDAFELSPLEKMEKIESNVYEILETLGMDLTDDSLKGTPRRVAKMFVNEIFGGLLPENKPSASTFENKYKYGEMLVEKNIVVYSTCEHHLLPIVGRAHVGYISKGKVVGLSKMNRIVDYFSKRPQVQERLTMQIVQEMQKVLGTDDVACVIDAKHLCVNSRGIRDIESSTVTAEFGGKFKEESARREFLNYIKLETEF

SEQ ID NO: 13711 - protein, 210 aa, unidentified
  source 1..210: note = Pyrinomonas methylaliphatogenes
  REGION 1..210: note = tr|A0A0B6WYB9|A0A0B6WYB9_9BACT GTP cyclohydrolase 1; OS = Pyrinomonas methylaliphatogenes OX=454194 GN=folE PE=3; SV = 1
MNTQFSATEPDEEIAEAPPARRQVDLGKIAQGVRLILEGIGEDPDRPGLRRTPQRVAEMYAELTAGMDEDPHEYIVPLPGDTHDEMVIVKDIQIASLCEHHLAPFVGRCHIAYIPKDGRIIGLSKLARLADAFARRLQVQERLTSQIADTLYEALKPVGVMVVIEAEHTCMTVRGVKKPGSLTITSAIRGGFRKDQRTRAEAMALIKGRG

SEQ ID NO: 13712 - protein, 199 aa, Quadrisphaera granulorum
  REGION 1..199: note = tr|A0A316A9E4|A0A316A9E4_9ACTN GTP cyclohydrolase 1; OS = Quadrisphaera granulorum OX=317664 GN=folE PE=3 SV=1
MSAVPADLLVTDRPGVDLEAATTAAAAFLQALGVDTDRPGLDRTPERMARAYAELFDAGPVELTTFPNEEAYDEVVLARGIPFRSVCEHHLLPFVGVAHVGYLPGERIVGLSKLARVVEHLAAGPQVQERLTSQVARLLQDRLRPRGVGVVLDAEHLCMSVRGVRATGARTRTSALLGRMRSDARTRAEFLALTGTGAA

SEQ ID NO: 13713 - protein, 201 aa, Quadrisphaera granulorum
  REGION 1..201: note = tr|A0A316A8N1|A0A316A8N1_9ACTN GTP cyclohydrolase 1; OS = Quadrisphaera granulorum OX=317664 GN=folE PE=3 SV=1
MRTPAPPAPRQAPAHAPEPDLAAAERAVADLLRALRLDTEAPGLVGTPGRVARAYAELLTPQEFAFTTFPNDEGYDELVVVSDIPFRSLCEHHLLPFVGTAHVGYLPGERVVGLSKLARAVEALASRPQVQERLTCQVADLLEEALAPRGVGVVLEADHSCMSLRGARAVGARTRTSALRGLVRSDARTRAEFFDLTGRTR

SEQ ID NO: 13714 - protein, 215 aa, Quadrisphaera sp.
  REGION 1..215: note = tr|A0A5C8ZJ22|A0A5C8ZJ22_9ACTN GTP cyclohydrolase 1; OS = Quadrisphaera sp. DD2A OX=2593304 GN=folE PE=3 SV=1
MRSATTVPPPRPDEDLDRERSLAQVAPSSPPVDPAAAERAVGQLLVALGLDPGAPGLQDTPRRVARAYADLLTPEPFALTTFPNDEGYDELVVVSDIPFTSLCEHHLLPFSGVAHVGYLPGSRVVGLSKLARVVEALSRRPQVQERLTCQVADLLQEALDPDGVGVVLEAEHTCMSLRGVRAVGALTRTSALRGRVRSDARTRAEFLDLARRSRS

SEQ ID NO: 13715 - protein, 194 aa, Quadrisphaera sp.
  REGION 1..194: note = tr|A0A1H0YPD2|A0A1H0YPD2_9ACTN GTP cyclohydrolase 1; OS = Quadrisphaera sp. DSM 44207 OX=1881057 GN=folE PE=3 SV=1
MAGTPPPGYDAERVRRAVREILLAIGEDPDREGLVGTPERVARAYEEIFAGLHQDPAQVLATTFDLGHDEMVLVRDITVSSVCEHHLLPFTGVAHVAYIPSADGRITGLSKLARLVDVYARRPQVQERLTAQVADALVQHLSPRGVMVVLDCEHLCMSMRGVQRGGARTTTSAVRGGMREPATRAEALSLVLGR

SEQ ID NO: 13716 - protein, 188 aa, unidentified
  source 1..188: note = Quasibacillus thermotolerans
  REGION 1..188: note = tr|A0A0F5HYQ1|A0A0F5HYQ1_9BACI GTP cyclohydrolase 1; OS = Quasibacillus thermotolerans OX=1221996 GN=folE PE=3; SV = 1
MTEVNRAQIEEAVRMILEAVGEDPNREGLLDTPKRVAKMYEEVFSGLNTDPKEYFETIFGEDYEELVLVKDIPFYSMCEHHLVPFFGHAHVAYLPKNGKVTGLSKLARAVEAVARRPQLQERITAEVANAIMEKLQPHGVMVVVEAEHMCMAMRGVKKPGSKTVTTAARGKFANDVHSRSELLSLIKG

SEQ ID NO: 13717 - protein, 266 aa, unidentified
  source 1..266: note = Quisquiliibacterium sp.
  REGION 1..266: note = tr|A0A5C8NSA1|A0A5C8NSA1_9BURK GTP cyclohydrolase FolE2 OS=Quisquiliibacterium sp. CC-CFT501 OX=2498847; GN = folE2 PE=3 SV=1
MNAPEKLLLPDIQSTADARQLAIQRVGVRGIVFPVTIAGAGGAQASVARVDMYVGLPADQKGTHMSRFLEVLHVQDEPLSYAALDRLMVAMLDRLEADSGWIEMRLPYFVKKAAPVSGVESLMDYELTLRIEARDGLRRQTLKVLVPVTSLCPCSKEISAYGAHNQRSHVTIAARLSAGLPVESLIEVAEQAASCELWGLLKRPDEKYVTERAYENPKFVEDLVRDIALALDRIPAVEAYTVESENFESIHNHSAYALIERERPAA

SEQ ID NO: 13718 - protein, 221 aa, Rahnella aquatilis
  REGION 1..221: note = tr|H2IQP9|H2IQP9_RAHAC GTP cyclohydrolase 1; OS = Rahnella aquatilis (strain ATCC 33071 / DSM 4594 / JCM 1683 / NBRC 105701 / NCIMB 13365 / CIP 78.65) OX=745277; GN = folEPE=3 SV=1
MSTLSKEAILVHEALLARGLETPLREALPIDNETRKQRIQEHMTGIMQLLNLDLSDDSLAETPHRIAKMYVDEIFSGLDYANFPKITVIENKMKVDEMVTVRDITLTSTCEHHFVTIDGKATVAYIPKETVIGLSKINRIVQFFSQRPQVQERLTQQILVALQTLLGTTNVAVSIDAVHYCVKARGVRDATSATTTTSLGGLFKSSQNTRQEFLRTVRHPS

SEQ ID NO: 13719 - protein, 221 aa, Rahnella aquatilis
  REGION 1..221: note = tr|H8NRN9|H8NRN9_RAHAQ GTP cyclohydrolase 1; OS = Rahnella aquatilis HX2 OX=1151116 GN=folE PE=3 SV=1
MPILSKEAILVHEALLARGLETPLREALPIDNETRKQRIQEHMTGIMQLLNLDLSDDSLAETPHRIAKMYVDEIFSGLDYANFPKITVIENKMKVDEMVTVRDITLTSTCEHHFVTIDGKATVAYIPKDTVIGLSKINRIVQFFSQRPQVQERLTQQILVALQTLLGTTNVAVSIDAVHYCVKARGVRDATSATTTTSLGGLFKSSQNTRQEFLRTVRHPS

SEQ ID NO: 13720 - protein, 221 aa, unidentified
  source 1..221: note = Rahnella inusitata
  REGION 1..221: note = tr|A0A419MEB3|A0A419MEB3_9GAMM GTP cyclohydrolase 1; OS = Rahnella inusitata OX=58169 GN=folE PE=3 SV=1
MPTLSKEAILVHEALLARGLETPLREALPIDNETRKQRIQEHMTGIMQLLNLDLSDDSLAETPNRIAKMYVDEIFSGLDYANFPKITVIENKMKVDEMVTVRDITLTSTCEHHFVTIDGKATVAYIPKDTVIGLSKINRIVQFFSQRPQVQERLTQQILVALQTLLGTTNVAVSIDAVHYCVKARGVRDATSATTTTSLGGLFKSSQNTRQEFLRTVRHAS

SEQ ID NO: 13721 - protein, 221 aa, Rahnella sp.
  REGION 1..221: note = tr|A0A2N0W542|A0A2N0W542_9GAMM GTP cyclohydrolase 1; OS = Rahnella sp. AA OX=2057180 GN=folE PE=3 SV=1
MPTLSKEAILVHEALLARGLETPLREALPIDNETRKKQIQEHMTGIMQLLNLDLSDDSLAETPHRIAKMYVDEIFSGLDYANFPKITVIENKMKVDEMVTVRDITLTSTCEHHFVTIDGKATVAYIPKETVIGLSKINRIVQFFSQRPQVQERLTQQILVALQTLLGTTNVAVSIDAVHYCVKARGVRDATSATTTTSLGGLFKSSQNTRQEFLRTVRHAS

SEQ ID NO: 13722 - protein, 221 aa, Rahnella sp.; identical to SEQ ID NO: 8001
  REGION 1..221: note = tr|A0A4R7GI17|A0A4R7GI17_9GAMM GTP cyclohydrolase 1; OS = Rahnella sp. BIGb0236 OX=2485117 GN=folE PE=3 SV=1

SEQ ID NO: 13723 - protein, 221 aa, unidentified; identical to SEQ ID NO: 8001
  source 1..221: note = Rahnella woolbedingensis
  REGION 1..221: note = tr|A0A419NDV7|A0A419NDV7_9GAMM GTP cyclohydrolase 1; OS = Rahnella woolbedingensis OX=1510574 GN=folE PE=3 SV=1

SEQ ID NO: 13724 - protein, 235 aa, unidentified
  source 1..235: note = Raineya orbicola
  REGION 1..235: note = tr|A0A2N3IEZ8|A0A2N3IEZ8_9BACT GTP cyclohydrolase 1; OS = Raineya orbicola OX=2016530 GN=folE PE=3 SV=1
MKPNETSLNTLPNAWQMIEEIGENHFSSNLDTPLRDDAFEIDDDLKIELIEKHFREIMHILGLDLTDDSLKGTPHRVAKMYVKEIFSGLNPANKPKISLFENKYEYNQMLVEKDIIVYSYCEHHFVPIVGKAHVAYISKGQVIGLSKLNRIVQYYARRPQVQERMTMQIGKELQEVLQTEDVAIVVDAKHLCVSSRGVQDVCSSTITAFYEGKFREEATKNEFLKYLSLSTEYGI

SEQ ID NO: 13725 - protein, 209 aa, unidentified
  source 1..209: note = Raineyella antarctica
  REGION 1..209: note = tr|A0A1G6IJC6|A0A1G6IJC6_9ACTN GTP cyclohydrolase 1; OS = Raineyella antarctica OX=1577474 GN=folE PE=3 SV=1
MAEQLTDRFPDVSPEEWGAARRPFDHDRVAAAVREILVGIGEDPDRDGLLDTPARVARMYGEVFAGMHESASEVLSTTFDINHEELVLVKDIEVWSMCEHHLVPFNGVAHVGYIPGGDGQVTGLSKLARLVDVYARRPQVQERLTTQVAEALVHHLRPRGVIVVFDCEHLCMTMRGVHKPGSRTVTSAVRGILRNPATRAEAMGLIMGR

SEQ ID NO: 13726 - protein, 268 aa, Ralstonia insidiosa
  REGION 1..268: note = tr|A0A191ZUG7|A0A191ZUG7_9RALS GTP cyclohydrolase FolE2 OS=Ralstonia insidiosa OX=190721 GN=folE2 PE=3 SV=1
MNDMNPAFVMPDVQSSHDTRQIPIQRVGVRGVRYPMSLQTPSGVQNTVGTYNLDVHLPADQKGTHMSRFVALLEEEREPLNLAQFQLLLEKMLEKLEADAGRIEVHFPYFVSKTAPVSGVQSLMDYEVTMIGEVRDGHTKVRVKALVPVTSLCPCSKKISQYGAHNQRSHITIDAELAADTPVESLIRMAEEEASCELWGLLKRPDEKFVTERAYENPKFVEDLVRDIAMRLNLDDRIVAYTLEAENFESIHNHSAYALIERDKRLDK

SEQ ID NO: 13727 - protein, 268 aa, Ralstonia mannitolilytica
  REGION 1..268: note = tr|A0A0D5ARV7|A0A0D5ARV7_9RALS GTP cyclohydrolase FolE2 OS=Ralstonia mannitolilytica OX=105219 GN=folE2 PE=3; SV = 1
MNDMNPAFAMPDVQSSHDTRQIPIQRVGVRGVRYPMSLQTPSGVQNTVGTFNLDVHLPADQKGTHMSRFVALLEEEREPLNLAQFQLLLEKMLEKLEADAGRIEVHFPYFVSKTAPVSGVQSLMDYEVTMIGEVRNGHTTVRVKALVPVTSLCPCSKKISQYGAHNQRSHITIDAELAADTPVEALIRMAEEEASCELWGLLKRPDEKFVTERAYENPKFVEDLVRDIAMRLNQDDRIVAYTLEAENFESIHNHSAYALIERDKRTDK

SEQ ID NO: 13728 - protein, 268 aa, Ralstonia pickettii
  REGION 1..268: note = tr|C6BK66|C6BK66_RALP1 GTP cyclohydrolase FolE2; OS = Ralstonia pickettii (strain 12D) OX=428406 GN=folE2; PE = 3 SV=1
MNDMNPAFAMPDVQSSHDNRQIPIQRVGVRGVRYPMSLQTPSGVLNTVGTYNLDVHLPADQKGTHMSRFVALLEEEREPLNLAQFQLLLEKMLEKLEADAGRIEVHFPYFVSKTAPVSGVQSLMDYEVTMIGEVRDGHTKVRVKALVPVTSLCPCSKKISQYGAHNQRSHITIDAELAADTPVEALIRMAEEEASCELWGLLKRPDEKFVTERAYENPKFVEDLVRDIAMRLNQDDRIVAYSLEAENFESIHNHSAYALIERDKRSDK

SEQ ID NO: 13729 - protein, 268 aa, Ralstonia pickettii; identical to SEQ ID NO: 13728
  REGION 1..268: note = tr|A0A2P4RM54|A0A2P4RM54_RALPI GTP cyclohydrolase FolE2 OS=Ralstonia pickettii OX=329 GN=folE2 PE=3 SV=1

SEQ ID NO: 13730 - protein, 268 aa, unidentified
  source 1..268: note = Ralstonia pseudosolanacearum
  REGION 1..268: note = tr|A0A223GNY1|A0A223GNY1_9RALS GTP cyclohydrolase FolE2 OS=Ralstonia pseudosolanacearum OX=1310165 GN=folE2; PE = 3 SV=1
MNDMNPGFVMPDVQSSHDTRQIPIQRVGVRGVRYPMSLQTPSGVLSTVGTFNLDVHLPADQKGTHMSRFVALLEEEREPLNLAQFQLLLEKMLEKLEADAGRIEVSFPYFVSKTAPVSGVQSLMDYEVTMIGEVRDGHTTVRVKALVPVTSLCPCSKKISQYGAHNQRSHITIDAELAADTPVEALIRMAEEEASCELWGLLKRPDEKFVTERAYENPKFVEDLVRDIAMRLNEDDRIVAYTLEAENFESIHNHSAYALIERDKRRAG

SEQ ID NO: 13731 - protein, 209 aa, unidentified
  source 1..209: note = Ralstonia pseudosolanacearum
  REGION 1..209: note = tr|A0A223H0Q3|A0A223H0Q3_9RALS GTP cyclohydrolase 1; OS = Ralstonia pseudosolanacearum OX=1310165 GN=folE PE=3; SV = 1
MLCSHDDDDPIRTAASHGIRRVRAFDAQRFELAVQSLLEASGIEIDTAHTGKTAQRVRELWQRRLLDGYDIDPAEALGHGFEDPRRDMVIIRSIAVHGVCPHHLLPFRGVAHVAYLPDGRLHGFGRIARMIDAISHRYTYQEWVTNEVAHALVAHGQARGAACLIEAEQLCLLMGENRRGDERVITQCYVGEFEQNMQARTEFLRAIKG

SEQ ID NO: 13732 - protein, 209 aa, Ralstonia solanacearum; identical to SEQ ID NO: 13731
  REGION 1..209: note = sp|Q8XZK8|GCH1_RALSO GTP cyclohydrolase 1; OS = Ralstonia solanacearum (strain GMI1000) OX=267608; GN = folE PE=3 SV=1

SEQ ID NO: 13733 - protein, 208 aa, Ralstonia solanacearum
  REGION 1..208: note = tr|A0A0S4TP02|A0A0S4TP02_RALSL GTP cyclohydrolase 1; OS = Ralstonia solanacearum OX=305 GN=folE PE=3 SV=1
MLCSHDDDPVRTAASHGIRRVRAFDAQRFELAVQSLLEASGIEIDTAHTGKTAQRVRELWQRRLLDGYDIDPAEALGHGFEDPRRDMVVIRSIAVHGVCPHHLLPFRGVAHVAYLPDGRLHGFGRIGRMIDAISHRYTYQEWVTNEVAHVLVAHGQARGAACLIEAEQLCLLMGENRRGDERVITQCYVGEFEQNMQARTEFLRAIKG

SEQ ID NO: 13734 - protein, 268 aa, Ralstonia sp.
  REGION 1..268: note = tr|U3G6W7|U3G6W7_9RALS GTP cyclohydrolase FolE2; OS = Ralstonia sp. 5_2_56FAA OX=658080 GN=folE2 PE=3 SV=1
MNDMNPAFAMPDVQSSHDTRQIPIQRVGVRGVRYPMSLQTPSGVLNTVGTYNLDVHLPADQKGTHMSRFVALLEEEREPLNLAQFQLLLEKMLEKLEADAGRIEVHFPYFVSKTAPVSGVQSLMDYEVTMIGEVRDGHTKVRVKALVPVTSLCPCSKKISQYGAHNQRSHITIDAELAADTPVEALIRMAEEEASCELWGLLKRPDEKFVTERAYENPKFVEDLVRDIAMRLNQDDRIVAYTLEAENFESIHNHSAYALIERDKRSDK

SEQ ID NO: 13735 - protein, 268 aa, Ralstonia sp.
  REGION 1..268: note = tr|A0A0J9DY98|A0A0J9DY98_9RALS GTP cyclohydrolase FolE2 OS=Ralstonia sp. MD27 OX=1676617 GN=folE2 PE=3 SV=1
MNDMNPAFAMPDVQSSHDTRQIPIQRVGVRGVRYPMSLQTPSGVQNTVGTYNLDVHLPADQKGTHMSRFVALLEEEREPLNLAQFQLLLEKMLEKLEADAGRIEVHFPYFVSKTAPVSGVQSLMDYEVTMIGEVRDGHTKVRVKALVPVTSLCPCSKKISQYGAHNQRSHITIDAELAADTPVESLIRMAEEEASCELWGLLKRPDEKFVTERAYENPKFVEDLVRDIAMRLNQDDRIVAYTLEAENFESIHNHSAYALIERDKRLDK

SEQ ID NO: 13736 - protein, 268 aa, Ralstonia syzygii
  REGION 1..268: note = tr|G3A083|G3A083_9RALS GTP cyclohydrolase FolE2; OS = Ralstonia syzygii R24 OX=907261 GN=folE2 PE=3 SV=1
MNDMNPAFVMPDVQSSHDTRQIPIQRVGVRGVRYPMSLQTPSGVQSTVGTFNLDVHLPADKKGTHMSRFVALLEEEREPLNLAQFQLLLEKMLEKLEADAGRIEVSFPYFISKTAPVSGVQSLMDYEVTMIGEVRDGHTTVRVKALVPVTSLCPCSKKISQYGAHNQRSHITIDAELAADTPVEALIRMAEEEASCELWGLLKRPDEKFVTERAYENPKFVEDLVRDIAMRLNEDDRIVAYTLEAENFESIHNHSAYALVERDKRRAS

SEQ ID NO: 13737 - protein, 222 aa, unidentified
  source 1..222: note = Raoultella electrica
  REGION 1..222: note = tr|A0A514EP26|A0A514EP26_9ENTR GTP cyclohydrolase 1; OS = Raoultella electrica OX=1259973 GN=folE PE=3 SV=1
MSALSKEAILVHEALVARGLETPLRPPVEEIDNETRKSLIAGHMTEIMQLLNLDLTDDSLMETPRRIAKMYVDEIFSGLDYARFPKITVIENKMQVDEMVTVRDITLTSTCEHHFVTIDGKATVAYIPKDSVIGLSKINRIVQFFSQRPQVQERLTQQILTALQTLLGTSNVAVSIDAVHYCVKARGIRDATSATTTTSLGGLFKSSQNTRQEFLRAVRHHN

SEQ ID NO: 13738 - protein, 222 aa, Raoultella ornithinolytica
  REGION 1..222: note = tr|A0A4R2XXF3|A0A4R2XXF3_RAOOR GTP cyclohydrolase 1; OS = Raoultella ornithinolytica OX=54291 GN=folE PE=3 SV=1
MSSLSKEAILVHEALVARGLETPLRPPVQEIDNETRKRLIAGHMTEIMQLLNLDLSDDSLMETPHRIAKMYVDEIFSGLDYARFPKITVIENKMQVDEMVTVRDITLTSTCEHHFVTIDGKATVAYIPKDSVIGLSKINRIVQFFSQRPQVQERLTQQILTALQTLLGTSNVAVSIDAVHYCVKARGIRDATSATTTTSLGGLFKSSQNTRQEFLRAVRHHS

SEQ ID NO: 13739 - protein, 222 aa, Raoultella ornithinolytica
  REGION 1..222: note = tr|A0A1Y6GKR2|A0A1Y6GKR2_RAOOR GTP cyclohydrolase 1; OS = Raoultella ornithinolytica OX=54291 GN=folE PE=3 SV=1
MSALSKEAILVHEALVARGLETPLRPPVQEIDNETRKSLIAGHMTEIMQLLNLDLTDDSLMETPRRIAKMYVDEIFSGLDYARFPKITVIENKMQVDEMVTVRDITLTSTCEHHFVTIDGKATVAYIPKDSVIGLSKINRIVQFFSQRPQVQERLTQQILTALQTLLGTSNVAVSIDAVHYCVKARGIRDATSATTTTSLGGLFKSSQNTRQEFLRAVRHHN

SEQ ID NO: 13740 - protein, 76 aa, Raoultella planticola
  REGION 1..76: note = tr|A0A0D8TWR5|A0A0D8TWR5_RAOPL GTP cyclohydrolase (Fragment) OS=Raoultella planticola OX=575 GN=folE PE=4; SV = 1
MSALSKEAILVHEALVARGLETPLRPPVQEIDNETRKSLIAGHMTEIMQLLNLDLTDDSLMETPRRIAKMYVDEIF

SEQ ID NO: 13741 - protein, 222 aa, Raoultella planticola; identical to SEQ ID NO: 13739
  REGION 1..222: note = tr|A0A2X2ED43|A0A2X2ED43_RAOPL GTP cyclohydrolase 1; OS = Raoultella planticola OX=575 GN=folE PE=3 SV=1

SEQ ID NO: 13742 - protein, 222 aa, Raoultella sp.; identical to SEQ ID NO: 13738
  REGION 1..222: note = tr|A0A509BVK5|A0A509BVK5_9ENTR GTP cyclohydrolase 1; OS = Raoultella sp. NCTC 9189 OX=2583577 GN=folE PE=3 SV=1

SEQ ID NO: 13743 - protein, 222 aa, Raoultella sp.
  REGION 1..222: note = tr|A0A4R3ZNY4|A0A4R3ZNY4_9ENTR GTP cyclohydrolase 1; OS = Raoultella sp. BIGb0138 OX=2485115 GN=folE PE=3 SV=1
MSALSKEAILVHEALVARGLETPLRPPVQEIDNETRKRLIAGHMTEIMQLLNLDLSDDSLMETPHRIAKMYVDEIFSGLDYARFPKITVIENKMQVDEMVTVRDITLTSTCEHHFVTIDGKATVAYIPKDSVIGLSKINRIVQFFSQRPQVQERLTQQILTALQTLLGTSNVAVSIDAVHYCVKARGIRDATSATTTTSLGGLFKSSQNTRQEFLRAVRHHN

SEQ ID NO: 13744 - protein, 309 aa, Raoultella terrigena
  REGION 1..309: note = tr|A0A3P8M2J9|A0A3P8M2J9_RAOTE GTP cyclohydrolase FolE2 OS=Raoultella terrigena OX=577 GN=folE2 PE=3 SV=1
MTLRKTLCPAMLPDVQSAKVASDAESLSWVGMEHIDLPVEIAGRPVSARVNAGINLLSSTDAEKGIHMSRLYLLLDELTQHEITPALLGTVLEGFLKSHRGRSDEASIDITGELLLSRKSLNSNHFGWKAYPIHLRAELNKGLTVTLKAGIPYSSTCPASAALSRHVAGLQFRSDFGNRIDRLPVEEVAEWLTDKGMPATPHSQRSWAWVTVWLHTDADSFPVNDVIDYAEIALGTAVQTVVKRSDEQAFAVANGQNLMFCEDAARRLSKAFHAAPFCEDFEIHVEHQESLHAHNAVARIYRKGTKNVT

SEQ ID NO: 13745 - protein, 222 aa, Raoultella terrigena; identical to SEQ ID NO: 13738
  REGION 1..222: note = tr|A0A1V2BQS2|A0A1V2BQS2_RAOTE GTP cyclohydrolase 1; OS = Raoultella terrigena OX=577 GN=folE PE=3 SV=1

SEQ ID NO: 13746 - protein, 235 aa, unidentified; identical to SEQ ID NO: 7301
  source 1..235: note = Raphidiopsis brookii
  REGION 1..235: note = tr|D4TRY5|D4TRY5_9CYAN GTP cyclohydrolase 1; OS = Raphidiopsis brookii D9 OX=533247 GN=folE PE=3 SV=1

SEQ ID NO: 13747 - protein, 235 aa, unidentified; identical to SEQ ID NO: 7302
  source 1..235: note = Raphidiopsis curvata
  REGION 1..235: note = tr|A0A1Z4VCB7|A0A1Z4VCB7_9CYAN GTP cyclohydrolase 1; OS = Raphidiopsis curvata NIES-932 OX=1973482 GN=folE PE=3; SV = 1

SEQ ID NO: 13748 - protein, 188 aa, Rarobacter faecitabidus
  REGION 1..188: note = tr|A0A542ZTI9|A0A542ZTI9_RARFA GTP cyclohydrolase 1; OS = Rarobacter faecitabidus OX=13243 GN=folE PE=3 SV=1
MAVDQERIAAAVREILLAVGEDPDRDGLRETPERVARSYAEVFSGLADDPAEVLETVFDIDHDEMILVKDIAVYSTCEHHLVPFHGVAHVAYIPSAQGHVTGLSKLARLVDVYAKRPQVQERLTTQIAEALVASLQPRGVAVVVECEHMCMSMRGVRKPGAKTVTSAVRGQMRDPATRAEVMALILGR

SEQ ID NO: 13749 - protein, 188 aa, Rarobacter incanus
  REGION 1..188: note = tr|A0A542SP74|A0A542SP74_9MICO GTP cyclohydrolase 1; OS = Rarobacter incanus OX=153494 GN=folE PE=3 SV=1
MAVDTERVAAAVREILLAVGEDPDRDGLRETPQRVARAYAEVFAGLGQSPADVLETVFDIDHDEMILVKDISVYSTCEHHLVPFHGVAHVAYIPSEQGSVTGLSKLARLVDVYAKRPQVQERLTTQIAEALVEYLHPRGVAVVLECEHLCMSMRGVRKPGAKTVTSAVRGQMRNPATRAEVMGLIHGR

SEQ ID NO: 13750 - protein, 197 aa, Rathayibacter caricis
  REGION 1..197: note = tr|A0A2T4UQF4|A0A2T4UQF4_9MICO GTP cyclohydrolase 1; OS = Rathayibacter caricis DSM 15933 OX=1328867 GN=folE PE=3; SV = 1
MAVDRARIEAAVVELLAAIGDDPGREGLASTPRRFAEAYEEFFGESDVDPASHLDETFAVVEGEATAHPDGQTVIVRDLAFRSVCEHHLLPFVGVAHIAYRAGERVVGLGRLPRVVETVASRLQLQERLTEQIADVIQTGLAPEGVVVVVDAEHGCVRMRGPRQTRSSTVTVAARGTLAEPAARAEIIALIGAARGE

SEQ ID NO: 13751 - protein, 196 aa, Rathayibacter festucae
  REGION 1..196: note = tr|A0A3Q9UZS6|A0A3Q9UZS6_9MICO GTP cyclohydrolase 1; OS = Rathayibacter festucae DSM 15932 OX=1328866 GN=folE; PE = 3 SV=1
MPVDRARIEAAVAELLAAIGEDPGREGLSTTPQRFADSYEEFFGEFDLDPASHLAETFAVVEEGEQPPATQTVVVRDLAFRSVCEHHLLPFAGVAHIAYRAGERVVGLGKLPRVVETVASRPQLQERLTEQIADVLDAGLSPEGVLVVVDAEHGCVRLRGARQRASSTVTVAARGTLADPAARAEIIALIGAAREA

SEQ ID NO: 13752 - protein, 196 aa, Rathayibacter iranicus
  REGION 1..196: note = tr|A0A316B422|A0A316B422_9MICO GTP cyclohydrolase 1; OS = Rathayibacter iranicus NCPPB 2253 = VKM Ac-1602; OX = 1328868 GN=folE PE=3 SV=1
MPVDKARIEAAVTEILAAIGENPGREGLVATPRRVAAAYEEFFTDFDTDAAAQLTETFAVVEDGQEAPLQQTIIVRDLVFRSVCEHHLLPFVGVVHIAYRPQERVVGLGRLPRVVDTVASRPQIQERLTEQIADALDDGLAPEGVLVVVDAEHGCVRMRGPRQAASSTVTVAARGSLAETAARAEIIALIGAARGR

SEQ ID NO: 13753 - protein, 195 aa, unidentified
  source 1..195: note = Rathayibacter oskolensis
  REGION 1..195: note = tr|A0A1X7NZN4|A0A1X7NZN4_9MICO GTP cyclohydrolase 1; OS = Rathayibacter oskolensis OX=1891671 GN=folE PE=3 SV=1
MPVDKARIEAAVVELLAAIGEDPGREGLASTPKRFAEAYEEFFGEFDLDPASHLVETFAVVEGGAPVDAQTVIIRDLAFRSVCEHHLLPFAGVAHIAYRAGDRVVGLGKLPRIVETVASRPQLQERLTEQVADVIDTGLSPEGVLVVVDAEHGCVRMRGARQTSSSTVTVAARGTLAEPAARAEIIALIGAARGE

SEQ ID NO: 13754 - protein, 196 aa, Rathayibacter rathayi
  REGION 1..196: note = tr|A0A286HC54|A0A286HC54_RATRA GTP cyclohydrolase 1; OS = Rathayibacter rathayi NCPPB 2980 = VKM Ac-1601; OX = 1328865 GN=folE PE=3 SV=1
MPVDKTRIEAAVAEILAAIGEDPGREGLTETPRRFAEAYEEFFGGFDADAAAELTETFAVVEGGQESSLDQTVIVRDLAFRSVCEHHLLPFLGVAHIAYRPRERVVGLGRLPRVVETVASRPQIQERMTEQIADALEQGLDPEGVLVVVDAEHGCVRMRGPRQTASSTVTVAARGSLADPAARAEIIALIGAARGE

SEQ ID NO: 13755 - protein, 196 aa, Rathayibacter rathayi; identical to SEQ ID NO: 13754
  REGION 1..196: note = tr|A0A2S5XV87|A0A2S5XV87_RATRA GTP cyclohydrolase 1; OS = Rathayibacter rathayi OX=33887 GN=folE PE=3 SV=1

SEQ ID NO: 13756 - protein, 194 aa, Rathayibacter sp.
  REGION 1..194: note = tr|A0A0Q5AFN8|A0A0Q5AFN8_9MICO GTP cyclohydrolase 1; OS = Rathayibacter sp. Leaf294 OX=1736326 GN=folE PE=3 SV=1
MPVDKARIEAAVVELLAAIGEDPGREGLTSTPKRFAEAYAEFFGEFELDPASHLDETFAVVEGGRAEQQTVIVRDLSFRSVCEHHLLPFVGVAHIAYRAGDRVIGLGKLPRIVETVASRPQLQERLTEQVAEVIDSGLNPEGVLVVVDAEHGCVRMRGARQTASSTVTVAARGTLAEPAARAEIIALIGVARGE

SEQ ID NO: 13757 - protein, 196 aa, Rathayibacter sp.
  REGION 1..196: note = tr|A0A2S5XJE9|A0A2S5XJE9_9MICO GTP cyclohydrolase 1; OS = Rathayibacter sp. AY1C5 OX=2080538 GN=folE PE=3 SV=1
MPVDKARIEAAVAEILAAIGDDPGREGLLDTPRRFAEAYEEFFGGFDDDAAAQLTETFAVVEGGQESPLDQTVVVRDLAFRSVCEHHLLPFLGVAHIAYRPRERVVGLGRLPRVVETVASRPQIQERMTEQIADALEQGLAPEGVLVVVDAEHGCVRMRGPRQTASSTVTVAARGSLADPAARAEIIALIGAARGE

SEQ ID NO: 13758 - protein, 196 aa, unidentified
  source 1..196: note = Rathayibacter tanaceti
  REGION 1..196: note = tr|A0A162GFD2|A0A162GFD2_9MICO GTP cyclohydrolase 1; OS = Rathayibacter tanaceti OX=1671680 GN=folE PE=3 SV=1
MPVDKARIEAAVAEILAAIGDDPGREGLAATPRRVAEACEEFFGEFGADAAEQLTETFAVVEGGQESALDQTVIVRDLAFRSVCEHHLLPFLGFAHIAYRPRERVVGLGRLPRVVDTVASRPQLQERLTEQIADALVEGLAPEGVLVVVDAEHGCVRMRGPRQTASSTVTVAARGSLAEPAARAEIVALIGAPRGQ

SEQ ID NO: 13759 - protein, 271 aa, unidentified
  source 1..271: note = Rathayibacter tanaceti
  REGION 1..271: note = tr|A0A168G8D2|A0A168G8D2_9MICO Dinuclear metal center YbgI/SA1388 family protein OS=Rathayibacter tanaceti OX=1671680 GN=ACH61_00982 PE=4 SV=1
MPLLRDVHAVIDRLWPEAAAESWDTPGLVTGDPDSSVERILLTVDVVADTVSEAVDGGFQLLVAHHPLLLRGVTSIAEDGYKGRLLAELIRGGCALVSAHTNADIVTDGVSDVIATRLGLTGTTPLVPGAEPSIGLGRVGDLPEEVTLGRLAAAVAELLPATAGGVRAAGGYETPVRRVSLCGGAGDSLLDAAAVRTSDVYITADLRHHPASEAREKALHGTGPALIDVSHWASEWLWLDVAAAALREALPTVAVEVSETRTDPWDFAIVH

SEQ ID NO: 13760 - protein, 196 aa, Rathayibacter toxicus
  REGION 1..196: note = tr|A0A2S5Y4H9|A0A2S5Y4H9_9MICO GTP cyclohydrolase 1; OS = Rathayibacter toxicus OX=145458 GN=folE PE=3 SV=1
MPVDKARIEAAVAEILAAIGEDPTRAGIALTPRRFAEAYEEFFAEVDCDPYDALDETFAVSDSGEEALLEQTVIVRHLAFRSVCEHHLLPFAGVAHLAYSPRERVVGLGRLSRVVAAVASRLQLQERMTEQVVDVLDRGLSPRGALVVLDAEHGCVRMRGPRETSSSTITIAARGCLAEPAARAEIIALLGAARRE

SEQ ID NO: 13761 - protein, 196 aa, Rathayibacter toxicus
  REGION 1..196: note = tr|A0A0C5BIU7|A0A0C5BIU7_9MICO GTP cyclohydrolase 1; OS = Rathayibacter toxicus OX=145458 GN=folE PE=3 SV=1
MPVDKARIEAAVAEILAAIGEDPTRAGIALTPRRFAEAYEEFFAEVDCDPYDALDETFAVSDSGEEALLEQTVIVRHLAFRSVCEHHLLPFAGVAHLAYSPRERVVGLGRLSRVVATVASRLQLQERMTEQVVDVLDRGLSPRGALVVLDAEHGCVRMRGPRETSSSTITIAARGCLAEPAARAEIIALLGAARRE

SEQ ID NO: 13762 - protein, 196 aa, Rathayibacter tritici
  REGION 1..196: note = tr|A0A160KUK0|A0A160KUK0_9MICO GTP cyclohydrolase 1; OS = Rathayibacter tritici OX=33888 GN=folE PE=3 SV=1
MPVDKARIEAAVAEILAAIGDDPGREGLIDTPRRCAEAYEEFFGGFDADAAAQLSETFAVVEGGQESPVDQTVIVRDLAFRSVCEHHLLPFLGIAHIAYRPRQRVVGLGRLPRMVETVASRPQIQERMTEQIADALEQGLDPEGALVVVDAEHDCVRMRGPRQTDSSTVTVAARGSLADPAARAEIIALIGAARGE

SEQ ID NO: 13763 - protein, 231 aa, Reichenbachiella agariperforans
  REGION 1..231: note = tr|A0A1M6TPI0|A0A1M6TPI0_9BACT GTP cyclohydrolase 1; OS = Reichenbachiella agariperforans OX=156994 GN=folE PE=3; SV = 1
MKQKETMSNTPLDNDDILDDHVASSYDTPLRPDAFEMDDELKKELIAKHFKEIMQILGMDLTDDSLAGTPRRVAKMYVEEVFSGLNPKNKPKARLFENKFGYNQMLVEKDITFYSHCEHHFVPIYGKAHVAYISSGEVIGLSKINRIVQYYSKRPQVQERLTVQIANELRKVLKTEDVGVVIDANHMCVSSRGVGDTNSKTGTAHFSGKFLEEKYKNEFLNYINSPGNGMV

SEQ ID NO: 13764 - protein, 227 aa, Reichenbachiella faecimaris
  REGION 1..227: note = tr|A0A1W2GEM1|A0A1W2GEM1_9BACT GTP cyclohydrolase 1; OS = Reichenbachiella faecimaris OX=692418 GN=folE PE=3 SV=1
MKQKETMSNTPSDDVIDDLDHVATSFDTPLRADAFEMDDELKIELISKHFKEIMQVLGLDLNDDSLKGTPNRVAKMYVQEVFSGLNPKNKPHARLFENKFGYDQMLVEKEITFYSHCEHHFVPIYGKAHVAYISSGKVIGLSKINRIVQYYAKRPQVQERMTVQIANELRSVLKTEDVAVVIDANHMCVSSRGVGDTNSKTGTAHFSGKFTNEDTKKEFLNYINTPA

SEQ ID NO: 13765 - protein, 225 aa, Reichenbachiella sp.
  REGION 1..225: note = tr|A0A2G5L552|A0A2G5L552_9BACT GTP cyclohydrolase 1; OS = Reichenbachiella sp. 5M10 OX=1889772 GN=folE PE=3 SV=1
MSNTPLDNDDILDDHVASSYDTPLRPDAFEMDDELKKELIAKHFKEIMQILGMDLTDDSLAGTPRRVAKMYVEEVFSGLNPKNKPKARLFENKFGYNQMLVEKDITFYSHCEHHFVPIYGKAHVAYISSGEVIGLSKINRIVQYYSKRPQVQERLTVQIANELRKVLKTEDVGVVIDANHMCVSSRGVGDTNSKTGTAHFSGKFLEEKYKNEFLNYINSPGNGMV

SEQ ID NO: 13766 - protein, 213 aa, Reinekea blandensis
  REGION 1..213: note = tr|A4BK59|A4BK59_9GAMM GTP cyclohydrolase 1; OS = Reinekea blandensis MED297 OX=314283 GN=folE PE=3 SV=1
MAVSSEAKAVRDRLIEMGLETPMVEQTLTKAERQSRIESLMTDVMGALALDLSDDSLAETPARIAKMFVNEIFSGLDYEHFPKITLIENKMSVSEMIRVKDIDLTSTCEHHFVTIDGTADVAYIPAKRIIGLSKINRIVRFFAQRPQVQERLNQQVLVALQTLLGTEDVAVRMNAVHYCVKARGVMDSTSSTETLSLGGAFLNDRDVRRDFVR

SEQ ID NO: 13767 - protein, 28 aa, Reinekea blandensis
  REGION 1..28: note = tr|A4BK58|A4BK58_9GAMM GTP cyclohydrolase I; OS = Reinekea blandensis MED297 OX=314283 GN=folE PE=4 SV=1
MDFFLTHYGNIRGLIDDGCRSDGCQNDE

SEQ ID NO: 13768 - protein, 213 aa, unidentified
  source 1..213: note = Reinekea forsetii
  REGION 1..213: note = tr|A0A2K8KTH2|A0A2K8KTH2_9GAMM GTP cyclohydrolase 1; OS = Reinekea forsetii OX=1336806 GN=folE PE=3 SV=1
MAISVEAHAVHKRLLELGLETPVMEQKLTPAAQIEKIEGLMHQVMGALALDLTDDSMAETPHRIAKMYVNEIFSGLDYNKFPKITLIENKMSATEMIRIRDIELTSTCEHHFVTIDGFADVAYIPGQRIIGLSKINRIVRFFAQRPQVQERLNQQVLVALQTLLDTEDVAVKINATHYCVKARGVMDSHSSTETLSLGGQFLTDRDLRRDFVR

SEQ ID NO: 13769 - protein, 213 aa, Reinekea marinisedimentorum
  REGION 1..213: note = tr|A0A4R3IC64|A0A4R3IC64_9GAMM GTP cyclohydrolase 1; OS = Reinekea marinisedimentorum OX=230495 GN=folE PE=3 SV=1
MPISAEALAVQKRLIELGLETPMVEQTLSEAEQKSRIEVLMKEVMQVLALDLSDDSLAETPERMAKMYVSEIFSGLNYENFPKITLIENKMGVREMIRVKDICLTSTCEHHFVTIDGTADVAYIPKDRIIGLSKINRIVGFFAQRPQVQERLNQQVLIALQTLLGTDDVAVKMNATHYCVKARGVMDSTSSTETLSLGGKFLSDRDLRRDFVR

SEQ ID NO: 13770 - protein, 213 aa, Reinekea sp.
  REGION 1..213: note = tr|A0A5C8ZB04|A0A5C8ZB04_9GAMM GTP cyclohydrolase 1; OS = Reinekea sp. SSH23 OX=2593301 GN=folE PE=3 SV=1
MSISAEALAVHNKLIELGMETPMLQQRLKTSEQKAKIETLMREVMQVLALDLSDDSLSETPERIAKMYVSEVFSGLSYENFPKITLIENKMGVSEMIRVKDIGLTSTCEHHFVTIDGTADVAYIPDQKIIGLSKINRIVRFFAQRPQVQERLNQQVLIALQTLLGTDNVAVKMNATHFCVKSRGVMDSTSSTETLSLGGRFLTDKDLRREFSL

SEQ ID NO: 13771 - protein, 201 aa, Renibacterium salmoninarum
  REGION 1..201: note = tr|A9WUR0|A9WUR0_RENSM GTP cyclohydrolase 1; OS = Renibacterium salmoninarum (strain ATCC 33209 / DSM 20767 / JCM 11484 / NBRC 15589 / NCIMB 2235) OX=288705; GN = folE PE= 3 SV=1
MCDVDEEAQVPAKSVVDLARIEAAVREILIAIGENPDRSGLMETPQRVARAYSEVFSGLNQDPAEVLSRTFDISHQELVLVKDIPFYSTCEHHLVPFHGSAHVGYIPSADGKVTGLSKLARLVDVFAKRPQVQERLTTQIVDALVEHLKPRGAIVVVECEHMCMSMRGVRKPGAKTVTSAVCGILHDPATRAEAMSLILGK

SEQ ID NO: 13772 - protein, 208 aa, unidentified
  source 1..208: note = Reyranella soli
  REGION 1..208: note = tr|A0A512NJR9|A0A512NJR9_9PROT GTP cyclohydrolase 1; OS = Reyranella soli OX=1230389 GN=folE PE=3 SV=1
MNKMVKKSEMVSLATGLTRPSRDEAEAAVRTLIRWAGDDPDREGLVGTPDRVVRSYEEFFRGYDEDPREMLQRTFEEVEGYDEVVVLRDIRLESHCEHHMVPIIGKVHVGYLPDKRVVGISKLARVVDAFAFRLQIQEKLTAQIANTLQEVLQPRGVAVVIEAAHQCMTTRGVHKSDVAMVTSRMLGAFRDNGETRREFLTMIGRTSV

SEQ ID NO: 13773 - protein, 214 aa, Reyranella sp.
  REGION 1..214: note = tr|A0A5C5SKH6|A0A5C5SKH6_9PROT GTP cyclohydrolase 1; OS = Reyranella sp. CPCC 100927 OX=2599616 GN=folE PE=3 SV=1
MNKVLKRPDLGSAAVAASQVKPSRAEAEEAVRTLIRWAGDDPDREGLVGTPDRVVRSYEEFFAGYAEDPREILARTFEETDGYDEMVVLRDIRLESYCEHHIVPIIGKAHVGYLPAHRVVGISKLARIVEAYAKRLQIQEKMTAQIANCIQEVLEPRGVAVVIEAAHQCMTTRGIRKPGVAMVTSRMLGSFRDDPSTRREFLAMIGKNGAGGYA

SEQ ID NO: 13774 - protein, 208 aa, Reyranella sp.
  REGION 1..208: note = tr|A0A521RR64|A0A521RR64_9PROT GTP cyclohydrolase 1; OS = Reyranella sp. OX=1929291 GN=folE PE=3 SV=1
MNKMAKPREIVSLATGLPRPSREEAEAAVRTLIRWAGDDPGREGLAGTPDRVVRSYEEFFAGYDQDPRDMLQRTFEEVEGYDEVVALRDIRLESHCEHHMVPIIGRVHVGYLPDKRVVGISKLARVVDAYALRLQIQEKLTAQIANTLQEVLQPRGVAVVIEAAHQCMTTRGVHKSDVTMVTSRMLGAFRDNGETRREFLSMIGRTSV

SEQ ID NO: 13775 - protein, 214 aa, Rheinheimera nanhaiensis
  REGION 1..214: note = tr|I1DWR4|I1DWR4_9GAMM GTP cyclohydrolase 1; OS = Rheinheimera nanhaiensis E407-8 OX=562729 GN=folE PE=3; SV = 1
MLSQEAILVRSALEAQGLETPMLENGLSRDQKYSKISALMTEVVSTLGLDLQDDSLSETPHRIAKMYVDEIFCGLDYKNFPKIALIDNKMQVKEMVKVKDISFTSTCEHHFVTIDGSATVAYIPEKRIIGLSKINRIVRFFAQRPQVQERLTQQILVALQTLLQTKNVAVTMDAVHYCVKSRGVMDVNSKTQTTALGGIFKDDGRTRAEFLARY

SEQ ID NO: 13776 - protein, 214 aa, Rheinheimera pacifica
  REGION 1..214: note = tr|A0A1H6MTI2|A0A1H6MTI2_9GAMM GTP cyclohydrolase 1; OS = Rheinheimera pacifica OX=173990 GN=folE PE=3 SV=1
MLSEEAVLVRSALEALGLETPMLDNGLSRDQKYDKINSLMAEVVSTLGLDLRDDSLSETPHRIAKMYVDEIFGGLNYANFPKMALIENKMQVKEMVKVKDISFTSTCEHHFVTIDGYATVAYIPEKRIIGLSKINRIVRFFAQRPQVQERLTQQVLVAMQTLLQTQNVAVTMEAVHYCVKSRGVMDVNSKTQTTALGGIFKDDGRTRAEFLARY

SEQ ID NO: 13777 - protein, 304 aa, Rheinheimera pacifica
  REGION 1..304: note = tr|A0A1H6NB34|A0A1H6NB34_9GAMM GTP cyclohydrolase FolE2 OS=Rheinheimera pacifica OX=173990 GN=folE2 PE=3 SV=1
MHFPALADTAHAASPAFAVALDNVGMQHIDLILTLSDLPQHPLAVKADVSVNLPQPDKKGIHMSRLYQHLYQWVQVQSVSPATLHDLLTILLQSQQECASASASLHLSAQLLLRRPALKTPALAGFKAYPLTISATLINNELNIELSVVIGYSSTCPCSASLSRQLLSEQFQQQFAGQPVVDTALASQWLLQHASLATPHSQRSTAQLRIKLNPAQHDFGILPLIDRAEQALATPLQTAVKRADEQEFARLNGANLMFVEDAARRLHAALSQHYDAFSIAVAHHESLHPHDAVANVTFAANSNG

SEQ ID NO: 13778 - protein, 215 aa, unidentified
  source 1..215: note = Rheinheimera salexigens
  REGION 1..215: note = tr|A0A1E7Q537|A0A1E7Q537_9GAMM GTP cyclohydrolase 1; OS = Rheinheimera salexigens OX=1628148 GN=folE PE=3 SV=1
MLSKEATLVRDTLIARGLETPMLDNGLSRDEKYTKVRQLMSEVVSTLGLDLQDDSLNETPHRIAKMYVDEIFGGLNYANFPKMSLIDNKMQVSEMIKVKDISFTSTCEHHFVTIDGYAMVAYIPSGRIIGLSKINRIVRFFAQRPQVQERLTQQVLVALQTLLETDDVAVTMEAVHYCVKSRGVMDVNSKTQTTALGGSFKDDARTRAEFLANNG

SEQ ID NO: 13779 - protein, 214 aa, Rheinheimera sp.
  REGION 1..214: note = tr|A0A4P6VVF7|A0A4P6VVF7_9GAMM GTP cyclohydrolase 1; OS = Rheinheimera sp. D18 OX=2545632 GN=folE PE=3 SV=1
MLSDEAILVRRALEAQGLETPMQHNGLSRDQKYNKINALMSEVVSTLGLDLADDSLRETPHRIAKMYVDEIFGGLDYANFPKMSLIENKMQVKEMVKVKEISFTSTCEHHFVTIDGTATVAYLPDARIIGLSKINRIVRFFSQRPQVQERLTQQILVALQTLLQTDNVAVTMEAVHYCVKSRGVMDVTSKTQTTALGGTFKEDARTRAEFLARY

SEQ ID NO: 13780 - protein, 213 aa, Rheinheimera sp.
  REGION 1..213: note = tr|A0A486XRC7|A0A486XRC7_9GAMM GTP cyclohydrolase 1; OS = Rheinheimera sp. BAL341 OX=1708203 GN=folE PE=3 SV=1
MLSDEAILVRSALEAQGLETPMLDNGLSRDEKYKKISALMTEIVSTLGLDLQDDSLNETPHRIAKMYVDEVFSGLDYRNFPKIALIENKMQVNEMVKVKDISFTSTCEHHFVTIDGYATVAYIPNQRIIGLSKINRIVRFFAQRPQVQERLTQQILIALQTLLQTKNVAVTMEAIHYCVKSRGVMDVNSKTQTTALGGIFKDDGRTRAEFLAR

SEQ ID NO: 13781 - protein, 214 aa, unidentified
  source 1..214: note = Rheinheimera tuosuensis
  REGION 1..214: note = tr|A0A285J767|A0A285J767_9GAMM GTP cyclohydrolase 1; OS = Rheinheimera tuosuensis OX=1323745 GN=folE PE=3 SV=1
MLSEEAILVRSALEAQGLETPMLDNGLSRDEKYQKISQLMTEVVSTLGLDLTDDSLSETPHRIAKMYVDEIFGGLNYQHFPKIALIENKMQVREMVKVKDISFTSTCEHHFVTIDGSATVAYIPQGRIIGLSKINRIVRFFAQRPQVQERLTQQILLALQTLLQTKDVAVTMEAVHYCVKSRGVMDMNSKTQTTALGGIFKDDGRTRAEFLARY

SEQ ID NO: 13782 - protein, 271 aa, Rhizobacter sp.
  REGION 1..271: note = tr|A0A0Q7A7Y2|A0A0Q7A7Y2_9BURK GTP cyclohydrolase FolE2 OS=Rhizobacter sp. Root404 OX=1736528 GN=folE2 PE=3; SV = 1
MTNLKDALHIPDTQSARDERHLAIQRVGVKSVRYPLQLRIGNTVSPTVAVWSLDVALPAEQKGTHMSRFVAWLDGLDKPLDAPALRAEMALMLDKLHATEGVIDAQFPFFLRKRAPVTGVQSLLEYQGRWIAEARAGKGSPAGAVAPVTIWAEVVVPVKSLCPCSKEISDYGAHNQRSHVTIRVELLGDIGWQELVRFAEDSASSEIWPMLKRADEKWVTERAYENPKFVEDLVRDVALRLNTDARIGRYSVDVENFESIHNHSAFARIER

SEQ ID NO: 13783 - protein, 266 aa, Rhizobacter sp.
  REGION 1..266: note = tr|A0A1M7QWY4|A0A1M7QWY4_9BURK GTP cyclohydrolase FolE2 OS=Rhizobacter sp. OV335 OX=1500264 GN=folE2 PE=3; SV = 1
MNHMTNLKDALHIPDTQSERDERHLAIQRVGVKDVRYPLQLKFGKTVQPTIGQWELDVALPAEQKGTHMSRFVAWLDALHEPLDADGLKLRFAEMLEKLHATHGRVEVKFPFFIRKRAPVSGVESLLDYQGSWVAEMRDGQPVVWSQVLVPVKSLCPCSKEISDYGAHNQRSHVTIRAELLQDVPWGELVRFAENAASSEIWPMLKRADEKWVTEHAYENPKFVEDLVRDVALALNGDARIGRYTVDVENFESIHNHSAFARIERL

SEQ ID NO: 13784 - protein, 204 aa, unidentified
  source 1..204: note = Rhizobiaceae bacterium
  REGION 1..204: note = tr|A0A4U6A1U7|A0A4U6A1U7_9RHIZ GTP cyclohydrolase 1; OS = Rhizobiaceae bacterium LC148 OX=1120689 GN=folE PE=3; SV = 1
MDAIVKNFPASSQTQARPTQQEAEEAVRVLLRWAGDDPMREGLLDTPKRVATAYMELFGGYEQSPEEVLGRTFEEVSGYDDIVLVRDIPFHSHCEHHMLPIIGKAHVAYLPNGRVLGLSKIARVVDIFARRLQTQENMTAQIANVIQDVLKPRGVAVMLEAKHMCMEMRGVEKQGSDTLTTTFTGEFKGNAADQARFLSLIRGR

SEQ ID NO: 13785 - protein, 204 aa, unidentified
  source 1..204: note = Rhizobiaceae bacterium
  REGION 1..204: note = tr|A0A4Q3GX35|A0A4Q3GX35_9RHIZ GTP cyclohydrolase 1; OS = Rhizobiaceae bacterium OX=1913961 GN=folE PE=3 SV=1
MNTITDHEQFSAAGDDAVPHEVQESIRALIRWAGDDPAREGLRDTPRRVARAWREYCRGYDEDPGEHLARTFDEVGGYDEIVMLRAIPFQSHCEHHMAPITGTATIAYLPAGRVVGISKLARVLNGYASRLQVQERLTAQVAQAIWDELAPRGVAVMIEAQHGCMTGRGVKTSGVGMITSRMLGCFLDDPQSRNEVLSLMNSRH

SEQ ID NO: 13786 - protein, 237 aa, unidentified
  source 1..237: note = Rhizobiales bacterium
  REGION 1..237: note = tr|A0A258J2F4|A0A258J2F4_9RHIZ GTP cyclohydrolase 1; OS = Rhizobiales bacterium 32-66-11 OX=1970549 GN=folE PE=3; SV = 1
MDAVVKLLRAQAENEAKARKHVKHLQAQAKRHDDAPQDAAADEAHDPARPSKREAEAAVRTLLAYIGEDPDREGLLETPHRVVKAYGELFSGYRHDAAEALDRTFGEIGNFDDFVLVRDIPFYSHCEHHMVPFVGKAHVAYFPVERVVGLSKIARVVDIYAKRLQTQEHLTSQIISALDETLKPRGVAVMIEAEHMCMAMRGITKAGVSTITSQFTGAFRDDPAEQVRFITLVRARG

SEQ ID NO: 13787 - protein, 197 aa, unidentified
  source 1..197: note = Rhizobiales bacterium
  REGION 1..197: note = tr|A0A1H4QS48|A0A1H4QS48_9RHIZ GTP cyclohydrolase 1; OS = Rhizobiales bacterium GAS188 OX=1884351 GN=folE PE=3; SV = 1
MTSPLRRPSREEAEAAVRTLIRWAGDDPTREGLVETPRRVVRAYEQLFDGYEKDPSHALARVFEEAGGYDDLVLVRDIPFFSHCEHHMLPFFGKAHVGYYSSSGVVGLSKLAHVIDIFSRRLQTQETMSAEIVQAIEESLMPRGVALLVEAEHLCMSMRGVRKVGASTVTTQFSGVFRDDPAEQAKFLTMLCQKTAG

SEQ ID NO: 13788 - protein, 204 aa, unidentified
  source 1..204: note = Rhizobium acidisoli
  REGION 1..204: note = tr|A0A0N1DKV4|A0A0N1DKV4_9RHIZ GTP cyclohydrolase 1; OS = Rhizobium acidisoli OX=1538158 GN=folE PE=3 SV=1
MDAIVKNFPQTNRDSDRPSQQEAEEAVRVLLRWAGENPTREGLIETPARVVKSYRELFAGYDMAPEDVLGRTFEEVAGYDDMVLVKDIPFFSHCEHHMVPIIGKAHVAYMPDGRVLGLSKIARVVEIYGRRLQTQETMTAQIARAIDDTLNPRGVAVMIEAEHMCMAMRGVQKQGSTTLTTTFTGTFKTEPADQARFMTMVRSR

SEQ ID NO: 13789 - protein, 204 aa, unidentified
  source 1..204: note = Rhizobium aethiopicum
  REGION 1..204: note = tr|A0A1C3XWG7|A0A1C3XWG7_9RHIZ GTP cyclohydrolase 1; OS = Rhizobium aethiopicum OX=1138170 GN=folE PE=3 SV=1
MDAIVKNFPQPNRDSDRPSQQEAEEAVRVLLRWAGDNPAREGLIETPARVAKAYRELFAGYDMAPEDVLGRTFEEVAGYDDMVLVKDIPFYSHCEHHMVPIIGKAHVAYMPDGRVLGLSKIARVVEIYGRRLQTQETMTAQIARAIDDTLNPRGVAVMIEAEHMCMAMRGVQKQGSTTLTTTFTGTFKTEPADQARFMSMVRSR

SEQ ID NO: 13790 - protein, 204 aa, unidentified
  source 1..204: note = Rhizobium album
  REGION 1..204: note = tr|A0A2U2DT26|A0A2U2DT26_9RHIZ GTP cyclohydrolase 1; OS = Rhizobium album OX=2182425 GN=folE PE=3 SV=1
MDAIVKNFPRTGQESGRPTQQEAEDAVRVLLRWAGDDPLREGLLDTPMRVAKAYRELFSGYEQSPEDVLGRTFEEVAGYDDMVLVRDIPFFSHCEHHVVPIIGKAHVAYLPEGRVLGLSKIARVVEIYGRRLQTQESMTAQIARAIDETLAPRGVAVMIEAEHMCMAMRGVQKQGSTTLTTTFTGAFKTDAAEQVRFMTMVRSR

SEQ ID NO: 13791 - protein, 206 aa, unidentified
  source 1..206: note = Rhizobium altiplani
  REGION 1..206: note = tr|A0A109JLI5|A0A109JLI5_9RHIZ GTP cyclohydrolase 1; OS = Rhizobium altiplani OX=1864509 GN=folE PE=3 SV=1
MDAIIKNFPQTPADLDADRPSQKEAEDAVRTLLRWAGDDPTREGLLDTPARVAKAYRELFAGYDMDPEDVLGRTFEEVAGYDDMVLVRDIPFFSHCEHHMVPIIGKAHVAYMPDGKVLGLSKIARVVEIYGRRLQTQETMTAQIAKAIDDTLTPRGVAVMIEAEHMCMAMRGVQKQGSTTLTTTFTGTFKTEPADQARFMSMVRSR

SEQ ID NO: 13792 - protein, 204 aa, unidentified
  source 1..204: note = Rhizobium anhuiense
  REGION 1..204: note = tr|A0A3S0Q2F2|A0A3S0Q2F2_9RHIZ GTP cyclohydrolase 1; OS = Rhizobium anhuiense OX=1184720 GN=folE PE=3 SV=1
MDAIVKNFPQTNRDSDRPSQQEAEEAVRVLLRWAGDDPTREGLLDTPARVVKSYRELFSGYDMAAEDVLGRTFEEVAGYDDMVLVKDIPFFSHCEHHMVPIIGKAHVAYMPDGRVLGLSKIARVVEIYGRRLQTQETMTAQIARAIDDTLNPRGVAVMIEAEHMCMAMRGVQKQGSTTLTTTFTGTFKTEPADQARFMTMVRSR

SEQ ID NO: 13793 - protein, 202 aa, unidentified
  source 1..202: note = Rhizobium anhuiense
  REGION 1..202: note = tr|A0A3S0RZ02|A0A3S0RZ02_9RHIZ GTP cyclohydrolase 1; OS = Rhizobium anhuiense OX=1184720 GN=folE PE=3 SV=1
MDAIVTNACPVAASERPTQHQAEEAVRTLIRWAGDDPSREGLLDTPKRVAKAYRELFSGYATEPEDVLSKTFSEVGGYNEMVLVRDIEFHSHCEHHMVPFHGIAHIAYIPEQGVLGLSKMARLVDLYARRLQTQETMTAQIAKALEESLRPKGVAVMIEAEHMCMAMRGLRKQGAKTLTTAFAGQFEASASDQARFIMLARG

SEQ ID NO: 13794 - protein, 204 aa, unidentified
  source 1..204: note = Rhizobium azibense
  REGION 1..204: note = tr|A0A4R7ZT07|A0A4R7ZT07_9RHIZ GTP cyclohydrolase 1; OS = Rhizobium azibense OX=1136135 GN=folE PE=3 SV=1
MDAIVKNFPQTSRDAERPSQKEAEDAIRVLLRWAGDDPSREGLIDTPTRVAKAYRELFAGYEMDPEDVLGRTFEEVAGYDDMVLVKDIPFYSHCEHHMVPIIGKAHVAYMPDGKVLGLSKIARVVEIYGRRLQTQETMTAQIAKAIDDTLAPRGVAVMLEAEHLCMAMRGVQKQGSTTLTTTFTGIFKAEPAEQARFMTMVRSR

SEQ ID NO: 13795 - protein, 204 aa, unidentified
  source 1..204: note = Rhizobium azibense
  REGION 1..204: note = tr|A0A4R3Q7K6|A0A4R3Q7K6_9RHIZ GTP cyclohydrolase 1; OS = Rhizobium azibense OX=1136135 GN=folE PE=3 SV=1
MDAIVKNFPQTSRDTERPSQKEAEEAIRVLLRWAGDDPSREGLIDTPARVAKAYRELFAGYEMDPEDVLGRTFEEVAGYDDMVLVKDIPFYSHCEHHMVPIIGKAHVAYMPDGKVLGLSKIARVVEIYGRRLQTQETMTAQIAKAIDDTLAPRGVAVMLEAEHMCMAMRGVQKQGSTTLTTTFTGTFKAEPAEQARFMTMVRSR

SEQ ID NO: 13796 - protein, 204 aa, unidentified
  source 1..204: note = Rhizobium esperanzae
  REGION 1..204: note = tr|A0A246DVZ0|A0A246DVZ0_9RHIZ GTP cyclohydrolase 1; OS = Rhizobium esperanzae OX=1967781 GN=folE PE=3 SV=1
MDAIVKNFPQPNRDSDRPSQQEAEEAVRVLLRWAGDDPTREGLIETPARVAKAYRELFAGYDMAPEDVLGRTFEEVAGYDDMVLVKDIPFYSHCEHHMVPIIGKAHVAYMPDGRVLGLSKIARVVEIYGRRLQTQETMTAQIARAIDDTLNPRGVAVLIEAEHMCMAMRGVQKQGSTTLTTTFTGTFKTEPADQARFMSMVRSR

SEQ ID NO: 13797 - protein, 204 aa, Rhizobium etli
  REGION 1..204: note = tr|F2AJ19|F2AJ19_RHIET GTP cyclohydrolase 1; OS = Rhizobium etli CNPAF512 OX=993047 GN=folE PE=3 SV=1
MDAIVKNFPQPNRDSDRPSQQEAEEAVRVLLRWAGDDPTREGLIETPARVAKAYRELFAGYDMAPEDVLGRTFEEVAGYDDMVLVKDIPFYSHCEHHMVPIIGKAHVAYMPDGRVLGLSKIARVVEIYGRRLQTQETMTAQIARAIDDTLQPRGVAVMIEAEHMCMAMRGVQKQGSTTLTTTFTGTFKTEPADQARFMNMVRSR

SEQ ID NO: 13798 - protein, 204 aa, Rhizobium etli
  REGION 1..204: note = tr|A0A0A8GCW9|A0A0A8GCW9_RHIET GTP cyclohydrolase 1; OS = Rhizobium etli bv. phaseoli str. IE4803 OX=1432049; GN = folE PE=3 SV=1
MDAIVKNFPQPNRDSDRPSQQEAEEAVRVLLRWAGDDPTREGLIETPARVAKAYRELFAGYDMAAEDVLGRTFEEVAGYDDMVLVKDIPFYSHCEHHMVPIIGKAHVAYMPDGRVLGLSKIARVVEIYGRRLQTQETMTAQIARAIDDTLQPRGVAVMIEAEHMCMAMRGVQKQGSTTLTTTFTGTFKTEPADQARFMSMVRSR

SEQ ID NO: 13799 - protein, 206 aa, unidentified
  source 1..206: note = Rhizobium favelukesii
  REGION 1..206: note = tr|W6RH48|W6RH48_9RHIZ GTP cyclohydrolase 1; OS = Rhizobium favelukesii OX=348824 GN=folE PE=3 SV=1
MDAIIKNFPQTPADLEADRPSRKEAEDAVRTLLRWAGDDPSREGLVDTPARVAKAYRELFAGYDMDPEDVLGRTFEEVAGYDDMVLVRDIPFFSHCEHHMVPIIGKAHVAYMPDGKVLGLSKIARVVEIYGRRLQTQETMTAQIAKAIDDTLSPRGVAVMIEAEHMCMAMRGVQKQGSTTLTTTFTGTFKTEPADQARFMTMVRSR

SEQ ID NO: 13800 - protein, 205 aa, unidentified
  source 1..205: note = Rhizobium fredii
  REGION 1..205: note = tr|A0A2A6LV82|A0A2A6LV82_RHIFR GTP cyclohydrolase 1; OS = Rhizobium fredii OX=380 GN=folE PE=3 SV=1
MDAIVKNFPLLDDTSGRPTQKEAEEAVRVLLRWAGEDPTREGLKDTPTRVVKSYREIFGGYDLIAEDVLGRTFEEVSGYDDIVLEKDIPFYSHCEHHMVPIIGKAHVAYLPNGRVLGLSKIARVVDIYARRLQTQESMTAQIARAIDETLDPRGVAVMIEAEHLCMAMRGIKKQGATTLTTTFTGAFKTEPTEQARFMTMLRGFK

SEQ ID NO: 13801 - protein, 205 aa, unidentified; identical to SEQ ID NO: 13800
  source 1..205: note = Rhizobium fredii
  REGION 1..205: note = tr|G9A4Z6|G9A4Z6_RHIFH GTP cyclohydrolase 1; OS = Rhizobium fredii (strain HH103) OX=1117943 GN=folE PE=3; SV = 1

SEQ ID NO: 13802 - protein, 203 aa, unidentified
  source 1..203: note = Rhizobium freirei
  REGION 1..203: note = tr|N6UY83|N6UY83_9RHIZ GTP cyclohydrolase 1; OS = Rhizobium freirei PRF 81 OX=363754 GN=folE PE=3 SV=1
MDAIVKNFPQVVDSDRPSQKEAEDAVRVLLRWAGDDPQREGLLDTPARVAKAYRELFGGYDLNPEDVLGRTFEEVSGYDDIVLVRDIPFFSHCEHHMVPIIGKAHVGYLPNGRVLGLSKIARVVDIFGRRLQTQEAMTAQIANAIDDTLRPRGVAVMIEAEHMCMAMRGVQKQGSTTLTMTFTGAFKADAAEQARFMSLVRGR

SEQ ID NO: 13803 - protein, 204 aa, Rhizobium galegae
  REGION 1..204: note = tr|A0A5J5KQ86|A0A5J5KQ86_RHIGA GTP cyclohydrolase I FolE OS=Rhizobium galegae OX=399 GN=folE PE=4 SV=1
MDAIVKNFPASKEKQVRPSQQEAEEAVRVLLRWAGDDPAREGLLDTPKRVAAAYRELFAGYEQSPEDVLGRTFEEVSGYDDIVLVRDIPFFSHCEHHMLPIIGKAHVAYLPNGRVLGLSKIARVVEIFGRRLQTQENLTAQIANAIEETLKPRGVAIMIEAEHLCMEMRGVQKQGSHTMTTTFTGEFKANAAEQARFFTLARNR

SEQ ID NO: 13804 - protein, 204 aa, Rhizobium gallicum
  REGION 1..204: note = tr|A0A1L5NII7|A0A1L5NII7_9RHIZ GTP cyclohydrolase 1; OS = Rhizobium gallicum OX=56730 GN=folE PE=3 SV=1
MDAIVKNFPQTSRDAERPSQKEAEDAIRVLLRWAGDDPSREGLTDTPTRVAKAYRELFAGYEMDPEDVLGRTFEEVAGYDDMVLVKDIPFYSHCEHHMVPIIGKAHVAYMPDGKVLGLSKIARVVEIYGRRLQTQETMTAQIAKAIDDTLAPRGVAVMLEAEHMCMAMRGVQKQGSTTLTTTFTGIFKAEPAEQARFMSMVRSR

SEQ ID NO: 13805 - protein, 204 aa, Rhizobium gallicum; identical to SEQ ID NO: 13794
  REGION 1..204: note = tr|A0A0B4X2F1|A0A0B4X2F1_9RHIZ GTP cyclohydrolase 1; OS = Rhizobium gallicum bv. gallicum R602 OX=1418105 GN=folE; PE = 3 SV=1

SEQ ID NO: 13806 - protein, 206 aa, unidentified
  source 1..206: note = Rhizobium grahamii
  REGION 1..206: note = tr|A0A370KS79|A0A370KS79_9RHIZ GTP cyclohydrolase 1; OS = Rhizobium grahamii OX=1120045 GN=folE PE=3 SV=1
MDAIIKNFPQTPADLDADRPSQKEAEDAVRTLLRWAGDDPSREGLLDTPSRVAKAYRELFAGYDMDPEDVLGRTFEEVAGYDDMVLVKDIPFFSHCEHHMVPIIGKAHVAYMPDGKVLGLSKIARVVEIYGRRLQTQETMTAQIARAIDETLAPRGVAVMIEAEHMCMAMRGVQKQGSTTLTTTFTGTFKTEPADQARFMSMVRSR

SEQ ID NO: 13807 - protein, 206 aa, unidentified; identical to SEQ ID NO: 13806
  source 1..206: note = Rhizobium grahamii
  REGION 1..206: note = tr|S3HL09|S3HL09_9RHIZ GTP cyclohydrolase 1; OS = Rhizobium grahamii CCGE 502 OX=990285 GN=folE PE=3 SV=1

SEQ ID NO: 13808 - protein, 203 aa, Rhizobium hainanense
  REGION 1..203: note = tr|A0A1C3WHI0|A0A1C3WHI0_9RHIZ GTP cyclohydrolase 1; OS = Rhizobium hainanense OX=52131 GN=folE PE=3 SV=1
MDAIVKNFPQVTDSERPSQQEAEDAIRVLLRWAGDDPRREGLLDTPARVAKAYRELFGGYELNPEDVLGRTFEEVSGYDDIVLERDVPFYSHCEHHMVPIIGKAHVAYLPSGRVLGLSKIARVVDIFARRLQTQEAMTAQIANAIDESLRPRGVAVMIDAEHMCMSMRGIKKQGSSTLTMTFTGAFKADPAEQARFMSLVRGR

SEQ ID NO: 13809 - protein, 204 aa, unidentified
  source 1..204: note = Rhizobium hidalgonense
  REGION 1..204: note = tr|A0A2A6KHF0|A0A2A6KHF0_9RHIZ GTP cyclohydrolase 1; OS = Rhizobium hidalgonense OX=1538159 GN=folE PE=3 SV=1
MDAIVKNFPQTNRDSDRPSQQEAEEAVRVLLRWAGENPTREGLIETPARVVKSYRELFSGYDMAPEDVLGRTFEEVAGYDDMVLVKDIPFFSHCEHHMVPIIGKAHVAYMPDGRVLGLSKIARVVEIYGRRLQTQETMTAQIARAIDDTLNPRGVAVMIEAEHMCMAMRGVQKQGSTTLTTTFTGTFKTEPADQARFMTMVRSR

SEQ ID NO: 13810 - protein, 210 aa, unidentified
  source 1..210: note = Rhizobium ipomoeae
  REGION 1..210: note = tr|A0A4S8NTU6|A0A4S8NTU6_9RHIZ GTP cyclohydrolase 1; OS = Rhizobium ipomoeae OX=1210932 GN=folE PE=3 SV=1
MDTSAAKANLEKLDRQVTREEVEDAIRTLLIWVGEDPYREGLLETPKRVAKAFKEYCAGYAMDPRDVLYRTFEDAVGYEDMVVLRHIPFESMCEHHLAPIVGNAHIAYIPVGRVVGISKLARLVDGYARRLQIQERLTFEIAQAIGEVLKPKGVACIIEAEHFCMKCRGVRKNGSRLTTSHFVGAFSSDHGLRQEFYQRLRCEALPTGAY

SEQ ID NO: 13811 - protein, 200 aa, unidentified
  source 1..200: note = Rhizobium ipomoeae
  REGION 1..200: note = tr|A0A4S8P8M2|A0A4S8P8M2_9RHIZ GTP cyclohydrolase 1; OS = Rhizobium ipomoeae OX=1210932 GN=folE PE=3 SV=1
MDAIVKKLTTEPRRPSQEDAEAAVRTLLLWAGDDPEREGLIDTPARVAKSFRELFAGYHADIEEVLGRTFEEVGGYKDMVLVRDIPFHSHCEHHMLPVIGKAHVGYLPDGRVLGLSKIARIVDVFAKRLQTQENMTAQIAQAIDETLRPKGVAVFVEAEHMCMAMRGIQKSGSTTLTTTFKGAFDGNAAEQVRFMTMVRG

SEQ ID NO: 13812 - protein, 207 aa, unidentified
  source 1..207: note = Rhizobium jaguaris
  REGION 1..207: note = tr|A0A387FUW1|A0A387FUW1_9RHIZ GTP cyclohydrolase 1; OS = Rhizobium jaguaris OX=1312183 GN=folE PE=3 SV=1
MDAIVKNFPQALESNPELDRPSQKEAEDAVRVLLRWAGDDPQREGLLDTPTRVVKAYRELFAGYDMNPEDVLGRTFEEVSGYDDMVLVRDIPFFSHCEHHMVPIIGKAHVAYLPSGRVLGLSKIARVVEIFGRRLQTQEAMTAQIANAIDETLRPRGVAVMLEAEHMCMAMRGVQKQGSSTLTTTFTGAFKADPAEQVRFMTMVRSR

SEQ ID NO: 13813 - protein, 204 aa, unidentified
  source 1..204: note = Rhizobium laguerreae
  REGION 1..204: note = tr|A0A1S9GPJ9|A0A1S9GPJ9_9RHIZ GTP cyclohydrolase 1; OS = Rhizobium laguerreae OX=1076926 GN=folE PE=3 SV=1
MDAIVKNFPQTNRDSDRPSQQEAEEAVRVLLRWAGDDPTREGLLETPARVVKSYRELFSGYDMAAEDVLGRTFEEVAGYDDMVLVKDIPFYSHCEHHMVPIIGKAHVAYMPDGRVLGLSKIARVVEIYGRRLQTQETMTAQIARAIDDTLNPRGVAVLIEAEHMCMAMRGVQKQGSTTLTTTFTGTFKTEPADQARFMTMVRSR

SEQ ID NO: 13814 - protein, 204 aa, Rhizobium leguminosarum
  REGION 1..204: note = tr|A0A2K9Z2P7|A0A2K9Z2P7_RHILE GTP cyclohydrolase 1; OS = Rhizobium leguminosarum OX=384 GN=folE PE=3 SV=1
MDAIVKNFPQTNRDSDRPSQQEAEEAVRVLLRWAGDDPTREGLLETPARVVKSYRELFSGYDMAAEDVLGRTFEEVAGYDDMVLVKDIPFYSHCEHHMVPIIGKAHVAYMPDGRVLGLSKIARVVEIYGRRLQTQETMTAQIARAIDDTLHPRGVAVLIEAEHMCMAMRGVQKQGSTTLTTTFTGTFKTEPADQARFMTMVRSR

SEQ ID NO: 13815 - protein, 204 aa, Rhizobium leguminosarum
  REGION 1..204: note = tr|Q1MGA4|Q1MGA4_RHIL3 GTP cyclohydrolase 1; OS = Rhizobium leguminosarum bv. viciae (strain 3841); OX = 216596 GN=folE PE=3 SV=1
MDAIVKNFPQTTRDSDRPSQQEAEEAVRVLLRWAGDDPTREGLLETPARVVKSYRELFSGYDMAAEDVLGRTFEEVAGYDDMVLVKDIPFYSHCEHHMVPIIGKAHVAYMPDGRVLGLSKIARVVEIYGRRLQTQETMTAQIARAIDDTLNPRGVAVLIEAEHMCMAMRGVQKQGSTTLTTTFTGTFKTEPADQARFMTMVRSR

SEQ ID NO: 13816 - protein, 204 aa, Rhizobium loessense
  REGION 1..204: note = tr|A0A1G4U6J5|A0A1G4U6J5_9RHIZ GTP cyclohydrolase 1; OS = Rhizobium loessense OX=158890 GN=folE PE=3 SV=1
MDAIVKNFPQTSRDAERPSQKEAEDAIRVLLRWAGDDPSREGLIDTPTRVAKAYRELFAGYEMDPEDVLGRTFEEVAGYDDMVLVKDIPFYSHCEHHMVPIIGKAHVAYMPDGKVLGLSKIARVVEIYGRRLQTQETMTAQIAKAIDDTLAPRGVAVMLEAEHMCMAMRGVQKQGSMTLTTTFTGIFKAEPAEQARFMSMVRSR

SEQ ID NO: 13817 - protein, 211 aa, unidentified; identical to SEQ ID NO: 10554
  source 1..211: note = Rhizobium loti
  REGION 1..211: note = tr|A0A1A5IFT7|A0A1A5IFT7_RHILI GTP cyclohydrolase 1; OS = Rhizobium loti OX=381 GN=folE PE=3 SV=1

SEQ ID NO: 13818 - protein, 211 aa, unidentified
  source 1..211: note = Rhizobium loti
  REGION 1..211: note = tr|A0A316CC11|A0A316CC11_RHILI GTP cyclohydrolase 1; OS = Rhizobium loti OX=381 GN=folE PE=3 SV=1
MDAVIKKLMPQSAYMEKPVTDRPSEAEVEAAVRTLLRWTGDNPDREGLIDTPKRVAKAYREMFGGYDMCPAEELGRTFEEVAGYDDLVIVKDITFHSHCEHHMVPIIGKAHVGYLPDGKVVGLSKIARVVDIFAHRLQTQEALTAQIAGVIQDVLNPRGVAVMIEAEHMCMAMRGIRKQGSTTLTSTFTGVFKDTPEEQVRFVTMVRGGGV

SEQ ID NO: 13819 - protein, 203 aa, Rhizobium lusitanum
  REGION 1..203: note = tr|A0A1C3VID1|A0A1C3VID1_9RHIZ GTP cyclohydrolase 1; OS = Rhizobium lusitanum OX=293958 GN=folE PE=3 SV=1
MDAIVKNFPQVVESERPSQKEAEDAVRVLLRWAGDDPRREGLLDTPERVAKAYRELFAGYDMNPEDVLGRTFEEVAGYDDIVLVRDIPFFSHCEHHMVPIIGKAHVAYLPNGRVLGLSKIARVVEIFGRRLQTQEAMTAQIANAIDETLRPRGVAVMIDAEHMCMAMRGVQKQGSSTLTTTFTGAFKADPAEQVRFMSMVRGR

SEQ ID NO: 13820 - protein, 204 aa, unidentified
  source 1..204: note = Rhizobium meliloti
  REGION 1..204: note = sp|Q92QB4|GCH1_RHIME GTP cyclohydrolase 1; OS = Rhizobium meliloti (strain 1021) OX=266834 GN=folE PE=3; SV = 1
MDAIVKNFPVLDDTGRPTQKEAEEAVRVLLRWAGEDPAREGLKDTPSRVAKAYREIFGGYDLVAEDVLGRTFEEVSGYDDIVLEKDIPFYSHCEHHMVPIIGKAHIAYLPNGRVLGLSKIARVVDIYARRLQTQEAMTAQIAKAIDETLMPRGVAVMIEAEHLCMAMRGIKKQGATTLTTTFTGAFKSEPAEQVRFMTMLRGFK

SEQ ID NO: 13821 - protein, 204 aa, unidentified; identical to SEQ ID NO: 13820
  source 1..204: note = Rhizobium meliloti
  REGION 1..204: note = tr|A0A222J6Y7|A0A222J6Y7_RHIML GTP cyclohydrolase 1; OS = Rhizobium meliloti OX=382 GN=folE PE=3 SV=1

SEQ ID NO: 13822 - protein, 206 aa, unidentified
  source 1..206: note = Rhizobium mesoamericanum
  REGION 1..206: note = tr|K0PPD4|K0PPD4_9RHIZ GTP cyclohydrolase 1; OS = Rhizobium mesoamericanum STM3625 OX=1211777 GN=folE; PE = 3 SV=1
MDAIIKNFPQTPVDLDADRPSQKEAEDAVRTLLRWAGDDPSREGLLDTPARVAKAYRELFAGYDMEPEDVLGRTFEEVAGYDDMVLVKDIPFFSHCEHHMVPIIGKAHVAYMPDGKVLGLSKIARVVEIYGRRLQTQETMTAQIAKAIDDTLAPRGVAVMIEAEHMCMAMRGVQKQGSTTLTTTFTGTFKTEPADQARFMSMVRSR

SEQ ID NO: 13823 - protein, 203 aa, Rhizobium miluonense
  REGION 1..203: note = tr|A0A1C3WPW5|A0A1C3WPW5_9RHIZ GTP cyclohydrolase 1; OS = Rhizobium miluonense OX=411945 GN=folE PE=3 SV=1
MDAIVKNFPQVVDSDRPSQKEAEDAVRVLLRWAGDDPQREGLLDTPARVAKAYRELFGGYDLNPEDVLGRTFEEVSGYDDIVLVRDIPFFSHCEHHMVPIIGKAHVGYLPNGRVLGLSKIARVVDIFGRRLQTQEAMTAQIANAIDDTLRPRGVAVMIEAEHMCMAMRGVQKQGSSTLTMTFTGAFKADAAEQARFMSLVRGR

SEQ ID NO: 13824 - protein, 204 aa, Rhizobium mongolense
  REGION 1..204: note = tr|A0A559SNG6|A0A559SNG6_9RHIZ GTP cyclohydrolase 1; OS = Rhizobium mongolense USDA 1844 OX=1079460 GN=folE PE=3; SV = 1
MDAIVKNFPQTSRDAERPSQKEAEDAIRVLLRWAGDDPSREGLIDTPTRVAKAYRELFAGYEMDPEDVLGRTFEEVAGYDDMVLVKDIPFYSHCEHHMVPIIGKAHVAYMPDGKVLGLSKIARVVEIYGRRLQTQETMTAQIAKAIDDTLAPRGVAVMLEAEHMCMAMRGVQKQGSTTLTTTFTGIFKAEPAEQARFMTMVRSR

SEQ ID NO: 13825 - protein, 203 aa, Rhizobium multihospitium; identical to SEQ ID NO: 13808
  REGION 1..203: note = tr|A0A1C3WKH6|A0A1C3WKH6_9RHIZ GTP cyclohydrolase 1; OS = Rhizobium multihospitium OX=410764 GN=folE PE=3 SV=1

SEQ ID NO: 13826 - protein, 203 aa, unidentified
  source 1..203: note = Rhizobium naphthalenivorans
  REGION 1..203: note = tr|A0A512HCP2|A0A512HCP2_9RHIZ GTP cyclohydrolase 1; OS = Rhizobium naphthalenivorans OX=1118451 GN=folE PE=3 SV=1
MGMDAIVNKLAPLDKRPSREEAEEAVRVLLRWAGDDPAREGLIDTPKRVANAYRELFSGYDADIEDVLGTTFEEVAGYDDIVLVRDIPFFSHCEHHVLPVIGKAHVAYLPDSRVLGLSKIARVVEVFGRRLQTQEAMTAQIATAIDETLRPQGVAVFIEAEHMCMAMRGVQKSGSTTLTTTFTGRFKDNAVEQARFMSMVRGR

SEQ ID NO: 13827 - protein, 208 aa, unidentified; identical to SEQ ID NO: 4188
  source 1..208: note = Rhizobium nepotum
  REGION 1..208: note = tr|A0A0D8K9R1|A0A0D8K9R1_9RHIZ GTP cyclohydrolase 1; OS = Rhizobium nepotum 39/7 OX=1368418 GN=folE PE=3 SV=1

SEQ ID NO: 13828 - protein, 205 aa, Rhizobium oryzae
  REGION 1..205: note = tr|A0A1Q9AXC0|A0A1Q9AXC0_9RHIZ GTP cyclohydrolase 1; OS = Rhizobium oryzae OX=464029 GN=folE PE=3 SV=1
MDAIIKSFPAPSGVDDRPTQKEAEDAVRVLLRWAGEDPDREGLRDTPARVAKSYRELFSGYDLAAEDVLGRTFEEVSGYDDMVLVKDIPFFSHCEHHMVPIIGHAHVAYLPQGRVLGLSKIARVVDIFGRRLQTQESMTAQIAAAIDDTLRPRGVAVMIEAEHLCMAMRGVQKQGATTLTTTFTGVFKSDPAEQARFMTFLRTQR

SEQ ID NO: 13829 - protein, 204 aa, Rhizobium oryzae
  REGION 1..204: note = tr|A0A1X7GGZ3|A0A1X7GGZ3_9RHIZ GTP cyclohydrolase 1; OS = Rhizobium oryzae OX=464029 GN=folE PE=3 SV=1
MDAIVKNFPASKEKQARPTLQEAEEAVRVLLRWAGDDPAREGLLDTPKRVAAAYRELFAGYEQSPEEVLGRTFEEVSGYDDIVLVRDIPFFSHCEHHMLPIIGKAHVAYLPKGRVLGLSKIARVVEIFGRRLQTQENLTAQIANAIEETLKPRGVAVMIEAEHMCMEMRGVQKRGSQTMTTTFSGEFKTNAAEQARFFTLVRNR

SEQ ID NO: 13830 - protein, 201 aa, unidentified
  source 1..201: note = Rhizobium oryziradicis
  REGION 1..201: note = tr|A0A1Q8ZPB9|A0A1Q8ZPB9_9RHIZ GTP cyclohydrolase 1; OS = Rhizobium oryziradicis OX=1867956 GN=folE PE=3 SV=1
MDAIVKKLTPEAGRPSRAEAEDAVRTLLRWAGEDITREGLLDTPKRVAKAYAELFSGYHISVEDALGTTFEEVGGYNDIVLVRDIPFFSHCEHHMLPVIGKAHVAYLPAGRVLGLSKIARVVDIFARRLQTQETMTAQIAEAIDTNLMPRGVAVMVDAEHMCMAMRGIQKSGSTTLTTTFTGEFKDNAAEQVRFMTMVRSR

SEQ ID NO: 13831 - protein, 204 aa, Rhizobium phaseoli; identical to SEQ ID NO: 13797
  REGION 1..204: note = tr|A0A0M3GIA9|A0A0M3GIA9_9RHIZ GTP cyclohydrolase 1; OS = Rhizobium phaseoli Ch24-10 OX=1128399 GN=folE PE=3 SV=1

SEQ ID NO: 13832 - protein, 204 aa, Rhizobium phaseoli
  REGION 1..204: note = tr|A0A2U3CYV2|A0A2U3CYV2_9RHIZ GTP cyclohydrolase 1; OS = Rhizobium phaseoli OX=396 GN=folE PE=3 SV=1
MDAIVKNFPQPNRDSDRPSQQEAEEAVRVLLRWAGDDPTREGLIETPARVAKAYRELFAGYDMAPEDVLGRTFEEVAGYDDMVLVKDIPFYSHCEHHMVPIIGKAHVAYMPDGRVLGLSKIARVVEIYGRRLQTQETMTAQIARAIDDTLQPRGVAVMIEAEHMCMAMRGVQKQGSTTLTTTFTGTFKTEPADQARFMSMVRSR

SEQ ID NO: 13833 - protein, 204 aa, Rhizobium pisi
  REGION 1..204: note = tr|A0A3R9AVJ8|A0A3R9AVJ8_9RHIZ GTP cyclohydrolase 1; OS = Rhizobium pisi OX=574561 GN=folE PE=3 SV=1
MDAIVKNFPQTNRESDRPSQQEAEEAVRVLLRWAGDDPAREGLLETPARVVKAYRELFAGYDMAPEDVLGRTFEEVAGYDDMVLVKDIPFYSHCEHHMVPIIGKAHVAYMPDGRVLGLSKIARVVEIYGRRLQTQETMTAQIARAIDDTLNPRGVAVMIEAEHMCMAMRGVQKQGSTTLTTTFTGTFKTEPADQARFMTMVRSR

SEQ ID NO: 13834 - protein, 208 aa, Rhizobium pusense; identical to SEQ ID NO: 4184
  REGION 1..208: note = tr|A0A1L9CFU2|A0A1L9CFU2_9RHIZ GTP cyclohydrolase 1; OS = Rhizobium pusense OX=648995 GN=folE PE=3 SV=1

SEQ ID NO: 13835 - protein, 208 aa, Rhizobium radiobacter
  REGION 1..208: note = tr|A0A420G2C5|A0A420G2C5_RHIRD GTP cyclohydrolase 1; OS = Rhizobium radiobacter OX=358 GN=folE PE=3 SV=1
MDAIVKNFPGAGAKPDVAEARPSQAEAEEAVRVLLRWAGENPAREGLLDTPKRVAKAYRELFAGYELNVQDVLGTTFEEVGGYDDVVLVRDIPFFSHCEHHMVPIVGKAHVAYLPAGRVLGLSKIARVVEIFGRRLQTQENMTAQIARSIEETLKPRGVAVMIDAEHMCMSMRGVNKQGSTTLTTSFTGVFKNDPAEQVRFMTMVRNR

SEQ ID NO: 13836 - protein, 208 aa, Rhizobium radiobacter
  REGION 1..208: note = tr|A0A2T7W6N6|A0A2T7W6N6_RHIRD GTP cyclohydrolase 1; OS = Rhizobium radiobacter OX=358 GN=folE PE=3 SV=1
MDAIVKNFPGAGATDDVTKARPTQAEAEDAVRVLLSWAGDDPTREGLLDTPKRVAKAYRELFSGYDLDAKDVLGTFFEEVGGYDDIILVRDIPFFSHCEHHMVPIIGKAHVAYLPNGRVLGLSKIARVVEIFGRRLQTQETMTAQIASAIETTLKPRGVAVMIDAEHMCMSMRGVQKQGSTTLTTSFTGAFKKDPAEQARFMSMVRSR

SEQ ID NO: 13837 - protein, 205 aa, unidentified
  source 1..205: note = Rhizobium rhizosphaerae
  REGION 1..205: note = tr|A0A1Q9AJA3|A0A1Q9AJA3_9RHIZ GTP cyclohydrolase 1; OS = Rhizobium rhizosphaerae OX=1672749 GN=folE PE=3 SV=1
MDAIIKNFPAPEGVDDRPSQKEAEDAVRVLLRWAGEDPEREGLRDTPARVAKSYRELFAGYDLAAEDVLGRTFEEVAGYDEMVLVKDIPFFSHCEHHMVPIIGRAHVAYLPQGRVLGLSKIARVVDIYGRRLQTQESMTAQIATAIDETLRPRGVAVMIEAEHLCMAMRGVQKQGSTTLTTTFTGAFKTDAAEQARFMTFLRAQR

SEQ ID NO: 13838 - protein, 201 aa, Rhizobium rosettiformans
  REGION 1..201: note = tr|A0A4S8Q5K9|A0A4S8Q5K9_9RHIZ GTP cyclohydrolase 1; OS = Rhizobium rosettiformans W3 OX=538378 GN=folE PE=3 SV=1
MDAIVTKLTAQSPRPTREEAEQAVRTLLLWAGDDPEREGLLDTPARVAKAYGELFSGYEADIEDVLGRTFEEVGGYEDMVLVRDISFFSHCEHHMLPVIGKAHVAYLPKGRVLGLSKIARVVDVFAKRLQTQENMTAQIAHAIDETLQPRGVAVFLEAEHMCMAMRGIQKTGSTTLTTTFTGAFKDNPAEQARFMSMVRSR

SEQ ID NO: 13839 - protein, 227 aa, Rhizobium selenitireducens
  REGION 1..227: note = tr|A0A376AGH6|A0A376AGH6_9RHIZ GTP cyclohydrolase 1; OS = Rhizobium selenitireducens ATCC BAA-1503 OX=1336235; GN = folE PE=3 SV=1
MSRVTHLQAEKSKQAVRNLKDRETMGMDAIVNKLAPNAKRPSREEAENAVRVLLRWAGDDPAREGLLDTPKRVANAYRELFAGYDADIEDVLGTTFEEVAGYDDIVVVRDIPFFSHCEHHMLPVIGKAHVAYLPDGRVLGLSKIARVVEVFGRRLQTQEAMTAQISAAIDETLKPRGVAVFIEAEHMCMAMRGVQKSGSTTLTTTFTGVFKDNAAEQARFMSMVRGR

SEQ ID NO: 13840 - protein, 208 aa, unidentified
  source 1..208: note = Rhizobium smilacinae
  REGION 1..208: note = tr|A0A5C4XGU7|A0A5C4XGU7_9RHIZ GTP cyclohydrolase 1; OS = Rhizobium smilacinae OX=1395944 GN=folE PE=3 SV=1
MDAIVKNFPAQGQESSKDQARPSQAEAEEAVRVLLRWAGDDPTREGLLDTPTRVAKSYRELFAGYDQSYEEVLGRTFEEMSGFDDVVLVRDIPFFSHCEHHMLPIKGMATVAYLPNGPVLGLSKIARVIEIFGRRLQTQENMTAQIANAIQDTLKPRGVAVLIEAEHMCMEMRGVQKQGSRTLTTTFTGEFKTNATEQARFFTLARNR

SEQ ID NO: 13841 - protein, 204 aa, unidentified; identical to SEQ ID NO: 13798
  source 1..204: note = Rhizobium sophoriradicis
  REGION 1..204: note = tr|A0A2A5KLF2|A0A2A5KLF2_9RHIZ GTP cyclohydrolase 1; OS = Rhizobium sophoriradicis OX=1535245 GN=folE PE=3 SV=1

SEQ ID NO: 13842 - protein, 206 aa, Rhizobium sp.
  REGION 1..206: note = tr|A0A246U558|A0A246U558_9RHIZ GTP cyclohydrolase 1; OS = Rhizobium sp. R72 OX=1764278 GN=folE PE=3 SV=1
MDAIIKNFPQTPTDLEADRPSQKEAEDAVRTLLRWAGDDPSREGLLDTPARVAKAYRELFAGYDMDPEDVLGRTFEEVAGYDDMVLVRDIPFFSHCEHHMVPIIGKAHVAYMPDGKVLGLSKIARVVEIYGRRLQTQETMTAQIAKAIDDTLAPRGVAVMIEAEHMCMAMRGVQKQGSTTLTTTFTGTFKTEPADQARFMSMVRSR

SEQ ID NO: 13843 - protein, 201 aa, Rhizobium sp.
  REGION 1..201: note = tr|A0A2S6BMA0|A0A2S6BMA0_9RHIZ GTP cyclohydrolase 1; OS = Rhizobium sp. KAs_5_22 OX=2067668 GN=folE PE=3 SV=1
MDASVNKIVPVDQRPSREEAENAVRVLLRWAGDDPAREGLLDTPKRVVNAYRELFAGYDADIEDVLGTTFGEVAGYDDIVLVRDIPFFSHCEHHMLPVIGKAHVAYLPDGRVLGLSKIARVVDVFGRRLQTQEAMTAQIAAAIDETLAPKGVAVFIEAEHMCMAMRGVQKSGSTTLTTTFTGRFKDNAAEQARFMSMVRGR

SEQ ID NO: 13844 - protein, 202 aa, unidentified
  source 1..202: note = Rhizobium straminoryzae
  REGION 1..202: note = tr|A0A549TGP2|A0A549TGP2_9RHIZ GTP cyclohydrolase 1; OS = Rhizobium straminoryzae OX=1387186 GN=folE PE=3 SV=1
MDAIVKNFPAGQKQARPTQQEAEEAVRLLLRWAGDDPTREGLLDTPKRVAAAYRELFSGYEQTPEEILGRTFEEVAGYDDMVLVRDIPFFSHCEHHMVPIIGKAHVAYLPKGRVLGLSKIARVVDVYGRRLQTQEAMTAQITHAIQEVLQPRGVAVMIDAEHMCMSMRGIQKQGSTTLTTTFTGEFQNNAAEQARFLTMIRR

SEQ ID NO: 13845 - protein, 205 aa, unidentified
  source 1..205: note = Rhizobium subbaraonis
  REGION 1..205: note = tr|A0A285UAH1|A0A285UAH1_9RHIZ GTP cyclohydrolase 1; OS = Rhizobium subbaraonis OX=908946 GN=folE PE=3 SV=1
MDAVIKNFPVGEENSGRPTQKEAEDAVRVLLRWAGDDPSREGLLDTPSRVAKAYRELFSGYELDPEDVLGRTFEEVAGYDDIVLVKDIPFYSHCEHHMVPIIGRAHVAYLPNGRVLGLSKIARVVEIYGRRLQTQETMTAQIASAIDETLRPRGVAVMIEAEHMCMAMRGIQKQGSTTLTTTFTGAFKAEPAEQVRFMTMIRGRG

SEQ ID NO: 13846 - protein, 204 aa, Rhizobium sullae
  REGION 1..204: note = tr|A0A4R3QAA5|A0A4R3QAA5_RHISU GTP cyclohydrolase 1; OS = Rhizobium sullae OX=50338 GN=folE PE=3 SV=1
MGLGPSHAPRKRPTREAAEAAVRTLIEWAGDDPDREGLVGTPDRVVRAYEEFFEGYRIDPVDLLGRTFEETQNYGDMVVLRDVRLESHCEHHIVPIIGKAHVAYLPSGRVVGISKLARLVEVYGKRLQIQETLTAQIADAIDEVLKPKGVAVVIEAAHMCMTTRGIRKPGITMVTRRLTGAFETDAELRRDFLGSISGSREAFG

SEQ ID NO: 13847 - protein, 204 aa, Rhizobium sullae
  REGION 1..204: note = tr|A0A2N0CZY0|A0A2N0CZY0_RHISU GTP cyclohydrolase 1; OS = Rhizobium sullae OX=50338 GN=folE PE=3 SV=1
MDAIVKNFPQNNRDSERPSQKEAEDAIRVLLRWAGDDPSREGLIDTPNRVAKAYRELFAGYDMDAEDVLGRTFEEVAGYDDMVLVKDIPFYSHCEHHMVPIIGKAHVAYIPDGKVLGLSKIARVVEIYGRRLQTQETMTAQIAKAIDDTLAPRGVAVMLEAEHMCMAMRGVQKQGSTTLTTTFTGTFKAEPAEQVRFMTMVRSR

SEQ ID NO: 13848 - protein, 201 aa, Rhizobium taibaishanense
  REGION 1..201: note = tr|A0A1Q9A1C2|A0A1Q9A1C2_9RHIZ GTP cyclohydrolase 1; OS = Rhizobium taibaishanense OX=887144 GN=folE PE=3 SV=1
MDASVKKLSPDAARPSREEAENAVRTLLRWAGDDPAREGLLDTPKRVAKAYAELFGGYSVNVEDVLGTTFEEVGGYNDIVLVRDIPFFSHCEHHMLPVIGKAHVAYLPNGRVLGLSKIARVVDLYARRLQTQETMTAQIAESIVKYLQPRGVAVMVDAEHMCMAMRGIQKSGSTTLTTTFTGEFKDNAAEQVRFMTMVQNR

SEQ ID NO: 13849 - protein, 206 aa, Rhizobium tibeticum
  REGION 1..206: note = tr|A0A1H8LPQ8|A0A1H8LPQ8_9RHIZ GTP cyclohydrolase 1; OS = Rhizobium tibeticum OX=501024 GN=folE PE=3 SV=1
MDAIIKNFPQTPADLEADRPSQKEAEDAVRTLLRWAGDDPSREGLLDTPARVAKAYRELFAGYDMDPEDVLGRTFEEVAGYDDMVLVRDIPFFSHCEHHMVPIIGKAHVAYMPDGKVLGLSKIARVVEIYGRRLQTQETMTAQIAKAIDDTLAPRGVAVMIEAEHMCMAMRGVQKQGSTTLTTTFTGTFKTEPADQARFMTMVRSR

SEQ ID NO: 13850 - protein, 203 aa, Rhizobium tropici
  REGION 1..203: note = tr|L0LKM2|L0LKM2_RHITR GTP cyclohydrolase 1; OS = Rhizobium tropici CIAT 899 OX=698761 GN=folE PE=3 SV=1
MDAIVKNFPQSVDSERPSQKEAEDAVRVLLRWAGDDPLREGLLDTPARVAKAYRELFAGYDMNPEDVLGRTFEEVSGYDDIVLVRDIPFFSHCEHHMVPIIGKAHVAYLPNGRVLGLSKIARVVEIFGRRLQTQEAMTAQIANAIDDTLRPRGVAVMIDAEHMCMAMRGVQKQGSSTLTMTFTGAFKADPAEQARFMSLVRGR

SEQ ID NO: 13851 - protein, 203 aa, Rhizobium tropici
  REGION 1..203: note = tr|A0A5B0VV74|A0A5B0VV74_RHITR GTP cyclohydrolase 1; OS = Rhizobium tropici OX=398 GN=folE PE=3 SV=1
MDAIVKNFPQVVDSERPTQKEAEDAVRVLLRWAGDDPQREGLLDTPARVAKAYRELFGGYDMSPEDELGRTFEEVSGYDDIVLERDIPFFSHCEHHMVPIIGKAHVAYLPNGRVLGLSKIARVVDIFARRLQTQEAMTAQIANAIDETLRPRGVAVMIDAEHMCMAMRGVKKQGSTTLTMTFTGAFKADPAEQARFMSLVRGR

SEQ ID NO: 13852 - protein, 204 aa, Rhizobium tubonense
  REGION 1..204: note = tr|A0A2W4CJV6|A0A2W4CJV6_9RHIZ GTP cyclohydrolase 1; OS = Rhizobium tubonense OX=484088 GN=folE PE=3 SV=1
MDAVVKNFPQPDLKSDRPSQQEAEDAVRVLLRWAGDDPTREGLVDTPARVAKSYRELFAGYDMDPEDVLGRTFEEVAGYDDMVLVKDIPFFSHCEHHMVPIVGKAHVAYLPNGRVLGLSKIARVVEIYGRRLQTQEAMTAQIAAAIDETLRPRGVAIMIEAEHMCMAMRGVQKQGSTTLTTTFTGSFKVDPAEQVRFMTMVRGR

SEQ ID NO: 13853 - protein, 200 aa, Rhizobium tubonense
  REGION 1..200: note = tr|A0A2W4C413|A0A2W4C413_9RHIZ GTP cyclohydrolase 1; OS = Rhizobium tubonense OX=484088 GN=folE PE=3 SV=1
MDAIVRVFSKAAERPSKDEAEEAVRTLIRWAGDDPGREGLQDTPRRVTKAYGELFAGYDEPADDPLARTFSDVGGYQDMVIVKGIPFFSHCEHHMLPFHGHVHIGYQPAGRVLGLSKFARLVEIFARRLQTQETITAQIAQSLDDGLQPLGVAVMVEAEHMCMSMRGVKKQGAATLTMTFKGEMQNSASLQARFLSEVRA

SEQ ID NO: 13854 - protein, 201 aa, unidentified
  source 1..201: note = Rhizobium tumorigenes
  REGION 1..201: note = tr|A0A2W4BIU3|A0A2W4BIU3_9RHIZ GTP cyclohydrolase 1; OS = Rhizobium tumorigenes OX=2041385 GN=folE PE=3 SV=1
MDAMLANADLAAFERPSQQEAEAAVRTLIRWAGEDPTREGLLDTPKRVTKAYRELFAGYDLAPEDVLSRTFSEVAGYNDMVIVKDITFHSHCEHHMVPFHGVAHIAYVPDKGVLGLSKMARLVDLYARRLQTQETMTAQIATALDESLRPKGVAVMIEAEHMCMAMRGVAKQGTKTLTTRFTGSFQMSAADQARFITLARG

SEQ ID NO: 13855 - protein, 204 aa, unidentified
  source 1..204: note = Rhizobium tumorigenes
  REGION 1..204: note = tr|A0A2W4BWP1|A0A2W4BWP1_9RHIZ GTP cyclohydrolase 1; OS = Rhizobium tumorigenes OX=2041385 GN=folE PE=3 SV=1
MDAVLKNLALTDTHPDRPTQKEAEDAVRVLLRWAGDDPTREGLIDTPARVAKSYRELFAGYELDPENVLGRTFEEVAGYDDMVLVRDIPFFSHCEHHMVPIIGKAHVAYLPNGRVLGLSKIARVVDIFGRRLQTQETMTAQIATAIDETLRPRGVAIMIEAEHMCMAMRGVQKQGSTTLTTRFTGSYKVDPAEQARFMTLVRGR

SEQ ID NO: 13856 - protein, 204 aa, Rhizobium vallis
  REGION 1..204: note = tr|A0A432PM16|A0A432PM16_9RHIZ GTP cyclohydrolase 1; OS = Rhizobium vallis OX=634290 GN=folE PE=3 SV=1
MDAIVKNFPQTNRESDRPSQQEAEEAVRVLLRWAGDDPTREGLLETPARVAKSYRELFAGYDMAPEDVLGRTFEEVAGYDDMVLVKDIPFYSHCEHHMVPIIGKAHVAYMPDGRVLGLSKIARVVEIYGRRLQTQETMTAQIARAIDDTLNPRGVAVMIEAEHMCMAMRGVQKQGSTTLTTTFTGTFKTEPADQARFMTMVRSR

SEQ ID NO: 13857 - protein, 206 aa, unidentified
  source 1..206: note = Rhizorhabdus dicambivorans
  REGION 1..206: note = tr|A0A2A4G327|A0A2A4G327_9SPHN GTP cyclohydrolase 1; OS = Rhizorhabdus dicambivorans OX=1850238 GN=folE PE=3 SV=1
MSILGDDDEALHGTPPSKLPVPEDVQDAIRTLIRWSGDDPDREGLLDTPARVGRAWKEYCQGYQEDPSLHLSRTFEEVGGYDEIVLLKDIPFQSHCEHHMAPIIGHAHIAYLPNHRVVGISKLARVLHGFARRLQIQERLTAEVADCIWTHLEPIGVAVVIHATHACMTARGVRTPGVGMTTSRMMGVFREDDRSRKEVLSLMGLG

SEQ ID NO: 13858 - protein, 206 aa, unidentified
  source 1..206: note = Rhizorhabdus sp.
  REGION 1..206: note = tr|A0A521SF32|A0A521SF32_9SPHN GTP cyclohydrolase 1; OS = Rhizorhabdus sp. OX=1968843 GN=folE PE=3 SV=1
MSISGEDDQTPNATLPDKLPVPEHVQDAIRTLIRWAGDDPDREGLLDTPSRVGRAWREYCQGYDEDPSLHLSRTFEEVGGYDEIVLLKQIPFHSHCEHHMAPIIGHAHIAYLPHNRVVGISKLARVLHGFARRLQIQERLTAEIADCIWTHLEPAGVAVVIQATHACMTARGVRTPGVGMTTSRMMGVFRDDERSRKEVLSLMGLG

SEQ ID NO: 13859 - protein, 200 aa, unidentified
  source 1..200: note = Rhodanobacter denitrificans
  REGION 1..200: note = tr|M4NDI4|M4NDI4_9GAMM GTP cyclohydrolase 1; OS = Rhodanobacter denitrificans OX=666685 GN=folE PE=3 SV=1
MSEQRHPNDVSQEQAEEAVRTLLRWAGEDPSREGLLDTPKRVVKAYRDWFAGYDSDPGDYLRRTFKEVNGYDEMVVLRDIEFESHCEHHMAPIIGRAHVGYLPTNRVVGISKLARVVDGFARRFQVQEKLTAQIAQCIQETLQPAGVAVVVDASHECMTTRGVHKRGVSMVTSQMLGTFRDDARTRAEFLQFIGIHGGHR

SEQ ID NO: 13860 - protein, 315 aa, unidentified
  source 1..315: note = Rhodanobacter denitrificans
  REGION 1..315: note = tr|A0A368KJ88|A0A368KJ88_9GAMM GTP cyclohydrolase FolE2 OS=Rhodanobacter denitrificans OX=666685 GN=folE2; PE = 3 SV=1
MPNQENTARLLPDVAVHAQPHLAGALDWVGMADIQVPVLFDAGDGQAQRSSARVGAFVNLSRPDKRGIHMSRLYLQVEQALSSQALNAQMLHALLRGFLDSHRDLSDRACLSIHFEHLVRRPALKSANSGWRAYPVCIEASLTGDEFLLEFGTEVVYSSTCPASAALSRQLIQDQFASDFDAGRPLDHAAVLAWLGSEQGIVATPHAQRSVARLRIRLVPGTDFHLIGLIDRVEHALGTPVQTAVKREDEQAFALANGGNLMFCEDAARRIQKALDADAALSDFHIRVEHQESLHPHDAVAYASKGVEGGYGSTP

SEQ ID NO: 13861 - protein, 329 aa, Rhodanobacter fulvus
  REGION 1..329: note = tr|I4VYH4|I4VYH4_9GAMM GTP cyclohydrolase FolE2; OS = Rhodanobacter fulvus Jip2 OX=1163408 GN=folE2 PE=3 SV=1
MRLLRHDDPQDKTMTNQENTARLLPDVAVHAQPHLAGALDWVGMAEIQVPVRFDAGDGDVQRASARVGAFVNLKRPDKRGIHMSRLYLQAEQALSTQTLGADTLQALLRGFLDSHADLSDRACLSIRFEHLVRRPALRSANSGWRAYPVTIEASLTGSAFLLELGTEVVYSSTCPASAALSRQLIQDQFASDFAADATLDRAAVLEWLGSEKGIVATPHAQRSVACLRVRPAAGAPLQLISLIDRVETALGTPVQTAVKRQDEQAFALANGGNLMFCEDAARRIQKALDADAALDDFHIRVEHQESLHPHDAVAYASKGIDGGYGGAKF

SEQ ID NO: 13862 - protein, 200 aa, Rhodanobacter fulvus
  REGION 1..200: note = tr|I4VPZ2|I4VPZ2_9GAMM GTP cyclohydrolase 1; OS = Rhodanobacter fulvus Jip2 OX=1163408 GN=folE PE=3 SV=1
MSDHANQPDVTREQAEEAVRTLLRWAGDDPAREGLIDTPKRVAKAYRDWFSGYESDPAEFLLRTFEEVGGYDQMVVLRDIQFESHCEHHLAPIIGRAHVGYMPTNRVVGISKLARVVDGFARRLQVQEKLTAQIAHCIQETLQPAGVAVVIDASHECMTTRGVHKRGVSMVTSQMLGSFRDDARTRMEFLQFIGLQGGHH

SEQ ID NO: 13863 - protein, 202 aa, unidentified
  source 1..202: note = Rhodanobacter glycinis
  REGION 1..202: note = tr|A0A1I3YYD7|A0A1I3YYD7_9GAMM GTP cyclohydrolase 1; OS = Rhodanobacter glycinis OX=582702 GN=folE PE=3 SV=1
MSEPNHPTDVTREQAEDAVRTLLRWAGEDPSREGLLDTPKRVVKAYRDWFAGYAEDPGDYLLRTFKEVEGYDEMVVLRDIEFESHCEHHMAPIIGRAHVGYLPTNRVVGISKLARVVDGFARRFQVQEKLTAEIAHCIQENLQPAGVAVVIDASHECMTTRGVHKRGVSMVTSQMLGSFRDDARTRAEFLEFIGLHGSVRSR

SEQ ID NO: 13864 - protein, 315 aa, unidentified
  source 1..315: note = Rhodanobacter glycinis
  REGION 1..315: note = tr|A0A502CF55|A0A502CF55_9GAMM GTP cyclohydrolase FolE2 OS=Rhodanobacter glycinis OX=582702 GN=folE2 PE=3; SV = 1
MPNQENTARLLPDVAVHAQPHLAGALDWVGMADIQVPVLFDAGDGEVQRASARVGAFVNLSRPDKRGIHMSRLYLQVEQALSTQKLTADSLHALLRGFLDSHKDLSDRACVSIRFEHLVRRPALRSANSGWRAYPVCIEASLTGDEFLLEFGTEVVYSSTCPASAALSRQLIQDQFVSDFSATQPVDHAAVLAWLGSERGIVATPHAQRSVARLRIRLVAGAGFQLIDLIDRVEHALGTPVQTAVKREDEQAFALANGGNLMFCEDAARRIQKALDADGHLSDFHIRVEHQESLHPHDAVAYASKGVAGGYGSTP

SEQ ID NO: 13865 - protein, 200 aa, Rhodanobacter lindaniclasticus
  REGION 1..200: note = tr|A0A4S3KJ64|A0A4S3KJ64_9GAMM GTP cyclohydrolase 1; OS = Rhodanobacter lindaniclasticus OX=75310 GN=folE PE=3; SV = 1
MNEEHHSQEVSQQQAEDAVRTLLRWAGDDPTREGLLDTPKRVARAYRDWFSGYESDPAEFLRRTFEEVAGYDQMVVLRDIQFESHCEHHLAPIIGRAHVGYMPTNRVVGISKLARVVDGFARRLQVQEKLTAQIAHCIQETLQPSGVAVVIDASHQCMTTRGVHKRGVSMVTSQMLGSFRDDVRTRNEFLQFIGIHGSAR

SEQ ID NO: 13866 - protein, 315 aa, Rhodanobacter lindaniclasticus
  REGION 1..315: note = tr|A0A4S3KGL6|A0A4S3KGL6_9GAMM GTP cyclohydrolase FolE2 OS=Rhodanobacter lindaniclasticus OX=75310 GN=folE2; PE = 3 SV=1
MPNQENTARLLPDVAVHAQPHLAGALDWVGMAEIQVPVLFDAGDGQPQRSSARVGAFVNLKRPDKRGIHMSRLYLQVEQALGTQTLSADMLRSLLRGFLDSHQDLSDRACLSIHFEHLVRRPALKSANSGWRAYPVCIEASLVGDQFLLEFGTEVVYSSTCPASAALSRQLIQDQFIHDFAPGETLDHAAVLAWLGSEKGIVAAAHAQRSVARLRVRPAAGAGFHLVELIDRVESALGTPVQTAVKREDEQAFALANGSNLMFCEDAARRIQKALDADDRLGDFHIRVEHQESLHPHDAVAYASKGVEGGYGSIG

SEQ ID NO: 13867 - protein, 315 aa, Rhodanobacter sp.
  REGION 1..315: note = tr|A0A1V3P464|A0A1V3P464_9GAMM GTP cyclohydrolase FolE2 OS=Rhodanobacter sp. C05 OX=1945855 GN=folE2 PE=3; SV = 1
MPNQENTARLLPDVAVHAQPHLAGALDWVGMADIQVPVLFDAGDGEVQRASARVGAFVNLNRPDKRGIHMSRLYLQVEQALSTQVLTADSLHALLRGFLDSHKDLSDRACLSIHFEQLVRRPALRSANSGWRAYPVCIEASLTDDEFLLEFGTEVVYSSTCPASAALSRQLIQDQFASDFDAAKPIDHAAVLAWLGSEHGIVATPHAQRSVARLRIRPVAGAGFHLIDLVDRVEHVLGTPVQTAVKREDEQAFALANGGNLMFCEDAARRIQKALDADAKLGDFHIRVEHQESLHPHDAVAYASKGVDGGYGSTP

SEQ ID NO: 13868 - protein, 201 aa, Rhodanobacter sp.
  REGION 1..201: note = tr|A0A522L8V3|A0A522L8V3_9GAMM GTP cyclohydrolase 1; OS = Rhodanobacter sp. OX=1883446 GN=folE PE=3 SV=1
MSEPPSPRTVTREQAEDAVRTLLRWAGDDPAREGLLDTPARVARAYRDWFSGYDEDPAEFLLRTFKEVDGYDEMVVLRDIEFESHCEHHLAPIIGRAHVGYLPTNRVVGISKLARVVDGFARRLQVQEKLTAQIAQCIQDTLQPAGVAVVIDATHGCMTTRGVHKTGVSMITSHMLGAFRNDARTRAEFLEFIGLHGSMRR

SEQ ID NO: 13869 - protein, 200 aa, Rhodanobacter spathiphylli
  REGION 1..200: note = tr|I4W2X1|I4W2X1_9GAMM GTP cyclohydrolase 1; OS = Rhodanobacter spathiphylli B39 OX=1163407 GN=folE PE=3; SV = 1
MNDRAKHPEVTPEQAEEAVRTLLRWAGEDPSREGLLDTPKRVVKAYRDWFSGYETDPGEYLRRTFKEVAGYDEMVVLRDIEFESHCEHHMAPIIGRAHVGYLPTNRVVGISKLARVVDGYARRFQVQEKLTAEIAHCIQETLQPAGVAVVIDASHECMTTRGVHKRGVSMVTSQMLGTFRDDARTRAEFLQFIGIHGGHR

SEQ ID NO: 13870 - protein, 315 aa, Rhodanobacter spathiphylli
  REGION 1..315: note = tr|I4W5U0|I4W5U0_9GAMM GTP cyclohydrolase FolE2; OS = Rhodanobacter spathiphylli B39 OX=1163407 GN=folE2 PE=3; SV = 1
MPNQENTARLLPDVAVHAQPHLAGALDWVGMADIQVPVLFDAGDGQPQRASARVGAFVNLKRPDKRGIHMSRLYLQVEQALSTQALGADMLHALLRGFLDSHGDLSDRACLSIRFEHLVRRPALKSANSGWRAYPVCIEASLTGDEFLLEFGTEVIYSSTCPASAALSRQLIQDQFASDFSADQPLDHAAVLAWLGSEKGIVATPHAQRSVARLRVRPVPGAGFHLVGLIDGVEHALGTPVQTAVKREDEQAFALANGGNLMFCEDAARRIQKSLDADATLSDFHIRVEHQESLHPHDAVAYASKGVEGGYGSAP

SEQ ID NO: 13871 - protein, 200 aa, Rhodanobacter thiooxydans; identical to SEQ ID NO: 13859
  REGION 1..200: note = tr|A0A154QIM8|A0A154QIM8_9GAMM GTP cyclohydrolase 1; OS = Rhodanobacter thiooxydans OX=416169 GN=folE PE=3 SV=1

SEQ ID NO: 13872 - protein, 315 aa, Rhodanobacter thiooxydans
  REGION 1..315: note = tr|A0A154QHK2|A0A154QHK2_9GAMM GTP cyclohydrolase FolE2 OS=Rhodanobacter thiooxydans OX=416169 GN=folE2 PE=3; SV = 1
MPNQENTARLLPDVAVHAQPHLAGALDWVGMADIQVPVLFDAGDGQVQRSSARVGAFVNLSRPDKRGIHMSRLYLQVEQALSTQTLDASMLHALLRGFLDSHKDLSDRACLSIQFEHLVRRPALKSANSGWRAYPVCIEASLTSDEFLLEFGTEVVYSSTCPASAALSRQLIQDQFASDFDAGQPLGHAAVLAWLGSERGIVATPHAQRSVARLRIRLVPGADFHLIGLIDRVEHALGTPVQTAVKREDEQAFALANGGNLMFCEDAARRIQKALDADAALGDFHVRVEHQESLHPHDAVAYASKGVEGGYGSTP

SEQ ID NO: 13873 - protein, 307 aa, unidentified
  source 1..307: note = Rhodanobacteraceae bacterium
  REGION 1..307: note = tr|A0A522QZM9|A0A522QZM9_9GAMM GTP cyclohydrolase FolE2 OS=Rhodanobacteraceae bacterium OX=2052182 GN=folE2; PE = 3 SV=1
MTSNIDNARLPDVATDVEPAAGGALDWVGMDGIDLPVRCADGDGGTLTVPARVSVQVNLADPEARGIHMSRLYLALEKSLGEQTLTPSGLCSLLHALVASHADLSSRARLRVEYSQLLKRRALVSDNAGWHAYPVTVGAQLFDDRFSVQLGCAVTYSSTCPASAALSRQLNRQRFDEDFADAVPSLRAVGEWIGSERGMAATPHAQRSTAHVMVRLAPGFDLPVSELIDAVETALETPVQTAVKREDEQAFAKLNAENLMFCEDAARRIRNALDTDERVAGYHIRAAHHESLHAHDAVAEVSRSFSW

SEQ ID NO: 13874 - protein, 305 aa, unidentified
  source 1..305: note = Rhodanobacteraceae bacterium
  REGION 1..305: note = tr|A0A522S373|A0A522S373_9GAMM GTP cyclohydrolase FolE2 OS=Rhodanobacteraceae bacterium OX=2052182 GN=folE2; PE = 3 SV=1
MNTVADDRRLPDVATGPEPAAGGALDWVGMDGIDLPVRCADGRGGTLTVPARVSVQVNLADPAARGIHMSRLYLALEQSLAGQVLTPAGLCSLLHALVASHAGLSSRARLRVEYSQLLQRPALVSDNTGWRAYPVTVEAQLLGERFSVQLGCELLYSSTCPASAALSRQLNQQRFDADFAGAVPSQRAVREWLGSERGVAATPHAQRSTANVVVRLAAGFDLPVSELVDMLERALATPVQTAVKREDEQAFAKLNAENLMFCEDAARRMCAALDTDARIAGYRIRAAHHESLHPHDAVAEVCKNF

SEQ ID NO: 13875 - protein, 363 aa, Rhodobaca barguzinensis
  REGION 1..363: note = tr|A0A2K8KD53|A0A2K8KD53_9RHOB GTP cyclohydrolase FolE2 OS=Rhodobaca barguzinensis OX=441209 GN=folE2 PE=3; SV = 1
MNLHVSSLEKTPSREEAEAALDVLRRFTDAAPVTERVEMEAAVTSLMPAAGYPVLNRDYPSEFEVDSAYKDGLPDLQNGPASLIVGAKAPIQHVGISNFRLPIRYHTRDNGDLTLETSVTGTVSLEAEKKGINMSRIMRSFYAHAERTFSADVIRAALDNYKTDLESFDARIMMRFSFPMKVQSLRSGLSGYQYYDIALELVDQGGVRQMFMHLDYVYSSTCPCSLELSEHARATRGQLATPHSQRSVARISVEVLEGEKLWFEDLIDLCRIAVPTETQVMVKREDEQAFAELNAANPIFVEDAARSFCAQLDGDVRIGDFRVVASHQESLHSHDAVSVLTRGASFEAASLDPRLFSTLFHVG

SEQ ID NO: 13876 - protein, 363 aa, Rhodobacter aestuarii
  REGION 1..363: note = tr|A0A1N7P594|A0A1N7P594_9RHOB GTP cyclohydrolase FolE2 OS=Rhodobacter aestuarii OX=453582 GN=folE2 PE=3 SV=1
MNIQGRIGTPDTDEAKAALEVLRLWAAEAHPAEVTALDPAIARLLPGAPESYPELARSYDAEFRPDAAYKAAMPDLQNGPSSLIVGAKTRIEHVGISNFRLPIKYRLRDGGEVVLETSVTGSVSLEAEKKGINMSRILRSFYTHAECEFSFEVMAAALDDYVENLESFDARLMMRFSLPLQVDSLRSGLTGWQYYDIALELVEQAGVRTKIVHLDFVYSSTCPCSLELSEDARIRRGRLATPHSQRSVARISAVIEPGKTLWFEDLIDLARANVPTETQVMVKREDEQAFAELNAANPIFVEDAVRAFAAGLMAEPRVGDFRVIASHQESLHSHDAVALLTEGPTFAQTSLDPQLFGTLIHRG

SEQ ID NO: 13877 - protein, 359 aa, Rhodobacter azotoformans
  REGION 1..359: note = tr|A0A2T5K6U1|A0A2T5K6U1_9RHOB GTP cyclohydrolase FolE2 OS=Rhodobacter azotoformans OX=43057 GN=folE2 PE=3; SV = 1
MNILTPVADRLPSREEAEEALAVLRRWAKHTPVSDVAGLAPDVPALVYPEFSRSYPRNFTVDEAYKASLPDLQNGPASLIVGAKAVIQHVGISNFRLPIRYHTRDNGDLTLETSVTGTVSLEAEKKGINMSRIMRSFYAHAEQGFSFEVIERALEDYKRDLESFDARIQMRFSFPVKVPSLRSGLVGWQYYDIALELVDRGGVRKKIMHLDFVYSSTCPCSLELSEHARRERGQLATPHSQRSVARISVEVRPGKCLWFEDLIELARAAVPTETQVMVKREDEQAFAELNAANPIFVEDAARSFCQALQSDPRIGDFRVVASHQESLHSHDAVSVLTEGPTFAAESLDPRLFASLYHTG

SEQ ID NO: 13878 - protein, 363 aa, Rhodobacter blasticus
  REGION 1..363: note = tr|A0A2T4J4K2|A0A2T4J4K2_RHOBL GTP cyclohydrolase FolE2 OS=Rhodobacter blasticus DSM 2131 OX=1188250; GN = folE2 PE=3 SV=1
MNVHTPEIDRKPSREEAEAALAVLRQWAGKSSDEEISRLDPAVGNLLPGHGYPALSRVYPADFVADDAYKATLPDLQNGPASLIVGERQTIQHVGISNFRLPIRYRTRDNGEVMLETSVTGTVSLEAEKKGINMSRIMRSFYAHSEKDFSFAVIEHALDDYKRDLGAFDARIQMRFSFPVRVASLRSGLSGWQYYDIALELVDAGGVRKKIMHLDYVYSSTCPCSLELSEHARMTRGQLATPHSQRSVARISVELSGKACLWFEDLIDLAREGVPTETQVMVKREDEQAFAELNAANPIFVEDAARSFCKALKADARVGDFRVVASHQESLHSHDAVSLLTEGPTFAAESLDPRLFASLIHAG

SEQ ID NO: 13879 - protein, 363 aa, Rhodobacter capsulatus
  REGION 1..363: note = tr|D5ATE9|D5ATE9_RHOCB GTP cyclohydrolase FolE2; OS = Rhodobacter capsulatus (strain ATCC BAA-309 / NBRC 16581 / SB1003) OX=272942 GN=folE2 PE=3 SV=1
MNIHGRIDTPDTAEAKAALELLRAFVAQAHPAEVAALDPAIARLFTPVPGPYPELARVYDAEFRPDDAYKAAMPDLQNGPASLIRGAKTRIEHVGISNFRLPIRYKLRDGGDVMLETSVTGTVSLEAEKKGINMSRILRSFYAHSESEFSFEVMAAALDDYIDHLESFDARLMMRFSLPLQVESLRSGLRGWQYYDIALELVEQAGVRTKIVHLDYVYSSTCPCSLELSEDARIRRGRLATPHSQRSVARISAVIEPGKTLWFEDLIEIARANVPTETQVMVKREDEQAFAELNAANPIFVEDAVRSFAAGLMAEPRVGDFRVIASHQESLHSHDAVAVLTEGPTFASASLDPKLFASLVHAG

SEQ ID NO: 13880 - protein, 363 aa, Rhodobacter capsulatus; identical to SEQ ID NO: 13879
  REGION 1..363: note = tr|A0A0E2PFH5|A0A0E2PFH5_RHOCA GTP cyclohydrolase FolE2 OS=Rhodobacter capsulatus Y262 OX=1415161 GN=folE2; PE = 3 SV=1

SEQ ID NO: 13881 - protein, 359 aa, Rhodobacter johrii
  REGION 1..359: note = tr|A0A330HDS6|A0A330HDS6_9RHOB GTP cyclohydrolase FolE2 OS=Rhodobacter johrii OX=445629 GN=folE2 PE=3 SV=1
MNILTPVAERLPSREEAEEALAVLRRWAKHTPASDMAALAPDAPALVYPELSRSYPRTFTVDEAYKASLPDLQNGPASLIVGAKAVIQHVGISNFRLPIRYHTRDNGDLLLETSVTGTVSLEAEKKGINMSRIMRSFYAHAEQSFSFEVIERALEDYKRDLESFDARIQMRFSFPVKVPSLRSGLVGWQYYDIALELVDRGGVRKEIMHLDFVYSSTCPCSLELSEHARRERGQLATPHSQRSVARISVEVRPGKCLWFEDLLDLARSAVPTETQVMVKREDEQAFAELNAANPIFVEDAARSFCQALQSDPRIGDFRVVASHQESLHSHDAVSVLTEGPTFAAESLDPKLFSSLYHVG

SEQ ID NO: 13882 - protein, 363 aa, Rhodobacter maris
  REGION 1..363: note = tr|A0A285RZC8|A0A285RZC8_9RHOB GTP cyclohydrolase FolE2 OS=Rhodobacter maris OX=446682 GN=folE2 PE=3 SV=1
MNIQGRIGTPDMDEAKAALETLRLWAAEAHPGEVAALDPAIARLLPGAPASYPDLARVYDATFRPDAAYKAAMPDLQNGPASLIVGAKTRIEHVGISNFRLPIKYRLRDGGEVVLETSVTGSVSLEAEKKGINMSRILRSFYAHAEREFSFEVMAAALDDYVENLESFDARLMMRFSLPLQVESLRSGLSGWQYYDIALEMVDQGGVRTKIVHLDFVYSSTCPCSLELSEDARIRRGRLATPHSQRSVARISVVVEPGQVLWFEDLIEIARANVPTETQVMVKREDEQAFAELNAANPIFVEDAVRAFAAGLMAEPRVGDFRVIASHQESLHSHDAVALLTEGPTFAAASLDPQLFASLIHRG

SEQ ID NO: 13883 - protein, 359 aa, Rhodobacter megalophilus
  REGION 1..359: note = tr|A0A239JBY7|A0A239JBY7_9RHOB GTP cyclohydrolase FolE2 OS=Rhodobacter megalophilus OX=418630 GN=folE2 PE=3; SV = 1
MNILTPVAERLPSREEAEEALAVLRRWAAHTPASDIAALAPEAPALVYPDLSRAYPRTFTVDEAYKASLPDLQNGPASLIVGAKAVIQHVGISNFRLPIRYHTRDNGDLQLETSVTGTVSLEAEKKGINMSRIMRSFYAHAEQAFSFEVIERALEDYKRDLESFDARIQMRFSFPVKVPSLRSGLTGWQYYDIALELVDRGGVRKEIMHLDFVYSSTCPCSLELSEHARRERGQLATPHSQRSVARISVEVRQGKCLWFEDLLDLVRSAVPTETQVMVKREDEQAFAELNAANPIFVEDAARSFCQALQSDPRIGDFRVVASHQESLHSHDAVSVLTEGPTFAAESLDPRLFSSLYHVG

SEQ ID NO: 13884 - protein, 359 aa, Rhodobacter ovatus
  REGION 1..359: note = tr|A0A285CQ51|A0A285CQ51_9RHOB GTP cyclohydrolase FolE2 OS=Rhodobacter ovatus OX=439529 GN=folE2 PE=3 SV=1
MNILTPVSDRIPSRDEAEAALDLLRRWARATPVGEVTLLAPDVPSMVYPDLSRTYPKGFVADEAYKAGMPDLQNGPASLIVGAKAVIQHVGISNFRLPIRYHTRDNGDLTLETSVTGTVSLEAEKKGINMSRIMRSFYAHAERSFSFEVIEHALDDYKRDLESFDARIQMRFSFPVKVPSLRSGLVGWQYYDIALELVDKGGVRRKIMHLDFVYSSTCPCSLELSEHARRERGQLATPHSQRSVARISVEVLPGQCLWFEDLIELARAAVPTETQVMVKREDEQAFAELNAANPIFVEDAARSFCQALQSESRIGDFRVVASHQESLHSHDAVSVLTEGPTFATDSLDPRLFASLYHIG

SEQ ID NO: 13885 - protein, 362 aa, Rhodobacter sp.
  REGION 1..362: note = tr|C8S0W5|C8S0W5_9RHOB GTP cyclohydrolase FolE2; OS = Rhodobacter sp. SW2 OX=371731 GN=folE2 PE=3 SV=1
MNIHMPEIDRKPSRAQAEAALALLRQWAGTASDAEIAAVDPDALLLLGQGETVLSRAYPEDFVATEAYKATLPDLQNGPASLIVGTRTQIQHVGISNFRLPIRYHTRDNGDLTLETSVTGTVSLEAEKKGINMSRIMRSFYAHAERDFSFEVIEHALEDYKRDLQSFDARIQMRLSFPAKVQSLRSGLTGWQYYDIALELVDAGGVRKKIMHLDFVYSSTCPCSLELSEHARRSRGQLATPHSQRSVARISVVVNDGECLWFEDLIDLARAAVPTETQVMVKREDEQAFAELNGANPIFVEDAARSFCAKLLDDPRIGDFRVLASHQESLHSHDAVSLLTQGPTFAQESLDPRLFGTLFHVG

SEQ ID NO: 13886 - protein, 369 aa, Rhodobacter sp.
  REGION 1..369: note = tr|A0A366JQE5|A0A366JQE5_9RHOB GTP cyclohydrolase FolE2 OS=Rhodobacter sp. 140A OX=2183910 GN=folE2 PE=3 SV=1
MNKHERSNSPDTEAAKAALATLRAWAERADPVEVARLDPAIARLLPGHALSNYPDLVRSYDAGFRPDAAYKDGMPDLQNGPASLITGAHAPIAHVGISNFRLPIRYRLRPGTDNPPGEVTLETSVTGTVSLDAEKKGINMSRIIRSFYGHAEREFSFEVMAAALDGYKDHLDSFDARLMMRFSYPVRVESLRSGLSGWQYYDIALEMADQGGRRLKAIHLDYVYSSTCPCSLELSEHARRDRGRLATPHSQRSVARISVAVEPGAPLWFEDLIDIARAAVPTETQVMVKREDEQAFAELNAAHPIFVEDAVRVFAAGLLAEPRVGDFRVVASHQESLHSHDAVAVLTEGPTFAAASLDPRFFASLVHSR

SEQ ID NO: 13887 - protein, 359 aa, Rhodobacter sphaeroides
  REGION 1..359: note = sp|B9KM22|GCH4_RHOSK GTP cyclohydrolase FolE2; OS = Rhodobacter sphaeroides (strain KD131 / KCTC 12085); OX = 557760 GN=folE2 PE=3 SV=1
MNILTPVAERLPSREEAEEALAVLRRWATHTPASDVAALAPEAPALVYPELSRSYPRAFTVDEAYKASLPDLQNGPASLIVGAKAVIQHVGISNFRLPIRYHTRDNGDLQLETSVTGTVSLEAEKKGINMSRIMRSFYAHAEQAFSFEVIERALEDYKRDLESFDARIQMRFSFPVKVPSLRSGLTGWQYYDIALELVDRGGVRKEIMHLDFVYSSTCPCSLELSEHARRERGQLATPHSQRSVARISVEVRQGKCLWFEDLLDLVRSAVPTETQVMVKREDEQAFAELNAANPIFVEDAARSFCQALQSDPRIGDFRVVASHQESLHSHDAVSVLTEGPTFAAESLDPRLFSSLYHVG

SEQ ID NO: 13888 - protein, 359 aa, Rhodobacter sphaeroides
  REGION 1..359: note = tr|A0A370Y5D1|A0A370Y5D1_RHOSH GTP cyclohydrolase FolE2 OS=Rhodobacter sphaeroides f. sp. denitrificans; OX = 39723 GN=folE2 PE=3 SV=1
MNILTPVAERLPSREEAEEALAVLRRWAKHTPASDMAALAPDAPALVYPELSRSYPRTFTVDEAYKASLPDLQNGPASLIVGAKAVIQHVGISNFRLPIRYHTRDNGDLLLETSVTGTVSLEAEKKGINMSRIMRSFYVHAEKSFSFEVIERALEDYKRDLESFDARIQMRFSFPVKVPSLRSGLVGWQYYDIALELVDRGGVRKEIMHLDFVYSSTCPCSLELSEHARRERGQLATPHSQRSVARISVEVRPGKCLWFEDLLDLARSAVPTETQVMVKREDEQAFAELNAANPIFVEDAARSFCQALQSDPRIGDFRVVASHQESLHSHDAVSVLTEGPTFAAESLDPKLFSSLYHVG

SEQ ID NO: 13889 - protein, 365 aa, Rhodobacter veldkampii
  REGION 1..365: note = tr|A0A2T4JKG4|A0A2T4JKG4_9RHOB GTP cyclohydrolase FolE2 OS=Rhodobacter veldkampii DSM 11550 OX=1185920; GN = folE2 PE=3 SV=1
MNIQGRISHAPDRQEAEEALERLRAWAMAATETEIATLDPVIARLLPGREGASYPDLSRRYPEEFRADAAYKATLPDLQNGPASLIVGAKTQIQHVGISNFRLPIRYHTRDNGDLTLETSVTGTVSLEAEKKGINMSRIMRSFYAHAERTFSFDVIEAALDDYKADLGSFDARIQMRFSFPMTVGSLRSGLAGWQYYNIALEVVERAGVRKKIVHLDYVYSSTCPCSLELSEHARATRGQLATPHSQRSVARISVVVEPGGVLWFEDLIDMARAAVPTETQVMVKREDEQAFAELNAANPIFVEDAARAFAGVLLADWRVGDFRVLASHQESLHSHDAVSLLTEGPTFAAESLDPRLFASLIHHG

SEQ ID NO: 13890 - protein, 365 aa, Rhodobacter vinaykumarii
  REGION 1..365: note = tr|A0A1N7L6G6|A0A1N7L6G6_9RHOB GTP cyclohydrolase FolE2 OS=Rhodobacter vinaykumarii OX=407234 GN=folE2 PE=3; SV = 1
MNIHGRILGAPDREDARSALETLRAWAAEATEAEISTLDPAIARLVPGRAPDSYPTLSRAYPADFAVDEAYKDSLPDLQNGPSSLIVGARTQIQHVGISNFRLPIRYHTRDNGDITLETGVTGTVSLEAEKKGINMSRIMRSFYAHAERTFSFEVMEAALDDYKSDLESFDARIQMRLSFPMKVDSLRSGLSGWQYYDIALELVERAGVRKKIVHLDFVYSSTCPCSLELSEHARATRGQLATPHSQRSVARISVVLEPGAVLWFEDLIEAARAAVPTETQVMVKREDEQAFAELNAANPIFVEDAARAFAAVLLADPRVGDFRILASHQESLHSHDAVSLLTEGPTFAAESLDPHLFATLIHRG

SEQ ID NO: 13891 - protein, 363 aa, unidentified
  source 1..363: note = Rhodobacter viridis
  REGION 1..363: note = tr|A0A318TY05|A0A318TY05_9RHOB GTP cyclohydrolase FolE2 OS=Rhodobacter viridis OX=1054202 GN=folE2 PE=3 SV=1
MNIHGRIDTPDTAEAKAALEVLRAFVAQAHPAEVAGLDPAIARLFNPAPTPYPELARVYDAEFRPDDAYKAAMPDLQNGPASLIRGAKTRIEHVGISNFRLPIRYKLRDGGDVTLETSVSGTVSLEAEKKGINMSRILRSFYAHSESEFSFEVMAAALDDYIDHLESFDARLMMRFSLPLQVESLRSGLRGWQYYDIALELVEQAGVRTKIVHLDYVYSSTCPCSLELSEDARIRRGRLATPHSQRSVARISVVVEPGKTLWFEDLIEIARDNVPTETQVMVKREDEQAFAELNAANPIFVEDAVRSFAAGLMAEPRVADFRVIASHQESLHSHDAVAVLTEGPTFASASLDPKLFASLVHAG

SEQ ID NO: 13892 - protein, 364 aa, unidentified; identical to SEQ ID NO: 4675
  source 1..364: note = Rhodobacteraceae bacterium
  REGION 1..364: note = tr|A0A327LS97|A0A327LS97_9RHOB GTP cyclohydrolase FolE2 OS=Rhodobacteraceae bacterium AsT-22 OX=2230886; GN = folE2 PE=3 SV=1

SEQ ID NO: 13893 - protein, 367 aa, unidentified
  source 1..367: note = Rhodobacteraceae bacterium
  REGION 1..367: note = tr|A0A2V2LMJ9|A0A2V2LMJ9_9RHOB GTP cyclohydrolase FolE2 OS=Rhodobacteraceae bacterium TG-679 OX=2072018; GN = folE2 PE=3 SV=1
MNIHSPVLDRDLTREDAAQALAVLRRWAGQATEAEVETLDPAVKRLAAAPEPGSYPDLSRFYPEDFAVTPDYKAALPDLQNGPASLIKGARQQIQHVGISNFRLPIRFRTRDNGDLTLETSVTGTVSLEAEKKGINMSRIMRTFYGHAEKTFSFGVIEAALDDYKTDLESFDARIQMRFSFPVKVPSLRSGLAGYQYYDIALELVESAGVRKRIVHLDYVYSSTCPCSLELSEHARSTRGQLATPHSQRSVARVSVELDEAAGTLWFEDLIEMCRAAVPTETQVMVKREDEQAFAELNAANPIFVEDAARLFCAQLLGDPRIGDFRIVASHQESLHSHDAVSVLTEGATFASESLDPRLFGTLFHIG

SEQ ID NO: 13894 - protein, 367 aa, unidentified
  source 1..367: note = Rhodobacterales bacterium
  REGION 1..367: note = tr|A0A1Y5HJW1|A0A1Y5HJW1_9RHOB GTP cyclohydrolase FolE2 OS=Rhodobacterales bacterium 56_14_T64 OX=1856299; GN = folE2 PE=3 SV=1
MNIHAHKTDEKPDRDAAEAALLVLRNWAAGATETEIALLDPAVARLLPGRELQNYPDLSRQYPEDFISDEIYRATLPDLQNGPSSLIRGAKQQIQHVGISNFRLPIRFHTRDDGDLTLETSITGTVSLEGEKKGINMSRIMRSFYKHADRTFSFEVMAAALDDYLSDLDSPDARIQMRFSFPARVSSLRSGLSGYQYYDFALELVDHDGVREKIIHMDYVYSSTCPCSLELSEHARAVRGQLATAHSQRSVARLSVQVKPEGDCLWFEDLIDHCRKAVPTETQVMVKREDEQAFAELNAANPIFVEDAARLFCEVLQSDPRIGDFRVLASHQESLHSHDAVSVLTNGNTFVSRSLDPKLFSTLIHQG

SEQ ID NO: 13895 - protein, 362 aa, unidentified
  source 1..362: note = Rhodobacterales bacterium
  REGION 1..362: note = tr|A0A1Q4CQG8|A0A1Q4CQG8_9RHOB GTP cyclohydrolase FolE2 OS=Rhodobacterales bacterium 65-51 OX=1895824; GN = folE2 PE=3 SV=1
MNIRTPELDRKPGPEEVEAALALIRQWASKASDTEMLALDPAARALIGDGYPDLSTIYPAEFRADAAYKATLPDLQNGPASLIRGAKTQIQHVGISNFRLPIRYRTRDAGEVLLETSVTGTVSLEAEKKGINMSRIMRSFYTHAERDFSFDVIEHALSDYKRDLESFDARIQMRFSFPVKVPSLRSGLSGWQYYDIALELVDRAGERLKIMHLDYVYSSTCPCSLELSEHARRTRGQLATPHSQRSVARISVVANPGPALWFEDLIELCRRAVPTETQVMVKREDEQAFAELNAANPIFVEDAARLFCAQLQADPRAGDFRIVASHQESLHSHDAVSVLTEGPTFAQASLDPRLFGTLFHVG

SEQ ID NO: 13896 - protein, 207 aa, unidentified
  source 1..207: note = Rhodobiaceae bacterium
  REGION 1..207: note = tr|A0A2E1MT66|A0A2E1MT66_9RHIZ GTP cyclohydrolase 1; OS = Rhodobiaceae bacterium OX=2026785 GN=folE PE=3 SV=1
MDVKVSDKTIHTESNNQDLKKPSREEAMDAVRTLISWAGDDPSREGLVETPKRVVKAYEEFFAGYNQDPVKVLGKTFSDVKGYDDIVFLRDINIETHCEHHMVPILGKAHVAYLPKNKVVGISKLARVIEIFAKRLQTQETMTMQILNTIDDTLEPYGSAIMIDAKHQCMTTRGINKPNVSTVTTKFSGSFSNDTDLRQRFMQLTKE

SEQ ID NO: 13897 - protein, 208 aa, unidentified
  source 1..208: note = Rhodobiaceae bacterium
  REGION 1..208: note = tr|A0A2D7FQM5|A0A2D7FQM5_9RHIZ GTP cyclohydrolase 1; OS = Rhodobiaceae bacterium OX=2026785 GN=folE PE=3 SV=1
MDARVDGNNTPTNRERDIKVEKPSREEAEAAVRTLISWAGDNPDREGLVDTPKRVVKAYQEFFAGYDEDPEEVLGRTFEDVEGYDDMVMLRDISLESHCEHHMVAILGKVHIAYMPVDKVVGISKLARVIEIFAKRLQTQETMTAQIVDCIQRVMEPAGIAILVDAKHQCMTTRGIRKPDVATITTQFTGVFAEDPKMEARFLAMINS

SEQ ID NO: 13898 - protein, 211 aa, Rhodobium orientis
  REGION 1..211: note = tr|A0A327JRT6|A0A327JRT6_9RHIZ GTP cyclohydrolase 1; OS = Rhodobium orientis OX=34017 GN=folE PE=3 SV=1
MDAIVKSLRPADEKEVALEPVRRPTREEAEAAVRTLIAWAGDNPDREGLVDTPKRVAKAFEEFYRGYNERAEDALERTFDEVGGYEDIVLVRDIPFYSHCEHHLVPFVGKAHIAYYPSEGVVGLSKLARVVDVFARRMQTQENLTAQIIGAIDETLKPRGVAVMLEAEHQCMSLRGVQKPGVSTITSQFTGVFQDDPTEQVRFLTLVRSGK

SEQ ID NO: 13899 - protein, 210 aa, Rhodoblastus acidophilus
  REGION 1..210: note = tr|A0A212R9B0|A0A212R9B0_RHOAC GTP cyclohydrolase 1; OS = Rhodoblastus acidophilus OX=1074 GN=folE PE=3 SV=1
MDDMVKSARPHRERAKKNAIGRKPTREEAEAAVATLLAWAGDDPSREGLRETPARVAKAYLEVFAGYAQDPSDVLDTVFEDVGGYGEMVLVKDIPFYSHCEHHMAPFFGHAHIAYYPAGGVFGLSKFGRLVDIYARRLQTQETMTAQILAALDARLNSRGAAVMIEAEHMCMSMRGVRKPGATTVTMQFSGPFKTDPAEQARFLSLVRRR

SEQ ID NO: 13900 - protein, 210 aa, Rhodoblastus sphagnicola
  REGION 1..210: note = tr|A0A2S6MXX0|A0A2S6MXX0_9RHIZ GTP cyclohydrolase 1; OS = Rhodoblastus sphagnicola OX=333368 GN=folE PE=3 SV=1
MDDVVKSARPQRERTAEKNDARKPTREEAEAAVATLLAWAGDDPSREGLRDTPARVAKAYEELFAGYAQDPSDVLDTVFEDVGGYGEMVLVRDIPFYSHCEHHMAPFFGHAHIAYYPSGGVFGLSKFGRLVDIYARRLQTQETMTAQILAALDARLHSRGAAVMIEAEHMCMSMRGVRKPGASTVTMQFSGPFKTDPAEQARFLTLVRGR

SEQ ID NO: 13901 - protein, 217 aa, Rhodococcus aetherivorans
  REGION 1..217: note = tr|A0A059MTK4|A0A059MTK4_9NOCA GTP cyclohydrolase 1; OS = Rhodococcus aetherivorans OX=191292 GN=folE PE=3 SV=1
MSVNHLDSETDSASIGGDGEVLRSLESGRVFDQARAEAAVRELLIAVGEDPEREGLLDTPARVARAYREMFAGLYTDPDSVLDKTFDEGHQELVLVRDIPMYSTCEHHLVSFHGVAHVGYIPGRTGRVTGLSKLARVVDLYAKRPQVQERLTSQIADALVRKLDPVGVIVVVEAEHLCMAMRGIRKPGASTTTSAVRGLLQSNSASRAEALDLILRR

SEQ ID NO: 13902 - protein, 205 aa, unidentified
  source 1..205: note = Rhodococcus agglutinans
  REGION 1..205: note = tr|A0A3S3ATA7|A0A3S3ATA7_9NOCA GTP cyclohydrolase 1; OS = Rhodococcus agglutinans OX=1644129 GN=folE PE=3 SV=1
MSVNQLGSETVALMTGRPFDQARAEAAVRELLIAVGEDPDRPGLLDTPGRVARAYREVFAGLYTDPDDVLNTTFDEGHQEMVLVRDIPMYSTCEHHLVSFHGVAHVGYIPGPTGRVTGLSKLARLVDLYAKRPQVQERLTSQIADALVRKLDPRGAIVVIEAEHLCMAMRGIRKPGASTTTSAVRGLFQSNSASRAEALDLILRK

SEQ ID NO: 13903 - protein, 221 aa, unidentified
  source 1..221: note = Rhodococcus biphenylivorans
  REGION 1..221: note = tr|A0A2Z4VE99|A0A2Z4VE99_9NOCA GTP cyclohydrolase 1; OS = Rhodococcus biphenylivorans OX=1500843 GN=folE PE=3 SV=1
MEGERVSVNHLKSDTGSDPEDVTTHELSVDAGRTFDQARAEAAVRELLIAVGEDPDREGLRDTPARVARAYREVFGGLFTDPDEVLDTTFDEGHQELVLVRDIPMYSTCEHHLVSFHGVAHVGYIPGPTGRVTGLSKLARVVDLYAKRPQVQERLTRQIADAMMRKLQPRGVIVVVEAEHLCMAMRGIRKPGASTTTSAVRGLFQTSSASRAEALDLILRR

SEQ ID NO: 13904 - protein, 218 aa, Rhodococcus coprophilus
  REGION 1..218: note = tr|A0A2X4UHS0|A0A2X4UHS0_9NOCA GTP cyclohydrolase 1; OS = Rhodococcus coprophilus OX=38310 GN=folE PE=3 SV=1
MSVDHVSTATGSGMDDDDVVSQTLSVEAGRVFDQARAEAAVRELLIAVGEDPEREGLRDTPARVARAYREVFAGLFTNPDEVLNTTFDEGHRELVLVRDIPMYSTCEHHLVSFHGVAHVGYIPGPTGRVTGLSKLARVVDLYAKRPQVQERLTSQIADALVRKLEPRGVIVVVEAEHLCMAMRGIRKPGASTTTSAVRGLLQTSSASRAEALDLILRR

SEQ ID NO: 13905 - protein, 205 aa, unidentified
  source 1..205: note = Rhodococcus enclensis
  REGION 1..205: note = tr|A0A1C4EYL4|A0A1C4EYL4_9NOCA GTP cyclohydrolase 1; OS = Rhodococcus enclensis OX=1049584 GN=folE PE=3 SV=1
MSVNDVASELVSLGTGRPFDQARAEAAVRELLIAVGEDPERPGLLDTPARVARSYKEIFAGLYSEPDDALNTTFDEGHQELVLVRDIPMFSTCEHHLVSFHGVAHVGYIPGKSGKVTGLSKLARVVDLYAKRPQVQERLTSQIADALMRKLDPRGAIVVIEAEHLCMAMRGIRKPGASTTTSAVRGLLQSSAASRSEALDLILRK

SEQ ID NO: 13906 - protein, 205 aa, Rhodococcus erythropolis; identical to SEQ ID NO: 13905
  REGION 1..205: note = tr|C0ZPK6|C0ZPK6_RHOE4 GTP cyclohydrolase 1; OS = Rhodococcus erythropolis (strain PR4 / NBRC 100887); OX = 234621 GN=folE PE=3 SV=1

SEQ ID NO: 13907 - protein, 205 aa, Rhodococcus erythropolis; identical to SEQ ID NO: 13905
  REGION 1..205: note = tr|A0A0C3AE84|A0A0C3AE84_RHOER GTP cyclohydrolase 1; OS = Rhodococcus erythropolis OX=1833 GN=folE PE=3 SV=1

SEQ ID NO: 13908 - protein, 227 aa, Rhodococcus fascians
  REGION 1..227: note = tr|A0A161GMH1|A0A161GMH1_RHOFA GTP cyclohydrolase 1; OS = Rhodococcus fascians D188 OX=1051973 GN=folE PE=3 SV=1
MSVNRTDESTGDSAEVPAAVQSVVPQQGITETVAYATGAVFDQPRAEAAVRELLIAVGEDPDRPGLLDTPARVARSYREIFAGLYTDPDTALNTTFDEGHQELVLVRDIPMYSTCEHHLVSFHGVAHVGYIPGKSGKVTGLSKLARVVDMYAKRPQVQERLTSQIADALMRKLDPRGAIVVIEAEHLCMAMRGIRKPGASTTTSAVRGLLQSSAASRSEALDLILRK

SEQ ID NO: 13909 - protein, 188 aa, Rhodococcus fascians
  REGION 1..188: note = tr|A0A260U2C0|A0A260U2C0_RHOFA GTP cyclohydrolase 1; OS = Rhodococcus fascians OX=1828 GN=folE PE=3 SV=1
MFDQPRAEAAVRELLIAVGEDPDRPGLLDTPARVARSYREIFAGLYTDPDTALNTTFDEGHQELVLVRDIPMYSTCEHHLVSFHGVAHVGYIPGKSGKVTGLSKLARVVDMYAKRPQVQERLTSQIADALMRKLDPRGAIVVIEAEHLCMAMRGIRKPGASTTTSAVRGLLQSSAASRSEALDLILRK

SEQ ID NO: 13910 - protein, 216 aa, Rhodococcus gordoniae
  REGION 1..216: note = tr|A0A379M295|A0A379M295_9NOCA GTP cyclohydrolase 1; OS = Rhodococcus gordoniae OX=223392 GN=folE PE=3 SV=1
MSVNHLKSDTGSDPEDVTTHALSVDAGRTFDQARAEAAVRELLIAVGEDPDREGLRDTPARVARAYREVFGGLFTDPDEVLDTTFDEGHQELVLVRDIPMYSTCEHHLVSFHGVAHVGYIPGPTGRVTGLSKLARVVDLYAKRPQVQERLTSQVADAMMRKLQPRGVIVVVEAEHLCMAMRGIRKPGASTTTSAVRGLFQTSSASRAEALDLILRR

SEQ ID NO: 13911 - protein, 219 aa, unidentified
  source 1..219: note = Rhodococcus hoagii
  REGION 1..219: note = tr|A0A3S5Y2E7|A0A3S5Y2E7_RHOH1 GTP cyclohydrolase 1; OS = Rhodococcus hoagii (strain 103S) OX=685727 GN=folE PE=3; SV = 1
MGQGSQPRYWRCGRLSVNQLGSESVALATGRPFDQARAEAAVRELLLAVGEDPDRPGLLDTPARVARAYREVFAGLYTNPDDVLNTTFDEGHQELVLVRDIPMYSTCEHHLVSFHGVAHVGYIPGPEGRVTGLSKLARLVDLYAKRPQVQERLTSQIADALMAKLAPRGAIVVVEAEHLCMAMRGIRKPGASTTTSAVRGLFQSNSASRAEALDLILRK

SEQ ID NO: 13912 - protein, 205 aa, unidentified
  source 1..205: note = Rhodococcus hoagii
  REGION 1..205: note = tr|A0A2K7TVR9|A0A2K7TVR9_RHOHA GTP cyclohydrolase 1; OS = Rhodococcus hoagii OX=43767 GN=folE PE=3 SV=1
MSVNQLGSESVALATGRPFDQARAEAAVRELLLAVGEDPDRPGLLDTPARVARAYREVFAGLYTNPDDVLNTTFDEGHQELVLVRDIPMYSTCEHHLVSFHGVAHVGYIPGPEGRVTGLSKLARLVDLYAKRPQVQERLTSQIADALMAKLAPRGAIVVVEAEHLCMAMRGIRKPGASTTTSAVRGLFQSNSASRAEALDLILRK

SEQ ID NO: 13913 - protein, 188 aa, Rhodococcus imtechensis
  REGION 1..188: note = tr|I0W6R1|I0W6R1_9NOCA GTP cyclohydrolase 1; OS = Rhodococcus imtechensis RKJ300 = JCM 13270 OX=1165867; GN = folE PE=3 SV=1
MFDQPRAEAAVRELLIAIGENPDRPGLRDTPARVARSYREVFAGLYTDPDTVLNTTFDEGHQELVLVRDIPLYSTCEHHLVSFHGVAHVGYIPGKTGKVTGLSKLARVVDLYAKRPQVQERLTSQIADAVMRKLDPRGAIVVIEAEHLCMAMRGIRKPGASTTTSAVRGLLQSSAASRSEALDLILRK

SEQ ID NO: 13914 - protein, 198 aa, Rhodococcus imtechensis
  REGION 1..198: note = tr|I0WDH5|I0WDH5_9NOCA GTP cyclohydrolase 1; OS = Rhodococcus imtechensis RKJ300 = JCM 13270 OX=1165867; GN = folE PE=3 SV=1
MPSTATLHVLHQAPGRDLAAAEEAAAAFLEALGIDLDSESLRQTPRRMAHGYAELFTPRAFDLTTFPNDEDYDELVLVRNVPLRSVCEHHLLPFAGTVHIGYLPGERIIGLSKLARVAEHFACRPQVQERLTKQIAGWLDEHLHPRGVGVVIEAEHSCMTLRGVQSVGSATVTSALLGALRDDPRSRQEFFALAGVHA

SEQ ID NO: 13915 - protein, 203 aa, Rhodococcus jostii
  REGION 1..203: note = tr|Q0RVZ8|Q0RVZ8_RHOJR GTP cyclohydrolase 1; OS = Rhodococcus jostii (strain RHA1) OX=101510 GN=folE PE=3; SV = 1
MTVVNDVVVAVQTGRTFDQPRAEAAVRELLAAVGEDPDRPGLVDTPARVARAYKEIFGGLYTDPDSVLNTTFDEGHQELVLVRDIPMFSTCEHHLVSFHGVAHVGYIPGKSGKVTGLSKLARVVDLYAKRPQVQERLTSQIADAVMRKLDPRGAIVVVEAEHLCMAMRGIRKPGASTTTSAVRGLLQSSAASRAEALDLILRK

SEQ ID NO: 13916 - protein, 205 aa, Rhodococcus jostii
  REGION 1..205: note = tr|Q0S8E2|Q0S8E2_RHOJR GTP cyclohydrolase 1; OS = Rhodococcus jostii (strain RHA1) OX=101510 GN=folE PE=3; SV = 1
MSVNHLGSEPVALETGRVFDQPRAEAAVRELLIAIGEDPDRPGLRDTPSRVARSYREVFAGLYTDPDTVLNTTFDEGHQELVLVRDIPLYSTCEHHLVSFHGVAHVGYIPGKTGKVTGLSKLARVVDLYAKRPQVQERLTSQIADAVMRKLDPRGAIVVIEAEHLCMAMRGIRKPGASTTTSAVRGLLQSSAASRSEALDLILRK

SEQ ID NO: 13917 - protein, 198 aa, Rhodococcus koreensis; identical to SEQ ID NO: 13914
  REGION 1..198: note = tr|A0A1H4LVQ7|A0A1H4LVQ7_9NOCA GTP cyclohydrolase 1; OS = Rhodococcus koreensis OX=99653 GN=folE PE=3 SV=1

SEQ ID NO: 13918 - protein, 203 aa, Rhodococcus koreensis
  REGION 1..203: note = tr|A0A1H4TW26|A0A1H4TW26_9NOCA GTP cyclohydrolase 1; OS = Rhodococcus koreensis OX=99653 GN=folE PE=3 SV=1
MNHLGSEPVALETGRVFDQPRAEAAVRELLIAIGEDPDRPGLRDTPARVARSYREVFAGLYTDPDTVLNTTFDEGHQELVLVRDIPLYSTCEHHLVSFHGVAHVGYIPGRTGKVTGLSKLARVVDLYAKRPQVQERLTSQIADAVMRKLDPRGAIVVIEAEHLCMAMRGIRKPGASTTTSAVRGLLQSSAASRSEALDLILRK

SEQ ID NO: 13919 - protein, 208 aa, Rhodococcus kroppenstedtii
  REGION 1..208: note = tr|A0A1I0TTA4|A0A1I0TTA4_9NOCA GTP cyclohydrolase 1; OS = Rhodococcus kroppenstedtii OX=293050 GN=folE PE=3 SV=1
MSLSRVDESYDQPVSVSNGRPFDRERAEAAVRELLLAVGEDPDREGLKDTPARVARAYAEVFGGLFVDPDSVLDTTFDESHRELVLVRDIPMYSTCEHHLVSFHGVAHVGYIPGPSGRVTGLSKLARVVDLYAKRPQVQERLTTQVADALMRKLEPRGVIVVMEAEHLCMAMRGIRKPGARTTTSAVRGVFQSSAVSRSEALDLILRG

SEQ ID NO: 13920 - protein, 212 aa, Rhodococcus kyotonensis
  REGION 1..212: note = tr|A0A239GQM8|A0A239GQM8_9NOCA GTP cyclohydrolase 1; OS = Rhodococcus kyotonensis OX=398843 GN=folE PE=3 SV=1
MSVRHVDEDGEAVVNDVVAVETGRRFDQPRAEAAVRELLIAVGENPDRPGLLDTPARVARAYREIFGGLYTDPDSVLNTTFDEGHQELVLVRDIPMFSTCEHHLVSFHGVAHVGYIPGKAGKVTGLSKLARVVDLYAKRPQVQERLTSQIADAVMRKLDPRGAIVVIEAEHLCMAMRGIRKPGASTTTSAVRGLLQSSAASRSEALDLILRK

SEQ ID NO: 13921 - protein, 215 aa, Rhodococcus kyotonensis
  REGION 1..215: note = tr|A0A177YL02|A0A177YL02_9NOCA GTP cyclohydrolase 1; OS = Rhodococcus kyotonensis OX=398843 GN=folE PE=3 SV=1
MSVRHAGDDGAAAINGVGELVAVETGQTFDQPRAEAAVRELLIAVGEDPDRPGLVDTPARVARAYKEIFGGLYTDPDSVLNTTFDEGHQELVLVRDIPMFSTCEHHLVSFHGVAHVGYIPGKAGKVTGLSKLARVVDLYAKRPQVQERLTSQIADAVMRKLDPRGAIVVIEAEHLCMAMRGIRKPGASTTTSAVRGLLQSSAASRAEALDLILRK

SEQ ID NO: 13922 - protein, 229 aa, Rhodococcus maanshanensis
  REGION 1..229: note = tr|A0A1H7HH34|A0A1H7HH34_9NOCA GTP cyclohydrolase 1; OS = Rhodococcus maanshanensis OX=183556 GN=folE PE=3 SV=1
MSVNQLGGANSRDASTSQERDAVESDERGAAAPLECIETGRVFDQPRAEAAIRELLIAVGENPDRPGLLDTPARVARAYREVFAGLYTDPDSVLNTTFDEGHQELVLVRDIPMYSTCEHHLVSFHGVAHVGYIPGSTGRVTGLSKLARLVDLYAKRPQVQERLTSQIADAMVRKLDPRGVIVVVEAEHLCMAMRGIRKPGASTTTSAVRGLLQSSAASRAEALDLILRK

SEQ ID NO: 13923 - protein, 196 aa, Rhodococcus opacus
  REGION 1..196: note = tr|A0A076EXG9|A0A076EXG9_RHOOP GTP cyclohydrolase 1; OS = Rhodococcus opacus OX=37919 GN=folE PE=3 SV=1
MLLYGGAAGVGDPRNADLVAAESAARAFLHALGIDTGASGVRNTPARMARAYLDLFTPSTFELTTFPNDEGYDELVVAKSIPVRSVCEHHLLPFSGVAHVGYLPGERVLGLSKLARIVEFFARRPQVQERLTKQVADCLTTKLGPKGVGVVIEAEHSCMSMRGIRAIGSTTVTSALSGSLRDDPRSRQEFFTLTGV

SEQ ID NO: 13924 - protein, 205 aa, Rhodococcus opacus
  REGION 1..205: note = tr|A0A076EN39|A0A076EN39_RHOOP GTP cyclohydrolase 1; OS = Rhodococcus opacus OX=37919 GN=folE PE=3 SV=1
MSVNHLGSEPVALETGRVFDQPRAEAAVRELLIAIGENPDRPGLRDTPARVARSYREVFAGLYTDPDTVLNTTFDEGHQELVLVRDIPLYSTCEHHLVSFHGVAHVGYIPGKTGKVTGLSKLARVVDLYAKRPQVQERLTSQIADAVMRKLDPRGAIVVIEAEHLCMAMRGIRKPGASTTTSAVRGLLQSSAASRSEALDLILRK

SEQ ID NO: 13925 - protein, 221 aa, Rhodococcus pyridinivorans; identical to SEQ ID NO: 13903
  REGION 1..221: note = tr|H0JLQ4|H0JLQ4_9NOCA GTP cyclohydrolase 1; OS = Rhodococcus pyridinivorans AK37 OX=1114960 GN=folE PE=3; SV = 1

SEQ ID NO: 13926 - protein, 216 aa, Rhodococcus pyridinivorans
  REGION 1..216: note = tr|A0A419ZGQ0|A0A419ZGQ0_9NOCA GTP cyclohydrolase 1; OS = Rhodococcus pyridinivorans OX=103816 GN=folE PE=3 SV=1
MSVNHLKSDTGSDPEDVTTHELSVDAGRTFDRARAEAAVRELLIAVGEDPDREGLRDTPSRVARAYREVFGGLFTDPDEVLDTTFDEGHQELVLVRDIPMYSTCEHHLVSFHGVAHVGYIPGPTGRVTGLSKLARLVDLYAKRPQVQERLTSQIADAMMRKLQPRGVIVVVEAEHLCMAMRGIRKPGASTTTSAVRGLFQTSSASRAEALDLILRR

SEQ ID NO: 13927 - protein, 215 aa, Rhodococcus qingshengii
  REGION 1..215: note = tr|A0A4R5Z9G7|A0A4R5Z9G7_9NOCA GTP cyclohydrolase 1; OS = Rhodococcus qingshengii OX=334542 GN=folE PE=3 SV=1
MKSEQLLILCEKFPHLFNKQTIEENGNLANVTTFTEAIKQLIKLCGDDPERDGLQETPYRVLKAFLEYTEGYHEDPKLHLEKTFDIHHKGLILIKDIEFYSLCEHHFSPFFGVAHIGYIPKEKITGLSKMGRLVEGYAKRFQVQERLTTQIAEAIEEVLDPEGTIVVVEAKHMCMCSRGIKKANTVTTTSSLLGIYENRPDLRAEFYSLIKNARE

SEQ ID NO: 13928 - protein, 205 aa, Rhodococcus qingshengii; identical to SEQ ID NO: 13905
  REGION 1..205: note = tr|A0A069JB99|A0A069JB99_9NOCA GTP cyclohydrolase 1; OS = Rhodococcus qingshengii OX=334542 GN=folE PE=3 SV=1

SEQ ID NO: 13929 - protein, 206 aa, Rhodococcus rhodnii
  REGION 1..206: note = tr|R7WSJ5|R7WSJ5_9NOCA GTP cyclohydrolase 1; OS = Rhodococcus rhodnii LMG 5362 OX=1273125 GN=folE PE=3; SV = 1
MSDPAAFADAVAIATGRTFDQARAEAAVRELLLAVGEDPDRPGLRDTPARVARSYREIFSGLYTDPGDVLGTTFDEEHRELIVVRDIPMYSTCEHHLVSFHGVAHVGYIPGREGRVTGLSKLARVVDLYAKRPQVQERLTSQVADALVRKLEPTGVIVVIEAEHLCMAMRGIRKPGARTTTSAVRGSLQSNSASRAEALDLILRAR

SEQ ID NO: 13930 - protein, 216 aa, Rhodococcus rhodochrous
  REGION 1..216: note = tr|A0A1X7KPQ4|A0A1X7KPQ4_RHORH GTP cyclohydrolase 1; OS = Rhodococcus rhodochrous J3 OX=903528 GN=folE PE=3 SV=1
MSVNHLKSDTGSDPEDVTTHELSVDAGRTFDQARAEAAVRELLIAVGEDPDREGLRDTPARVARAYREVFGGLFTDPDEVLDTTFDEGHQELVLVRDIPMYSTCEHHLVSFHGVAHVGYIPGPTGRVTGLSKLARVVDLYAKRPQVQERLTSQIADAMMRKLQPRGVIVVVEAEHLCMAMRGIRKPGASTTTSAVRGLFQTSSASRAEALDLILRR

SEQ ID NO: 13931 - protein, 217 aa, Rhodococcus rhodochrous; identical to SEQ ID NO: 13901
  REGION 1..217: note = tr|W4A9Z2|W4A9Z2_RHORH GTP cyclohydrolase 1; OS = Rhodococcus rhodochrous ATCC 21198 OX=1429046 GN=folE; PE = 3 SV=1

SEQ ID NO: 13932 - protein, 217 aa, Rhodococcus ruber
  REGION 1..217: note = tr|M2ZJ80|M2ZJ80_9NOCA GTP cyclohydrolase 1; OS = Rhodococcus ruber BKS 20-38 OX=1278076 GN=folE PE=3 SV=1
MSVNHLDSEADSVSIGGDGQPLRSRESGRAFDQARAEAAVRELLIAVGEDPEREGLLETPARVARAYREMFAGLYTDPDSVLDKTFDEGHQELVLVRDIPMYSTCEHHLVSFHGVAHVGYIPGPTGRVTGLSKLARVVDLYAKRPQVQERLTSQVADALMRKLDPVGVIGVVEAEHLCMAMRGSRKPGASTTTSAVRGLLQTNSASRAEALDLILRR

SEQ ID NO: 13933 - protein, 217 aa, Rhodococcus ruber
  REGION 1..217: note = tr|A0A098BPJ4|A0A098BPJ4_9NOCA GTP cyclohydrolase 1; OS = Rhodococcus ruber OX=1830 GN=folE PE=3 SV=1
MSVNHLDSEADSVSIGGDGELLRSRESGRAFDQARAEAAVRELLIAVGEDPEREGLLDTPARVARAYREMFAGLYTDPDSVLDKTFDEGHQELVLVRDIPMYSTCEHHLVSFHGVAHVGYIPGPTGRVTGLSKLARVVDLYAKRPQVQERLTSQVADALMRKLDPVGVIVVVEAEHLCMAMRGIRKPGASTTTSAVRGLLQTNSASRAEALDLILRR

SEQ ID NO: 13934 - protein, 205 aa, Rhodococcus sp.
  REGION 1..205: note = tr|A0A4P8Q1E5|A0A4P8Q1E5_9NOCA GTP cyclohydrolase 1; OS = Rhodococcus sp. SGAir0479 OX=2567884 GN=folE PE=3 SV=1
MSVNQLGSESVALMTGRPFDQARAEAAVRELLIAVGEDPDRPGLLDTPARVARAYREVFAGLYTEPDDVLNTTFDEGHQELVLVRDIPMYSTCEHHLVSFHGVAHVGYIPGPTGRVTGLSKLARLVDLYAKRPQVQERLTSQVADAMVRKLDPNGVIVVMEAEHLCMAMRGIRKPGASTTTSAVRGLFQTNSASRAEALDLILRK

SEQ ID NO: 13935 - protein, 229 aa, Rhodococcus sp.
  REGION 1..229: note = tr|A0A285E068|A0A285E068_9NOCA GTP cyclohydrolase 1; OS = Rhodococcus sp. OK270 OX=1882814 GN=folE PE=3 SV=1
MSVNQLGGANSRDASTSQERDAAEAPERVAAAPLECVETGRVFDQPRAEAAIRELLIAVGENPDRPGLLDTPARVARAYREVFAGLYTDPDSVLNTTFDEGHQELVLVRDIPMYSTCEHHLVSFHGVAHVGYIPGSTGRVTGLSKLARLVDLYAKRPQVQERLTSQIADAMVRKLDPRGVIVVVEAEHLCMAMRGIRKPGASTTTSAVRGLLQSSAASRSEALDLILRK

SEQ ID NO: 13936 - protein, 219 aa, Rhodococcus triatomae
  REGION 1..219: note = tr|M2VM00|M2VM00_9NOCA GTP cyclohydrolase 1; OS = Rhodococcus triatomae BKS 15-14 OX=1278078 GN=folE PE=3; SV = 1
MGGAVQVSVHQLGGAGTGEAGEVLQSLESGRAFDQQRAEAAVRELLIAVGEDPDRPGLLDTPARVARAYREVFAGLYTDPDSVLDTTFDEGHQELVLVRDIPMYSTCEHHLVSFHGVAHVGYIPGPTGRVTGLSKLARVVDLYAKRPQVQERLTSQIADALVRKLDPRGVIVVVEAEHLCMAMRGIRKPGASTTTSAVRGLFQTSAASRAEALDLIVRR

SEQ ID NO: 13937 - protein, 219 aa, Rhodococcus triatomae
  REGION 1..219: note = tr|A0A1G8S051|A0A1G8S051_9NOCA GTP cyclohydrolase 1; OS = Rhodococcus triatomae OX=300028 GN=folE PE=3 SV=1
MSVNDLSSDGHSGAGVDSVVPSAEVATATGRPFDQERAEAAVRELLIAVGEDPSRPGLVDTPARVARAYREVFAGLYTDPDAVLNTTFDEGHQELVVVRDIPMFSTCEHHLVSFHGVAHVGYIPGPTGRVTGLSKLARLVDLYAKRPQVQERLTSQVADAMMRKLDPRGVIVVVEAEHLCMAMRGIRKPGARTTTSAVRGTLQSSAASRSEALDLILRK

SEQ ID NO: 13938 - protein, 204 aa, Rhodococcus tukisamuensis
  REGION 1..204: note = tr|A0A1G7CZW7|A0A1G7CZW7_9NOCA GTP cyclohydrolase 1; OS = Rhodococcus tukisamuensis OX=168276 GN=folE PE=3 SV=1
MSAALDLEVEPPTQVRAGRLRPAVDLPAAERAVADLLRALGRDPDGVHLSDTPRRVAASYEEMLTPRDFDLTTFPNDAGYDELVLARDIPMISLCEHHLLPFRGVAHVGYLPGGRILGLSKLARVVELFARDLQVQERLTMQVADWLGEHLQPRGIGVVIEAEHMCMSVRGVQAAGTRTVTSAVRGALRENPAARREFLDLIRG

SEQ ID NO: 13939 - protein, 216 aa, Rhodococcus tukisamuensis
  REGION 1..216: note = tr|A0A1G6N933|A0A1G6N933_9NOCA GTP cyclohydrolase 1; OS = Rhodococcus tukisamuensis OX=168276 GN=folE PE=3 SV=1
MSVNQLGGANSHGGSNESHELTALASGRVFDQPRAEAAVRELLLAVGEDPDRPGLLDTPSRVARAYREVFAGLYTDPDSVLNTTFDEGHQELVLVRDIPMYSTCEHHLVSFHGVAHVGYIPGTTGRVTGLSKLARLVDLYAKRPQVQERLTSQIADAMMRKLDPRGVIVVVEAEHLCMAMRGIRKPGASTTTSAVRGLLQSSAASRSEALDLILRK

SEQ ID NO: 13940 - protein, 203 aa, Rhodococcus wratislaviensis
  REGION 1..203: note = tr|A0A3D9R749|A0A3D9R749_9NOCA GTP cyclohydrolase 1; OS = Rhodococcus wratislaviensis OX=44752 GN=folE PE=3 SV=1
MNHLGSEPVALETGRVFDQPRAEAAVRELLIAIGENPDRPGLRDTPARVARSYREVFAGLYTDPDTVLNTTFDEGHQELVLVRDIPLYSTCEHHLVSFHGVAHVGYIPGKTGKVTGLSKLARVVDLYAKRPQVQERLTSQIADAVMRKLDPRGAIVVIEAEHLCMAMRGIRKPGASTTTSAVRGLLQSSAASRSEALDLILRK

SEQ ID NO: 13941 - protein, 205 aa, Rhodococcus wratislaviensis; identical to SEQ ID NO: 13924
  REGION 1..205: note = tr|X0RFS7|X0RFS7_9NOCA GTP cyclohydrolase 1; OS = Rhodococcus wratislaviensis NBRC 100605 OX=1219028; GN = folE PE=3 SV=1

SEQ ID NO: 13942 - protein, 269 aa, unidentified
  source 1..269: note = Rhodocyclaceae bacterium
  REGION 1..269: note = tr|A0A3S0CPC3|A0A3S0CPC3_9RHOO GTP cyclohydrolase FolE2 OS=Rhodocyclaceae bacterium OX=1898103 GN=folE2 PE=3; SV = 1
MNAPTAIAIPDVQSSADSRRIAIDKVGIKSIRHPIKVADKRGGVQHTVASFNMYVGLPHNFKGTHMSRFIEILNGREREISVENFEPMLRTMVERLEAETGHVEMSFPYFINKTAPVSGVQSLMDYEVCFIGSIREGGAYEFTMKVVVPVTSLCPCSKKISAYGAHNQRSHVTVTAVLNDHLWIEEMVQMVEAQASCEVFGLLKRPDEKWVTERAYDNPKFVEDMVRDVAGELNREPRIDAYVVESENFESIHNHSAYALIERDKRRDA

SEQ ID NO: 13943 - protein, 269 aa, unidentified
  source 1..269: note = Rhodocyclaceae bacterium
  REGION 1..269: note = tr|A0A524B6S0|A0A524B6S0_9RHOO GTP cyclohydrolase FolE2 OS=Rhodocyclaceae bacterium OX=1898103 GN=folE2 PE=3; SV = 1
MTSPSNSVTQIPDVQNSADTRQLAINKVGIKAIRHPIKVQDKTGGIQHTIAVFNMYVGLPHNFKGTHMSRFVEILNGHEREISVENFPTMLREMLQKLEAETGHIEMNFPYFINKAAPVSGVQSLMDYDVTFIGDISGDEISFSLKVVVPVTSLCPCSKKISERGAHNQRSHVTITARTTERVWIEEIVELVESEASCELFGLLKRPDEKYVTERAYDNPKFVEDMVRDVAARLNAEARIEAYVVESENFESIHNHSAYALIERDKKIG

SEQ ID NO: 13944 - protein, 207 aa, unidentified
  source 1..207: note = Rhodocyclales bacterium
  REGION 1..207: note = tr|A0A3L6M3U3|A0A3L6M3U3_9RHOO GTP cyclohydrolase 1; OS = Rhodocyclales bacterium GT-UBC OX=2316108 GN=folE PE=3; SV = 1
MSAPDDHLAPSNPPGIGIARSGQFDPVAFETAVGDLLKACGIADDSPHMGRTAQRVRELWQKRLLGGYDLDPSTVLGEGFADERSDLVVIRGIAVHGVCPHHLVPFRGVAHVGYLPGGRLHGFGRIARLVDAIGHRFTYQEWMSRDIANALVTYGQAAGAACIIEAEQLCLLLGEDRRGDERVVTQAFAGAFETSAQLRNEFLRAVG

SEQ ID NO: 13945 - protein, 264 aa, unidentified
  source 1..264: note = Rhodocyclales bacterium
  REGION 1..264: note = tr|A0A1G3HSK9|A0A1G3HSK9_9RHOO GTP cyclohydrolase FolE2 OS=Rhodocyclales bacterium GWA2_65_20 OX=1802017; GN = folE2 PE=3 SV=1
MSIPIPDVQSSADSRQLPINKVGIKSIRHPVKVLDKSGGVQHTIATFNMYVSLPHNFKGTHMSRFVEILNAHEREISVESFESMLRDMVKLLEAETGHIEMSFPYFINKEAPVSKVKSLMDYDVTFVGEILEGGQYRQTTKVVVAATSLCPCSKKIADRGAHNQRSHITITATTNAFVWIEEIVQIAESQASCELFGLLKRPDEKHVTERAYDNPKFVEDIVRDVAGALNADARIDAYVVESENFESIHNHSAYALIEFNKKLF

SEQ ID NO: 13946 - protein, 233 aa, Rhodoferax antarcticus
  REGION 1..233: note = tr|A0A1Q8Y9N5|A0A1Q8Y9N5_9BURK Putative GTP cyclohydrolase I OS=Rhodoferax antarcticus ANT.BR; OX = 1111071 GN=BLL52_4046 PE=4 SV=1
MNPVDTDEGTPVSVKIRERIQAARKRFHANDNIAEFIQPGELELLLDEVQEKMKGVLGSLVIDTEHDHNTDKTARRVAKMYLKEVFQGRYVPQPAITEFPNAEHLNELMIVGPITVRSACSHHLVPVIGKLWIGVLPNEHTNVIGLSKYARLAEWIMGRPQIQEEAVVQLADLIQRKTQPDGLAIVMEATHFCVGWRGVRDLDSKMINSVMRGSFLKDANLRREFLSLIAQKG

SEQ ID NO: 13947 - protein, 242 aa, unidentified
  source 1..242: note = Rhodoferax ferrireducens
  REGION 1..242: note = tr|Q21YW8|Q21YW8_RHOFT GTP cyclohydrolase; OS = Rhodoferax ferrireducens (strain ATCC BAA-621 / DSM 15236 / T118) OX=338969 GN=Rfer_1301 PE=4 SV=1
MLMKSQSTMNPSDADEGIPVSVKIRQRLLAARKRFHANDNIADFIEPGELEQLLDEVEDKMKGVLSSLVIDTDHDHNTDETARRVAKMYLKEVFNGRYVSAPTITEFPNAEHLNELMIVGPITVRSACSHHLCPIVGQIWIGVLPNEHTNVIGLSKYARLAEWVMGRPQIQEEAVVQLADLIQEKTQPDGLAIVMEATHFCMGWRGVKDLDSKMINSVMRGSFLKDPNLRREFLSLIPKKEG

SEQ ID NO: 13948 - protein, 195 aa, Rhodoglobus vestalii
  REGION 1..195: note = tr|A0A543UT09|A0A543UT09_9MICO GTP cyclohydrolase 1; OS = Rhodoglobus vestalii OX=193384 GN=folE PE=3 SV=1
MSIDVARIEAAVAEMLSAVGEDPARAGLTATPRRVAEAYSEFFAGNELNALDHLSDSIEFTAKADQTGELVLVRDIEFRSMCEHHLLPFLGVAHVAYVPDERIIGLGNIARVVETISARAQLQERLTEEITEAINDGLSPRGVLVVIDAVHGCVSTRGPRQTASSTVTLASRGVLSDPLERAEVMALIGSRGGDG

SEQ ID NO: 13949 - protein, 234 aa, unidentified
  source 1..234: note = Rhodohalobacter barkolensis
  REGION 1..234: note = tr|A0A2N0VM10|A0A2N0VM10_9BACT GTP cyclohydrolase 1; OS = Rhodohalobacter barkolensis OX=2053187 GN=folE PE=3 SV=1
MSKEKNVVDSLELNHAEADEIGDDHISTSVKTPLREGAFDLTDSEKIEEIEKHFAHIMHALGLDLNDESLSGTPHRVAKMYVKEIFQGLNPKNRPEARKFGNKYEYGDMVVVKNINVTSFCEHHFLPFIGKAHVAYHSTGKVIGLSKINRIVDYYARRPQVQERLTLQIADELETALESKDVAVFIESKHFCVSTRGIQDRESSTVTTEYRGQFKKEMIQQRFIDYIKTQTELA

SEQ ID NO: 13950 - protein, 299 aa, unidentified
  source 1..299: note = Rhodohalobacter barkolensis
  REGION 1..299: note = tr|A0A2N0VLN4|A0A2N0VLN4_9BACT GTP cyclohydrolase FolE2 OS=Rhodohalobacter barkolensis OX=2053187 GN=folE2; PE = 3 SV=1
MISTNLKRFYDPTFVVTDQYKESLPDLQNGPASLIEGANVPIQQVGISNFKLPLKYPTPSGDVITLETSVDGYVGLDAGKKGINMSRIMRTFYKFKDEIFHPDKLRDILEQYQEDLESRSAFLKLSFSYPMIQESLRSGMSGYQYYNVAIEGKLDEQGKFTRFVHIDFEYSSACPCSFELAEHARETRDVATIPHSQRSVANITVQLNSEMMIDDLVMACREALKTETQVMVKREDEQAFAELNGAYQKFVEDAARLLYDELNTDERIRDFVVRCAHLESLHSHDAVSRICKGVPNGLR

SEQ ID NO: 13951 - protein, 235 aa, unidentified
  source 1..235: note = Rhodohalobacter sp.
  REGION 1..235: note = tr|A0A371QP37|A0A371QP37_9BACT GTP cyclohydrolase 1; OS = Rhodohalobacter sp. SW132 OX=2293433 GN=folE PE=3 SV=1
MNKDKQTLDSTGNNHSVQDIDDIGEDHIATSVQTPLRKDAFLLSDDEKIAKIENHFGEIMQILGLDLTDESLSGTPRRVAKMYVKEIFQGLNPKNRPDAKKFGNKYEYGDLVVVKNINVTSFCEHHFLPFLGKAHVAYKSSGSVIGLSKINRLVDYYSRRPQVQERLTLQIADELETSLETGDVAVFIESKHLCVSTRGIQDRASSTVTTEYRGAFKEKDTQQRFIDYISTDTEM

SEQ ID NO: 13952 - protein, 299 aa, unidentified
  source 1..299: note = Rhodohalobacter sp.
  REGION 1..299: note = tr|A0A371QN60|A0A371QN60_9BACT GTP cyclohydrolase FolE2 OS=Rhodohalobacter sp. SW132 OX=2293433 GN=folE2; PE = 3 SV=1
MITTQLKRFYDPTFTVTDQYKASLPDLQNGPSSLIEGANVPIQQVGISNFKLPLKYPTPSGELLTLETSVDGYVGLDAGKKGINMSRIMRTFYDFRDEVFYPGKLKDLLEAYQRDLDSRSAFLKLSYSYPMIKKSLRSGLEGYQYYDVSIEGKLDEYGNFRKFMHLDFVYSSACPCSFELAEHAREQRDVAAIPHSQRSVASISVELSDDIFVDELVEISRDALHTETQVMVKREDEQAFAEMNGAYQKFVEDAARLLYDKLSEEDRIYDFLVRCAHLESLHSHDAVSRICKGVPNGMR

SEQ ID NO: 13953 - protein, 184 aa, unidentified
  source 1..184: note = Rhodoluna lacicola
  REGION 1..184: note = tr|A0A060JL32|A0A060JL32_9MICO GTP cyclohydrolase 1; OS = Rhodoluna lacicola OX=529884 GN=folE PE=3 SV=1
MIDAERVKKAVVELISAIGEDPTRSELLATPEKVAVAYGEFFKGVGVDEKEVLAETFAAEHNEVVILKDIDFVSMCEHHLLPFTGVAHVAYLPSDRVIGLGRLPKLVELVAARPQLQENLTAQIADALEQGLGTKGVVVVIEARHHCVISRGARQPEANTITMAARGCYSEPASRAEVMALISK

SEQ ID NO: 13954 - protein, 202 aa, unidentified
  source 1..202: note = Rhodomicrobium udaipurense
  REGION 1..202: note = tr|A0A037UVV6|A0A037UVV6_9RHIZ GTP cyclohydrolase 1; OS = Rhodomicrobium udaipurense JA643 OX=858455 GN=folE PE=3; SV = 1
MRASGDTRRPSREEAEAAVRTLLAWTGDDLTREGLLDTPKRVVDSYAEYFWGYDGDPVDELSRTFEDVQGYDDIVMLRDIDFASHCEHHMVPIIGVAHVAYIPDRRIVGISKLARVVDIYAKRLQTQETMTAQIANCIQEALKPKGVAVMIDALHQCMTMRGVHKKGTTTITTRFTGVFSEDKAERDRFMQLVNGTRVLASR

SEQ ID NO: 13955 - protein, 220 aa, Rhodomicrobium vannielii
  REGION 1..220: note = tr|E3I318|E3I318_RHOVT GTP cyclohydrolase 1; OS = Rhodomicrobium vannielii (strain ATCC 17100 / ATH 3.1.1 / DSM 162 / LMG 4299) OX=648757 GN=folE PE=3 SV=1
MERKASAPVPPLREPQTGLRASADSQRPSREEAEAAVRTLLAWTGDDPTREGLIDTPKRVVDSYAEYFWGYDGDPVDELSRTFEDVQGYDDIVMLRDIDFASHCEHHMVPIIGVAHVAYIPDRRIVGISKLARVVDIYAKRLQTQETMTAQIANCIQDALKPKGVAVMIDALHQCMTMRGVHKKGTTTITTRFTGVFSEDKAERDRFMQLVNGTRVLASR

SEQ ID NO: 13956 - protein, 231 aa, Rhodonellum psychrophilum
  REGION 1..231: note = tr|U5BUF8|U5BUF8_9BACT GTP cyclohydrolase 1; OS = Rhodonellum psychrophilum GCM71 = DSM 17998 OX=1123057; GN = folE PE=3 SV=1
MKQKETLLNTMGINYAQEIEEMGEDHVGTSYETPLRADAFEMDDDLKIELIGKHFKEIMHIMGLDLSDDSLKGTPHRVAKMYVKEIFSGLNPKNKPAAKLFENKYKYNEMLVEKDITFFSNCEHHFVPIYGKAHVAYISNGTVIGLSKINRIVQYFAKRPQVQERLTMQIGNELKEILGTNDVAVILDADHMCVSSRGINDVNSSTVTSFYGGKFEKDEQTRNEFLKYVSL

SEQ ID NO: 13957 - protein, 222 aa, Rhodopila globiformis
  REGION 1..222: note = tr|A0A2S6N7D0|A0A2S6N7D0_RHOGL GTP cyclohydrolase 1; OS = Rhodopila globiformis OX=1071 GN=folE PE=3 SV=1
MNRSGGESAVNIVTPATSRSDRGITPEPPTREQAEEAVRTLLRWAGDDPDREGLRDTPSRVARSFKEFFVGYAVDPFALLERTFEETDGYDEIVLLRDIRLESTCEHHMAPIIGRAHVAYLPYRRVVGISKLARVVDAYAKRLQIQEKLTAQIANTIHEVLEPRGVAVVIEAAHQCMTTRGVHKPGVTMVTSRMLGAFRDNAATRRELLAMIGNRGATIQSE

SEQ ID NO: 13958 - protein, 229 aa, unidentified
  source 1..229: note = Rhodopirellula bahusiensis
  REGION 1..229: note = tr|A0A2G1W3N1|A0A2G1W3N1_9PLAN GTP cyclohydrolase 1; OS = Rhodopirellula bahusiensis OX=2014065 GN=folE PE=3 SV=1
MFRDSANTIAPSNQDSDKPVVDKEQPAERTPFFVDKNAPHNEVDFARIESAVRVILEAVGEDPDRDGLLETPARVARMYAEMFAGLKSDPGRHLAKVFAEDYDEIVLVRDISFCSMCEHHLLPFTGKAHIAYLPSGKVVGLSKLARVVEEVARRPQVQERLTHTVANLIEDRLSARGVAVVVESTHSCMTMRGIRKPGSLCLTSAMRGAFKTDPKSRAEVLGLINRAAS

SEQ ID NO: 13959 - protein, 229 aa, Rhodopirellula baltica
  REGION 1..229: note = sp|Q7UJJ7|GCH1_RHOBA GTP cyclohydrolase 1; OS = Rhodopirellula baltica (strain DSM 10527 / NCIMB 13988 / SH1) OX=243090 GN=folE PE=3 SV=1
MFRESDNTIAPSNQDLNKPVVDKEQPAERTPFFVDKNAPHNEVDFARIESAVREILEAVGEDPDRDGLLETPERVARMYAEMFAGLKSDPGRHLAKVFAEDYDEIVLVRDISFCSMCEHHLLPFTGKAHIAYLPSGKVVGLSKLARVVEEVARRPQVQERLTHTVANLIEDRLSARGVAVVVESTHSCMTMRGIRKPGSLCLTSAMRGAFKTDPKSRAEVLGLINRAAS

SEQ ID NO: 13960 - protein, 210 aa, Rhodopirellula baltica
  REGION 1..210: note = tr|K5E4F2|K5E4F2_RHOBT GTP cyclohydrolase 1; OS = Rhodopirellula baltica SH28 OX=993517 GN=folE PE=3 SV=1
MVDKEQPAERTPFFVDKNAPHNEVDYPRIEAAVREILEAVGEDPDRDGLLETPERVARMYAEMFAGLKSDPGRHLAKVFAEDYDEIVLVRDISFCSMCEHHLLPFTGKAHIAYLPSGKVVGLSKLARVVEEVARRPQVQERLTHTVANLIEDRLSARGVAVVVESTHSCMTMRGIRKPGSLCLTSAMRGAFKTDPKSRAEVLGLINRAAS

SEQ ID NO: 13961 - protein, 229 aa, unidentified
  source 1..229: note = Rhodopirellula europaea
  REGION 1..229: note = tr|M5S0L5|M5S0L5_9PLAN GTP cyclohydrolase 1; OS = Rhodopirellula europaea SH398 OX=1263868 GN=folE PE=3; SV = 1
MFRDSDNTIAPSNQDSNKPVVDKEQPAEQTPFFVDKNAPHNEVDFARIESAVREILEAVGEDPDRDGLLETPARVARMYAEMFAGLKSEPGRHLAKVFAEDYDEIVLVRDISFCSMCEHHLLPFTGKAHIAYLPSGKVVGLSKLARVVEEVARRPQVQERLTHTVANLIEDRLSARGVAVVVESTHSCMTMRGIRKPGSLCLTSAMRGAFKTDPKSRAEVLGLINRAAS

SEQ ID NO: 13962 - protein, 83 aa, unidentified
  source 1..83: note = Rhodopirellula europaea
  REGION 1..83: note = tr|M2AAD7|M2AAD7_9PLAN GTP cyclohydrolase 1; OS = Rhodopirellula europaea 6C OX=1263867 GN=RE6C_05839; PE = 3 SV=1
MVEEVARRPQVQERLTHTVANLIEDRLSARGVAVVVESTHSCMTMRGIRKPGSLCLTSAMRGAFKTDPKSRAEVLGLINRAAS

SEQ ID NO: 13963 - protein, 210 aa, unidentified
  source 1..210: note = Rhodopirellula islandica
  REGION 1..210: note = tr|A0A0J1BJB4|A0A0J1BJB4_RHOIS GTP cyclohydrolase 1; OS = Rhodopirellula islandica OX=595434 GN=folE PE=3 SV=1
MADKEQPAERTPFFVDKNAPHNEVDFARIESAVREILEAVGEDPDRDGLLETPERVARMYAEMFAGLKSDPGRHLAKVFAEDYDEIVLVRDISFCSMCEHHLLPFTGKAHIAYLPSGKVVGLSKLARVVEEVARRPQVQERLTHTVANLIEDRLSARGVAVVVESTHSCMTMRGIRKPGSLCLTSAMRGAFKTDPKSRAEVLGLINRAAS

SEQ ID NO: 13964 - protein, 235 aa, unidentified
  source 1..235: note = Rhodopirellula maiorica
  REGION 1..235: note = tr|M5RX92|M5RX92_9PLAN GTP cyclohydrolase 1; OS = Rhodopirellula maiorica SM1 OX=1265738 GN=folE PE=3 SV=1
MQNVDPRSYKEPSCNLPFLQSDSGANCNAASISPEPPLFPDRNAPSRDHVDLPRIEQAVRIILDAVGEDPDREGLLETPARVARMYAEMFAGLKSDPGRHLAKVFTEEYDEIVLVRDISFCSMCEHHLLPFTGRAHIAYLPSGKVVGLSKLARVVEEVARRPQVQERMTQTIADLVEERLSATGVAVVCEATHSCMTMRGVRKPGSLCLTSAMRGAFRDDPKSRAEVLGLINREV

SEQ ID NO: 13965 - protein, 221 aa, unidentified
  source 1..221: note = Rhodopirellula sallentina
  REGION 1..221: note = tr|M5U7N5|M5U7N5_9PLAN GTP cyclohydrolase 1; OS = Rhodopirellula sallentina SM41 OX=1263870 GN=folE PE=3; SV = 1
MIASSKNDSSEEGEDTATERQPFFVDKNEPKNDSVDYPAIEAAVRVILESVGEDPDRDGLLETPARVARMYAEMFAGLKSDPGRHLAKVFEEDYDEIVLVRDISFCSMCEHHLLPFTGKAHIAYLPSGKVVGLSKLARVVEEVARRPQVQERLTHTVANLIEERLSARGVAVVVESTHSCMTMRGIRKPGSLCLTSAMRGTFKTDPKSRAEVLGLINRSAS

SEQ ID NO: 13966 - protein, 274 aa, Rhodopirellula sp.
  REGION 1..274: note = tr|A0A255QPP7|A0A255QPP7_9PLAN GTP cyclohydrolase FolE2 OS=Rhodopirellula sp. MGV OX=2023130 GN=folE2 PE=3; SV = 1
MTNPSINSTPLPDIQSTGDRRQVAINKVGVTNVRYPISLRTPGSGKGNEFLHTVATINMFVSLPHDVKGTHMSRFLEVLNEFHEELCSDTLSLVTNRMKEKLGSEDAYLELTFPYFINKKAPVTGQSGKLDFDVAFELASNGTDDFVMTLKVPATSLCPCSKEISEYGAHNQRCDMTVKVRMADGVNLWIEELFSIVEKCASTQVFSVLKRPDEKWVTEKAYENPKFVEDIVRDLAVALNNDDRIVWYQCSSENYESIHNHNAFAFIECDKREQ

SEQ ID NO: 13967 - protein, 197 aa, Rhodopirellula sp.
  REGION 1..197: note = tr|A0A2E4M5D7|A0A2E4M5D7_9PLAN GTP cyclohydrolase 1; OS = Rhodopirellula sp. OX=2024855 GN=folE PE=3 SV=1
MNKSEANGQNVDLPRIEAAVKEILAAVGEDPEREGLIETPGRVARMYAEMFGGLHTDPTEHTKKFFPEEYDEVVLVRDISFCSMCEHHLLPFIGKAHIGYMPDGKVIGLSKLARVVEGFARRPQVQERMTQQVANLLVEELGAKGVAVVLEASHSCMSIRGVRKPGSITVTSAMKGIFRSNLSSRSEMMQLIYGNRG

SEQ ID NO: 13968 - protein, 209 aa, Rhodoplanes elegans
  REGION 1..209: note = tr|A0A327K660|A0A327K660_9RHIZ GTP cyclohydrolase 1; OS = Rhodoplanes elegans OX=29408 GN=folE PE=3 SV=1
MAKRTKDHDAPGGRSRTERQKIERPSRAEVEAAFRTILRWTGDDPDREGLLETPARAARAYEEFFKGYREDPAAILRKTFDETAGYDEMVVLRGVRFESHCEHHIVPIIGRAWVAYVPNGRVVGISKLARVVEVYAKRLQIQEKMTAQIADTIQDVLEPQGVAVVIKAQHHCMSTRGVHKHDTDMVTSRMTGVFRDNTATRQEFLALID

SEQ ID NO: 13969 - protein, 218 aa, Rhodoplanes elegans
  REGION 1..218: note = tr|A0A327K795|A0A327K795_9RHIZ GTP cyclohydrolase 1; OS = Rhodoplanes elegans OX=29408 GN=folE PE=3 SV=1
MDHVIKTLTPAARPSEAPGEVPVAPARVRPSRTEAEAAVRVLLGYIGDDPDREGLLDTPRRVVAAYDELFGGYHESAGEVLERTFSEIGTYDDIVLVRDIPFTSHCEHHMMPFMGRAHVGYLPVERVVGLSKIARLIDIFAKRLQTQERLSSEIVTEIDTVLKPRGVAVMLEAEHTCMSMRGVQKIGSRTITTQFTGVFRDDPKEQFRFVNLVRNGIG

SEQ ID NO: 13970 - protein, 228 aa, unidentified
  source 1..228: note = Rhodoplanes piscinae
  REGION 1..228: note = tr|A0A327JUV9|A0A327JUV9_9RHIZ GTP cyclohydrolase 1; OS = Rhodoplanes piscinae OX=444923 GN=folE PE=3 SV=1
MDTVTKTLTPAARSSDPAVPTGPAPSGAPSPATSGALSRPSRAEAEAAVRVLLGYIGDDPDREGLLDTPRRVVSAFDELYGGYREQPGEALERTFSEIGTYDDIVLVRDIPFSSHCEHHMMPFVGRAHVGYLPVERVVGLSKIARVIDIFARRLQTQERLSSEIVTEIDTVLKPRGVAVMLEAEHTCMSMRGVAKVGSRTITTQFTGVFRDDPGEQLRFLNLVRNGIG

SEQ ID NO: 13971 - protein, 210 aa, unidentified
  source 1..210: note = Rhodoplanes piscinae
  REGION 1..210: note = tr|A0A327K684|A0A327K684_9RHIZ GTP cyclohydrolase 1; OS = Rhodoplanes piscinae OX=444923 GN=folE PE=3 SV=1
MTPAVQVIDTMAKRKKDAGRPRIERPSRAEVEAAFRTILRWTGDDPDREGLLETPARAARAYEEFFRGYDEDPAAILRKTFEETGGYDEMVVLRGVRFESHCEHHIVPIIGRAWVAYVPNGRVVGISKLARLVEVYAKRLQIQEKMTAQIADTIQEVLEPQGVAVVIKAQHHCMTTRGVHKHDTDMVTSRMTGVFRDNTATRQEFLSLID

SEQ ID NO: 13972 - protein, 205 aa, Rhodoplanes roseus
  REGION 1..205: note = tr|A0A327KNU7|A0A327KNU7_9RHIZ GTP cyclohydrolase 1; OS = Rhodoplanes roseus OX=29409 GN=folE PE=3 SV=1
MAKRTKSDDRKTRARPKIERPSRAEVEAAFRTIIRWTGDDPDREGLLETPARAARAYEEFFKGYDQDPVAILRKTFEETAGYDEMVVLRGVRFESHCEHHIVPIIGRAWVAYVPNGRVVGISKLARLVEVYAKRLQIQEKLTAQVADTIQEVLEPQGVAVVIKAQHHCMTTRGVHKHDTDMVTSRMTGVFRDNTATRQEFLSLID

SEQ ID NO: 13973 - protein, 217 aa, Rhodoplanes roseus
  REGION 1..217: note = tr|A0A327KUX9|A0A327KUX9_9RHIZ GTP cyclohydrolase 1; OS = Rhodoplanes roseus OX=29409 GN=folE PE=3 SV=1
MDHVIKTLTPAARPSEAAETTAPSTLVRPSRAEAEAAVRVLIGYLGDDPDREGLLDTPRRVVSAYEELFGGYHENPADVLDRTFSEIGTYDDIVLVRDIPFNSHCEHHMMPFVGKAHVGYLPVERVVGLSKIARLIDIFARRLQTQERLSSQIVTEIDTVLKPRGVAVMLEAEHSCMSMRGVQKVGSRTITTQFTGVFRDDPKEQFRFVSLVRNGIG

SEQ ID NO: 13974 - protein, 219 aa, Rhodoplanes sp.
  REGION 1..219: note = tr|A0A127EWS9|A0A127EWS9_9RHIZ GTP cyclohydrolase 1; OS = Rhodoplanes sp. Z2-YC6860 OX=674703 GN=folE PE=3 SV=1
MDAIVKPAVVGSNSPLSDHVRKAPDPVSPRPSREQAESAVRTLLAYIGDDPAREGLLDTPKRVVGAYEELYRGYRESPVEALERTFSETGNYDDLVLVRDISFNSACEHHMMPFTGKAHVAYMPVDKVVGLSKLARLVDVYARRLQTQEHMNSQIATAIEEILKPRGVAVMIEAEHTCMSLRGVEKPGALTVTTQFRGAFREDTNEQVRFIQLVRGGQR

SEQ ID NO: 13975 - protein, 204 aa, Rhodoplanes sp.
  REGION 1..204: note = tr|A0A127EVW8|A0A127EVW8_9RHIZ GTP cyclohydrolase 1; OS = Rhodoplanes sp. Z2-YC6860 OX=674703 GN=folE PE=3 SV=1
MAKSARARSLQKPSRSEAEDAVRVLLRWAGDDPRREGLAGTPGRVARAFEEWFSGYQQDPRQYLSRTFEEVAGYDEIVALRDIPFESHCEHHLAPIIGKAHIAYLPRRRVVGISKLARLVDVYAKRLQIQEKMTAEIAACLDKVLQPMGVAVVIEGTHQCMTTRGVHKPGVSMVTSRMLGVFRDQPETRQEFLASLHLRERTSI

SEQ ID NO: 13976 - protein, 227 aa, Rhodopseudomonas faecalis
  REGION 1..227: note = tr|A0A318TKZ4|A0A318TKZ4_9BRAD GTP cyclohydrolase 1; OS = Rhodopseudomonas faecalis OX=99655 GN=folE PE=3 SV=1
MDAVIKPLRGGKPSDEPTDFRAPELDPSDFLDAAVLPDQPRPTREEAEAAVKTLLAYIGENTEREGLVDTPRRVIEAYDELFQGYHQCPAEVLNRTFGETAGYDDFVLIRDMYFTSHCEHHVMPFYGQAHIAYTPVERVVGLSKLARLVDVFARRLQTQEHLTAQIAAAVDEVLKPRGVAVLVEAEHTCMSVRGIAKRGAKTFTTRFTGVFRDNPAEQARFLSMVRS

SEQ ID NO: 13977 - protein, 229 aa, Rhodopseudomonas palustris
  REGION 1..229: note = sp|B3QE25|GCH1_RHOPT GTP cyclohydrolase 1; OS = Rhodopseudomonas palustris (strain TIE-1) OX=395960; GN = folE PE=3 SV=1
MDAKIKPIRGTNPAEGRPEFQPAELEPSEFLEVAVQPDQPRPSRAEAEAAVKTLLSYIGENTEREGLIDTPRRVVEAYDELFQGYHQCPKEVLERTFGETAGYDDFVLVRNISFTSHCEHHVMPFYGKAHIAYTPVERVVGLSKLARLVDIFARRLQTQEHLTAQIAAAIDEVLKPRGVAVLLEAEHTCMSVRGIAKKGATTFTSRYTGVFRDNPAEQARFMSMVRDRG

SEQ ID NO: 13978 - protein, 229 aa, Rhodopseudomonas palustris
  REGION 1..229: note = tr|E6VNI1|E6VNI1_RHOPX GTP cyclohydrolase 1; OS = Rhodopseudomonas palustris (strain DX-1) OX=652103; GN = folE PE=3 SV=1
MDAKIKPIRGTKPADARSEFQPAELDPSDFLEVAVQPDQPRPSRAEAEAAVKTLLSYIGENTEREGLLDTPRRVVEAYDELFQGYHQCPKEVLERTFGETAGYDDFVLVRNISFTSHCEHHVMPFYGKAHIAYTPVERVVGLSKLARLVDIFARRLQTQEHLTAQIAAAIDEVMKPRGVAVLIEAEHTCMSVRGIAKKGATTFTSRYTGVFRDNPAEQARFMSMVRDRG

SEQ ID NO: 13979 - protein, 229 aa, unidentified
  source 1..229: note = Rhodopseudomonas pentothenatexigens
  REGION 1..229: note = tr|A0A336JTC4|A0A336JTC4_9BRAD GTP cyclohydrolase 1; OS = Rhodopseudomonas pentothenatexigens OX=999699 GN=folE; PE = 3 SV=1
MDAKIKPIRGTKPADSRPEFQPTELDPSDFLEVAVQPDQPRPSRAEAEAAVKTLLSYIGENTEREGLIDTPRRVVEAYDELFQGYHQCPKEVLERTFGETAGYDDFVLVRNISFTSHCEHHVMPFYGKAHIAYTPVERVVGLSKLARLVDIFGRRLQTQEHLTAQIAAAVDEVLKPRGVAVLIEAEHTCMSVRGIAKKGATTFTSRYTGVFRDNPAEQARFMSMVRDRG

SEQ ID NO: 13980 - protein, 229 aa, unidentified
  source 1..229: note = Rhodopseudomonas pseudopalustris
  REGION 1..229: note = tr|A0A1H8Q3V3|A0A1H8Q3V3_9BRAD GTP cyclohydrolase 1; OS = Rhodopseudomonas pseudopalustris OX=1513892 GN=folE; PE = 3 SV=1
MDAKIKPLRGGKPADARAEFQPAELDPSEFLAAAVQPDQPRPSRNEAEQAVKTLLAYIGENTGREGLLDTPRRVVEAYDELFQGYHQCPAEVLDRTFGETAGYDDFVLVRDIGFTSHCEHHVMPFYGKAHIAYTPVERVVGLSKLARLVEIFARRLQTQEHLTAQIAAAIDEVLKPRGVAVMIEAEHTCMSVRGIGKQGASTFTSRYTGMFRDNPAEQARFMSMIRSRG

SEQ ID NO: 13981 - protein, 229 aa, Rhodopseudomonas sp.
  REGION 1..229: note = tr|A0A0N1CCQ0|A0A0N1CCQ0_9BRAD GTP cyclohydrolase 1; OS = Rhodopseudomonas sp. AAP120 OX=1523430 GN=folE PE=3 SV=1
MDAKIKPLRTGKPPEARTDFQPAELDPSEFLAAAVQPDQPRPSRAEAEAAVKTLLSYIGENVEREGLLDTPRRVVEAYDELFQGYHQCPAEVLDRTFGETAGYDDFVLVRDISFTSHCEHHVMPFYGKAHIAYTPVERVVGLSKLARLVEIFARRLQTQEHLTAQIAAAIDEVLKPRGVAVMIEAEHTCMSVRGIGKQGASTFTSRYTGMFRDNPAEQARFMSMIRNHR

SEQ ID NO: 13982 - protein, 364 aa, unidentified
  source 1..364: note = Rhodosalinus sediminis
  REGION 1..364: note = tr|A0A3D9BVK1|A0A3D9BVK1_9RHOB GTP cyclohydrolase FolE2 OS=Rhodosalinus sediminis OX=1940533 GN=folE2 PE=3; SV = 1
MNIQISDLDRTPDRDEAEAALAKLRRWMEHASDAEIDALDPMMRRLLSGDGGYPDLSRVYPEGFAADAAYRATLPDLQNGPAALIRGARRPIQHVGISNFRLPIRFATRGGGEMTLETSVTGTVSLDAEKKGINMSRIMRSFYTHAERVVSFAVIEAALDDYKTDLETLDARIQMRASFPMKVESLRSGLAGYQYYDIALELVERAGVRRRILHLDYVYSSTCPCSLELSEHARRERGQLATPHSQRSVARISVELTEDGCLWFEDLVEMCRAAVPTETQVMVKREDEQAFAELNAANPIFVEDAARLFAAELERDARVGDFRVVASHQESLHSHDAVSVLTEGETFAGESLDPRLFGTLVHPG

SEQ ID NO: 13983 - protein, 364 aa, unidentified
  source 1..364: note = Rhodosalinus sp.
  REGION 1..364: note = tr|A0A365UCK4|A0A365UCK4_9RHOB GTP cyclohydrolase FolE2 OS=Rhodosalinus sp. E84 OX=2259333 GN=folE2 PE=3 SV=1
MNIHLSDLDRTPGRDEAEAALDKLRRWMEQASEAEIAALDPAILRLLPGASDYPALSRVYPERFAADEAYRATLPDLQNGPAALIRGARRPIQHVGISNFRLPIRFRTRAGGDVTLETSVTGTVSLDAEKKGINMSRIMRSFYTHAERVFSFDVIEAALDDYKAELESLDARIQMRLSFPMRVESLRSGLAGYQYYDMALELVERAGVRRRILHLDYVYSSTCPCSLELSEHARRERGQLATPHSQRSVARLSVVLTEDGCLWFEDLVEMCRRAVPTETQVMVKREDEQAFAELNAANPIFVEDAARLFAAELEGDPRVGDFRVVASHQESLHSHDAVSVLTEGETFASESLDPRLFGTLIHAG

SEQ ID NO: 13984 - protein, 222 aa, Rhodospira trueperi
  REGION 1..222: note = tr|A0A1G7EJJ4|A0A1G7EJJ4_9PROT GTP cyclohydrolase 1; OS = Rhodospira trueperi OX=69960 GN=folE PE=3 SV=1
MPLDRPPGKPHPYSDYRDAAGRLHPDPDTGPDPRPSREEAEEAVRTLLRWAGDDPTREGLLDTPKRVAAAYEEFFAGYAEDPRDILMRTFEEVEGYDEMVVLRDIRLESHCEHHMVPIIGKAHVAYLPDSRVVGISKLARVVDAYAKRLQIQETLTAQIANTINDVLAPKGVAVVIEAAHQCMTTRGVHKPGVTMVTSRMLGAFRTSSDTRREFLSMINGGG

SEQ ID NO: 13985 - protein, 199 aa, unidentified
  source 1..199: note = Rhodospirillaceae bacterium
  REGION 1..199: note = tr|A0A1Z9J4B4|A0A1Z9J4B4_9PROT GTP cyclohydrolase 1; OS = Rhodospirillaceae bacterium TMED167 OX=1986863 GN=folE; PE = 3 SV=1
MDSLKVERPSQDEAEEAVRTLIKWAGDDPNREGLIGTPHRVAKAYEEFFAGYNEDPVSVLGATFEETGSYDDVVILRDIRLESHCEHHIVPIIGKVHIGYLPNGRVVGISKLARLIEVFAKRMQIQETLTAQIADTIADVLEPHGVAVVIEAAHQCMTTRGIRKPGVSMVTSRMLGVFRDDSNTRREFLSMIGKPSNSG

SEQ ID NO: 13986 - protein, 209 aa, unidentified
  source 1..209: note = Rhodospirillaceae bacterium
  REGION 1..209: note = tr|A0A2E7BD74|A0A2E7BD74_9PROT GTP cyclohydrolase 1; OS = Rhodospirillaceae bacterium OX=1898112 GN=folE PE=3 SV=1
MTPNDNSLTAADKPTADLTAIRPTRAEAEAAVDLLIRWLGEDPSREGLRDTPARVVRAWEEFCAGYAEDPAVYLSSTFEEVEGYDDMVMLRNIQLESHCEHHMVPILGVAHIAYLPHRRVVGISKLARVLDSYARRLQTQETLTAQVADCIHSVLQPRGVAVMIDAQHQCMTTRGVRKDGVSMVTSRFTGAFDSDDALRNRFLDQIRIG

SEQ ID NO: 13987 - protein, 203 aa, unidentified
  source 1..203: note = Rhodospirillales bacterium
  REGION 1..203: note = tr|A0A1G3IBM5|A0A1G3IBM5_9PROT GTP cyclohydrolase 1; OS = Rhodospirillales bacterium RIFCSPLOWO2_12_FULL_58_28; OX = 1802022 GN=folE PE=3 SV=1
MSAEKSASSRPSRSEAEEAVRTLIRWSGDDVTREGLKETPARVVRSCEESFAGYKSDPVDLLRRTFEEIEGYDEMVLLKDIRFESHCEHHMAPFIGKAHVAYLPKRRVVGISKLARLVDVYARRLQIQEKMTAQIANTINEVLQPEGVAVVIEASHQCMTTRGIHKPGVVMVTSRMLGAFRDNPSTRHEFLAMIGNPASGENV

SEQ ID NO: 13988 - protein, 208 aa, unidentified
  source 1..208: note = Rhodospirillales bacterium
  REGION 1..208: note = tr|A0A259MI88|A0A259MI88_9PROT GTP cyclohydrolase 1; OS = Rhodospirillales bacterium 39-66-50 OX=1970570 GN=folE; PE = 3 SV=1
MNKMAKPREVVSLATGQSRPSREEAEAAVRTLIRWAGDDPVREGLAGTPDRVVRSYEEFFAGYDQDPRDMLQRTFEEVEGYDEVVALRDIRLESHCEHHMVPIIGKVHVGYLPDKRVVGISKLARVVDAYAHRLQIQEKLTAQIANTLQEVLQPRGVAVVIEAAHQCMTTRGVHKSDVTMVTSRMLGAFRNNGETRREFLSMIGRSSI

SEQ ID NO: 13989 - protein, 220 aa, unidentified
  source 1..220: note = Rhodospirillum centenum
  REGION 1..220: note = tr|B6IPQ8|B6IPQ8_RHOCS GTP cyclohydrolase 1; OS = Rhodospirillum centenum (strain ATCC 51521 / SW); OX = 414684 GN=folE PE=3 SV=1
MSPSKTTAGMIVPGPAHGRRAAAPVERPTRAEAEAAVRTLIRWAGDDPGREGLLGTPDRVVRSYEEFFAGYHEDPVELLSRTFEETDGYDEMVVLRDIRFESHCEHHMVPIIGKAHVAYLPRKRVVGISKLARVIEVYAKRLQIQEKMTSQIANSIDEVLQPLGVAVVVEASHQCMTTRGVHKPGVSMVTSRMLGAFRDDPTTRREFLAMIGNPTNRVEA

SEQ ID NO: 13990 - protein, 234 aa, Rhodospirillum rubrum
  REGION 1..234: note = tr|Q2RXR9|Q2RXR9_RHORT GTP cyclohydrolase 1; OS = Rhodospirillum rubrum (strain ATCC 11170 / ATH 1.1.1 / DSM 467 / LMG 4362 / NCIB 8255 / S1) OX=269796 GN=folE; PE = 3 SV= 1
MTTNLPADTAEASLCAFRADGEEGIPATPVVADGLWPTTKPSRAEAEAAVRTLIRWAGDDPNREGLIDTPARVARSYEELFSGYGADPEDLLRRTFEEVEGYDEVVLLRDIRIESHCEHHMVPIIGKVHIGYLPNRRVVGISKLARVAEVYAKRLQIQEKMTAQIANAINAVLEPRGVAVVVEAAHQCMTTRGVHKPGVTMVTSRMLGAFRTNSDTRREFLHLIGQTREGGFGL

SEQ ID NO: 13991 - protein, 210 aa, Rhodospirillum rubrum
  REGION 1..210: note = tr|Q2RTB3|Q2RTB3_RHORT GTP cyclohydrolase 1; OS = Rhodospirillum rubrum (strain ATCC 11170 / ATH 1.1.1 / DSM 467 / LMG 4362 / NCIB 8255 / S1) OX=269796 GN=folE; PE = 3 SV= 1
MEKTLLSRAQSGVEAFDATPYYKPVSVGEAEAAIAVLLRYIGEDPTREGLVETPARFIRACGHHFAGYAQDPLRILATTFSESAGYAGMILLRDIRFEAFCEHHLAPIIGKAHVAYMPNDRVVGLSKLARVVDVFAKRLQLQERMTMQIATAIEAALAPRGVAVLIESEHHCMSTRGAYKPGSTMVTSVTTGCFEADGAPRREFFEAVRA

SEQ ID NO: 13992 - protein, 216 aa, Rhodothalassium salexigens
  REGION 1..216: note = tr|A0A4R2PFK2|A0A4R2PFK2_RHOSA GTP cyclohydrolase 1; OS = Rhodothalassium salexigens DSM 2132 OX=1188247 GN=folE; PE = 3 SV=1
MESIAPDRDRPCADLAATETPEIARPTRAEAESAVRTLLLWAGDNPDREGLLDTPRRVVKAYEEYFCGYDEDPADHLRRTFEEVAGYDDMVLVRGIAFDSHCEHHLAPIQGLAHVAYVPSGRIVGLSKLARVVELYARRLQVQEKLTAQVADALEDSLAPLGVAVQVEATHGCMSCRGVRKVGADTVTTVMRGLFRTDARLERRFLDAASQTGRGR

SEQ ID NO: 13993 - protein, 207 aa, Rhodothalassium salexigens
  REGION 1..207: note = tr|A0A4R2PU09|A0A4R2PU09_RHOSA GTP cyclohydrolase 1; OS = Rhodothalassium salexigens DSM 2132 OX=1188247 GN=folE; PE = 3 SV=1
MTDQSSRPQPTVSDDGAFDPSPEADRAREAVRELLRWSGDDPEREGLRDTPDRVIRAFREYFRGYDENPVDYLQRTFEEVNSYDEVVLLRGIPFVSHCEHHIAPIEGKAHVAYLPTSRVVGISKLARVVHAYARRLQIQERLTAEIGDCIQQVLNPQGVAVVLQATHGCMTCRGVETPDVTMVTSRMTGAFRDDEKARREILALMGF

SEQ ID NO: 13994 - protein, 225 aa, unidentified
  source 1..225: note = Rhodothermaceae bacterium
  REGION 1..225: note = tr|A0A1V0DFB0|A0A1V0DFB0_9BACT GTP cyclohydrolase 1; OS = Rhodothermaceae bacterium RA OX=1779382 GN=folE PE=3; SV = 1
MKNDTLEANGALTPAHQADAHHADDEFPTLYERKDQYAGEATDVIARRVRDILVTLGEDADREGLVKTPERVARAYQFLTHGYAMDPRAILESALFDEDYSEMILVKDIEVYSLCEHHMLPFFGKAHVAYIPNGKIVGLSKIPRVVDVFARRLQVQERLTLQVRDAIQDVLKPLGVAVVIEAQHLCMMMRGAEKQNSWTTTSAMSGEFMRESTRAEFMRLIRPRA

SEQ ID NO: 13995 - protein, 228 aa, unidentified
  source 1..228: note = Rhodothermaceae bacterium
  REGION 1..228: note = tr|A0A424HJV9|A0A424HJV9_9BACT GTP cyclohydrolase 1; OS = Rhodothermaceae bacterium TMED105 OX=1986665 GN=folE; PE = 3 SV=1
MSRDETTILKETFEAQGDDHFSEGLQTPMHEDAFLMSNEEKMEQIAHHFEKIMHTLGLDTQNESLRGTPHRVAKMYVEEIFGGLNPMEAPDTRTFANPYDYGHLVVEKNIRLVSFCEHHFLPFIGKAHVAYIAEGEVIGLSKINRLVDYYARRPQVQERLTLQIAEAFESALKTKDVAVVIDSKHLCVSTRGIKDESSSTVTAEYRGAFKEAATQQRFIDYIRMETDL

SEQ ID NO: 13996 - protein, 220 aa, unidentified; identical to SEQ ID NO: 8117
  source 1..220: note = Rhodothermaeota bacterium
  REGION 1..220: note = tr|A0A2A5X9J8|A0A2A5X9J8_9BACT GTP cyclohydrolase 1; OS = Rhodothermaeota bacterium MED-G18 OX=1986239 GN=folE; PE = 3 SV=1

SEQ ID NO: 13997 - protein, 228 aa, unidentified
  source 1..228: note = Rhodothermaeota bacterium
  REGION 1..228: note = tr|A0A2A5Y4U5|A0A2A5Y4U5_9BACT GTP cyclohydrolase 1; OS = Rhodothermaeota bacterium MED-G12 OX=1986237 GN=folE; PE = 3 SV=1
MKEPIDTLDQQEEFDQMGEAHAGSSELTPIRSDAFELSDDEKIKQIEHHFAKIMDILGLDLTDDSLKGTPRRVAKMYVKEVFNGLNPANRPEARTFNNNYDYSDVVIEKNIQVNSFCEHHFLPFIGKAHVAYISKGKVIGLSKINRLVDYYSRRPQVQERLTLQIADAISDAMNTEDVAVYIDSKHLCVSMRGIKDHASSTITSEFRGAFRDKDTQQKFIDFIRTPSE

SEQ ID NO: 13998 - protein, 220 aa, Rhodothermus marinus
  REGION 1..220: note = tr|G2SED1|G2SED1_RHOMG GTP cyclohydrolase 1; OS = Rhodothermus marinus (strain SG0.5JP17-172) OX=762570; GN = folE PE=3 SV=1
MAKNKSTGVLVRSGAHLELDSHPIDHFERVDRYPAEATEAIQQHMREILRWIGEDPDREGLRRTPERVALALQYLTQGYHQDPRAILESALFEEDYSEMILVRDIQIYSLCEHHLLPFFGKAHVAYIPNKKIVGLSKIPRVVDVFARRLQVQERLTIQIRDALEEVLQPLGVAVVIEAQHLCMMMRGVEKQHAITTTSAMSGEFLKEATRAEFMRLINGG

SEQ ID NO: 13999 - protein, 220 aa, Rhodothermus marinus
  REGION 1..220: note = tr|D0MCY9|D0MCY9_RHOM4 GTP cyclohydrolase 1; OS = Rhodothermus marinus (strain ATCC 43812 / DSM 4252 / R-10) OX=518766 GN=folE PE=3 SV=1
MAKNKSTGVLVRSGAHLELDSHPIDHYERVDRYPAEATEAIQQHVREILRWIGEDPDREGLRRTPERVALALQYLTQGYHQDPRAILEAALFEEDYSEMILVRDIQIYSLCEHHLLPFFGKAHVAYIPNKKIVGLSKIPRVVDVFARRLQVQERLTIQIRDALEEVLQPLGVAVVIEAQHLCMMMRGVEKQHAITTTSAMSGEFLKEATRAEFMRLINGG

SEQ ID NO: 14000 - protein, 220 aa, Rhodothermus profundi
  REGION 1..220: note = tr|A0A1M6TV79|A0A1M6TV79_9BACT GTP cyclohydrolase 1; OS = Rhodothermus profundi OX=633813 GN=folE PE=3 SV=1
MAKNKSARVLTTATASLDLDDYPVGRYERIDRYAPEVTEAIQQHVREILRWLGEDPDREGLQRTPERVALAFQYLTQGYHQDPRAILESALFEEDYSEMILVRDIQIYSLCEHHLLPFFGKAHVAYIPNRKIVGLSKIPRVVDVFARRLQVQERLTIQIRDALEEVLQPLGVAVVIEAQHLCMMMRGVEKQHAVTTTSAMSGEFLKEATRAEFMRLINGG

SEQ ID NO: 14001 - protein, 211 aa, Rhodovarius sp.
  REGION 1..211: note = tr|A0A437MCL4|A0A437MCL4_9PROT GTP cyclohydrolase 1; OS = Rhodovarius sp. CCP-6 OX=1979269 GN=folE PE=3 SV=1
MNEVTPPHRLSQNPIQRPSRAEAEAAVRTLLLWAGDDPDREGLVDTPARVARAYEEFFQGYADDPVEMLARSFEETDGYDEMVVLRDIRLESHCEHHMVPIIGKAHVAYLPNGRVVGISKLARVVETYAKRLQIQEKLTAQIANTIESVLQPKGVAVVIEAAHQCMTTRGIHKPGVTMVTSRMLGAFRENLSTRKEFLSMIQGSRGGGIEG

SEQ ID NO: 14002 - protein, 366 aa, Rhodovulum adriaticum
  REGION 1..366: note = tr|A0A4R2NK95|A0A4R2NK95_RHOAD GTP cyclohydrolase FolE2 OS=Rhodovulum adriaticum OX=35804 GN=folE2 PE=3 SV=1
MNMHNREIDRQPTRDEAEHALAVLRQWAAGASAAERNTLDPAVEGLMPGPVSDYPALSRSYPADFKADAAYKDTLPDLQNGPSSLIRGARRAIQHVGISNFRLPIRFHTRDNGDLTLETSVTGSVSLEAEKKGINMSRIMRSFYAHAERTFSFEVIEAALDSYKADLDSLDARIAMRFSFPMKVGSLRSGLSGYQYYDIALELVEQAGVARKIMHLDYVYSSTCPCSLELSEHARQARGQLATPHSQRSVARISVALDPEAECLWFEDLIEICRAAVPTETQVMVKREDEQAFAELNAANPIFVEDAARLFAEGLQRDPRIGDFRVLASHQESLHSHDAISVLTEGETFAADSLDPKLFATLIHAG

SEQ ID NO: 14003 - protein, 367 aa, unidentified
  source 1..367: note = Rhodovulum bhavnagarense
  REGION 1..367: note = tr|A0A4R2RDU8|A0A4R2RDU8_9RHOB GTP cyclohydrolase FolE2 OS=Rhodovulum bhavnagarense OX=992286 GN=folE2 PE=3; SV = 1
MNIHNREIDRQPTRDDAERALAVLRQWASVVTEAERHTLDPAVDGLVPGRPVPDYPALSRSYPERFVADAAYKATLPDLQNGPSSLIRGARREIQHVGISNFRLPIRFHTRDNGDLTLETSVTGSVSLEAEKKGINMSRIMRSFYAHAERTFSFEVIEAALDSYKADLDSLDARISMRFSFPMKVRSLRSGLSGYQYYDIALELVEQAGVARKIMHLDYVYSSTCPCSLELSEHARQARGQLATPHSQRSVARISVALEPDVGCLWFEDLIEICRAAVPTETQVMVKREDEQAFAELNAANPIFVEDAARLFAEGLQRDPRIGDFRVVASHQESLHSHDAISVLTEGPTFAGESLDPKLFATLIHAG

SEQ ID NO: 14004 - protein, 367 aa, Rhodovulum euryhalinum
  REGION 1..367: note = tr|A0A4R2KI48|A0A4R2KI48_9RHOB GTP cyclohydrolase FolE2 OS=Rhodovulum euryhalinum OX=35805 GN=folE2 PE=3 SV=1
MNVHNREIEPSPGREDAERALELLRLWATRATEDELATVDPGLAALVPGHPASAYPVFSRAYPHGFEADAAYKATMPDLQNGPASLIRGSMRPIQHVGISNFRLPIRFHSRDNGDLTLETSVTGTVSLEAEKKGINMSRIMRSFYAHAERTFSFEVIEAALDSYKADLESFDARIMMRFSFPMKVRSLRSGLEGFQYYDFALELVETRGVARKIMHMDYVYSSTCPCSLELSEHARRERGQLATPHSQRSVARISVVLDPAAGCLWFEDLIEICQSAVPTETQVMVKREDEQAFAELNAAHPIFVEDAARLFCEALERDPRIGDFRVIASHQESLHSHDAVSVLTEGPTFAAESLDPKLFATLIHHG

SEQ ID NO: 14005 - protein, 366 aa, Rhodovulum imhoffii
  REGION 1..366: note = tr|A0A2T5BQM7|A0A2T5BQM7_9RHOB GTP cyclohydrolase FolE2 OS=Rhodovulum imhoffii OX=365340 GN=folE2 PE=3 SV=1
MNMHDRDPDRLPSLDEARDALELLRSWAAAATEDERGMLDPALRNILPGRGTNYPPLSRRYPEEFVADSAYKDTMPDLQNGPASLIRGARQQIQHVGISNFRLPIRFHTRDNGDLTLETSVTGTVSLEAEKKGINMSRIIRSFYGHAERTFSFEVIEAALESYKADLDSFDARIMMRFSFPVKVPSLRSGLEGYQYYDIALELVEQAGVSRKIMHLDYVYSSTCPCSLELSEHARQMRGQLATPHSQRSVARLSVVLDETGGCLWFEDLIDICRAAVPTETQVMVKREDEQAFAELNAAHPVFVEDAARLFCEGLQNDPRVGDFRVVASHQESLHSHDAVSVLSEGETFATQSLDPRLFQSLYHGG

SEQ ID NO: 14006 - protein, 367 aa, Rhodovulum kholense
  REGION 1..367: note = tr|A0A2T5UIJ1|A0A2T5UIJ1_9RHOB GTP cyclohydrolase FolE2 OS=Rhodovulum kholense OX=453584 GN=folE2 PE=3 SV=1
MNVFSRDMDREPTRAEAERALALLRDWAGSASDTEIETLDPALARLLPGRLVSDYPALSRAYPEAFVADDTYKATLPDLQNGPASLIRGARRPIQHVGISNFRLPIRFHTRDNGDLTLETSVTGTVSLEAEKKGINMSRIMRSFYAHAERTFSFQVIEAALASYKTDLETFDARIMMRFSFPMTVRSLRSGLEGFQYYDFGLELVDMAGTACQIMHLDYVYSSTCPCSLELSEHARRERGQLATPHSQRSVARISVALEPGGDCLWFEDLVELCRSAVPTETQVMVKREDEQAFAELNAANPIFVEDAARLFAEALSTDPRIGDFRVIASHQESLHSHDAVSVLTEGPTFASGSLDPKLFSTLIHAR

SEQ ID NO: 14007 - protein, 368 aa, Rhodovulum marinum
  REGION 1..368: note = tr|A0A4R2Q5X3|A0A4R2Q5X3_9RHOB GTP cyclohydrolase FolE2 OS=Rhodovulum marinum OX=320662 GN=folE2 PE=3 SV=1
MNVHSREIERSPDREDAERALELLRRWADRASEAELAALDPGLAALLPGGRPAGDYPVLSRDYPHGFEADAAYKATMPDLQNGPASLIRGSRRPIQHVGISNFRLPIRFHTRDNGDLTLETSVTGTVSLEAEKKGINMSRIMRSFYAHAERTFSFEVIEAALESYKSDLESFDARILMRFSFPMKMRSLRSGLDGFQYYDFALELVEQAGVAKKIMHMDYVYSSTCPCSLELSEHARRERGQLATPHSQRSVARISVALDPDAPCLWFEDLIELCRSAVPTETQVMVKREDEQAFAELNAAHPIFVEDAARLFCEALERDPRIGDFRVIASHQESLHSHDAVSVLTEGPTFAAESLDPKLFATLIHRG

SEQ ID NO: 14008 - protein, 367 aa, Rhodovulum robiginosum
  REGION 1..367: note = tr|A0A428JNP5|A0A428JNP5_9RHOB GTP cyclohydrolase FolE2 OS=Rhodovulum robiginosum OX=68292 GN=folE2 PE=3 SV=1
MNIHNRDIERQPTREEAERALSLLRNWAGSVTPAELATLDPAVARLLPGQEVSNYPALSRTYPHDFEADAAYKASMPDLQNGPASLIRGARRAIQHVGISNFRLPIRFHTRDNGDLTLETSVTGTVSLEAEKKGINMSRIMRSFYAHAERTFSFEVVEAALESYKSDLESFDARIMMRFSFPMKMRALRSGLDGFQYYDFALELVEQAGVAKKIMHLDYVYSSTCPCSLELSEHARQVRGQLATPHSQRSVARISVVQEPGAGCLWFEDLIDICRAAVPTETQVMVKREDEQAFAELNAANPIFVEDAARLFSEGLQRDPRIGDYRVIASHQESLHSHDAVSVLTEGETFAADSLDPKLFSTLVHPG

SEQ ID NO: 14009 - protein, 211 aa, Rhodovulum sp.
  REGION 1..211: note = tr|J6J003|J6J003_9RHOB GTP cyclohydrolase 1; OS = Rhodovulum sp. PH10 OX=1187851 GN=folE PE=3 SV=1
MRTVDETAKVKATATDIGDGRAGPQRPSRAEAEAAFRTIIRWAGDDPDREGLRETPARAARAYEEFFRGYDEDPAAVLRKTFEETGGYDEMVMLRGVRFESHCEHHIVPIIGRAWVAYVPAGRVVGISKLARLVEIFAKRLQIQEKMTAQIADTIQEVLEPQGVAVVIKAVHHCMTTRGVRQPATDLVTSRMLGVFRDNRSTRQEFLALID

SEQ ID NO: 14010 - protein, 367 aa, Rhodovulum sp.
  REGION 1..367: note = tr|A0A1V0PT76|A0A1V0PT76_9RHOB GTP cyclohydrolase FolE2 OS=Rhodovulum sp. P5 OX=1564506 GN=folE2 PE=3 SV=1
MNIYSREIDRHPTRDDAERALETLRNWAESASDVERDTLDPTISALMGTRGLNAYPDLSRSYPHRFEADAAYKATMPDLQNGPASLIRGAKRPIQHVGISNFRLPIRFHTRHNGDLTLETSVTGTVSLEAEKKGINMSRIMRSFYAHAERTFSFEVIEAALESYKADLESLDARIMMRFSFPMKVSSLRSGLDGYQYYDFALELVETAGAVKKIVHLDYVYSSTCPCSLELSEHARQERGQLATPHSQRSVARLSVELDPAGDCLWFEDLIEMCRSAVPTETQVMVKREDEQAFAELNAANPIFVEDAARLFAEALERDPRVGDFRVIASHQESLHSHDAVSVLTEGDTFASESLDPKLFTTLIHAR

SEQ ID NO: 14011 - protein, 367 aa, Rhodovulum steppense
  REGION 1..367: note = tr|A0A4R1Z364|A0A4R1Z364_9RHOB GTP cyclohydrolase FolE2 OS=Rhodovulum steppense OX=540251 GN=folE2 PE=3 SV=1
MNVHNREIDARPGREEAERALEILRRWADAASESDLATADPALAALVAGRPAGGYPAFSRAYPHGFQADDAYKATMPDLQNGPASLIRGAKRPIQHVGISNFRLPIRFHTRDNGDLTLETSVTGTVSLEAEKKGINMSRIMRSFYAHAERTFSFEVIEAALDSYKSDLDSFDARIMMRFSFPMKVRSLRSGLEGFQYYDFALELVEQAGVVKKIMHMDYVYSSTCPCSLELSEHARRERGQLATPHSQRSVARISVVLDADAPCLWFEDLIELCRSAVPTETQVMVKREDEQAFAELNAAHPIFVEDAARLFCEALERDPRIGDFRVVASHQESLHSHDAVSVLTEGPTFAAESLDPKLFATLIHHG

SEQ ID NO: 14012 - protein, 367 aa, Rhodovulum sulfidophilum
  REGION 1..367: note = tr|A0A0D6B0A5|A0A0D6B0A5_RHOSU GTP cyclohydrolase FolE2 OS=Rhodovulum sulfidophilum OX=35806 GN=folE2 PE=3; SV = 1
MNVFNRDIDREPTRAEAERALALLRDWAGAASDGEIETLDPALSALCPGRAVSDYPTLSRTYPDGFEADAAYKASLPDLQNGPASLIRGARRQIQHVGISNFRLPIRFHTRENGDLTLETSVTGTVSLEAEKKGINMSRIMRSFYAHAERTFSFQVIEAALASYKADLDSFDARIMMCFSFPMKVRSLRSGLDGFQYYDFALELVETAGVPLKIMHLDYVYSSTCPCSLELSEHARRERGQLATPHSQRSVARISVALEPGGDCLWFEDLIDLCRKAVPTETQVMVKREDEQAFAELNAANPIFVEDAARLFAEALLTDPRIGDFRVIASHQESLHSHDAVSVLTEGATFAADSLDPKLFSTLVHGR

SEQ ID NO: 14013 - protein, 367 aa, Rhodovulum sulfidophilum
  REGION 1..367: note = tr|A0A1Q9QJY3|A0A1Q9QJY3_RHOSU GTP cyclohydrolase FolE2 OS=Rhodovulum sulfidophilum OX=35806 GN=folE2 PE=3; SV = 1
MNVFNRDIDREPTRAEAERALALLRDWAGAASDGEIETLDPALSALCPGRAVSDYPTLSRTYPDGFEADAAYKASLPDLQNGPASLIRGARRQIQHVGISNFRLPIRFHTRENGDLTLETSVTGTVSLEAEKKGINMSRIMRSFYAHAERTFSFQVIEAALASYKADLDSFDARIMMCFSFPMKMRSLRSGLDGFQYYDFALELVETAGVPLKIMHLDYVYSSTCPCSLELSEHARRERGQLATPHSQRSVARISVALEPGGDCLWFEDLIDLCRKAVPTETQVMVKREDEQAFAELNAANPIFVEDAARLFAEALLTDPRIGDFRVVASHQESLHSHDAVSVLTEGATFAADSLDPKLFSTLVHGR

SEQ ID NO: 14014 - protein, 367 aa, Rhodovulum visakhapatnamense
  REGION 1..367: note = tr|A0A4R8G005|A0A4R8G005_9RHOB GTP cyclohydrolase FolE2 OS=Rhodovulum visakhapatnamense OX=364297 GN=folE2; PE = 3 SV=1
MNVFSRDLDREPTRAEAERALALLRDWAGSASDAEIETLDPALARLLPGRPVSDYPALSRAYPEAFVADDTYKATLPDLQNGPASLIRGARRPIQHVGISNFRLPIRFHTRDNGDLTLETAVTGTVSLEAEKKGINMSRIMRSFYAHAERTFSFQVIEAALASYKTDLEAFDARIMMRFSFPMSVRSLRSGLDGFQYYDFGLELVETAGNTRQIMHLDYVYSSTCPCSLELSEHARRERGQLATPHSQRSVARISVALEPGGDCLWFEDLVELCRSAVPTETQVMVKREDEQAFAELNAANPIFVEDAARLFAEALSADLRIGDFRVIASHQESLHSHDAVSVLTEGPTFAAESLDPKLFSTLIHAR

SEQ ID NO: 14015 - protein, 236 aa, unidentified
  source 1..236: note = Richelia intracellularis
  REGION 1..236: note = tr|M1X421|M1X421_9NOST GTP cyclohydrolase 1; OS = Richelia intracellularis HM01 OX=1165095 GN=folE PE=3; SV = 1
MTIAGSESFKSSQPPLNTSLPKAVNVTRPDRNTNNGKQASFNQPTEKDMERMQEAIEILLLGLGEDPQREGLLKTPKRVAEAMIFLTSGYRQSLEELVNGAIFDEGHNEMVLLRDINIFSLCEHHMLPFMGKAHVAYIPNQKVVGLSKLARIAEMYSRRLQVQERLTRQIAEAIQEILNPQGVAVVIEASHMCMVMRGVQKPGSWTVTSAMLGAFQQEQKTREEFLSLIRHKPGFS

SEQ ID NO: 14016 - protein, 236 aa, unidentified
  source 1..236: note = Richelia intracellularis
  REGION 1..236: note = tr|M1WZK6|M1WZK6_9NOST GTP cyclohydrolase 1; OS = Richelia intracellularis HH01 OX=1165094 GN=folE PE=3; SV = 1
MTIAGSESFKSSQPPLNTSLPKAVNGTRPDRNTNNGKQASFNQPTEKDMERMQEAIEILLLGLGEDPQREGLLKTPKRVAEAMIFLTSGYRQSLEELVNGAIFDEGHNEMVLVRDIDIFSLCEHHMLPFMGKAHVAYIPNQKVVGLSKLARIAEMYSRRLQVQERLTRQIAEAIQEILNPQGVAVVIEASHMCMVMRGVQKPGSWTVTSAMLGAFQQEQKTREEFLSLIRHKPGFS

SEQ ID NO: 14017 - protein, 189 aa, Rickettsia africae
  REGION 1..189: note = sp|C3PNA0|GCH1_RICAE GTP cyclohydrolase 1; OS = Rickettsia africae (strain ESF-5) OX=347255 GN=folE; PE = 3 SV=1
MSKPTREEATEAVRTLLKFIGEDPSREGLLQTPDRVINSYVEIFSGYGKDVAEILNTKFYETCNFQDFILLNIKFTSFCEHHILPFNGTVDIAYIPDNCIVGISKLARIVNIFARRLQIQEKMTVQIAESVQENLKPLGVAVKISAVHSCMSMRGVMQDNSVMNTMHYTGIFAEQQKYRHEFLNLTAKR

SEQ ID NO: 14018 - protein, 190 aa, Rickettsia akari
  REGION 1..190: note = sp|A8GN89|GCH1_RICAH GTP cyclohydrolase 1; OS = Rickettsia akari (strain Hartford) OX=293614 GN=folE; PE = 3 SV=1
MSKPTREEATEAVRTLLKFIGEDPTREGLLKTPDRVINSYTEIFSGYGKDVEEILNTKFYDTCNFQDFISLEGIKFTSFCEHHMLPFNGTVHIAYIPDNCIVGISKLARIVNIFAKRLQIQEKMTVQIAESVQENLKPLGVAVKIAALHSCMSMRGVMQDHSIMNTMHYTGIFAEQQKYRHEFLNLTTKR

SEQ ID NO: 14019 - protein, 189 aa, unidentified
  source 1..189: note = Rickettsia amblyommatis
  REGION 1..189: note = tr|A0A0F3QS82|A0A0F3QS82_RICAM GTP cyclohydrolase 1; OS = Rickettsia amblyommatis str. Darkwater OX=1359166; GN = folE PE=3 SV=1
MSKPTREEAKEAVRTLLKFIGEDPSREGLLKTPDRVINSYAEIFSGYGKDVAEILNTKFYETCNFQDFILLNIKFTSFCEHHILPFNGTVDIAYVPDNCIVGISKLVRIVNIFARRLQIQEKMTVQIAESVQENLKPLGVAVKISAVHSCMSMRGVMQDNSVMNTMHYTGIFAEQQKYRHEFLNLTAKR

SEQ ID NO: 14020 - protein, 189 aa, unidentified; identical to SEQ ID NO: 14019
  source 1..189: note = Rickettsia amblyommatis
  REGION 1..189: note = tr|H8K541|H8K541_RICAG GTP cyclohydrolase 1; OS = Rickettsia amblyommatis (strain GAT-30V) OX=1105111; GN = folE PE=3 SV=1

SEQ ID NO: 14021 - protein, 189 aa, unidentified
  source 1..189: note = Rickettsia argasii
  REGION 1..189: note = tr|A0A0F3RI51|A0A0F3RI51_9RICK GTP cyclohydrolase 1; OS = Rickettsia argasii T170-B OX=1268837 GN=folE PE=3 SV=1
MSKPTREEAKDAVRTLLKFIGEDPSREGLLKTPDRVINSYAEIFSGYGKDVAEILNTKFYETCNFQDFILLNIKFTSFCEHHILPFNGTVDIAYVPDNCIVGISKLARIVNIFARRLQIQEKMTVQIAESVQENLKPLGVAVKISAVHSCMSMRGVMQDNSVMNTMHYTGIFAEQQKYRHEFLNLTAKR

SEQ ID NO: 14022 - protein, 190 aa, unidentified
  source 1..190: note = Rickettsia asembonensis
  REGION 1..190: note = tr|A0A0C2M0B1|A0A0C2M0B1_9RICK GTP cyclohydrolase 1; OS = Rickettsia asembonensis OX=1068590 GN=folE PE=3 SV=1
MSKPTREEAKEAVRTLLKFIGEDPNREGLLKTPERVINSYEEIFSGYEKDIAEILSTKFYDTCNFQDFISLEGIKFTSFCEHHMLPFNGTVHIAYVPDNCIIGISKLARIVNIFARRLQIQEKMTVQIAESVQENLKTLGVAVKISALHSCMSMRGVMQDNSVMNTMHYTGIFAEQQKYRHEFLNLTLKR

SEQ ID NO: 14023 - protein, 200 aa, Rickettsia asiatica
  REGION 1..200: note = tr|A0A510GA16|A0A510GA16_9RICK GTP cyclohydrolase 1; OS = Rickettsia asiatica OX=238800 GN=folE PE=3 SV=1
MKLEKPSREEAKEAVRTLLKFIGEDPNREGLLKTPDRVINSYRELFSGYEKDIAEILSTKFYDTCNFQDFILLKDIKFTSFCEHHMLPFIGTVDIAYIPDNCIIGISKLARIVNVFARRLQIQEKMTVQIAESVQENLKPLGVAVKISALHSCMTMRGVMQDSMMQDSDINITMNTMHYTGIFAEQQKYRHEFLNLTSKR

SEQ ID NO: 14024 - protein, 190 aa, Rickettsia australis
  REGION 1..190: note = tr|H8K7T5|H8K7T5_RICAC GTP cyclohydrolase 1; OS = Rickettsia australis (strain Cutlack) OX=1105110; GN = folE PE=3 SV=1
MSKPTREEATEAVRTLLKFIGEDPTREGLLKTPDRVINSYTEIFSGYGKDVEEILNTKFYDTCNFQGFISLEGIKFTSFCEHHMLPFNGTVHIAYIPDNCIVGISKLARIVNIFARRLQIQEKMTVQIAESVQENLRPLGVAVKISALHSCTSMRGVMQDHSIMNTIHYTGIFAEQQKYRHEFLNLTTKR

SEQ ID NO: 14025 - protein, 192 aa, Rickettsia bellii
  REGION 1..192: note = sp|A8GUB6|GCH1_RICB8 GTP cyclohydrolase 1; OS = Rickettsia bellii (strain OSU 85-389) OX=391896 GN=folE; PE = 3 SV=1
MTIKKPTKEEAKEAVRTLLRFIGEDPNREGLFKTPDRVIKSYEEIFSGYGKNIEEILETKFSDTGNFQDFISLEGIKFTSFCEHHMLPFSGTVHIAYIPDNCIVGISKLARIVNAFAKRLQIQEKMTVQIAESVQENLKPLGVAVKISALHSCMSMRGVMQDNSIMNTMHYTGIFAEQQKYRHEFLNLTSKK

SEQ ID NO: 14026 - protein, 192 aa, Rickettsia bellii; identical to SEQ ID NO: 14025
  REGION 1..192: note = tr|A0A0F3QBI5|A0A0F3QBI5_RICBE GTP cyclohydrolase 1; OS = Rickettsia bellii str. RML An4 OX=1359193 GN=folE PE=3; SV = 1

SEQ ID NO: 14027 - protein, 190 aa, unidentified
  source 1..190: note = Rickettsia buchneri
  REGION 1..190: note = tr|A0A067AJI7|A0A067AJI7_9RICK GTP cyclohydrolase 1; OS = Rickettsia buchneri OX=1462938 GN=folE PE=3 SV=1
MSKPTREEAKEAVRTLLKFIGEDPNREGLLKTPERVINSYEEIFSGYEKDIAEILSTKFFDTCNFQDFISLEGIKFTSFCEHHMLPFNGTVYIAYIPDNCIIGISKLARIVNIFARRLQIQEKMTVQIAESVQENLKPLGVAVKISALHSCMSMRGVMQDNSVMNTMHCTGIFAEQQKYRHEFLNLTSKR

SEQ ID NO: 14028 - protein, 219 aa, Rickettsia canadensis
  REGION 1..219: note = tr|A8EZ52|A8EZ52_RICCK GTP cyclohydrolase 1; OS = Rickettsia canadensis (strain McKiel) OX=293613 GN=folE; PE = 3 SV=1
MALIAIVGGLMFVYFYGKTMFLKTNKLMKLEKPSREEAKEAVRTLLKFIGEDPNREGLLKTPDRVINSYMEIFSGYEKDVAEILSTKFYDTCNFQDFISLDGIRFTSFCEHHMLPFNGTVHISYIPDNCIIGISKLARIVNVFARRLQIQEKMTVQIAESVQDNLKPLGVAVRISALHSCMSIRGVIQDNSIMNTMHYTGIFAEQQKYRHEFLNLTATR

SEQ ID NO: 14029 - protein, 189 aa, Rickettsia conorii
  REGION 1..189: note = sp|Q92I93|GCH1_RICCN GTP cyclohydrolase 1; OS = Rickettsia conorii (strain ATCC VR-613 / Malish 7); OX = 272944 GN=folE PE=3 SV=1
MSKPTREEAKEAVRTLLKFIGEDPSREGLLQTPDRVINSYVEIFSGYGKDVAEILNTKFYETCNFRDFILLNIKFTSFCEHHILPFNGTVDIAYVPDNCIVGISKLARIVNIFARRLQIQEKMTVQIAESVQENLKPLGVAVKISAVHSCMSMRGVMQDNSVMNTMHYTGIFAEQQKYRHEFLNLTAKR

SEQ ID NO: 14030 - protein, 190 aa, unidentified; identical to SEQ ID NO: 14027
  source 1..190: note = Rickettsia endosymbiont
  REGION 1..190: note = tr|C4YYZ1|C4YYZ1_9RICK GTP cyclohydrolase 1; OS = Rickettsia endosymbiont of Ixodes scapularis OX=444612; GN = folE PE=3 SV=1

SEQ ID NO: 14031 - protein, 190 aa, unidentified
  source 1..190: note = Rickettsia endosymbiont
  REGION 1..190: note = tr|A0A0F3R9D1|A0A0F3R9D1_9RICK GTP cyclohydrolase 1; OS = Rickettsia endosymbiont of Ixodes pacificus OX=1133329; GN = folE PE=3 SV=1
MSKPTREEAKEAVRTLLKFIGEDPNREGLLKTPERVINSYEEIFSGYEKDIAEILSTKFYDTCNFQDFISLEGIKFTSFCEHHMLPFNGTVYIAYIPDNCIIGISKLARIVNIFARRLQIQEKMTVQIAESVQENLKPLGVAVKISALHSCMSMRGVMQDNSVMNTMHCTGIFAEQQKYRHEFLNLTSKR

SEQ ID NO: 14032 - protein, 190 aa, Rickettsia felis
  REGION 1..190: note = sp|Q4ULX3|GCH1_RICFE GTP cyclohydrolase 1; OS = Rickettsia felis (strain ATCC VR-1525 / URRWXCal2); OX = 315456 GN=folE PE=3 SV=1
MSKPTREEAKEAVRTLLKFIGEDPTREGLLKTPDRVVNSYTEIFSGYGKDVAEILNTKFYDTCNFQDFILLKDIKFTSFCEHHMLPFIGTVDIAYIPDNCIVGISKLARIVNAFSKRLQIQEKMTVQIAESVQENLKPLGVAVKISALHSCMSMRGVMQDNSVMNTMHYTGIFAEQQKYRYDFLNLTAKR

SEQ ID NO: 14033 - protein, 190 aa, Rickettsia felis; identical to SEQ ID NO: 14032
  REGION 1..190: note = tr|A0A0F3MQ02|A0A0F3MQ02_RICFI GTP cyclohydrolase 1; OS = Rickettsia felis str. Pedreira OX=1359196 GN=folE PE=3; SV = 1

SEQ ID NO: 14034 - protein, 189 aa, Rickettsia heilongjiangensis; identical to SEQ ID NO: 14021
  REGION 1..189: note = tr|G0GXW1|G0GXW1_RICH0 GTP cyclohydrolase 1; OS = Rickettsia heilongjiangensis (strain ATCC VR-1524 / 054) OX=1032845 GN=folE PE=3 SV=1

SEQ ID NO: 14035 - protein, 189 aa, Rickettsia japonica
  REGION 1..189: note = tr|A0A3B7DEJ5|A0A3B7DEJ5_RICJA GTP cyclohydrolase 1; OS = Rickettsia japonica OX=35790 GN=folE PE=3 SV=1
MSKPTREAAKDAVRTLLKFIGEDPSREGLLKTPDRVINSYAEIFSGYGKDVAEILNTKFYETCNFQDFILLNIKFTSFCEHHILPFNGTVDIAYVPDNCIVGISKLARIVNIFARRLQIQEKMTVQIAESVQENLKPLGVAVKISAVHSCMSMRGVMQDNSVMNTMHYTGIFAEQQKYRHEFLNLTAKR

SEQ ID NO: 14036 - protein, 189 aa, Rickettsia japonica; identical to SEQ ID NO: 14035
  REGION 1..189: note = tr|G4KMW8|G4KMW8_RICJY GTP cyclohydrolase 1; OS = Rickettsia japonica (strain ATCC VR-1363 / YH); OX = 652620 GN=folE PE=3 SV=1

SEQ ID NO: 14037 - protein, 189 aa, Rickettsia massiliae
  REGION 1..189: note = sp|A8F1F2|GCH1_RICM5 GTP cyclohydrolase 1; OS = Rickettsia massiliae (strain Mtu5) OX=416276 GN=folE; PE = 3 SV=1
MSKPTREEAKEAVRTLLKFIGEDPSREGLLKTPDRVINSYAEIFSGYGKDVAKILNTKFYETCNFQDFILLNIKFTSFCEHHILPFNGTVDIAYVPDNCIVGISKLARIVNIFARRLQIQEKMTVQIAESVQENLKPLGVAVKISAVHSCMSMRGVMQDNSVMNTMHYTGIFAEQQKYRHEFLNLTAKR

SEQ ID NO: 14038 - protein, 189 aa, Rickettsia massiliae
  REGION 1..189: note = tr|H6QJI9|H6QJI9_RICMA GTP cyclohydrolase 1; OS = Rickettsia massiliae str. AZT80 OX=1105112 GN=folE PE=3; SV = 1
MSKPTREEAKEAIRTLLKFIGEDPSREGLLKTPDRVINSYAEIFSGYGKDVAKILNTKFYETCNFQDFIVLNIKFTSFCEHHILPFNGTVDIAYVPDNCIVGISKLARIVNIFARRLQIQEKMTVQIAESVQKNLKPLGVAVKISAVHSCMSMRGVMQDNSVMNTMHYTGIFAEQQKYRHEFLNLTAKR

SEQ ID NO: 14039 - protein, 190 aa, unidentified; identical to SEQ ID NO: 14031
  source 1..190: note = Rickettsia monacensis
  REGION 1..190: note = tr|A0A0B7J0J3|A0A0B7J0J3_9RICK GTP cyclohydrolase 1; OS = Rickettsia monacensis OX=109232 GN=folE PE=3 SV=1

SEQ ID NO: 14040 - protein, 189 aa, Rickettsia montanensis
  REGION 1..189: note = tr|H8KDG1|H8KDG1_RICMS GTP cyclohydrolase 1; OS = Rickettsia montanensis (strain OSU 85-930) OX=1105114; GN = folE PE=3 SV=1
MSKPTREEAKEAVRTLLKFIGEDPSREGLLKTPDRVINSYAEIFSGYGKDVAEILNTKFYETCNFQDFILLNIKFTSFCEHHILPFNGTVDIAYVPDNCIVGISKLARIVNIFARRLQIQEKMTVQIAESVQENLKPLGVAVKISAVHSCMSMRGVMQDNSVMNTMHYTGIFAEQQKYRHEFLNLTAKR

SEQ ID NO: 14041 - protein, 189 aa, Rickettsia parkeri; identical to SEQ ID NO: 14029
  REGION 1..189: note = tr|A0A0F3QMF1|A0A0F3QMF1_RICPA GTP cyclohydrolase 1; OS = Rickettsia parkeri str. Grand Bay OX=1359203 GN=folE; PE = 3 SV=1

SEQ ID NO: 14042 - protein, 189 aa, Rickettsia peacockii
  REGION 1..189: note = sp|C4K2D8|GCH1_RICPU GTP cyclohydrolase 1; OS = Rickettsia peacockii (strain Rustic) OX=562019 GN=folE; PE = 3 SV=1
MSKPTREEAKEAVRTLLKFIGEDPSREGLLKTPDRVINSYAEIFSGYGKDVAEILNTKFYETCNFRDFILLNIKFTSFCEHHILPFNGTVDIAYVPDNCIVGISKLARIVNIFARRLQIQEKMTVQIAESVQENLKPLGVAVKISAVHSCMSMRGVMQDNSVMNTMHYTGIFAEQQKYRHEFLNFTAKR

SEQ ID NO: 14043 - protein, 189 aa, unidentified
  source 1..189: note = Rickettsia philipii
  REGION 1..189: note = tr|H6PTG5|H6PTG5_RICP3 GTP cyclohydrolase 1; OS = Rickettsia philipii (strain 364D) OX=481009 GN=folE; PE = 3 SV=1
MSKPTREEAKEAVRTLLKFIGEDPSREGLLKTPDRVINSYAEIFSGYGKDVAEILNTKFYETCNFRDFILLNIKFTSFCEHHILPFNGTVDIAYVPDNCIVGISKLARIVNIFARRLQIQEKMTVQIAESVQENLKPLGVAVKISAVHSCMSMRGVMQDNSVMNTMHYTGIFAEQQKYRHEFLNLTAKR

SEQ ID NO: 14044 - protein, 190 aa, Rickettsia prowazekii
  REGION 1..190: note = sp|Q9ZDE8|GCH1_RICPR GTP cyclohydrolase 1; OS = Rickettsia prowazekii (strain Madrid E) OX=272947; GN = folE PE=3 SV=1
MSKPTREEAKEAVRTLLKFIGEDPNREGLLKTPDRVINSYTEIFSGYGKDAQEILNTKFYDICNFQDLISLEGIKFTSFCEHHILPFNGTVHIAYIPDNCIIGVSKLARIVNIFARRLQIQEKMTLEIAESVQENLKPLGVAVKISALHSCMSMRGVMHDNSVMNTMYYTGIFAEQQKYRYEFLNLIAKR

SEQ ID NO: 14045 - protein, 190 aa, Rickettsia prowazekii; identical to SEQ ID NO: 14044
  REGION 1..190: note = tr|D5AWW6|D5AWW6_RICPP GTP cyclohydrolase 1; OS = Rickettsia prowazekii (strain Rp22) OX=449216 GN=folE; PE = 3 SV=1

SEQ ID NO: 14046 - protein, 189 aa, Rickettsia raoultii
  REGION 1..189: note = tr|A0A126E9G7|A0A126E9G7_9RICK GTP cyclohydrolase 1; OS = Rickettsia raoultii OX=369822 GN=folE PE=3 SV=1
MSKPTREEAKEAVRTLLKFIGEDLSREGLLKTPDRVINSYTEIFSGYGKDVAEILNTKFYETCNFQDFILLNIKFTSFCEHHILPFNGTVDIAYVPDNCIVGISKLARIVNIFARRLQIQEKMTVQIAESVQENLKPLGVAVKISAVHSCMSMRGVMQDNSVMNTMHYTGIFAEQQKYRHEFLNLTAKR

SEQ ID NO: 14047 - protein, 189 aa, Rickettsia rhipicephali; identical to SEQ ID NO: 14037
  REGION 1..189: note = tr|A0A0S2C9U4|A0A0S2C9U4_RICRH GTP cyclohydrolase 1; OS = Rickettsia rhipicephali OX=33992 GN=folE PE=3 SV=1

SEQ ID NO: 14048 - protein, 189 aa, Rickettsia rhipicephali; identical to SEQ ID NO: 14038
  REGION 1..189: note = tr|A0A0F3PGH5|A0A0F3PGH5_RICRH GTP cyclohydrolase 1; OS = Rickettsia rhipicephali str. Ect OX=1359199 GN=folE; PE = 3 SV=1

SEQ ID NO: 14049 - protein, 189 aa, Rickettsia rickettsii; identical to SEQ ID NO: 14043
  REGION 1..189: note = sp|B0BXB8|GCH1_RICRO GTP cyclohydrolase 1; OS = Rickettsia rickettsii (strain Iowa) OX=452659 GN=folE; PE = 3 SV=1

SEQ ID NO: 14050 - protein, 189 aa, Rickettsia rickettsii; identical to SEQ ID NO: 14043
  REGION 1..189: note = sp|A8GRW0|GCH1_RICRS GTP cyclohydrolase 1; OS = Rickettsia rickettsii (strain Sheila Smith) OX=392021; GN = folE PE=3 SV=1

SEQ ID NO: 14051 - protein, 189 aa, Rickettsia sibirica; identical to SEQ ID NO: 14029
  REGION 1..189: note = tr|Q7PBN9|Q7PBN9_RICS2 GTP cyclohydrolase 1; OS = Rickettsia sibirica (strain ATCC VR-151 / 246); OX = 272951 GN=folE PE=3 SV=1

SEQ ID NO: 14052 - protein, 189 aa, Rickettsia slovaca; identical to SEQ ID NO: 14029
  REGION 1..189: note = tr|H8LND6|H8LND6_RICSL GTP cyclohydrolase 1; OS = Rickettsia slovaca str. D-CWPP OX=1105109 GN=folE PE=3; SV = 1

SEQ ID NO: 14053 - protein, 190 aa, Rickettsia sp.
  REGION 1..190: note = tr|A0A1C3EZ42|A0A1C3EZ42_9RICK GTP cyclohydrolase 1; OS = Rickettsia sp. wb OX=1851512 GN=folE PE=3 SV=1
MKKPTKEEAKEAVRTLLRFIGEDPNREGLFKTPDRVIKSYEEIFSGYGKNIEEILETKFSDTGNFQDFISLEGIKFTSFCEHHMLPFSGTVHIAYIPDNCIVGISKLARIVNTFAKRLQIQEKMTVQIAESVQENLKPLGVAVKISALHSCMSMRGVMQDNSIMNTMNYTGIFAEQQKYRHEFLNLTSKK

SEQ ID NO: 14054 - protein, 190 aa, Rickettsia sp.; identical to SEQ ID NO: 14053
  REGION 1..190: note = tr|A0A249E422|A0A249E422_9RICK GTP cyclohydrolase 1; OS = Rickettsia sp. MEAM1 (Bemisia tabaci) OX=1182263; GN = folE PE=3 SV=1

SEQ ID NO: 14055 - protein, 190 aa, Rickettsia typhi
  REGION 1..190: note = sp|Q68WZ4|GCH1_RICTY GTP cyclohydrolase 1; OS = Rickettsia typhi (strain ATCC VR-144 / Wilmington); OX = 257363 GN=folE PE=3 SV=1
MNKPTREEAKEAVRTLLRFIGEDPTREGLLKTPDRVINSYMEIFSGYGKDVQEILNTKFYDTYNFQDLISLEGIKFTSFCEHHILPFNGTVHIAYIPDNCIIGVSKLARIVNIFSRRLQIQEKMTVQIAESIQESLKPLGVAIKISAFHSCMSMRGVMHDNSVMNTMYYTGIFAEQQKYRHEFLNFIAKR

SEQ ID NO: 14056 - protein, 202 aa, unidentified; identical to SEQ ID NO: 12505
  source 1..202: note = Rickettsiales bacterium
  REGION 1..202: note = tr|A0A2D7GHS3|A0A2D7GHS3_9RICK GTP cyclohydrolase 1; OS = Rickettsiales bacterium OX=2026788 GN=folE PE=3 SV=1

SEQ ID NO: 14057 - protein, 193 aa, unidentified
  source 1..193: note = Rickettsiales bacterium
  REGION 1..193: note = tr|A0A077FIS8|A0A077FIS8_9RICK GTP cyclohydrolase 1; OS = Rickettsiales bacterium Ac37b OX=1528098 GN=folE PE=3; SV = 1
MRNNTPTREEAKEAVRILIKWIGDNPDRVELLNTPARVVDSMKQMFPGYLIRPEDVFNNTMEMVEDYNDIILLRNIKFVSYCEHHILPIIGVANIAYLPDKKMVGIGKLAKIVEIFASRLQIQERMTVQIAEAIEDVLLPKGVAVTVEAAHYCMCKENNMHLLESKMYTSHMRGIFNTDQGMKDKLRDLKFYS

SEQ ID NO: 14058 - protein, 204 aa, unidentified
  source 1..204: note = Rickettsiales endosymbiont
  REGION 1..204: note = tr|A0A4Q7DJ00|A0A4Q7DJ00_9RICK GTP cyclohydrolase 1; OS = Rickettsiales endosymbiont of Peranema trichophorum; OX = 2486577 GN=folE PE=3 SV=1
MQHTVSDSQDTLNSNSNISKDEAINAIRVLLGWIGEDPSRQDLIETPNRVLNSFNEFFSGYKIQPATLLQKTFQNTYRYTEPVILKDIAINSYCEHHMVPFTGVAHIAYIPNERIVGISKLARVAEAYARRLQVQERLTMEIARTVEEALQPHGVAVIIEALHQCIATRGAHQPNVKMVTTAMLGRFDSDQKLRAEFFNMCIKK

SEQ ID NO: 14059 - protein, 190 aa, unidentified
  source 1..190: note = Rickettsiales endosymbiont
  REGION 1..190: note = tr|A0A3Q8T8N6|A0A3Q8T8N6_9RICK GTP cyclohydrolase 1; OS = Rickettsiales endosymbiont of Stachyamoeba lipophora; OX = 2486578 GN=folE PE=3 SV=1
MSIIKEEDALQAIRTLLKWIGEDPEREGLIDTPKRVINSYKELFAGYHKDPEQILSRTFEETENYNDIILLKDISFKSFCEHHMLPIIGTANIAYLPNQKVVGISKLARIVDCFAMRLQIQERMTVQIAETIEKILKPKGVAVMITATHQCMSQRGTNKDGVSMQTSHYTGCFKSQDYLSRLMNMMLHSK

SEQ ID NO: 14060 - protein, 179 aa, Rickettsiella grylli
  REGION 1..179: note = tr|A8PMI8|A8PMI8_9COXI GTP cyclohydrolase 1; OS = Rickettsiella grylli OX=59196 GN=folE PE=3 SV=1
MEKHIKAILTALGENPEREGLKNTPMRVSQSLRYLTGGLHESLDEILNGAVFCSAMEEMIVVKDIELYSLCEHHLLPFIGVCHIAYIPNGKIIGLSKIPRIINFYARRLQIQENLTRQIAESLIKILDAKGVAIIIEAKHLCMMMRGVEKQRASMKTSVMLGLFREDLRTRSEFLSLIT

SEQ ID NO: 14061 - protein, 221 aa, Riemerella anatipestifer
  REGION 1..221: note = tr|A0A314ZVR3|A0A314ZVR3_RIEAN GTP cyclohydrolase 1; OS = Riemerella anatipestifer OX=34085 GN=folE PE=3 SV=1
MNNHFDNDDDVFTGKEHTPLRADAFEKTPEEKIAIIEKHFAEIMQTLGLDMTDDSLKDSPKRVAKMYVNEIFGGLLPENKPGISTFSNKYKYRQMLIEKDITVYSFCEHHFLPIIGRAHVAYISNGEVIGLSKINRIVDYYAKRPQVQERLTMQIVDALKEALGTNDVACIIDAKHLCVNCRGIKDTASSTITAELSGIFRTNPITRQEFLHYVGSHAKLD

SEQ ID NO: 14062 - protein, 221 aa, Riemerella anatipestifer
  REGION 1..221: note = tr|J9R5K9|J9R5K9_RIEAN GTP cyclohydrolase 1; OS = Riemerella anatipestifer RA-CH-1 OX=1228997 GN=folE; PE = 3 SV=1
MNNHFDNDDDVFTGKEHTPLRADAFEKTPEEKIAIIEKHFAEIMQTLGLDMTDDSLKDSPKRVAKMYVNEIFGGLLPENKPGISTFSNKYKYRQMLVEKDITVYSFCEHHFLPIIGRAHVAYISNGEVIGLSKINRIVDYYAKRPQVQERLTMQIVDALKEALGTNDVACIIDAKHLCVNCRGIKDTASSTITAELSGIFRTNPITRQEFLHYVGSHTKLD

SEQ ID NO: 14063 - protein, 221 aa, unidentified
  source 1..221: note = Riemerella columbipharyngis
  REGION 1..221: note = tr|A0A1G7DLL4|A0A1G7DLL4_9FLAO GTP cyclohydrolase 1; OS = Riemerella columbipharyngis OX=1071918 GN=folE PE=3 SV=1
MSHFFDNDDDVFTGKEHTPLRKDAFEKTPEEKIKIIEKHFAEIMRTLGLDMTDDSLKDSPKRVAKMYVNEIFGGLLPENKPGISTFSNKYKYRQMLVEKDITVYSFCEHHFLPIIGKAHVAYISNGEVIGLSKINRIVDYYAKRPQVQERLTMQIVDALKEALGTKDVACIIDAKHLCVNCRGIKDTASSTITAELSGIFRTNPITRQEFLHYVGSHAKLD

SEQ ID NO: 14064 - protein, 221 aa, Riemerella sp.
  REGION 1..221: note = tr|A0A496P3U9|A0A496P3U9_9FLAO GTP cyclohydrolase 1; OS = Riemerella sp. OX=2382126 GN=folE PE=3 SV=1
MTDFSDIEDDFFTGKEHTPLHKDAFLLSPDEKIEKIEKLFGEIMHTLGLDMTDDSLKDSPKRVAKMYVNEIFGGLLPENKPGISTFKNQYRYRQMLVEKDITVYSFCEHHFLPIIGRAHVAYISNGEVIGLSKINRIVNYYASRPQVQERLTMQIVQAMKEALGTEDVACIIDAKHLCVNCRGIKDTASSTITAELSGLFRKNPTTRKEFLHYVGSHTKLD

SEQ ID NO: 14065 - protein, 221 aa, Riemerella sp.
  REGION 1..221: note = tr|A0A496P3L9|A0A496P3L9_9FLAO GTP cyclohydrolase 1; OS = Riemerella sp. OX=2382126 GN=folE PE=3 SV=1
MNDFSDIEDDFFTGKEHTPLREDAFLLSPNQKIEKIEALFGEIMHTLGLDMTDDSLKDSPKRVAKMYVNEIFGGLLPENKPSISTFKNQYKYRQMLVEKDITVYSFCEHHFLPIIGRAHVAYISNGEVIGLSKINRIVDYYSKRPQVQERLTMQIAQAMKEALGTEDVACIIDAKHLCVNCRGIKDTASSTITAELSGLFRKNPTTRKEFLHYVGSHAKLD

SEQ ID NO: 14066 - protein, 191 aa, unidentified
  source 1..191: note = Riesia pediculicola
  REGION 1..191: note = tr|D4G8Z4|D4G8Z4_RIEPU GTP cyclohydrolase 1; OS = Riesia pediculicola (strain USDA) OX=515618; GN = RIEPE_0570 PE=3 SV=1
MSFSNEKSSMIQKKLQMNGVNVQSEINIDQSLKHLSQEYAKMFSKSGYNHFPKIDLMKNDTRSDQMIMINNIQFISFCEHHLLVIDGFSTVAYVPKKYIVGFSKISQIVHFFSKRPQLQERLTRQILISLKTILDIEDVAVFVRAVHYCMKLKTQDGSSDVITTELSGSFLSNHSLKNNFFRSCYSFNKGG

SEQ ID NO: 14067 - protein, 193 aa, Rikenella microfusus
  REGION 1..193: note = tr|A0A379MW49|A0A379MW49_9BACT GTP cyclohydrolase 1; OS = Rikenella microfusus OX=28139 GN=folE PE=3 SV=1
MEYDEEKIAQLAQHYKAILELLGEDPRREGLLKTPERVAKAISFMTQGYEQDPIQILLSARFREEYKQMVVVKDIELYSLCEHHMVPFYGKAHVAYIPNGFITGLSKIPRVVDCFARRLQVQERLTVQIRDCIQQALNPLGVAVVIEASHMCMQMRGVEKQNSATTTSAFTGAFLTQLQTREEFMNLISHKLR

SEQ ID NO: 14068 - protein, 199 aa, unidentified
  source 1..199: note = Rikenellaceae bacterium
  REGION 1..199: note = tr|A0A3D4XI61|A0A3D4XI61_9BACT GTP cyclohydrolase 1; OS = Rikenellaceae bacterium OX=2049048 GN=folE PE=3 SV=1
MAYTKIEQYDEETTQELAKNYKNVLDLIGEDSAREGLELTPVRVARSIQFLTQGYQMDGKAILNSAKFKEEYQQIVLVKDIELYSMCEHHMLPFYGKAHVAYIPNGYITGLSKIARVVEAYARRLQVQERLTVQIRDCIQETLNPLGVAVVIEASHMCMQIRGVQKLHSITTTSAFTGAFLKDMRTREEFLHLIGVSSH

SEQ ID NO: 14069 - protein, 193 aa, unidentified
  source 1..193: note = Rikenellaceae bacterium
  REGION 1..193: note = tr|A0A351NGB5|A0A351NGB5_9BACT GTP cyclohydrolase 1; OS = Rikenellaceae bacterium OX=2049048 GN=DCW53_03210 PE=3; SV = 1
MITEEKAIQNIRELFEYIGEDPYRVGLKDTPERMLRMFKEVFRGYDLGQKPLITTFPNGQDGIIYDNMVVDSGTFYSLCEHHCRTFFGEYWFAYLPNPHGRILGLSKIGRVVDYCAARLQVQERLVHDVVEMLTEALGDENPPFGMALMMRGRHMCKESRGARKSGEMTTTCLTGAFRKSASVRAEFLSYVKE

SEQ ID NO: 14070 - protein, 214 aa, unidentified
  source 1..214: note = Rippkaea orientalis
  REGION 1..214: note = tr|B7JYS2|B7JYS2_RIPO1 GTP cyclohydrolase 1; OS = Rippkaea orientalis (strain PCC 8801) OX=41431 GN=folE; PE = 3 SV=1
MTLSQPKELNPTLPKLITQSQPPVTEEEMRQAVRTLLLGLGEDPDREGLRDTPKRVVKALKFLTSGYHQSLDELLNGAVFHENTDEMVLVRDIDLFSSCEHHILPILGRAHIAYIPDGKVIGLSKIARICEMYGRRLQVQERLTAQIADALQGLLQPKGVAVVVEATHMCMVMRGVQKAGSWTVTSAVRGLFAEDAKTRQEFMSLIRHSATFHH

SEQ ID NO: 14071 - protein, 239 aa, unidentified
  source 1..239: note = Rippkaea orientalis
  REGION 1..239: note = tr|B7JZP6|B7JZP6_RIPO1 GTP cyclohydrolase 1; OS = Rippkaea orientalis (strain PCC 8801) OX=41431 GN=folE; PE = 3 SV=1
MTIASSNGFNRLNANGSNTLSPNLAERVSTRPDRNTHNGQPAQLHPISDSSKEKMMEAVRTMLEALGEDPEREGLLKTPKRVAEAMAFLTEGYSQSLETLVNGAIFDEGHNEMVLVRDINFFSLCEHHMLPFMGRAHVAYIPNQKVVGLSKLARIVEMYSRRLQVQERLTRQIAEAVQEILDPRGVAVVMEASHMCMVMRGVQKPGSWTVTSAMLGVFQDEQKTREEFLNLIRHQPNFF

SEQ ID NO: 14072 - protein, 275 aa, Rivibacter subsaxonicus
  REGION 1..275: note = tr|A0A4Q7W0R3|A0A4Q7W0R3_9BURK GTP cyclohydrolase FolE2 OS=Rivibacter subsaxonicus OX=457575 GN=folE2 PE=3; SV = 1
MTDLSNPNPSAIGSSLLHIPDTQSERDERHLAIQRVGVRELRYPLTVRIDGRAQGAAATWSLDVALPAERKGTHMSRFVAWLDALAQSGTALDAAGLQRGFAEMLDKLHADEGRVEARFSFFIRKQAPVSGVSSLLDYQGAFIIERRGAATTLWLEMAAPVKSLCPCSKEISDYGAHNQRSMVTIRAEVKDPALAFEDLVRIAETSASSEIWGLLKRPDEKWITERAYENPKFVEDLVRDVALRLNADARIGRYRATVENFESIHNHSAFAVIER

SEQ ID NO: 14073 - protein, 265 aa, unidentified
  source 1..265: note = Rivicola pingtungensis
  REGION 1..265: note = tr|A0A318KUF7|A0A318KUF7_9NEIS GTP cyclohydrolase FolE2 OS=Rivicola pingtungensis OX=1054498 GN=folE2 PE=3; SV = 1
MGAPETLPDVQGMLADFGFTIDQVGVKSVKFPLQVASADGGAQATVATLDMYVALPPTQKGTHMSRFLEQLHAHQGPLDGRALHGFVRDMAQRLNAESAEVSLRFPYFVRKTAPVSGAVSLLDVEAAMRGEWRADRGWTLTLTVTTPVTSLCPCSKEISRYGAHNQRSAITLSVELAADADMSLEHLVRVAEHSASCELFGLLKRPDEKWVTERAYDNPKFVEDLVRDIARALVADPRVQAFVVESENFESIHNHSAFARIRHRR

SEQ ID NO: 14074 - protein, 268 aa, unidentified
  source 1..268: note = Rivicola pingtungensis
  REGION 1..268: note = tr|A0A318KKA8|A0A318KKA8_9NEIS GTP cyclohydrolase FolE2 OS=Rivicola pingtungensis OX=1054498 GN=folE2 PE=3; SV = 1
MTVESTAAAMPDVQASADIRNIAINKVGIKSIRHPVLVADRSGGVQHSVGVFDMYVHLPQHFKGTHMSRFVEILNAQERELSVASFEQIVRQMVERLEAPSGYLEMRFPYFVNKTAPVSGVQSLLDYDVTLIGELRDGQYRFTMKVLIPVTSLCPCSKKISERGAHNQRSHITITARTAQHVWIEELIDIAERQASCELYGLLKRPDEKYVTERAYDNPKFVEDLVRDVAAALTADARIDAYVVESENFESIHNHSAYALIEFERPQA

SEQ ID NO: 14075 - protein, 216 aa, Rivularia sp.
  REGION 1..216: note = tr|K9RBH1|K9RBH1_9CYAN GTP cyclohydrolase 1; OS = Rivularia sp. PCC 7116 OX=373994 GN=folE PE=3 SV=1
MTLSFRPELNSAEEVVSSLSTQNKPKVTDEEMMQAVRTLLLGLGEDPDREGLKDTPKRVVKALQFLTKGYNESLDELLNGAVFTEDANEMVLVRDIDIFSSCEHHILPILGRAHVAYIPNGKVIGLSKIARICEMYGRRLQVQERLTLQIAEALEGLLKPQGVAVVVEASHMCMVMRGVQKPGSWTVTSAMRGVFAEDAKTREEFMNLIRHKANFH

SEQ ID NO: 14076 - protein, 235 aa, Rivularia sp.
  REGION 1..235: note = tr|K9RGN4|K9RGN4_9CYAN GTP cyclohydrolase 1; OS = Rivularia sp. PCC 7116 OX=373994 GN=folE PE=3 SV=1
MTIASSNGSNYSQSPLIPNLEDAVNPRPDRNTKGGSQPSLYPPSEEQMEQMKDAVRTMLLGVGEDPEREGLLKTPKRVAEAMRFLTSGYSQSLDDLVNGAIFDEGHNEMVLVRDINFFSLCEHHMLPFMGKAHVAYIPNQKVVGLSKLARIVEMYSRRLQVQERLNRQIAEAIQEILDPQGVAVVMEATHMCMAMRGVQKPGSWTVTSAMLGVFEQEQKTREEFFSLIRHQPAFF

SEQ ID NO: 14077 - protein, 203 aa, unidentified
  source 1..203: note = Robbsia andropogonis
  REGION 1..203: note = tr|A0A0F5JVC5|A0A0F5JVC5_9BURK GTP cyclohydrolase 1; OS = Robbsia andropogonis OX=28092 GN=folE PE=3 SV=1
MGMTDTIKPTREEAEKAVRTLIRWAGDDPDREGLLDTPSRVVRSYDEFFAGYAIDPATLLSTTFSEVDGYDEMVVLKDIRFESYCEHHMVPIIGKAHVAYLPNQRVVGLSKLARLVDAYAKRLQIQEKMTVQIADTLNATLEPKGVAVILEAAHQCMSTRGVHKAGSTMVTSRMLGAFREDASTRREFLSIVGKNASILAPYA

SEQ ID NO: 14078 - protein, 226 aa, unidentified
  source 1..226: note = Robertkochia marina
  REGION 1..226: note = tr|A0A4S3LX96|A0A4S3LX96_9FLAO GTP cyclohydrolase 1; OS = Robertkochia marina OX=1227945 GN=folE PE=3 SV=1
MKIDKALEEQYEELGNEHIGSSANTPLRDDAFEASDDEKIEGIETQVYNIMETLGLDLTDDSLRGTPRRVAKMFVKEIFAGLHPDRKPKASTFENKYKYGEMLVEKNITVYSTCEHHLLPIVGRAHVAYISNGTVIGLSKMNRIVDYYAKRPQVQERMTMQIVQELQQALGTKDVACVVDAKHLCVNSRGIRDIESSTVTAEFGGKFKDAAVRREFLDYINLDTEF

SEQ ID NO: 14079 - protein, 198 aa, unidentified
  source 1..198: note = Robertkochia marina
  REGION 1..198: note = tr|A0A4S3M1E2|A0A4S3M1E2_9FLAO GTP cyclohydrolase 1; OS = Robertkochia marina OX=1227945 GN=folE PE=3 SV=1
MPYKTFEEYNMKITDEVRDRYKQIITELGEDADREGLIKTPERAAKAMQFLTQGYYQDASAIMKSAMFKESYNEMVIVKDIELYSLCEHHILPFFGKAHIAYIPDGYIVGLSKLPRVVDVFARRLQVQERLTHDILECINETLKPKGVAVVIEASHMCMMMRGVQKQNSVTTTSGFRGQFEKIETRNEFLKLISSDLT

SEQ ID NO: 14080 - protein, 227 aa, Robiginitalea biformata
  REGION 1..227: note = tr|A4CM58|A4CM58_ROBBH GTP cyclohydrolase 1; OS = Robiginitalea biformata (strain ATCC BAA-864 / HTCC2501 / KCTC 12146) OX=313596 GN=folE PE=3 SV=1
MKTDPALETSRESFMEDHFTGKEETPLREDAFRLSDEEKIDRIRQNVRDILLTLGMDLNDDSLRGTPDRVAKMYVKEIFAGLHPDRRPKSSTFDNKYKYGEMLVEKNITVYSTCEHHLLPIVGKAHIAYISGGSVVGLSKMNRIVDYYARRPQVQERMNIQIVRELQRVLGTEDVACVIDAKHLCVNSRGIRDVDSSTVTSEYGGRFKEEESLRREFLEYINLDTEF

SEQ ID NO: 14081 - protein, 176 aa, Robiginitalea biformata
  REGION 1..176: note = tr|A4CGT7|A4CGT7_ROBBH GTP cyclohydrolase 1; OS = Robiginitalea biformata (strain ATCC BAA-864 / HTCC2501 / KCTC 12146) OX=313596 GN=folE PE=3 SV=1
MQALGMDLSDTSLADTPMRVARMYVNETFRGLSAKNFPRISFFEKAPGTPEMIVVNDITLYSYCEHHFVPFFGKVHVAYIPGDRLLGLSKVNRVVDYLSRKPHLQERLTREIADTLSELLQTRHVAVFVEAQHLCVASRGVRDAKSITRTGCYLGQFQNTHTRAEFMASLKMQGSL

SEQ ID NO: 14082 - protein, 199 aa, Robiginitalea myxolifaciens
  REGION 1..199: note = tr|A0A1I6GW15|A0A1I6GW15_9FLAO GTP cyclohydrolase 1; OS = Robiginitalea myxolifaciens OX=400055 GN=folE PE=3 SV=1
MSPFRQLEEYDIELTQEIKERYLRILDEIGEDVEREGLEKTPERAAKAMLFLTQGYQQDAVKILKGAMFKEDYNEMVIIKDIELYSLCEHHMLPFFGKAHVAYIPNGQIVGLSKIPRVVDVFSRRLQVQERLTHDILECINTTLKPKGVAVVIEAAHMCMMMRGVQKQNSVTTTSGFRGQFEKIETRNEFLKLISSDLS

SEQ ID NO: 14083 - protein, 226 aa, Robiginitalea myxolifaciens
  REGION 1..226: note = tr|A0A1I6HE90|A0A1I6HE90_9FLAO GTP cyclohydrolase 1; OS = Robiginitalea myxolifaciens OX=400055 GN=folE PE=3 SV=1
MKGDTTLQMSEDSLGEDHFSASEETPLRDDAFRLTDEEKIDRITDSVRDILLTLGMDLDDDSLKGTPLRVAKMFVKETFGGLHPDRRPKSSTFDNKYKYGEMLVEKNITLYSTCEHHLLPIVGKAHIAYISNGSVVGLSKMNRIVDYYAKRPQVQERLNIQIVRELQEVLGTPDVACVIDAKHLCVNSRGIRDVASSTVTAEYGGKFKEEAVRKEFLEYINLETEF

SEQ ID NO: 14084 - protein, 107 aa, Robiginitomaculum sp.
  REGION 1..107: note = tr|A0A2G2M5G8|A0A2G2M5G8_9RHOB GTP cyclohydrolase 1; OS = Robiginitomaculum sp. OX=2030823 GN=COA85_00590 PE=3; SV = 1
MAPFMGVAHVAYLPTDRVVGLSKIARLVEMYAKRLQTQENLTAQITKAMMDALKPRGVAVMITAEHQCMSTRGVHHGGVDTVTTRFDGVFKDCAEMRERFLRLAEKA

SEQ ID NO: 14085 - protein, 207 aa, Robiginitomaculum sp.
  REGION 1..207: note = tr|A0A2G2LR48|A0A2G2LR48_9RHOB GTP cyclohydrolase 1; OS = Robiginitomaculum sp. OX=2030823 GN=folE PE=3 SV=1
MDAYTNKAATLRAVNDDQAKPSRDEAEAAVRTLLAWAGDDPTREGLLETPKRVTRAFGEWFSGYEGDAADILSRTFKEVSGYDDIVMLRNIEVQSHCEHHMAPFMGVAHVAYLPVGRVVGLSKIARLVEMFARRLQTQENLTAQITKAMMDELRPRGVAVMISAQHQCMSTRGVHHHDVDTITTRFDGVFKDCAEMRERFLRLAEKA

SEQ ID NO: 14086 - protein, 184 aa, Robinsoniella peoriensis
  REGION 1..184: note = tr|A0A4U8Q3A6|A0A4U8Q3A6_9FIRM GTP cyclohydrolase 1; OS = Robinsoniella peoriensis OX=180332 GN=folE PE=3 SV=1
MIDQSKIKEGVRLILEGIGEDTTREGLIETPDRIARMYTEIVGGMEEDAAEHLSKRFHVKNNEMVLEKDITFYSTCEHHMLPFFGKAHIAYVPNGSVVGLSKIARTVEVFAKRLQLQEQLTAQIADAFMDNLAPQGVMVMVEAEHMCMTMRGIKKPGSKTVTVVTRGIFKDNEKLQNTFYQMLR

SEQ ID NO: 14087 - protein, 194 aa, Robinsoniella sp.
  REGION 1..194: note = tr|A0A371AXI8|A0A371AXI8_9FIRM GTP cyclohydrolase 1; OS = Robinsoniella sp. MCWD5 OX=1812858 GN=folE PE=3 SV=1
MAIDKSKIEEHIRGILIALGEDPQREGLIDTPKRVADMYAEVFEGINYTNDEIADMFKKTFEDDLFIQKGKDMVLMKDIEIMSHCEHHLALMYNMKVAVAYIPNDKVIGLSKIARVADMVGRRLQLQERIGSDILEIIKKITNSEDVAVLVEGEHGCMTFRGIKKVNAKTVTTTLSGKFQSDPMLHQKFITLVK

SEQ ID NO: 14088 - protein, 184 aa, Robinsoniella sp.; identical to SEQ ID NO: 14086
  REGION 1..184: note = tr|A0A0J1GEV1|A0A0J1GEV1_9FIRM GTP cyclohydrolase 1; OS = Robinsoniella sp. RHS OX=1504536 GN=folE PE=3 SV=1

SEQ ID NO: 14089 - protein, 218 aa, unidentified
  source 1..218: note = Rodentibacter genomosp.
  REGION 1..218: note = tr|A0A1V3JEF4|A0A1V3JEF4_9PAST GTP cyclohydrolase 1; OS = Rodentibacter genomosp. 2 OX=1908266 GN=folE PE=3 SV=1
MSNISQDALNVRDALIAKGIETPMITPNPNKDERRSGIASHMREVMKLIGLDLGDDSLEETPNRLAKMFVDEIFSGMDYANFPKMTKIKNQMKVSEMVQVNDITLTSTCEHHFVTIDGNVAVAYYPKDWVIGLSKINRIVAFFAQRPQVQERLTEQLLTAFQTILETDDVAVYVKATHFCVKARGVKDTNSYTVTSAYGGVFLEDRETRKEFLASIQK

SEQ ID NO: 14090 - protein, 218 aa, unidentified
  source 1..218: note = Rodentibacter genomosp.
  REGION 1..218: note = tr|A0A1V3JCN2|A0A1V3JCN2_9PAST GTP cyclohydrolase 1; OS = Rodentibacter genomosp. 2 OX=1908266 GN=folE PE=3 SV=1
MSNISQDALNVRDALIAKGIETPMMTPNPNKDERRSGIASHMREVMKLIGLDLGDDSLEETPNRLAKMFVDEIFSGMDYANFPKMTKIKNQMKVSEMVQVNDITLTSTCEHHFVTIDGSVAVAYYPKDWVIGLSKINRIVAFFAQRPQVQERLTEQLLTAFQTILETDDVAVYVKATHFCVKARGVKDTNSYTVTSAYGGVFLEDRETRKEFLASIQK

SEQ ID NO: 14091 - protein, 218 aa, unidentified
  source 1..218: note = Rodentibacter heidelbergensis
  REGION 1..218: note = tr|A0A1V3I8P7|A0A1V3I8P7_9PAST GTP cyclohydrolase 1; OS = Rodentibacter heidelbergensis OX=1908258 GN=folE PE=3; SV = 1
MSEISPDALSVRNALREKGIETPMIDPSKNKDERRISIAKHMNEVMKLIGLDLADDSLEETPHRLAKMFIDEIFSGMDYANFPKMTKIKNQMKVSEMVQVNDITLTSTCEHHFVTIDGKVCVAYYPKDWVIGLSKINRIVSFFAQRPQVQERLTEQLLTAFQTILETDDVAVYVKATHFCVKARGIKDTHSYTVTSAYGGVFLEDRDTRKEFLATVQK

SEQ ID NO: 14092 - protein, 218 aa, unidentified
  source 1..218: note = Rodentibacter heylii
  REGION 1..218: note = tr|A0A1V3KG14|A0A1V3KG14_9PAST GTP cyclohydrolase 1; OS = Rodentibacter heylii OX=1906744 GN=folE PE=3 SV=1
MSNISQDALNVRDALVAKGIETPMITLNPNKDERRSGIASHMREVMKLIGLDLGDDSLEETPNRLAKMFVDEIFSGMDYANFPKMTKIKNQMKVSEMVQVNDITLTSTCEHHFVTIDGNVAVAYYPKDWVIGLSKINRIVAFFAQRPQVQERLTEQLLTAFQTILETDDVAVYVKATHFCVKARGVKDTNSYTVTSAYGGVFLEDRETRKEFLASIQK

SEQ ID NO: 14093 - protein, 218 aa, unidentified; identical to SEQ ID NO: 14089
  source 1..218: note = Rodentibacter heylii
  REGION 1..218: note = tr|A0A1V3KG23|A0A1V3KG23_9PAST GTP cyclohydrolase 1; OS = Rodentibacter heylii OX=1906744 GN=folE PE=3 SV=1

SEQ ID NO: 14094 - protein, 218 aa, unidentified
  source 1..218: note = Rodentibacter mrazii
  REGION 1..218: note = tr|A0A1V3IGK7|A0A1V3IGK7_9PAST GTP cyclohydrolase 1; OS = Rodentibacter mrazii OX=1908257 GN=folE PE=3 SV=1
MSDISQDALNVRNALIAKGIETPMISPNQNKDERRSGISKHMREVMKLIGLDLRDDSLEETPNRLAKMFIDEIFSGMDYANFPKMTKIKNQMKVSEMVQVNDITLTSTCEHHFVTIDGNVAVAYYPKDWVIGLSKINRIVAFFAQRPQVQERLTEQLLTAFQTILETDDVAVYVKATHFCVKARGVKDTNSYTVTSAYGGVFLEDRETRKEFLASIQK

SEQ ID NO: 14095 - protein, 218 aa, unidentified
  source 1..218: note = Rodentibacter myodis
  REGION 1..218: note = tr|A0A1V3JQX7|A0A1V3JQX7_9PAST GTP cyclohydrolase 1; OS = Rodentibacter myodis OX=1907939 GN=folE PE=3 SV=1
MNEISPDALSVRNALIAKGIETPMIDPAQDKNARRADIAKHMHEVMKLIGLDLRDDSLEETPNRLAKMFIDEIFSGMDYANFPKMTKIKNQMKVSEMVQVNDITLTSTCEHHFVTIDGKVCVAYYPKDWVIGLSKINRIVSFFAQRPQVQERLTEQLLTAFQTILETDDVAVYVKATHFCVKARGIKDTHSYTVTSAYGGVFLEDRDTRKEFLATVQK

SEQ ID NO: 14096 - protein, 218 aa, unidentified
  source 1..218: note = Rodentibacter pneumotropicus
  REGION 1..218: note = tr|A0A1V3K834|A0A1V3K834_9PAST GTP cyclohydrolase 1; OS = Rodentibacter pneumotropicus OX=758 GN=folE PE=3 SV=1
MSDISQDALNVRDALIAKGIETPMITPCQNKDERRSGISKHMREVMKLIGLDLGDDSLEETPNRLAKMFIDEIFSGMDYANFPKMTKIKNQMKVSEMVQVNDITLTSTCEHHFVTIDGSVAVAYYPKDWVIGLSKINRIVAFFAQRPQVQERLTEQLLTAFQTILETDDVAVYVKATHFCVKARGVKDTSSYTVTSAYGGVFLEDRETRKEFLASIQK

SEQ ID NO: 14097 - protein, 230 aa, unidentified
  source 1..230: note = Rodentibacter pneumotropicus
  REGION 1..230: note = tr|A0A448MN22|A0A448MN22_9PAST GTP cyclohydrolase 1; OS = Rodentibacter pneumotropicus OX=758 GN=folE PE=3 SV=1
MSDISQDALNVRDALIAKGIETPMITPCQNKDERRSGISKHMREVMKLIGLDLGDDSLEETPNRLAKMFIDEIFSGMDYANFPKMTKIKNQMKVSEMVQVNDITLTSTCEHHFVTIDGSVAVAYYPKDWVIGLSKINRIVAFFAQRPQVQERLTEQLLTAFQTILETDDVAVYVKATHFCVKARGVKDTNSYTVTSAYGGVFLEDRETRKEFLASIQNKNVKRNDRTLSH

SEQ ID NO: 14098 - protein, 218 aa, unidentified
  source 1..218: note = Rodentibacter rarus
  REGION 1..218: note = tr|A0A1V3IN99|A0A1V3IN99_9PAST GTP cyclohydrolase 1; OS = Rodentibacter rarus OX=1908260 GN=folE PE=3 SV=1
MSEISPDALSVRNALREKGIETPMIDPNQNKDERRIGIAKHMNEVMKLIGLDLADDSLEETPHRLAKMFIDEIFSGMDYANFPKMTKIKNQMKVSEMVQVNDITLTSTCEHHFVTIDGKVCVAYYPKDWVIGLSKINRIVSFFAQRPQVQERLTEQLLTAFQTILETDDVAVYVKATHFCVKARGIKDTHSYTVTSAYGGVFLEDRDTRKEFLATVQK

SEQ ID NO: 14099 - protein, 218 aa, unidentified
  source 1..218: note = Rodentibacter ratti
  REGION 1..218: note = tr|A0A1V3KUB5|A0A1V3KUB5_9PAST GTP cyclohydrolase 1; OS = Rodentibacter ratti OX=1906745 GN=folE PE=3 SV=1
MSDISQDALNVRDALIAKGIETPMIISNQNKDERRSGISNHMREVMKLIGLDLRDDSLEETPNRLAKMFIDEIFSGMDYANFPKMTKIKNQMKVSEMVQVNDITLTSTCEHHFVTIDGKVAVAYYPKDWVIGLSKINRIVAFFAQRPQVQERLTEQLLTAFQTILETDDVAVYVKATHFCVKARGVKDTNSYTVTSAYGGVFLEDRETRKEFLASIQK

SEQ ID NO: 14100 - protein, 218 aa, unidentified
  source 1..218: note = Rodentibacter sp.
  REGION 1..218: note = tr|A0A1V3JZL9|A0A1V3JZL9_9PAST GTP cyclohydrolase 1; OS = Rodentibacter sp. Ppn85 OX=1908525 GN=folE PE=3 SV=1
MSNISQDALNVHEALIAKGIETPMITPNQNKDERRSGIAGHMREVMKLIGLDLGDDSLEETPNRLAKMFIDEIFSGMDYANFPKMTKIKNQMKVSEMVQVNDITLTSTCEHHFVTIDGSVAVAYYPKDWVIGLSKINRIVTFFAQRPQVQERLTEQLLTAFQTILETDDVAVYVKATHFCVKARGVKDTNSYTVTSAYGGVFLEDRETRKEFLASIQK

SEQ ID NO: 14101 - protein, 218 aa, unidentified
  source 1..218: note = Rodentibacter trehalosifermentans
  REGION 1..218: note = tr|A0A1V3IU17|A0A1V3IU17_9PAST GTP cyclohydrolase 1; OS = Rodentibacter trehalosifermentans OX=1908263 GN=folE; PE = 3 SV=1
MSEISPDALSVRNALRDKGIETPMIDPIKNQDERRIGIAKHMNEVMKLIGLDLADDSLEETPNRLAKMFIDEIFSGMDYANFPKITKIKNQMKVSEMVQVNDITLTSTCEHHFVTIDGKVCVAYYPKDWVIGLSKINRIVSFFAQRPQVQERLTEQLLTAFQTILETDDVAVYVKATHFCVKARGIKDTHSYTVTSAYGGVFLEDRDTRKEFLATVQK

SEQ ID NO: 14102 - protein, 190 aa, unidentified
  source 1..190: note = Romboutsia hominis
  REGION 1..190: note = tr|A0A2P2BT08|A0A2P2BT08_9FIRM GTP cyclohydrolase 1; OS = Romboutsia hominis OX=1507512 GN=folE PE=3 SV=1
MSKVDKDKIRKAVRDILEAIGEDPNREGLIGTPDRVARMYEEIFAGLHQDPSEHLKVIFQDESHEELVLVRDIPFYSCCEHHIVPFFGKAHIAYIPKDGKLTGLSKLARVVETFAKRPQLQERITKGIADIIMQELEPYGVIVVVEAEHMCMTMRGVKKPGSKTITSAVRGIFEKDIAARAEAMSLITMK

SEQ ID NO: 14103 - protein, 190 aa, unidentified
  source 1..190: note = Romboutsia ilealis
  REGION 1..190: note = tr|A0A1V1I2F5|A0A1V1I2F5_9FIRM GTP cyclohydrolase 1; OS = Romboutsia ilealis OX=1115758 GN=folE PE=3 SV=1
MSNVDKDKIKRAVRDILEAIGEDPDREGLLDTPDRVARMYEEIYSGIHQDPREHLKVIFQDEKHEELVLVRDVSFYSCCEHHLVPFFGKAHIAYLPKDGRLTGLSKLARVIETLAKRPQLQERITKSAADIIMEELNPYGVIVVVEAEHMCMTMRGVKKPGSKTITSAVRGIFEKDIAARAEAMSLITMK

SEQ ID NO: 14104 - protein, 190 aa, unidentified
  source 1..190: note = Romboutsia lituseburensis
  REGION 1..190: note = tr|A0A1G9L409|A0A1G9L409_9FIRM GTP cyclohydrolase 1; OS = Romboutsia lituseburensis DSM 797 OX=1121325 GN=folE; PE = 3 SV=1
MSKVDKDKIKNAVRDILEAIGEDPDREGLIGTPDRVARMYEEIFAGLHQDPSEHLKVIFQDESHEELVLVRDIPFYSCCEHHIVPFFGKAHIAYIPKDGKLTGLSKLARVVETFAKRPQLQERITKGVADIIMKELEPYGVIVVVEAEHMCMTMRGVKKPGSKTTTSAVRGIFEKDIAARAEAMSLITMR

SEQ ID NO: 14105 - protein, 190 aa, unidentified
  source 1..190: note = Romboutsia maritimum
  REGION 1..190: note = tr|A0A371IVY8|A0A371IVY8_9FIRM GTP cyclohydrolase 1; OS = Romboutsia maritimum OX=2020948 GN=folE PE=3 SV=1
MSNVDKDKIKRAVRDILEAIGENPDREGLVNTPDRVARMYEEIYSGLHKDPREHLKVIFQDEKHEELVLVKDIPFYSCCEHHLVPFFGKAHIAYIPKGGRLTGLSKLARVIDTLAKRPQLQERITKEAADIIMKELQPYGVIVVVEAEHMCMTMRGVKKPGSKTITSAVRGVFETDMSTRAEAMSLINMR

SEQ ID NO: 14106 - protein, 190 aa, unidentified
  source 1..190: note = Romboutsia weinsteinii
  REGION 1..190: note = tr|A0A371J9M6|A0A371J9M6_9FIRM GTP cyclohydrolase 1; OS = Romboutsia weinsteinii OX=2020949 GN=folE PE=3 SV=1
MSNVDRDKIKRAVRDILEAIGENPDREGLIDTPDRVARMYEEIFSGIHEDPKDHLKVLFQDEKHEEMVVVKDISFYSCCEHHLVPFFGKAHIAYIPKGGKLTGLSKLARVIETLAKKPQLQERITKDAADIIMKELEPYGVVVVVEAEHMCMTMRGVKKPGSKTVTSAVRGIFEKDISSRSEALSLINMR

SEQ ID NO: 14107 - protein, 184 aa, Roseburia inulinivorans
  REGION 1..184: note = tr|A0A174BCC0|A0A174BCC0_9FIRM GTP cyclohydrolase 1; OS = Roseburia inulinivorans OX=360807 GN=folE PE=3 SV=1
MDKEKIEAGVKLILEGIGENPDREGLIDTPDRIARMYEEIFGGLTQTAEEPLSKTFHVKDNAMVLEKDITFYSTCEHHFMPFYGKAHIAYIPDGKVVGLSKLARTVEVYAKRPQIQEQLTAQIADALMEYLKPQGAMVMLEAEHMCMTMRGVKKPGSKTVTFVTRGVFDRDERLQRQFFELVRG

SEQ ID NO: 14108 - protein, 184 aa, Roseburia inulinivorans
  REGION 1..184: note = tr|A0A3R5WUG5|A0A3R5WUG5_9FIRM GTP cyclohydrolase 1; OS = Roseburia inulinivorans OX=360807 GN=folE PE=3 SV=1
MDKEKIEAGVRLILEGIGEDPHREGLLDTPDRIARMYEEIFGGLTLTAEEPLSKTFHVKDNAMVLEKDITFYSTCEHHFMPFYGKAHIAYIPDGKVVGLSKLARTVEVYAKRPQIQEQLTAQIADALMEYLKPQGAMVMLEAEHMCMTMRGVKKPGSRTVTFVTRGVFDRDERLQRQFFELVRG

SEQ ID NO: 14109 - protein, 201 aa, Roseburia sp.
  REGION 1..201: note = tr|A0A1Q6U1A4|A0A1Q6U1A4_9FIRM GTP cyclohydrolase 1; OS = Roseburia sp. CAG:197_41_10 OX=1897018 GN=folE PE=3 SV=1
MENKKKIDTEAIAYHIREILKALGDDPEREGLKDTPKRVAKMYEEVFEGMNYTNKEIADMFNKTFVLNECDEYDGIEKMQNMVVVRDIDIFSYCEHHLALMYDMKVTVAYIPKDRVIGISKIARIADMVSKRLQLQERIGTDIADIVQMVTGAEDIAVFIEGCHSCMTARGIKKVNAKTYTQTLKGRFNNESNGFIQWWNR

SEQ ID NO: 14110 - protein, 184 aa, Roseburia sp.
  REGION 1..184: note = tr|R6Z5J6|R6Z5J6_9FIRM GTP cyclohydrolase 1; OS = Roseburia sp. CAG:309 OX=1262945 GN=folE PE=3 SV=1
MDKDKIKKAVSLFLEGIGENPEREGFLETPDRIAKMCEELFGGYEADAADHLEKTFSSTQKGLVLEKDITFYSVCEHHLLPFYGKVHIGYIPDGKVVGLSKLARTVEVFARRAQIQEQLTDQIADAMMDILAPKGVIVMVEAEHMCMTMRGIKKPGSKTITLSTRGCAKEEESWKREFLELLRL

SEQ ID NO: 14111 - protein, 208 aa, unidentified
  source 1..208: note = Roseiarcus fermentans
  REGION 1..208: note = tr|A0A366FGP9|A0A366FGP9_9RHIZ GTP cyclohydrolase 1; OS = Roseiarcus fermentans OX=1473586 GN=folE PE=3 SV=1
MYEVVKLKPAATAPAHPAGRPSREQAEAAVRTLIAWAGDDPDREGLIDTPRRVAKAYEELFGGYREDAVKPLKRVFREVSGYKDLVLVRDIAFVSHCEHHILPVFGKAHIGYYPKGGVVGLSKFARIVDTFARRLQTQEALSAQIVEAIEETLETRGVAVMLEAEHTCMAMRGVRKHGTSTVTTQFGGVFRDDPDQQTRFLGLLRGAR

SEQ ID NO: 14112 - protein, 201 aa, unidentified
  source 1..201: note = Roseiarcus fermentans
  REGION 1..201: note = tr|A0A366ET03|A0A366ET03_9RHIZ GTP cyclohydrolase 1; OS = Roseiarcus fermentans OX=1473586 GN=folE PE=3 SV=1
MIHKLETGGHGVSDPEVEEAFRTVLRWIGEDPERDGLRETPNRLKRAFREYFAGYDEDPEQVLRKTFSEVDGYDEMIVLRGVTFESHCEHHVAPIIGRAWVGYIPDKRVVGISKLARVVEIFAKRLQIQERLTAQIANTIEDVLKPQGVAVVVKAAHHCMISRGVHKRGADLVTSRMLGVFRDSPVTRGEFLSLVNADRTE

SEQ ID NO: 14113 - protein, 363 aa, unidentified
  source 1..363: note = Roseibaca calidilacus
  REGION 1..363: note = tr|A0A0P7WWX7|A0A0P7WWX7_9RHOB GTP cyclohydrolase FolE2 OS=Roseibaca calidilacus OX=1666912 GN=folE PE=3 SV=1
MNVHVPGLEQTPSEAEAQAALETLRRFADGAADDARARVEAAATSLLPALTYPDLNRDYPQGFRADADYKAGLPDLQNGPASLIVGAKAPIQHVGISNFRLPIRYHTRDNGDLMLETSVTGSVSLEAEKKGINMSRIMRSFYGHAERTFSADVVRAALDDYKADLDSFDARIMMRFSFPVKVESLRSGLQGYQYYDIAMEVVDRAGVRQTFMHLDYVYSSTCPCSLELSEHARATRGQLATPHSQRSVARVSVQVLPGNKLWFEDLIDLCRAAVPTETQVMVKREDEQAFAELNAANPIFVEDAARSFCAQLDADPRIGDFRVLASHQESLHSHDAVSVLTRGETFDADSLDPRLFASLFHVG

SEQ ID NO: 14114 - protein, 363 aa, Roseibaca ekhonensis
  REGION 1..363: note = tr|A0A3B0M3U7|A0A3B0M3U7_9RHOB GTP cyclohydrolase FolE2 OS=Roseibaca ekhonensis OX=254356 GN=folE2 PE=3 SV=1
MNVHVPGLEQTPSEAEAEAALETLRRFADGASGDARARVEAAATSLLPATSYPDLNRDYPEGFRADAAYKAGLPDLQNGPASLIVGAKAPIQHVGISNFRLPIRYHTRDNGDLTLETSVTGSVSLEAEKKGINMSRIMRSFYGHAERTFSADVVRAALEDYKADLESFDARIMMRFSFPVKVESLRSGLHGYQYYDIAMEVVDRAGVRQTFMHLDYVYSSTCPCSLELSEHARATRGQLATPHSQRSVARVSVQVLPGNKLWFEDLIDLCRAAVPTETQVMVKREDEQAFAELNAANPIFVEDAARSFCEQLDGDARIGDFRVVASHQESLHSHDAVSVLTHGDTFESESLDPRLFASLFHVG

SEQ ID NO: 14115 - protein, 259 aa, Roseibacillus sp.
  REGION 1..259: note = tr|A0A2E5D929|A0A2E5D929_9BACT GTP cyclohydrolase FolE2 OS=Roseibacillus sp. OX=2024856 GN=folE2 PE=3 SV=1
MQDLIDTQNEKDDRNLPIDRVGIKSLKHPCGVVGRDGEIQHTVADVSLAVNLPHDERGTHMSRFVEVLNEHGNCLNVKEPGLVPRELQRRLRAETAWVTYQFPFFRSKRAPVTEKEGNLCYEVRFEIEAGETEDFALTVMVPVTTLCPCSKAISERGAHNQRGIVTYSIRSSQVIWIEDAIEIVEESASSELYSLLKRPDEKAVTERAYDHPVFVEDLVRNVARRSEEQGSISWYRVEAENFESIHNHSAYAEIENELG

SEQ ID NO: 14116 - protein, 259 aa, Roseibacillus sp.
  REGION 1..259: note = tr|A0A2D6DYD8|A0A2D6DYD8_9BACT GTP cyclohydrolase FolE2 OS=Roseibacillus sp. OX=2024856 GN=folE2 PE=3 SV=1
MQELTDTQNERDYRNLPIDRVGIKSLKHPVVVVGRDGDLQHTVADVSMAVNLPHEQRGTHMSRFVEVLNEHGNCLDVREPGMVSRELQRRLKAERAWVSYQFPFFRSKRAPVTEKESSLSYEVRFEIEAGKTEDFVLTVMVPVTTLCPCSKAISERGAHNQRGIVTYSLRSPQVIWIEDAIETVEESASSELYSLLKRPDEKAVTERAYDNPVFVEDLVRNVARRSVEQGSISWYRVEAENFESIHNHSAYAEIENKPG

SEQ ID NO: 14117 - protein, 365 aa, Roseibacterium elongatum
  REGION 1..365: note = tr|W8RWM0|W8RWM0_9RHOB GTP cyclohydrolase FolE2; OS = Roseibacterium elongatum DSM 19469 OX=1294273 GN=folE2; PE = 3 SV=1
MNMHVTTTPEDPTREDAAEALRLLRLWAANATEAERAELDPDVARLLAGQGDYPSFSRDYPQDFTVDEAYKAGLPDLQNGPSSLIRGSQRQIQHVGISNFRLPILYHTRDNGDLTLETSVTGTVSLEAEKKGINMSRIMRSFYAHADKTFSFEVIEAALDDYKTDLESFDARIQMRLSFPMRVNSLRSGLSGYQYYDIALELVERNNVRQKIIHLDYVYSSTCPCSLELSEHARATRNQLATPHSQRSVARISVELAEGQSCLWFEDLIDMARAAVPTETQVMVKREDEQAFAELNAANPIFVEDAARLFAEQLENDARVGDFRVLASHQESLHSHDAVSVLTEGPTFEAASLDPRLFQSLIHVG

SEQ ID NO: 14118 - protein, 211 aa, Roseibium hamelinense
  REGION 1..211: note = tr|A0A562TA88|A0A562TA88_9RHOB GTP cyclohydrolase 1; OS = Roseibium hamelinense OX=150831 GN=folE PE=3 SV=1
MDAVLKPVQKKVDRKTPDQLQRPSKEEAEAAVKTLLAWTGDDPDREGLLETPKRVVKAFTQLYGGYFEDPIEHLERTFEDVGGYQDIVMVRGIPFHSHCEHHMLPFIGQAHIAYYPAEGVVGLSKLARVVDIYAKRLQTQENLTAQITSAIDDTLAPRGMAVMLEAEHQCMTMRGVQKPGVSTITTQFTGVFHDDPAEQAKFMTMVRGGMR

SEQ ID NO: 14119 - protein, 229 aa, Roseibium sp.
  REGION 1..229: note = tr|E2CSH6|E2CSH6_9RHOB GTP cyclohydrolase 1; OS = Roseibium sp. TrichSKD4 OX=744980 GN=folE_2 PE=3 SV=1
MSVRASQPTYSEVLKIMNYAATVAAMADYRKEHGLRPSRADAEAAVRVLLEWSGDDPDREGLVDTPARVVRAYEEFFEGYKIDPAELLARTFEETNDYDDLIVLRNMRLESHCEHHVVPIIGKVHVAYLPANRVVGISKLARVVEVYAKRLQIQETLTSQIADTIQDVLQPRGVAVVVEAAHMCMTTRGIKKPGVSMLTRRLLGEFQTEPELRRDFLSSISGANGGAFS

SEQ ID NO: 14120 - protein, 211 aa, Roseibium sp.
  REGION 1..211: note = tr|E2CM47|E2CM47_9RHOB GTP cyclohydrolase 1; OS = Roseibium sp. TrichSKD4 OX=744980 GN=folE_1 PE=3 SV=1
MDAVLKSVGKTFERKSPDKLSRPSRAEAEAAVRTLLAWTGDDPEREGLLDTPKRVAKAFEQLYAGYFEDASEHLERTFDDVGGYQDIVLVRGIPFHSHCEHHMLPFIGEAHIAYYPAEGVVGLSKLARVVDIYAKRLQTQENLTSEIVSAIDDALAPRGLAVMLEAEHQCMTMRGVQKPGVSTITTQFTGVFQDDPAEQAKFMTLLRGGAR

SEQ ID NO: 14121 - protein, 366 aa, Roseicitreum antarcticum
  REGION 1..366: note = tr|A0A1H2SJB4|A0A1H2SJB4_9RHOB GTP cyclohydrolase FolE2 OS=Roseicitreum antarcticum OX=564137 GN=folE2 PE=3; SV = 1
MNIYTPEMDRQPSQDEAEAALAVLKRWAGKASDAEIAHLEPALARLLPGAGDAAYPVLNRDYPAAFTVDDAYKRGLPDLQNGPASLIVGARAQIQHVGISNFRLPIRFHTRDNGDLTLETSVTGTVSLEAEKKGINMSRIMRTFYGHAERTFSFGVIEAALDDYKADLDSFDARIQMRFSFPMKVESLRSGLSGYQYYDIALELVERAGVRRRFMHLDYVYSSTCPCSLELSEHARATRGQLATPHSQRSVARISVELLPGATLWFEDLIGLCRAAVPTETQVMVKREDEQAFAELNAANPIFVEDAARSFCARLQADARIGDFRVVASHQESLHSHDAVSVLSMGDTFAAESLDPKLFNTLFHVG

SEQ ID NO: 14122 - protein, 363 aa, Roseicyclus mahoneyensis
  REGION 1..363: note = tr|A0A316GPW8|A0A316GPW8_9RHOB GTP cyclohydrolase FolE2 OS=Roseicyclus mahoneyensis OX=164332 GN=folE2 PE=3; SV = 1
MNIHVTEMTEAPSRAEVETALARLRAWAATASTEEIAALDPTIGRLAAAPYPVFERHYPTEFRADAAYKDTLPDLQNGPSSLIRGANRQIQHVGISNFRLPIRYHTRDNGDLTLETSVTGTVSLEADKKGINMSRIMRSFYVHAEKTFSFEVIEAALDDYKSDLESFDARIQMRLSFPARVQSLRSGLSGYQYYDIALELVERAGVRQKIVHLDYVYSSTCPCSLELSEHARATRSQLATPHSQRSVARISVELKDGEGCLWFEDLIEMARAAVPTETQVMVKREDEQAFAELNAANPIFVEDAARLYAEQLHADTRVGDFRVVASHQESLHSHDAVSVLTEGNTFAQASLDPHLFSSLIHRG

SEQ ID NO: 14123 - protein, 225 aa, Roseiflexus castenholzii
  REGION 1..225: note = tr|A7NG47|A7NG47_ROSCS GTP cyclohydrolase 1; OS = Roseiflexus castenholzii (strain DSM 13941 / HLO8); OX = 383372 GN=folE PE=3 SV=1
MTYHNGNNGHHDHALADVDEREYETLIIQGRGKLEGMSYHSDAAIEDAVRVILKQIGENPEREGLQKTPSRVAKMYAELTAGYHIDPDALINEAVFSVGYDEMVLVKNIEFSSLCEHHMLPFMGRVHVAYIPNGRVVGLSKIPRIVEMFARRLQVQERMTVQIADFINQRLEPLGVAVVAEGVHMCAVMRGVKKAGATMVTSAMRGVFRDDPKTRSEFMAHIERG

SEQ ID NO: 14124 - protein, 226 aa, Roseiflexus sp.
  REGION 1..226: note = tr|A5UR68|A5UR68_ROSS1 GTP cyclohydrolase 1; OS = Roseiflexus sp. (strain RS-1) OX=357808 GN=folE PE=3; SV = 1
MAFRNSTNGYHTDHALADDDGQEYETLIVQGRGKLEGVSYQSDPAIEDAVRVILKQIGENPEREGLLKTPSRVAKMYAELTAGYHIDPDALINDAIFSVSYDEMVLVKNIEFASLCEHHMLPFMGRVHVAYIPNGKVVGLSKIPRIVEMFARRLQVQERMTVQIADFINQRLEPLGVAVVAEGVHMCAVMRGVKKAGATMVTSAMRGVFRDDPKTRSEFMAHIERA

SEQ ID NO: 14125 - protein, 276 aa, unidentified
  source 1..276: note = Roseimaritima ulvae
  REGION 1..276: note = tr|A0A5B9R9U2|A0A5B9R9U2_9PLAN GTP cyclohydrolase 1 type 2 OS=Roseimaritima ulvae OX=980254 GN=UC8_58570 PE=4; SV = 1
MSETIQHVCQTLAQLAPLPLAESWDNVGLLVGDRRQPVQRVMVCLTITPAVVAEAVERRADLIVSHHPLPFKPLARITRDTVAGGMLLDLIRGGVAVYSAHTAWDSAVDGINQQLADCLQLDDVAPLKLIEWDAEPSALADSPSVEVPHGAGRQGRAAEGTTLGHVAQAVAAKTSASGVRLVGSPDQLVRKVALACGSGGSFLDVAVQRGCNAMVTGEATFHTCLDAEARGVGLVLLGHYASERFAMEELAGRLAALHDRLTIWASENDRDPIANL

SEQ ID NO: 14126 - protein, 218 aa, unidentified
  source 1..218: note = Roseimaritima ulvae
  REGION 1..218: note = tr|A0A5B9QNE1|A0A5B9QNE1_9PLAN GTP cyclohydrolase 1; OS = Roseimaritima ulvae OX=980254 GN=folE PE=3 SV=1
MEASALSKSNNQDDNHRGASPYVDRNEPRPQGVDLKRIEAAVREILDAVGEDPDREGLLETPARVARMYAEMFAGLKHDAGRHLAKVFTEKYDEIVLVRDISFCSMCEHHLLPFTGTAHIAYLPSGKVVGLSKLARVVEEVARRPQVQERMTETVADLIEQRLEARGVAVVCEATHSCMTMRGVRKPGSLCITSSMRGVFRDDSSSRAEVLGLINRGA

SEQ ID NO: 14127 - protein, 263 aa, unidentified
  source 1..263: note = Roseimicrobium gellanilyticum
  REGION 1..263: note = tr|A0A366HVV9|A0A366HVV9_9BACT GTP cyclohydrolase FolE2 OS=Roseimicrobium gellanilyticum OX=748857 GN=folE2; PE = 3 SV=1
MPASKLHDTQNQSDARGIPIDRVGVKGLRFPLKIRDRDQAEQSTVAVVSLAVDLPHHFKGTHMSRFVEVLHSHGQVLTVADIAGMPRELLKKLHADKAHVEFRFPWFRMKKAPATKAEGLMDYGIIFEVNAEGEKVDFVVTVEVAVTTLCPCSKAISVHGAHNQRGVVTFSVRFTKPVWIEELVELVEASASSELYSLLKRPDEKVVTERAYENPVFVEDLVRNVALRAKQHPQITWFKVEAENFESIHNHNAYALIEQTVER

SEQ ID NO: 14128 - protein, 363 aa, Roseinatronobacter monicus
  REGION 1..363: note = tr|A0A543KAZ8|A0A543KAZ8_9RHOB GTP cyclohydrolase FolE2 OS=Roseinatronobacter monicus OX=393481 GN=folE2; PE = 3 SV=1
MNLHVPSLEETPSREEAEAALDVLRRFTDEAPEAERGALEAAVTSLLPAAGYPVLNRDYPAEFSVDSVYKEGLPDLQNGPASLIVGAKAAIQHVGISNFRLPIGYHTRDNGDLTLETSVTGTVSLEAEKKGINMSRIMRSFYAHAERTFSTDVICAALDDYKSDLDSFDARIMMRFSFPMKVESLRSGLSGYQYYDIALELVDLGGSRQVFMHLDYVYSSTCPCSLELSEHARATRGQLATPHSQRSVARVSVEVLSGRTLWFEDLVELCRNAVPTETQVMVKREDEQAFAELNAANPIFVEDAARSFCEQLDADERIGDFRVVASHQESLHSHDAVSVLTRGPSFEAASLDPRLFSTLFHVG

SEQ ID NO: 14129 - protein, 363 aa, Roseinatronobacter thiooxidans
  REGION 1..363: note = tr|A0A2W7QFG5|A0A2W7QFG5_9RHOB GTP cyclohydrolase FolE2 OS=Roseinatronobacter thiooxidans OX=121821 GN=folE2; PE = 3 SV=1
MNLHVSSLEKTPSREEAEAALDLLRRFTDTAPEAERVELETAVTSLLPAAGYPVLNRDYPSDFAVDGAYKDGLPDLQNGPASLIVGAKAAIQHVGISNFRLPIRYHTRDNGDLTLETSVTGTVSLEAEKKGINMSRIMRSFYAHAERTFSTDVITAALDDYKADLESFDARIMMRFSFPLKVQSLRSGLSGYQYYDIALELVDLGGSRQVFMHLDYVYSSTCPCSLELSEHARATRGQLATPHSQRSVARVSVEVLAGGTLWFEDLVELCRAAVPTETQVMVKREDEQAFAELNAANPIFVEDAARSFCAQLEGDARIGDFRVVASHQESLHSHDAVSVLTRGPSFEAASLDPRLFSTLFHVG

SEQ ID NO: 14130 - protein, 368 aa, Roseisalinus antarcticus
  REGION 1..368: note = tr|A0A1Y5TL43|A0A1Y5TL43_9RHOB GTP cyclohydrolase FolE2 OS=Roseisalinus antarcticus OX=254357 GN=folE2 PE=3; SV = 1
MNLHAPDFDREPTRSEAEAALAVLRRWAGEASADEVATLDPTVAALLPGHAGAEYPALTRAYPEAFEADAAYRATMPDLQNGPASLIRGCATQIQHVGISNFRLPIRFHTRDNGDLTLETSVTGTVSLEAEKKGINMSRIMRTFYKHANETFSFEVIERALDAYKSDLESFDARIQMRFSFPMQVQSLRSGLEGFQYYDIALELVERDGIRKKIIHLDFVYSSTCPCSLELSEHARQVRGQLATPHSQRSVARISVEVDGSAPGCLWFEDLIDMARAAVPTETQVMVKREDEQAFAELNAANPIFVEDAARLFCEQLKADPRVGDFRIVASHQESLHSHDAVSVLTEGPTFAAESLDPRLFMTLFHVG

SEQ ID NO: 14131 - protein, 201 aa, unidentified
  source 1..201: note = Roseitalea porphyridii
  REGION 1..201: note = tr|A0A4P6V1C2|A0A4P6V1C2_9RHIZ GTP cyclohydrolase 1; OS = Roseitalea porphyridii OX=1852022 GN=folE PE=3 SV=1
MDAIAPATANPADERPSREEAEAAVLTLLKWIGDDPAREGLRETPSRVVKAYEEMFGGYENDPADILGRTFEEVAGYDDIVLVRDIDFHSHCEHHMVPIIGKAHVAYLPHDRVLGLSKIVRVVDIFARRLQTQETMTAQIATAIDDALAPRGVAVMLEAEHMCMAMRGVRKNGSTTITTRFTGSFEDQAWQSRFTDLVRQR

SEQ ID NO: 14132 - protein, 230 aa, Roseivirga echinicomitans
  REGION 1..230: note = tr|A0A150X2S1|A0A150X2S1_9BACT GTP cyclohydrolase 1; OS = Roseivirga echinicomitans OX=296218 GN=folE PE=3 SV=1
MKNKNGKSSEDLLKQIEEMGDDHMMSSIETPMREGAFDLSDEEKIAIIQGHFEKIMHTLGLDLTDDSLSGTPKRVAKLYVKELFKGLKPENKPSLSTFQNKYEYSEMLVEKNITLYSNCEHHFLPIVGKAHVAYIPNGKVIGLSKINRIVDYYSRRPQVQERLAIQILDEMKRALNTEDVAVYIDAEHMCVSSRGVSDQSSSTVTVEYSGKFKEEETKREFLTYVNDKLK

SEQ ID NO: 14133 - protein, 228 aa, Roseivirga echinicomitans
  REGION 1..228: note = tr|A0A150XJJ1|A0A150XJJ1_9BACT GTP cyclohydrolase 1; OS = Roseivirga echinicomitans OX=296218 GN=folE PE=3 SV=1
MKQNGTLSSTPLNVYSSIEEIGDEHVGTSYETPMVPNAFDMDDDLKQELIEKKFKEIMEIMGLDLSDDSLSGTPKRVAKMYIKEIFSGLSPANKPKVTLFENKYQYNEMLVEKNITFHSNCEHHFVPIIGKAHVAYISSGKVIGLSKINRIVEYYAKRPQVQERLTVQIANELKTLLDTEDVAVIIDADHLCVQSRGVKDVNSSTVTAQFHGKFKEEATRSEFLKYIK

SEQ ID NO: 14134 - protein, 230 aa, Roseivirga ehrenbergii
  REGION 1..230: note = tr|A0A150X8L8|A0A150X8L8_9BACT GTP cyclohydrolase 1; OS = Roseivirga ehrenbergii OX=279360 GN=folE PE=3 SV=1
MKNKNGKSSEDLLKQIEEMGDDHVMSSIETPMREGAFDLSDEEKIAIIQGHFEKIMHTLGLDLTDDSLSGTPKRVAKLYVKELFKGLKPENKPSLSTFQNKYEYSEMLVEKNITLYSNCEHHFLPIVGKAHVAYIPNGNVIGLSKINRIVDYYSRRPQVQERLALQILDEMKRALNTEDVAVYIDAEHMCVSSRGVSDQSSSTVTVEYSGKFKEEETKREFLTYVNDKLK

SEQ ID NO: 14135 - protein, 231 aa, Roseivirga ehrenbergii
  REGION 1..231: note = tr|A0A150XPK9|A0A150XPK9_9BACT GTP cyclohydrolase 1; OS = Roseivirga ehrenbergii OX=279360 GN=folE PE=3 SV=1
MKQNGTLSSTPLNVYSSIEEIGDEHVGTSYETPMVPNAFDMDDDLKQELIEKKFKEIMEIMGLDLSDDSLSGTPKRVAKMYIKEIFSGLSPANKPKVTLFENKYQYNEMLVEKNITFYSNCEHHFVPIIGKAHVAYISSGKVIGLSKINRIVEYYAKRPQVQERLTVQIANELKTLLETEDVAVIIDADHLCVQSRGVKDVNSSTVTAQFHGKFKENSTKKELMSYINTKA

SEQ ID NO: 14136 - protein, 230 aa, unidentified; identical to SEQ ID NO: 14134
  source 1..230: note = Roseivirga seohaensis
  REGION 1..230: note = tr|A0A150XNX6|A0A150XNX6_9BACT GTP cyclohydrolase 1; OS = Roseivirga seohaensis OX=1914963 GN=folE PE=3 SV=1

SEQ ID NO: 14137 - protein, 231 aa, unidentified
  source 1..231: note = Roseivirga seohaensis
  REGION 1..231: note = tr|A0A0L8AM42|A0A0L8AM42_9BACT GTP cyclohydrolase 1; OS = Roseivirga seohaensis subsp. aquiponti OX=1566026; GN = folE PE=3 SV=1
MKQNGTLSSTPLNVLSRIEEIGDEHVGTSYETPMVPNAFDMDDDLKQELIEKKFKEIMEIMGLDLSDDSLSGTPKRVAKMYIKEIFSGLSPANKPKVTLFENKYQYNEMLVEKNITFYSNCEHHFVPIIGKAHVAYISSGKVIGLSKINRIVEYYAKRPQVQERLTVQIANELKTLLETEDVAVIIDADHLCVQSRGVKDVNSSTVTAQFHGKFQENSTKKELMSYINTKS

SEQ ID NO: 14138 - protein, 230 aa, Roseivirga sp.
  REGION 1..230: note = tr|A0A316KJT0|A0A316KJT0_9BACT GTP cyclohydrolase 1; OS = Roseivirga sp. XM-24bin3 OX=2133949 GN=folE PE=3 SV=1
MKQKETLLSTQLNGLTVEEIGDEHVGTSYDTPMKADAFDMDDELKMNLIEDKFRDIMEIMGLDLTDDSLSGTPKRVAKMYIKEIFSGLNPANKPKVALFENKYKYNEMLVEKDITFYSNCEHHFVPIIGKAHVAYISTGNVIGLSKINRIVEYYAKRPQVQERLTVQIANELKEVMGTEDVAVVIDAEHLCVSSRGVKDVNSSTVTAQFHGKFKEEATRREFLGYINTKK

SEQ ID NO: 14139 - protein, 230 aa, Roseivirga sp.
  REGION 1..230: note = tr|A0A316KKR6|A0A316KKR6_9BACT GTP cyclohydrolase 1; OS = Roseivirga sp. XM-24bin3 OX=2133949 GN=folE PE=3 SV=1
MEDKSTKVSDELLKEVDEIGDNHIMTSIATPMREDAFELSDEEKIEKIQGYFEKIMHTLGLDLTDDSLKGTPKRVAKLYIKDLFKGLDPANKPSMSTFENKYNYNQMLVEKNITVYSNCEHHFLPIVGRAHVAYIPNGNVIGLSKINRIVDYYARRPQVQERLALQVLNELKEALNTEDVAVYVDAEHMCISSRGVSDQHSSTVTVEYSGKFQEEATKKEFLTYINDKLK

SEQ ID NO: 14140 - protein, 230 aa, Roseivirga spongicola; identical to SEQ ID NO: 14138
  REGION 1..230: note = tr|A0A150X5T8|A0A150X5T8_9BACT GTP cyclohydrolase 1; OS = Roseivirga spongicola OX=333140 GN=folE PE=3 SV=1

SEQ ID NO: 14141 - protein, 230 aa, Roseivirga spongicola; identical to SEQ ID NO: 14139
  REGION 1..230: note = tr|A0A150WZL2|A0A150WZL2_9BACT GTP cyclohydrolase 1; OS = Roseivirga spongicola OX=333140 GN=folE PE=3 SV=1

SEQ ID NO: 14142 - protein, 367 aa, Roseivivax halodurans
  REGION 1..367: note = tr|X7EJ20|X7EJ20_9RHOB GTP cyclohydrolase FolE2; OS = Roseivivax halodurans JCM 10272 OX=1449350 GN=folE2; PE = 3 SV=1
MNVHTPDIDRKPSREEAEKALALLRQWAGKAHDSEIADLEPALAGLVPGADARPAYPPLTRSYDHDFRVDASYKATLPDLQNGPSSLIRGAKRAIQHVGISNFRLPVHYHTRDNGDVVLETSVTGSVSLEADKKGINMSRIIRSFYAHAEKTFSFETIEAALNDYKTDLESFDARINMRLRFPVAVESLRSGLSGYQYYDIALELVETDGVRRKIMHLDFVYSSTCPCSLELSEHARRERGVLATPHSQRSVARISVELTGDDCLWFEDLIELCRSAVPTETQVMVKREDEQAFAELNGANPIFVEDAARLFAEALQGDARIADFRVIASHQESLHSHDAVSVLTEGDLFAAESLDPKLFATLVHVG

SEQ ID NO: 14143 - protein, 364 aa, Roseivivax halotolerans
  REGION 1..364: note = tr|A0A1I5XUS8|A0A1I5XUS8_9RHOB GTP cyclohydrolase FolE2 OS=Roseivivax halotolerans OX=93684 GN=folE2 PE=3; SV = 1
MNVHTPELERKPSREAAREALALLRDWAGASDDDEIAELDPAIARLVSGADAYPDLAREYDAAFDVDAEYKDTLPDLQNGPSSLIRGARRAIQHVGISNFRLPVTFRTRDNGNVTLETSVTGSVSLDADKKGINMSRIMRSFYKHGEKTFSFEVIESALDDYKSDLESFDARINMRLRFPLRVESLRSGLEGFQYYDIALELVETAGQRRKIMHLDYVYSSTCPCSLELSEHARRERGVLATPHSQRSVARISVETTGDDCLWFEDLIELCRKAVPTETQVMVKREDEQAFAELNGANPIFVEDAARLFAEQLQKDARIGDFRVVASHQESLHSHDAVSVLTEGPLFEQESLDPKLFSTLFHVG

SEQ ID NO: 14144 - protein, 366 aa, Roseivivax isoporae
  REGION 1..366: note = tr|X7FG71|X7FG71_9RHOB GTP cyclohydrolase FolE2; OS = Roseivivax isoporae LMG 25204 OX=1449351 GN=folE2 PE=3; SV = 1
MNVHTPDIDRKPSREEAEEALALLRKWTGKAQDREIADLDPALMALLGEPAPAAYPDLARRYDAGFAPDAAYRATLPDLQNGPSSLIRGANRAIQHVGISNFRLPLRYRTRDNGDLVLETSVTGSVSLDADKKGINMSRIIRSFYRHAEETFSFGTIEAALDDYKSDLESFDARIHMRLRFPVAVESLRSGLTGYQYYDIALELVERDGVRRKVMHLDYVYSSTCPCSLELSEHARRERGVLATPHSQRSVARLSVELTEAGCLWFEDLIELCRGAVPTETQVMVKREDEQAFAELNAANPIFVEDAARLFAEALSGDARIGDYRVVASHQESLHSHDAVSVLTEGDLFAADSLDPRLFASLYHVG

SEQ ID NO: 14145 - protein, 367 aa, unidentified
  source 1..367: note = Roseivivax jejudonensis
  REGION 1..367: note = tr|A0A1X6ZGY4|A0A1X6ZGY4_9RHOB GTP cyclohydrolase FolE2 OS=Roseivivax jejudonensis OX=1529041 GN=folE2 PE=3; SV = 1
MNVHTPDIDRGPSREEAEAALETLRHWAGRAHDSEIADLDPALARLVPGVDGGAPYPALARHYDTGFEADADYKLTLPDLQNGPASLIRGARRAIQHVGISNFRLPVQFRTRDNGNLVLETSVTGSVSLDADKKGINMSRIMRSFYVHAEKTFSFETIEAALDDYKSDLESFDARIAMALRFPMAVESLRSGLTGYQYYDITLELVDRDGARRKIMHLDYVYSSTCPCSLELSEHARRERGVLATPHSQRSVARISVEVTGDDCLWFEDLVELCRRAVPTETQVMVKREDEQAFAELNAANPIFVEDAARLFAAELQDDARIGDFRVVASHQESLHSHDAVSVLTEGDLFAAESLDPKLFATLIHAG

SEQ ID NO: 14146 - protein, 364 aa, Roseivivax lentus
  REGION 1..364: note = tr|A0A1N7NGU0|A0A1N7NGU0_9RHOB GTP cyclohydrolase FolE2 OS=Roseivivax lentus OX=633194 GN=folE2 PE=3 SV=1
MNVYDPEFDRKPSREEAEAALAVLRQWADRAHEAEIEALDPAVQKLLPGADSYPILARDYDSGFDVDTAYKDTLPDLQNGPSSLIRGANRPIQHVGISNFRLPIAYHTRDNGDLHLETSVTGTVSLDADKKGINMSRIMRSFYKHAEKTFSFEVIEAALDDYKTDLESFDARINMRLRFPVKVDSLRSGLSGFQYYDIALELVELEGVRRKVMHLDYVYSSTCPCSLELSEHARRERGVLATPHSQRSVARISVELKGEDVLWFEDLIDLCRAAVPTETQVMVKREDEQAFAELNAANPIFVEDAARLFADQLQRDGRIGDYRVLASHQESLHSHDAVSVLTEGDLFAQESLDPQLFSTLFHVG

SEQ ID NO: 14147 - protein, 364 aa, unidentified
  source 1..364: note = Roseivivax marinus
  REGION 1..364: note = tr|W4HPM9|W4HPM9_9RHOB GTP cyclohydrolase FolE2; OS = Roseivivax marinus OX=1379903 GN=folE2 PE=3 SV=1
MNVHLPEFDREPSRDEAEAALRLLRHWADTAESAEIDALDPAIARLLSGKVDYPALERRYDHEFDADDAYRRTLPDLQNGPASLIRGAKRSIQHVGISNFRLPLRYRTRDNGALVLETSVTGSVSLDADKKGINMSRIIRSFYAHAEQTFSIGTVEAALDDYKQDLESFDARIALALRFPMRVESLRSGLEGWQYYDVAMELVERDGVRRKVMHLDYVYSSTCPCSLELSEHARQERNVLATPHSQRSVARISVELIGDDVLWIEDLVELCRKAVPTETQVMVKREDEQAFAELNGANPIFVEDAARLFAEALQSDARIGDFRVAASHQESLHSHDAVSVLSEGELFDAESFDPKFFETLIHRG

SEQ ID NO: 14148 - protein, 364 aa, unidentified
  source 1..364: note = Roseivivax pacificus
  REGION 1..364: note = tr|A0A2T6ATN2|A0A2T6ATN2_9RHOB GTP cyclohydrolase FolE2 OS=Roseivivax pacificus OX=1267769 GN=folE2 PE=3 SV=1
MNMHTPEIDRKPSREEAERALELLRRWAGKAKDTEIAELDPAVKRLVEGADDYPALRREYPDGFTVDADYKETLPDLQNGPAALIRGENRGIQHVGISNFRLPIAYHTRDNGDLVLETSVTGTVSLEADKKGINMSRIMRSFYAHSEKTFSFEVIEAALDDYKSDLESFDARINMRLSFPMKVDSLRSGLAGYQYYDIALELVEVDGVRRKIMHLDYVYSSTCPCSLELSEHARRERGQLATPHSQRSVARVSVELSGDDCLWFEDLVDMCRRAVPTETQVMVKREDEQAFAELNAANPIFVEDAARLFAEQLQADARVGDYRIVASHQESLHSHDAVSVLTEGDLFSADSLDPKLFSTLFHVG

SEQ ID NO: 14149 - protein, 367 aa, unidentified
  source 1..367: note = Roseivivax roseus
  REGION 1..367: note = tr|A0A1H9WFP1|A0A1H9WFP1_9RHOB GTP cyclohydrolase FolE2 OS=Roseivivax roseus OX=641238 GN=folE2 PE=3 SV=1
MNIHTPEIERQPEREDAAAALRTLRAWAATASDAEIETLDPSIARLLTDRPTGTYPDLSRQYPEGFTADSDYKATLPDLQNGPQSLIRGARRPIQHVGISNFRLPIHFRTRDNGDLTLETSVTGTVSLEAEKKGINMSRIMRTFYTYAEETFSFEVIEAALDSYKSDLESFDARIQMRFSFPMRVESLRSGLAGFQYYDIALELVEREGVRRKIVHLDYVYSSTCPCSLELSEHARRERGQLATPHSQRSVARISVALNPEAECLWFEDLVELCRAAVPTETQVMVKREDEQAFAELNAANPIFVEDAARLFAERLQAEPRIGDFRVIASHQESLHSHDAVSVLTEGDTFDQESLDPKAFATLFHVG

SEQ ID NO: 14150 - protein, 366 aa, unidentified
  source 1..366: note = Roseivivax roseus
  REGION 1..366: note = tr|A0A1H9W262|A0A1H9W262_9RHOB GTP cyclohydrolase FolE2 OS=Roseivivax roseus OX=641238 GN=folE2 PE=3 SV=1
MPISPANVRAWELIKAEQRSIPEKIRKAADTLTNRAVASERTQLERQAKTAEVAYPLFKRTYETDFEADAAYRDTLPDLQNGPESLIKGARRSIQHVGISNFRLPIRFHSRNAEDLTLETSVTGTVSLEAEKKGINMSRIMRSFYRFAESLFSFEVAEGVIDAYKADLGSFDARLQMRFSYPMKVSSLRSGLEGYQYYDIALEVVERNGHRQKIVHLDYVYSSTCPCSLELSEHARRTRMQLATPHSQRSVARISVELADEAGFWFEDLIELCRQAVQTETQVMVKREDEQAFAELNAANPIFVEDAVRLFGEALAGDDRIADFRVIASHQESLHSHDAVSVLTEGETFAQASFDPRLFSTLFHVG

SEQ ID NO: 14151 - protein, 366 aa, unidentified
  source 1..366: note = Roseivivax sediminis
  REGION 1..366: note = tr|A0A1I1TDL2|A0A1I1TDL2_9RHOB GTP cyclohydrolase FolE2 OS=Roseivivax sediminis OX=936889 GN=folE2 PE=3 SV=1
MNVHTPEIDRKPSRKEAERALATLRHWAGQSHEAEIAALDPAVAALAPDAEKVSYPPLARHYDAGFEADADYRDTLPDLQNGPSSLIRGARRAIQHVGISNFRLPIRFRSRDNGALVLETSVTGSVSLDADKKGINMSRIIRSFYAHAEKTFSFETIEAALDDYKTDLESFDARINMGLRFPVAVESLRSGLTGYQYYDISLELVETAGVRRKIMHLDYVYSSTCPCSLELSEHARQARGVLATPHSQRSVARVSVELVGSRCLWFEDLIELCRRAVPTETQVMVKREDEQAFAELNAANPIFVEDAARLFAEELQAEERIGDFRVVASHQESLHSHDAVSVLTEGTLFAADSLDPKLFSTLFHVG

SEQ ID NO: 14152 - protein, 221 aa, unidentified; identical to SEQ ID NO: 5172
  source 1..221: note = Rosenbergiella nectarea
  REGION 1..221: note = tr|A0A1H9M3N8|A0A1H9M3N8_9ENTR GTP cyclohydrolase 1; OS = Rosenbergiella nectarea OX=988801 GN=folE PE=3 SV=1

SEQ ID NO: 14153 - protein, 367 aa, Roseobacter denitrificans
  REGION 1..367: note = sp|Q168P4|GCH4_ROSDO GTP cyclohydrolase FolE2; OS = Roseobacter denitrificans (strain ATCC 33942 / OCh 114); OX = 375451 GN=folE2 PE=3 SV=2
MNIHTPGLELTPDRDEAQAALDVLRQWAKQATPAEISELDPSVARLVPGMDGVEYPALSREYPSDFSLDDGYKETLPDLQNGPSSLIRGTKQQIQHVGISNFRLPIRFHTRSGGDITLETSVTGSVSLEADKKGINMSRIMRSFYKHAEETFSFEVIEAALDAYINDLESFDARIQMRFSFPMKVDSLRSGLSGYQYYDIALELVDQGGVRKKIMHLDYVYSSTCPCSLELSEHARATRGQLATPHSQRSVARISVEVENDGQCLWFEDLIEACRRAVPTETQVMVKREDEQAFAELNAANPIFVEDAARLFCEQLHSDTRIGDFRVIASHQESLHSHDAVSVLMEGETFKSESLDPKLFNTLFHVG

SEQ ID NO: 14154 - protein, 367 aa, Roseobacter litoralis
  REGION 1..367: note = tr|F7ZB52|F7ZB52_ROSLO GTP cyclohydrolase FolE2; OS = Roseobacter litoralis (strain ATCC 49566 / DSM 6996 / JCM 21268 / NBRC 15278 / OCh 149) OX=391595 GN=folE2 PE=3; SV = 1
MNIHTPGLQVTPDRDEAQAALDVLRQWAKQATPTEISELDPSVARLIPGMDGVEYPALSREYPGDFAIDDSYKETLPDLQNGPSSLIRGTKQQIQHVGISNFRLPIRFHTRTGGDITLETSVTGSVSLEADKKGINMSRIMRSFYKHAEETFSFEVIEAALDAYINDLESFDARIQMRFSFPMKVDSLRSGLSGYQYYDIALELVDQGGVRKKIMHLDYVYSSTCPCSLELSEHARATRGQLATPHSQRSVARVSVEVENDGQCLWFEDLIETCRRAVPTETQVMVKREDEQAFAELNAANPIFVEDAARLFCEQLHADTRIGDFRVIASHQESLHSHDAVSILMEGDTFKSESLDPKLFNTLFHVG

SEQ ID NO: 14155 - protein, 367 aa, Roseobacter sp.
  REGION 1..367: note = tr|A3X4I2|A3X4I2_9RHOB GTP cyclohydrolase FolE2; OS = Roseobacter sp. MED193 OX=314262 GN=folE2 PE=3 SV=1
MNIQTRDLSEAPDRHAAETALALLRQWAEAADPSEVAQLDPAIARLLPGRELGNYPELSRDYPEEFVSDAAYRATLPDLQNGPASLIRGAKEQIQHVGISNFRLPIRFHSRDGHDQTLETSITGSVSLEADKKGINMSRIMRSFYKHAEKTFSFEVMESALSDYLTDLESMDARLQMRFSFPVRIESLRSGLSGYQYYDIALELVQSEGQRHKVIHLDYVYSSTCPCSLELSEHARKARGQLATPHSQRSVARLSVSVDPDGECLWFEDLIEHCRRAVPTETQVMVKREDEQAFAELNAANPIFVEDAARLFCEALQNDARIKDFRVVASHQESLHSHDAISILTQGPLFANKSLDPRLFSSLIHQG

SEQ ID NO: 14156 - protein, 367 aa, Roseobacter sp.
  REGION 1..367: note = tr|A4EY36|A4EY36_9RHOB GTP cyclohydrolase FolE2; OS = Roseobacter sp. SK209-2-6 OX=388739 GN=folE2 PE=3 SV=1
MNVHSGEIDETPDRAAAEAALELLRSWAGTATETEIAQLEPAVARLLPGREVGNYPDLSRNYPEDFKSDEAYRETLPDLQNGPSSLIRGAKEQIQHVGISNFRLPIRFHTRDGGDLMLETSITGSVSLEPGKKGINMSRIMRTFYKHAEKTFSFEVMEAALDDYLSDLGSLDARIQMRFSFPAKVQSLRSGLSGYQYYDFALELVDHDGVREKIMHLDYVYSSTCPCSLELSEHARQSRGQLATPHSQRSVARISVQADPAGECLWFEDLIDHCRAAVPTETQVMVKREDEQAFAELNAANPIFVEDAARLFCEVLQNDTRIGDFRVVASHQESLHSHDAISVLTKGQLFSSTSLDPRLFSTLIHQG

SEQ ID NO: 14157 - protein, 212 aa, Roseococcus sp.
  REGION 1..212: note = tr|A0A4R0YF35|A0A4R0YF35_9PROT GTP cyclohydrolase 1; OS = Roseococcus sp. SYP-B2431 OX=2496640 GN=folE PE=3 SV=1
MNIQAPPERKAEEGQSPVKPTREEAEAAVRVLLRWAGDDPDREGLLDTPARVVRSYEEFFAGYDTDPVELLARSFEETDGYDEMVVLRDIRLESYCEHHMVPIIGKAHVAYLPDGKVVGISKLARVIDAYSKRLQIQEKLTAQIANTIESVLHPKGVAVVIEAGHQCMTTRGVHKTGVSMVTSRMLGAFRHNDATRREFLSMITGPRGSGEA

SEQ ID NO: 14158 - protein, 238 aa, unidentified
  source 1..238: note = Roseofilum reptotaenium
  REGION 1..238: note = tr|A0A1L9QNX6|A0A1L9QNX6_9CYAN GTP cyclohydrolase 1; OS = Roseofilum reptotaenium AO1-A OX=1925591 GN=folE PE=3; SV = 1
MTIASSNGSPSLSYSSDKDAKEHQPLSSRPDRSTTHGAESKISHPSSDVSNEALMNSVQTMLAELGEDPEREGLLKTPKRVAEAMRFLTNGYHQSLEDLVNGAIFDEGHDEMVLVRDINLFSLCEHHMLPFMGKAHVAYIPNQKVVGLSKLARIVEMYSRRLQVQERLTRQVAEAIQEILDPQGVAVVVEANHMCMVMRGVQKPGSWTVTSSMVGVFKEDQKVREEFLNLIRHQPSFF

SEQ ID NO: 14159 - protein, 216 aa, unidentified
  source 1..216: note = Roseofilum reptotaenium
  REGION 1..216: note = tr|A0A1L9QJP6|A0A1L9QJP6_9CYAN GTP cyclohydrolase 1; OS = Roseofilum reptotaenium AO1-A OX=1925591 GN=folE PE=3; SV = 1
MTAQIPAHNLSVDQTIAAISAQPQPRVSQAEMEQAVRTLLLGLGEDPDREGLRDTPKRVVKALQFLTSGYHQSLDELLNGAVFHEDTDEMVLVRDIDLFSSCEHHILPILGRAHIAYIPNGKVIGLSKIARICEMYARRLQVQERLTQQIANALQGLLKPQGVAVVVESTHICMVMRGVQKPGSWTVTSSMQGIFAEDAKARQEFMSLIRHNPSFH

SEQ ID NO: 14160 - protein, 216 aa, Roseomonas aestuarii
  REGION 1..216: note = tr|A0A2U1V580|A0A2U1V580_9PROT GTP cyclohydrolase 1; OS = Roseomonas aestuarii OX=568898 GN=folE PE=3 SV=1
MTFPPARPLADPASTDRDAAPRRPSRAEAEEAVRTLLLWAGDDPGREGLADTPARVARAYEEFFSGYKEDPVALLARSFEETDGYDEMVVLRDIRLESHCEHHMVPIIGRAHVAYLPAGRVVGISKLARVVEAYARRLQIQEKLTAQIANSIDSVLRPRGVAVIIEASHQCMTTRGVHKPGVAMITSRMLGEFRTDPAMRREFLALTQNGRPVPEA

SEQ ID NO: 14161 - protein, 219 aa, Roseomonas cervicalis
  REGION 1..219: note = tr|D5RT60|D5RT60_9PROT GTP cyclohydrolase 1; OS = Roseomonas cervicalis ATCC 49957 OX=525371 GN=folE PE=3; SV = 1
MMHRNAALNLPLPPAAKRALPEITAPRPSREQAEEAVRTLLLWAGDDPGREGLRDTPARVARAYEEFFSGYQEDPVALLARSFEETEGYDEMVVLRDIRVESHCEHHMVPIIGRAHVAYLPEGRVVGISKLARVVEAYARRLQIQEKLTAQVANSIQEVLRPRGVAVVIEASHQCMTTRGVHKPGVSMITSRMLGAFREDAGLRREFLAMTRGAAAPEA

SEQ ID NO: 14162 - protein, 213 aa, unidentified
  source 1..213: note = Roseomonas deserti
  REGION 1..213: note = tr|A0A1V2GXG0|A0A1V2GXG0_9PROT GTP cyclohydrolase 1; OS = Roseomonas deserti OX=1817963 GN=folE PE=3 SV=1
MNLPLPTAAKLAKPDLTAERPSRAEAEAAIRTLLLWAGDDPEREGLLDTPARVARAYEEFFSGYKEDPMALLARSFEETDGYDEMVVLRDIRLESHCEHHMVPIIGRVHVAYLPKDRVVGISKLARVVEAYARRLQIQEKLTAQIANCIQETLQPRGVAVVIEAAHQCMTTRGVHKPGVTMMTSRMLGEFREDAGLRREFLALVKNGAPAPEA

SEQ ID NO: 14163 - protein, 209 aa, Roseomonas gilardii
  REGION 1..209: note = tr|A0A1L7ACL4|A0A1L7ACL4_9PROT GTP cyclohydrolase 1; OS = Roseomonas gilardii OX=257708 GN=folE PE=3 SV=1
MISTPFPPYQEPDEPLPTQQDAENAIRTLLRWAGDNPGREGLLDTPKRVAKAYREWFAGYEEDPVELLQRSFEEVEGYDEMVVLRDIRLESTCEHHMAPIIGRAHVGYLPRGRVVGISKLARVVDAYGKRLQIQEKLTAQIANSIQDVLNPYGVAVVVEAAHQCMTTRGAHKPGVTMVTSRMLGAFRDQRSTRQEFLAMIGAPRATPII

SEQ ID NO: 14164 - protein, 209 aa, Roseomonas gilardii
  REGION 1..209: note = tr|A0A379NE37|A0A379NE37_9PROT GTP cyclohydrolase 1; OS = Roseomonas gilardii subsp. rosea OX=243956 GN=folE PE=3; SV = 1
MTSTPFPPYQEPDEVRPTQRDAEEAIRTLLRWAGDNPGREGLLDTPKRVAKAYREWFAGYEEDPVELLQRSFEEVEGYDEMVILRDIRLESTCEHHMAPIIGRAHVGYLPRGRVVGISKLARVVDAYGKRLQIQEKLTAQIANSIQDVLNPYGVAVVVEAAHQCMTTRGAHKPGVTMVTSRMLGAFRDQRSTRQEFLAMIGAPRATPII

SEQ ID NO: 14165 - protein, 209 aa, Roseomonas mucosa
  REGION 1..209: note = tr|A0A379N159|A0A379N159_9PROT GTP cyclohydrolase 1; OS = Roseomonas mucosa OX=207340 GN=folE PE=3 SV=1
MTSTPFPPYQEPDEPRPTQQDAEDAIRTLLRWAGDNPGREGLLDTPKRVAKAYREWFAGYEEDPVELLQRSFEEVEGYDEMVILRDIRLESTCEHHMAPIIGRAHVGYLPRGRVIGISKLARVVDAYGKRLQIQEKLTAQIANSIQEVLNPYGVAVVVEAAHQCMTTRGAHKPGVTMVTSRMLGAFRDQRSTRQEFLAMIGAPRATPII

SEQ ID NO: 14166 - protein, 209 aa, Roseomonas mucosa
  REGION 1..209: note = tr|A0A1S8D9N3|A0A1S8D9N3_9PROT GTP cyclohydrolase 1; OS = Roseomonas mucosa OX=207340 GN=folE PE=3 SV=1
MTSTPFPPYQEPGEPRPTQQDAEDAIRTLLRWAGDNPGREGLLDTPKRVAKAYREWFAGYEEDPVELLQRSFEEVEGYDEMVILRDIRLESTCEHHMAPIIGRAHVGYLPRGRVIGISKLARVVDAYGKRLQIQEKLTAQIANSIQEVLNPYGVAVVVEAAHQCMTTRGAHKPGVTMVTSRMLGAFRDQRSTRQEFLAMIGAPRATPII

SEQ ID NO: 14167 - protein, 217 aa, unidentified
  source 1..217: note = Roseomonas nepalensis
  REGION 1..217: note = tr|A0A502G6K0|A0A502G6K0_9PROT GTP cyclohydrolase 1; OS = Roseomonas nepalensis OX=1854500 GN=folE PE=3 SV=1
MTEQNPPSPDRTSARSRLRAELVRPSQAEAEAAVRTLLLWAGDDPDREGLVDTPARVARSYRELFAGYDVDPVQLLQRSFEEVAGYDEMVVLRDIRLESHCEHHMVPIIGRAHIGYLPRGRVVGISKLARVVDAFAKRLQIQEKLTAQIANAIQDVLDPVGVAVVLEGSHQCMTTRGVHKTGVAMVTSTMLGAFREDHATRREFLSIINGRANTFEG

SEQ ID NO: 14168 - protein, 214 aa, unidentified
  source 1..214: note = Roseomonas oryzae
  REGION 1..214: note = tr|A0A5B2TNR2|A0A5B2TNR2_9PROT GTP cyclohydrolase 1; OS = Roseomonas oryzae OX=1608942 GN=folE PE=3 SV=1
MTPARKPTQPTATSPVEAPRRPSRAEAEAAVRTLLLWAGDDPEREGLLDTPARVARAYEEFFSGYAEDPVELLARSFAETDGYDEMVVLRDIRLESHCEHHMVPIIGRAHVAYLPAGRVVGISKLARVVEAYSRRLQIQEKLTAQIANSIQEVLQPRGVAVVIEAGHQCMTTRGVHKPGVAMITSRMLGEFRSDASLRREFLAMVNSGRPVPEA

SEQ ID NO: 14169 - protein, 220 aa, unidentified
  source 1..220: note = Roseomonas rosea
  REGION 1..220: note = tr|A0A1M6B1M7|A0A1M6B1M7_9PROT GTP cyclohydrolase 1; OS = Roseomonas rosea OX=198092 GN=folE PE=3 SV=1
MTEPHPDTQAAAEAGAACPADLAGHKRPTQAEAEAAVRTLLLWAGDDPDREGLVDTPKRVAKSYRELFVGYGTDPVQLLQRSFEEVAGYDEMVVLRDIRLESHCEHHMVPIIGRAHVGYLPRGRVVGISKLARVVDAFAKRLQIQEKLTAQIANAINDVLDPVGVAVVLEAAHQCMTTRGVHKHGVTMVTSTMLGAFRDDHATRREFLSIINGRSGTFEG

SEQ ID NO: 14170 - protein, 209 aa, Roseomonas sp.; identical to SEQ ID NO: 14166
  REGION 1..209: note = tr|A0A2D2H4V9|A0A2D2H4V9_9PROT GTP cyclohydrolase 1; OS = Roseomonas sp. FDAARGOS_362 OX=2018065 GN=folE PE=3 SV=1

SEQ ID NO: 14171 - protein, 221 aa, Roseomonas sp.
  REGION 1..221: note = tr|A0A317FLQ2|A0A317FLQ2_9PROT GTP cyclohydrolase 1; OS = Roseomonas sp. CQN31 OX=2184016 GN=folE PE=3 SV=1
MTPKDSHAVNIQTPPRHLAKANPAAEPPPTREDAEAAIRTLLRWAGDDPSREGLQDTPARVARAYREWFCGYEEDPVELLARSFEETDGYDEMVLLRDIRLESTCEHHMAPILGKVHVAYLPNGRVVGISKLARVVEAYAKRLQIQEKMTAQIANTINDVLKPKGVAVVVEAAHQCMTTRGVHKPGVTMVTSRMLGAFRDDASTRREFLAMVAAPRPGTEG

SEQ ID NO: 14172 - protein, 212 aa, Roseomonas stagni
  REGION 1..212: note = tr|A0A1I4DX41|A0A1I4DX41_9PROT GTP cyclohydrolase 1; OS = Roseomonas stagni DSM 19981 OX=1123062 GN=folE PE=3 SV=1
MNIQTPASLADPQASTIQRPSRAEAEAAVRTLLLWAGDDPNREGLVDTPARVARAYEEFFGGYEVDPVELLARSFEETDGYDEMVVLRDIRLESHCEHHLVPIIGRAHIAYIPDGRVVGISKLARVLEAYAKRLQIQEKLTAQVANTIETVLKPKGVAVVIEAQHQCMTTRGIHKPGVSMVTSRMLGAFRDDASTRREFLAMIGSPRLGAEG

SEQ ID NO: 14173 - protein, 224 aa, Roseospirillum parvum
  REGION 1..224: note = tr|A0A1G7ZFT4|A0A1G7ZFT4_9RHIZ GTP cyclohydrolase 1; OS = Roseospirillum parvum OX=83401 GN=folE PE=3 SV=1
MFDPARPARLDPAHIAPARDYRDPAAAQPATITGEPRPSRAEAEAAVRTLLRWAGDDPDREGLVGTPDRVVRAYEEFFAGYQEDPADILRRTFEETDGYDEMVLLKDIRLESHCEHHMVPIIGVAHIAYLPDHRVVGISKLARIVEVFAKRLQIQEKMTAQIANTINEVLEPKGVAVVIEAAHQCMTTRGVKKPGVNMVTSRMLGAFRDDPTTRKEFLHMIGPR

SEQ ID NO: 14174 - protein, 366 aa, Roseovarius aestuarii
  REGION 1..366: note = tr|A0A1X7BVV9|A0A1X7BVV9_9RHOB GTP cyclohydrolase FolE2 OS=Roseovarius aestuarii OX=475083 GN=folE2 PE=3 SV=1
MNMQRPDVDTFPQRDDANKALAVLRAWARSATPEEVADLDPAIARLLPESEVSNYPALARAFPEDFAVDEAYRASLPDLQNGPSSLIRGAKQHLQHVGISNFRLPIRFHARDDDDLRLETSVTGTVSLEAGKKGINMSRIMRSFYKHAQKTFSFEVIEAALKDYISDLDSFDARIQMRFSYPMKIKSLRSDLEGFQYYDIALELVEKNGQHRKFMHLDYVYSSTCPCSLELSEHARQTRGQLATPHSQRSVARLSVEVLGHDCLWFEDLIDMARAAVPTETQVMVKREDEQAFAELNAANPIFVEDAARLFCQRFLADERIGDFRIVASHQESLHSHDAVSVLTEGPTFAADSLDPKLFNTLFHAG

SEQ ID NO: 14175 - protein, 366 aa, unidentified
  source 1..366: note = Roseovarius albus
  REGION 1..366: note = tr|A0A1X6YJU7|A0A1X6YJU7_9RHOB GTP cyclohydrolase FolE2 OS=Roseovarius albus OX=1247867 GN=folE2 PE=4 SV=1
MNIHASELEKQREREAAEAALALLREWAENASPEEVADLDPTVARLLPDAPLPNYPQMHREYPEDFVPDDAYRALMPDLQNGPSSLIKGAKQHLQHVGISNFHLPIRFHTRDAGDLTLETSVTGTVSLEASKKGINMSRIMRSFYKHAQKTFSFDVISDALDDYIADLGSVDARLMMKFRYPAEVKSLRSGLVGYQYYDIALELVDAGGVRRKFMHLDYVYSSTCPCSLELSEHARETRGQLATPHSQRSVARISLEYSGEDFLWFEDVIDMAREMVPTETQVMVKREDEQAFAELNAANPIFVEDAARLFCEPLLKDKRIGDFRIVASHQESLHSHDAVSILTEGPTFASDSIDPKLFSTLFHVG

SEQ ID NO: 14176 - protein, 366 aa, unidentified
  source 1..366: note = Roseovarius atlanticus
  REGION 1..366: note = tr|A0A0T5NU36|A0A0T5NU36_9RHOB GTP cyclohydrolase FolE2 OS=Roseovarius atlanticus OX=1641875 GN=folE2 PE=3; SV = 1
MNVHPSDMKKVADRGDAKEALDILRAWAETATPEEIADLDPAISRLLPQGEVSNYPALRRDYPEEFRPDAAYRASMPDLQNGPSSLIKGARQQLQHVGISNFRLPINFHTRENGDLTLETSVTGSVSLEAEKKGINMSRIMRSFYKHAERTFSFEVIEAALDDYISDLDSIDARIQMRFSFPMKITSLRSGLEGYQYYDIAMELVEHDGVRRKFMHLDYVYSSTCPCSLELSEHARQARGQLATPHSQRSVARISVEVVGEACLWFEDLIELARTAVATETQVMVKREDEQAFAELNAANPIFVEDAARLFSEQLLNDARIGDFRVIASHQESLHSHDAVSITTEGETFASESLDPKLFTTLFHVG

SEQ ID NO: 14177 - protein, 366 aa, unidentified
  source 1..366: note = Roseovarius azorensis
  REGION 1..366: note = tr|A0A1H7MB27|A0A1H7MB27_9RHOB GTP cyclohydrolase FolE2 OS=Roseovarius azorensis OX=1287727 GN=folE2 PE=3; SV = 1
MNLHTSEMKPKPDRDDAREALALLRAWAGSASPEEVADLDPAIARLLTSGEVSNYPLLRRDYPEDFVVDARYRASLPDLQNGPASLIRGTRQQLQHVGISNFRLPIRFHTRDNGDLTLETSVTGTVSLEAGRKGINMSRIMRSFYKHAEKTFSLEVMEAALADYITDLDSVDARLQMRISYPAKVRSLRSGLEGFQYYDIAMELVETGGAKRKFMHLDYVYSSTCPCSLELSEHARAARGQLATPHSQRSVARISVEVLEGDCLWFEDLIDLARRAVPTETQVMVKREDEQAFAELNAANPVFVEDAARLFCEQLLADPRVGDFRVIASHQESLHSHDAVSVLTEGDTFAAQSLDPKLFQTLLHGR

SEQ ID NO: 14178 - protein, 366 aa, unidentified
  source 1..366: note = Roseovarius gaetbuli
  REGION 1..366: note = tr|A0A1X6Z696|A0A1X6Z696_9RHOB GTP cyclohydrolase FolE2 OS=Roseovarius gaetbuli OX=1356575 GN=folE2 PE=3 SV=1
MNVHPPKMNSAPDRDDAKQALALLRAWAHTATPEEVADLEPSIARLLPTGEMSNYPALTRHYPEDFTVDAAYRTTLPDLQNGPSSLIRGSKQHLQHVGISNFRLPIGFHTRDNGDLTLETAVTGTVSLEADRKGINMSRIMRSFYKHAEKTFSFEVMEAALNDYITDLDSLDARLQMRLSYPARVRSLRSGLDGFQYYDIALELVETGGARRKFMHLDYVYSSTCPCSLELSEHARSARGQLATPHSQRSVARISVEVMPGDCLWFEDLIELARRAVPTETQVMVKREDEQAFAELNAANPIFVEDAARLFCEQLLAEPRIGDFRVVASHQESLHSHDAVSVLTEGEAFASDSIDPKLFHTLIHGR

SEQ ID NO: 14179 - protein, 366 aa, Roseovarius halotolerans
  REGION 1..366: note = tr|A0A1X6ZEH9|A0A1X6ZEH9_9RHOB GTP cyclohydrolase FolE2 OS=Roseovarius halotolerans OX=505353 GN=folE2 PE=3; SV = 1
MNIHTREMSDMPDRDEAKAALERLRAWAGQATPEEVADLDPAISRLLPGRDRVNYPDLSRTYPESFEVDTAYRNSMPDLQNGPSSLIRGAKQHLQHVGISNFRLPIRFHTRDNGDLTLQTSVTGTVSLEAGKKGINMSRIMRSFYRHAEKTFSYEVMEAALDDYISDLDTIDARLQMRFSYPVKLSSLRSGLEGYQYYDIAMELAESGGVRRKFMHFDYVYSSTCPCSLELSEHARQTRGQLATPHSQRSVARISVEIAGDAMLWFEDLIEIARKAVPTETQVMVKREDEQAFAELNAANPIFVEDAARLFCEQLLKDERIGDFRIVASHQESLHSHDAVSLLTEGDTFASDSIDPRLFSTLFHVG

SEQ ID NO: 14180 - protein, 367 aa, Roseovarius indicus
  REGION 1..367: note = tr|A0A0T5P8M4|A0A0T5P8M4_9RHOB GTP cyclohydrolase FolE2 OS=Roseovarius indicus OX=540747 GN=folE2 PE=3 SV=1
MNIQTKLAQALDRDDAEQALSVLRAWAASASPEEVADLDPAIARLLPQGEVSNYPALSRTYDEDFEPDAAYRKSMPDLQNGPASLIRGAKQHLEHVGISNFRLPISFHTRDNGDLTLETSVTGTVSLEPGKKGINMSRIMRSFYKHAEKTFSFEVIEAALDDYMSDLDSLDARIQMRFSYPMKIKSLRSGLEGFQYYDIALELVETAGVRRKFMHLDYVYSSTCPCSLELSEHARQARGQLATPHSQRSVARISVEINCDTGGCLWFEDLIEMARAGVPTETQVMVKREDEQAFAELNAANPIFVEDAARLFCEQLQQDERIGDFRIMASHQESLHSHDAVSILTEGDTFAAQSIDPKIFKTLFHVG

SEQ ID NO: 14181 - protein, 366 aa, unidentified
  source 1..366: note = Roseovarius litoreus
  REGION 1..366: note = tr|A0A1M7FF68|A0A1M7FF68_9RHOB GTP cyclohydrolase FolE2 OS=Roseovarius litoreus OX=1155722 GN=folE2 PE=3 SV=1
MNIHTRELSDMPDRDEAKAALERLRSWAAQATPEEVADLDPAIARLLPGRSLSNYPDLSRDYPDEFKVSDAYKASLPDLQNGPSSLIRGARQQLQHVGISNFRLPIQFHTRDNGDLTLETSVTGTVSLEAGKKGINMSRIMRSFYRHAEKTFSFEVMEAALDDYITDLDTIDARLQMRFSYPAKVTSLRSGLQGYQYYDIAMELVEQDGVRRKFMHLDYIYSSTCPCSLELSEHARQTRGQLATPHSQRSVARLSIEIEGPQILWFEDLIDMARAAVPTETQVMVKREDEQAFAELNAANPIFVEDAARLFCEQLLKDPRIGDFRVVASHQESLHSHDAVSVLTEGETFASDSIDPRMFSSLFHVG

SEQ ID NO: 14182 - protein, 366 aa, unidentified
  source 1..366: note = Roseovarius lutimaris
  REGION 1..366: note = tr|A0A1I5DPQ7|A0A1I5DPQ7_9RHOB GTP cyclohydrolase FolE2 OS=Roseovarius lutimaris OX=1005928 GN=folE2 PE=3; SV = 1
MNVHPSEMNGTPDRDEAKQALAVLRVWAQTATPEEVADLDPSIARLLPTGQVSNYPVLRRDYPTDFSVDAAYRASLPDLQNGPSSLIRGTKQHLQHVGISNFRLPIGFHTRDNGDLTLETAVTGSVSLEAERKGINMSRIMRSFYKHAEKTFSFEVMEAALNDYITDLDSVDARLQMRLSYPARVRSLRSGLEGFQYYDIALELVETGGLRRKFMHLDYVYSSTCPCSLELSEHARSARGQLATPHSQRSVARLSVEVMAGDCLWFEDLIELARRAVPTETQVMVKREDEQAFAELNAANPIFVEDAARLFCEQLLADPRIGDFRVIASHQESLHSHDAVSVLTEGDTFASDSLDPKLFHTLVHGR

SEQ ID NO: 14183 - protein, 366 aa, unidentified
  source 1..366: note = Roseovarius marisflavi
  REGION 1..366: note = tr|A0A1M6YNY9|A0A1M6YNY9_9RHOB GTP cyclohydrolase FolE2 OS=Roseovarius marisflavi OX=1054996 GN=folE2 PE=3; SV = 1
MNVHPPKMNSAPDRDDAKQALALLRAWAQTATPEEVADLEPSIARLLPTGRMSNYPALTRHYPEDFTVDGAYRATLPDLQNGPSSLIRGSKQHLQHVGISNFRLPIGFHTRDNGDLTLETAVTGTVSLEADRKGINMSRIMRSFYKHAEKTFSFEVMEAALNDYITDLDSLDARLQMRLSYPARVRSLRSGLDGFQYYDIALELVETGGARRKFMHLDYVYSSTCPCSLELSEHARSARGQLATPHSQRSVARLSVEVMPGDCLWFEDLIELARRAVPTETQVMVKREDEQAFAELNAANPIFVEDAARLFCEQLLGDPRIGDFRVIASHQESLHSHDAVSVLTEGETFASDSIDPKLFHTLIHGR

SEQ ID NO: 14184 - protein, 366 aa, Roseovarius mucosus
  REGION 1..366: note = tr|A0A1V0RTM9|A0A1V0RTM9_9RHOB GTP cyclohydrolase FolE2 OS=Roseovarius mucosus OX=215743 GN=folE2 PE=3 SV=1
MNVHPSEMKPAPDRDEAKEALALLRSWARAASPEEVADLDPAIARLLPSGEVANYPLLAREYPESFATSAAYLASLPDLQNGPASLIRGTRQQLQHVGISNFRLPIRYHTRENGDLTLETSVTGTVSLDAGKKGINMSRIMRSFYKHAEKTFSADVMEAALSDYITDLDSVDARLQMRLSYPARVRSLRSGLEGYQYYDIAMELVKNAGVTRKFMHLDYVYSSTCPCSLELSEHARSARGQLATPHSQRSVARISVELVEDDCLWFEDLIELARRAVPTETQVMVKREDEQAFAELNAANPIFVEDAARLFCEQLLADPRIGDFRVVASHQESLHSHDAVSVLTEGETFAAQSLDPRLFQTLIHGR

SEQ ID NO: 14185 - protein, 366 aa, Roseovarius mucosus
  REGION 1..366: note = tr|A0A0A0HIR1|A0A0A0HIR1_9RHOB GTP cyclohydrolase FolE2 OS=Roseovarius mucosus DSM 17069 OX=1288298 GN=folE2; PE = 3 SV=1
MNVHPSEMKPAPDRDEAKEALALLRSWARAASPEEVADLDPAIARLLPSGEVSNYPVLAREYPEDFATSAAYLASLPDLQNGPASLIRGTRQQLQHVGISNFRLPIRYHTRDNGDLTLETSVTGTVSLDAGKKGINMSRIMRSFYKHAEKTFSADVMEAALSDYITDLESLDARLQMRLSYPARVRSLRSGLEGYQYYDIAMELVKNAGVTRKFMHLDYVYSSTCPCSLELSEHARAARGQLATPHSQRSVARISVELVEEDCLWFEDLIELARRAVPTETQVMVKREDEQAFAELNAANPIFVEDAARLFCEQLLADPRIGDFRVVASHQESLHSHDAVSVLTEGETFAAQSLDPRLFQTLIHGR

SEQ ID NO: 14186 - protein, 366 aa, Roseovarius nanhaiticus
  REGION 1..366: note = tr|A0A1N7EC26|A0A1N7EC26_9RHOB GTP cyclohydrolase FolE2 OS=Roseovarius nanhaiticus OX=573024 GN=folE2 PE=3; SV = 1
MTHHTPGMEAAPDRDDAQDALALLRRWAAAATPEEVADLDPSISRLLPRGEVSNYPALSRAYPHDFDADVGYRKTMPDLQNGPASLIRGARQQLQHVGISNFRLPIRFHTRDNGDLTLETSVTGTVSLEANKKGINMSRIMRSFYKHAEKTFSFEVIEAALDDYIADLGSVDARIQMRFSYPAKVRSLRSGLEGYQYYDIALELVETAGVRRKFMHLDYVYSSTCPCSLELSEHARQARGQLATPHSQRSVARISLEACCNDCLWFEDLIELARAAVPTETQVMVKREDEQAFAELNAANPVFVEDAARLFCERLLADERIGDFRVVASHQESLHSHDAVSVLTEGETFASQSLDPKLFSTLFHVG

SEQ ID NO: 14187 - protein, 366 aa, Roseovarius nubinhibens
  REGION 1..366: note = tr|A0A348WA65|A0A348WA65_9RHOB GTP cyclohydrolase FolE2 OS=Roseovarius nubinhibens OX=314263 GN=folE2 PE=3; SV = 1
MNMHPSHVQSSPDRDDAQDALDTLRTWAMSATPEEVADLDPAVARLLPGQEVSNYPALARAYPEEFEVDDAYRATMPDLQNGPTSLIRGARQQLQHVGISNFRLPVRFHRRDESDLTLESSVTGTVSLEAGKKGINMSRIMRSFYKHAEKTFSFEVIEAALDDYITDLDSIDARIQMRFSYPMKIRSLRSGLEGYQYYDFALELIETEGVRRKFMHLDYVYSSTCPCSLELSEHARRERGQLATPHSQRSVARISVELVGEDCLWFEDLIDLARRAVPTETQVMVKREDEQAFAELNAANPIFVEDAARLFCKELLADGRVGDFRVVASHQESLHSHDAVSILTEGPTFAAQSLDPKLFNTLFHVG

SEQ ID NO: 14188 - protein, 366 aa, Roseovarius nubinhibens
  REGION 1..366: note = tr|A3SJN5|A3SJN5_ROSNI GTP cyclohydrolase FolE2; OS = Roseovarius nubinhibens (strain ATCC BAA-591 / DSM 15170 / ISM) OX=89187 GN=folE2 PE=3 SV=1
MNMHPSQVQSSPDRDDAQDALDTLRTWAMSATPEEVADLDPAVARLLPGQEVSNYPALARAYPEEFEVDDAYRATMPDLQNGPTSLIRGARQQLQHVGISNFRLPVRFHRRDESDLTLESSVTGTVSLEAGKKGINMSRIMRSFYKHAEKTFSFEVIEAALDDYITDLDSIDARIQMRFSYPMKIRSLRSGLEGYQYYDFALELVETEGVRRKFMHLDYVYSSTCPCSLELSEHARRERGQLATPHSQRSVARISVELVGEDCLWFEDLIDLARRAVPTETQVMVKREDEQAFAELNAANPIFVEDAARLFCKELLADGRVGDFRVVASHQESLHSHDAVSILTEGPTFAAQSLDPKLFNTLFHVG

SEQ ID NO: 14189 - protein, 366 aa, Roseovarius pacificus
  REGION 1..366: note = tr|A0A1M7DA94|A0A1M7DA94_9RHOB GTP cyclohydrolase FolE2 OS=Roseovarius pacificus OX=337701 GN=folE2 PE=3 SV=1
MNVHTREPSDMPDREEARAALERLRAWAEKVTPEEVADLDPAIARLLPGRQSVNYPDLVRVYDDGFEAGDAYRATMPDLQNGPSSLIRGAKKQLQHVGISNFRLPIRFHTRDDGDLSLETSVTGTVSLEAGKKGINMSRIMRSFYRHAEKTFSFEVMEAALDDYISDLETIDARLQMRFSYPARVKSLRSGLEGYQYYDIAMELVERDGQRRKFMHLDYVYSSTCPCSLELSEHARQARGRLATPHSQRSVARISVESKGDDILWFEDLIDIARSAVPTETQVMVKREDEQAFAELNAANPIFVEDATRLFCEKLHNEPRIGDFRVIASHQESLHSHDAVSVLTEGTTFAADSIDPKLFNTLFHVG

SEQ ID NO: 14190 - protein, 366 aa, Roseovarius sp.
  REGION 1..366: note = tr|A0A365U4I6|A0A365U4I6_9RHOB GTP cyclohydrolase FolE2 OS=Roseovarius sp. TE539 OX=2249812 GN=folE2 PE=3; SV = 1
MNFHSKDLDSAPEREEARDALALLRRWASSASEDEIADLDPAIARLLPGGAPSDYPDLSREYPGEFTVTDDYRRSLPDLQNGPSSLIRGARQHLQHVGISNFRLPIRFHSRDGSDLTLETSVTGTVSLEAGKKGINMSRIMRSFYKHAGKTFSFEVMEAALDDYIADLQSIDARLQMRFSYPTEIRSLRSGISGYQYYDIALELVEHEGRRHHYMHLDYVYSSTCPCSLELSEHARQTRGQLATPHSQRSVARISVAVEPGSLLWFEDLIDAARSAVPTETQVMVKREDEQAFAELNAANPIFVEDAARLFCAELLKDQRIGDFRVIASHQESLHSHDAVSIVTEGETFAAGSIDPKLFGTLVHGG

SEQ ID NO: 14191 - protein, 365 aa, Roseovarius sp.
  REGION 1..365: note = tr|A0A4Q9XPR4|A0A4Q9XPR4_9RHOB GTP cyclohydrolase FolE2 OS=Roseovarius sp. JS7-11 OX=1607786 GN=folE2 PE=3; SV = 1
MNLQLNDLATAPDSDEARKALDTLRAWAATASAEELAALDPSITGLLRNAPEYPVFNRDYPKDFTVDAEYKAGLPDLQNGPASLIKGQKRVIQHVGISNFRLPIRYHTRDDGDLTLETSVTGTVSLEAEKKGINMSRIMRSFYNHAERTFSFEVMEAALDAYKTDLDSFDARIQMRFSFPMKIESLRSGLTGYQYYDIALELVEQGGSRKKILHLDYVYSSTCPCSLELSEHAREFRNQLATPHSQRSVARISVEVPFGRDCLWFEDLIDLARHAVPTETQVMVKREDEQAFAELNAANPIFVEDAARLFAQALHDEPRVGDFRIVASHQESLHSHDAVSVLTEGDTFAATSLDPKLFKTLFHIG

SEQ ID NO: 14192 - protein, 366 aa, Roseovarius tolerans
  REGION 1..366: note = tr|A0A0L6D035|A0A0L6D035_9RHOB GTP cyclohydrolase FolE2 OS=Roseovarius tolerans OX=74031 GN=folE2 PE=3 SV=1
MNMHPSEMNPTPDRDAAKAALDVLRDWARAASPEEVADLDPAIARLLPDAEMSNYPALSRTYPEGFEVTDAYRASLPDLQNGPASLIRGTKQQLQHVGISNFRLPIRFHARDNGDLTLETSVTGTVSLEAGKKGINMSRIMRSFYKHAEKTFSFEVMEAALADYITDLDSLDARLQMRISYPMKVQSLRSGLEGYQYYDIALELVEQAGVKRKFMHLDFVYSSTCPCSLELSEHARATRGQLATPHSQRSVARISVELIEGDCLWFEDLIELARRAVPTETQVMVKREDEQAFAELNAANAIFVEDAARLFCEQLLADPRIGDFRVVASHQESLHSHDAVSVLTEGETFAAQSLDPRLFQTLVHGG

SEQ ID NO: 14193 - protein, 366 aa, Roseovarius tolerans
  REGION 1..366: note = tr|A0A1H8FN36|A0A1H8FN36_9RHOB GTP cyclohydrolase FolE2 OS=Roseovarius tolerans OX=74031 GN=folE2 PE=3 SV=1
MNMHPSEMNPTPDRDAAKAALDVLRDWARTASPEEVADLDPAIARLLPDAEMSNYPALSRTYPEGFEVTDAYRASLPDLQNGPASLIRGTKQQLQHVGISNFRLPIRFHARDNGDLTLETSVTGTVSLEAGKKGINMSRIMRSFYKHAEKTFSFEVMEAALADYITDLDSLDARLQMRISYPMKVQSLRSGLEGYQYYDIALELVEQAGVKRKFMHLDFVYSSTCPCSLELSEHARATRGQLATPHSQRSVARISVELIEGDCLWFEDIIELARRAVPTETQVMVKREDEQAFAELNAANAIFVEDAARLFCEQLLADPRIGDFRVVASHQESLHSHDAVSVLTEGETFAAQSLDPRLFQTLVHGG

SEQ ID NO: 14194 - protein, 195 aa, Rothia aeria
  REGION 1..195: note = tr|I0US30|I0US30_9MICC GTP cyclohydrolase 1; OS = Rothia aeria F0474 OX=1125724 GN=folE PE=3 SV=1
MSEANGSAVDKPRIEAAVREILLAIGEDPDRDGLQDTPARVARAYEEFFSGLHADPADVLGTTFDIAHSEMVLVKDIPFYSTCEHHLVPFHGVAHVGYIPGADGKVTGLSKLARVLEVYARRPQVQERLTTQVVEALEEHLSPRGAIVVIEAEHMCMSMRGVRKPGAKTVTSAVRGQLKNAATRAEAMSLIFSKQ

SEQ ID NO: 14195 - protein, 195 aa, Rothia aeria; identical to SEQ ID NO: 14194
  REGION 1..195: note = tr|U7V5J2|U7V5J2_9MICC GTP cyclohydrolase 1; OS = Rothia aeria F0184 OX=888019 GN=folE PE=3 SV=1

SEQ ID NO: 14196 - protein, 199 aa, Rothia dentocariosa
  REGION 1..199: note = tr|E3H1W2|E3H1W2_ROTDC GTP cyclohydrolase 1; OS = Rothia dentocariosa (strain ATCC 17931 / CDC X599 / XDIA) OX=762948 GN=folE PE=3 SV=1
MEGRMSEDNGSGVDKPRIEAAVREILLAIGEDPDRDGLQNTPARVARAYEEFFSGLHADPADVLGTTFDIAHSEMVLVKDIPFYSTCEHHLVPFHGVAHVGYIPGADGKVTGLSKLARVLEVYARRPQVQERLTTQVVEALEEHLNPRGAIVVIEAEHMCMSMRGVRKPGAKTVTSAVRGQLKNAATRAEAMSLIFSKH

SEQ ID NO: 14197 - protein, 216 aa, Rothia dentocariosa
  REGION 1..216: note = tr|D8UNA4|D8UNA4_9MICC GTP cyclohydrolase 1; OS = Rothia dentocariosa M567 OX=563032 GN=folE PE=3 SV=1
MSSSRTRTRITTRTRTPMEGRMSEDNGSGVDKPRIEAAVREILLAIGEDPDRDGLQNTPARVARAYEEFFSGLHADPADVLGTTFDIAHSEMVLVKDIPFYSMCEHHLVPFHGVAHVGYIPGADGKVTGLSKLARVLEVYARRPQVQERLTTQVVEALEEHLSPRGAIVVIEAEHMCMSMRGVRKPGAKTVTSAVRGQLKNAATRAEAMSLIFSKH

SEQ ID NO: 14198 - protein, 189 aa, unidentified
  source 1..189: note = Rothia kristinae
  REGION 1..189: note = tr|A0A147E2L6|A0A147E2L6_9MICC GTP cyclohydrolase 1; OS = Rothia kristinae OX=37923 GN=folE PE=3 SV=1
MDLPRIEAAVREILLAVGEDPDRDGLRETPARVARSYAEVFSGLGQDPADLLATTFDIGHSEMVLVKDITFHSMCEHHLVPFFGTAHIGYIPGADGRVTGLSKLARLVDLYARRPQVQERLTTQIVEAMEQFLRPAGAIVVVEAEHLCMAMRGVAKPGAHTVTSAVRGQLRDPATRAEAMGLIRGGERR

SEQ ID NO: 14199 - protein, 191 aa, unidentified
  source 1..191: note = Rothia kristinae
  REGION 1..191: note = tr|A0A199NTT6|A0A199NTT6_9MICC GTP cyclohydrolase 1; OS = Rothia kristinae OX=37923 GN=folE PE=3 SV=1
MPMDLPRIEAAVREILLAVGEDPDRDGLRETPARVARSYAEVFSGLGQDPADLLATTFDIGHSEMVLVKDITFHSMCEHHLVPFFGTAHIGYIPGADGRVTGLSKLARLVDLYARRPQVQERLTTQIVEAMEQFLRPAGAIVVVEAEHLCMAMRGVAKPGAHTVTSAVRGQLRDPATRAEAMGLIRGGERR

SEQ ID NO: 14200 - protein, 146 aa, Rothia mucilaginosa
  REGION 1..146: note = tr|A0A525HEH0|A0A525HEH0_9MICC GTP cyclohydrolase 1 (Fragment) OS=Rothia mucilaginosa OX=43675 GN=DI608_05455; PE = 3 SV=1
MSEVKNAVDQPRIEAAVREILLAIGEDPDRDGLQQTPARVARAYAEFFSGLHQDAGEILGTTFDIAHSEMVLVKDIPFYSTCEHHLVPFHGVAHVGYIPGPDGKVTGLSKLARVVDMYARRPQVQERLTTQVVEALEEHLNPRGAI

SEQ ID NO: 14201 - protein, 194 aa, Rothia mucilaginosa
  REGION 1..194: note = tr|A0A291DFT5|A0A291DFT5_9MICC GTP cyclohydrolase 1; OS = Rothia mucilaginosa OX=43675 GN=folE PE=3 SV=1
MSEAKNAVDQPRIEAAVREILLAIGEDPDRDGLQQTPARVARAYAEFFSGLHQDAGEILGTTFDIAHSEMVLVKDIPFYSTCEHHLVPFHGVAHVGYIPGPDGKVTGLSKLARVVDLYARRPQVQERLTTQVVEALEEHLNPRGAIVVIEAEHMCMSMRGVRKPGAKTVTSAVRGALMNGATRAEAMSLIFSQR

SEQ ID NO: 14202 - protein, 188 aa, Rothia nasimurium
  REGION 1..188: note = tr|A0A4Y9F6Q1|A0A4Y9F6Q1_9MICC GTP cyclohydrolase 1; OS = Rothia nasimurium OX=85336 GN=folE PE=3 SV=1
MAVDQPRIEAAVREILLAIGEDPTRDGLLDTPARVARAYDEIFAGLHQSAGDILGTTFDIDHSELVLVKDIPFYSICEHHLVPFVGHAHIGYIPGGDGKVTGLSKLARLVDVYAKRPQVQERLTTQVIEALEEHLQPTGAIVVIQAEHMCMSMRGVRKPGAKTVTSAVRGALRDPATRAEAMSLINAS

SEQ ID NO: 14203 - protein, 188 aa, Rothia nasimurium
  REGION 1..188: note = tr|A0A1Y1RQ80|A0A1Y1RQ80_9MICC GTP cyclohydrolase 1; OS = Rothia nasimurium OX=85336 GN=folE PE=3 SV=1
MAVDQPRIEAAVREILLAIGENPDRDGLLDTPARVARAYDEMFAGLHQSAGDILGTTFDIDHSELVLVKDIPFYSTCEHHLVPFYGHAHIGYIPGGEGRVTGLSKLARLVDVYAKRPQVQERLTTQVIEALEEHLQPTGAIVVIQAEHMCMSMRGVRKPGTKTVTSAVRGALRDPATRAEAMSLINAS

SEQ ID NO: 14204 - protein, 194 aa, Rothia sp.; identical to SEQ ID NO: 14201
  REGION 1..194: note = tr|A0A1F0Y2G5|A0A1F0Y2G5_9MICC GTP cyclohydrolase 1; OS = Rothia sp. HMSC072B04 OX=1739432 GN=folE PE=3 SV=1

SEQ ID NO: 14205 - protein, 194 aa, Rothia sp.
  REGION 1..194: note = tr|A0A1E9ZD17|A0A1E9ZD17_9MICC GTP cyclohydrolase 1; OS = Rothia sp. HMSC071B01 OX=1715007 GN=folE PE=3 SV=1
MSEVKNAVDQPRIEAAVREILLAIGEDPDRDGLQQTPARVARAYAEFFSGLHQDAGEILGTTFDIAHSEMVLVKDIPFYSTCEHHLVPFHGVAHVGYIPGPDGKVTGLSKLARVVDLYARRPQVQERLTTQVVEALEEHLNPRGAIVVIEAEHMCMSMRGVRKPGAKTVTSAVRGALMNGATRAEAMSLIFSQR

SEQ ID NO: 14206 - protein, 220 aa, unidentified
  source 1..220: note = Rouxiella badensis
  REGION 1..220: note = tr|A0A1X0WDT4|A0A1X0WDT4_9GAMM GTP cyclohydrolase 1; OS = Rouxiella badensis OX=1646377 GN=folE PE=3 SV=1
MATLSKEAVLVHEALIARGLETPLREEPSLDAETRKARIEEHMTGIMQLLNLDLNDDSLAETPKRIAKMYVDEIFSGLDYANFPKITVITNKMKVDEMISVRDITLTSTCEHHFVTIDGKATVAYIPKDSVIGLSKINRIVQFFSQRPQVQERLTQQILVALQTLLGTNNVAVSIDAVHYCVKARGIRDATSATTTTSLGGLFKTSQNTRQEFLRTIRHN

SEQ ID NO: 14207 - protein, 220 aa, unidentified
  source 1..220: note = Rouxiella silvae
  REGION 1..220: note = tr|A0A1X0W8Y9|A0A1X0W8Y9_9GAMM GTP cyclohydrolase 1; OS = Rouxiella silvae OX=1646373 GN=folE PE=3 SV=1
MATLSKEAVLVHEALLARGLETPLRDEPSLDAATRKQRIKEHMTGIMQLLNLDLNDDSLAETPTRIAKMYVDEIFSGLDYANFPKITVITNKMKVDEMISVRDITLTSTCEHHFVTIDGKATVAYIPKDSVIGLSKINRIVQFFSQRPQVQERLTQQILIALQTLLGTNNVAVSIDAVHYCVKARGIRDATSATTTTSLGGLFKTSQNTRQEFLRTIRHN

SEQ ID NO: 14208 - protein, 188 aa, unidentified
  source 1..188: note = Ruaniaceae bacterium
  REGION 1..188: note = tr|A0A239QTL5|A0A239QTL5_9MICO GTP cyclohydrolase 1; OS = Ruaniaceae bacterium KH17 OX=1945888 GN=folE PE=3 SV=1
MYDQAGVERAIRDLLIAIGEDPERDGIKGTPERIARSYREIFGGLERDPGDVLETVFDIGHSELILVRDIPMYSMCEHHLLPFHGVAHVGYIPGAGGQVTGLSKLARLVEGYARRPQVQERLTTQIADTLVERLQPAGVIVVVEAEHLCMSMRGVRKPGSRTLTSAVRGQLRAPATRAEAMSLILRGV

SEQ ID NO: 14209 - protein, 367 aa, Rubellimicrobium mesophilum
  REGION 1..367: note = tr|A0A017HTF5|A0A017HTF5_9RHOB GTP cyclohydrolase I type 2 OS=Rubellimicrobium mesophilum DSM 19309 OX=442562; GN = Rumeso_00832 PE=4 SV=1
MNVHSPELDRDPARSDAAEALALLRRWAARATPEEVADLDPAVARLLPGREVSNYPDLARAYPDEFAPDALYRATLPDLQNGPESLIRGARAPIQHVGISGFRLPIRFHSRDNGDVTLETSVTGTVSLEAGKKGINMSRLMRSFYRFAEETFSFDVMERALDSYKADLGSCDARIQMRFRFPLKVESLRSGLWGYQYYDIALELVDQEGLRKKIFHLDYVYASTCPCSLELSEHARQTRGQLAVPHAQRSVARLSVEVVPGQGKLWFEDLIDMARRAVPTETQVMVKREDEQAFAELNAAHPIFVEDAARLFAAEFLSDSRIGDFRVVASHQESLHSHDAVSLLIEGETFRAESLDPRLFASLVHLP

SEQ ID NO: 14210 - protein, 367 aa, Rubellimicrobium thermophilum
  REGION 1..367: note = tr|S9R7G0|S9R7G0_9RHOB GTP cyclohydrolase FolE2; OS = Rubellimicrobium thermophilum DSM 16684 OX=1123069; GN = folE2 PE=3 SV=1
MNLHQPDFERDLTRAEAEDALATLRRWATRASPEEVADLDPAIARLLPGRELSNYPDLSRSYPEGFQADACYRATLPDLQNGPESLIRGARAPIQHVGISGFRLPVRFRTRDDGEVTLETAVTGTVSLEAGKKGINMSRLMRSFYLYAEETFSFDVMERALDRYKADLASCDARLQMRFRYPLRVASLRSGLSGWQYYDIALELVETGGVRKKLFHLDYVYSSTCPCSLELSEHARQMRGQLAVPHAQRSVARLSVEVLPGQARLWFEDLIEMARRAVPTETQVMVKREDEQAFGELNAAHPVFVEDAARLFAAELLADPRIGDFRVIASHQESLHSHDAVSILVEGETFAAQSLDPRLFGTLIHVP

SEQ ID NO: 14211 - protein, 212 aa, unidentified
  source 1..212: note = Rubidibacter lacunae
  REGION 1..212: note = tr|U5D9N2|U5D9N2_9CHRO GTP cyclohydrolase 1; OS = Rubidibacter lacunae KORDI 51-2 OX=582515 GN=folE PE=3; SV = 1
MDFSNLPDDIRKQAILTEPKAPVSEEEMQQAVRTLLLGLGEDPDREGLRDTPKRVVKALKFLTSGYNQSLDELLNGAIFHEDANEMVLVRDIDLFSSCEHHILPILGRAHVAYIPNGKVIGLSKIARICEMYARRLQVQERLTQQIASALQGLLRPQGVAVVVEATHMCMVMRGVQKPGSWTVTSSMQGVFAENDSTRQEFMNLIRHTPPLR

SEQ ID NO: 14212 - protein, 256 aa, unidentified
  source 1..256: note = Rubidibacter lacunae
  REGION 1..256: note = tr|U5D5M5|U5D5M5_9CHRO GTP cyclohydrolase 1; OS = Rubidibacter lacunae KORDI 51-2 OX=582515 GN=folE PE=3; SV = 1
MTMAASNGSNGSKGARASYGKGQSIGNGNGKISPMAEASALAQQVADGQGGGVRADAPSPVEADVDATLGVMKSAVRELLVGVGENPEREGLLRTPQRVAEAMRFLTQGYNQSLETLVNGAIFDEGHNEMVLVRDIDLFSLCEHHMLPFLGKAHVAYIPNQKVVGLSKLARIVEMYARRLQVQERLTRQVAEAVETILEPRGVAVVVEATHMCMVMRGVQKPSSWTVTSAMLGVFQDDQKTREEFLNLIRHQPSFH

SEQ ID NO: 14213 - protein, 231 aa, unidentified
  source 1..231: note = Rubinisphaera brasiliensis
  REGION 1..231: note = tr|F0SFP3|F0SFP3_RUBBR GTP cyclohydrolase 1; OS = Rubinisphaera brasiliensis (strain ATCC 49424 / DSM 5305 / JCM 21570 / NBRC 103401 / IFAM 1448) OX=756272; GN = folE PE=3SV=1
MISSRQDSAVAEISNRDAAAATLNKSQSIEVMPEQNEEKSAANQPVDLESIKDAVRVILKAVGEDPDRDGLLETPRRVAKMYAEMFAGLHKDAGRHLEVTFPETYDEMVLVRDISFTSMCEHHLLPFSGVAHVAYLPDGAVTGLSKLARVVEEVSRRPQVQERMTQTVAELIETRLECRGVAVVVEAEHSCMTIRGIRKPGSKTITSALRGEFKTNPASRAEVMSLINERR

SEQ ID NO: 14214 - protein, 203 aa, unidentified
  source 1..203: note = Rubinisphaera sp.
  REGION 1..203: note = tr|A0A2E9VMB2|A0A2E9VMB2_9PLAN GTP cyclohydrolase 1; OS = Rubinisphaera sp. OX=2024857 GN=folE PE=3 SV=1
MNPSCNLTNDHEDALPETTVDLEAIQGAVRTILAAVGEDPDRPGLLETPRRVAKMYAEMFSGLKLDPGRHLQTTFPETYDEMVLVRDIHFASMCEHHLLPFTGVAHVAYLPNGKVTGLSKLARVVEEVSRRPQVQERMTQTIADLVEKELGSKGVAVVVEAEHSCMSIRGIRKAGSMTVTSALRGQFKNNQASRSEVMSLINQ

SEQ ID NO: 14215 - protein, 189 aa, unidentified; identical to SEQ ID NO: 7013
  source 1..189: note = Rubneribacter badeniensis
  REGION 1..189: note = tr|A0A2K2U218|A0A2K2U218_9ACTN GTP cyclohydrolase 1; OS = Rubneribacter badeniensis OX=2070688 GN=folE PE=3 SV=1

SEQ ID NO: 14216 - protein, 189 aa, Rubricoccus marinus
  REGION 1..189: note = tr|A0A259U3Z3|A0A259U3Z3_9BACT GTP cyclohydrolase 1; OS = Rubricoccus marinus OX=716817 GN=folE PE=3 SV=1
MYHEATTRELSTLTHRQLQLVGEDPEREGLLKTPERVAKAMQFLTHGYQLDPEAILRSAVFEESYSEMVLVKDIEVYSLCEHHMLPFFGKAHVAYIPNGKIVGLSKIPRIVDVFARRLQVQERLTIQIRDAIERVLEPEGVAVVIEAQHLCMMMRGAEKQNSSTTTSAMSGAFLDNDNTRAEFMRLAVR

SEQ ID NO: 14217 - protein, 210 aa, Rubrimonas cliftonensis
  REGION 1..210: note = tr|A0A1H4E585|A0A1H4E585_9RHOB GTP cyclohydrolase 1; OS = Rubrimonas cliftonensis OX=89524 GN=folE PE=3 SV=1
MNVHRPDLPREAPSPQLRPTREEAEEAVRTLLRWAGDDPGREGLIDTPSRVARAYGEWFRGYDEDPHADLQRVFEEVEGYDEMVILRDIRFESYCEHHLAPIIGRAHVGYMPDRRVVGISKLARVVDSFAKRLQVQEKMTAQVANAIRDVLQPKGVAVVLEAEHQCMSTRGVHKHGVSMVTSTMLGVFRDDHATRREFLTMVGNPVNRGG

SEQ ID NO: 14218 - protein, 273 aa, unidentified
  source 1..273: note = Rubripirellula obstinata
  REGION 1..273: note = tr|A0A5B1CTL1|A0A5B1CTL1_9PLAN GTP cyclohydrolase 1 type 2 OS=Rubripirellula obstinata OX=406547 GN=LF1_51310; PE = 4 SV=1
MTPGESLGRICSVLAQIAPLRLAEDWDNVGLLVGDRGADVSRAMTCLTITPDVVKEAVESKVDLIIAHHPLPFKPLAKLTTDTVPGTMLLGLASHKIAVYSAHTAFDSAADGINNQWAKLIGIDDSLPLITSENGSGGVSEGRVNEGSGRMGRFESPRSLGQIVKQAADAVGQPSARIVGSPDLSVSKVAIACGSGGSFLAAAKRQGCDMLLTGEATFHTCLEARSLGIGLGLLGHYHSERFAMERLAKQLADEVDAIEVWASKVESDPVQML

SEQ ID NO: 14219 - protein, 278 aa, unidentified
  source 1..278: note = Rubripirellula obstinata
  REGION 1..278: note = tr|A0A5B1CMD7|A0A5B1CMD7_9PLAN GTP cyclohydrolase FolE2 OS=Rubripirellula obstinata OX=406547 GN=folE2 PE=3; SV = 1
MIQTNNSEETTQLPDIQSTGDVRKVAINKVGVTNVRYPISLRTPGEGEGNTFLHTVATINMFVSLPHHEKGTHMSRFLEVLNEYHEELCSDTLVEICASMREKLKSQDAFLDLTFPYFIDKKAPVTGQSGKLDFDVRFEIAAGTIDDFIMTLKVPATSLCPCSKEISEYGAHNQRCEMTVKVRIADGVHLWIEELFAMIEKCASTQVFSVLKRPDEKWVTERAYENPKFVEDIVRDMAVTLNADDRIEWYQCFSENFESIHNHNAYAFIENDKREKTD

SEQ ID NO: 14220 - protein, 264 aa, unidentified
  source 1..264: note = Rubritalea profundi
  REGION 1..264: note = tr|A0A2S7TZ04|A0A2S7TZ04_9BACT GTP cyclohydrolase FolE2 OS=Rubritalea profundi OX=1658618 GN=folE2 PE=3 SV=1
MPARIQPLTDTQNERDDRNIAIDRVGVKALRFPVEVREKEGGSQRTVAITALAVDLPEHFKGTHMSRFVEVLNSHGNCLDVREMKKVPEELLGRLDASRAHVEFEFPFFRTKAAPVTGKGGVLDYNIRFEVEACSNGDSDFICTVMVPVATLCPCSKAISEYGAHNQRGLVTFAVRAKQPVWVEDLIDLVESCASCELYSLLKRPDEKFVTEKAYENPVFVEDLVRNIAGKANAQENIVWYKVEAENFESIHNHNAYAMIEKHV

SEQ ID NO: 14221 - protein, 265 aa, Rubritalea squalenifaciens
  REGION 1..265: note = tr|A0A1M6LMF7|A0A1M6LMF7_9BACT GTP cyclohydrolase FolE2 OS=Rubritalea squalenifaciens DSM 18772 OX=1123071; GN = folE2 PE=3 SV=1
MPEQIMPLKDTQNERDHRNIAIDRVGVKALRFPVEVREKEGGSQRTVATTALAVDLPEHFKGTHMSRFVEVLNSHGNCLDVREMKKVPEELLERLEASKAHVEFEFPFFRTKPAPVTGKGGVLDYTVRFEVEACANGDSDFVCTVMVPVATLCPCSKAISDYGAHNQRGLVTFAVRAKRPIWVEDLIDLVESSASCELYSLLKRPDEKYVTERAYDNPVFVEDLVRNVASKANAQDNIVWYRVEAENFESIHNHNAYAMIEKHAE

SEQ ID NO: 14222 - protein, 217 aa, unidentified
  source 1..217: note = Rubrivirga marina
  REGION 1..217: note = tr|A0A271IXF4|A0A271IXF4_9BACT GTP cyclohydrolase 1; OS = Rubrivirga marina OX=1196024 GN=folE PE=3 SV=1
MASNEQHEGGASDLAVKDASPLLYERQDVYHDDTTAELAALSKRQLELVGEDPEREGLLKTPERVAKAWQFLTHGYGLDPDKVLRSALFAEDYSEMVLVKDIEVYSLCEHHALPFFGKAHVAYIPNGHIVGLSKIPRVVDVFARRLQVQERLTLEIRDAVDRVLKPEGVAVVIEAQHLCMMMRGAEKQNSMTTTSAMSGVFLDNANTRSEFMRLISG

SEQ ID NO: 14223 - protein, 189 aa, unidentified
  source 1..189: note = Rubrivirga sp.
  REGION 1..189: note = tr|A0A271J6F7|A0A271J6F7_9BACT GTP cyclohydrolase 1; OS = Rubrivirga sp. SAORIC476 OX=1961794 GN=folE PE=3 SV=1
MYHAETTDQLAALTERQLELIGEDPTREGLLKTPERVAKAWQFLTHGYGLDPEAILRSALFAEDYSQMVLVKDIEVYSLCEHHALPFFGKAHVAYIPNGHIVGLSKIPRVVDVFARRLQVQERLTLQIRDAIDAVLKPEGVAVVIEAQHLCMMMRGAEKQNSHTTTSAMSGVFLDQPDTRAEFMRLISG

SEQ ID NO: 14224 - protein, 193 aa, unidentified
  source 1..193: note = Rubrivirga sp.
  REGION 1..193: note = tr|A0A2E8PD09|A0A2E8PD09_9BACT GTP cyclohydrolase 1 (Fragment) OS=Rubrivirga sp. OX=1885344 GN=folE PE=3 SV=1
MAIDPVDTGSGSAAGEYDADAVAAAIRQLLIAIGEDPDRDGLRETPERVARSYAEMFGGLRQDPEDVLTTVFNVGHEELVIVKDIQLYSTCEHHLLPFYGVTHVGYIPNASGQITGLSKLARLVDVFARRPQVQERLTTEIADAIVRILQPRGAIVVVEAEHTCMSVRGVRKAGSMTVTSAMRGTLLNAATRA

SEQ ID NO: 14225 - protein, 266 aa, Rubrivivax benzoatilyticus
  REGION 1..266: note = tr|F3LKC4|F3LKC4_9BURK GTP cyclohydrolase FolE2; OS = Rubrivivax benzoatilyticus JA2 = ATCC BAA-35 OX=987059; GN = folE2 PE=3 SV=1
MTNLTDALHIPDTQSARDERHVAIQRVGVKDVRYPLQLRVAGAVQATAASWTLDVALPAEQKGTHMSRFVAWLDALDEPLDAAALARRHAAMLDKLGAREGRVEASFSFFLRKRAPVSGLQSLLDYQGRWIAETRLDGDTPKTTLWAEVAVPVKSLCPCSKEISDYGAHNQRSIVTIRVELLQPVEWHELVRFAEDEASSEIWPMLKRTDEKWVTERAYENPKFVEDLVRDVALRLNREPRIGRYVVDVENFESIHNHSAWARIER

SEQ ID NO: 14226 - protein, 249 aa, Rubrivivax gelatinosus
  REGION 1..249: note = tr|I0HXR4|I0HXR4_RUBGI GTP cyclohydrolase I FolE; OS = Rubrivivax gelatinosus (strain NBRC 100245 / IL144); OX = 983917 GN=folE PE=4 SV=1
MAKTVLPPEPATPRLLRSEDELATLPVSERIRYRLVCADKRFHANDNIADFVREGELPELKKEVQAKLEELLRALVIDTESDHNTQETAKRVAKMYIDEVFRGRFHPMPSVTEFPNAERLNELMIVGPITVRSACSHHLCPIFGKVWIGLLPNEHSNLIGLSKYARITDWIMSRPQIQEEAVTMLANELQERVRPDGLAIVMEADHFCMHWRGVKDTDSAMVNSVMRGAFLKDPNLRREFLSLLPRKQD

SEQ ID NO: 14227 - protein, 266 aa, Rubrivivax gelatinosus
  REGION 1..266: note = tr|A0A4R2M4Q8|A0A4R2M4Q8_RUBGE GTP cyclohydrolase FolE2 OS=Rubrivivax gelatinosus OX=28068 GN=folE2 PE=3 SV=1
MTNLTDALHIPDTQSARDERHVAIQRVGVKDVRYPLQLRVAGAVQAATASWTLDVALPAEQKGTHMSRFVAWLDALDEPLDAAALARRHAAMLDKLGASEGRVEASFSFFLRKRAPVSGLQSLLDYQGRWIAETRLDGDSPRTTLWAEVAVPVKSLCPCSKEISDYGAHNQRSIVTIRVELLQPVEWHELVRFAEDEASSEIWPMLKRSDEKWVTERAYENPKFVEDLVRDVALRLNREPRIGRYVVDVENFESIHNHSAWARIER

SEQ ID NO: 14228 - protein, 263 aa, Rubrivivax sp.
  REGION 1..263: note = tr|A0A1E4IE00|A0A1E4IE00_9BURK GTP cyclohydrolase FolE2 OS=Rubrivivax sp. SCN 71-131 OX=1660138 GN=folE2; PE = 3 SV=1
MNKLTDALHIPDTQSERDERHLAIQRVGVKALRYPLQLRVAGAVQPATGEWTLDVALPAEQKGTHMSRFVAWLEQNTEPLDAAVLRARHARMLELLHAREGQIEVAFTFFLKKRAPVSGLASLLDVQGRWVAQTRAGATTVWAEVGVPVKSLCPCSKEISDYGAHNQRSLVTIRVELLQSIEWHELVRFAEESASSEIWPMLKRSDEKWVTERAYENPKFVEDLVRDVALRLNQDARIGRYAVEVENFESIHNHSAYARIERA

SEQ ID NO: 14229 - protein, 304 aa, Rubrivivax sp.
  REGION 1..304: note = tr|A0A1E4Q0H1|A0A1E4Q0H1_9BURK GTP cyclohydrolase FolE2 OS=Rubrivivax sp. SCN 70-15 OX=1660139 GN=folE2 PE=3; SV = 1
MNAALPDVSLTDIAPRLSPLAWVGMQGIDLPITVAEPGYRRELHAHADVQVDLPAPHVKGIHMSRLYRLLDALGQGEGLSPAGLRHLLQAMIDSHQDCDTRSARLRLNLDLLVRRPALVTQGLSGWKSYPIRLDASLVKGEFRCRVQVTAGYSSTCPCSAALSRHIIEQGFLKAFGRQTPVEPADVAAWLHQHATLATPHSQRSEAQVTVDVAGDCDSLGLLALIDRIEQAVGTPVQTAVKRADEQAFAALNGQNLMFVEDAARRIEAALSGYVRPSIHVRHLESLHPHDAVAWATPMSEGVSA

SEQ ID NO: 14230 - protein, 200 aa, Rubrobacter radiotolerans
  REGION 1..200: note = tr|A0A023X2Z7|A0A023X2Z7_9ACTN GTP cyclohydrolase 1; OS = Rubrobacter radiotolerans OX=42256 GN=folE PE=3 SV=1
MSEGELPGRPEAPGGTDFGRLEAALGEALLALGLGPQSAPGMRETPERTAKALDSFFSGLRTDPEVYLEETFPGGTGDPVVLRDIPLYSMCEHHLVPFVGRAHVGYVPDRRVLGLSEIAGVVEAYARRPQLQERLTAQVADLLFEPLGSKGSFVVIEAEQLCMTMRGAQKPGTLTVTRAARGVYAQDASLREEFTRLLGR

SEQ ID NO: 14231 - protein, 198 aa, Rubrobacter xylanophilus
  REGION 1..198: note = tr|Q1AWU1|Q1AWU1_RUBXD GTP cyclohydrolase 1; OS = Rubrobacter xylanophilus (strain DSM 9941 / NBRC 16129); OX = 266117 GN=folE PE=3 SV=1
MTEAYPPRGRVDRERIQRAVREILVAVGEDPEREGLLGTPRRVAEAYEYLFSGLREDPLRHLQVGFMEDYRDLIIVRDIYLASLCEHHLLPFIGRAHVAYAPRGKVVGISKLARLVEGYARRPQLQERLTSQIADALYEGLGSRGSLVIVEADHSCMTMRGVQKPGSVTVTSASRGIYREDGALRSELTDLILRGREI

SEQ ID NO: 14232 - protein, 198 aa, Rubrobacter xylanophilus
  REGION 1..198: note = tr|A0A510HFB8|A0A510HFB8_9ACTN GTP cyclohydrolase 1; OS = Rubrobacter xylanophilus OX=49319 GN=folE PE=3 SV=1
MTEAYPPRGRVDRERIERAVREILVAIGEDPEREGLLGTPRRVAEAYEYLFSGLREDPRRHLEVGFMEDYRDLILVRDIYLASLCEHHLLPFIGRAHVAYAPRGKVVGISKLARLVEGYARRPQLQERLTSQIADALYEGLGSRGSLVIIEADHSCMTMRGVQKPGSVTVTSASRGIYREDGALRSELTDLILRGREI

SEQ ID NO: 14233 - protein, 195 aa, unidentified
  source 1..195: note = Rudaeicoccus suwonensis
  REGION 1..195: note = tr|A0A561E2Y2|A0A561E2Y2_9MICO GTP cyclohydrolase 1; OS = Rudaeicoccus suwonensis OX=657409 GN=folE PE=3 SV=1
MSIPPTVDLERAAAAVRELLLALGEDPDREGLRDTPGRVARAYAETFAGLWQEPADVLNRTFDVDHSELVIVRDIEVYSTCEHHLVPFHGVAHVGYIPAEDGRVTGLSKIARLVDVFAKRPQVQERLTTQIADSLVEHLRAQGVIVVVECEHLCMSMRGVHKPGATTITSAVRGQLRHAATRAEAMSLIQAQPRR

SEQ ID NO: 14234 - protein, 367 aa, unidentified
  source 1..367: note = Ruegeria arenilitoris
  REGION 1..367: note = tr|A0A238JY41|A0A238JY41_9RHOB GTP cyclohydrolase FolE2 OS=Ruegeria arenilitoris OX=1173585 GN=folE2 PE=3; SV = 1
MNIHSRDIDEKPDRDEAAEALKVLRKWAKGASVAEISQLDPAVARLVPGLMPDNYPAMSREYPEDFKVDEAYKSALPDLQNGPSSLIRGAKQQIQHVGISNFRLPIRFHSKNGPDLTLETSVTGTVSLEAEKKGINMSRIMRSFYKHAERTFSFEVMESALSDYLTDLDSFDARLQMRFSYPDRVKSLRSGLEGYQYYDIALELVEQGGVRQKIMHLDYVYSSTCPCSLELSEHARSVRGQLATPHSQRSVARISVVVDCDADCLWFEDLIALCRRAVPTETQVMVKREDEQAFAELNAANPIFVEDAARLFCAELLADHHVGDFRVIASHQESLHSHDAVSILTEGPTFASTSLDPRLFTTLFHVG

SEQ ID NO: 14235 - protein, 367 aa, Ruegeria atlantica
  REGION 1..367: note = tr|A0A0P1EQF7|A0A0P1EQF7_9RHOB GTP cyclohydrolase folE2 OS=Ruegeria atlantica OX=81569 GN=folE2 PE=4 SV=1
MNVHPRDIEDTPDNDEAAAALKTLRKWAESATEAEISQLDPAIARLVPGLVPVNYPSLSREYPDGFTVDSAYRATLPDLQNGPSSLIRGAKQQIQHVGISNFRLPIRFHRKRGDDLTLETSVTGTVSLDAEKKGINMSRIMRSFYKHAERTFSFEVMEAALDDYMTDLDSFDARIQMLFSYPDRVQSLRSGLEGYQYYDIALELVEQGGVRQKIMHLDYVYSSTCPCSLELSEHARATRGQLATPHSQRSVARISVVVDCDTDCLWFEDLIALCRRAVPTETQVMVKREDEQAFAELNAANPIFVEDAARLFCAELLADHHIGDFRVVASHQESLHSHDAVSVLTEGPTFVSPSLDPRLFTTLFHVG

SEQ ID NO: 14236 - protein, 367 aa, Ruegeria atlantica
  REGION 1..367: note = tr|A0A0P1F123|A0A0P1F123_9RHOB GTP cyclohydrolase FolE2 OS=Ruegeria atlantica OX=81569 GN=folE2 PE=3 SV=1
MNVHPRDIEDMPDNDEAAAALKTLRKWAESATEAEISQLDPAIARLVPGLVPINYPSLSREYPEGFAVDSAYRATLPDLQNGPSSLIRGAKQQIQHVGISNFRLPIRFHRKRGDDLTLETSVTGTVSLDAEKKGINMSRIMRSFYKHAERTFSFEVMEAALDDYMTDLDSFDARIQMRFSYPDRVQSLRSGLEGYQYYDIALELVEQGGVRQKIMHLDYVYSSTCPCSLELSEHARATRGQLATPHSQRSVARISVVVDCDTDCLWFEDLIALCRRAVPTETQVMVKREDEQAFAELNAANPIFVEDAARLFCAELLADHHIGDFRVVASHQESLHSHDAVSVLTEGPTFVSPSLDPRLFTTLFHVG

SEQ ID NO: 14237 - protein, 367 aa, unidentified
  source 1..367: note = Ruegeria conchae
  REGION 1..367: note = tr|A0A497ZX66|A0A497ZX66_9RHOB GTP cyclohydrolase FolE2 OS=Ruegeria conchae OX=981384 GN=folE2 PE=3 SV=1
MNIHPRDINETPDHDQAAAALKVLREWAKSASAVEISQLDPAVAQLVPGLSQAEYPALSRDYPESFEADVAYRATLPDLQNGPSSLIRGSKQQIQHVGISNFRLPIRFHRKSGAELTLETSVTGSVSLEAEKKGINMSRIMRSFYKHAERTFSFEVMEAALNDYLSDLDSLDARIQMRFSYPDRIESLRSGLSGYQYYDIALELVDRGGERLKIMHLDYVYSSTCPCSLELSEHARATRGQLATPHSQRSVARISVVVDCNADCLWFEDLIALCRRAVPTETQVMVKREDEQAFAELNAANPIFVEDAARLFCAELQADHHVGDFRVIASHQESLHSHDAVSILTEGPTFETASLDPRLFTTLFHVG

SEQ ID NO: 14238 - protein, 367 aa, unidentified
  source 1..367: note = Ruegeria denitrificans
  REGION 1..367: note = tr|A0A0N7M8W7|A0A0N7M8W7_9RHOB GTP cyclohydrolase FolE2 OS=Ruegeria denitrificans OX=1715692 GN=folE2 PE=3; SV = 1
MNVHPRSIEDAPDKDDAAAALKTLRKWAESATEAEISQLDPAVARLVPGVVPVNYPSLSREYAENFKVDAAYRASLPDLQNGPSSLIRGAKQQIQHVGISNFRLPIRFHRKHGDDLTLETSVTGTVSLEAEKKGINMSRIMRSFYKHAERTFSFEVIEAALNDYMTDLDSFDARIQMRFSYPDRVESLRSGLAGYQYYDIALELVEQNGVRQKIIHLDYVYSSTCPCSLELSEHARSTRGQLATPHSQRSVARISVVLDCEADCLWFEDLIALCRRAVPTETQVMVKREDEQAFAELNAANPIFVEDAARLFCAELLADHHVGDFRVVASHQESLHSHDAVSVLTEGPTFVSPSLDPRLFTTLFHVG

SEQ ID NO: 14239 - protein, 367 aa, Ruegeria faecimaris
  REGION 1..367: note = tr|A0A521BMM0|A0A521BMM0_9RHOB GTP cyclohydrolase FolE2 OS=Ruegeria faecimaris OX=686389 GN=folE2 PE=3 SV=1
MNVYPRDIDDAPNNDEAAAALKTLRKWAENATEAEIGQLDPAVARLVPGLLPVNYPSLSRHYPEGFAVDEAYRASLPDLQNGPSSLIRGAKQQIQHVGISNFRLPIRFHRKQGDDLTLETSVTGTVSLDAEKKGINMSRIMRSFYKHAERTFSFEVIEAALNDYMTDLDSFDARIQMRFSYPDRTQSLRSGLEGYQYYDIALELVEQNGVRQKIMHLDYVYSSTCPCSLELSEHARSTRGQLATPHSQRSVARISVAVDCDADCLWFEDLIALCRRAVPTETQVMVKREDEQAFAELNAANPIFVEDAARLFCAELLADHHIGDFRVIASHQESLHSHDAVSVLTEGPTFVSSSLDPRLFTTLFHVG

SEQ ID NO: 14240 - protein, 367 aa, unidentified
  source 1..367: note = Ruegeria intermedia
  REGION 1..367: note = tr|A0A1M4XX62|A0A1M4XX62_9RHOB GTP cyclohydrolase FolE2 OS=Ruegeria intermedia OX=996115 GN=folE2 PE=3 SV=1
MNIHSRDMDEKPDRDAAAEALKVLRKWAKGASAAEISQLDPAVARLVPGLMPDNYPSMSREYPEDFKVDEAYKAALPDLQNGPSSLIRGAKQQIQHVGISNFRLPIRFHSKNGPDLTLETSVTGTVSLEAEKKGINMSRIMRSFYKHAERTFSFEVMEAALSDYLTDLDSFDARLQMRFSYPERVKSLRSGLEGYQYYDIALELVEQGGVRQKIMHLDYVYSSTCPCSLELSEHARSVRGQLATPHSQRSVARVSVVVDSDADCLWFEDLIALCRRAVPTETQVMVKREDEQAFAELNAANPIFVEDAARLFCAELQANHHVGDFRVIASHQESLHSHDAVSILTEGPTFAASSLDPRLFSTLFHVG

SEQ ID NO: 14241 - protein, 367 aa, unidentified
  source 1..367: note = Ruegeria litorea
  REGION 1..367: note = tr|A0A1Y5T9A5|A0A1Y5T9A5_9RHOB GTP cyclohydrolase FolE2 OS=Ruegeria litorea R37 OX=1200284 GN=folE2 PE=3 SV=1
MNFHTRDMNETPDREEAAAALDVLRAWAKTATEAEIAQLDPSVARLVPGLVPVNYPPLSRSYPEEFEVDDAYKASLPDLQNGPSSLIRGAKQQIQHVGISNFRLPIRFHRKEGADLTLETSVTGTVSLEAEKKGINMSRIMRSFYKHAERTFSFEVIEAALDDYKSDLESFDARIQMRFSYPVKVESLRSGLSGYQYYDIALELVEQNGVRQKIMHLDYVYSSTCPCSLELSEHARMSRGQLATPHSQRSVARISVVVDCDADCLWFEDLIALCRRAVPTETQVMVKREDEQAFAELNAANPIFVEDAARSFCAELLADHHVGDFRVIASHQESLHSHDAVSVLTEGPTFAAASLDPKLFNTLFHVG

SEQ ID NO: 14242 - protein, 367 aa, unidentified
  source 1..367: note = Ruegeria marisrubri
  REGION 1..367: note = tr|A0A101CYC9|A0A101CYC9_9RHOB GTP cyclohydrolase FolE2 OS=Ruegeria marisrubri OX=1685379 GN=folE2 PE=3 SV=1
MNFLSRNIDETPDREEAEAALALLRKWAEAASEVEISQLDPAIARLVPGLVPTNYPPLSRDYAGDFVVDEAYKASLPDLQNGPSSLIRGAKQQIQHVGISNFRLPIRFHSKNGPDLTLETSVTGTVSLEAEKKGINMSRIMRSFYKHAERTFSFEVMEAALDDYMTDLDSFDARIQMRFSYPVRLKSLRSGLEGYQYYDIALELVEQGGVRQKIIHLDYVYSSTCPCSLELSEHARSQRGRLATPHSQRSVARISVVVDTHADCLWFEDLIALCRRAVPTETQVMVKREDEQAFAELNASNPIFVEDAARLFCAELQADHHIGDFRVIASHQESLHSHDAVSILTEGPTFAASSLDPKLFNTLFHVG

SEQ ID NO: 14243 - protein, 367 aa, unidentified
  source 1..367: note = Ruegeria mediterranea
  REGION 1..367: note = tr|A0A2R8C4W4|A0A2R8C4W4_9RHOB GTP cyclohydrolase FolE2 OS=Ruegeria mediterranea M17 OX=1200281 GN=folE2; PE = 3 SV=1
MNFHTRDLNETPDREDAAAALDVLRAWAKTASEAEISQLDPSVARLVPGLVPEDYPTLSREYPADFTVDADYKAALPDLQNGPSSLIRGAKQQIQHVGISNFRLPIRFHRKEGEDLTLETSVTGTVSLEAEKKGINMSRIMRSFYKHAERTFSFEVIEAALDDYKSDLESFDARIQMRFSYPVKVESLRSGLSGYQYYDIALELVEQNGVRQKIMHLDYVYSSTCPCSLELSEHARMSRGQLATPHSQRSVARVSVVVDCDADCLWFEDLIALCRRAVPTETQVMVKREDEQAFAELNAANPIFVEDAARSFCAELLADHHVGDFRIIASHQESLHSHDAVSVLTEGPTFAADSLDPKLFNTLFHVG

SEQ ID NO: 14244 - protein, 367 aa, unidentified
  source 1..367: note = Ruegeria meonggei
  REGION 1..367: note = tr|A0A1X6YSY8|A0A1X6YSY8_9RHOB GTP cyclohydrolase FolE2 OS=Ruegeria meonggei OX=1446476 GN=folE2 PE=3 SV=1
MNVQPRDIDDAPDHDEAAAALKTLRKWAETATEAEISQLDPAIARLVPGLASTNYPAFSREYPEGFTVNEAYRASLPDLQNGPSSLIRGAKQQIQHVGISNFRLPIRFHRKDDEDLTLETSITGTVSLEAEKKGINMSRIMRSFYKHAERTFSFEVMEAALDDYMSDLDSFDARIQMRFSYPDRVKSLRSGLEGYQYYDIALELVEQNGVRQKIMHLDYVYSSTCPCSLELSEHARATRGQLATPHSQRSVARISVVVDCDADCLWFEDLIGLCRRAVPTETQVMVKREDEQAFAELNAANPIFVEDAARLFCAELLADHHVGDFRVVASHQESLHSHDAVSVLTKGPTFVSASLDPRLFTTLFHVG

SEQ ID NO: 14245 - protein, 367 aa, Ruegeria pomeroyi
  REGION 1..367: note = sp|Q5LTR1|GCH4_RUEPO GTP cyclohydrolase FolE2; OS = Ruegeria pomeroyi (strain ATCC 700808 / DSM 15171 / DSS-3) OX=246200 GN=folE2 PE=3 SV=1
MNLHPRDIDETPDRDAAAAALAVLRRWASGATSTEISELDPSVARLLPDAALSNYPDLSRQYPEDFTVDATYRAGLPDLQNGPSSLIRGAKQQIQHVGISNFRLPIRFHRKEGDDLTLETSVTGTVSLEAGKKGINMSRIMRSFYKHAERTFSFEVIEAALDDYMTDLDSFDARIQMRFSYPERIESLRSGLSGYQYYDIALELVEQGGERLKIMHLDYVYSSTCPCSLELSEHARSSRGQLATPHSQRSVARLSVVVDGDASCLWFEDLIALCRRAVPTETQVMVKREDEQAFAELNAANPIFVEDAARLFCAELLADHRIGDFRVVASHQESLHSHDAVSVLTEGATFATASLDPRLFATLFHVG

SEQ ID NO: 14246 - protein, 367 aa, unidentified
  source 1..367: note = Ruegeria profundi
  REGION 1..367: note = tr|A0A0X3TW34|A0A0X3TW34_9RHOB GTP cyclohydrolase FolE2 OS=Ruegeria profundi OX=1685378 GN=folE2 PE=3 SV=1
MNVHPRNIDDAPDTDEATAALKTLRKWAQTATEAEISQLDPAIARLVPGLVPMNYPTLSRDYPEGFQVDKAYRATLPDLQNGPSSLIRGAKQQIQHVGISNFRLPIRFHRKHGEDLTLETSVTGTVSLDADKKGINMSRIMRSFYKHAERTFSFEVMEAALDDYLTDLDSFDARLQMRFSYPDRVKSLRSGLEGYQYYDIALELVEQNGVRQKIMHLDYVYSSTCPCSLELSEHARATRGQLATPHSQRSVARISVVLDCDADCLWFEDLIALCRRAVPTETQVMVKREDEQAFAELNAANPIFVEDAARLFCAELLADHHVGDFRVVASHQESLHSHDAVSVLTEGLTFVSASLDPRLFSTLFHVG

SEQ ID NO: 14247 - protein, 367 aa, Ruegeria sp.
  REGION 1..367: note = sp|Q1GF96|GCH4_RUEST GTP cyclohydrolase FolE2; OS = Ruegeria sp. (strain TM1040) OX=292414 GN=folE2 PE=3; SV = 1
MNIHSRDVNETPDRSDAEQALAVLRRWAGEASETEVAQLDPAIARLLPGQELQNYPDLKRQYPDDFDANESYRATLPDLQNGPSSLIRGAKEQIQHVGISNFRLPIRFHTRDNGDLTLETSVTGTVSLDAEKKGINMSRIMRSFYKHAEKVFSFDVMEAALEDYLSDLESGDARLQMRFSFPVKVQSLRSGLSGYQYYDVALELVQMAGQRHRIVHLDYVYSSTCPCSLELSEHARQARGQLATPHSQRSVARISVQMEQDGGCLWFEDLIDHCRRAVPTETQVMVKREDEQAFAELNAANPIFVEDAARLFCEALQSDARVGDFRVVASHQESLHSHDAVSVLTQGTMFAAPSLDPQLFSTLIHRG

SEQ ID NO: 14248 - protein, 367 aa, Ruegeria sp.; identical to SEQ ID NO: 12574
  REGION 1..367: note = tr|B7QX88|B7QX88_9RHOB GTP cyclohydrolase FolE2; OS = Ruegeria sp. R11 OX=439497 GN=folE2 PE=3 SV=1

SEQ ID NO: 14249 - protein, 221 aa, unidentified
  source 1..221: note = Rufibacter immobilis
  REGION 1..221: note = tr|A0A3M9N6F2|A0A3M9N6F2_9BACT GTP cyclohydrolase 1; OS = Rufibacter immobilis OX=1348778 GN=folE PE=3 SV=1
MDRRDWNEEDPEEEHLAGSLDTPLRPDAFDLTDEQKINGIEHHFREIMQLLGLDLEDDSLKGTPRRVAKMYVKEIFDGLNPENRPNARLFENKYGYRQMLVERDITLYSSCEHHFVPIIGKAHVAYIPNEHVIGLSKLNRIVQYYGRRPQVQERLTRQIAQELRDVLKTENVAVYIEADHLCVMSRGVNDVSSSTITSEYSGLFEQEAYRLEFLQAIRHHK

SEQ ID NO: 14250 - protein, 221 aa, unidentified
  source 1..221: note = Rufibacter sp.
  REGION 1..221: note = tr|A0A3M9MKB8|A0A3M9MKB8_9BACT GTP cyclohydrolase 1; OS = Rufibacter sp. R-22-1c-1 OX=2487040 GN=folE PE=3 SV=1
MDRRDWNEEDPAEEHVAGSLDTPLRADAFDLTDEQKIDGIAHHFREIMTLLGLDLEDDSLKGTPRRVAKMYVKEIFDGLNPENRPVARLFENKYGYRQMLVERNITLYSSCEHHFVPIIGKAHVAYIPEGHVIGLSKLNRIVQYFGRRPQVQERLTRQIAQELRDVLKSDNVAVYIEADHLCVMSRGVNDVSSSTITSEYSGLFEQDAYRLEFLQAIRRNG

SEQ ID NO: 14251 - protein, 222 aa, unidentified
  source 1..222: note = Rufibacter sp.
  REGION 1..222: note = tr|A0A127B257|A0A127B257_9BACT GTP cyclohydrolase 1; OS = Rufibacter sp. DG15C OX=1379909 GN=folE PE=3 SV=1
MDRREDNDQDPEEDHMTGSLDTPLRPDAFALTDEQKIEGIEYHFKEIMQLLGLDLEDDSLKGTPRRVAKMYVKEIFDGLKPENRPAARLFENRYGYRQMLVERDITLYSSCEHHFVPIIGKAHVAYIPNEHVIGLSKLNRIVQYFGRRPQVQERLTRQIAQELRDVLKTENVAVLIEADHLCVMSRGVNDVSSSTITSEYSGLFEQEAYRLEFMQAIRHNKS

SEQ ID NO: 14252 - protein, 221 aa, unidentified
  source 1..221: note = Rufibacter tibetensis
  REGION 1..221: note = tr|A0A0P0C808|A0A0P0C808_9BACT GTP cyclohydrolase 1; OS = Rufibacter tibetensis OX=512763 GN=folE PE=3 SV=1
MDRRDWNEEDPEEEHLAGSLDTPLRPDAFDLTDEQKIEGIAHHFREIMQILGLDLEDDSLKGTPKRVAKMYVKEIFDGLNPENRPTARLFENKYGYRQMLVERDITLYSSCEHHFVPIIGKAHVAYIPSEHVIGLSKLNRIVQYFGRRPQVQERLTRQIAQELRDVLKSKNVAVLIEADHLCVMSRGVNDVSSSTITSEYSGLFEQDTYRLEFLQAIRHNK

SEQ ID NO: 14253 - protein, 188 aa, Rugamonas rubra
  REGION 1..188: note = tr|A0A1I4TVT3|A0A1I4TVT3_9GAMM GTP cyclohydrolase 1; OS = Rugamonas rubra OX=758825 GN=folE PE=3 SV=1
MSKEEFSENDWRRLLTSLGEDPDRPGLAETPHRVAKAWKHWTSGYGQDPVELLKAFEDGAEQYNELIVVRGIPVYSHCEHHLAPFFGKATIGYVPNGKIVGLSKLTRLVDCFAKRLQVQERMTIQIANAMMEVLEPKAVGVVVRCRHMCMESRGIRTPGEETITSAMLGELQPNLALRTEFLALAREQ

SEQ ID NO: 14254 - protein, 189 aa, unidentified
  source 1..189: note = Rugosibacter aromaticivorans
  REGION 1..189: note = tr|A0A0C5JLP1|A0A0C5JLP1_9RHOO GTP cyclohydrolase 1; OS = Rugosibacter aromaticivorans OX=1565605 GN=folE PE=3; SV = 1
MELNTEKIGRLVRELLVEIGEDPAREGLLDTPKRVAKALEFLTSGYRTDAKELINGACFTQETSSMVIVKGIEFYSMCEHHMLPFFGHCHIGYIPSGTVFGVSKLARLVDMYARRLQLQERLTEQISNVVMESVNAKGVGVIIEARHLCMMMRGVEKQNSTMVTSSVLGEFRDSFATREEFFSLIGRRT

SEQ ID NO: 14255 - protein, 268 aa, unidentified
  source 1..268: note = Rugosibacter aromaticivorans
  REGION 1..268: note = tr|A0A0C5J7A6|A0A0C5J7A6_9RHOO GTP cyclohydrolase FolE2 OS=Rugosibacter aromaticivorans OX=1565605 GN=folE2; PE = 3 SV=1
MPDQNKAVIPDVQSSEDLRHLPINRVGIKSIRHPFKVLDKSGGVRHTIADFNMYVGLPHNFKGTHMSRFVEILNSHEDEISVESFETMLREMVRRLEAQMGYLEMSFPYFVNKTAPVSGVKSLMDYDVTFIGEILSNGEYRQTIKVLVPVTSLCPCSKKISDRGAHNQRSHVTITATTNTLVWIEDLINIAESQASCELYGLLKRPDEKFVTERAYDNPKFVEDLVRDVASVLNVDQRIDAYSVESENFESIHNHSAYAMIEKDKKAH

SEQ ID NO: 14256 - protein, 274 aa, unidentified
  source 1..274: note = Rugosibacter sp.
  REGION 1..274: note = tr|A0A522YCV9|A0A522YCV9_9RHOO GTP cyclohydrolase FolE2 OS=Rugosibacter sp. OX=1914450 GN=folE2 PE=3 SV=1
MNSRVPMPDQNKAVIPDVQSSEDLRHLPINRVGIKSIRHPFKVLDKSGGVRHTIADFNMYVGLPHNFKGTHMSRFVEILNSHEDEISVESFETMLREMVRRLEAQMGYLEMSFPYFVNKTAPVSGVKSLMDYDVTFIGEILSNGEYRQTIKVLVPVTSLCPCSKKISDRGAHNQRSHVTITATTNTLVWIEDLINIAESQASCELYGLLKRPDEKFVTERAYDNPKFVEDLVRDVASVLNVDQRIDAYSVESENFESIHNHSAYAMIEKDKKAH

SEQ ID NO: 14257 - protein, 189 aa, unidentified
  source 1..189: note = Rugosibacter sp.
  REGION 1..189: note = tr|A0A521KKV2|A0A521KKV2_9RHOO GTP cyclohydrolase 1; OS = Rugosibacter sp. OX=1914450 GN=folE PE=3 SV=1
MELNTEKISRLVRELLVEIGEDPAREGLLDTPQRVAKALEFLTSGYRTDTKELINGACFTQETSSMVIVKDIELYSMCEHHMLPFFGHCHIGYIPSGTVFGVSKLARLVDMYARRLQLQERLTEQISNAVMKAVNAKGAGVIIEARHLCMMMRGVEKQNSTMVTSSVLGEFRNSFATREEFFSLIGRRT

SEQ ID NO: 14258 - protein, 195 aa, unidentified
  source 1..195: note = Ruminiclostridium cellobioparum
  REGION 1..195: note = tr|S0FFV1|S0FFV1_RUMCE GTP cyclohydrolase 1; OS = Ruminiclostridium cellobioparum subsp. termitidis CT1112 OX=1195236 GN=folE PE=3 SV=1
MAVDIKKVQEHIRGILSAIGEDPDREGLKDTPLRVAHMYEEIFEGIGYSNDDIAEMFNKTFEDDLIIPEDNREIVLVKDMDIFSYCEHHLALMYNMKAAIAYIPVGKVLGLSKIARIADMVGKRLQLQERIGSDIAEIMHKITGSEDIAVIIEGKHACMTTRGIKNTGSLTATTTLRGKFNTDSNLVNRLMLLLK

SEQ ID NO: 14259 - protein, 195 aa, unidentified
  source 1..195: note = Ruminiclostridium cellulolyticum
  REGION 1..195: note = sp|B8I184|GCH1_RUMCH GTP cyclohydrolase 1; OS = Ruminiclostridium cellulolyticum (strain ATCC 35319 / DSM 5812 / JCM 6584 / H10) OX=394503 GN=folE PE=3 SV=1
MSIDRKKVEEHIRGLLVAIGENPDREGLKETPSRVAQMYQEVFEGISYTNDEIAEMFNKTFEEDLVIPKDNKEIVLVKDIDIFSYCEHHMALMYNMKVAVAYIPNDKILGLSKIARIADMVGKRLQLQERIGSDIAEIMQKITDSEDVAVIVEGQHACMTTRGIKNTGSRTTTTTLRGAFKTDTNLTNRLMMLYK

SEQ ID NO: 14260 - protein, 264 aa, unidentified
  source 1..264: note = Ruminiclostridium hungatei
  REGION 1..264: note = tr|A0A1V4SI29|A0A1V4SI29_RUMHU GTP cyclohydrolase 1 type 2 OS=Ruminiclostridium hungatei OX=48256; GN = CLHUN_29060 PE=4 SV=1
MKVGEILEYINELAPWGYAESWDNVGLMLGSRQSQVNRILLSMDVTSKVIKEAVDCGAELIVSHHPFFFGKLNRLDFDTMKGRQVQTLVTRNISVISAHTNLDVAEGGVNDTLAETIGLVDPEPLKPYSPSGSKVDLGLGKVGTLKHETEFSSFLASVKAGLNIGSLRIIGAQPEKVQKVGVFCGSFDVELEYLKGLGLDAVITGDIKYHTAADAREMGICILDVGHFASEHVILEELRKKLSGRFEAVEAVCSKMESDPFIFA

SEQ ID NO: 14261 - protein, 194 aa, unidentified
  source 1..194: note = Ruminiclostridium papyrosolvens
  REGION 1..194: note = tr|F1T924|F1T924_9FIRM GTP cyclohydrolase 1; OS = Ruminiclostridium papyrosolvens DSM 2782 OX=588581; GN = folE PE=3 SV=1
MSIDRKKVEEHIRGLLIAIGEDPDREGLKETPSRVARMYEEIFEGISYTNDDIADMYNKTFEDDLVIPKDNKEMVLVKDIDIFSYCEHHMALMYNMKVAVAYVPNGKILGLSKIARIADMVGKRLQLQERIGSDIAEIMQKITDSEDVAIIIEGQHACMTARGIKNTGSRTTTTTFRGKFNTDSNLTKRLMILL

SEQ ID NO: 14262 - protein, 195 aa, unidentified
  source 1..195: note = Ruminiclostridium papyrosolvens
  REGION 1..195: note = tr|U4QXP2|U4QXP2_9FIRM GTP cyclohydrolase 1; OS = Ruminiclostridium papyrosolvens C7 OX=1330534 GN=folE; PE = 3 SV=1
MSIDRKKVEEHIRGLLIAIGEDPDREGLKETPSRVARMYEEIFEGISYTNDEIAEMYNKTFEDDLVIPKDNKEMVLVKDIDIFSYCEHHMALMYNMKVAVAYVPNGKILGLSKIARIADMVGKRLQLQERIGSDIAEITQKITDSEDVAVIIEGQHACMTARGIKNTGSRTTTTTFRGKFNTDTNLTKRLMILYK

SEQ ID NO: 14263 - protein, 187 aa, unidentified; identical to SEQ ID NO: 9054
  source 1..187: note = Ruminiclostridium sp.
  REGION 1..187: note = tr|A0A3B8KN76|A0A3B8KN76_9FIRM GTP cyclohydrolase 1; OS = Ruminiclostridium sp. OX=2053608 GN=folE PE=3 SV=1

SEQ ID NO: 14264 - protein, 194 aa, unidentified
  source 1..194: note = Ruminiclostridium sp.
  REGION 1..194: note = tr|A0A4U7JKV8|A0A4U7JKV8_9FIRM GTP cyclohydrolase 1; OS = Ruminiclostridium sp. MA18 OX=2488810 GN=folE PE=3 SV=1
MIDRAKIEEHIRGILLAIGENPNREGLVDTPARVAKMYEEIFEGIGYTNNEIAEMFNKTFEEDLEIPEDNKEMVIMKDIEIFSYCEHHLALMYNMKATIAYIPNKKIIGLSKIARIADMVSRRLQLQERIGSDIAEIMQKVTGSEDVAVIIEGQHACMTARGIKNTKAVTKTTTLRGKFESDDSINSKLFMMLK

SEQ ID NO: 14265 - protein, 195 aa, unidentified
  source 1..195: note = Ruminiclostridium sufflavum
  REGION 1..195: note = tr|A0A318Y556|A0A318Y556_9FIRM GTP cyclohydrolase 1; OS = Ruminiclostridium sufflavum DSM 19573 OX=1121337; GN = folE PE=3 SV=1
MINKEKIEEHIKGILLAIGENPDREGLADTPARVAKMYEEIFEGIGYSNNEIAERFNKTFEEDLTIPDNNKEIVIMKDIEIFSYCEHHLALMYNMRVAIAYIPCGKIIGLSKIARIADMVSKRLQLQERIGSDIAEIMQKVTGSEDVAVIIEGQHACMTARGIKSTKAVTATTTLRGKFDTDGDIASKLFIMLGR

SEQ ID NO: 14266 - protein, 189 aa, unidentified
  source 1..189: note = Ruminococcaceae bacterium
  REGION 1..189: note = tr|A0A1G4W4A3|A0A1G4W4A3_9FIRM GTP cyclohydrolase 1; OS = Ruminococcaceae bacterium P7 OX=1200751 GN=folE PE=3; SV = 1
MDTKKIEEHVLGILEAIGEDPNREGLRETPARVARMLEEVLEGTAYSNHEIAEMFGKTFTEESIKDSENAVVIKDITVFSYCEHHLALMYDMHVNVAYVPHGRVLGLSKIARICDMAAKRLQLQERLGRDIAEIISEAAGTTDVGVMIRGCHSCMTARGIKNVSANTVTATYIGAFRDNAELKQLVKFD

SEQ ID NO: 14267 - protein, 186 aa, unidentified
  source 1..186: note = Ruminococcaceae bacterium
  REGION 1..186: note = tr|A0A351EGB8|A0A351EGB8_9FIRM GTP cyclohydrolase 1; OS = Ruminococcaceae bacterium OX=1898205 GN=folE PE=3 SV=1
MDLERIEKAVREILLAVGEDPEREGLQETPNRVARMYAEIFSGLKSDPKQHLKIFHEEGEHDELVFVRDIPLYSVCEHHLLPFIGKCHIAYIPRDGKIIGLSKFARIVDCFARRPQVQERLTAQIADFIEENLNPRGVAVFIEAEHLCMTMRGARAAGALTQTSALRGCMRTEAKTRNEVMLLLAK

SEQ ID NO: 14268 - protein, 186 aa, Ruminococcus albus
  REGION 1..186: note = tr|A0A011UEB3|A0A011UEB3_RUMAL GTP cyclohydrolase 1; OS = Ruminococcus albus SY3 OX=1341156 GN=folE PE=3 SV=1
MDKEKIMFHIKGLLEAIGEDPEREGLKETPARVANMLAEVLEGTAYTNHEIAEMFGKTFTSEDIDADEAIIMKDITVFSYCEHHMALMYDMTVNVGYIPRGKVLGLSKIARICEMAAKRLQLQEKLGRDIAEIISEAAGTPDVGVKISGCHSCMTARGIKNASSHTETRTYLGTFKTDSDLKKLLD

SEQ ID NO: 14269 - protein, 186 aa, Ruminococcus albus
  REGION 1..186: note = tr|E9S9P2|E9S9P2_RUMAL GTP cyclohydrolase 1; OS = Ruminococcus albus 8 OX=246199 GN=folE PE=3 SV=1
MDREKIEYHIRGLLEAIGEDPDREGLKETPARVARMMEEVLEGTKYSNHEIAQMFSKTFAEEGSSADEAVVMKDITVFSYCEHHMALMYDMTVNVGYIPHGKVLGLSKIARICDMAAKRLQLQERLGRDIAEIISEAAGTPDVGVKIVGSHSCMTARGIKNVSARTETRTYLGQFKERQELKDMLI

SEQ ID NO: 14270 - protein, 186 aa, Ruminococcus callidus
  REGION 1..186: note = tr|U2K9L0|U2K9L0_9FIRM GTP cyclohydrolase 1; OS = Ruminococcus callidus ATCC 27760 OX=411473 GN=folE PE=3; SV = 1
MDTKAIETHIRGILEAIGEDPDREGLRETPQRVARMYEEIFAGISYSNHEIAEMFGKTFEAPSPSQSQTAVVMKDISVFSYCEHHMALMYDMNVNVAYVPRGRVIGLSKIARICDMASKRLQLQERLGQDIAEILMEAVGTPDVGVVITGSHSCMTARGIRNVSSRTTTKTFCGAFQTDRSLQELL

SEQ ID NO: 14271 - protein, 183 aa, Ruminococcus champanellensis
  REGION 1..183: note = tr|D4L9T8|D4L9T8_RUMC1 GTP cyclohydrolase 1; OS = Ruminococcus champanellensis (strain DSM 18848 / JCM 17042 / KCTC 15320 / 18P13) OX=213810 GN=folE PE=3 SV=1
MDAEKIRQGVRLLLEGIGEDPEREGLRDTPDRVARMYAELFAGYADSASTHLSTTFASPDSEMVLEKDITFYSTCEHHLLPFFGKVHIAYIPDGRVVGISKLARTVEVFARRLQIQEQMTAQIADALMAELHPKGAMVAVDAEHTCMTMRGIKKPGTRTLTYCSRGAFAKDPELKREFFSLVR

SEQ ID NO: 14272 - protein, 189 aa, Ruminococcus flavefaciens
  REGION 1..189: note = tr|A0A1H6KTZ5|A0A1H6KTZ5_RUMFL GTP cyclohydrolase 1; OS = Ruminococcus flavefaciens OX=1265 GN=folE PE=3 SV=1
MDREAIEYHVLGILKAIGEDPEREGLKETPARVARMLEEVLEGTAYTNHQIAEMFGKTFEADYDADMDSAVVMKDITVFSYCEHHIALMYDMSVNVAYIPHGKVLGLSKIARICDMAAKRLQLQERLGRDIAEIISEAAGTPDVGVMIRGSHSCMTARGIRNPNAKTVTGTFMGAFRDSAELKDLVKFD

SEQ ID NO: 14273 - protein, 184 aa, Ruminococcus flavefaciens
  REGION 1..184: note = tr|W7UKV8|W7UKV8_RUMFL GTP cyclohydrolase 1; OS = Ruminococcus flavefaciens 007c OX=1341157 GN=folE PE=3; SV = 1
MDTKAIELHIKGILEALGEDPEREGLKETPQRVARMMEEVFEGIGYTNHEIARMFGKTFEAADDSTAVVMKDITVFSYCEHHMALMYDMTVDVAYIPRGRVLGLSKIARICDMAAKRLQLQERLGSDIAEIIAEASGSPDVGVVIKGSHSCMTARGIRNPSSRTVTKTWRGEFRNDPELRKLLD

SEQ ID NO: 14274 - protein, 186 aa, Ruminococcus gnavus
  REGION 1..186: note = tr|A0A415S6D5|A0A415S6D5_RUMGN GTP cyclohydrolase 1; OS = Ruminococcus gnavus OX=33038 GN=folE PE=3 SV=1
MIDQEKVKKAVRLLLEGIGEDADREGLIETPDRIARMCEEIYGGYEEDAKEHLCKTFHVENSDMVVEKDITFYSMCEHHLLPFYGKAHIAYIPDGKVAGLSKLARTVEVFARRLQLQEQLTGQIADALMNELKAKGAAVVIEAEHMCMTMRGIKKPGSRTVTFAKRGLFETDPALEERFFRMLERG

SEQ ID NO: 14275 - protein, 253 aa, Ruminococcus gnavus
  REGION 1..253: note = tr|A0A415S9D3|A0A415S9D3_RUMGN GTP cyclohydrolase FolE2 OS=Ruminococcus gnavus OX=33038 GN=folE2 PE=3 SV=1
MIDIQKSLENRGIFLDKVGIRGFQRPIQLQIGTEVCPTVANLNAYVSLKADERAIHMSRLIEILQMWDGTVNNQTILHLLSSMRKRLESDNSYLEIMFPYFMKKSAPVSQKIGFMNYDCIISARLNHEQVHFDITVITQITSVCPCSKAISQYGAHNQRGKVKVKINDFDICDLKKVIEIIEESGSSQLYSVLKRKDEKFVTEAAFNSPKFVEDIARDVNINIKNKTNWNISDLSVENYESIHNHNAYSEICR

SEQ ID NO: 14276 - protein, 189 aa, Ruminococcus lactaris
  REGION 1..189: note = tr|V8BL86|V8BL86_9FIRM GTP cyclohydrolase 1; OS = Ruminococcus lactaris CC59_002D OX=1073376 GN=folE PE=3; SV = 1
MIDTKAIEEHIRGILVALGDDPEREGLKDTPKRVAKMYEEVFLGMNYSNHEIAQMFDKTFEDGIEELDTSKVVVMKDIDLFSYCEHHMALMYDMKATVAYIPNGKVIGLSKIARICDMVGRRLQLQERIGQDIADIMAEITGSEDVAVVLEGYHSCVSARGIKKNNTRTMTVELRGSFKDDAALQMYLR

SEQ ID NO: 14277 - protein, 185 aa, Ruminococcus lactaris
  REGION 1..185: note = tr|A0A3E4LPQ0|A0A3E4LPQ0_9FIRM GTP cyclohydrolase 1; OS = Ruminococcus lactaris OX=46228 GN=folE PE=3 SV=1
MIDHEKIEQAVRLLLEGIGEDVNREGLLETPDRIARMYEEIYGGMEEDAGIHLSKTFTVESREMVIEKDITFYSTCEHHLLPFYGKAHIAYIPDGKVVGLSKLARTVEVFARRLQLQEQLTGQIADALMEYMQPKGALVMIEAEHMCMTMRGIKKPGSQTVTLARRGVFETDPSLEERFFRMLGR

SEQ ID NO: 14278 - protein, 185 aa, Ruminococcus obeum; identical to SEQ ID NO: 5599
  REGION 1..185: note = tr|R7D7Y6|R7D7Y6_9FIRM GTP cyclohydrolase 1; OS = Ruminococcus obeum CAG:39 OX=1263107 GN=folE PE=3 SV=1

SEQ ID NO: 14279 - protein, 185 aa, Ruminococcus sp.; identical to SEQ ID NO: 5605
  REGION 1..185: note = tr|A0A417L5P4|A0A417L5P4_9FIRM GTP cyclohydrolase 1; OS = Ruminococcus sp. TM09-4 OX=2293244 GN=folE PE=3 SV=1

SEQ ID NO: 14280 - protein, 185 aa, Ruminococcus sp.
  REGION 1..185: note = tr|A0A416J194|A0A416J194_9FIRM GTP cyclohydrolase 1; OS = Ruminococcus sp. AM54-14NS OX=2293225 GN=folE PE=3 SV=1
MVDKAKIEQAVRLLLEGIGEDITREGLIDTPDRIARMCEEIYGGLGHEADQHLLKQFPVENNEIVLEKDITFYSMCEHHLMPFYGKAHLAYIPNGKVTGLSKLARTVEVYSRRPQIQERLTVQIADALERTLDPKGIMVMLEAEHTCMTMRGIKKPGSKTITTVTRGAFTEDKELQKMFLSMVKG

SEQ ID NO: 14281 - protein, 185 aa, unidentified
  source 1..185: note = [Ruminococcus] torques
  REGION 1..185: note = tr|D4M1W6|D4M1W6_9FIRM GTP cyclohydrolase 1; OS = [Ruminococcus] torques L2-14 OX=657313 GN=folE PE=3 SV=1
MIDHEKVEQAVRLLLEGIGEDVNREGLIDTPDRIARMYEEIYGGMEEDAGVHLMKTFTVESSEMVIEKDITFYSTCEHHLLPFYGKAHIAYIPDGKVVGLSKLARTVEVFARRLQLQEQLTGQIADALMEYMQPKGALVMVEAEHMCMTMRGIKKPGSQTVTLARRGVFETDPTLEERFFRMLGR

SEQ ID NO: 14282 - protein, 186 aa, unidentified
  source 1..186: note = [Ruminococcus] torques
  REGION 1..186: note = tr|A0A174A061|A0A174A061_9FIRM GTP cyclohydrolase 1; OS = [Ruminococcus] torques OX=33039 GN=folE PE=3 SV=1
MIDQEKVKKAVRLLLEGIGEDADREGLIETPDRIARMCEEIYGGYEEDAKEHLCKTFHVENSDMVVEKDITFYSMCEHHLLPFYGKAHIAYIPDGKVAGLSKLARTVEGFARRLQLQEQLTGQIADALMNELKAKGAAVVIEAEHMCMTMRGIKKPGSRTVTFAKRGLFETDPALEERFFRMLERG

SEQ ID NO: 14283 - protein, 202 aa, Rummeliibacillus sp.
  REGION 1..202: note = tr|A0A3N5ZQC8|A0A3N5ZQC8_9BACL GTP cyclohydrolase 1; OS = Rummeliibacillus sp. TYF005 OX=2058214 GN=folE PE=3 SV=1
MLIEKNFEKIDQVSTDVDLKKIETAVTMILEAVGENPLREGLLDTPKRVAKMYAEMFQGLHEDPRQYFETVFHEGHDELVLVKDIPFYSMCEHHLVPFYGKAHIAYIPQNGVVAGLSKLARTVETVSHRPQLQERITGTIADTLMEMLNPKGVYVVVEAEHMCMTMRGIKKPGAKTVTSVAKGIFEEDEVKRSEILSFIQMS

SEQ ID NO: 14284 - protein, 201 aa, Rummeliibacillus stabekisii
  REGION 1..201: note = tr|A0A511BV06|A0A511BV06_9BACL GTP cyclohydrolase 1; OS = Rummeliibacillus stabekisii OX=241244 GN=folE PE=3 SV=1
MINIKEEKIDHSNSNVDLNKIEQAVKMILEAVGENPDREGLLDTPKRVAKMYAEMFQGLHIDAREYFKTVFHEEHNEVVLVKDIPFYSMCEHHLVPFYGKAHIAYLPKDGVVAGLSKLARTVETISHRPQLQERITSEIAETMMEMLEPEGVYVVVEAEHMCMTMRGIKKPGAKTVTSSAKGIFSEDDVKRQEILSFIKMA

SEQ ID NO: 14285 - protein, 201 aa, Rummeliibacillus stabekisii
  REGION 1..201: note = tr|A0A143HAW6|A0A143HAW6_9BACL GTP cyclohydrolase 1; OS = Rummeliibacillus stabekisii OX=241244 GN=folE PE=3 SV=1
MINIKEEKIDHSNSNVDLNKIEQAVKMILEAVGENPDREGLLDTPKRVAKMYAEMFQGLHIDARDYFKTVFHEEHNEVVLVKDIPFYSMCEHHLVPFYGKAHIAYLPKGGVVAGLSKLARTVETISHRPQLQERITSEIAETMMEMLEPEGVYVVVEAEHMCMTMRGIKKPGAKTVTSSAKGIFSEDDVKRQEILSFIKMA

SEQ ID NO: 14286 - protein, 232 aa, Runella sp.
  REGION 1..232: note = tr|A0A3C1THV6|A0A3C1THV6_9BACT GTP cyclohydrolase 1; OS = Runella sp. OX=1960881 GN=folE PE=3 SV=1
MKQNETLWNTLPNHADLGELNIDDWGDDHLFSAYNTPLREDAFELSDVEKVAKIEGHFRAIMETLGLDLTDDSLNGTPHRVAKMYVKELFSGLNPANKPKATLFENKYKYNEMLVEKDISFYSNCEHHFVPIFGKAHVAYISSGKVIGLSKLNRIVQYFAKRPQVQERLTVQIAKELQQILQTEDVAIIMDAKHLCVASRGVQDDSSSTVTAFYGGKFQEDSTKSEFLKYLA

SEQ ID NO: 14287 - protein, 231 aa, Runella sp.
  REGION 1..231: note = tr|A0A344TRI5|A0A344TRI5_9BACT GTP cyclohydrolase 1; OS = Runella sp. HYN0085 OX=2259595 GN=folE PE=3 SV=1
MKPNETLWNTPREAADFVDLNIDEWGDDHSLSAYDTPMREDAFELSDVEKVAKIELHFKEIMETLGLDLTDDSLKGTPHRVAKMYVKEIFSGLNPKNKPKATLFENKYNYNEMLVEKDISFYSNCEHHFVPIFGKAHVAYISSGKVIGLSKLNRIVQYFAKRPQVQERLTVQIGKELQQILQTEDVAVVMDAKHLCVASRGIQDDTSTTITSFYGGKFKEDATKNEFLKYL

SEQ ID NO: 14288 - protein, 264 aa, unidentified
  source 1..264: note = Ruthia magnifica
  REGION 1..264: note = sp|A1AVX5|GCH4_RUTMC GTP cyclohydrolase FolE2; OS = Ruthia magnifica subsp. Calyptogena magnifica OX=413404; GN = folE2 PE=3 SV=1
MSAIHLPDTQNSADTRQIIIDKVGIKDITHPITYIDCDGNKIPTIGIFTMTVSLSERVKGTHMSRFIEILNEGPCEFSAHNFDKIIDKVRKRLESDIAHITLNFTFFRRKKAPSSGVESMMDYQVTLYGTLNKDEVQVMMKVVVPVTSLCPCSKSISKYGAHNQRSHITIKAKAAKDKTLHIEDLIDLAERKASCELYAILKRDDEKVVTERAYDNPAFVEDLVRDIAVDLNADDKISYYRLESENFESIHNHSAYALIENQKC

SEQ ID NO: 14289 - protein, 197 aa, Saccharibacillus sp.
  REGION 1..197: note = tr|A0A209DIB1|A0A209DIB1_9BACL GTP cyclohydrolase 1; OS = Saccharibacillus sp. O16 OX=1978120 GN=folE PE=3 SV=1
MSGVNDYTNKQVGDNREQIEHHIAKILELIGENPQREGLLETPARVTRMYEEIFAGYSVDPREALGVTFDEHHEELVIVKDIVYYSQCEHHMAPFFGKIHIGYIPNGRIAGLSKFARLAEAVTRRLQVQERITTQIADLLVEVLQPKGVMVVVEGEHLCMCARGVKKPGSKTVTTAVRGVLRNDAAQRAECLALIKD

SEQ ID NO: 14290 - protein, 306 aa, Saccharibacillus sp.
  REGION 1..306: note = tr|A0A254NM38|A0A254NM38_9BACL GTP cyclohydrolase FolE2 OS=Saccharibacillus sp. O23 OX=2009338 GN=folE2 PE=3; SV = 1
MPHPSFPSKKERHRRFGSVPPTPGSKATRKEDMTDLQNALDDYLFDIQSVGVAAVKHPILFLSPLAPYEQMPIATLELTTTLDRSSKGINMSRLTEQLEMYRDFDFTSDSGKLGQFARDLAQNMNQRGATVKLAFPWFYERTAPESGQTGLAYCDLYMEMSYEQGIESPFRLTVGLDASVTTLCPCSKEISEYGAHNQRGTVHIRTEVDLKQFHENWCQVLLDAAESNASSMLYPILKRTDEKKVTERAYENPRFVEDLARLVAADLIECPFARQFTVECRNEESIHQHNAIARIVWTEEDQKRRY

SEQ ID NO: 14291 - protein, 213 aa, Saccharibacter sp.; identical to SEQ ID NO: 12369
  REGION 1..213: note = tr|A0A060QFD8|A0A060QFD8_9PROT GTP cyclohydrolase 1; OS = Saccharibacter sp. AM169 OX=1343158 GN=folE PE=3 SV=1

SEQ ID NO: 14292 - protein, 190 aa, Saccharomonospora azurea
  REGION 1..190: note = tr|H0K9I0|H0K9I0_9PSEU GTP cyclohydrolase 1; OS = Saccharomonospora azurea SZMC 14600 OX=1114959 GN=folE; PE = 3 SV=1
MFDQERAERAVRELLLACGEDPDRDGLRETPARVARAYREMFAGLYSDPDHVLDRTFDESHEELVLVTDIPMFSLCEHHLTPFHGVAHVGYIPNGQGKVTGLSKLGRLVDLYAKRPQVQERLTSQVADALNRRLRPRGVIVVMEAEHLCMSMRGVRKPGARTITSAVRGLLQTSASSRAEALELIKGGRR

SEQ ID NO: 14293 - protein, 211 aa, Saccharomonospora azurea
  REGION 1..211: note = tr|H8G5P4|H8G5P4_9PSEU GTP cyclohydrolase 1; OS = Saccharomonospora azurea NA-128 OX=882081 GN=folE PE=3; SV = 1
MTGNGYSPLEVDAELPRAGHAVFDQERAERAVRELLLACGEDPDRDGLRETPARVARAYREMFAGLYSDPDHVLDRTFDESHEELVLVTDIPMFSLCEHHLTPFHGVAHVGYIPNGQGKVTGLSKLGRLVDLYAKRPQVQERLTSQVADALNRRLRPRGVIVVMEAEHLCMSMRGVRKPGARTITSAVRGLLQTSASSRAEALELIKGGRR

SEQ ID NO: 14294 - protein, 217 aa, Saccharomonospora cyanea
  REGION 1..217: note = tr|H5XK68|H5XK68_9PSEU GTP cyclohydrolase 1; OS = Saccharomonospora cyanea NA-134 OX=882082 GN=folE PE=3; SV = 1
MIGEGRDVTGNGHSPLGVDAELPRAGHAVFDQERAERAIRELLLACGEDPERDGLRETPARVARAYREMFAGLYTEPDHVLDRTFDESHEELVLVTDIPMFSLCEHHLTPFHGVAHIGYIPNGQGKVTGLSKLARLVDLYAKRPQVQERLTSQVADALNRKLRPRGVIVVIEAEHLCMSMRGVRKPGARTTTSAVRGLLQTSASSRAEALQLIKGRR

SEQ ID NO: 14295 - protein, 217 aa, Saccharomonospora glauca
  REGION 1..217: note = tr|I1D772|I1D772_9PSEU GTP cyclohydrolase 1; OS = Saccharomonospora glauca K62 OX=928724 GN=folE PE=3 SV=1
MIGEGSDVRANGHSPLEVDAELPRSGHAVFDQERAERAIRELLLACGEDPEREGLRETPARVARAYREMFAGLYTDPDHVLDRTFDESHEEMVLVTDIPMFSLCEHHLTPFHGVAHVGYIPNGQGKVTGLSKLARLVDLYAKRPQVQERLTSQVADALNRKLRPRGVIVVIEAEHLCMSMRGVRKPGARTTTSAVRGLLQTSASSRAEALQLIKGRR

SEQ ID NO: 14296 - protein, 215 aa, Saccharomonospora marina
  REGION 1..215: note = tr|H5X6L2|H5X6L2_9PSEU GTP cyclohydrolase 1; OS = Saccharomonospora marina XMU15 OX=882083 GN=folE PE=3; SV = 1
MSVSELEHSGQAGRLAVAGRRGPRVAGERAEPDLAAAERAVADLLLALGKDPDSEHLADTPRRVASSYAELLRPREFELTTFGNDEGYDELVVARDIPVQSLCEHHLLPFRGVAHIGYLPGERILGLSKLARVIELFARDLQVQERLTKQVADWLQQRLAPNGVGVVIEAEHLCMSLRGVRAQGALTVTSALHGALREDAASREEFFALTLRHTR

SEQ ID NO: 14297 - protein, 217 aa, Saccharomonospora marina
  REGION 1..217: note = tr|H5X225|H5X225_9PSEU GTP cyclohydrolase 1; OS = Saccharomonospora marina XMU15 OX=882083 GN=folE PE=3; SV = 1
MTGKGSDVSGNGHGFLDVDAELPRVEGRVFDQARAERAVRELLLACGEDPDRDGLRETPARVARAYREMFAGLYSEPDHVLDRTFDESHEELVLVTDIPMFSMCEHHLTPFHGVAHVGYIPNGQGKVTGLSKLARLVDLYAKRPQVQERLTSQVADALYRKLRPRGVIVVIEAEHLCMAMRGIRKPGARTTTSAVRGLLQSSASSRAEALDLIKGRR

SEQ ID NO: 14298 - protein, 232 aa, Saccharomonospora sp.
  REGION 1..232: note = tr|A0A4P7CC03|A0A4P7CC03_9PSEU GTP cyclohydrolase 1; OS = Saccharomonospora sp. 31sw OX=2528243 GN=folE PE=3 SV=1
MIGEGSDVSDVSDVSDVPDVTGGTGNGYSPFEVDAELPRAGHAVFDEERAERAVRELLLACGEDPERDGLRETPARVARAYREMFAGLYTDPDHVLDRTFDESHEELVLVTDIPMFSLCEHHLTPFHGVAHVGYIPNGQGKVTGLSKLARLVDLYAKRPQVQERLTSQVADALNRKLRPRGVIVVIEAEHLCMSMRGVRKPGARTTTSAVRGLLQTSASSRAEALELIKGRR

SEQ ID NO: 14299 - protein, 214 aa, Saccharomonospora sp.
  REGION 1..214: note = tr|A0A1V9A706|A0A1V9A706_9PSEU GTP cyclohydrolase 1; OS = Saccharomonospora sp. LRS4.154 OX=1962155 GN=folE PE=3; SV = 1
MTGDVTGNGHSPLEVDAELPRTGHAVFDQARAEHAIRELLLACGEDPERDGLRETPGRVARAYREMFAGLYSDPDHVLDRTFDESHEELVLVTDIPMYSLCEHHLTPFHGVAHVGYIPNGQGKVTGLSKLARLVDLYAKRPQVQERLTSQVADALNRKLRPRGVIVVVEAEHLCMAMRGVRKPGARTTTSAVRGLLQTSASSRAEALDLIKGRR

SEQ ID NO: 14300 - protein, 222 aa, Saccharomonospora viridis
  REGION 1..222: note = tr|C7MQJ3|C7MQJ3_SACVD GTP cyclohydrolase 1; OS = Saccharomonospora viridis (strain ATCC 15386 / DSM 43017 / JCM 3036 / NBRC 12207 / P101) OX=471857 GN=folE; PE = 3 SV=1
MIGEGSDVTTNGSSPLEVDPFEVDAERPEAGHAVFDQERAERAVREFLLACGEDPDRDGLRETPARVARAYRELFAGLYCDPDHVLDRTFDESHEELVLVTDIPIFSLCEHHLLPFHGVAHVGYIPNGQGKVTGLSKLARLVDMYAKRPQVQERLTSQVADALNRKLRPRGVIVVVEAEHLCMSMRGVRKPGSRTTTSAVRGLLQSSASSRAEALELIKGRR

SEQ ID NO: 14301 - protein, 215 aa, Saccharomonospora viridis
  REGION 1..215: note = tr|A0A1I5RSZ4|A0A1I5RSZ4_9PSEU GTP cyclohydrolase 1; OS = Saccharomonospora viridis OX=1852 GN=folE PE=3 SV=1
MTTNGSSPLEVDPFEVDAERPEAGHAVFDQERAERAVREFLLACGEDPDRDGLRETPARVARAYRELFAGLYCDPDHVLDRTFDESHEELVLVTDIPIFSLCEHHLLPFHGVAHVGYIPNGQGKVTGLSKLARLVDMYAKRPQVQERLTSQVADALNRKLRPRGVIVVVEAEHLCMSMRGVRKPGSRTTTSAVRGLLQSSASSRAEALELIKGRR

SEQ ID NO: 14302 - protein, 235 aa, Saccharomonospora xinjiangensis
  REGION 1..235: note = tr|I0V3P5|I0V3P5_9PSEU GTP cyclohydrolase 1; OS = Saccharomonospora xinjiangensis XJ-54 OX=882086 GN=folE; PE = 3 SV=1
MIGEGSDVSDVSDVADVADVTGGTGGTGNGYSPFEVDAELPRAGRAVFDQERAERAVRELLLACGEDPERDGLRETPARVARAYREMFAGLYTDPDHVLDRTFDESHEELVLVTDIPMFSLCEHHLTPFHGVAHVGYIPNGQGKVTGLSKLARLVDLYAKRPQVQERLTSQVADALNRKLRPRGVIVVIEAEHLCMSMRGVRKPGARTTTSAVRGLLQTSASSRAEALELIKGRR

SEQ ID NO: 14303 - protein, 179 aa, Saccharophagus degradans
  REGION 1..179: note = tr|Q21IX6|Q21IX6_SACD2 GTP cyclohydrolase 1; OS = Saccharophagus degradans (strain 2-40 / ATCC 43961 / DSM 17024) OX=203122 GN=folE PE=3 SV=1
MKEYFAKIIESVGEDLTRPGLLDTPQRAATAMEFLTSGYKQTLDEVVNDALFPSDSNDMVIVKDIELFSMCEHHMLPFIGKAHVGYIPTGKVLGLSKIARIVDMYSRRLQIQEQLTKQIAETIQSVTGAAGVGVIIEAKHLCMMMRGVEKQNSSMRTSSMMGCFRSNLSTRSEFLSLLK

SEQ ID NO: 14304 - protein, 199 aa, Saccharopolyspora antimicrobica
  REGION 1..199: note = tr|A0A1I4U155|A0A1I4U155_9PSEU GTP cyclohydrolase 1; OS = Saccharopolyspora antimicrobica OX=455193 GN=folE PE=3; SV = 1
MTSAPALRVAHEPAGEIDLGAAERAAGDLLRALGISTDSESLRGTPGRMARAYAELFTPRPFDLTTFPNDEGYDELVLARAIPVRSVCEHHLLPFVGTAHVGYLPGERILGLSKLARVVEHFSCRPQVQERLTKQVADWLCEHLRPQGVGVVIEAEHTCMTLRGVQATGSSTVTSTLLGTLRSDARSRQEFFALTGVNA

SEQ ID NO: 14305 - protein, 212 aa, Saccharopolyspora antimicrobica
  REGION 1..212: note = tr|A0A1I5G4X9|A0A1I5G4X9_9PSEU GTP cyclohydrolase 1; OS = Saccharopolyspora antimicrobica OX=455193 GN=folE PE=3; SV = 1
MTSSVDEPIGTGDDSRPDGSFHAPQFDHARAEAAVRELLLAAGEDPEREGLRDTPARVARAYQELFAGLYTNPDEVLDKTFDEAHEELVLVRDIPVYSQCEHHLLPFHGYAHVGYIPNEKGRVTGLSKLARLVDLYAKRPQVQERLTSQIADALVRRLEPRGVIVVIDAEHLCMGMRGVRKAGSTTTTSAVRGQFRSSASSRSEALSLIRGR

SEQ ID NO: 14306 - protein, 535 aa, unidentified
  source 1..535: note = Saccharopolyspora dendranthemae
  REGION 1..535: note = tr|A0A561TZ39|A0A561TZ39_9PSEU GTP cyclohydrolase 1; OS = Saccharopolyspora dendranthemae OX=1181886 GN=folE PE=3; SV = 1
MTNTVDEPIGAGDSRPDGSFHIPQFDQARAEAAVRELLLAAGENPERDGLKETPQRVARAYRELFAGLYTDPDEVLDKTFDEAHEELVLVRDIPVYSQCVPSKQTVNLVGGAKRARDVQLGDRFWTLVDGKVEQTEVVGVSSHEKRELVEVVTEKGRFQVTPDHPLATPQGWQEAKDVEGTYIEWTPPRKLCRQRWQPMVGYEFGYVLGALCSDGTVGDTCVSLVVNDRDFAKQFAYALDQAFGINASIEEVERPSGYLQRQVEGFRVRVVSSYLADLVRQYVGGDAHHQRQRFPRVVMSNEITFRGFLNGYVDGDGFRSKSGRGRMLTSMNAGFLADVAQVLGARFTQKSPDVSRLWVADDWPLRHGFSQESHRTDLIESQWVKVESVQRLEANGAKPYTVYSYKCEPHPTFLISGHLTHNCEHHLLPFHGNAHIGYIPNSQGRVTGLSKLARLVDLYAKRPQVQERLTSQVADALVRKLEPRGVIVVIDAEHLCMGMRGVRKAGSTTTTSAVRGIFRSSASSRSEALSLIRGR

SEQ ID NO: 14307 - protein, 199 aa, unidentified
  source 1..199: note = Saccharopolyspora dendranthemae
  REGION 1..199: note = tr|A0A561V797|A0A561V797_9PSEU GTP cyclohydrolase 1; OS = Saccharopolyspora dendranthemae OX=1181886 GN=folE PE=3; SV = 1
MTHSTALRVVHQPDTGIDLEAAERAAGQLLRALGISTDSESLSGTPGRIARAYAELFTPRPFDLTTFPNDEGYDEMVLARSIPVRSVCEHHLLPFVGVAHVGYLPGERILGLSKLARIVEHFACRPQVQERLTKQVADWLSEHLQPKGVGVVIEAEHTCMTLRGARATGASTVTSTLLGTLRDDARSRQEFFSLTGVHR

SEQ ID NO: 14308 - protein, 198 aa, Saccharopolyspora erythraea
  REGION 1..198: note = tr|A4FIT5|A4FIT5_SACEN GTP cyclohydrolase 1; OS = Saccharopolyspora erythraea (strain ATCC 11635 / DSM 40517 / JCM 4748 / NBRC 13426 / NCIMB 8594 / NRRL 2338); OX = 405948GN=folE2 PE=3 SV=1
MSAPALHVVHQPEAEIDLAAAEKAAADMLRALGISTDSESLRGTPGRMARAYAELFSPRPFDLTTFPNEEGYDELVLARSIPVRSVCEHHLLPFVGTAHVGYLPGERILGLSKLARVVEHFACRPQVQERLTKQVADWLSEQLEPKGVGVVIEAEHTCMTLRGVQATGSNTVTSTMLGTLRQDARSRQEFFALTGVNA

SEQ ID NO: 14309 - protein, 213 aa, Saccharopolyspora erythraea
  REGION 1..213: note = tr|A4F6S1|A4F6S1_SACEN GTP cyclohydrolase 1; OS = Saccharopolyspora erythraea (strain ATCC 11635 / DSM 40517 / JCM 4748 / NBRC 13426 / NCIMB 8594 / NRRL 2338); OX = 405948GN=folE PE=3 SV=1
MTSTVGEPVGPEEDSGPGRSAFHNPVFDQERAEAAIRELLLAAGEDPDREGLRETPARVARAYRELFAGLYTDPDQVLDRTFDEAHEELVLVREIPMYSQCEHHLLPFHGVAHVGYIPNEKGRVTGLSKLARLVDLYAKRPQVQERLTSQVADALMRRLEPRGVIVVIEAEHLCMGMRGIRKAGSMTTTSAVRGIFRSSASSRSEALSLIRGT

SEQ ID NO: 14310 - protein, 211 aa, Saccharopolyspora flava
  REGION 1..211: note = tr|A0A1I6QXG9|A0A1I6QXG9_9PSEU GTP cyclohydrolase 1; OS = Saccharopolyspora flava OX=95161 GN=folE PE=3 SV=1
MTNAVDEPIGAGDSRPDGSFHMPQFDQARAEAAIRELLIAAGEDPDRDGLRETPQRVARAYRELFAGLYTNPDEVLDKTFDEAHEELVLVRDIPVYSQCEHHLLPFHGTAHIGYIPNEQGRVTGLSKLARLVDLYAKRPQVQERLTSQVADALVRRLEPRGVIVVIDAEHLCMGMRGVRKAGSTTTTSAVRGIFRSSASSRSEALSLIRGR

SEQ ID NO: 14311 - protein, 212 aa, Saccharopolyspora hirsuta
  REGION 1..212: note = tr|A0A1H6ELG9|A0A1H6ELG9_SACHI GTP cyclohydrolase 1; OS = Saccharopolyspora hirsuta OX=1837 GN=folE PE=3 SV=1
MTSSVDEPIGAGGDSRPDGSFHAPQFDHARAEAAVRELLLAAGEDPEREGLRDTPARVARAYQELFAGLYTNPDEVLDKTFDEAHEELVLVRDIPVYSQCEHHLLPFHGYAHVGYIPNEKGRVTGLSKLARLVDLYAKRPQVQERLTSQVADALVRRLEPRGVIVVIDAEHLCMGMRGVRKAGSTTTTSAVRGQFRSSASSRSEALSLIRGR

SEQ ID NO: 14312 - protein, 199 aa, Saccharopolyspora hirsuta
  REGION 1..199: note = tr|A0A1H5ZEB9|A0A1H5ZEB9_SACHI GTP cyclohydrolase 1; OS = Saccharopolyspora hirsuta OX=1837 GN=folE PE=3 SV=1
MTSAPALRVAHEPAGEIDLGAAERAAGDLLRALGISTDSESLRGTPGRMARAYAELFTPRPFDLTTFPNDEGYDELVLARSIPVRSVCEHHLLPFVGTAHVGYLPGERILGLSKLARVVEHFSCRPQVQERLTKQVADWLCEHLRPQGVGVVVEAEHTCMTLRGVQATGSSTVTSTLLGTLRSDARSRQEFFSLTGVNA

SEQ ID NO: 14313 - protein, 199 aa, Saccharopolyspora jiangxiensis; identical to SEQ ID NO: 14312
  REGION 1..199: note = tr|A0A1I2GIN8|A0A1I2GIN8_9PSEU GTP cyclohydrolase 1; OS = Saccharopolyspora jiangxiensis OX=418522 GN=folE PE=3; SV = 1

SEQ ID NO: 14314 - protein, 212 aa, Saccharopolyspora jiangxiensis; identical to SEQ ID NO: 14311
  REGION 1..212: note = tr|A0A1I2EJ46|A0A1I2EJ46_9PSEU GTP cyclohydrolase 1; OS = Saccharopolyspora jiangxiensis OX=418522 GN=folE PE=3; SV = 1

SEQ ID NO: 14315 - protein, 214 aa, Saccharopolyspora rectivirgula
  REGION 1..214: note = tr|A0A073B7R1|A0A073B7R1_9PSEU GTP cyclohydrolase 1; OS = Saccharopolyspora rectivirgula OX=28042 GN=folE PE=3; SV = 1
MTSVVGEPFGLDDEDELQPDGSANVREFDQQRAEAAIRELLLAVGEDPDREGLQETPARVARAYRELFAGLHTNPDRVLDKTFDESHEELVLVREIPVYSTCEHHLLPFHGMAHIGYIPNDQGRVTGLSKLARLVDLYAKRPQVQERLTSQVADALVRRLQPRGVIVVIEAEHLCMGMRGVRKAGAITTTSAVRGIFRSSTSSRAEALSLIRGK

SEQ ID NO: 14316 - protein, 198 aa, Saccharopolyspora shandongensis
  REGION 1..198: note = tr|A0A1H3RIC3|A0A1H3RIC3_9PSEU GTP cyclohydrolase 1; OS = Saccharopolyspora shandongensis OX=418495 GN=folE PE=3; SV = 1
MSALAQHVVHQPEGEIDLAAAEKAAGDLLRALGISTDSESLLGTPGRMARAYAELFSPRPFDLTTFPNEEEYDELVLARSIPVRSVCEHHLLPFVGVAHVGYLPGDRILGLSKLARVVEHFACRPQVQERLTKQVADWLCEQLNPKGVGVVIEAEHTCMTLRGVQATGSNTVTSTLLGTLRQDARSRQEFFALTGVNA

SEQ ID NO: 14317 - protein, 212 aa, Saccharopolyspora shandongensis
  REGION 1..212: note = tr|A0A1H3HAT4|A0A1H3HAT4_9PSEU GTP cyclohydrolase 1; OS = Saccharopolyspora shandongensis OX=418495 GN=folE PE=3; SV = 1
MTSTVDEPIGAEGDFRPDGSFHTPHFDQARAEAAVRELLIAAGEDPDREGLRDTPARVARAYRELFAGLYTNPDEVLDRTFDEAHEELVLVRDIPVYSQCEHHLLPFHGNAHVGYIPNEQGRVTGLSKLARLVDLYAKRPQVQERLTSQVADALVRRLDPRGVIVVIDAEHLCMGMRGVRKAGSTTTTSAVRGIFRSSASSRSEALSLIRGR

SEQ ID NO: 14318 - protein, 211 aa, Saccharopolyspora sp.
  REGION 1..211: note = tr|A0A4R4UC73|A0A4R4UC73_9PSEU GTP cyclohydrolase 1; OS = Saccharopolyspora sp. 16K404 OX=2530385 GN=folE PE=3; SV = 1
MTSAVDEPFGAGDSRPDGSSHLPQFDQARAEAAIRELLIAAGEDPEREGLRETPQRVARAYQELFAGLYTDPDEVLDKTFDEAHEELVLVRDIPVYSQCEHHLLPFHGTAHIGYIPNSQGRVTGLSKLARLVDLYAKRPQVQERLTSQVADALVRRLEPRGVIVVIDAEHLCMGMRGVRKAGSTTTTSAVRGIFRSSASSRSEALSLIRGR

SEQ ID NO: 14319 - protein, 211 aa, Saccharopolyspora sp.
  REGION 1..211: note = tr|A0A4R4VU32|A0A4R4VU32_9PSEU GTP cyclohydrolase 1; OS = Saccharopolyspora sp. 16K309 OX=2530384 GN=folE PE=3; SV = 1
MTSAVDEPIGAGDSRPDGSSHLPQFDQARAEAAIRELLIAAGEDPERDGLRETPQRVARAYQELFAGLYTDPDEVLDKTFDEAHEELVLVRDIPVYSQCEHHLLPFHGTAHIGYIPNSQGRVTGLSKLARLVDLYAKRPQVQERLTSQVADALVRRLEPRGVIVVIDAEHLCMGMRGVRKAGSTTTTSAVRGIFRSSASSRSEALSLIRGR

SEQ ID NO: 14320 - protein, 536 aa, Saccharopolyspora spinosa
  REGION 1..536: note = tr|A0A2N3XT32|A0A2N3XT32_SACSN GTP cyclohydrolase 1; OS = Saccharopolyspora spinosa OX=60894 GN=folE PE=3 SV=1
MTSTVDEPIGAGGDSRPDGSFHIPQFDHARAEAAVRELLLAAGEDPDREGLRDTPARVARAYHELFAGLYTNPDEVLDKTFDEAHEELVLVRDIPVYSQCVPSKQTVNLVGGAKPARDVRIGDRFWTLVDGKVEQTEVVEVSSHQKRELVEVVTEKGRFQVTPDHPLATPQGWQEAKDVAGTYIEWTPPKKLCRQRWQPKIGYEFGYALGALCSDGTVGDHYVSLVVNDRDVAKNFAYALDQAFGTDAAIEEIERPSGHLQRQVEGFRVRVVSSYLADLVRQYVGGDAHHQRQRFPRVVMSNETTFRGFLDGCVDGDGCRMSSRRFRVITGRNVPFLDDIARVISARFTPSLTQASELYVSDDWILRHGFAQESHRTDLIESQWVKVESVRSLEASGAEPYTVHSFKCDPHPTFLINGHLTHNCEHHLLPFHGVAHIGYIPNEMGRVTGLSKLARLVDLYAKRPQVQERLTSQVADALVRRLEPRGVIVVIDAEHLCMGMRGVRKAGSTTTTSAVRGQFRSSASSRSEALSLIRGR

SEQ ID NO: 14321 - protein, 198 aa, Saccharopolyspora spinosa
  REGION 1..198: note = tr|A0A2N3XVR9|A0A2N3XVR9_SACSN GTP cyclohydrolase 1; OS = Saccharopolyspora spinosa OX=60894 GN=folE PE=3 SV=1
MSAPVLHVAHQPDGEIDLAAAEKAAGDLLRALGISTDSESLSGTPGRMARAYAELFTPRPFDLTTFPNEEQYDELVLARAIPVRSVCEHHLLPFVGTAHVGYLPGDRILGLSKLARVVEHFACRPQVQERLTKQVADWLCEQLEPKGVGVVIEAEHTCMTLRGVQATGSNTVTSTLLGTLRQDARSRQEFFALTGVNA

SEQ ID NO: 14322 - protein, 186 aa, Saccharospirillum sp.
  REGION 1..186: note = tr|A0A2T6E6B0|A0A2T6E6B0_9GAMM GTP cyclohydrolase 1; OS = Saccharospirillum sp. MSK14-1 OX=1897632 GN=folE PE=3; SV = 1
MPPSLSDHYRNIILELGEDPERNGLQKTPERAAKAMSFLTEGYGQSLETVTNDAVFEADNDEMVVVKDIEFYSLCEHHLLPFFGKAHIAYIPNGKVLGLSKFARITDMYARRLQIQEQLTKQIADAIQTVTDAKGVGVILEAKHMCMTMRGVQKQNSWMTTSMMLGGLRHSQNTRNEFLNLIGQHS

SEQ ID NO: 14323 - protein, 213 aa, Saccharospirillum sp.
  REGION 1..213: note = tr|A0A2T6E2P5|A0A2T6E2P5_9GAMM GTP cyclohydrolase 1; OS = Saccharospirillum sp. MSK14-1 OX=1897632 GN=folE PE=3; SV = 1
MLSNEALAVQEALIARGLETPMVPNDLNRDQKVDRIERLMAEVAGTLGLDLADDSLAETPLRIAKMYVDEVFSGLDYQHFPKITQIDNKMNVSEMVRVRDIEVLSTCEHHFITIDGLATVAYLPKQTVIGLSKINRIVRFFAQRPQIQERLTQQVLVALQTLLGTDDVAVQIDATHYCVKARGVRDAQSRTETQALGGVFLQDAARRREFLGA

SEQ ID NO: 14324 - protein, 196 aa, Saccharothrix australiensis
  REGION 1..196: note = tr|A0A495VWN3|A0A495VWN3_9PSEU GTP cyclohydrolase 1; OS = Saccharothrix australiensis OX=2072 GN=C8E97_2403 PE=3; SV = 1
MSFTIPEVVDGVELVGGAAPARTPDPLEGLARQLLVEIGEDPDRDGLRGTPARYARWWREFTDYDPGRIETVFQSVGSDQLVEVNDIKVWSLCEHHLLPFWCEVSIAYVARGRLLGLSKFARIAHDHAHRLQIQERLTQGIADAVVEASGSPDVAVRATGEHLCMTMRGIRTGARMNTSVLRGVFQSDPQMRARLS

SEQ ID NO: 14325 - protein, 210 aa, Saccharothrix australiensis
  REGION 1..210: note = tr|A0A495VSF5|A0A495VSF5_9PSEU GTP cyclohydrolase 1; OS = Saccharothrix australiensis OX=2072 GN=folE PE=3 SV=1
MTEIDQTGLPASGEAGSTRRAFDQRRAEAAVRELLLACGEDPEREGLRETPARVARAYRELFAGLYTDPDSVLAKTFDESHEELVLVTDIPMFSFCEHHLLPFHGVAHVGYIPNEHGRVTGLSKLARLVDLYAKRPQVQERLTSQIADALVRRLEPGGVIVVVEAEHLCMGMRGVRKPGSRTTTSAVRGLLRSSSSTRAEAIELIRGRTR

SEQ ID NO: 14326 - protein, 214 aa, unidentified
  source 1..214: note = Saccharothrix carnea
  REGION 1..214: note = tr|A0A2P8IB58|A0A2P8IB58_9PSEU GTP cyclohydrolase 1; OS = Saccharothrix carnea OX=1280637 GN=folE PE=3 SV=1
MTEHDTALDQTGLSANGGAGLARRPFDQKRAEAAVRELLLACGEDPEREGLRDTPARVARAYRELFAGLHTDPDSVLARTFDESHEELVLVTDIPMFSFCEHHLLPFHGVAHVGYIPNEHGRVTGLSKLARLVDLYAKRPQVQERLTSQVADALMRRLDPRGVIVVVEAEHLCMAMRGVRKPGSRTTTSAVRGLLRDSATSRSEAIELIKGRLR

SEQ ID NO: 14327 - protein, 210 aa, Saccharothrix espanaensis
  REGION 1..210: note = tr|K0JR27|K0JR27_SACES GTP cyclohydrolase 1; OS = Saccharothrix espanaensis (strain ATCC 51144 / DSM 44229 / JCM 9112 / NBRC 15066 / NRRL 15764) OX=1179773; GN = folE PE=3SV=1
MTEIDQAGLSVTGEAGSTRRTFDQKRAEAAVRELLLACGEDPDREGLQETPARVARAYRELFAGLYTDPDSVLAKTFDESHEELVLVTDIPMFSFCEHHLLPFHGVAHVGYIPNEHGRVTGLSKLARLVDLYSKRPQVQERLTSQVADALVRRLEPRGVIVVIEAEHLCMGMRGVRKPGSRTTTSAVRGILRSSASSRAEAIELIRGRTR

SEQ ID NO: 14328 - protein, 211 aa, unidentified
  source 1..211: note = Saccharothrix saharensis
  REGION 1..211: note = tr|A0A543JQ42|A0A543JQ42_9PSEU GTP cyclohydrolase 1; OS = Saccharothrix saharensis OX=571190 GN=folE PE=3 SV=1
MTTLARQPSFDPPAGSHRRPHPVHGRPGVDVEAARRAVADLLVALGKDPASEHLADTPRRVAHAYAEMLTPREFDLTTFPNEEGYDELVLARGIPVQSLCEHHMLPFQGVAHVGYLPGERILGLSKLARVVELFARDLQVQERLTKQVAGWLLEHLAPRGVGVVVEAEHLCLSLRGVRAAGSRTVTSAMLGALRDDARTRQEFFALTGVRA

SEQ ID NO: 14329 - protein, 214 aa, unidentified
  source 1..214: note = Saccharothrix saharensis
  REGION 1..214: note = tr|A0A543JFJ6|A0A543JFJ6_9PSEU GTP cyclohydrolase 1; OS = Saccharothrix saharensis OX=571190 GN=folE PE=3 SV=1
MTEHGTAIDQTGLSVNGGAGLARRPFDQKRAEAAVRELLLACGEDPEREGLRDTPARVARAYRELFAGLHTDPDGVLARTFDESHEELVLVTDIPMFSFCEHHLLPFHGVAHVGYIPNEHGRVTGLSKLARLVDLYAKRPQVQERLTSQVADALMRRLEPRGVIVVVEAEHLCMAMRGVRKPGSRTTTSAVRGLLRNSASTRSEAIELIKGRLR

SEQ ID NO: 14330 - protein, 201 aa, Saccharothrix sp.
  REGION 1..201: note = tr|A0A0F0HKH4|A0A0F0HKH4_9PSEU GTP cyclohydrolase 1; OS = Saccharothrix sp. ST-888 OX=1427391 GN=folE PE=3 SV=1
MIDPVTLDQPTAVGAFDQERAEKAVRELLIAVGEDPDREGLQETPARVARAYKEIFAGLWQQPEDVLTTTFDLGHDEMVLVKDIEVFSTCEHHLVPFQGVAHVGYIPSASGKITGLSKLARLVDVYARRPQVQERLTSQVADSLMRILEPRGAIVVVECEHMCMSMRGIRKPGAKTLTSAVRGQLRDPATRAEAMSLIIGR

SEQ ID NO: 14331 - protein, 214 aa, Saccharothrix sp.
  REGION 1..214: note = tr|A0A1V2Q0U7|A0A1V2Q0U7_9PSEU GTP cyclohydrolase 1; OS = Saccharothrix sp. ALI-22-I OX=1933778 GN=folE PE=3 SV=1
MTEHVTEHDQTGLSGNGGAGLARRPFDQKRAEAAVRELLLACGENPEREGLRDTPARVARAYRELFAGLYTDPDSVLRKTFDESHEELVLVTDIPMFSFCEHHLLPFHGVAHVGYIPNEHGRVTGLSKIARLVDLYAKRPQVQERLTSQVADALVRRLEPRGVIVVVEAEHLCMGMRGVRKPGSRTTTSAVRGQLRSSATSRAEAIELIRGRLR

SEQ ID NO: 14332 - protein, 214 aa, Saccharothrix texasensis
  REGION 1..214: note = tr|A0A3N1H8T6|A0A3N1H8T6_9PSEU GTP cyclohydrolase 1; OS = Saccharothrix texasensis OX=103734 GN=folE PE=3 SV=1
MTEHGTAIDQTGLSANGGAGLARRPFDQKRAETAVRELLLACGEDPEREGLRDTPGRVARAYRELFAGLHTDPDSVLAKTFDESHEELVLVTDIPMFSFCEHHLLPFHGVAHVGYIPNEHGRVTGLSKLARLVDLYAKRPQVQERLTSQVADALMRRLDPRGVIVVVEAEHLCMAMRGVRKPGSRTTTSAVRGLLRDSASSRAEAIDLIKGRLR

SEQ ID NO: 14333 - protein, 208 aa, Saccharothrix variisporea
  REGION 1..208: note = tr|A0A495X7T8|A0A495X7T8_9PSEU GTP cyclohydrolase 1; OS = Saccharothrix variisporea OX=543527 GN=folE PE=3 SV=1
MTNTLDRLAPSESQDLVSPGEVDTERVVDLVGQLLAAIGEDPGREGLADTPARVAAWWRSFFSPEPSAAPTSFPEQHVSGQLVVIGGMSVWSLCEHHLLPMNLDVAVGYVPDGEVIGLSKFGRIAQRYAGRLQVQERFTRQVVDEIAVVLGSTDVAVAVRGTHLCMSSRGVRMEAARTTTLQAGGRFESDPVLSQQFLALATDRWRVA

SEQ ID NO: 14334 - protein, 211 aa, Saccharothrix variisporea
  REGION 1..211: note = tr|A0A495XF06|A0A495XF06_9PSEU GTP cyclohydrolase 1; OS = Saccharothrix variisporea OX=543527 GN=folE PE=3 SV=1
MTDIDQAGPSVVNGGAGLARRPFDQKRAEAAVRELLLACGEDPDREGLMDTPARVARAYRELFAGLYTDPDSVLAKTFDESHEELVLVTDIPMFSFCEHHLLPFHGVAHVGYIPNEQGRVTGLSKLARLVDLYAKRPQVQERLTSQVADALVRRLEPRGVIVVVEAEHLCMGMRGVRKPGSRTTTSAVRGLLRTSASSRAEAIELIKGRTR

SEQ ID NO: 14335 - protein, 366 aa, Sagittula sp.
  REGION 1..366: note = tr|A0A2K8WEY2|A0A2K8WEY2_9RHOB GTP cyclohydrolase FolE2 OS=Sagittula sp. P11 OX=2009329 GN=folE2 PE=3 SV=1
MNVHTPEIDRKPSREEAEAALAVLRQWTGKAHDSEIDALDPALKRLAPDAEVDGYPDLSRTFPEGFEVDADYRASLPDLQNGPSSLIRGANRVIQHVGISNFRLPIHYRTRDNGALMLETSVTGTVSLDADKKGINMSRIMRSFYAHAEKTFSFGVIEAALDDYKTDLESFDARIDMAFSFPVKVESLRSGLSGYQYYDIALELVETDGVRRKIFHLDYVYSSTCPCSLELSEHARRERGQLATPHSQRSVARLSVEVKPGDCLWFEDLIDMCRRAVPTETQVMVKREDEQAFAELNAANPIFVEDAARLFAEQLLADSRVGDFRVVASHQESLHSHDAVSVLTEGDLFKAESLDPRLFSTLFHVG

SEQ ID NO: 14336 - protein, 373 aa, Sagittula stellata
  REGION 1..373: note = tr|A3K0Q6|A3K0Q6_9RHOB GTP cyclohydrolase FolE2; OS = Sagittula stellata E-37 OX=388399 GN=folE2 PE=3 SV=1
MGRGQPFMNVHTPEIDRKLSREDAEAALAVLRQWTGKAHDSEIDALDPALKHLAPDAVADGYPDLSRAFPEDFQTDGDYIASLPDLQNGPSSLIRGAKRMIQHVGISNFRLPIRYRTRDNGALMLETSVTGTVSLDADKKGINMSRIMRSFYTHADETFSFGVIEAALDDYKADLDSFDARINMAFSFPVKVESLRSGLSGYQYYDIALELVEKDGVRCKIIHLDYVYSSTCPCSLELSEHARRERGQLATPHSQRSVARVSVDVKPGDCLWFEDLIDMCRRAVPTETQVMVKREDEQAFAELNAANPIFVEDAARLFAEQMLADPRVGDFRVVASHQESLHSHDAVSVLTEGDLFEAESLDPRLFSTLFHVS

SEQ ID NO: 14337 - protein, 198 aa, Salegentibacter agarivorans
  REGION 1..198: note = tr|A0A1I2N421|A0A1I2N421_9FLAO GTP cyclohydrolase 1; OS = Salegentibacter agarivorans OX=345907 GN=folE PE=3 SV=1
MAYKFKEEYNIEVTDGLQQNYKNILEGIGEDISREGIENTPERAAKAMQFLTQGYKMDAKTILEKAMFKESYDEMVVVKDIELYSLCEHHMLPFFGKAHIAYIPNGHIVGLSKLPRVVDVFARRLQVQERLTHDILECINNTLKPKGVAVVIEAVHMCMMMRGVQKQNSATTTSGFRGQFEKIETRNEFLKLISSDLK

SEQ ID NO: 14338 - protein, 225 aa, Salegentibacter agarivorans
  REGION 1..225: note = tr|A0A1I2LTL1|A0A1I2LTL1_9FLAO GTP cyclohydrolase 1; OS = Salegentibacter agarivorans OX=345907 GN=folE PE=3 SV=1
MKIDKILNEIDEQGDAHVGSSAETPIREDAFELSDIEKVALINKDVKHIMETLGLDLTDDSLKGTPQRVAKMFVNEIFAGLDPEKKPIASTFENKYKYGEMLVEKNITVYSTCEHHLLPIVGKAHVAYISKGRVIGLSKMNRIVDYFAKRPQVQERMTMQIVQELQKALGTPDVACVVDAKHLCVNSRGIRDIDSSTVTSEFGGAFKEKSVKREFLDYIKLDTTF

SEQ ID NO: 14339 - protein, 197 aa, unidentified
  source 1..197: note = Salegentibacter echinorum
  REGION 1..197: note = tr|A0A1M5M5Z5|A0A1M5M5Z5_9FLAO GTP cyclohydrolase 1; OS = Salegentibacter echinorum OX=1073325 GN=folE PE=3 SV=1
MYKFKEEYNLEVTDGLQEKYQGILERIGEDVNREGIEKTPERAAKAMQFLTQGYKMDPEAILKKAMFKEDYNEMVVVKDIELYSLCEHHLLPFFGKAHIAYIPNGHIVGLSKLPRLVDVFARRLQVQERLTHNILECINKTLKPKGVAVVIEAEHLCMMMRGVQKQNSATTTSGFRGQFQKIETRNEFLKLISANLK

SEQ ID NO: 14340 - protein, 225 aa, unidentified
  source 1..225: note = Salegentibacter echinorum
  REGION 1..225: note = tr|A0A1M5C3Q5|A0A1M5C3Q5_9FLAO GTP cyclohydrolase 1; OS = Salegentibacter echinorum OX=1073325 GN=folE PE=3 SV=1
MKIDKILNDIDEQGDAHAGGSAKNPIREDAFELSDIEKVALINKDVKRIMETLGLDLTDDSLKGTPQRVAKMFVNEIFAGLDPEKKPVASTFDNNYKYGEMLVEKNITVYSTCEHHLLPIVGKAHVAYISKGRVIGLSKMNRIVDYFAKRPQVQERMTMQIVQELQKALGTPDVACVVDAKHLCVNSRGIRDIDSSTVTSEFGGAFKEQSVKREFLDYIKLDTTF

SEQ ID NO: 14341 - protein, 226 aa, Salegentibacter flavus
  REGION 1..226: note = tr|A0A1I4XU84|A0A1I4XU84_9FLAO GTP cyclohydrolase 1; OS = Salegentibacter flavus OX=287099 GN=folE PE=3 SV=1
MKIDKILTEIDEMGDAHAGSSADTPIREDAFELSDIEKVALIKDDVKKIMETLGLDLTDDSLQGTPQRVAKMFVNEIFSGLDPANKPKASTFENKYKYGEMLVEKNITVYSTCEHHLLPIVGKAHVAYISKGRVIGLSKMNRIVDYFAKRPQVQERMTMQIVQELQRALGTPDVACVIDAKHLCVNSRGIRDIESSTVTSEFGGAFKNKEVKREFLDYIKLDTTFS

SEQ ID NO: 14342 - protein, 225 aa, Salegentibacter holothuriorum
  REGION 1..225: note = tr|A0A1T5CI52|A0A1T5CI52_9FLAO GTP cyclohydrolase 1; OS = Salegentibacter holothuriorum OX=241145 GN=folE PE=3; SV = 1
MKIDKILNEIDEQGDAHAGSSAENPIREDAFELSDIEKVALINKDVKKIMETLGLDLTDDSLKGTPQRVAKMFVNEIFAGLNPDKKPIASTFENKYKYGEMLVEKNITVYSTCEHHLLPIVGKAHVAYISKGRVIGLSKMNRIVDYFAKRPQVQERMTMQIVQELQKALGTPDVACVVDAKHLCVNSRGIRDIDSSTVTSEFGGAFKEQSVKREFLDYIKLDTTF

SEQ ID NO: 14343 - protein, 198 aa, Salegentibacter holothuriorum
  REGION 1..198: note = tr|A0A1T5AGX5|A0A1T5AGX5_9FLAO GTP cyclohydrolase 1; OS = Salegentibacter holothuriorum OX=241145 GN=folE PE=3; SV = 1
MAYKFKEEYNIEVTDGLQENYKNILEGIGEDVQREGIEKTPERAAKAMQFLTQGYKMDAEAILKKAMFKESYDEMVVVKDIELYSMCEHHMLPFFGKAHIAYIPDGHIVGLSKLPRVVDVFARRLQVQERLTHDILECINKTMKPKGVAVVIEAVHMCMMMRGVQKQNSATTTSGFRGQFEKIETRNEFLKLISSNLK

SEQ ID NO: 14344 - protein, 225 aa, Salegentibacter mishustinae
  REGION 1..225: note = tr|A0A0Q9Z9E8|A0A0Q9Z9E8_9FLAO GTP cyclohydrolase 1; OS = Salegentibacter mishustinae OX=270918 GN=folE PE=3 SV=1
MKIDKILNEIDEQGDAHVGSSAETPIREDAFELSDIEKVALINKDVKHIMETLGLDLTDDSLKGTPQRVAKMFVNEIFAGLNPERKPIASTFENKYKYGEMLVEKNITVYSTCEHHLLPIVGKAHVAYISKGRVIGLSKMNRIVDYFAKRPQVQERMTMQIVQELQKALGTPDVACVVDAKHLCVNSRGIRDIDSSTVTSEFGGAFKEQSVKREFLDYIKLDTTF

SEQ ID NO: 14345 - protein, 198 aa, Salegentibacter mishustinae
  REGION 1..198: note = tr|A0A0Q9ZGF7|A0A0Q9ZGF7_9FLAO GTP cyclohydrolase 1; OS = Salegentibacter mishustinae OX=270918 GN=folE PE=3 SV=1
MAYKFKEEYNIEVTDGLQENYRNILEGIGEDISREGIEKTPERASKAMQFLTQGYKMDGETILKEAMFRESYDEMVVVKDIELYSMCEHHMLPFFGKAHIAYIPNGHIVGLSKLPRVVDVFARRLQVQERLTHDILECINKTMKPKGVAVVIEAVHMCMMMRGVQKQNSATTTSGFRGQFEKIETRNEFLKLISSNLK

SEQ ID NO: 14346 - protein, 225 aa, Salegentibacter salarius
  REGION 1..225: note = tr|A0A2N0U0R7|A0A2N0U0R7_9FLAO GTP cyclohydrolase 1; OS = Salegentibacter salarius OX=435906 GN=folE PE=3 SV=1
MKIDKILNEIDEQGDAHVGSSAQTPIREDAFELSDIEKVALINKDVKHIMETLGLDLTDDSLKGTPQRVAKMFVNEIFAGLNPERKPIASTFENKYKYGEMLVEKNITVYSTCEHHLLPIVGKAHVAYISKGRVIGLSKMNRIVDYFAKRPQVQERMTMQIVQELQKALGTPDVACVVDAKHLCVNSRGIRDIDSSTVTSEFGGAFKEKSVKREFLDYIKLDTIF

SEQ ID NO: 14347 - protein, 198 aa, Salegentibacter salarius
  REGION 1..198: note = tr|A0A2N0U2V7|A0A2N0U2V7_9FLAO GTP cyclohydrolase 1; OS = Salegentibacter salarius OX=435906 GN=folE PE=3 SV=1
MAYKFKEEYNIEVTDGLQENYRNILEGIGEDISREGIEKTPERAAKAMQFLTQGYKMDGETILKEAMFKESYDEMVVVKDIELYSMCEHHMLPFFGKAHIAYIPNGHIVGLSKLPRVVDVFARRLQVQERLTNDILECINNTIKPKGAAVVIEAVHMCMMMRGVQKQNSATTTSGFRGQFEKIETRNEFLKLISSNLK

SEQ ID NO: 14348 - protein, 225 aa, Salegentibacter salegens
  REGION 1..225: note = tr|A0A1M7I487|A0A1M7I487_9FLAO GTP cyclohydrolase 1; OS = Salegentibacter salegens OX=143223 GN=folE PE=3 SV=1
MKIDKILNEIDEQGDAHVGTSAETPLREDAFELSDIEKVALINKDVKKIMETLGLDLTDDSLKGTPQRVAKMFVNEIFAGLDPEKKPIASTFENKYKYGEMLVEKNITVYSTCEHHLLPIVGKAHVAYISKGRVIGLSKMNRIVDYFAKRPQVQERMTMQIVQELQKALGTPDVACVVDAKHLCVNSRGIRDIDSSTVTSEFGGAFKDKSVKREFLDYIKLDTSF

SEQ ID NO: 14349 - protein, 198 aa, Salegentibacter salegens
  REGION 1..198: note = tr|A0A1M7ISZ0|A0A1M7ISZ0_9FLAO GTP cyclohydrolase 1; OS = Salegentibacter salegens OX=143223 GN=folE PE=3 SV=1
MAYKFKEEYNIEVTDGLQKNYKNILEGIGEDISREGIANTPERAAKAMQFLTQGYKMDAETILKKAMFKESYDEMVVVKDIELYSLCEHHMLPFFGKAHIAYIPNGHIVGLSKLPRVVDVFARRLQVQERLTHDILECINSTLKPKGVAVVIEAVHMCMMMRGVQKQNSATTTSGFRGQFEKIETRNEFLKLISSNLK

SEQ ID NO: 14350 - protein, 225 aa, Salegentibacter salinarum
  REGION 1..225: note = tr|A0A2N0TMG4|A0A2N0TMG4_9FLAO GTP cyclohydrolase 1; OS = Salegentibacter salinarum OX=447422 GN=folE PE=3 SV=1
MKIDKILNEIDEQGDAHVGSSAQTPIREDAFELSDIEKVALINKDVKHIMETLGLDLTDDSLKGTPQRVAKMFVNEIFAGLNPDKKPIASTFENKYKYGEMLVEKNITVYSTCEHHLLPIVGKAHVAYISKGRVIGLSKMNRIVDYFAKRPQVQERMTMQIVQELQKALGTPDVACVVDAKHLCVNSRGIRDIDSSTVTSEFGGAFKEQSVKREFLDYIKLDTSF

SEQ ID NO: 14351 - protein, 198 aa, Salegentibacter salinarum
  REGION 1..198: note = tr|A0A2N0TQQ2|A0A2N0TQQ2_9FLAO GTP cyclohydrolase 1; OS = Salegentibacter salinarum OX=447422 GN=folE PE=3 SV=1
MAYKFKEEYNIEVTDGLQENYKNILEGIGEDISREGIENTPERAAKAMQFLTQGYKMDAETILKKAMFKESYDEMVVVKDIELYSLCEHHMLPFFGKAHIAYIPNGHIVGLSKLPRVVDVFARRLQVQERLTHDILECINNTLKPKGVAVVIEAVHMCMMMRGVQKQNSATTTSGFRGQFEKIETRNEFLKLISSDLK

SEQ ID NO: 14352 - protein, 197 aa, Salegentibacter sp.
  REGION 1..197: note = tr|A0A4R6FWZ5|A0A4R6FWZ5_9FLAO GTP cyclohydrolase 1; OS = Salegentibacter sp. 24 OX=2183986 GN=folE PE=3 SV=1
MYKFKEEYNIEVTDGLQKNYQAILEGIGEDISREGIEKTPERAAKAMQFLTQGYKMDAETILKEAMFKESYDEMVVVKDIELYSLCEHHMLPFFGKAHIAYIPNGHIVGLSKLPRVVDVFARRLQVQERLTHNILECINNTLQPKGVAVVIEAVHMCMMMRGVQKQNSATTTSGFRGQFEKIETRNEFLKLISSNLK

SEQ ID NO: 14353 - protein, 225 aa, Salegentibacter sp.; identical to SEQ ID NO: 14338
  REGION 1..225: note = tr|A0A1L6QZ83|A0A1L6QZ83_9FLAO GTP cyclohydrolase 1; OS = Salegentibacter sp. T436 OX=1729720 GN=folE PE=3 SV=1

SEQ ID NO: 14354 - protein, 189 aa, unidentified
  source 1..189: note = Salibacterium halotolerans
  REGION 1..189: note = tr|A0A1I5Q4W5|A0A1I5Q4W5_9BACI GTP cyclohydrolase 1; OS = Salibacterium halotolerans OX=1884432 GN=folE PE=3 SV=1
MSDVNHDKIEQAVYSILEAVGEDPDRDGLRDTPKRVARMYEEVFQGLSQDPSEHLHTVFGEEHEELVLVRDIPFYSMCEHHLVPFYGKAHVGYIPKEGQVTGLSKLARTVETVAKRPQLQERITSTVADSILQTLTPHGVIVVVEAEHMCMTMRGIQKPGTETVTSAVRGSFEQDEASRAEVLTLINRS

SEQ ID NO: 14355 - protein, 96 aa, unidentified
  source 1..96: note = Salibacterium qingdaonense
  REGION 1..96: note = tr|A0A1I4R1D7|A0A1I4R1D7_9BACI GTP cyclohydrolase 1; OS = Salibacterium qingdaonense OX=266892; GN = SAMN04488054_1572 PE=3 SV=1
MNSFDHEKIKQGVPLLLEGIGEDPRREGLLETPDRVARFYKEIFSGLNKPSHTYLETSFTDDHEELVLVKDISFFSVCEHHLVPFFGQAHVAYIPK

SEQ ID NO: 14356 - protein, 189 aa, unidentified
  source 1..189: note = Salibacterium qingdaonense
  REGION 1..189: note = tr|A0A1I4M4C8|A0A1I4M4C8_9BACI GTP cyclohydrolase 1; OS = Salibacterium qingdaonense OX=266892 GN=folE PE=3 SV=1
MSTVNHDKIEKAVYSILEAVGENPDRDGLLDTPKRVARMYEEVFQGLSQDPAEHLQTVFGEEHEELVLVRDIPFYSMCEHHLVPFYGKAHVGYIPKEGQVTGLSKLARTVETVAKRPQLQERITSTVADSILETLNPHGVIVVVEAEHMCMTMRGIQKPGTETVTSAVRGSFENDEASRAEVLTLINRS

SEQ ID NO: 14357 - protein, 184 aa, unidentified
  source 1..184: note = Salilacibacter sp.
  REGION 1..184: note = tr|A0A514LEF3|A0A514LEF3_9ACTN GTP cyclohydrolase 1; OS = Salilacibacter sp. NKC3-5 OX=2502791 GN=folE PE=3 SV=1
MDHAKIQTAVRQLLEAVGEDPDREGVQETPARVARMYEEIFSGINEDPETHLRTVFGEEHEELVLVKDITFYSMCEHHLLPFFGQAHIGYIPKNGTVTGLSKLARAVETVARRPQLQERITSNVADALVETLDPHGVIVVVEAEHMCMTMRGIKKPGSTTVTSAVRGVFEKDASSRSEVMTLLK

SEQ ID NO: 14358 - protein, 310 aa, Salimicrobium flavidum
  REGION 1..310: note = tr|A0A1N7IJW3|A0A1N7IJW3_9BACI GTP cyclohydrolase FolE2 OS=Salimicrobium flavidum OX=570947 GN=folE2 PE=3; SV = 1
MNKTDIDTPASLPPKQERHKLFGSIDPGPKTKPVDKDKMADLQNAKQDYLFDIDVVGINNVKHPIKVKSFMTPEEQTTIGTFTFSSSIAKGSKGTNMSRFTEQLTKYYEQGFTVTIASLKEFARELAGRLKRDDAFIKVDFPWFFERKGPSSELAGMNHADAFISVSYSRTDGFDIQTGLTGKITTLCPCSKEISEYSAHNQRGNVSMAVTLEEDFDEARTDWKEALLEAAESNASARIHPVLKRPDEKMVTEQAYENPRFVEDMVRLVAADLYEHPFVEAFEVSCRNEESIHLHDAVASLTFDKRTDEL

SEQ ID NO: 14359 - protein, 311 aa, Salimicrobium halophilum
  REGION 1..311: note = tr|A0A1G8Q584|A0A1G8Q584_9BACI GTP cyclohydrolase FolE2 OS=Salimicrobium halophilum OX=86666 GN=folE2 PE=3; SV = 1
MHNTYKQQSTSLPTKEERHKLFGSVDPGPKYKPTDKSEMPDLQNSKQDFLFSIDVVGINNVKHPIKVNSSLTPHEQTTIGTFTFSSSVARGSKGTNMSRFTEQLTKYSENGFTVDMETLKEFTQELAGRLKQNDAFVQVEFPWFFERKGPSSELAGMNHADAYITVSYSADTGFDIEAGLTGKITTLCPCSKEISEYSAHNQRGNVSMSVELSDDFDETTMDWKEALLEAAESNASARIHPVLKRPDEKMVTEQAYENPRFVEDMVRLVAADLYEYTFVEAFEVSCQNEESIHLHDAIATISFDKRIDELG

SEQ ID NO: 14360 - protein, 310 aa, unidentified
  source 1..310: note = Salimicrobium jeotgali
  REGION 1..310: note = tr|K2FPB8|K2FPB8_9BACI GTP cyclohydrolase FolE2; OS = Salimicrobium jeotgali OX=1230341 GN=folE2 PE=3 SV=1
MNKIESHITDTMPSKDERHKLFGSVPPGPKTKPVEKDQMADLQNSRQDFLFDLDVVGINNVKHPITIESSMKPSTQTTIGTFTFSSSIAKGSKGTNMSRFTEQLTSYYEQGFTVTIESLKQFAEELAGRLKREDAFIKVEFPWFFEREGPSSGLAGMNHADAFISVTWSKAGGFDIQTGLTGKITTLCPCSKEISEYSAHNQRGNVSMAVTLTEDFNEDMVDWKEVLLEAAESNASARIHPVLKRPDEKMVTEQAYENPRFVEDMVRLVAADLYETPFIHAFEVSCRNEESIHLHDALASLRFDKRTDER

SEQ ID NO: 14361 - protein, 310 aa, Salimicrobium salexigens; identical to SEQ ID NO: 14360
  REGION 1..310: note = tr|A0A1N7KV12|A0A1N7KV12_9BACI GTP cyclohydrolase FolE2 OS=Salimicrobium salexigens OX=908941 GN=folE2 PE=3; SV = 1

SEQ ID NO: 14362 - protein, 310 aa, Salimicrobium sp.
  REGION 1..310: note = tr|A0A2A3A5M2|A0A2A3A5M2_9BACI GTP cyclohydrolase FolE2 OS=Salimicrobium sp. WN024 OX=2029857 GN=folE2 PE=3; SV = 1
MNKTESHITDTIPSKDERHKLFGSVPPGPKTKPVEKDQMADLQNSRQDFLFDLDVVGINNVKHPITIESSMKPSTQTTIGTFTFSSSIAKGSKGTNMSRFTEQLTSYYEQGFTVTIESLKQFAEELAGRLKREDAFIKVEFPWFFEREGPSSGLAGMNHADAFISVTWSKADGFDIQTGLTGKITTLCPCSKEISEYSAHNQRGNVSMAVTLTEDFDEDTLDWKEVLLEAAESNASARIHPVLKRPDEKMVTEQAYENPRFVEDMVRLVAADLYETPFIHAFEVSCRNEESIHLHDALASLHFDKRTDER

SEQ ID NO: 14363 - protein, 215 aa, unidentified
  source 1..215: note = Salinarimonadaceae bacterium
  REGION 1..215: note = tr|A0A0P8BKZ5|A0A0P8BKZ5_9RHIZ GTP cyclohydrolase 1; OS = Salinarimonadaceae bacterium HL-109 OX=1653334 GN=folE; PE = 3 SV=1
MDAVVKSLSTRETSVDADKREMQRPSREEAEAAVRTLIRWAGDDPEREGLLETPKRVAKAYRELFAGYEEDAGDVLAKVFEDVEGYGDMVLVRDIPFHSHCEHHMVPFHGKAHIAYFPSQGVVGLSKLARLVDVYARRLQTQETMTAQITDAIEDSLKPRGIAVMIEAEHMCMSMRGVMKAGSSTVTTSFTGIFKDEPAEQVRFFTQLRAGKEYR

SEQ ID NO: 14364 - protein, 213 aa, Salinarimonas sp.
  REGION 1..213: note = tr|A0A5B2VFW9|A0A5B2VFW9_9RHIZ GTP cyclohydrolase 1; OS = Salinarimonas sp. BN140002 OX=1638099 GN=folE PE=3 SV=1
MDAVVKSLSARVTEVAADKPKIEKPTREEAEAAVRTLIRWAGDDPEREGLRDTPRRVAKAYGQLFAGYGEDAREILNKVFEEVEGYGDMVLVRDIPFHAHCEHHMVPFMGKAHVAYYPSAGVVGLSKLARVVDVFARRLQTQETMTAQIAEVIDEVLRPRGVAVMVDAEHMCMTMRGVQKPGASTLTTQFTGVFRQDPAEQARFFTLLRAGRS

SEQ ID NO: 14365 - protein, 309 aa, Salinibacillus kushneri
  REGION 1..309: note = tr|A0A1I0DZW3|A0A1I0DZW3_9BACI GTP cyclohydrolase FolE2 OS=Salinibacillus kushneri OX=237682 GN=folE2 PE=3; SV = 1
MSKVQKQKKQLPSKKERHQLFGSVPPGPRTKPTEKDKMPDLQNTNKDFLFELDAVGIQNVKHPIVIHSKMKPYNQTTIGTFTFSSSIRQESKGTNMSRFTEQLNRYYENGFTLDIKMMKSFTKELAERLKQKDATMEVTFPWFFERKGPDSELPGMNHATASIRVEYHAEEDFDIKVSLEGTITTLCPCSKEISEYSAHNQRGKVSMVTDLTDDFDEEEIDWKQALLEAAESNASARIHPVLKRPDEKMVTETAYENPRFVEDIVRLVAADLYEMPFVKVFDVKCVNEESIHLHDAMASIHYDKTKMID

SEQ ID NO: 14366 - protein, 218 aa, Salinibacter ruber
  REGION 1..218: note = tr|D5HD27|D5HD27_SALRM GTP cyclohydrolase 1; OS = Salinibacter ruber (strain M8) OX=761659 GN=folE PE=3; SV = 1
MAEKKIQSSGLRTNGSADGMPPKLYERRDIYDEETSEALSEHIEAILDILGEDADREGLADTPERVARAYQFLMHGYALDPKDILRQALFEEAYDEMILVKDIEVYSMCEHHMLPFYGKAHVAYIPDGQIVGLSKIPRTVEVFARRLQVQERLTLQIRNAIDEVVDPMGTAVVIEAKHLCMMMRGAEKQNSATTTSSVSGEFNNHATRDEFMRLIDAE

SEQ ID NO: 14367 - protein, 199 aa, Salinibacter ruber
  REGION 1..199: note = tr|Q2RYU5|Q2RYU5_SALRD GTP cyclohydrolase 1; OS = Salinibacter ruber (strain DSM 13855 / M31) OX=309807; GN = folE PE=3 SV=1
MPPKLYERRDIYDEETSEALSEHIEAILDILGEDADREGLADTPERVARAYQFLMHGYALDPKDILRQALFEEAYDEMILVKDIEVYSMCEHHMLPFYGKAHVAYIPDGQIVGLSKIPRTVEVFARRLQVQERLTLQIRNAIDEVVDPMGTAVVIEAKHLCMMMRGAEKQNSATTTSSVSGEFNNHATRDEFMRLIDAE

SEQ ID NO: 14368 - protein, 219 aa, Salinibacter sp.
  REGION 1..219: note = tr|A0A2P6C3F4|A0A2P6C3F4_9BACT GTP cyclohydrolase 1; OS = Salinibacter sp. 10B OX=1923971 GN=folE PE=3 SV=1
MAEKKIASDELRENGTPVGGPPKLYERRDVYDEATTEALSDHVSSMLDILGEDPSRDGLKDTPERVARAYQFLMHGYALNPKEILQQALFEEAYDEMILVKDIEVYSLCEHHMLPFFGKAHVAYIPDGKIVGLSKIPRTVDVFARRLQVQERLTLQIRDAIDEVLDPLGTAVVIEAKHLCMMMRGAEKQNSMTTTSSVSGEFDEHATRAEFMRLIHATE

SEQ ID NO: 14369 - protein, 194 aa, Salinibacterium amurskyense
  REGION 1..194: note = tr|A0A2M9D6R4|A0A2M9D6R4_9MICO GTP cyclohydrolase 1; OS = Salinibacterium amurskyense OX=205941 GN=folE PE=3 SV=1
MSIDLARIEAAVAEILAAVGEDPNRAGLTATPRRVASAYAEFFAGNEIDPLTHLSDSIEFTAKADQTGELVLLRDIEFRSMCEHHLLPFLGVAHVAYIPDERIIGLGNIARVVETIAARAQLQERLTEEIADAFDEGLSPRGVLVVVDAMHGCVSARGPRQTASSTVTLASRGALSDPVERAEVMALIGRGRDA

SEQ ID NO: 14370 - protein, 208 aa, Salinibacterium sp.
  REGION 1..208: note = tr|A0A5B9GAJ8|A0A5B9GAJ8_9MICO GTP cyclohydrolase 1; OS = Salinibacterium sp. dk2585 OX=2603292 GN=folE PE=3 SV=1
MPGGSAASRASVDRPRIEAAVSELLAAIGADASRLAETPRRVAESYAEYFSGMGVDPAVHLGDLIDLEDGREGGLVIMRDIAFRSMCEHHLLPFVGLAHIAYLPGRRVVGLGALPRVVDTLASRPQLQERLTDEIADALSDALDARGVLVVLDARQDCVSTRGTRQVGSTTVTLASRGELADSGQKAAVLALVGGAAAAGDDAGGPHA

SEQ ID NO: 14371 - protein, 196 aa, Salinibacterium sp.
  REGION 1..196: note = tr|A0A522DQV8|A0A522DQV8_9MICO GTP cyclohydrolase 1; OS = Salinibacterium sp. OX=1915057 GN=folE PE=3 SV=1
MAIDSGRVEAAIAEILLAIGENPERPGLATTPQRVAEAYQEFFSGLGVDPLDHLRESSEFPPGAEELADVVLMRDIEFRSMCEHHLLPFVGVAHLAYRPGTRIVGLGRLPRVVETLAARPQLQERLTEEIAEALDAGLSPLGVLVVVDAVHGCVASRGARQASSSTVTMASRGTLSDPQARAEIIALIGARATEAS

SEQ ID NO: 14372 - protein, 188 aa, Salinibacterium xinjiangense
  REGION 1..188: note = tr|A0A2C8Z4L9|A0A2C8Z4L9_9MICO GTP cyclohydrolase 1; OS = Salinibacterium xinjiangense OX=386302 GN=folE PE=3 SV=1
MAVDSGRIEAAIAEILAAIGEDAARPGLRSTPKRVAQAYTEFFAGVGVDPSAVLADSVASGGLGELVLLRDIEFRSICEHHLLPFLGAAHVAYVPGERIVGLGRLATVVATAAARPQLQEQLTEQIADAIQSGLAPQGVLVVVDAVHGCVTARGPRQTGSSTVTMASRGSLSDPVQRAGVLAMIGGPS

SEQ ID NO: 14373 - protein, 292 aa, Salinicoccus alkaliphilus
  REGION 1..292: note = tr|A0A1M7HZY5|A0A1M7HZY5_9STAP GTP cyclohydrolase FolE2 OS=Salinicoccus alkaliphilus DSM 16010 OX=1123231; GN = folE2 PE=3 SV=1
MEELDLTTREGRFKHFGSVEPVKGTKPTEKAEMADLQNSKKDFLFAVESVGINNLSYPVVIGDFQSVGNFELATSLRREEKGVNMSRLLEALETENRNGVRLDFATLEQVLKVLRDRMRQENAEVTADGKWYFSKPSPGTNLHGMAHADVKYSLALDEGGLTRKQFGMTAMVTTLCPCSKEISEYSAHNQRGYVKVLIDVDPGADLPENHKEIVYELLEINASSQLYPILKRTDEKMVTERAYENPRFVEDLIRLIAYDIAELDWVKGFELECRNEESIHQHDAFSRMKHQK

SEQ ID NO: 14374 - protein, 292 aa, Salinicoccus halodurans
  REGION 1..292: note = tr|A0A0F7HPG7|A0A0F7HPG7_9STAP GTP cyclohydrolase FolE2 OS=Salinicoccus halodurans OX=407035 GN=folE2 PE=3; SV = 1
MEELDLTTREGRFKHFGSTDPIEGTKPIEKELMVDLQSSKKDFLFEVDSVGINNLSYPVVIGDFQSVGNFELATSLRRNEKGINMSRILESLETKNNGGIKLDFTTLESVLGTLRDRMHQESAEVTADGKWYFSKPSPHTQLSGMAHADVKYSLEMGESGTTRKQLGMTAMVTTLCPCSKEISEYSAHNQRGYVKALLDIDPDAELPENHKEQLYEVLEINASSQLYPILKRTDEKMVTERAYENPRFVEDLIRLIAYDLVELDWVSGFELECRNEESIHQHDAFSRMKYQK

SEQ ID NO: 14375 - protein, 292 aa, unidentified
  source 1..292: note = Salinicoccus kekensis
  REGION 1..292: note = tr|A0A285UM97|A0A285UM97_9STAP GTP cyclohydrolase FolE2 OS=Salinicoccus kekensis OX=714307 GN=folE2 PE=3 SV=1
MEELDLTTREGRFKHFGSVEPVEGTKPTEKAEMADLQNSKKDFLFAVESVGINNLSYPVVIGDYQSVGNFELATSLRREEKGVNMSRLLEALETENKNGVSLDFETLEQVLKVLRDRMRQENAEVTADGKWYFSKPSPGTNLHGMAHADVKYSLALDEGGLTRKQFGMTAMVTTLCPCSKEISEYSAHNQRGYVKVLIDVDPDAEVPENHKEIVYELLEINASSQLYPILKRTDEKIVTERAYENPRFVEDLIRLIAYDIAELDWVKGFELECRNEESIHQHDAFSRMKYQK

SEQ ID NO: 14376 - protein, 292 aa, Salinicoccus qingdaonensis
  REGION 1..292: note = tr|A0A1G9D5A5|A0A1G9D5A5_9STAP GTP cyclohydrolase FolE2 OS=Salinicoccus qingdaonensis OX=576118 GN=folE2; PE = 3 SV=1
MEELDLTTREGRFKHFGSVEPVKGTKPTDKAEMADLQNSKKDFLFSVESVGINNLSYPVVIGDFQSVGNFELATSLRRDEKGVNMSRLLEALETENNNGVTLDFETLEQVLLVLRDRMRQDNAEVTADGKWYFSKPSPGTNLHGIAHADVKYSLALDESGLTRKQFGMTAMVTTLCPCSKEISEYGAHNQRGYIKVMIDVDPDAELPENHKEIVYELLEINASSQLYPILKRTDEKMVTERAYENPRFVEDLIRLVAYDIAELDWVKGFELECRNEESIHQHDAFSRMTYNK

SEQ ID NO: 14377 - protein, 292 aa, Salinicoccus roseus
  REGION 1..292: note = tr|A0A265E7J8|A0A265E7J8_9STAP GTP cyclohydrolase FolE2 OS=Salinicoccus roseus OX=45670 GN=folE2 PE=3 SV=1
MEQLDLSTREARFRHFGSVEPIEGTKPVEKEMMVDLQSSKKDFLFEVDSVGINNLSYPVVIGDFQSVGTFELATSLRRNEKGINMSRILESLETENDGGVPLTFETLENVLEILRVRMHQDEAEVTGSGKWYFSKPSPHTLLSGMAHADVEYSMRISGAGVLHKQLGMTAMVTTLCPCSKEISEYSAHNQRGYVKVLLDIDPEAELPDDHKEQLYELLEINASSQLYPILKRTDEKMVTERAYENPRFVEDLIRLIAYDLVELDWVKGFELECRNEESIHQHDAFSRMSYQK

SEQ ID NO: 14378 - protein, 292 aa, unidentified
  source 1..292: note = Salinicoccus sediminis
  REGION 1..292: note = tr|A0A0M2SJN1|A0A0M2SJN1_9STAP GTP cyclohydrolase FolE2 OS=Salinicoccus sediminis OX=1432562 GN=folE2 PE=3; SV = 1
MEELDLTTREGRFKHFGSVDPVEGTKPIEKELMVDLQSSKKDFLFEVDSVGINNLSYPVVIGDFQSVGNFELATSLRKNEKGINMSRILESLETQNDGGVRLDFGTLETVLGTLRDRMDQESAEVTADGKWYFAKQSPHTQLSGMAHADVKYSLEIGESGTTRKQLGMTAMVTTLCPCSKGISEYSAHNQRGYVKVLLDIDPEKELPDDHREQLYEVLEINASSQLYPILKRTDEKMVTERAYENPRFVEDLIRLIAYDLVELDWVKGFELECRNEESIHQHDAFSRMRYQK

SEQ ID NO: 14379 - protein, 292 aa, Salinicoccus sp.
  REGION 1..292: note = tr|A0A558ARZ1|A0A558ARZ1_9STAP GTP cyclohydrolase FolE2 OS=Salinicoccus sp. CT19 OX=2493691 GN=folE2 PE=3; SV = 1
MEELDLTTREGRFRHFGSVDPIEGMKPVEKEMMVDLQSSKKDFLFEVDSVGINNLSYPVVIGDFQSVGTFELATSLRKNEKGINMSRILESLETENNAGVPLEFETLQRVLEILRARMHQEEAEMTADGKWYFSKPSPHTQLSGMAHADVKYSMRISESGVERKQLGMTAMVTTLCPCSKEISEYSAHNQRGYVKVLLDIDPEAELPEDHKEQLYEVLEINASSQLYPILKRTDEKMVTERAYENPRFVEDLIRLIAYDLVELDWVKGFELECRNEESIHQHDAFSRMSYQK

SEQ ID NO: 14380 - protein, 185 aa, Salinicola socius
  REGION 1..185: note = tr|A0A1Q8SRN2|A0A1Q8SRN2_9GAMM GTP cyclohydrolase 1; OS = Salinicola socius OX=404433 GN=folE PE=3 SV=1
MTEQLAGHFHGILEKLGEDPEREGLRDTPMRAAKAMQFLTQGYGQSLEALINGAVFASDTDEMVLIKDIEMYSMCEHHVLPFIGKCHIAYLPQGKVLGLSKFARIVDMYARRLQIQENLTREIAEAVMQVTEARGVGVVIEAQHMCMMMRGVEKQNSSMTTSVMLGSFRKNQTTRQEFLMLVNGR

SEQ ID NO: 14381 - protein, 185 aa, Salinicola sp.
  REGION 1..185: note = tr|A0A1Q8SYE6|A0A1Q8SYE6_9GAMM GTP cyclohydrolase 1; OS = Salinicola sp. MH3R3-1 OX=1928762 GN=folE PE=3 SV=1
MTEQLAGHYHGILEKLGEDPEREGLRDTPMRAAKAMQFLTQGYHQSLEELINGAVFASDTDEMVLVKDIEMYSMCEHHVLPFIGKCHIAYLPQGKVLGLSKFARIVDMYARRLQIQENLTREIAEAVMQVTEARGVGVVIEAQHMCMMMRGVEKQNSSMTTSVMLGSFRKNQTTRQEFLMLVNGR

SEQ ID NO: 14382 - protein, 306 aa, Salinicola sp.
  REGION 1..306: note = tr|A0A1Q8T7I4|A0A1Q8T7I4_9GAMM GTP cyclohydrolase FolE2 OS=Salinicola sp. MH3R3-1 OX=1928762 GN=folE2 PE=3; SV = 1
MNLTVPPLPDVAAGREPEPSRASAYRALQHVGMQGIATRLQWEDGTRLPATADVSVDLAAGQRGIHMSRLYRLLDRLDESPLTPAGLTTLGNALLDSQQGISQALALTLRFDLPLRRPALLSGESGWRHYPCRLELKGSREALETILTLSIDYASTCPCSTALARHAMARDWRHWVEEQRHADIDAGTVADWIEHQGAFPTPHSQRSRAALSLTLSPRAAFAAADRIDTFERLLQTPVQTLVKRIDEQAFAERNGANLMFCEDAARRLAEGCDAQPDVTGYRIEIVHAESLHAHDAIAVVERDLPA

SEQ ID NO: 14383 - protein, 363 aa, Salinihabitans flavidus
  REGION 1..363: note = tr|A0A1H8LC77|A0A1H8LC77_9RHOB GTP cyclohydrolase FolE2 OS=Salinihabitans flavidus OX=569882 GN=folE2 PE=3; SV = 1
MNIHYRDTPSRDEAKDALARLRAWAETASPTEIAELDPAVARLLPEREVGNYPELSRDYPEEFEADDAYRATLPDLQNGPTSLIRGARQTIQHVGISNFRLPISYHTRDNGDLTLETSVTGTVSLEAGKKGINMSRIMRSFYRHAEKTFSFEVMEAALADYITDLDSIDARLQMRFSYPMKIESLRSGLEGYQYYDIALEKIQIGGRRQKIMHLDYVYSSTCPCSLELAEHARQTRGQLATPHSQRSVARISVVVHPGRILWFEDLIDMARAAVPTETQVMVKREDEQAFAELNAANPIFVEDAARLFCEQLLADSRVGDFRVVASHQESLHSHDAVSILTEGDTFDAGSIDPKMFTTLFHTG

SEQ ID NO: 14384 - protein, 225 aa, Salinimicrobium catena
  REGION 1..225: note = tr|A0A1H5NG49|A0A1H5NG49_9FLAO GTP cyclohydrolase 1; OS = Salinimicrobium catena OX=390640 GN=folE PE=3 SV=1
MKKNNIDEAIDEMGDAFVSPNTDTPMRKDAFDKTDAEKVEIIQENVKNIMDALGLDLNDDSLKGTPKRVAKMFVHEIFGGLNPKYKPKASTFQNKYKYGEMLVEKDITLYSTCEHHLLPIVGKAHVGYISNGTVVGLSKMNRIVDFYAKRPQVQERLTMQIVKELQEVLGTEDVACVIDAKHLCVNSRGIRDVASSTVTSEYGGRFKDPEARRDFLDYINLETDF

SEQ ID NO: 14385 - protein, 225 aa, unidentified
  source 1..225: note = Salinimicrobium sediminis
  REGION 1..225: note = tr|A0A285X6A5|A0A285X6A5_9FLAO GTP cyclohydrolase 1; OS = Salinimicrobium sediminis OX=1343891 GN=folE PE=3 SV=1
MKKDNIDEAIDEMGDAFVSPNTDTPMRSDAFDLSDDEKIEKIQEDVRNILNTLGLDLTDDSLKGTPKRVAKMFVREIFGGLHPQGKPKASTFQNKYKYGEMLVEKNITLYSTCEHHLLPIVGKAHVGYISNGTVVGLSKMNRIVDYYAKRPQVQERLTMQIVKELQEVLGTEDVACVIDAKHLCVNSRGIRDIESSTVTSEYGGRFKDPEARRDFLDYINLETEF

SEQ ID NO: 14386 - protein, 228 aa, unidentified
  source 1..228: note = Salinimonas sediminis
  REGION 1..228: note = tr|A0A346NR39|A0A346NR39_9ALTE GTP cyclohydrolase 1; OS = Salinimonas sediminis OX=2303538 GN=folE PE=3 SV=1
MFAKEAVVVCDALEAAISEEARIVRQALVDHGLETPMLENRLSDEDKRTRIARAMTDIMNTLGLDLADDSLADTPQRIAKMYVDEIFGGLDYAKFPKITQIENKMKLNQPVQVSDISLTSTCEHHFVTIDGTATVAYIPKETVLGLSKINRLVGFFAQRPQVQERLTQQVMVAIQALTGSPDVAVSINATHYCVKARGIRDTNSFTRTSALGGAFNTDANLRREFFGL

SEQ ID NO: 14387 - protein, 228 aa, Salinimonas sp.
  REGION 1..228: note = tr|A0A5B7YCF5|A0A5B7YCF5_9ALTE GTP cyclohydrolase 1; OS = Salinimonas sp. KX18D6 OX=2572577 GN=folE PE=3 SV=1
MLANEAVVVRDAIEPVIAKEAQIVRQALIEKGLETPLVDNSLSGQEKRDRIEAAMTDIMDTLGLDRSDDSLTETPKRIAKMYVDEIFGGLDYGNFPKITTIENKMQLNQPVQVSDISLTSTCEHHFVTIDGTASVAYIPKDTVLGLSKINRLVGFFSQRPQVQERLTQQVMVAIQALTGTDDVAVTINATHYCVKARGIRDNNSFTRTSALGGQFATDANLRREFFAG

SEQ ID NO: 14388 - protein, 184 aa, unidentified
  source 1..184: note = Saliniradius amylolyticus
  REGION 1..184: note = tr|A0A2S2E680|A0A2S2E680_9ALTE GTP cyclohydrolase 1; OS = Saliniradius amylolyticus OX=2183582 GN=gch1 PE=3 SV=1
MSDELANHYHAIIEKLGEDPKRGGLLDTPKRAARAMEYLTDGYQKSLDEVVNGAVFESDMDEMVVVQDIEFYSLCEHHMLPFIGRCHIAYLPQGTVLGLSKFARIVDMYARRLQIQEGLTKQIANAVQEITGAKGVGVVMEGKHMCMMMRGVQKQNSSMVTSVMLGSMRSSQATRDEFLRLIGK

SEQ ID NO: 14389 - protein, 287 aa, unidentified
  source 1..287: note = Salinisphaera halophila
  REGION 1..287: note = tr|A0A423PHZ6|A0A423PHZ6_9GAMM GTP cyclohydrolase FolE2 OS=Salinisphaera halophila YIM 95161 OX=1051139; GN = folE2 PE=3 SV=1
MSTVAKSQSADGRSAATRSGRAAGPQIEDVQGRADARRLAINKVGICDIRHPVSIAQRVGGHQSTVATFGMYVNLPHHFKGTHMSRFVQILNAHEHQITVDSFKCMLGEMTERLEADNGHIEMSFPYFIDKFAPVTGEKGVMDYEVTFLGDQRGDKIDLYVEVAVPVTTLCPCSKDISDYGAHNQRSLVTLRVRAEKFFWLEELIDIAESEASSELYGILKRVDEKAVTERAYENPKFVEDVVRDIATRLNADERFRHYRVASENFESIHNHSAYALIEHDKDAPAE

SEQ ID NO: 14390 - protein, 287 aa, Salinisphaera hydrothermalis
  REGION 1..287: note = tr|A0A084IK97|A0A084IK97_SALHC GTP cyclohydrolase FolE2 OS=Salinisphaera hydrothermalis (strain C41B8); OX = 1304275 GN=folE2 PE=3 SV=1
MSTTSKSANADARGARGNGSAATASEIEDVQGRADPRNLAINKVGICDIRHPVSIAQRVGGHQSTVATFGMYVNLPHEFKGTHMSRFVEILNAHEHQITLESFKAMLGEMTERLESDNGHIEMTFPYFIDKYAPITGEKGVMDYEVSFIGDRIGDRIDMHVEVKVPVTTLCPCSKDISDYGAHNQRSLVTIRVKAHEFFWAEELIDIAESEASCELFGILKRIDEKAVTERAYENPKFVEDVVRDIATRLNEDDRFRSYRVESENFESIHNHSAYAMIERDKDQPNG

SEQ ID NO: 14391 - protein, 273 aa, unidentified
  source 1..273: note = Salinisphaera japonica
  REGION 1..273: note = tr|A0A423PWU4|A0A423PWU4_9GAMM GTP cyclohydrolase FolE2 OS=Salinisphaera japonica YTM-1 OX=1209778 GN=folE2; PE = 3 SV=1
MNSNSQHASPRPAPIEDVQGRTDPRRLAINKVGICDIRHPVSIAQRVGGHQSTVATFAMYVNLPHEFKGTHMSRFVEILNAHEQQITPDSFQLMLEEMAERLEANNGHIEMYFPYFVDKYAPVTGEKGVMDYEVGFIGDRVDGVSTLYVEVQVPVTTLCPCSKDISDYGAHNQRSLVTIRVRADAFFWAEELIDIAESEGSCELYGVLKRIDEKAVTERAYENPKFVEDVVRDIATRLNDDDRFRSYRVTSENFESIHNHSAYAMIEHDKDAE

SEQ ID NO: 14392 - protein, 287 aa, unidentified; identical to SEQ ID NO: 14389
  source 1..287: note = Salinisphaera orenii
  REGION 1..287: note = tr|A0A423PVP7|A0A423PVP7_9GAMM GTP cyclohydrolase FolE2 OS=Salinisphaera orenii MK-B5 OX=856730 GN=folE2; PE = 3 SV=1

SEQ ID NO: 14393 - protein, 261 aa, Salinisphaera sp.
  REGION 1..261: note = tr|A0A2E9AKU8|A0A2E9AKU8_9GAMM GTP cyclohydrolase FolE2 OS=Salinisphaera sp. OX=1914330 GN=folE2 PE=3 SV=1
MEDVQSRADQRHLAINKVGICDIRHPVSIEQRVGGHQSTVATFGMYVNLPHHFKGTHMSRFVQILNAHEHQITVDSFRAMLGEMTERLEADNGHIEMSFPYFIDKYAPVTREKGVMDYNVTFIGDQRGERTDLYVEVKVPVTTLCPCSKDISDYGAHNQRSLITIRVRATEFFWLEELIEIAESQASSELYGILKRVDEKSVTERAYENPKFVEDVVRDVAQCLNDDPRFRYYVVESENFESIHNHSAYAMIEHDKDRPTG

SEQ ID NO: 14394 - protein, 286 aa, Salinisphaera sp.
  REGION 1..286: note = tr|A0A3A5J5Z5|A0A3A5J5Z5_9GAMM GTP cyclohydrolase FolE2 OS=Salinisphaera sp. Q1T1-3 OX=2321229 GN=folE2 PE=3; SV = 1
MSTTAKTGQASAALSGAGEANTPRDIEDVQGRADPRRLAIDKVGICDIRHPVSIAQRVGGHQSTVATFGMYVNLPHEFKGTHMSRFVEILNAHEHQITLDSFKLMLTEMTDRLESRNGHIEMTFPYFVDKYAPVTGEKGVMDYEVGFIGDRVGDVSTLHVEVKVPVTTLCPCSKDISDYGAHNQRSLVSIRVRADAFFWAEELIDIAESEGSCELYGVLKRIDEKAVTERAYENPKFVEDVVRDIATRLNEDDRFRSYRVASENYESIHNHSAYAMIEHDKDAPQA

SEQ ID NO: 14395 - protein, 275 aa, unidentified
  source 1..275: note = Salinisphaeraceae bacterium
  REGION 1..275: note = tr|A0A2D4SAV2|A0A2D4SAV2_9GAMM GTP cyclohydrolase FolE2 OS=Salinisphaeraceae bacterium OX=2026789 GN=folE2; PE = 3 SV=1
MSVSSPEKLRSTASRLEDVQGREDKRRLAINKVGICDISHPVRIRQRTGEDQHTVANFAMYVNLPHQFKGTHMSRFVEILHAHEREITVASFREMLEEVTTRLEAENGHIEMRFPYFVEKSAPSSGVKSLMDYQVSFIGERKADHSELFVKVVVPVTTLCPCSKDISEYGAHNQRSHVTITARADEFFWLEDLIDVAEAEASSELYGILKRPDEKFVTERAYENPKFVEDLVRDVAARLNEDERILFYVVEAENFESIHNHSAYAKIERDKTTEV

SEQ ID NO: 14396 - protein, 198 aa, unidentified
  source 1..198: note = Salinisphaeraceae bacterium
  REGION 1..198: note = tr|A0A2D4SFF3|A0A2D4SFF3_9GAMM GTP cyclohydrolase 1; OS = Salinisphaeraceae bacterium OX=2026789 GN=folE PE=3 SV=1
MPDDEMNAARTTTREEAMDAVKVLLRWAGEDPDREGLLDTPARVADAYREYFRGYEEDPTAYLQRTFEQVGGYDEIVLLRDIPFHSHCEHHMALIAGKAHVAYLPRDRVVGISKLARVVHAFAHRLQVQERLTAEIADCIQTALEPYGVAVIVEATHACMSCRGVETPGVSMKTSRMMGVFRKSDKSRSEVLQLINNR

SEQ ID NO: 14397 - protein, 292 aa, unidentified
  source 1..292: note = Salinispira pacifica
  REGION 1..292: note = tr|V5WHD8|V5WHD8_9SPIO GTP cyclohydrolase FolE2; OS = Salinispira pacifica OX=1307761 GN=folE2 PE=3 SV=1
MEHTPVSKAQHPPNLKQFKGRKMMKDIQNTPDTRNLPLDKVGVKNIKYPITILDKEESIQHTSAEVDLFVNLPHHFKGTHMSRFIEVFHAHSDDIRMNNFLNMLEKIKHVLDAEKSLGEIRFPFFMEKHAPVSGQPSKTEYNCKFIGEVNSTYREFFVGIEVPVLTLCPCSKEISAYGAHNQRSYIRILVELGEFFWIEDMISEIESCASAPLYTLLKREDEKYITEYSYDHPVFVEDLVREVTVRLEQNYNFPWFSVEAENMESIHNHEAYAYIERGVKTYEHRTKGSRSD

SEQ ID NO: 14398 - protein, 219 aa, Salinispora arenicola
  REGION 1..219: note = tr|A0A542XLB3|A0A542XLB3_9ACTN GTP cyclohydrolase 1; OS = Salinispora arenicola OX=168697 GN=folE PE=3 SV=1
MAASATEPDSDLDHVAARLVSGRLTGRPVEDSIDLARVEKAVREILIAVGEDPDRDGLQQTPARVARAYAELFAGLRVDPAQVLVTTFEANHDELVLVRDIDVMSLCEHHLLPFRGSAHIGYIPGSNGRITGLSKLARLVEVFARRPQVQERLTAQIADLLMEQLQPRGVIVVLECEHMCMAMRGIQKSGAQTITSAVRGSLQQDAKSRAEAMALINSR

SEQ ID NO: 14399 - protein, 219 aa, Salinispora arenicola
  REGION 1..219: note = tr|A8M8H8|A8M8H8_SALAI GTP cyclohydrolase 1; OS = Salinispora arenicola (strain CNS-205) OX=391037; GN = folE PE=3 SV=1
MAASATEPDSDLDHVAARLVSGRLTGRPVEDSIDLVRVENAVREILIAVGEDPDRDGLQQTPARVARAYAELFAGLRVDPAQVLVTTFEANHDELVLVRDIDVMSLCEHHLLPFRGSAHIGYIPGSNGRITGLSKLARLVEVFARRPQVQERLTAQIADLLMEQLQPRGVIVVLECEHMCMAMRGIQKSGAQTITSAVRGSLQQDAKSRAEAMALINSR

SEQ ID NO: 14400 - protein, 219 aa, Salinispora tropica
  REGION 1..219: note = tr|A4XCS8|A4XCS8_SALTO GTP cyclohydrolase 1; OS = Salinispora tropica (strain ATCC BAA-916 / DSM 44818 / CNB-440) OX=369723 GN=folE PE=3 SV=1
MAASATEPDGDLDHVAARLVSGRLTGRPVEESVDLARLEKAVREILIAVGEDPDRDGLQQTPARVARAYAELLAGLRVDPAQVLTTTFEAGHDELVLVRDIDVMSLCEHHLLPFRGSAHIGYIPGANGRITGLSKLARLVEVFARRPQVQERLTVQVADLLMAQLQPRGVIVVLECEHMCMAMRGIQKSGACTITSAVRGSLQEDARTRAEAMALINSR

SEQ ID NO: 14401 - protein, 218 aa, unidentified
  source 1..218: note = Salinivibrio kushneri
  REGION 1..218: note = tr|A0A4P8H2B3|A0A4P8H2B3_9GAMM GTP cyclohydrolase 1; OS = Salinivibrio kushneri OX=1908198 GN=folE PE=3 SV=1
MMALSDAAKKVQEALIARGIETPMTAKSAMSSEERKEKIEFHMREILQSIDLDLTDDSLAETPARIAKMYVDEIFSGLDYSQFPKVTMIDNKMGCDEMVRVKDISVTSTCEHHLVTIDGRATVAYLPNNKVLGLSKINRIVRFFSQRPQVQERLTRQVLVALQTLLETEDVAVRIEATHYCVKSRGVMDANSETTTTALGGLFKKNAATRAEFLHGIQ

SEQ ID NO: 14402 - protein, 218 aa, unidentified
  source 1..218: note = Salinivibrio kushneri
  REGION 1..218: note = tr|A0A1V3GGG8|A0A1V3GGG8_9GAMM GTP cyclohydrolase 1; OS = Salinivibrio kushneri OX=1908198 GN=folE PE=3 SV=1
MMALSDAAKKVQEALIARGIETPMTAKSAMSSEERKEKIEFHMREILQSIDLDLTDDSLAETPARIAKMYVDEIFSGLDYSQFPKVTMIDNKMGCDEMVRVKDISVTSTCEHHLVTIDGRATVAYLPDNKVLGLSKINRIVRFFSQRPQVQERLTRQVLVALQTLLETEDVAVRIEATHYCVKSRGVMDANSETTTTALGGLFKKNAATRAEFLHGIQ

SEQ ID NO: 14403 - protein, 218 aa, Salinivibrio sharmensis
  REGION 1..218: note = tr|A0A1V3H0Y2|A0A1V3H0Y2_9GAMM GTP cyclohydrolase 1; OS = Salinivibrio sharmensis OX=390883 GN=folE PE=3 SV=1
MMALSDAAKKVQEALVARGIETPMTATSAMSSEERKEKIEFHMREILQLIDLDLTDDSLAETPARIAKMYVDEIFSGLDYSQFPKVTMIENKMGCDEMVRVKDISVTSTCEHHLVTIDGRATVAYLPNHKVLGLSKINRIVRFFSQRPQVQERLTRQVLVALQTLLETEDVAVRIEATHYCVKSRGVMDANSETTTTALGGLFKKNAATRAEFLHGIQ

SEQ ID NO: 14404 - protein, 218 aa, Salinivibrio sp.
  REGION 1..218: note = tr|A0A1V3I3L8|A0A1V3I3L8_9GAMM GTP cyclohydrolase 1; OS = Salinivibrio sp. IB872 OX=1766123 GN=folE PE=3 SV=1
MMALSDAAKKVQEALVARGIETPMTAKSALSAAERKEKIEFHMREILQSIDLDLTDDSLAETPARIAKMYVDEIFSGLDYTQFPKVTMIENKMGCDEMVRVKDISVTSTCEHHLVTIDGRATVAYLPDKKVIGLSKINRIVRFFAQRPQVQERLTRQVLVALQTLLETDNVAVRIEATHYCVKSRGVMDANSETTTTALGGQFKKNAATRAEFLHGIN

SEQ ID NO: 14405 - protein, 218 aa, Salinivibrio sp.; identical to SEQ ID NO: 14404
  REGION 1..218: note = tr|A0A2A4GHW6|A0A2A4GHW6_9GAMM GTP cyclohydrolase 1; OS = Salinivibrio sp. YCSC6 OX=2003370 GN=folE PE=3 SV=1

SEQ ID NO: 14406 - protein, 210 aa, unidentified
  source 1..210: note = Salinivirga cyanobacteriivorans
  REGION 1..210: note = tr|A0A0S2I2Y0|A0A0S2I2Y0_9BACT GTP cyclohydrolase 1; OS = Salinivirga cyanobacteriivorans OX=1307839 GN=folE PE=3; SV = 1
MRIKANGTQMEDGYTRIDQFNDKATAKLAKHYKGVLEGLGEDPEREGLQDTPKRVAQSMQFLTQGYHQSAEEILNSAKFKEDYRHMVLVKNIDLFSMCEHHMIPFIGKAHVAYIPNGYITGLSKIARVVEVYARRLQVQERMTNQIRDSIQNALDPLGVAVVIEAQHLCMQMRGIQKQNSVTTTSAFTGAFLEKEATREEFIHLIGSKLS

SEQ ID NO: 14407 - protein, 210 aa, unidentified
  source 1..210: note = Salinivirgaceae bacterium
  REGION 1..210: note = tr|A0A2N5ZH33|A0A2N5ZH33_9BACT GTP cyclohydrolase 1; OS = Salinivirgaceae bacterium OX=2053305 GN=folE PE=3 SV=1
MDIRFNGTNSDDGYSRIDQYNDEATEKLAKYYHGVLGAIGEDPDREGLQQTPIRVAKAMQFLTQGYHKSPEDILNSAKFKEDYKHMVLVKNIELYSMCEHHMLPFFGKAHVAYIPDGYITGLSKIARVVEVFARRLQVQERLTNQIRDSIQNALNPIGVAVVIEAQHMCMQMRGIQKQSSITTTSAFTGAFLEKMSTREEFIHLVGAKLS

SEQ ID NO: 14408 - protein, 188 aa, unidentified
  source 1..188: note = Salipaludibacillus aurantiacus
  REGION 1..188: note = tr|A0A1H9P8W6|A0A1H9P8W6_9BACI GTP cyclohydrolase 1; OS = Salipaludibacillus aurantiacus OX=1601833 GN=folE PE=3; SV = 1
MSEVNHAKIEEAVTMILEAIGEDPSREGLLDTPKRVARMYEEVFQGISQDPKEHFKTVFGEDHEELVLVKDIPFYSMCEHHLVPFFGKVHIGYIPKGGKVTGLSKLARAVEAVTRRPQLQERITSTIADSIVDTLTPRGVIVVIEAEHMCMTMRGVRKPGSKTVTSAVRGAFERSDAARAEVLSLIKE

SEQ ID NO: 14409 - protein, 188 aa, unidentified
  source 1..188: note = Salipaludibacillus keqinensis
  REGION 1..188: note = tr|A0A323TH93|A0A323TH93_9BACI GTP cyclohydrolase 1; OS = Salipaludibacillus keqinensis OX=2045207 GN=folE PE=3; SV = 1
MSSVDHEKIEQAVTMILEAIGEDPNREGLLDTPKRVARMYDEVFQGLRQDPKEHFKTVFGEDHEELVLVKDIPFYSMCEHHLVPFFGKAHIGYLPRGGKVTGLSKLARAVEAVTRRPQLQERITSTIADSMVDTLDPRGVMVVIEAEHMCMTMRGVRKPGSKTVTSAVRGAFEKNDAARAEVLSLIKE

SEQ ID NO: 14410 - protein, 188 aa, unidentified
  source 1..188: note = Salipaludibacillus neizhouensis
  REGION 1..188: note = tr|A0A3A9K7X5|A0A3A9K7X5_9BACI GTP cyclohydrolase 1; OS = Salipaludibacillus neizhouensis OX=885475 GN=folE PE=3; SV = 1
MSQVDHEKIEKAVTMILEAVGEDPTREGLLDTPKRVARMYEEVFQGLNQDPREHFKTVFGEDHEELVLVKDIPFYSMCEHHLVPFFGKVHIGYIPKGGKVTGLSKLARAVEAVCRRPQLQERITSTVANSIVETLDPRGVIVVVEAEHMCMTMRGVRKPGSKTVTSAVRGAFERSDAARAEVLSLIKD

SEQ ID NO: 14411 - protein, 363 aa, unidentified
  source 1..363: note = Salipiger bermudensis
  REGION 1..363: note = tr|Q0FNC7|Q0FNC7_SALBH GTP cyclohydrolase FolE2; OS = Salipiger bermudensis (strain DSM 26914 / JCM 13377 / KCTC 12554 / HTCC2601) OX=314265 GN=folE2 PE=3 SV=1
MNVHTPEIDSKPSEEQVRAALDLLRRFADKAQDTEIDAVDPALALLRDGSGYPDLSRIFPQDFEADAAYRETLPDLQNGPASLIRGANRAIQHVGISNFRLPIKFHTRDNGDLTLETSVTGTVSLDADKKGINMSRIMRSFYVHADKTFSFEVIEAALDDYKSDLESFDARIELAFSFPVKVESLRSGLWGFQYYDIALELVETAGVRRKIVHLDYVYSSTCPCSLELSEHARRERNQLATPHSQRSVARVSVELKEGECLWFEDLIDLCRAAVPTETQVMVKREDEQAFAELNAANPIFVEDAARLFAAQLQADPRIGDYRVLASHQESLHSHDAVSVLTEGTTFAHDSLGPKLFPTLIHSH

SEQ ID NO: 14412 - protein, 365 aa, unidentified; identical to SEQ ID NO: 6748
  source 1..365: note = Salipiger marinus
  REGION 1..365: note = tr|A0A1G8JSK5|A0A1G8JSK5_9RHOB GTP cyclohydrolase FolE2 OS=Salipiger marinus OX=555512 GN=folE2 PE=3 SV=1

SEQ ID NO: 14413 - protein, 364 aa, Salipiger mucosus
  REGION 1..364: note = tr|S9RDN7|S9RDN7_9RHOB GTP cyclohydrolase FolE2; OS = Salipiger mucosus DSM 16094 OX=1123237 GN=folE2 PE=3; SV = 1
MNLHTPEIDRKPSEEEARAALELLRRYTSKAQDAEIEALDPALGALVPGASAYPELSRDYPEGFDADADYKATLPDLQNGPSALIRGENRAIQHVGISNFRLPIHYHTRDNGDLMLETSVTGTVSLEADKKGINMSRIMRSFYRHAEKTFSFEVIEAALDDYKSDLESFDARIQMRFSFPMKVESLRSGLSGYQYYDIALELVETAGVRRKIMHLDYVYSSTCPCSLELSEHARRERGQLATPHSQRSVARISVELAEGDCLWFEDVIDMCRAAVPTETQVMVKREDEQAFAELNAANPIFVEDAARLFAERLQAEPRVGDFRVLASHQESLHSHDAVSVLTEGETFASESLDPRLFSSLFHVG

SEQ ID NO: 14414 - protein, 363 aa, unidentified
  source 1..363: note = Salipiger profundus
  REGION 1..363: note = tr|A0A1U7D7D9|A0A1U7D7D9_9RHOB GTP cyclohydrolase FolE2 OS=Salipiger profundus OX=1229727 GN=folE2 PE=3 SV=1
MNVHTPEIDRKPSREEAAEALALLRRFADTAQDGEIDALDPAIAALRDGVVYPELSRDYPHGFSVDEAYRDTLPDLQNGPASLIKGEDRAIQHVGISNFRLPIRYRSRDNGDLTLETSVTGTVSLDAGKKGINMSRIMRSFYAHAEKTFSFEVIEAALDDYKTDLGSFDARIQMRLSFPMMMQSLRSGLSGYQYYDIALELVETAGVRRKILHLDYVYSSTCPCSLELSEHARRERGQLATPHSQRSVARVSVELTEDGCLWFEDLIDLCRKAVATETQVMVKREDEQAFAELNAANPIFVEDAARLFAGQLQADPRIGDYRVLASHQESLHSHDAVSVLTEGTTFANESLDPKLFASLFHVG

SEQ ID NO: 14415 - protein, 366 aa, Salipiger sp.
  REGION 1..366: note = tr|A0A4Q3Z472|A0A4Q3Z472_9RHOB GTP cyclohydrolase FolE2 OS=Salipiger sp. IMCC34102 OX=2510647 GN=folE2 PE=3; SV = 1
MNKITRDAPGPTRAQAEEALQLLRDWAARAAPGEAIPLDPELADLVEAPRASDYPVLAHAYPEDFKIDAAYRAGLPDLQNGPTSLIRGARTAIQHVGISNFRLPIRYLARAGGERTLETSVTGTVSLEAEKKGINMSRIMRTFYDYAEETFSFDVMARTLDSYLGDLDSVDARLQMRLSYPMKVESLRSGLAGYQYYDIALEVVDRGGERLRIVHLDYVYSSTCPCSLELSEHARRTRGQLATPHSQRSVARLSAVIAPDQPVLWFEDLIELARAAVPTETQVMVKREDEQAFAELNAANPIFVEDAARLFTEQLRADPRIGDFRVMASHQESLHSHDAVSVLTEGPTFAAVSLDPRTFATLAHGA

SEQ ID NO: 14416 - protein, 365 aa, unidentified
  source 1..365: note = Salipiger thiooxidans
  REGION 1..365: note = tr|A0A1G7IE81|A0A1G7IE81_9RHOB GTP cyclohydrolase FolE2 OS=Salipiger thiooxidans OX=282683 GN=folE2 PE=3 SV=1
MNVFTPEIDRKPSKEEAAKALEVLRSFAEKALDYEIDALDPGIAALRDGGVPYPDLSRVYPTAFRADEAYRETLPDLQNGPSSLIKGENRLIQHVGISNFRLPIHYRTRDHGELTLETSVTGTVSLEADKKGINMSRIMRSFYAHAEKTFSFEVIEAALDDYKSDLESFDARIMMRLSFPVRRDSLRSGLSGYQYYDIALELVELDGVRRKILHLDYVYSSTCPCSLELSEHARRTRGQLATPHSQRSVARVSAVLANEGDCLWFEDLIGLCRKAVPTETQVMVKREDEQAFAELNAANPIFVEDAARLFAEQLQADPRIGDFRVLASHQESLHSHDAVSVLTEGTTFADDSLDPKLFSTLFHVG

SEQ ID NO: 14417 - protein, 188 aa, unidentified
  source 1..188: note = Salisediminibacterium haloalkalitolerans
  REGION 1..188: note = tr|A0A1H9P3W1|A0A1H9P3W1_9BACI GTP cyclohydrolase 1; OS = Salisediminibacterium haloalkalitolerans OX=1464123; GN = folE PE=3 SV=1
MEQIDQDKIQEAVKMILEAIGDDPEREGIQDTPKRVAKMYSEVFAGMFQDPKEHLKTVFGEDHEELVLVKDIPFYSMCEHHLVPFFGKAHIGYLPQGGKVTGLSKIARALESVASRPQLQERITSTVADSMVETLNPRGVIVVVEAEHMCMTMRGVNKPGSKTVTSAVRGAFENSEAARSEVLSLIKE

SEQ ID NO: 14418 - protein, 305 aa, unidentified
  source 1..305: note = Saliterribacillus persicus
  REGION 1..305: note = tr|A0A368X7V9|A0A368X7V9_9BACI GTP cyclohydrolase FolE2 OS=Saliterribacillus persicus OX=930114 GN=folE2; PE = 3 SV=1
MNDNEFNPINLPSKIDRHKLFGSVNPGPKSKPTEKNEMADLQNTKKDFMFDIDAVGITNVKHPITVVSNIAPTEQSTIGEFTFTSSIHKEHKGTNMSRFTEQLTEVYNENGFTIRIENLKNFVLNLAKRLEQKDASMTLKFPWFYERKGPYSKLSGMNHAEASITVTFKERQGFKLEVGLEGKVTTLCPCSKEISEYSAHNQRGVVKVNAELTEDFDEQETDWKEALLEAMESNASARLHPVLKRPDEKIVTELAYENPRFVEDMVRLVAADLYEMDFVSKFSVTCQNEESIHLHDAIATINFEK

SEQ ID NO: 14419 - protein, 222 aa, unidentified
  source 1..222: note = Salmonella abony
  REGION 1..222: note = tr|A0A5J0E293|A0A5J0E293_SALAB GTP cyclohydrolase I FolE OS=Salmonella abony OX=29482 GN=folE PE=4 SV=1
MPSLSKEAALVHDALVARGLETPLRPPMDELDNETRKSLIAGHMTEIMQLLNLDLSDDSLMETPHRIAKMYVDEIFAGLDYANFPKITLIENKMKVDEMVTVRDITLTSTCEHHFVTIDGKATVAYIPKDSVIGLSKINRIVQFFAQRPQVQERLTQQILTALQTLLGTNNVAVSIDAVHYCVKARGIRDATSATTTTSLGGLFKSSQNTRQEFLRAVRHHP

SEQ ID NO: 14420 - protein, 222 aa, unidentified; identical to SEQ ID NO: 14419
  source 1..222: note = Salmonella agona
  REGION 1..222: note = sp|B5EYP3|GCH1_SALA4 GTP cyclohydrolase 1; OS = Salmonella agona (strain SL483) OX=454166 GN=folE PE=3; SV = 1

SEQ ID NO: 14421 - protein, 222 aa, unidentified; identical to SEQ ID NO: 14419
  source 1..222: note = Salmonella anatum
  REGION 1..222: note = tr|A0A2T8LXK8|A0A2T8LXK8_SALAN GTP cyclohydrolase 1; OS = Salmonella anatum OX=58712 GN=folE PE=3 SV=1

SEQ ID NO: 14422 - protein, 222 aa, unidentified; identical to SEQ ID NO: 14419
  source 1..222: note = Salmonella arizonae
  REGION 1..222: note = sp|A9MK63|GCH1_SALAR GTP cyclohydrolase 1; OS = Salmonella arizonae (strain ATCC BAA-731 / CDC346-86 / RSK2980) OX=41514 GN=folE PE=3 SV=1

SEQ ID NO: 14423 - protein, 222 aa, unidentified; identical to SEQ ID NO: 14419
  source 1..222: note = Salmonella berta
  REGION 1..222: note = tr|A0A3V6R1S7|A0A3V6R1S7_SALBE GTP cyclohydrolase 1; OS = Salmonella berta OX=28142 GN=folE PE=3 SV=1

SEQ ID NO: 14424 - protein, 222 aa, unidentified; identical to SEQ ID NO: 14419
  source 1..222: note = Salmonella blockley
  REGION 1..222: note = tr|A0A5I2JXM9|A0A5I2JXM9_SALBL GTP cyclohydrolase I FolE OS=Salmonella blockley OX=57741 GN=folE PE=4 SV=1

SEQ ID NO: 14425 - protein, 222 aa, Salmonella bongori
  REGION 1..222: note = tr|A0A248K7T1|A0A248K7T1_SALBN GTP cyclohydrolase 1; OS = Salmonella bongori serovar 66:z41:- str. SA19983605; OX = 1243617 GN=folE PE=3 SV=1
MPSLSKEAALVHDALVARGLETPLRPAVDELDNETRKRLIAGHMTEIMQLLNLDLSDDSLMETPHRIAKMYVDEIFAGLDYTNFPKITLIENKMKVDEMVTVRDITLTSTCEHHFVTIDGKATVAYIPKDAVIGLSKINRIVQFFAQRPQVQERLTQQILTALQTLLGTNNVAVSIDAVHYCVKARGIRDATSATTTTSLGGLFKSSQNTRQEFLRAVRHHS

SEQ ID NO: 14426 - protein, 222 aa, Salmonella bongori; identical to SEQ ID NO: 14425
  REGION 1..222: note = tr|A0A5I6N0A3|A0A5I6N0A3_SALBN GTP cyclohydrolase I FolE OS=Salmonella bongori CFSAN000510 OX=1299282 GN=folE; PE = 4 SV=1

SEQ ID NO: 14427 - protein, 222 aa, unidentified
  source 1..222: note = Salmonella choleraesuis
  REGION 1..222: note = sp|Q57ME6|GCH1_SALCH GTP cyclohydrolase 1; OS = Salmonella choleraesuis (strain SC-B67) OX=321314; GN = folE PE=3 SV=1
MPSLSKEAALVHDALVARGLETPLRPPMDELDNETRKSLIAGHMTEIMQLLNLDLSDDSLMETPHRIAKMYVDEIFAGLDYANFPKITLIENKMKVDEMVTVRDITLTSTCEHHFVTIDGKATVAYIPKDSVIGLSKINRIVQFFAQRPQVQERLTQQILTVLQTLLGTNNVAVSIDAVHYCVKARGIRDATSATTTTSLGGLFKSSQNTRQEFLRAVRHHP

SEQ ID NO: 14428 - protein, 222 aa, unidentified; identical to SEQ ID NO: 14419
  source 1..222: note = Salmonella derby
  REGION 1..222: note = tr|A0A3V8R203|A0A3V8R203_SALDE GTP cyclohydrolase 1; OS = Salmonella derby OX=28144 GN=folE PE=3 SV=1

SEQ ID NO: 14429 - protein, 170 aa, unidentified
  source 1..170: note = Salmonella diarizonae
  REGION 1..170: note = tr|A0A379TWH4|A0A379TWH4_SALDZ GTP cyclohydrolase 1; OS = Salmonella diarizonae OX=59204 GN=folE PE=3 SV=1
MPSLSKEAALVHEALVARGLETPLRPPMDELDNETRKSLIAGHMTEIMLLLNLDLSDDSLMETPHRIAKMYVDEIFAGLDYANFPKITLIENKMKVDEMVTVRDITLTSTCEHHFVTIDGKATVAYIPKDSVIGLSKINRIVQFFAQRPQVQERLTQQILTALQTLLRHQ

SEQ ID NO: 14430 - protein, 222 aa, unidentified
  source 1..222: note = Salmonella diarizonae
  REGION 1..222: note = tr|A0A2I5HEJ5|A0A2I5HEJ5_SALDZ GTP cyclohydrolase 1; OS = Salmonella diarizonae OX=59204 GN=folE PE=3 SV=1
MPSLSKEAALVHEALVARGLETPLRPPMDELDNETRKSLIAGHMTEIMLLLNLDLSDDSLMETPHRIAKMYVDEIFAGLDYANFPKITLIENKMKVDEMVTVRDITLTSTCEHHFVTIDGKATVAYIPKDSVIGLSKINRIVQFFAQRPQVQERLTQQILTALQTLLGTNNVAVSIDAVHYCVKARGIRDATSATTTTSLGGLFKSSQNTRQEFLRAVRHHH

SEQ ID NO: 14431 - protein, 222 aa, unidentified; identical to SEQ ID NO: 14419
  source 1..222: note = Salmonella dublin
  REGION 1..222: note = sp|B5FNJ7|GCH1_SALDC GTP cyclohydrolase 1; OS = Salmonella dublin (strain CT_02021853) OX=439851; GN = folE PE=3 SV=1

SEQ ID NO: 14432 - protein, 222 aa, unidentified; identical to SEQ ID NO: 14419
  source 1..222: note = Salmonella dublin
  REGION 1..222: note = tr|A0A3T3IM37|A0A3T3IM37_SALDU GTP cyclohydrolase 1; OS = Salmonella dublin OX=98360 GN=folE PE=3 SV=1

SEQ ID NO: 14433 - protein, 222 aa, Salmonella enterica; identical to SEQ ID NO: 14419
  REGION 1..222: note = tr|G5QLJ2|G5QLJ2_SALRU GTP cyclohydrolase 1; OS = Salmonella enterica subsp. enterica serovar Rubislaw str. A4-653 OX=913081 GN=folE PE=3 SV=1

SEQ ID NO: 14434 - protein, 222 aa, Salmonella enterica
  REGION 1..222: note = tr|A0A379Q1J6|A0A379Q1J6_SALER GTP cyclohydrolase 1; OS = Salmonella enterica OX=28901 GN=folE PE=3 SV=1
MPSLSKEAALVHDALVARGLETPLRPPMDELDNETRKSLIAGHMTEIMQLLNLDLSDDSLMETPHRIAKMYVDEIFAGLDYANFPKITLIENKMKVDEMVTVRDITLTSTCEHHFVIIDGKATVAYIPKDSVIGLSKINRIVQFFAQRPQVQERLTQQILTALQTLLGTNNVAVSIDAVHYCVKARGIRDATSATTTTSLGGLFKSSQNTRQEFLRAVRHHP

SEQ ID NO: 14435 - protein, 222 aa, unidentified; identical to SEQ ID NO: 14419
  source 1..222: note = Salmonella enteritidis
  REGION 1..222: note = sp|B5R163|GCH1_SALEP GTP cyclohydrolase 1; OS = Salmonella enteritidis PT4 (strain P125109) OX=550537; GN = folE PE=3 SV=1

SEQ ID NO: 14436 - protein, 222 aa, unidentified; identical to SEQ ID NO: 14430
  source 1..222: note = Salmonella enteritidis
  REGION 1..222: note = tr|A0A3R0QB36|A0A3R0QB36_SALEN GTP cyclohydrolase 1; OS = Salmonella enteritidis OX=149539 GN=folE PE=3 SV=1

SEQ ID NO: 14437 - protein, 222 aa, unidentified
  source 1..222: note = Salmonella gallinarum
  REGION 1..222: note = sp|B5RC32|GCH1_SALG2 GTP cyclohydrolase 1; OS = Salmonella gallinarum (strain 287/91 / NCTC 13346); OX = 550538 GN=folE PE=3 SV=1
MPSLSKEAALVHDALVARGLETPLRPPMDELDNETRKSLIAGHMTEIMQLLNLDLSDDSLMETPHRIAKMYVDEIFAGLDYANFPKITLIENKMKVDEMVTVRDITLTSTCEHHFVTIDGKATVAYIPKDYVIGLSKINRIVQFFAQRPQVQERLTQQILTALQTLLGTNNVAVSIDAVHYCVKARGIRDATSATTTTSLGGLFKSSQNTRQEFLRAVRHHP

SEQ ID NO: 14438 - protein, 222 aa, unidentified; identical to SEQ ID NO: 14437
  source 1..222: note = Salmonella gallinarum
  REGION 1..222: note = tr|A0A3V9NKN5|A0A3V9NKN5_SALGL GTP cyclohydrolase 1; OS = Salmonella gallinarum OX=594 GN=folE PE=3 SV=1

SEQ ID NO: 14439 - protein, 222 aa, unidentified; identical to SEQ ID NO: 14419
  source 1..222: note = Salmonella hadar
  REGION 1..222: note = tr|A0A3V2W8F8|A0A3V2W8F8_SALHA GTP cyclohydrolase 1; OS = Salmonella hadar OX=149385 GN=folE PE=3 SV=1

SEQ ID NO: 14440 - protein, 222 aa, unidentified; identical to SEQ ID NO: 14419
  source 1..222: note = Salmonella heidelberg
  REGION 1..222: note = sp|B4TAL5|GCH1_SALHS GTP cyclohydrolase 1; OS = Salmonella heidelberg (strain SL476) OX=454169 GN=folE; PE = 3 SV=1

SEQ ID NO: 14441 - protein, 222 aa, unidentified
  source 1..222: note = Salmonella houtenae
  REGION 1..222: note = tr|A0A1J6YLX8|A0A1J6YLX8_SALHO GTP cyclohydrolase 1; OS = Salmonella houtenae OX=59205 GN=folE PE=3 SV=1
MPSLSKEAALVHDALVARGLETPLRPPMDELDNETRKRLIAGHMTEIMQLLNLDLSDDSLMETPHRIAKMYVDEIFAGLDYANFPKITLIENKMKVDEMVTVRDITLTSTCEHHFVTIDGKATVAYIPKDSVIGLSKINRIVQFFAQRPQVQERLTQQILTALQTLLGTNNVAVSIDAVHYCVKARGIRDATSATTTTSLGGLFKSSQNTRQEFLRAVRHHH

SEQ ID NO: 14442 - protein, 195 aa, unidentified
  source 1..195: note = Salmonella houtenae
  REGION 1..195: note = tr|A0A484W132|A0A484W132_SALHO GTP cyclohydrolase 1; OS = Salmonella houtenae OX=59205 GN=folE PE=3 SV=1
MDELDNETRKRLIAGHMTEIMQLLNLDLSDDSLMETPHRIAKMYVDEIFAGLDYANFPKITLIENKMKVDEMVTVRDITLTSTCEHHFVTIDGKATVAYIPKDSVIGLSKINRIVQFFAQRPQVQERLTQQILTALQTLLGTNNVAVSIDAVHYCVKARGIRDATSATTTTSLGGLFKSSQNTRQEFLRAVRHHH

SEQ ID NO: 14443 - protein, 222 aa, unidentified; identical to SEQ ID NO: 14419
  source 1..222: note = Salmonella infantis
  REGION 1..222: note = tr|A0A5F1JIC5|A0A5F1JIC5_SALIN GTP cyclohydrolase 1; OS = Salmonella infantis OX=595 GN=folE PE=3 SV=1

SEQ ID NO: 14444 - protein, 222 aa, unidentified
  source 1..222: note = Salmonella infantis
  REGION 1..222: note = tr|A0A3R0D282|A0A3R0D282_SALIN GTP cyclohydrolase 1; OS = Salmonella infantis OX=595 GN=folE PE=3 SV=1
MPSLSKESALVHDALVARGLETPLRPPMDELDNETRKSLIAGHMTEIMQLLNLDLSDDSLMETPHRIAKMYVDEIFAGLDYANFPKITLIENKMKVDEMVTVRDITLTSTCEHHFVTIDGKATVAYIPKDSVIGLSKINRIVQFFAQRPQVQERLTQQILTALQTLLGTNNVAVSIDAVHYCVKARGIRDATSATTTTSLGGLFKSSQNTRQEFLRAVRHHP

SEQ ID NO: 14445 - protein, 222 aa, unidentified; identical to SEQ ID NO: 14419
  source 1..222: note = Salmonella montevideo
  REGION 1..222: note = tr|A0A3A3JTU5|A0A3A3JTU5_SALMO GTP cyclohydrolase 1; OS = Salmonella montevideo OX=115981 GN=folE PE=3 SV=1

SEQ ID NO: 14446 - protein, 222 aa, unidentified; identical to SEQ ID NO: 14419
  source 1..222: note = Salmonella moscow
  REGION 1..222: note = tr|A0A5H7LMA5|A0A5H7LMA5_SALMC GTP cyclohydrolase I FolE OS=Salmonella moscow OX=28146 GN=folE PE=4 SV=1

SEQ ID NO: 14447 - protein, 222 aa, unidentified; identical to SEQ ID NO: 14419
  source 1..222: note = Salmonella muenchen
  REGION 1..222: note = tr|A0A3T3EUP9|A0A3T3EUP9_SALMU GTP cyclohydrolase 1; OS = Salmonella muenchen OX=596 GN=folE PE=3 SV=1

SEQ ID NO: 14448 - protein, 222 aa, unidentified; identical to SEQ ID NO: 14419
  source 1..222: note = Salmonella muenster
  REGION 1..222: note = tr|A0A5H9DTK9|A0A5H9DTK9_SALMS GTP cyclohydrolase I FolE OS=Salmonella muenster OX=82689 GN=folE PE=3 SV=1

SEQ ID NO: 14449 - protein, 222 aa, unidentified; identical to SEQ ID NO: 14419
  source 1..222: note = Salmonella newport
  REGION 1..222: note = sp|B4SY26|GCH1_SALNS GTP cyclohydrolase 1; OS = Salmonella newport (strain SL254) OX=423368 GN=folE; PE = 3 SV=1

SEQ ID NO: 14450 - protein, 222 aa, unidentified; identical to SEQ ID NO: 14419
  source 1..222: note = Salmonella newport
  REGION 1..222: note = tr|A0A0R9NC57|A0A0R9NC57_SALNE GTP cyclohydrolase 1; OS = Salmonella newport OX=108619 GN=folE PE=3 SV=1

SEQ ID NO: 14451 - protein, 222 aa, unidentified; identical to SEQ ID NO: 14419
  source 1..222: note = Salmonella oranienberg
  REGION 1..222: note = tr|A0A3Z0YT95|A0A3Z0YT95_SALON GTP cyclohydrolase 1; OS = Salmonella oranienberg OX=28147 GN=folE PE=3 SV=1

SEQ ID NO: 14452 - protein, 222 aa, unidentified; identical to SEQ ID NO: 14419
  source 1..222: note = Salmonella paratyphi
  REGION 1..222: note = sp|B5BE43|GCH1_SALPK GTP cyclohydrolase 1; OS = Salmonella paratyphi A (strain AKU_12601) OX=554290; GN = folE PE=3 SV=1

SEQ ID NO: 14453 - protein, 222 aa, unidentified; identical to SEQ ID NO: 14419
  source 1..222: note = Salmonella paratyphi
  REGION 1..222: note = tr|A0A5I3LKH2|A0A5I3LKH2_SALPT GTP cyclohydrolase I FolE OS=Salmonella paratyphi A OX=54388 GN=folE PE=3 SV=1

SEQ ID NO: 14454 - protein, 222 aa, unidentified; identical to SEQ ID NO: 14419
  source 1..222: note = Salmonella potsdam
  REGION 1..222: note = tr|A0A5I6S1Y8|A0A5I6S1Y8_SALPO GTP cyclohydrolase I FolE OS=Salmonella potsdam OX=597 GN=folE PE=4 SV=1

SEQ ID NO: 14455 - protein, 222 aa, unidentified; identical to SEQ ID NO: 14419
  source 1..222: note = Salmonella rubislaw
  REGION 1..222: note = tr|A0A3V7IN71|A0A3V7IN71_SALRU GTP cyclohydrolase 1; OS = Salmonella rubislaw OX=598 GN=folE PE=3 SV=1

SEQ ID NO: 14456 - protein, 222 aa, unidentified; identical to SEQ ID NO: 14419
  source 1..222: note = Salmonella schwarzengrund
  REGION 1..222: note = sp|B4TNQ0|GCH1_SALSV GTP cyclohydrolase 1; OS = Salmonella schwarzengrund (strain CVM19633) OX=439843; GN = folE PE=3 SV=1

SEQ ID NO: 14457 - protein, 222 aa, unidentified
  source 1..222: note = Salmonella senftenberg
  REGION 1..222: note = tr|A0A3V2LLV6|A0A3V2LLV6_SALSE GTP cyclohydrolase 1; OS = Salmonella senftenberg OX=28150 GN=folE PE=3 SV=1
MPSLSKEAALVHDALVARGLETPLRPPMDELDNEKRKSLIAGHMTEIMQLLNLDLSDDSLMETPHRIAKMYVDEIFAGLDYANFPKITLIENKMKVDEMVTVRDITLTSTCEHHFVTIDGKATVAYIPKDSVIGLSKINRIVQFFAQRPQVQERLTQQILTALQTLLGTNNVAVSIDAVHYCVKARGIRDATSATTTTSLGGLFKSSQNTRQEFLRAVRHHP

SEQ ID NO: 14458 - protein, 222 aa, unidentified; identical to SEQ ID NO: 14419
  source 1..222: note = Salmonella senftenberg
  REGION 1..222: note = tr|A0A3V9FKQ7|A0A3V9FKQ7_SALSE GTP cyclohydrolase 1; OS = Salmonella senftenberg OX=28150 GN=folE PE=3 SV=1

SEQ ID NO: 14459 - protein, 222 aa, Salmonella sp.; identical to SEQ ID NO: 14419
  REGION 1..222: note = tr|A0A509BW66|A0A509BW66_9ENTR GTP cyclohydrolase 1; OS = Salmonella sp. NCTC 6947 OX=2583581 GN=folE PE=3 SV=1

SEQ ID NO: 14460 - protein, 222 aa, Salmonella sp.; identical to SEQ ID NO: 14419
  REGION 1..222: note = tr|A0A509BAI9|A0A509BAI9_9ENTR GTP cyclohydrolase 1; OS = Salmonella sp. NCTC 3046 OX=2583580 GN=folE PE=3 SV=1

SEQ ID NO: 14461 - protein, 222 aa, unidentified; identical to SEQ ID NO: 14419
  source 1..222: note = Salmonella thompson
  REGION 1..222: note = tr|A0A403SLA8|A0A403SLA8_SALTH GTP cyclohydrolase 1; OS = Salmonella thompson OX=600 GN=folE PE=3 SV=1

SEQ ID NO: 14462 - protein, 222 aa, unidentified; identical to SEQ ID NO: 14419
  source 1..222: note = Salmonella typhi
  REGION 1..222: note = sp|P64210|GCH1_SALTI GTP cyclohydrolase 1; OS = Salmonella typhi OX=90370 GN=folE PE=3 SV=2

SEQ ID NO: 14463 - protein, 222 aa, unidentified; identical to SEQ ID NO: 14419
  source 1..222: note = Salmonella typhi
  REGION 1..222: note = tr|A0A4V6HLV5|A0A4V6HLV5_SALTI GTP cyclohydrolase 1; OS = Salmonella typhi OX=90370 GN=folE PE=3 SV=1

SEQ ID NO: 14464 - protein, 222 aa, unidentified; identical to SEQ ID NO: 14419
  source 1..222: note = Salmonella typhimurium
  REGION 1..222: note = sp|P64209|GCH1_SALTY GTP cyclohydrolase 1; OS = Salmonella typhimurium (strain LT2 / SGSC1412 / ATCC 700720) OX=99287 GN=folE PE=3 SV=2

SEQ ID NO: 14465 - protein, 222 aa, unidentified; identical to SEQ ID NO: 14419
  source 1..222: note = Salmonella typhimurium
  REGION 1..222: note = tr|A0A3Z6P083|A0A3Z6P083_SALTU GTP cyclohydrolase 1; OS = Salmonella typhimurium (strain ATCC 68169 / UK-1); OX = 990282 GN=folE PE=3 SV=1

SEQ ID NO: 14466 - protein, 222 aa, unidentified; identical to SEQ ID NO: 14419
  source 1..222: note = Salmonella virchow
  REGION 1..222: note = tr|A0A3V4BFA9|A0A3V4BFA9_SALVI GTP cyclohydrolase 1; OS = Salmonella virchow OX=48409 GN=folE PE=3 SV=1

SEQ ID NO: 14467 - protein, 194 aa, Salsuginibacillus halophilus
  REGION 1..194: note = tr|A0A2P8HWD5|A0A2P8HWD5_9BACI GTP cyclohydrolase 1; OS = Salsuginibacillus halophilus OX=517424 GN=folE PE=3 SV=1
MSSFDHEKIQQAVRMMLEGIGEDPDREGLLDTPKRVAKMYEEVFQGLYESPEEHLMTVFGEDHEELVLVKDIPFYSMCEHHLVPFYGHAHVGYIPKDGKVTGLSKLARTVEAVTRRPQLQERITSSVAEAIRETLAPHGVMVVVEAEHMCMTMRGVKKPGAVTVTSAVRGSFETDAAARSEVLAFLDRNSKPGG

SEQ ID NO: 14468 - protein, 220 aa, Samsonia erythrinae
  REGION 1..220: note = tr|A0A4R3VUW6|A0A4R3VUW6_9GAMM GTP cyclohydrolase 1; OS = Samsonia erythrinae OX=160434 GN=folE PE=3 SV=1
MSSLSKEAVMVHEALLARGLETPLRGALLERDMRKQRISEHMTEIMKLLSLDLSDDSLAETPTRIAKMYVDEIFSGLDYANFPKITIIENKMKVDEMVTVRDITLTSTCEHHFVTIDGKATVAYIPKDGVIGLSKLNRIVQFFSQRPQVQERLTQQILVALQTLLGTNNVAVSIDAVHYCVKARGIRDATSATTTTSLGGLFKSSQNTRQEFLRAVRHHN

SEQ ID NO: 14469 - protein, 209 aa, Sandaracinobacter sp.
  REGION 1..209: note = tr|A0A501XEV2|A0A501XEV2_9SPHN GTP cyclohydrolase 1; OS = Sandaracinobacter sp. PAMC 28131 OX=1715348 GN=folE; PE = 3 SV=1
MMMADYQMQQDDPPVADRDAAIPDTVLDAVRTLITWAGDDPTREGLLDTPGRVARAYKEYFRGYGEDPREHLLRTFREVGGYDEIVLLRDIPFHSHCEHHMAPIIGKVHIAYLPTDRVVGLSKLARVALGFARRLQVQERLTAEIADAIQEVLNPRGVAVVVEASHACMSARGVMTTGATMTTSRMMGVFREDERSRKEVLALMGAGSR

SEQ ID NO: 14470 - protein, 261 aa, Sandaracinus sp.; identical to SEQ ID NO: 11399
  REGION 1..261: note = tr|A0A2E0TGI0|A0A2E0TGI0_9DELT GTP cyclohydrolase FolE2 OS=Sandaracinus sp. OX=2024858 GN=folE2 PE=3 SV=1

SEQ ID NO: 14471 - protein, 252 aa, Sandaracinus sp.
  REGION 1..252: note = tr|A0A2D9T1H7|A0A2D9T1H7_9DELT GTP cyclohydrolase FolE2 OS=Sandaracinus sp. OX=2024858 GN=folE2 PE=3 SV=1
MRDVQNEPEERGLTLDAVGVAGVRLPVVAFGGPTVAVADLEVSLAADRRGTHMSRLVELLHQHRETVDFAGVEALLEATADRLEAEEVRVTLRFAHFVTRTAPVSGTAGLLDLDVAFVGRRAGGRNTVQLEVTVPVQSLCPCSKAVSDYGAHNQRGRVTVQITPTGPGLEPDALAALVEAEASAPIYPIIKRGDERHVTMQAYDNPVFVEDLTRGVAAALEAHPLVGAYRVRVVNEESIHNHQAVAERSGGR

SEQ ID NO: 14472 - protein, 197 aa, unidentified
  source 1..197: note = Sandarakinorhabdus cyanobacteriorum
  REGION 1..197: note = tr|A0A255YLF9|A0A255YLF9_9SPHN GTP cyclohydrolase 1; OS = Sandarakinorhabdus cyanobacteriorum OX=1981098 GN=folE; PE = 3 SV=1
MDAPAPADFVTIPQAEAEEAVRTLIRWTGDDPTREGLLDTPKRVAKAWREYTKGYAEDPGQHLSRTFAEVGGYDEIVILRDIPFQSHCEHHMAPIIGKGHIAYLPRSRVVGISKLARVLHGYARRLQVQERLTAEVADCIQTHLDPVGVAVVIEATHACMSARGVMTPGVVMTTSRMMGVFRDEPSSRSEVLRLMGK

SEQ ID NO: 14473 - protein, 207 aa, Sandarakinorhabdus sp.
  REGION 1..207: note = tr|A0A552UFH8|A0A552UFH8_9SPHN GTP cyclohydrolase 1; OS = Sandarakinorhabdus sp. LB1R16 OX=2593303 GN=folE PE=3; SV = 1
MDDFLDDGPERSVQAMGHEPIPQARAEDAVRELLRWAGDDPEREGLLDTPARVARAFREYFRGYLEDPGIHLSRTFGEVGGYDEIVLLKDIPFQSHCEHHMAPIIGKAHIAYLPRDRVVGISKLARVLHGYARRLQVQERLTAEVADCIQHHLDPVGVAVVIEATHACMSARGVMTAGVVMTTSRMMGVFRDDDRSRKEVLALMGRG

SEQ ID NO: 14474 - protein, 201 aa, Sanguibacter antarcticus
  REGION 1..201: note = tr|A0A2A9E862|A0A2A9E862_9MICO GTP cyclohydrolase 1; OS = Sanguibacter antarcticus OX=372484 GN=folE PE=3 SV=1
MTPTGAPASPADAGEVDLERAAAAVRELLLAIGEDPDRDGLRDTPARVARACTEIFSGLRQSPADVLNAVFDIGHEEMILVKDIEVYSTCEHHLVPFHGVAHVGYIPGPDGRVTGLSKLARLVDVFARRPQIQERLTAQVADSLVEALSPAGVIVVVECEHLCMSMRGVRKPGSRTVTSAVRGQMRNPATRAEAMSLIIGR

SEQ ID NO: 14475 - protein, 200 aa, unidentified
  source 1..200: note = Sanguibacter gelidistatuariae
  REGION 1..200: note = tr|A0A1G6HSX5|A0A1G6HSX5_9MICO GTP cyclohydrolase 1; OS = Sanguibacter gelidistatuariae OX=1814289 GN=folE PE=3; SV = 1
MTDPNESPMPAAEVDFARAEAAVRELLIAVGEDPDREGLLDTPGRVARAYAETFAGLRQNPGDVLNAVFDIGGHEEMILVKDIEVYSTCEHHLVPFHGVAHVGYIPGLDGRVTGLSKLARLVDVFARRPQVQERLTAQIADALVEFLAPRGVIVVIECEHLCMSMRGVRKAGSRTVTSAVRGQMRDGATRAEAMSLIIGR

SEQ ID NO: 14476 - protein, 219 aa, Sanguibacter keddieii
  REGION 1..219: note = tr|D1BDA0|D1BDA0_SANKS GTP cyclohydrolase 1; OS = Sanguibacter keddieii (strain ATCC 51767 / DSM 10542 / NCFB 3025 / ST-74) OX=446469 GN=folE PE=3 SV=1
MSDATGHLDASGAPAEAAGVDLDGAGVHAEHAQVDLPRAAAAVRELLIAVGEDPDREGLVDTPARVARAYAETFAGLRQDPADVLNAVFDIGHEEMILVRDIELYSTCEHHLVPFHGVAHVGYIPGEDGRVTGLSKLARLVDVYAKRPQVQERLTAQVADALVEHLSPRGVIVVIECEHLCMSMRGVRKPGSRTLTSAVRGQMRDGATRAEAMSLITGR

SEQ ID NO: 14477 - protein, 188 aa, Sanguibacter marinus
  REGION 1..188: note = tr|A0A1I2GWW1|A0A1I2GWW1_9MICO GTP cyclohydrolase 1; OS = Sanguibacter marinus OX=285351 GN=folE PE=3 SV=1
MSVDLARAEAAVRELLLAVGEDPDRDGLTDTPGRVARMYAETFAGLDQDPETILGTTFDIDHEEMILVRDIEVYSTCEHHLVPFHGVAHVGYIPGADGRVTGLSKLARLVDLYARRPQVQERLTTQVADALVQHLAPRGVIVVIEAEHLCMSMRGVRKPGSRTLTSAVRGQMRDGATRAEAMSLITGR

SEQ ID NO: 14478 - protein, 203 aa, Sanguibacter soli
  REGION 1..203: note = tr|A0A2A9EEG2|A0A2A9EEG2_9MICO GTP cyclohydrolase 1; OS = Sanguibacter soli OX=442709 GN=folE PE=3 SV=1
MSEHLMPEAGAAVAAGHVDLARAEAAVRELLLAVGEDPDREGLLETPARVARAYAETFAGLHQDPADVLSTTFDIGHDEMVLVKDIELYSTCEHHLVPFHGVAHVGYIPNVDGRVTGLSKLARLVDVFARRPQVQERLTSQVADALVEHLQPRGVIVVIECEHLCMSMRGVRKPGSRTVTSAVRGQMRNGTTRAEAMSLILGH

SEQ ID NO: 14479 - protein, 202 aa, Sanguibacter sp.
  REGION 1..202: note = tr|A0A0Q6FYM6|A0A0Q6FYM6_9MICO GTP cyclohydrolase 1; OS = Sanguibacter sp. Leaf3 OX=1736209 GN=folE PE=3 SV=1
MSDVTDESGVHAEHGQVDLPRAAAAVRELLIAVGEDPDREGLLDTPARVARAYAETFAGLRQDPADVLNAVFDIGHEEMILVRDIEVYSTCEHHLVPFHGVAHVGYIPGVDGRVTGLSKLARLVDVFAKRPQVQERLTAQVADALVEHLAPRGVIVVIECEHLCMSMRGVRKPGSRTVTSAVRGQMREAATRAEAMSLIVGR

SEQ ID NO: 14480 - protein, 207 aa, unidentified
  source 1..207: note = Sanguibacteroides justesenii
  REGION 1..207: note = tr|A0A0C3RJT4|A0A0C3RJT4_9PORP GTP cyclohydrolase 1; OS = Sanguibacteroides justesenii OX=1547597 GN=folE PE=3; SV = 1
MDFETDNNNEFYHKIECFNKERTEKLSYHYNEIIKLLGEDPCREGLVKTPYRVAKAMQFMTQGYTQDPEKILRSALFKEDYRQMVIVKDIEIYSLCEHHMLPFIGRAHVAYIPNGYITGLSKIARVVEAFARRLQVQERLTHDIKTCIQNTLNPLGVAVVIEAQHMCMILRGVQKQHSVTTTSDFSGAFEKLATREEFIRLISNKFH

SEQ ID NO: 14481 - protein, 208 aa, unidentified
  source 1..208: note = Sanguibacteroides justesenii
  REGION 1..208: note = tr|A0A318N7X9|A0A318N7X9_9PORP GTP cyclohydrolase 1; OS = Sanguibacteroides justesenii OX=1547597 GN=folE PE=3; SV = 1
MMDFETDNNNEFYHKIECFNKERTEKLSYHYNEIIKLLGEDPCREGLVKTPYRVAKAMQFMTQGYTQDPEKILRSALFKEDYRQMVIVKDIEIYSLCEHHMLPFIGRAHVAYIPNGYITGLSKIARVVEAFARRLQVQERLTHDIKTCIQNTLNPLGVAVVIEAQHMCMILRGVQKQHSVTTTSDFSGAFEKLATREEFIRLISNKFH

SEQ ID NO: 14482 - protein, 231 aa, Saprospira grandis
  REGION 1..231: note = tr|H6L144|H6L144_SAPGL GTP cyclohydrolase 1; OS = Saprospira grandis (strain Lewin) OX=984262 GN=folE; PE = 3 SV=1
MNQSVKTLTAEEQALFDEMGDQHILSSIDTPMREDAFLLSDEEKVEQIQAYFKAIMEIMGLDLNDDSLKGTPYRVAKMYVKEIFSGLNPANKPKIALFENKYQYEEMLIEKNILLQSTCEHHFLPIYGKAHVAYIPNGKVIGLSKINRLVQYYAKRPQVQERLSRQILEELKTSLGTNDVAVYIDAKHMCVSTRGIQDISSSTVTTAYSGQFEKEQFRKEFLAAIHHDVRY

SEQ ID NO: 14483 - protein, 231 aa, Saprospira grandis
  REGION 1..231: note = tr|J0XT47|J0XT47_9BACT GTP cyclohydrolase 1; OS = Saprospira grandis DSM 2844 OX=694433 GN=folE PE=3 SV=1
MNQSVKTLTAKEQALFDEMGDQHILSSIDTPMREDAFLLSDEEKVEQIQTHFKAIMEIMGLDLSDDSLKGTPYRVAKMYVKEIFSGLNPANKPKIALFKNKYQYEEMLIEKNILLQSTCEHHFLPIYGKAHVAYIPNGKVIGLSKINRLVQYYAKRPQVQERLSRQILEELKTSLGTNDVAVYIDAKHMCVSSRGIQDISSSTVTTAYSGQFEKEQFRKEFLAAIHHDVRY

SEQ ID NO: 14484 - protein, 198 aa, unidentified
  source 1..198: note = Saprospiraceae bacterium
  REGION 1..198: note = tr|A0A521UJM0|A0A521UJM0_9BACT GTP cyclohydrolase 1; OS = Saprospiraceae bacterium OX=2202734 GN=folE PE=3 SV=1
MSYSRKDKYNAEMTDNLTHDYRSILAKTGEDAHREGLSKTPERAAKAMQFLTQGYGMDAEAILRSAMFKEEYSEMVLVKDIEIYSLCEHHLLPFFGKAHVAYIPNGHIVGLSKIPRVVDVFARRLQVQERLTLEILNSIQNTLKPLGVAVVIEAMHLCMMMRGVQKQNSVTTTSAFTGAFENHETRTEFMHLIGAKLH

SEQ ID NO: 14485 - protein, 273 aa, unidentified
  source 1..273: note = Saprospirales bacterium
  REGION 1..273: note = tr|A0A1Z9NAB5|A0A1Z9NAB5_9BACT GTP cyclohydrolase FolE2 OS=Saprospirales bacterium TMED214 OX=1986670; GN = folE2 PE=3 SV=1
MTSEKTSKEGLPDIQSSVDDRNIAISKVGVTSIRWPIRFVSSSQGGTAEQSTTASFDMFVSLPANRKGTHMSRFLQLLSGWDACFSLESLKKFCQTICDKLDSDDAHVTLRFPYFVDRRAPVTGEAGKIQLEVTIDVKSGSQNDLVMTVTGPATSLCPCSKEISARGAHNQRCKLAVSFRCKPQTEISIEELYEMMEQSASTQIFPILKRSDEKWVTEAAYDNPKFVEDIVRDLALALSGDDRIAWYRCSSENYESIHQHNAYGEIESDMSSA

SEQ ID NO: 14486 - protein, 180 aa, unidentified
  source 1..180: note = Saprospirales bacterium
  REGION 1..180: note = tr|A0A3C0HBI5|A0A3C0HBI5_9BACT GTP cyclohydrolase 1 (Fragment) OS=Saprospirales bacterium OX=2026790 GN=folE; PE = 3 SV=1
ERYADILDFVGEDKEREGLLKTPERASKAMQFLTSGYDLDAEEILKGAIFKEDYSEMVLVKDIELYSLCEHHMLPFFGKAHIAYIPNGHIVGLSKIPRIVDVFARRLQVQERLTHQILDAIQKTLNPLGAAIVIEASHMCMMMRGVQKQNSMTTTSAFTGQFLNAETRAEFLSLIPSRSR

SEQ ID NO: 14487 - protein, 205 aa, unidentified
  source 1..205: note = Unknown
  REGION 1..205: note = tr|A0A2A5YCV5|A0A2A5YCV5_9PROT GTP cyclohydrolase 1; OS = SAR116 cluster bacterium MED-G04 OX=1986233 GN=folE; PE = 3 SV=1
MNPYEANEISLAHDNETRPSREEAEEAVRTLIRWAGDSPEREGLTDTPSRVVRSYEEFFAGYREDAVGMLARTFEEVEGYDDLVMLRNIRVESYCEHHIVPILGTAHIAYLPDQRVVGISKLARVIDIFAKRMQTQETMTAQIADTIQSVLMPKGVALLVDATHQCMTTRGVHKSDVSMVTTRFTGVFNDDHNLRDRFLTQIGQQ

SEQ ID NO: 14488 - protein, 220 aa, unidentified
  source 1..220: note = Unknown
  REGION 1..220: note = tr|A0A2D7UCE0|A0A2D7UCE0_9PROT GTP cyclohydrolase 1; OS = SAR116 cluster bacterium OX=2024888 GN=folE PE=3 SV=1
MTPYDNGTDRNGSDRNGTGKAAKPANARQAAARPTRDEAEAAVETLLRWMGESPAREGLVDTPARVVRAWEEFCSGYGEDPAALLNSTFEEVEGYDDMVMLRSIRMESHCEHHLVPILGTAHIAYLPDQRVVGISKLARVLDSFAHRLQTQETLTAQVADCIQTALQPRGVAVLIDAQHQCMTTRGVHKPDVSMVTTSFTGAFQDDRDLRDRFLSEARRG

SEQ ID NO: 14489 - protein, 191 aa, unidentified
  source 1..191: note = Unknown
  REGION 1..191: note = tr|A0A2N0M0E0|A0A2N0M0E0_9CHLR GTP cyclohydrolase 1; OS = SAR202 cluster bacterium MP-SAtl-SRR3965592-G1; OX = 1926619 GN=folE PE=3 SV=1
MEANKTVQKQRIKEAVAEILAAIGDDPSREGLLNTPDRVARMYEGLFSGIGIDTEDAIDTVFEAEGNDPVIVNGLVFYSVCEHHLLPFFGEARLGYVPNGKIAGISKLARALEIAAHRPQVQERLTADVANAIFNVLKPDGVVVELEAEHLCMAMRGVKKSGTRVLTSATRGEFENYPSGREGLLALMHSR

SEQ ID NO: 14490 - protein, 185 aa, unidentified
  source 1..185: note = Unknown
  REGION 1..185: note = tr|A0A2N0KGR8|A0A2N0KGR8_9CHLR GTP cyclohydrolase 1; OS = SAR202 cluster bacterium Casp-Chloro-G3 OX=1926605; GN = folE PE=3 SV=1
MIQQQRIEKAVSDILEAIGDDPQREGLRDTPNRVASMYLELFSGIGLDPAEAIDAVFEEDHHDPVILKNVTFYSVCEHHLLPFFGLAHLAYVPSGKVAGISKLVRSLEVVARRPQVQERLTRQWADAVFTALSPRGLVAQIEAEHLCMSMRGVQKPGSQVVTTAIRGVFTDSSFDSERLLSLLKR

SEQ ID NO: 14491 - protein, 224 aa, unidentified
  source 1..224: note = Unknown
  REGION 1..224: note = tr|A0A2D6YLW2|A0A2D6YLW2_9DELT GTP cyclohydrolase 1; OS = SAR324 cluster bacterium OX=2024889 GN=folE PE=3 SV=1
  VARIANT 27: note = Xaa can be any naturally occurring amino acid
  VARIANT 40: note = Xaa can be any naturally occurring amino acid
  VARIANT 44: note = Xaa can be any naturally occurring amino acid
  VARIANT 60: note = Xaa can be any naturally occurring amino acid
  VARIANT 73: note = Xaa can be any naturally occurring amino acid
MERSYEEFEILGDCHHSTSLETPIRAXAWELSSETKIHRXEEHXREIMHTLGLDLNDDSXQGTPRRVAKMLVXEIFIGLNPEKKPEIRLFQNTYRYQNVLLEKNISFRSFCEHHFLPIVGEAHVAYIPKNGVIGLSKINRIVDYYSRRPQVQERLTRQIAEELERALGTPDIAVLLDAKHFCVMMRGIEDQTSSTITTEYRGCFQKVERREEFLRYIHSKSKPA

SEQ ID NO: 14492 - protein, 200 aa, unidentified
  source 1..200: note = Unknown
  REGION 1..200: note = tr|A0A2A4T6H0|A0A2A4T6H0_9DELT GTP cyclohydrolase 1; OS = SAR324 cluster bacterium OX=2024889 GN=folE PE=3 SV=1
MNQRNLVKSVVSREEALECVRKLIQYIGDDPDREGLLDTPERVVRSYDELFSGYHLDPHQILQKTFPTASKEMVVLSNIEIYSTCEHHMIPFVGKCHIAYLPNDRVIGLSKLARMMEVFSRRLQIQEELTLEIAKTLNEHVHAFGVAVMIEAKHMCMSARGVNKQHSVMTTTAMLGRFQEDRELKNDFFRLVDKQSARMH

SEQ ID NO: 14493 - protein, 173 aa, unidentified
  source 1..173: note = Unknown
  REGION 1..173: note = tr|A0A0R2UVE1|A0A0R2UVE1_9GAMM GTP cyclohydrolase 1; OS = SAR86 cluster bacterium BACL1 MAG-120619-bin26; OX = 1655611 GN=folE PE=3 SV=1
MIKDIGEDPARDGLLETPKRAAAAFKFLNHGYKMSLDKVVNNALFDSDIEDMVLVRDIEFYSLCEHHMLPFNGRCHVAYIPNGKVLGLSKIARIVDMFARRLQIQERLTHQVAEAITKTTGCKGCAVVVEAQHMCMVMRGVQKQNSVMKTSSMLGAFRNNPSTRAEFLALLPS

SEQ ID NO: 14494 - protein, 173 aa, unidentified; identical to SEQ ID NO: 14493
  source 1..173: note = Unknown
  REGION 1..173: note = tr|A0A0R2U606|A0A0R2U606_9GAMM GTP cyclohydrolase 1; OS = SAR86 cluster bacterium BACL1 MAG-120820-bin45; OX = 1655612 GN=folE PE=3 SV=1

SEQ ID NO: 14495 - protein, 231 aa, unidentified
  source 1..231: note = Unknown
  REGION 1..231: note = tr|A0A2A5W1U2|A0A2A5W1U2_9GAMM GTP cyclohydrolase 1; OS = SAR92 bacterium MED-G29 OX=1986232 GN=folE PE=3 SV=1
MPTTAIAGNDINFRSNLSKEAQLVRNALIERGLETPMSGLQLSRDEKYARIRDAMTQVVTALGLDLTDDSLEETPHRIAKMYVDEIFSGLNYEKFPKISLIQNKMNTEEMVKVKAIKVISTCEHHFVTIDGLANVAYLPGKKIIGLSKINRIVAFFAQRPQVQERLTQQVLVALQTLLETEDVAVFMDATHYCVKARGIMDASSRTETSALGGHFKSDQSLRDNFLNSQVR

SEQ ID NO: 14496 - protein, 181 aa, unidentified
  source 1..181: note = Unknown
  REGION 1..181: note = tr|A0A0R2TVH4|A0A0R2TVH4_9GAMM GTP cyclohydrolase 1; OS = SAR92 bacterium BACL26 MAG-121220-bin70 OX=1655626; GN = folE PE=3 SV=1
MNNHFAKIIQSTGEDLNRPGLLDTPARAAKAFAYLTSGYQMDLDTVINNALFPSDSEEMVMVKDIELFSLCEHHMLPFIGKCHVAYIPNGKVLGLSKIARVVDMFSRRLQIQETLAQQIASTIQKVTKAQGVGVIIEAKHMCMMMRGVEKQNSSMKTSAMLGTFRSSQATRTEFFSLLGNS

SEQ ID NO: 14497 - protein, 230 aa, unidentified
  source 1..230: note = Unknown
  REGION 1..230: note = tr|A0A520MGD7|A0A520MGD7_9GAMM GTP cyclohydrolase 1; OS = SAR92 clade bacterium OX=2315479 GN=folE PE=3 SV=1
MPSTAIAENKVAFHSRLSNEAQLVRNALIERGLETPLSGQQLTRDEKYSRIKDAMTQVVSALGLDLTDDSLEETPHRIAKMYVDEIFSGLDYAEFPKISLIDNKMAADEMVKVKAVKVISTCEHHFVTIDGLANVAYLPADKIIGLSKINRIVKFFAQRPQVQERLTQQILVALQTLLETEDVAVFMDATHYCVKARGIMDASSRTETSAMGGRFKSDTNLRQNFLNTLR

SEQ ID NO: 14498 - protein, 211 aa, Scardovia inopinata
  REGION 1..211: note = tr|W5IJ43|W5IJ43_SCAIO GTP cyclohydrolase 1; OS = Scardovia inopinata F0304 OX=641146 GN=folE PE=3 SV=1
MSRTTNSEDSSLSSSLPAPAQHIDSEGVRRAVRDYLIAIGEDPDREGLKGTPDRIARASQELFAGLRQDPQDVLSARFDVKTEDLIVVRDIEFFSVCEHHLLPFHGLAHIGYIPTKDKVVGLSKLARLVQVYARRPQIQERMTQQIADALMDVLEAKGAIVITDCEHMCMSMRGVKQSQARTVTSAVRGYLRQSDTRSEALRLILDAPALH

SEQ ID NO: 14499 - protein, 188 aa, unidentified
  source 1..188: note = Schaalia canis
  REGION 1..188: note = tr|A0A3P1SF63|A0A3P1SF63_9ACTO GTP cyclohydrolase 1; OS = Schaalia canis OX=100469 GN=folE PE=3 SV=1
MYNEEAVVAAVKDLLVAVGEDPTREGIQDTPARMGRAWKELLSGMNEDPREHLRTTFETGTDELVLVRDIEFHSVCEHHLLPFYGRAHVGYIPSQGRVTGLSKLARVVEGYARRPQVQERLTSQIADALHEVLAPQGTIVVMEAEHMCMTMRGIRKPGASTVTSALRGIMNHPATRAEMMALVMGGPR

SEQ ID NO: 14500 - protein, 189 aa, unidentified
  source 1..189: note = Schaalia cardiffensis
  REGION 1..189: note = tr|N6W617|N6W617_9ACTO GTP cyclohydrolase 1; OS = Schaalia cardiffensis F0333 OX=888050 GN=folE PE=3 SV=1
MGYDEARAEAATRELIAAIGEDPDREGLRDTPTRVAKAWKEILNGLNEDPRDYLRTQFEAGTDELVLVRDIVFHSVCEHHLLPFYGRAHVGYIPRGGRVTGLSKLARVVEGYSRRPQVQERLTAQIADAIDEVLHPQGVIVVIEAEHMCMSMRGVSKPGSSTVTSALRGIMNDGATRAEMMSLVLGGRR

SEQ ID NO: 14501 - protein, 189 aa, unidentified
  source 1..189: note = Schaalia georgiae
  REGION 1..189: note = tr|J0NMG2|J0NMG2_9ACTO GTP cyclohydrolase 1; OS = Schaalia georgiae F0490 OX=1125717 GN=folE PE=3 SV=1
MTFDADAVERACRDLLVAVGEDPGREGLVGTPGRMARAWRELLAGVDLDPRDCLRTQFHAGTDELVLVRDIVFHSVCEHHLLPFYGRAHVGYIPRGGVVTGLSKLARLVEGYARRPQVQERLTAQIADALNEVLRPQGVIVVIEAEHMCMSMRGVRKPGSSTVTSALRGIMNDGTTRAEMMALVLGGKR

SEQ ID NO: 14502 - protein, 189 aa, unidentified
  source 1..189: note = Schaalia georgiae
  REGION 1..189: note = tr|A0A3R8QUC2|A0A3R8QUC2_9ACTO GTP cyclohydrolase 1; OS = Schaalia georgiae OX=52768 GN=folE PE=3 SV=1
MTFDADAVERACRDLLVAVGEDPGREGLVGTPGRMARAWRELLAGADLDPRDYLRTQFHAGTDELVLVRDIVFHSVCEHHLLPFYGRAHVGYIPRGGVVTGLSKLARLVEGYARRPQVQERLTAQIADALNEVLHPQGVIVVIEAEHMCMSMRGVCKPGSSTVTSALRGIMNDGTTRAEMMALVLGGKR

SEQ ID NO: 14503 - protein, 189 aa, unidentified
  source 1..189: note = Schaalia meyeri
  REGION 1..189: note = tr|A0A1H1LM00|A0A1H1LM00_9ACTO GTP cyclohydrolase 1; OS = Schaalia meyeri OX=52773 GN=folE PE=3 SV=1
MTYDPAGVSRASHDLLVAIGEDPAREGLVGTPERMARAWQQMCSGLTEDPCEHLRTQFRAGTDELVLVRDIPFHSVCEHHLLPFFGRAHVGYIPRGGVVVGLSKLARVVEGYARRPQVQERLTAQVADAIDQVLAPQGVIVVIEAEHLCMSMRGVSKPGSSTVTSALRGIMSDGATRAEMMALVLSGSR

SEQ ID NO: 14504 - protein, 189 aa, unidentified
  source 1..189: note = Schaalia odontolytica
  REGION 1..189: note = tr|D4TZX2|D4TZX2_9ACTO GTP cyclohydrolase 1; OS = Schaalia odontolytica F0309 OX=649742 GN=folE PE=3 SV=1
MTYDPAGVEKASRDLLVAIGEDPEREGLVGTPDRMARAWREMCKGLTEDPREHLHTQFHAGTDELVLVRDITFFSVCEHHLLPFYGRAHVGYIPRGGVVTGLSKLARVVEGYARRPQVQERLTAQVADAIDEILDPQGVIVVIEAEHMCMSMRGISKPGSSTVTSALRGIMSDGATRAEMMALVLSGSR

SEQ ID NO: 14505 - protein, 189 aa, unidentified
  source 1..189: note = Schaalia odontolytica
  REGION 1..189: note = tr|A0A2X0U6W8|A0A2X0U6W8_9ACTO GTP cyclohydrolase 1; OS = Schaalia odontolytica OX=1660 GN=folE PE=3 SV=1
MTYDPAGVEKASRDLLVAIGEDTEREGLVGTPDRMARAWREMCKGLSEDPREHLRTQFHAGTDELVLVRDITFFSVCEHHLLPFYGRAHVGYIPRGGVVTGLSKLARVVEGYARRPQVQERLTAQVADAIDEILNPQGVIVVIEAEHMCMSMRGISKPGSSTVTSALRGIMNDGATRAEMMALVLSGSR

SEQ ID NO: 14506 - protein, 188 aa, unidentified
  source 1..188: note = Schaalia radingae
  REGION 1..188: note = tr|A0A1H2F5N5|A0A1H2F5N5_9ACTO GTP cyclohydrolase 1; OS = Schaalia radingae OX=131110 GN=folE PE=3 SV=1
MYDQAGVEQAIRDLLVAIGEDPERDGLKDTPARMGRSFRELVGGLAEDPREHLRTTFTTGTNEMVLVRDIEFFSLCEHHLLPFHGKAHVGYIPSDGTVTGLSKLARLVEGYARRPQVQERLTSQIADAMVEILHPQGVTVILEAEHMCMTMRGVSKPGCSTVTSAMRGVMNNAATRSEMMALVMRGRP

SEQ ID NO: 14507 - protein, 190 aa, unidentified
  source 1..190: note = Schaalia turicensis
  REGION 1..190: note = tr|A0A2I1I4S0|A0A2I1I4S0_9ACTO GTP cyclohydrolase 1; OS = Schaalia turicensis OX=131111 GN=folE PE=3 SV=1
MAYDAAGVEKASRDLLIAIGEDPTREGLAGTPDRMARAWREMLSGLEEDPRDYLRTQFEAGTDELVLVRDITFHSICEHHLLPFYGRAHVGYIPCGGKVTGLSKLARVVEGYARRPQVQERLTAQIADAIDEVLHPQGVIVVMEAEHMCMSMRGITKPGSSTVTSALRGIMNDGTTRAEMMALVLGGDRS

SEQ ID NO: 14508 - protein, 190 aa, unidentified
  source 1..190: note = Schaalia turicensis
  REGION 1..190: note = tr|K0ZHC5|K0ZHC5_9ACTO GTP cyclohydrolase 1; OS = Schaalia turicensis ACS-279-V-Col4 OX=883077 GN=folE; PE = 3 SV=1
MAYDAAGVEKASRDLLIAIGEDPTREGMAGTPERMARAWREMLSGLEEDPRDYLRTQFEAGTDELVLVRDITFHSICEHHLLPFYGRAHVGYIPCGGKVTGLSKLARVVEGYARRPQVQERLTAQIADAIDEVLCPQGVIVVMEAEHMCMSMRGITKPGSSTVTSALRGIMNDGTTRAEMMALVLGGDRS

SEQ ID NO: 14509 - protein, 271 aa, Schlegelella thermodepolymerans
  REGION 1..271: note = tr|A0A2S5T9F1|A0A2S5T9F1_9BURK GTP cyclohydrolase FolE2 OS=Schlegelella thermodepolymerans OX=215580; GN = folE2 PE=3 SV=1
MNDMTSLKNLVPASEAMPDVQSSRDERRLAIQRVGVKDVRYPIQLRVGGQVQPGVALWSLDVALPAEQKGTHMSRFVAWLNEQHGKPMDASGLREDLAGMLRLLNASEGRIEASFSFFIRKTAPVSGVESLLDYQGKWIAETRAGRTTVWAEVVVPVKSLCPCSKEISDFGAHNQRSHVTIRAELLGDLDWHEFVRFAEESASSEIWPLLKRTDEKWITERAYQNPKFVEDLVRDVALRLNAEPRIGRYRVEVENFESIHNHSAFAVIDRE

SEQ ID NO: 14510 - protein, 228 aa, Schleiferia sp.
  REGION 1..228: note = tr|A0A401XN83|A0A401XN83_9FLAO GTP cyclohydrolase 1; OS = Schleiferia sp. LA OX=2173829 GN=folE2_1 PE=3 SV=1
MELTPLKDNTDDYYGDTHSSNNPENPLRPDAFDISSEEKIQRIQHHFRAIMETLGLDLTDDSLRGTPKRVAEMMVNELFSGLDPANMPSMSTFENKYKYGEMLVEKNIVVYSTCEHHFLPIVGRAHIAYISAGRVIGLSKMNRIVDYFARRPQVQERMTKQIVHAMQKALGTEDVACVIDAKHLCVNSRGIRDIESSTVTAEYGGRFQQENVKREFLELIGLNTQFGV

SEQ ID NO: 14511 - protein, 247 aa, Schleiferia sp.
  REGION 1..247: note = tr|A0A401XNG0|A0A401XNG0_9FLAO GTP cyclohydrolase 1; OS = Schleiferia sp. LA OX=2173829 GN=folE2_2 PE=3 SV=1
MKRQEIMLNTQEKKRNGVPHLNGNTAHALHIHDDDTCCDDHVCTGKETPLRPDAFELTDDEKIESIAEKFADILHILGLDLDDDSLKDTPRRVAKMYVKEIFSGLHPARKPSVQLFDNPYQYNQMLVEKNITVHSYCEHHLVPIIGVAHVAYISSGKVIGLSKINRIVRYFSKRPQVQERLTEQIAEELKKVLQTEDVAVYIDAEHFCVKTRGIEDTQSTTVTTHYSGKFLTDNQVRQEFLSIISKK

SEQ ID NO: 14512 - protein, 256 aa, Schleiferia thermophila
  REGION 1..256: note = tr|A0A369A7C2|A0A369A7C2_9FLAO GTP cyclohydrolase 1; OS = Schleiferia thermophila OX=884107 GN=folE PE=3 SV=1
MKRPEILLNTPEKKINGNGVKHLKGSSDVHSLCIDNLHDTCCDCDHDHDHISTSKQTPLREDAFKLTDEEKIEIITEKFTEILHTLGLDLNDDSLKDTPRRVAKMYVKEIFAGLHPERKPLIQLFENPYQYHQMLVEKNITVHSYCEHHLVPIIGTAHVAYISNGKVIGLSKINRMVRYYSKRPQVQERLTEQIAEELKNVLQTDDVAVYIDAEHFCVKTRGIEDSQSSTVTVHYGGRFLSDPQVKQEFLSIIHNK

SEQ ID NO: 14513 - protein, 228 aa, Schleiferia thermophila; identical to SEQ ID NO: 8098
  REGION 1..228: note = tr|A0A085L1P4|A0A085L1P4_9FLAO GTP cyclohydrolase 1; OS = Schleiferia thermophila str. Yellowstone OX=1453500; GN = folE PE=3 SV=1

SEQ ID NO: 14514 - protein, 199 aa, Schumannella sp.
  REGION 1..199: note = tr|A0A506XXA7|A0A506XXA7_9MICO GTP cyclohydrolase 1; OS = Schumannella sp. 10F1D-1 OX=2590779 GN=folE PE=3 SV=1
MTPSEAVPDAVPFDLPSGERAVAELLRALGQDPDEERLRRTPERFVQMLANAIQRDPLPPASFIDGPASRDLVVVHGIPFRSLCEHHLLPFRGVAHVGYLPGERLVGVSLPVRVVEHFARGLQLQERLTEQVADWLDANLEARGVGVVIEAEHQCMSFRGIGDAGTTLLTSAFRGEVTALPSPFGAIATAAGDAAPAAE

SEQ ID NO: 14515 - protein, 215 aa, Schumannella sp.
  REGION 1..215: note = tr|A0A506XP38|A0A506XP38_9MICO GTP cyclohydrolase 1; OS = Schumannella sp. 10F1B-5-1 OX=2590780 GN=folE PE=3 SV=1
MAIDTGRIEAAVSELIRAIGDDPDRPELASTPARVATAYTEFFAGIGVDPLEVLGDPTEIDLGAGETGEIVALRDIEFRSVCEHHLLPFTGVAHVAYLPDQHVVGLGRIPRVVEVLSSRPQLQERLTEQIASALDAGLSPRGVLVVMDARHACVGARGVRQSGSSTVTVASRGELRDPVARAEVMGMFALSRGVDGVGAAPAAPAAPAAGAGSDS

SEQ ID NO: 14516 - protein, 187 aa, unidentified
  source 1..187: note = Scopulibacillus darangshiensis
  REGION 1..187: note = tr|A0A4R2P9D1|A0A4R2P9D1_9BACL GTP cyclohydrolase 1; OS = Scopulibacillus darangshiensis OX=442528 GN=folE PE=3; SV = 1
MSVNHKKIEEAVTMIIEAIGEDPNREGLLDTPKRVARMYGEVFQGLEQDPEEYFATVFGEDHEELVLVKDIPFYSMCEHHLVPFYGKAHVGYIPRGGRVTGLSKLARAVEAVAKRPQLQERITTTIADSIVNTLEPHGVIVVVEAEHMCMTMRGVKKPGAKTITSAVRGIFQKDQSARAEAMMLIKE

SEQ ID NO: 14517 - protein, 235 aa, Scytonema hofmannii
  REGION 1..235: note = tr|A0A139X745|A0A139X745_9CYAN GTP cyclohydrolase 1; OS = Scytonema hofmannii PCC 7110 OX=128403 GN=folE PE=3 SV=1
MTIARSNGTNRSQSPLIPDLTESITPRPDRNTHNGRQADLHPQTEEQMEEMMEAVRTLLVGVGEDPEREGLLKTPKRVAEAMRFLTSGYNQSLEDLVNGAIFDEGHNEMVLVRDINLFSLCEHHMLPFMGRAHVAYIPNQKVVGLSKLARIVEMYSRRLQVQERLTRQIAEAVQQILEPQGVAVVIEASHMCMVMRGVQKPGSWTVTSALLGVFQEEQKTREEYFNLIRHQASFF

SEQ ID NO: 14518 - protein, 241 aa, unidentified; identical to SEQ ID NO: 6646
  source 1..241: note = Scytonema millei
  REGION 1..241: note = tr|A0A4R4IN41|A0A4R4IN41_9CYAN GTP cyclohydrolase 1; OS = Scytonema millei VB511283 OX=1245923 GN=folE PE=3 SV=1

SEQ ID NO: 14519 - protein, 169 aa, unidentified
  source 1..169: note = Scytonema millei
  REGION 1..169: note = tr|A0A1D2PEN7|A0A1D2PEN7_9CYAN GTP cyclohydrolase 1 (Fragment) OS=Scytonema millei VB511283 OX=1245923; GN = QH73_004110 PE=3 SV=1
EREGLLKTPKRVAEAMRFLTSGYNQSLEEIVNGAIFDEGHNEMVLVRDINVFSMCEHHMLPFMGKAHVAYIPNQKVVGLSKLARIVEMYSRRLQVQERLTRQIAEAVQTILEPQGVAVVMEATHMCMVMRGVQKPGSWTVTSAMLGLFQEEQKTREEFFNLIRHQSSFF

SEQ ID NO: 14520 - protein, 248 aa, Scytonema sp.
  REGION 1..248: note = tr|A0A1Z4IMY7|A0A1Z4IMY7_9CYAN GTP cyclohydrolase 1; OS = Scytonema sp. HK-05 OX=1137095 GN=folE PE=3 SV=1
MISTTETLTNTDIMTIASSNGTNSSQSPLIPDLTEAITPRPDRNTHNGRQADLHPQTEEQFEQMTDAVRTLLVGVGEDPEREGLLKTPKRVAEAMRFLTSGYNQSLEEIVNGAIFDEGHNEMVLVRDINFFSMCEHHMLPFMGKAHVAYIPNQKVVGLSKLARIVEMYSRRLQVQERLTRQIAEAVQTVLEPQGVAVVMEATHMCMVMRGVQKPGSWTVTSAMLGVFQEEQKTREEFFNLIRHQSSFF

SEQ ID NO: 14521 - protein, 248 aa, Scytonema sp.
  REGION 1..248: note = tr|A0A1Z4QAE0|A0A1Z4QAE0_9CYAN GTP cyclohydrolase 1; OS = Scytonema sp. NIES-4073 OX=2005464 GN=folE PE=3 SV=1
MISTTETLTNTDIMTTASSNGTNSSQSPLIPDLTEAIIPRPDRNTHNGRQAALHPQTEEQMEQMTDAVRTLLVGVGEDPEREGLLKTPKRVAEAMRFLTSGYNQSLEEIVNGAIFDEGHNEMVLVRDINFFSMCEHHMLPFMGKAHVAYIPNQKVVGLSKLARIVEMYSRRLQVQERLTRQIAEAVQTVLEPQGVAVVMEATHMCMVMRGVQKPGSWTVTSAMLGLFQEEQKTREEFFNLIRHQSSFF

SEQ ID NO: 14522 - protein, 236 aa, Scytonema tolypothrichoides
  REGION 1..236: note = tr|A0A0C2LC85|A0A0C2LC85_9CYAN GTP cyclohydrolase 1; OS = Scytonema tolypothrichoides VB-61278 OX=1233231 GN=folE; PE = 3 SV=1
MTIARSNGTNCSQQSPLVPDLTEAITPRPDRNTHNGRQADLHPQTEEQMEQMTDAVRTLLVGVGEDPQREGLLKTPKRVAEAMRFLTSGYNQSLEEIVNEAIFDEGHNEMVLVRDINVFSLCEHHMLPFMGKAHVAYIPNQKVVGLSKLARIVEMYSRRLQVQERLTRQIAEAVQTILEPQGVAVVMEATHMCMVMRGVQKPGSWTVTSAMLGVFQEEHKTREEFFNLIRHQSSFF

SEQ ID NO: 14523 - protein, 216 aa, Scytonema tolypothrichoides
  REGION 1..216: note = tr|A0A0C2QLS1|A0A0C2QLS1_9CYAN GTP cyclohydrolase 1; OS = Scytonema tolypothrichoides VB-61278 OX=1233231 GN=folE; PE = 3 SV=1
MTLSIRPDFTSANHIVSSLPTQQQPQVTESEMMQAVRTLLIGLGEDPDRQGLKDTPKRVVKALQFLTKGYHESLDELLNGAVFTEDANEMVLVRDIDIFSSCEHHILPIIGRAHVAYIPNGKVIGLSKIARICEMYARRLQVQERLTLQIADALQGLLKPQGVAVVVEATHMCMVMRGVQKPGSWTVTSAMRGVFAEDARTREEFMNLIRHNARFQ

SEQ ID NO: 14524 - protein, 184 aa, Sebaldella termitidis
  REGION 1..184: note = tr|D1AJ48|D1AJ48_SEBTE GTP cyclohydrolase 1; OS = Sebaldella termitidis (strain ATCC 33386 / NCTC 11300); OX = 526218 GN=folE PE=3 SV=1
MDKKNLEKLTYEMLEAIGEDADREGLKDTPKRIPVVYGEIFSGVGKKPEDIIKKVFTVEKNNIVIEKNIDFYSMCEHDLLPFFGQIHVAYIPDGKVLGFGDIIKITEIYSRRLQIQERLTNEICDAVIDMTKCQGVMVIVKARHLCIEMKGSRKTNSEIVTSAVRGIFEKEESKKNEILALLSI

SEQ ID NO: 14525 - protein, 221 aa, unidentified
  source 1..221: note = Unknown
  REGION 1..221: note = tr|J3VRM0|J3VRM0_9ENTR GTP cyclohydrolase 1; OS = secondary endosymbiont of Ctenarytaina eucalypti; OX = 1199245 GN=folE PE=3 SV=1
MVILTKEALQVREALMICGLETPLRGEVQDKAVRKRLIAEHMQAIMTLLNLDWTDDSLAKTPNRIAKMYVEELFAGLDYVNFPKITFIKNKMNVDEMVTVHDITLTSTCEHHFLMIDGKATVSYIPKNFVIGLSKINRIVQFFSQRPQLQERLTQQILLTLQTLLGINSVAVSIDAVHYCVKAQGIRHGDSTTTTTSLGGLFKSSNNIRQEFLRAATRHKG

SEQ ID NO: 14526 - protein, 221 aa, unidentified
  source 1..221: note = Unknown
  REGION 1..221: note = tr|J3TZ70|J3TZ70_9ENTR GTP cyclohydrolase 1; OS = secondary endosymbiont of Heteropsylla cubana OX=134287; GN = folE PE=3 SV=1
MLTLTKEASQVREALVAAGLESLPQDIALTNIVRQELIAGHMMEIMAILNLDLSDDSLKKTPHRIAKMYIEEIFLGLNYANFPKITLIENKMQIHEMVTICNITLTSTCEHHFILIDGKASVSYIPEYSIIGLSKINRIVHFFSQRPQIQERLTKQILLALQTLLETNNVAVSIDAIHYCVKGRGICDATSTTTTISCGGLFKSNQNTREEFLRTIKSYCN

SEQ ID NO: 14527 - protein, 186 aa, Sedimentibacter saalensis
  REGION 1..186: note = tr|A0A562JEM4|A0A562JEM4_9FIRM GTP cyclohydrolase 1; OS = Sedimentibacter saalensis OX=130788 GN=folE PE=3 SV=1
MDKERIEKAVREILFAVGEDPDREGLKDTPRRMAKMYEEIFAGLHENPAKHLEIYFQEEKYEELVLVKDIPFYSVCEHHLVPFFGKAHVAYLPKNGRLTGLSKLARVVETVAKRPQLQERITSTVADTIMEKLDPYGVIVVIEAEHMCMTMRGVKKPGSKTMTSAVRGMFRTDPKSRAEVMSMINK

SEQ ID NO: 14528 - protein, 185 aa, Sedimentibacter sp.
  REGION 1..185: note = tr|A0A252CLB1|A0A252CLB1_9FIRM GTP cyclohydrolase 1; OS = Sedimentibacter sp. SX930 OX=1955060 GN=folE PE=3 SV=1
MDLEKIETAVHMILEAIGEDPNRSGLQDTPKRVARMYAEIFSGVEKDPADHAKVVFHEDTDEIVLVKDIPFYSTCEHHLVPFFGVGHIAYMPKDGQVIGLSKLARILDEVSKKPQIQERITTTVADILMEHLEPQGVMVVLEAEHMCMTMRGVKKPGSKTVTSAVRGAFKQSFKSRSEVLELIKL

SEQ ID NO: 14529 - protein, 203 aa, Sedimentibacter sp.
  REGION 1..203: note = tr|A0A252CIZ0|A0A252CIZ0_9FIRM GTP cyclohydrolase 1; OS = Sedimentibacter sp. SX930 OX=1955060 GN=folE PE=3 SV=1
MAIDVQAIEEHIKGILIALGDNPEREGLKDTPKRVAKMYEVIYKGMCYTNAEIAEMLNTTFEDDLALDNAENDVVFMKDIEIFSHCEHHLALMYNMKVAVAYVPKQKVIGLSKIARIADMAGRRLQLQERIGSDIAEILQKITESEDVAVIIQGEHGCMTTRGIQKPGAKTITTTLRGRFNTDSMLNNKLMMLYAKDSSNQFG

SEQ ID NO: 14530 - protein, 259 aa, Sedimenticola selenatireducens
  REGION 1..259: note = tr|A0A2N6CUU4|A0A2N6CUU4_9GAMM GTP cyclohydrolase FolE2 OS=Sedimenticola selenatireducens OX=191960 GN=folE2; PE = 3 SV=1
MADVQSSVDTRQIAINKVGIKDIRHPVRVKDRSDGEQHTIATFNMYVNLPHNFKGTHMSRFVEILNSHEKEISISNFKVMLAEMAEKLEAESGHIEMNFPYFINKTAPISGVQSLLDYDVTFIGEVHGGKPITYIKVQVPVTSLCPCSKKISDRGAHNQRSHVTVQVRTCGFVWVEEIIDLVESQASCELYGLLKRPDEKFVTERAYDNPKFVEDMVRDVAGMLDRDERFCAYIVESENFESIHNHSAYALIERDKEAE

SEQ ID NO: 14531 - protein, 265 aa, Sedimenticola selenatireducens
  REGION 1..265: note = tr|A0A558DX65|A0A558DX65_9GAMM GTP cyclohydrolase FolE2 OS=Sedimenticola selenatireducens OX=191960 GN=folE2; PE = 3 SV=1
MTTTPEIADVQNSIDTRQIAINKVGIKDIRHPVRVKDRSDGEQHTIANFNMYVNLPHNFKGTHMSRFVEILNSHEKEISISNFKVMLAEMAEKLEAKSGHIEMNFPYFINKTAPVSGVQSLLDYDVTFIGEVHDGKPTTYIKVQVPVTSLCPCSKKISDRGAHNQRSHVTVQVRTCGFVWIEEIIDLVESQASCELYGLLKRPDEKFVTERAYDNPKFVEDMVRDVAGKLDEDDRYCAYVVESENFESIHNHSAYALIERDKEAE

SEQ ID NO: 14532 - protein, 271 aa, Sedimenticola sp.
  REGION 1..271: note = tr|A0A2N6GA96|A0A2N6GA96_9GAMM GTP cyclohydrolase FolE2 OS=Sedimenticola sp. OX=1940285 GN=folE2 PE=3 SV=1
MIVTDCVENQCEIADVQSSRDTRRIAINKVGIKDIRHPVRVKDRSDGEQHTVATFNMYVNLPHNFKGTHMSRFVEILNSHEKEISVESFKGMLTEMAERLEADSGHIEMSFPYFINKRAPVSGVNSLMDYDVSLIGEIHNGQPIMQIKVVVPVTSLCPCSKKISERGAHNQRSHVTVQARTNGFIWIEEIIDLVEKEASCELYGLLKRPDEKYVTERAYDNPKFVEDMVRDVADRLNHDDRFSAYVVESENFESIHNHSAYALIERDKTQD

SEQ ID NO: 14533 - protein, 271 aa, unidentified
  source 1..271: note = Sedimenticola thiotaurini
  REGION 1..271: note = tr|A0A558CXL8|A0A558CXL8_9GAMM GTP cyclohydrolase FolE2 OS=Sedimenticola thiotaurini OX=1543721 GN=folE2; PE = 3 SV=1
MSSSALALEDVQNSADERRIPINKVGVKGIRHPALVKDRSGGEQRTIADFSLYVSLPHNFKGTHMSRFIEILNEHEKEITVRSFHEMLFEISDRLEAKTSHIEMHFPYFVEKSAPISGVKSLMDYDISFIGELNEDEMAVSIKVAVPATSLCPCSKGISEYGAHNQRSMITVTARIGGFIWIEELIDLIENEASCDLFSVLKRPDEKYVTEKAYDNPKFVEDIVRDIADRLNNEKRITAYSVESENFESIHNHSAYAIITKDKTDPENIAA

SEQ ID NO: 14534 - protein, 269 aa, unidentified
  source 1..269: note = Sedimenticola thiotaurini
  REGION 1..269: note = tr|A0A0F7K2H4|A0A0F7K2H4_9GAMM GTP cyclohydrolase FolE2 OS=Sedimenticola thiotaurini OX=1543721 GN=folE2; PE = 3 SV=1
MTTTTEIADVQNSVDTRQIAINKVGIKDIRHPVRVKDRSDGEQHTIATFNMYVNLPHNFKGTHMSRFVEILNSHEKEISISNFKVMLAEMAEKLEANSGHIEMNFPYFINKTAPVSGVQSLLDYDVTFIGEVHNGEPTTYIKVLVPVTSLCPCSKKISERGAHNQRSHVTVQVRTCGFVWVEEIIDLVESQASCELYGLLKRPDEKFVTERAYDNPKFVEDMVRDVAGMLDQDERFCAYIVESENFESIHNHSAYALIERDKEAEQANA

SEQ ID NO: 14535 - protein, 197 aa, unidentified
  source 1..197: note = Sedimentisphaera cyanobacteriorum
  REGION 1..197: note = tr|A0A1Q2HND5|A0A1Q2HND5_9BACT GTP cyclohydrolase 1; OS = Sedimentisphaera cyanobacteriorum OX=1940790 GN=folE; PE = 3 SV=1
MSEDKNKTIDHKRIEAAVREILLAIGEDPDREGLAETPQRVARMYEEVFSGLGHQPSEHTDKLFHEDYNEIVVLRDIAFSSTCEHHLMPFSGKAHIAYLPDKHIIGLSKLARVFDCFAKRPQVQERLTIQAADFLMERLRPKGVAVVVEASHSCMTVRGAKKPGSFMVTSALRGIFIKDQRSRSEVMSLIRGAGGVQ

SEQ ID NO: 14536 - protein, 197 aa, unidentified
  source 1..197: note = Sedimentisphaera salicampi
  REGION 1..197: note = tr|A0A1W6LJK0|A0A1W6LJK0_9BACT GTP cyclohydrolase 1; OS = Sedimentisphaera salicampi OX=1941349 GN=folE PE=3 SV=1
MSEEKNKTIDHKRIEAAVREILLAIGENPDREGLAETPQRVARMYEEVFSGLGHQPSEHTEKLFHEDYNEIVVLRDIAFSSTCEHHLMPFSGKAHIAYLPDKHIIGLSKLARVFDCFAKRPQVQERLTIQAADFLMERLNPKGVAVVVEASHSCMTVRGAKKPGSFMVTSALRGIFIKDQRSRSEVMSLIRGAGGVQ

SEQ ID NO: 14537 - protein, 366 aa, unidentified
  source 1..366: note = Sedimentitalea nanhaiensis
  REGION 1..366: note = tr|A0A1I6YCV7|A0A1I6YCV7_9RHOB GTP cyclohydrolase FolE2 OS=Sedimentitalea nanhaiensis OX=999627 GN=folE2; PE = 3 SV=1
MNIHTPEREQLPDRSEAEAALNVLRAWARQASEAEILALDPSVARLLPQTGLNYPSLSRSYPQDFVVDAAYRDSLPDLQNGPSSLIRGSRQQIQHVGISNFRLPIRFHTRDSGDLTLETSITGTVSLEADKKGINMSRIMRSFYAHSERTFSFEVMEAALDGYKSDLDSFDARIQMRFSFPMKVESLRSGLSGYQYYDIALELVETGGVRQKIMHLDYVYSSTCPCSLELSEHARAMRGQLATPHSQRSVARISVQLDRESDCLWFEDLIDACRRAVPTETQVMVKREDEQAFAELNAANPIFVEDAARLFCEQLQADHRIADFRVVASHQESLHSHDAVSILIQGETFASGSLDPKLFSTLVHPG

SEQ ID NO: 14538 - protein, 367 aa, unidentified
  source 1..367: note = Sedimentitalea sp.
  REGION 1..367: note = tr|A0A3T0N4U3|A0A3T0N4U3_9RHOB GTP cyclohydrolase FolE2 OS=Sedimentitalea sp. W43 OX=2483033 GN=folE2 PE=3; SV = 1
MNIHSGETDTAPDRDAAAAALALLRNWAAGATATEIAQLDPAVTRLLPDVELRNYPDLSRQYPKDFKSDEAYRDTLPDLQNGPASLIRGARQQIQHVGISNFRLPIRFHTRDDGDLTLETSITGTVSLEGEKKGINMSRIMRSFYKHADRTFSFEVMAAALDDYLTDLDSPDARIQMRFSFPARVNSLRSGLSGYQYYDLTLELVDHDGIREKIIHLDYVYSSTCPCSLELSEHARETRGQLATPHSQRSVARLSVQVKPGGDCLWFEDLIDHCRRAVPTETQVMVKREDEQAFAELNAANPIFVEDAARLFCEALQSDPRIGDFRVLASHQESLHSHDAVSVLTSGETFVARSLDPQLFSTLIHRG

SEQ ID NO: 14539 - protein, 311 aa, Sediminibacillus albus
  REGION 1..311: note = tr|A0A1G8VVL4|A0A1G8VVL4_9BACI GTP cyclohydrolase FolE2 OS=Sediminibacillus albus OX=407036 GN=folE2 PE=3; SV = 1
MNNTEQVIKKTLPSKVERHKLFGSVNPGPRTKPVEKEQMADLQNSKKDFLFDIDAVGIANVKNPINISSNIKPLNQTTIGTFSFTSRIDKDSKGTNMSRFTEQLNEYYLNNYTIDIETLKIFTKDLATRLNQQDAQMEVCFPWFFERKGPSSELAGLNHANASIRVDFDQEKGHHVEVSLSGTITTLCPCSKEISEYSAHNQRGIVTMTANLSEEFDEREIDWKEALLEAAESNASARIHPVLKRPDEKMVTEQAYENPRFVEDIVRLVAADLYELPYVEKFSVYCKNEESIHLHDAVASLTYDKRQEAHV

SEQ ID NO: 14540 - protein, 309 aa, Sediminibacillus halophilus
  REGION 1..309: note = tr|A0A1G9M8V9|A0A1G9M8V9_9BACI GTP cyclohydrolase FolE2 OS=Sediminibacillus halophilus OX=482461 GN=folE2; PE = 3 SV=1
MNNTELKNKKTLPSKAERHKLFGSVEPGPKTKPVDKEKMVDLQNSKKDFLFDIDAVGIANVKNPINITSHLIPNNQTTIGTFRFTSRIDKDSKGTNMSRFTEQLDAYYKNNYSIDIDTLKRFTKDLAIRLKQKDAQMEVNFPWFFERKGPSSGLAGLNHADAGIKVTYDQDKGHHIEVTLAGTITTLCPCSKEISEYSAHNQRGRVEMTAVLSEDFDENETDWKEALLEAAESNASARIHPVLKRPDEKIVTEQAYENPRFVEDIVRLVAADLYELPFVEKFTISCKNEESIHLHDAVATLSFDKNTDA

SEQ ID NO: 14541 - protein, 198 aa, unidentified
  source 1..198: note = Sediminibacterium ginsengisoli
  REGION 1..198: note = tr|A0A1T4MZ87|A0A1T4MZ87_9BACT GTP cyclohydrolase 1; OS = Sediminibacterium ginsengisoli OX=413434 GN=folE PE=3; SV = 1
MAYVKKEMYDEDVTQGLMTNYHSVLQLLGEDAEREGLVKTPERIAKAMQFLTQGYQQDARAIINSAKFSEDVSEMVIVKDIELFSMCEHHMLPFFGKAHIAYIPNGYITGLSKLARVVDVYSRRLQVQERLTTQILEAIKDALNPIGVAVVIEAKHLCMMMRGVQKQNSVTTTSAFDGEFLKNSTRSEFLKLITAKLD

SEQ ID NO: 14542 - protein, 239 aa, unidentified
  source 1..239: note = Sediminibacterium goheungense
  REGION 1..239: note = tr|A0A4R6IWQ8|A0A4R6IWQ8_9BACT GTP cyclohydrolase 1; OS = Sediminibacterium goheungense OX=1086393 GN=folE PE=3; SV = 1
MKQNETLLNIRLNGEQIELSDLHIDDMGDDHISTSVDTPMREDAFVKTDDEKVVEIEAHFRSIMEILGLDLTDDSLKGTPRRVAKMYVKEIFQGLNPANKPAIALFENKYKYNEMLVEKNISFYSNCEHHFVPIIGKAHVAYISNGKVIGLSKLNRLVEYFAKRPQVQERLTMQIGKELQKDLGTEDVAIVIDAKHLCVASRGVEDDTSSTITAFYGGKFKEDKVKEEFLKYLELKTEF

SEQ ID NO: 14543 - protein, 240 aa, Sediminibacterium sp.
  REGION 1..240: note = tr|A0A2M8JYU4|A0A2M8JYU4_9BACT GTP cyclohydrolase 1; OS = Sediminibacterium sp. FEMGT703S OX=2080766 GN=folE PE=3; SV = 1
MKQNEILSNIRLNGDKIVFTDEDLVDEMGDNHISTSVDTPMVAGAFDKSDDEKIAIIQDHFKAIMETLGLDLTDDSLKGTPKRVAKMYVKEIFSGLNPANKPAVALFDNKYKYNEMLVEKNISFYSNCEHHFVPIIGKAHLAYISNGRVIGLSKLNRLVEFYAKRPQVQERLTMQIAKELQQELGTEDVAIVIDAKHLCVASRGVEDDTSSTITSFYGGKFKEEKRKEEFLRYLELKTEF

SEQ ID NO: 14544 - protein, 198 aa, Sediminicola luteus
  REGION 1..198: note = tr|A0A2A4G5S2|A0A2A4G5S2_9FLAO GTP cyclohydrolase 1; OS = Sediminicola luteus OX=319238 GN=folE PE=3 SV=1
MAYRNFEEYNIELTQEVKERYAGIINELGEDPFREGLVKTPERAAKAMMFLTQGYHQNAEEILRGAMFKEDYDDMVIVKDIELYSLCEHHMLPFFGKAHVAYIPNGQIVGLSKIPRIVDVFARRLQVQERLTHDILECLNNTLQPQGVAVVIEASHMCMMMRGVQKQNSVTTTSGFRGQFEKIETRNEFLKLISSDLS

SEQ ID NO: 14545 - protein, 227 aa, Sediminicola luteus
  REGION 1..227: note = tr|A0A2A4G860|A0A2A4G860_9FLAO GTP cyclohydrolase 1; OS = Sediminicola luteus OX=319238 GN=folE PE=3 SV=1
MWNTLIEKQTLNGFSEDEIGDDHIYMGLETPMRPDAFVLGDEEKKIKIADLFGQIMEVMGLDLTDDSLKGTPNRVAKMYIDEIFSGLNPMNKPKVALFDNKYQYQQMLVEKNITFYSNCEHHFVPIIGKAHVAYISSGKVIGLSKLNRLVQYYAKRPQVQERLTNQIAREMVQTLGTEDVAVIIDAKHLCVSSRGVKDDTSATVTSYYGGVFNTPQKIMELQNYLNE

SEQ ID NO: 14546 - protein, 226 aa, Sediminicola sp.
  REGION 1..226: note = tr|A0A0S1S4P8|A0A0S1S4P8_9FLAO GTP cyclohydrolase 1; OS = Sediminicola sp. YIK13 OX=1453352 GN=folE PE=3 SV=1
MKVDSALEEHFEEMGDNHASSAEETPLREDAFVLSDEEKIKRIKGSIKEIMLTLGLDLEDDSLKGTPNRVAKMFVDEIFGGLHPNRRPKASTFENKYKYGEMLVEKNITLYSTCEHHLLPIVGRAHVAYISNGTVVGLSKMNRIVDYFAKRPQVQERLNIQIVRELQKVLGTEDVACVIDAKHLCVNSRGIRDIESSTVTAEYGGKFKDDAVRKEFLNFINLDTNF

SEQ ID NO: 14547 - protein, 196 aa, Sediminicola sp.
  REGION 1..196: note = tr|A0A0S1S378|A0A0S1S378_9FLAO GTP cyclohydrolase 1; OS = Sediminicola sp. YIK13 OX=1453352 GN=folE PE=3 SV=1
MSPYKSLEEYNFEIKAEVQERYSRIIDEIGEDIHREGLVKTPERAAKAMLFLTQGYKQDAEEILKGAMFKEDYDDMVIIRDIELYSLCEHHMLPFFGKAHIAYIPNGHIVGLSKIPRVVDVFARRLQVQERLTHDILECINNTLKPKGVAVVIEASHMCMMMRGVQKQNSVTTTSGFRGQFEKQETRNEFLNLIGR

SEQ ID NO: 14548 - protein, 206 aa, unidentified
  source 1..206: note = Sediminihabitans luteus
  REGION 1..206: note = tr|A0A2M9CEE9|A0A2M9CEE9_9CELL GTP cyclohydrolase 1; OS = Sediminihabitans luteus OX=1138585 GN=folE PE=3 SV=1
MADVGHDAGADLPSAAEIGPYDEARVEAAVRELLLGVGENPDREGLRETPARVARAYREIFAGLHQDATDVLTTTFDLGHEEMVLVKDIELYSTCEHHLVPFHGVAHVGYIPNVDGRITGLSKLARLVEVYARRPQVQERLTTQIADALVEHLDARGVIVVVECEHLCMSMRGVRKPGSRTVTSAVRGQMRDGATRAEAMSLILGR

SEQ ID NO: 14549 - protein, 248 aa, Sediminitomix flava
  REGION 1..248: note = tr|A0A315Z7K3|A0A315Z7K3_9BACT GTP cyclohydrolase 1; OS = Sediminitomix flava OX=379075 GN=folE PE=3 SV=1
MKQNETLWNIQQSDGQDAGQGSTNNLSEKQMEEIDQLGDMHIGTSIETPMRADAFDLDDTTKVAKIAEHFESIMNLLGLDLNDDSLKGTPHRVAKMYVKEIFSGLNPENRPDIKLFENKYQYNEMLVEKDIHFFSNCEHHFVPIMGKAHVAYISNGKVIGLSKINRLVQYYAKRPQVQERLTVQILEDLKKTLETEDVAIIIDAKHLCVSMRGVEDTSSSTVTSAYSGKFQDEATRNEFLKYLSLSSD

SEQ ID NO: 14550 - protein, 217 aa, Sediminitomix flava
  REGION 1..217: note = tr|A0A315ZD15|A0A315ZD15_9BACT GTP cyclohydrolase 1; OS = Sediminitomix flava OX=379075 GN=folE PE=3 SV=1
MENKEIELIGDNHLSSNIETPLRPDAFEKSDEEKIQNIEGHFAKIMEELGLDLTDSSLSGTPYRFAKMYVKELFYGLDPKNKPRMSTFENKYGYHKMLIEQNITLNSSCEHHFLPIVGHAHIGYIPKDKVVGLSKINRLVDYYAHRPQVQERLCSQILNDLQQLLGTDDVIVVVNAQHLCVSSRGIKDQNSSTVSIEYGGRFEDITYRNEFFTSLKK

SEQ ID NO: 14551 - protein, 198 aa, Segetibacter aerophilus
  REGION 1..198: note = tr|A0A512BBF6|A0A512BBF6_9BACT GTP cyclohydrolase 1; OS = Segetibacter aerophilus OX=670293 GN=folE PE=3 SV=1
MAYNKKEEYDEAVTQGLMKNYRESIALLGEDPDREGLLKTPERMAKAMQFITQGYQQDAQAILNSAKFHEDVSEMVVVKDIELYSMCEHHMLPFYGKAHIAYIPNGWITGLSKMARVVDVYSRRLQVQERLTTQILDAIVESLQPLGAAVVIEASHLCMMMRGVSKQNSVTTTSAFFGEFEKYPTRNEFLKLISSKLH

SEQ ID NO: 14552 - protein, 197 aa, Segniliparus rotundus
  REGION 1..197: note = tr|D6ZBT1|D6ZBT1_SEGRD GTP cyclohydrolase 1; OS = Segniliparus rotundus (strain ATCC BAA-972 / CDC 1076 / CIP 108378 / DSM 44985 / JCM 13578) OX=640132 GN=folE PE=3; SV = 1
MESFEQTKSAFDDNRAEAAVRELLIAVGEDPDRPGLSRTPARVAKLYRELFSGLEQNPEDVLGESFAADHDELVLVKDIRVQSVCEHHLLSFHGNAHVGYIPGVGGSVVGFSALSRLVDLYARRPQIQERLTSQVADALMEHLRPRGVIVVVEAEHLCMQVRADRQQSARVTTSAVRGLLRTNPSSRAEALGFILRA

SEQ ID NO: 14553 - protein, 190 aa, Segniliparus rugosus
  REGION 1..190: note = tr|E5XQV5|E5XQV5_9ACTN GTP cyclohydrolase 1; OS = Segniliparus rugosus ATCC BAA-974 OX=679197 GN=folE; PE = 3 SV=1
MQSFDEQRAQAAVRELLIAVGEDPDRPGLAGTPLRVAKLYRELFSGLGQDPKDVLGESFAADHDELVLVKDITVQSVCEHHLLSFHGAAHVGYIPGVGGSVVGFSTLSRLVGLYSRRPQIQERLTSQVADALMEHLRPRGVIVVVEAEHLCMRVRADRQQSAKVTTSAVRGLLRTNASSRAEALGFILRQ

SEQ ID NO: 14554 - protein, 188 aa, Seinonella peptonophila
  REGION 1..188: note = tr|A0A1M4TGQ9|A0A1M4TGQ9_9BACL GTP cyclohydrolase 1; OS = Seinonella peptonophila OX=112248 GN=folE PE=3 SV=1
MRVDQQKIEQAVRMILEAVGENPDREGLIGTPARVARMYEELFQGMDEDPRKHFDVVFSEEHEELVLVKDIPFFSLCEHHLVPFYGHAHVAYIPRSGRVTGLSKLARAVETVARRPQLQERITSTIAESIMEKLDPYGVMVVVDAEHMCMTMRGIKKPGAKTVTTAVRGRMAEESDIRFEVLKLIKMQ

SEQ ID NO: 14555 - protein, 186 aa, Selenihalanaerobacter shriftii
  REGION 1..186: note = tr|A0A1T4JMH4|A0A1T4JMH4_9FIRM GTP cyclohydrolase 1; OS = Selenihalanaerobacter shriftii OX=142842 GN=folE PE=3; SV = 1
MVDKEKIREAVEMILEAIGEDPDREGLLETPDRVARMYEDIFSGLHKDPSDDLQIYFSEEHEELVLVKDISFYSMCEHHLLPFYGKAHVGYIPKSGKVTGLSKLARVVDSFAKRPQLQERLTSQIADLIMENIDARGVIVVIEAEHMCMTMRGVRKPGSFTTTSAVRGVLYQDQAVRAEALKLIKG

SEQ ID NO: 14556 - protein, 260 aa, unidentified
  source 1..260: note = Seleniivibrio woodruffii
  REGION 1..260: note = tr|A0A4R1KC40|A0A4R1KC40_9BACT GTP cyclohydrolase FolE2 OS=Seleniivibrio woodruffii OX=1078050 GN=folE2 PE=3; SV = 1
MKDIQNLRDNRNLDVDRVGIKDLQYPVILSDRNKGKQNTIARINMYVRLPHDFKGTHMSRFVEILSRHSDDINLYSVGHILDEMKERLDSEEAFIELAFNYFVRKKAPVSGQEAMMDYYCEYFGSSGPKGRDAVMSVRVPVMTLCPCSKEISQYGAHNQRGYVTISVRMKKLMWIEEIIEIAETSASSPVYPLLKREDEKYVTEHSYENPTFVEDVVRNAATKLMADERVVWFEVSSENMESIHNHSAYAVITRDKRTQS

SEQ ID NO: 14557 - protein, 263 aa, Selenomonas artemidis
  REGION 1..263: note = tr|E7N2X9|E7N2X9_9FIRM GTP cyclohydrolase FolE2; OS = Selenomonas artemidis F0399 OX=749551 GN=folE2 PE=3 SV=1
MLDVQSREDARGIAIQRVGVKEVKLPFLIKKQAGGYQQVLARITFTVALPMEFKGTHMSRFLEILLPWREQPLAEEEMEAMLTEALERLHAEEAEVSLAFTYFLEKIAPVSGKVSLLDVEASFTGRKRRGMPMRFELGLAMPFTSLCPCSKEISAYGAHNQRSVARVRLRYAEGVPCIYIEELAALLERQGSAPIYPLLKRADEKYVTEAAYENPKFVEDILRDTVLALRALPGLAYFSLECENEESIHSHNAFAAHEEFLRD

SEQ ID NO: 14558 - protein, 196 aa, Selenomonas artemidis
  REGION 1..196: note = tr|E7N077|E7N077_9FIRM GTP cyclohydrolase 1; OS = Selenomonas artemidis F0399 OX=749551 GN=folE PE=3 SV=1
MKKQTRGGAPDLPRAAAAMREFLAALGVDAMSCGMSETPTRTAELYAELFAGLRNDPAALWAETMTEDTAGLVAVRDIPFYSMCEHHLLPFFGTVDIVYRPQGGRVAGFGVFAQLAALYAARPQLQERLTAQIADEIMRGLGAAGVLVVVRARQLCMMMRGERAHGTQTVTAECRGAFRSDAAESAAAWQMLGVHE

SEQ ID NO: 14559 - protein, 262 aa, Selenomonas flueggei
  REGION 1..262: note = tr|C4V0P9|C4V0P9_9FIRM GTP cyclohydrolase FolE2; OS = Selenomonas flueggei ATCC 43531 OX=638302 GN=folE2 PE=3; SV = 1
MQDVQSREDGRGIAIQRVGVKDVRLPFLIKKQAGGYQQVLATITFTVSLPMEFKGTHMSRFLEILLPWREKPLAEEEMDAMLTEALDRLQAEAAEVRLAFTYFLEKSAPVSGRTSLLDVDASFTGRKRRGMPMEFELGLSMPFTSLCPCSKEISSYGAHNQRSRARVRLRFHEGVPCIYIEDLASLLEQQGSAPIYPLLKRADEKYVTEEAYEHPKFVEDILRDTVLALRQLPGLAYFSLACENEESIHSHNAFAAHEEYLN

SEQ ID NO: 14560 - protein, 191 aa, Selenomonas flueggei
  REGION 1..191: note = tr|C4V3M7|C4V3M7_9FIRM GTP cyclohydrolase 1; OS = Selenomonas flueggei ATCC 43531 OX=638302 GN=folE PE=3; SV = 1
MREFLTALGVDTAAQGMEETPQRAAQLYAELFAGLHEDTAELWADVLTEETDGLVAVRAIPFYSMCEHHLLPFFGTAHIVYQPHAGHVAGFGVFARLVASMARRPQLQERLTGDIAREIECGLGAEGVLVVLDAQQLCMMMRGARAHGAQTTTSASCGIFRTDAASRMQAWTMLGMERGAQDDGESTLSLC

SEQ ID NO: 14561 - protein, 201 aa, Selenomonas infelix
  REGION 1..201: note = tr|G5GRW8|G5GRW8_9FIRM GTP cyclohydrolase 1; OS = Selenomonas infelix ATCC 43532 OX=679201 GN=folE PE=3; SV = 1
MTEDKVDLARAECAMREFLTAVGVDLAAQGMEETPARAAALYAELFAGLHTDTQDLWADVLTEKTDGLVAVRSISFHSICEHHLLPFFGTAHIVYRPHAGRVAGFGVFARLVARMAQRPQLQERLTEDIAREIEQGLGAEGVLVVLDARQLCMTMRGAHAHGTRTTTSTCRGGFREDKMMELQAWQMLGERNHGAENISLS

SEQ ID NO: 14562 - protein, 263 aa, Selenomonas infelix
  REGION 1..263: note = tr|G5GS77|G5GS77_9FIRM GTP cyclohydrolase FolE2; OS = Selenomonas infelix ATCC 43532 OX=679201 GN=folE2 PE=3; SV = 1
MLDVQNREDERGIAIQRVGVKEVRLPFLIKKQAGGYQQVLARIAFTVSLPMEFKGTHMSRFLEILLPWSEKPLAEEEMDAMLTEALDRLHAEAAEVSLTFTYFLEKKAPVSGRASLLDVDASFTGRKRRGEPMQFELGLSMPFTSLCPCSKEISAYGAHNQRSTARVRLRYHEGVPCIYIEELAELLERQGSAPIYPLLKRADEKHVTEAAYENPKFVEDILRDTILALRALPGLAYFSLECENEESIHSHNAFAAHEEYLSE

SEQ ID NO: 14563 - protein, 202 aa, Selenomonas noxia
  REGION 1..202: note = tr|D4S4K5|D4S4K5_9FIRM GTP cyclohydrolase 1; OS = Selenomonas noxia ATCC 43541 OX=585503 GN=folE PE=3 SV=1
MADAQTEIDLARAEHAMREFLAAVGLDLTAQGMKDTPARAAELYAELFSGLRSDPQKLWTNAMTEETDGLVAVRTIPFHSVCEHHLLPFFGTAHIVYRPHAGRVAGFGIFTQLVDLMARRPQLQERLTEDIAREIERGLGAEGVLVVLDARQLCMTMRGERAHGTRTTTSACRGIFREDKAKELQAWQMLGEWDSAENISIP

SEQ ID NO: 14564 - protein, 263 aa, Selenomonas noxia
  REGION 1..263: note = tr|G5H4W5|G5H4W5_9FIRM GTP cyclohydrolase FolE2; OS = Selenomonas noxia F0398 OX=702437 GN=folE2 PE=3 SV=1
MLDVQNREDSRGIAIQRVGVKELRLPFLIKKQTGGYQQVLARISFTVSLPMEFKGTHMSRFLEILLPWSEKPLAEEEMEAMLTEALDRLHAEAAEVTLAFTYFLEKKAPVSGRVSLLDVDASFTGRKQRGASMLFELGLAMPFTSLCPCSKEISAYGAHNQRSIARVRLRYREGVPCIYIEELAALLEQQGSAPIYPLLKRADEKYVTEEAYENPKFVEDILRDTVLALRRLPGLAYFSLECENEESIHRHNAFAAHEEYLSE

SEQ ID NO: 14565 - protein, 267 aa, Selenomonas ruminantium
  REGION 1..267: note = tr|I0GRS2|I0GRS2_SELRL GTP cyclohydrolase FolE2; OS = Selenomonas ruminantium subsp. lactilytica (strain NBRC 103574 / TAM6421) OX=927704 GN=folE2 PE=3 SV=1
MKRGTKMQDVQNRKDQRGIAIQKVGIKEAHLPFLIKTKEGGYQQVLARVRFTVALPSQYKGTHMSRFLEILMPWSKKPLAEPEMEAMLAEALERLEAHAAEVELSFKYFVDKTAPVSGKTSVLDLDCCFTGRKEKGKPMEFQLGVEVPFTSLCPCSKEISSYGAHNQRSVARIQLRFKDGYDCIYIEDLAELVEKQGSSPIYPLLKREDEKFVTEAAYENPKFVEDILRDTVLALREIEGLGWFSVECENYESIHNHSAYAAHEEEL

SEQ ID NO: 14566 - protein, 190 aa, Selenomonas ruminantium
  REGION 1..190: note = tr|A0A1I3IDR9|A0A1I3IDR9_SELRU GTP cyclohydrolase 1; OS = Selenomonas ruminantium OX=971 GN=folE PE=3 SV=1
MGEKNDRAVRAMREFLEAVGVDLTARGMEKTPERVAQMYQYLFSGIGKDTFSIWGETFDAGSDGIVAVRHIPFYSMCEHHLVPFFGEVSIVYLPENGRVAGFSKFARLVDILSHQPQLQERLTAQIAAAVWHDLGARGVLVTVEAQQLCMTMRGDLAHGTRTVTSECTGVFQTDSALYHQAWMILGGEKS

SEQ ID NO: 14567 - protein, 264 aa, Selenomonas sp.
  REGION 1..264: note = tr|L1MVS8|L1MVS8_9FIRM GTP cyclohydrolase FolE2; OS = Selenomonas sp. oral taxon 138 str. F0429 OX=1127695; GN = folE2 PE=3 SV=1
MMLDVQNREDERGIAIQRVGVKEVRLPFLIKKQAGGYQQVLARIAFTVSLPMEFKGTHMSRFLEILLPWSEKPLAEEEMDAMLTEALDRLHAEAAEVSLAFTYFLEKKAPVSGRPSLLDVDASFTGRKRCGEPMQFELGLAMPFTSLCPCSKEISAYGAHNQRSTARVRLRYRERVPCIYIEDLAELLERQGSAPIYPLLKRVDEKYVTEAAYENPKFVEDILRDTVLALRELPGLAYFSLECENEESIHSHNAFAAHEEYLNE

SEQ ID NO: 14568 - protein, 206 aa, Selenomonas sp.
  REGION 1..206: note = tr|A0A0X8K9D6|A0A0X8K9D6_9FIRM GTP cyclohydrolase 1; OS = Selenomonas sp. oral taxon 136 OX=713030 GN=folE PE=3; SV = 1
METEYAADLPRAVRAMREFLAALGVDTAAQGMEETPLRAAQLYAELFAGLHEDTAELWADVLTEEMDGLVAVRAIPFYSMCEHHLLPFFGTAHIVYQPHAGRVAGFGVFARLVASMARRPQLQERLTGDIAREIECGLGAEGVLVVLDAQQLCMMMRGARAHGARTTTSASCGIFRTDAASRMQAWTMLGMERGAQDDSESTLSLC

SEQ ID NO: 14569 - protein, 273 aa, Selenomonas sputigena
  REGION 1..273: note = tr|F4EUQ3|F4EUQ3_SELS3 GTP cyclohydrolase FolE2; OS = Selenomonas sputigena (strain ATCC 35185 / DSM 20758 / VPI D19B-28) OX=546271 GN=folE2 PE=3 SV=1
MMKDIQKSADMRGIDIQHVGIKDAHLPFRIKTKAGDFQQVTARIRFTVSLPKEYKGTHMSRFLEILQQWCDKPVAEEEMEAMLQDALHRLEAETAKLRLSFKYFIEKEAPASGKKSVLDLDCFFEGEKRAGEAMSFRLGVTVPATSLCPCSKAISRYGAHNQRSLLQAVVEFKPPAPCIFIEDLAALMEEQASCPIYPLLKREDEKYVTEKAYEQPKFVEDILRDLVLALRPLPGLFWFSLSCENFESIHNHSAYASHEEYVNCEARTAGKEQ

SEQ ID NO: 14570 - protein, 189 aa, Selenomonas sputigena
  REGION 1..189: note = tr|C9LYD3|C9LYD3_SELS3 GTP cyclohydrolase 1; OS = Selenomonas sputigena (strain ATCC 35185 / DSM 20758 / VPI D19B-28) OX=546271 GN=folE PE=3 SV=1
MNEKASAAMRRFLEAMGLDLAACGMEKTPERVTEMFELLFSGCGEDASSAWGELFETKARGLTAVQHIPFYSLCEHHLVPFFGEVHIAYLPKDGRIAGFSRFVHVVNLLARRPQLQERFTREIADAVLDGLSAEGVLVIVEARQLCMMMRGELAPGTRTLTSETGGTITADAALGKEAWDLLMRGAKEG

SEQ ID NO: 14571 - protein, 193 aa, unidentified
  source 1..193: note = Senegalimassilia anaerobia
  REGION 1..193: note = tr|A0A369L7X4|A0A369L7X4_9ACTN GTP cyclohydrolase 1; OS = Senegalimassilia anaerobia OX=1473216 GN=folE PE=3 SV=1
MDTAKIEAGVRMILEGVGENPDREGLKETPARVARMYEEVFAGLTEDPAVHFATTFDEHCSEMVLVRDIYFYSMCEHHLVPFFGKAHIAYIPAADGRVCGLSKLARLVEVYAKRPQVQERLTSQIADTLVEQLNPQGVVVVLEAEHMCMSMRGVKKPGSHTVTSAVRGVFAGSTDAARASRSEAMSLILRETR

SEQ ID NO: 14572 - protein, 193 aa, unidentified
  source 1..193: note = Senegalimassilia sp.
  REGION 1..193: note = tr|A0A4Q2K263|A0A4Q2K263_9ACTN GTP cyclohydrolase 1; OS = Senegalimassilia sp. KGMB04484 OX=2509433 GN=folE PE=3; SV = 1
MDTAKIEAGVRMILEGVGEDPDREGLQETPARVARMYEEVFAGLTEDPAVHFEKTFDEHCNEMVLVRDISFYSMCEHHLVPFFGKAHIAYIPAPDGRVCGLSKLARLVEVYAKRPQVQERLTGQIADTLVEQLHPQGVAVVLEAEHMCMSMRGVKKPGSRTVTSAVRGVFAGSTDAARASRSEVMSLILRDAR

SEQ ID NO: 14573 - protein, 225 aa, unidentified
  source 1..225: note = Seonamhaeicola algicola
  REGION 1..225: note = tr|A0A5C7AMW6|A0A5C7AMW6_9FLAO GTP cyclohydrolase 1; OS = Seonamhaeicola algicola OX=1719036 GN=folE PE=3 SV=1
MKLDNNFDDFDALGDEHIGTSQDTPMRSDAFKLTNEEKIDIIKDDVRHIMETLGLDLTDDSLKGTPNRVAKMFVNEIFGGLNPNKKPSASTFDNKYKYGEMLVEKNITVYSTCEHHLLPIVGRAHVAYISNGSVVGLSKMNRIVDYYAKRPQVQERLTIQIVKELQQVLNTKDVACVIDAKHLCVNSRGIRDIESSTVTSEFGGKFKDMATRKEFLDYIKLDTKF

SEQ ID NO: 14574 - protein, 229 aa, unidentified
  source 1..229: note = Seonamhaeicola algicola
  REGION 1..229: note = tr|A0A5C7B4W9|A0A5C7B4W9_9FLAO GTP cyclohydrolase 1; OS = Seonamhaeicola algicola OX=1719036 GN=folE PE=3 SV=1
MQKENIEIKNGHLNGLTIEDIGDEHLFTGIETPLRKDAFKLTDTEKKERIAILFEEIMQVMGLDLTDDSLKGTPQRVAKMYIDEIFSGLNPENKPKVALFDNKYQYNQMLVEKNITFYSNCEHHFVPIIGKAHVAYISSGKVIGLSKLNRIVQYYAKRPQVQERLTNQIANELKATLNTEDIAVIIDAKHLCVSSRGIKDDTSATVTAYYGGKFNTTEKIVELQNYLKN

SEQ ID NO: 14575 - protein, 225 aa, unidentified
  source 1..225: note = Seonamhaeicola aphaedonensis
  REGION 1..225: note = tr|A0A3D9H995|A0A3D9H995_9FLAO GTP cyclohydrolase 1; OS = Seonamhaeicola aphaedonensis OX=1461338 GN=folE PE=3; SV = 1
MKFDKDFEDFDALGNEHIGTSQDTPMRSDAFKLSNEEKIDIIKDDVRHIMETLGLDLNDDSLKGTPNRVAKMFVKEIFGGLDPEKKPSASTFDNKYKYGEMLVEKNITVYSTCEHHLLPIVGKAHIAYISNGTVVGLSKMNRIVDYYAKRPQVQERLTIQIVKELQEVLDTKDVACVIDAKHLCVNSRGIRDIESSTVTSEFGGRFKDKATRREFLDYIKLDTKF

SEQ ID NO: 14576 - protein, 195 aa, unidentified
  source 1..195: note = Seonamhaeicola aphaedonensis
  REGION 1..195: note = tr|A0A3D9H8Q5|A0A3D9H8Q5_9FLAO GTP cyclohydrolase 1; OS = Seonamhaeicola aphaedonensis OX=1461338 GN=folE PE=3; SV = 1
MPYRKFEEYNIQVTDDVKDRYKKIIEDLGEDTERDGLLKTPERAAKAMQFLTQGYHQDPVEILKSAMFKESYDEMVIVKDIELYSLCEHHILPFFGKVHIAYIPNGQIVGLSKLPRIVDVFARRLQVQERLTEQILDCINYTLKPQGVAVVIEASHMCMMMRGVQKQNSITTTSGFRGQFEKIETRNEFLKLIGK

SEQ ID NO: 14577 - protein, 231 aa, unidentified
  source 1..231: note = Seonamhaeicola marinus
  REGION 1..231: note = tr|A0A5D0IAI7|A0A5D0IAI7_9FLAO GTP cyclohydrolase 1; OS = Seonamhaeicola marinus OX=1912246 GN=folE PE=3 SV=1
MQIEKEKQQINGHHLNGFSIEDIGDDHLFTGLETPMREDAFKLSDSEKKERIAILFEEIMQVMGLDLTDDSLKGTPERVAKMYIDEIFSGLNPKNKPKVALFDNKYQYNQMLIEKNITFYSNCEHHFVPIIGKAHVAYISSGMVIGLSKLNRIVQYYAKRPQVQERLTNQIANELKTILDTEDVAVIIEAKHLCVSSRGVKDDTSETITAYYGGSFNTSEKITELQNYLKS

SEQ ID NO: 14578 - protein, 150 aa, unidentified
  source 1..150: note = Seonamhaeicola marinus
  REGION 1..150: note = tr|A0A5D0J5J8|A0A5D0J5J8_9FLAO GTP cyclohydrolase 1 (Fragment) OS=Seonamhaeicola marinus OX=1912246 GN=folE; PE = 3 SV=1
MPYKKFEEYSMQVTDDVKDRYKKIIEDLGEDTKRDGLLKTPERAAKAMQFLTQGYEQDPVEILTSAMFKESYNEMVIVKDIELYSLCEHHILPFFGKVHIAYIPNGHIVGLSKLPRIVDVFARRLQVQERLTEQILDCINDTLKPQGVAV

SEQ ID NO: 14579 - protein, 231 aa, unidentified
  source 1..231: note = Seonamhaeicola sp.
  REGION 1..231: note = tr|A0A562YB79|A0A562YB79_9FLAO GTP cyclohydrolase 1; OS = Seonamhaeicola sp. W255 OX=2528206 GN=folE PE=3 SV=1
MQLERLKTKANGHKLNGFTIEDIGDDHLFTGLETPMRKDAFKLSDTEKKERIAILFEEIMEVMGLDLTDDSLKGTPKRVAKMYIDEIFSGLNPENKPKVALFDNKYQYNQMLVEKNITFYSNCEHHFVPIIGKAHVAYISSGKVIGLSKLNRIVQYYAKRPQVQERLTNQIANELKSILDTEDVAVIIDAKHLCVSSRGIKDDTSATVTAYYGGKFNNSDKIKELQNYLNG

SEQ ID NO: 14580 - protein, 217 aa, unidentified
  source 1..217: note = Seonamhaeicola sp.
  REGION 1..217: note = tr|A0A1U7DW05|A0A1U7DW05_9FLAO GTP cyclohydrolase 1; OS = Seonamhaeicola sp. S2-3 OX=1936081 GN=folE PE=3 SV=1
MNRKERHEINIFSNHEIQNLEAISKHEEKLKTIEYHFAKIMEALGLKLDNPSLKETPKRVAKMYINEVFKGLNEKNFPSISFFENVSSYREMILVDNIKVYSYCEHHFVPFFGKAAVAYIPKDRVIGLSKINRIVQFYASKPQIQEKLTVEIGEKLKILLKTDDIAIHIEANHLCVASRGVGDENSYTKTNFFSGKFLKEKEKSRFLNSINKTKLLI

SEQ ID NO: 14581 - protein, 205 aa, Serinicoccus chungangensis
  REGION 1..205: note = tr|A0A0W8I2Q0|A0A0W8I2Q0_9MICO GTP cyclohydrolase 1; OS = Serinicoccus chungangensis OX=767452 GN=folE PE=3 SV=1
MSTPATPEAGAGEPPATRPVDHARIEAAVREILLAVGEDPDRDGLQGTPARVARSYAEIFGGLQQDAREVLGTTFDVDHDEMILVKDIELYSVCEHHLVPFHGSAHVAYIPGRDGRVVGLSKLARLVDVYARRPQVQERLTTQVADALVEHLAPRGVLVVVEAEHLCMSMRGVRRPGARTVTSTVRGQLRNQATRAEAMSLITGR

SEQ ID NO: 14582 - protein, 212 aa, Serinicoccus sp.
  REGION 1..212: note = tr|A0A1Q9V0S3|A0A1Q9V0S3_9MICO GTP cyclohydrolase 1; OS = Serinicoccus sp. CNJ-927 OX=1904970 GN=folE PE=3 SV=1
MRPAPAGAGPDPDEDAPGPQDAVSRAVDHARIEAAVREILLAVGEDPDRDGLLHTPARVARSYAEIFSGIDQDPSAVLGTTFDVDHDEMILVKDIELYSVCEHHLVPFHGSAHVAYIPGPHGRVVGLSKLARLVDVYARRPQVQERLTTQVADALVDHLAPRGVLVVVEAEHLCMSMRGVRRPGARTITSTVRGHLRNQATRAEAMSLITGR

SEQ ID NO: 14583 - protein, 210 aa, Serinicoccus sp.
  REGION 1..210: note = tr|A0A5J6V1V5|A0A5J6V1V5_9MICO GTP cyclohydrolase I FolE OS=Serinicoccus sp. W204 OX=2593973 GN=folE PE=4 SV=1
MSSPGAEPDPVTPDPATAMAHQVDQPRIEAAVREILEAIGEDPQRDGLLDTPARVARAYAEIFGGLHQDPSDVLGTTFDVDHNEMILVRDIELYSVCEHHLLPFHGVAHLVYIPAKDGRVAGLSKMARLVDLFARRPQVQERLTTEIADALEAHLSPRGVLVVVEAEHLCMSMRGIRRPGARTVTSTVRGQLRNSATRAEAMSLVTGGRS

SEQ ID NO: 14584 - protein, 196 aa, unidentified
  source 1..196: note = Serpentinicella alkaliphila
  REGION 1..196: note = tr|A0A4R2TMC3|A0A4R2TMC3_9CLOT GTP cyclohydrolase 1; OS = Serpentinicella alkaliphila OX=1734049 GN=folE PE=3 SV=1
MSIDLKAIEQHIRGILIAIGDNPDREGLKDTPKRAAKMFEEVFKGMCYTNDEIAQMHDTTFEEDIYIQDNFNDIVFMKDIEIFSHCEHHLALMYNMKVAIAYIPNKKIIGLSKMARIADLVGRRLQLQERIGSDIAEILQKITESEDVAVIIQGEHGCMTTRGIEKPGSKTITITTRGRFNSDPVLNNKLMILYTK

SEQ ID NO: 14585 - protein, 220 aa, Serratia ficaria
  REGION 1..220: note = tr|A0A240BRI3|A0A240BRI3_SERFI GTP cyclohydrolase 1; OS = Serratia ficaria OX=61651 GN=folE PE=3 SV=1
MTSLSKEAALVHAALEERGLETPLRGEVLDRETRKRRIKEHMTEIMQLLNLDLSDDSLAETPHRIAKMYVDEIFSGLDYANFPKITVIENKMKVDEMVTVRDITLTSTCEHHFVTIDGKATVAYIPKDSVIGLSKINRIVQFFSQRPQVQERLTQQILVALQTLLGTNNVAVSIDAVHYCVKARGIRDATSATTTTSLGGLFKSSQNTRQEFLRAVRHHQ

SEQ ID NO: 14586 - protein, 308 aa, Serratia ficaria
  REGION 1..308: note = tr|A0A240C2L2|A0A240C2L2_SERFI GTP cyclohydrolase FolE2 OS=Serratia ficaria OX=61651 GN=folE2 PE=3 SV=1
MNQIALPPRQPLPDAQAWRGEMSEVGLDWVGMQGIALPLELAGKPLQAKVDAGINLRPSAAGARGIHMSRLYLALDELTQGELTPRRIENTLRAFLASQPEHSDSASLRIGGELLLSRSAMLSPQRGWKAYPLRIDAALTHRLALSLQIGVPYSSTCPSSAALSRQLAQQQFQFDFEQAASVSPQQVLDWLAEHGMPATPHSQRSWAWVTVWQTDGGSAFNPVNLIDRIEHTLGTPLQTLVKRRDEQAFALANGQNLMFCEDAARRLYQMLRSQCDVGAFSVRVEHQESLHAHNAVAELSWREGGDAA

SEQ ID NO: 14587 - protein, 221 aa, Serratia fonticola
  REGION 1..221: note = tr|A0A0F7D2G2|A0A0F7D2G2_SERFO GTP cyclohydrolase 1; OS = Serratia fonticola OX=47917 GN=folE PE=3 SV=1
MTSLSNEAALVHAALEARGLETPLCGEVLDRETRKRRIKEHMTEIMQLLNLDLSDDSLAETPHRIAKMYVDEIFSGLDYANFPKITVIENKMKVDEMVTVRDITLTSTCEHHFVTIDGKATVAYIPKDSVIGLSKINRIVQFFARRPQVQERLTQQILVALQTLLGTNNVAVSIDAVHYCVKARGIRDATSATTTTSLGGLFKSSQNTRQEFLRAVRHHHG

SEQ ID NO: 14588 - protein, 126 aa, Serratia fonticola
  REGION 1..126: note = tr|A0A4U9TEP7|A0A4U9TEP7_SERFO GTP cyclohydrolase 1; OS = Serratia fonticola OX=47917 GN=folE_2 PE=3 SV=1
MTSLSNEAALVHAALEARAWKPPLCGEVLDRETRKRRIKEHMTEIMQLLNLDLSDDSLAETPHRIAKMYVDEIFSGLDYANFPKITVIENKMKVDEMVTVRDITLTSTCEHHFVTIDGKSHRGVYS

SEQ ID NO: 14589 - protein, 222 aa, Serratia liquefaciens
  REGION 1..222: note = tr|A0A515CY17|A0A515CY17_SERLI GTP cyclohydrolase 1; OS = Serratia liquefaciens OX=614 GN=folE PE=3 SV=1
MTSSLSKEAALVHAALEERGLETPLRGEVLDRETRKRRIKEHMTEIMQLLNLDLSDDSLAETPHRIAKMYVDEIFSGLDYANFPKITVIENKMKVDEMVTVRDITLTSTCEHHFVTIDGKATVAYIPKDAVIGLSKINRIVQFFSQRPQVQERLTQQILVALQTLLGTNNVAVSIDAVHYCVKARGIRDATSATTTTSLGGLFKSSQNTRQEFLRAVRHHQS

SEQ ID NO: 14590 - protein, 73 aa, Serratia liquefaciens
  REGION 1..73: note = tr|A0A484XT04|A0A484XT04_SERLI GTP cyclohydrolase 1; OS = Serratia liquefaciens OX=614 GN=folE_1 PE=4 SV=1
MSSLSKEAVLVHEALVARGLETPMRAPVQEIDNETRKRLITGHMTEIMQLLNLDLSDDSLMETPHRIAKNVCR

SEQ ID NO: 14591 - protein, 221 aa, Serratia marcescens
  REGION 1..221: note = tr|A0A3E2EN04|A0A3E2EN04_SERMA GTP cyclohydrolase 1; OS = Serratia marcescens subsp. sakuensis OX=211760 GN=folE; PE = 3 SV=1
MTSLSKEAALVHAALEERGLETPLRGEVLDRETRKRRIKEHMTEIMQLLNLDLSDDSLAETPHRIAKMYVDEIFSGLDYANFPKITVIENKMKVDEMVTVRDITLTSTCEHHFVTIDGKATVAYIPKDSVIGLSKINRIVQFFSQRPQVQERLTQQILVALQTLLGTNNVAVSIDAVHYCVKARGIRDATSATTTTSLGGLFKSSQNTRQEFLRAVRHHQG

SEQ ID NO: 14592 - protein, 246 aa, Serratia marcescens
  REGION 1..246: note = tr|A0A380AB63|A0A380AB63_SERMA GTP cyclohydrolase 1; OS = Serratia marcescens OX=615 GN=folE PE=3 SV=1
MTSLSKEAALVHAALEERGLETPLRGEVLDRETRKRRIKEHMTEIMQLLNLDLSDDSLAETPHRIAKMYVDEIFSGLDYANFPKITVIENKMKVDEMVTVRDITLTSTCEHHFVTIDGKATVAYIPKDSVIGLSKINRIVQFFSQRPQVQERLTQQILVALQTLLGTNNVAVSIDAVHYCVKARGIRDATSATTTTSLGGCSSPARIPARSSCVRCVITRGDGVAGRPARRQQAPAGAFFMSGRQR

SEQ ID NO: 14593 - protein, 308 aa, Serratia nematodiphila
  REGION 1..308: note = tr|A0A5C7D2D0|A0A5C7D2D0_9GAMM GTP cyclohydrolase FolE2 OS=Serratia nematodiphila OX=458197 GN=folE2 PE=3; SV = 1
MNEVALPPRRSLPDAQAWRGEMSDVGLDWVGMQGIALPLELAGKPLMAKVDAGINLRAEAAGERGIHMSRLYLALDELTQGELTPQRIGRTLQAFLASQPEHSDRASLSISGELLLSRPALLSPQRGWKAYPLRIEATLTDTLTLALTVGVPYSSTCPSSAALSRQLAQQQFQFDFEQAAERVSQRQVSEWLLEQGMPATPHSQRSWAWITVTPENERAFEPVKLVDRIEHALGTPVQTLVKRRDEQAFALANGQNLMFCEDAARRLYRMLRSQCDYRAFSLRVEHQESLHAHNAVAELSWRGEHHAA

SEQ ID NO: 14594 - protein, 200 aa, Serratia nematodiphila
  REGION 1..200: note = tr|A0A1W9F2I2|A0A1W9F2I2_9GAMM GTP cyclohydrolase 1 (Fragment) OS=Serratia nematodiphila DZ0503SBS1 OX=1449981; GN = folE PE=3 SV=1
MTSLSKEAALVHAALEERGLETPLRGEVLDRETRKRRIKEHMTEIMQLLNLDLSDDSLAETPHRIAKMYVDEIFSGLDYANFPKITVIENKMKVDEMVTVRDITLTSTCEHHFVTIDGKATVAYIPKDSVIGLSKINRIVQFFSQRPQVQERLTQQILVALQTLLGTNNVAVSIDAVHYCVKARGIRDATSATTTTSLGG

SEQ ID NO: 14595 - protein, 309 aa, Serratia odorifera
  REGION 1..309: note = tr|D4E601|D4E601_SEROD GTP cyclohydrolase FolE2; OS = Serratia odorifera DSM 4582 OX=667129 GN=folE2 PE=3 SV=1
MEKTVSSNLPPLPDAQAWRTERGVIDLDWVGMQGIALPLELAGRPLAAQINASINLRGSRDGARGIHMSRLYAALDGLTQGELTPRRIITTLNDFLHSQPAHSDRAQLTISGDLLLSRPALVSAQRGWKSYPLCIEAQLATVPRLTLKVGVAYSSTCPSSAALSRQAAQQQFLVDFDAESTSLSRQRVAEWLGLHGMPATPHSQRSWAWVTVELSPDEQTVPVMTLIERIEHALGTPVQTLVKRLDEQAFALVNGQNLMFCEDAARRLYNALQASCRYRAGQVVVEHQESLHAHNAVAQLSWQEDDDVA

SEQ ID NO: 14596 - protein, 309 aa, Serratia odorifera; identical to SEQ ID NO: 14595
  REGION 1..309: note = tr|A0A447KY78|A0A447KY78_SEROD GTP cyclohydrolase FolE2 OS=Serratia odorifera OX=618 GN=folE2 PE=3 SV=1

SEQ ID NO: 14597 - protein, 221 aa, unidentified
  source 1..221: note = Serratia oryzae
  REGION 1..221: note = tr|A0A1S8CN70|A0A1S8CN70_9GAMM GTP cyclohydrolase 1; OS = Serratia oryzae OX=2034155 GN=folE PE=3 SV=1
MTSLSNEAALVHAALEARGLETPLCGEMLDRETRKSRIKEHMTEIMKLLNLDLSDDSLAETPHRIAKMYVDEIFSGLDYANFPKITVIENKMKVDEMVTVRDITLTSTCEHHFVTIDGKATVAYIPKDAVIGLSKINRIVQFFAQRPQVQERLTQQILVALQTLLGTNNVAVSIDAVHYCVKARGIRDATSATTTTSLGGLFKSSQNTRQEFLRAVRHHQG

SEQ ID NO: 14598 - protein, 309 aa, Serratia plymuthica
  REGION 1..309: note = tr|A0A447Q7R3|A0A447Q7R3_SERPL GTP cyclohydrolase FolE2 OS=Serratia plymuthica OX=82996 GN=folE2 PE=3 SV=1
MNKIALPPPQPLPDVQDWQGEMSEVGLDWVGMQEIALPLELAGKPLMTKVNVGINLLANRQGSRGIHMSRLYLALDELTQGELTPQRIGQTLNAILASQPEHSDRASLSIRGELLLSRPALLSPHRGWKAYPLRIDARLTKALALSLTVGVPYSSTCPSSAALSRQLAQQQFQFDFEQESDRVDRQQVIDWLGEQGMPATPHSQRSWAWVTLMLSGSEPALPVINLIDRIEHALGTPSQTLVKRHDEQAFALANGQNLMFCEDAARRLYLMLRSQCGLRGFSLRVEHQESLHAHNAVAELSWREEGDAA

SEQ ID NO: 14599 - protein, 221 aa, Serratia plymuthica
  REGION 1..221: note = tr|A0A2X4U7L1|A0A2X4U7L1_SERPL GTP cyclohydrolase 1; OS = Serratia plymuthica OX=82996 GN=folE PE=3 SV=1
MTSLSKEAALVHAALEERGLETPLRGEVLDRETRKRRIKEHMTEIMQLLNLDLSDDSLAETPHRIAKMYVDEIFSGLDYANFPKITVIENKMKVDEMVTVRDITLTSTCEHHFVTIDGKATVAYIPKDAVIGLSKINRIVQFFSQRPQVQERLTQQILVALQTLLGTNNVAVSIDAVHYCVKARGIRDATSATTTTSLGGLFKSSQNTRQEFLRAVRHHQG

SEQ ID NO: 14600 - protein, 221 aa, Serratia proteamaculans
  REGION 1..221: note = sp|A8GC24|GCH1_SERP5 GTP cyclohydrolase 1; OS = Serratia proteamaculans (strain 568) OX=399741 GN=folE; PE = 3 SV=1
MTSLSKEAVLVHAALEERGLETPLRGEVLDRETRKRRIKEHMTEIMQLLNLDLSDDSLAETPHRIAKMYVDEIFSGLDYANFPKITVIENKMKVDEMVTVRDITLTSTCEHHFVTIDGKATVAYIPKDAVIGLSKINRIVQFFSQRPQVQERLTQQILVALQTLLGTNNVAVSIDAVHYCVKARGIRDATSATTTTSLGGLFKSSQNTRQEFLRAVRHHQG

SEQ ID NO: 14601 - protein, 221 aa, Serratia proteamaculans; identical to SEQ ID NO: 14600
  REGION 1..221: note = tr|A0A1W5DHL9|A0A1W5DHL9_9GAMM GTP cyclohydrolase 1; OS = Serratia proteamaculans OX=28151 GN=folE PE=3 SV=1

SEQ ID NO: 14602 - protein, 221 aa, Serratia quinivorans; identical to SEQ ID NO: 14600
  REGION 1..221: note = tr|A0A2X2I764|A0A2X2I764_9GAMM GTP cyclohydrolase 1; OS = Serratia quinivorans OX=137545 GN=folE PE=3 SV=1

SEQ ID NO: 14603 - protein, 309 aa, Serratia quinivorans
  REGION 1..309: note = tr|A0A2X2GNX6|A0A2X2GNX6_9GAMM GTP cyclohydrolase FolE2 OS=Serratia quinivorans OX=137545 GN=folE2 PE=3 SV=1
MNMVALPPRQPLPDAQAWQGTMSEVGLDWVGMQGIALPLELAGKPLMAKVNAGINLRASRQGARGIHMSRLYLALDELTQGELTPQRISDQLQAFLASQPENSDRANLNISGELLLSRPALLSPQRGWKAYPLKIDATLTSELTLSLTVGVPYSSTCPSSAALSRQLAQQQFQFDFEQSPEKVDQQQVIDWLGEQGMPATPHSQRSWAWVTVTLNEEAVALPVVNLIDRIEHALGTPLQTLVKRQDEQAFALANGQNLMFCEDAARRLYRMLRSQCNQRAFSLRVEHQESLHAHNAVAELSWQEPGNAA

SEQ ID NO: 14604 - protein, 242 aa, Serratia rubidaea
  REGION 1..242: note = tr|A0A4U9HJV1|A0A4U9HJV1_SERRU GTP cyclohydrolase folE2 OS=Serratia rubidaea OX=61652 GN=folE2 PE=4 SV=1
MSRLYLTLDALTQGELTPRRIINTLAACLQSQTADSERVRLEIGGELLLSRAALLSPQRGWKSYPLHISATLERRPMLTLQVGVPYSSTCPASAALSRQAAQQQFLVDIETDDGALEVQQVFDWLGAHGMPATPHSQRSWAWVTVTLSGDEKVLPAISLIDRIEQALGTPVQTLVKRQDEQAFALANGRNLMFCEDAARRLHDALRRACCYRAFSVRVEHQESLHAHNAVAQLSWREGADAA

SEQ ID NO: 14605 - protein, 220 aa, Serratia rubidaea
  REGION 1..220: note = tr|A0A140EZ88|A0A140EZ88_SERRU GTP cyclohydrolase 1; OS = Serratia rubidaea OX=61652 GN=folE PE=3 SV=1
MTTLSKEAALVHAALEARGLETPLRGEMLDRETRKRRIQEHMTEIMQLLNLDLSDDSLAETPHRIAKMYVDEIFSGLDYANFPKITVIENKMKVDEMVTVRDITLTSTCEHHFVTIDGKATVAYIPKDGVIGLSKINRIVQFFAQRPQVQERLTQQILIALQTLLGTNNVAVSIDAVHYCVKARGIRDATSATTTTSLGGLFKSSQNTRQEFLRAVRHHQ

SEQ ID NO: 14606 - protein, 221 aa, Serratia sp.; identical to SEQ ID NO: 14591
  REGION 1..221: note = tr|A0A1B3F9T2|A0A1B3F9T2_9GAMM GTP cyclohydrolase 1; OS = Serratia sp. YD25 OX=1759437 GN=folE PE=3 SV=1

SEQ ID NO: 14607 - protein, 220 aa, Serratia sp.
  REGION 1..220: note = tr|A0A2R3GZL7|A0A2R3GZL7_9GAMM GTP cyclohydrolase 1; OS = Serratia sp. MYb239 OX=2033438 GN=folE PE=3 SV=1
MTTLSKEAALVHAALEARGLETPLRGEMLDRETRKRRIQEHMTEIMQLLNLDLTDDSLAETPHRIAKMYVDEIFSGLDYANFPKITVIENKMKVDEMVTVRDITLTSTCEHHFVTIDGKATVAYIPKDGVIGLSKINRIVQFFAQRPQVQERLTQQILIALQTLLGTNNVAVSIDAVHYCVKARGIRDATSATTTTSLGGLFKSSQNTRQEFLRAVRHHQ

SEQ ID NO: 14608 - protein, 222 aa, Serratia symbiotica
  REGION 1..222: note = tr|A0A455VS60|A0A455VS60_9GAMM GTP cyclohydrolase 1; OS = Serratia symbiotica OX=138074 GN=folE PE=3 SV=1
MTSRLSKEAALVHAALEACGLETPLWGDVLDRETRKRRIKEHMTEIMQLLNLDLSDDSLAETPHRIAKMYVDEIFSGLDYANFPKITVIENKMQVDEMVTVRDITLTSTCEHHFVTIDGKATVAYIPKDAVIGLSKINRIVRFFSQRPQVQERLTQQILVALQTLLGTNNVAVSIDAVHYCVKARGIRDATSATATTALGGLFKSSQNTRQEFLRAVRYCQK

SEQ ID NO: 14609 - protein, 222 aa, Serratia symbiotica
  REGION 1..222: note = tr|A0A068R8L7|A0A068R8L7_9GAMM GTP cyclohydrolase 1; OS = Serratia symbiotica SCt-VLC OX=1347341 GN=folE PE=3 SV=1
MTSRLSKEAALVHAALEACGLETPLWGDVLDPETRKRRIKEHMTEIMQLLNLDLSDDSLAETPHRIAKMYVDEIFSGLDYANFPKITVIENKMQVDEMVTVRDITLTSTCEHHFVTIDGKATVAYIPKDAVIGLSKINRIVRFFSQRPQVQERLTQQILVALQTLLGTNNVAVSIDAVHYCVKARGIRDATSATATTALGGLFKSSQNTRQEFLRAVRYCQK

SEQ ID NO: 14610 - protein, 221 aa, Serratia ureilytica; identical to SEQ ID NO: 14591
  REGION 1..221: note = tr|A0A5C7CCN4|A0A5C7CCN4_9GAMM GTP cyclohydrolase 1; OS = Serratia ureilytica OX=300181 GN=folE PE=3 SV=1

SEQ ID NO: 14611 - protein, 308 aa, Serratia ureilytica
  REGION 1..308: note = tr|A0A5C7CDS2|A0A5C7CDS2_9GAMM GTP cyclohydrolase FolE2 OS=Serratia ureilytica OX=300181 GN=folE2 PE=3 SV=1
MNEVALPPRRSLPDAQAWRGEMSDVGLDWVGMQGIALPLELAGKPLMAKVDAGINLRAEAAGERGIHMSRLYLALDELTQGELTPQRIGRTLQAFLASQPERSDRASLSIGGELLLSRPALLSPQRGWKAYPLRIEATLTDTLTLALTVGVPYSSTCPSSAALSRQLAQQQFQFDFEQAAERVSQRQVSEWLLEQGMPATPHSQRSWAWITVTPENERAFEPVKLIDRIEHALGTSVQTLVKRRDEQAFALANGQNLMFCEDAARRLYRMLRSQCDYRAFSLRVEHQESLHAHNAVAELSWRGEHHAA

SEQ ID NO: 14612 - protein, 216 aa, Shewanella algae
  REGION 1..216: note = tr|A0A1S2TVJ5|A0A1S2TVJ5_9GAMM GTP cyclohydrolase 1; OS = Shewanella algae OX=38313 GN=folE PE=3 SV=1
MALSEAALMVQTALLERGLETPMVPCGLSAEERKEKIEAHMKAILTLMSLDLSDDSLMDTPKRIAKMYVDEIFSGLDYANFPKITVIDNKMGFDEMVRVQDISLTSTCEHHLVTIDGTATVAYLPRKKIIGLSKINRIVRFFAQRPQVQERLTQQVLVALQTLLETKDVAVKMDAVHYCVKSRGVMDSTSSTTTTALGGVFKSNPATRAEFLHQAK

SEQ ID NO: 14613 - protein, 216 aa, Shewanella amazonensis
  REGION 1..216: note = sp|A1S2C7|GCH1_SHEAM GTP cyclohydrolase 1; OS = Shewanella amazonensis (strain ATCC BAA-1098 / SB2B); OX = 326297 GN=folE PE=3 SV=1
MALSEAAQKVQAALLERGLETPMVPCGLSREERKDKIEQHMRAILGLMSLDLTDDSLADTPRRIAKMYVDEIFSGLDYENFPKITVIDNKMGVDEMVRVQDISLTSTCEHHLVTIDGTATVAYLPRKKIIGLSKINRIVRFFAQRPQVQERLTQQVLVALQALLETKDVAVKIDAVHYCVKSRGVMDATSSTTTTALGGIFKSNPATRAEFLHQPR

SEQ ID NO: 14614 - protein, 219 aa, Shewanella atlantica
  REGION 1..219: note = tr|A0A431W1G2|A0A431W1G2_9GAMM GTP cyclohydrolase 1; OS = Shewanella atlantica OX=271099 GN=folE PE=3 SV=1
MTSKEAVLSESALLVQSALLARGLETPMLPSELSADERKDQIEQHMRAILNLMSLDLTDDSLADTPRRIAKMYVDEIFSGLDYRNFPKITVIENKMGFDEMIKVNDISLTSTCEHHLVTIDGLARVAYLPRKNIIGLSKINRIVQFFAQRPQVQERLTQQVLVALQTLLETKDVAVKMDAVHYCVKSRGVMDSTSSTTTTALGGIFKSNPATRAEFLSN

SEQ ID NO: 14615 - protein, 216 aa, Shewanella baltica
  REGION 1..216: note = sp|A9KXZ9|GCH1_SHEB9 GTP cyclohydrolase 1; OS = Shewanella baltica (strain OS195) OX=399599 GN=folE; PE = 3 SV=1
MALSEAAVKVQAALLERGLETPMLPSVYSSEERKDKIEHHMKEILTLMSLDLSDDSLADTPRRIAKMYVDEIFSGLDYANFPKITVIDNKMGFDEMVRVQDISLTSTCEHHLVTIDGTATIAYLPRKKIIGLSKINRIVRFFAQRPQVQERLTQQVLVALQTLLETKDVAVKMDAVHYCVKSRGVMDSTSSTTTTALGGIFKSNPATRAEFLHQSK

SEQ ID NO: 14616 - protein, 216 aa, Shewanella baltica; identical to SEQ ID NO: 14615
  REGION 1..216: note = tr|A0A161USZ8|A0A161USZ8_9GAMM GTP cyclohydrolase 1; OS = Shewanella baltica OX=62322 GN=folE PE=3 SV=1

SEQ ID NO: 14617 - protein, 219 aa, Shewanella benthica
  REGION 1..219: note = tr|A9DBA9|A9DBA9_9GAMM GTP cyclohydrolase 1; OS = Shewanella benthica KT99 OX=314608 GN=folE PE=3 SV=1
MTSKEAQLSESAVQVQTALLARGLETPMLPSEFSAEERKERIEHHMREILTLISLDLTDDSLVDTPRRVAKMYVDEIFSGLDYANFPKITVIENKMGFDEMVKVKDISLTSTCEHHLVTIDGLATVAYLPRKNIIGLSKINRIVRFFAQRPQVQERLTQQVLVALQTLLETKDVAVKMDAVHYCVKSRGIMDSTSSTTTTALGGIFKSNPATRAEFLSN

SEQ ID NO: 14618 - protein, 219 aa, Shewanella benthica
  REGION 1..219: note = tr|A0A330LVC5|A0A330LVC5_9GAMM GTP cyclohydrolase 1; OS = Shewanella benthica OX=43661 GN=folE PE=3 SV=1
MTSKEAQLSESAVQVQTALLARGLETPMLPSEFSAEERKERIEHHMREILTLMSLDLTDDSLVDTPRRVAKMYVDEIFSGLDYANFPKITVIENKMGFDEMVKVKDISLTSTCEHHLVTIDGLATVAYLPRKNIIGLSKINRIVRFFAQRPQVQERLTQQVLVALQTLLETKDVAVKMDAVHYCVKSRGIMDSTSSTTTTALGGIFKSNPATRAEFLSN

SEQ ID NO: 14619 - protein, 216 aa, unidentified
  source 1..216: note = Shewanella bicestrii
  REGION 1..216: note = tr|A0A220UHS5|A0A220UHS5_9GAMM GTP cyclohydrolase 1; OS = Shewanella bicestrii OX=2018305 GN=folE PE=3 SV=1
MALSEAAVKVQAALQERGLETPMLPNVFTPEERKDKIEFHMKEILTLMSLDLSDDSLADTPRRIAKMYVDEIFSGLDYENFPKITVIDNKMGFDEMVRVQDISLTSTCEHHLVTIDGTATIAYIPRKKIIGLSKINRIVRFFSQRPQVQERLTQQVLVALQTLLETKDVAVKMDAVHYCVKSRGVMDSTSSTTTTALGGIFKSNPATRAEFLNQSK

SEQ ID NO: 14620 - protein, 219 aa, Shewanella canadensis
  REGION 1..219: note = tr|A0A431WNL6|A0A431WNL6_9GAMM GTP cyclohydrolase 1; OS = Shewanella canadensis OX=271096 GN=folE PE=3 SV=1
MTSKDAVLSESAQLVQSALLTRGLETPMLPCELSADERKDQIEQHMRAILNLMSLDLTDDSLADTPRRIAKMYVDEIFSGLDYQNFPKITVIENKMGFDEMIKVNDISLTSTCEHHLVTIDGLATVAYLPRKNIIGLSKINRIVQFFAQRPQVQERLTQQVLVALQTLLETKDVAVKMDAVHYCVKSRGVMDSTSSTTTTALGGIFKSNPATRAEFLSN

SEQ ID NO: 14621 - protein, 216 aa, Shewanella chilikensis; identical to SEQ ID NO: 14612
  REGION 1..216: note = tr|A0A2V4W4N3|A0A2V4W4N3_9GAMM GTP cyclohydrolase 1; OS = Shewanella chilikensis OX=558541 GN=folE PE=3 SV=1

SEQ ID NO: 14622 - protein, 212 aa, Shewanella colwelliana
  REGION 1..212: note = tr|A0A1E5IU54|A0A1E5IU54_SHECO GTP cyclohydrolase 1; OS = Shewanella colwelliana OX=23 GN=folE PE=3 SV=1
MMHSSAEQVKQALIERGLETPLVASQLNSQQKYERIKGLMTEVVATLGLDLNDDSLQETPHRIAKMYVNEVFAGLDYNNFPAIAQIDNKMGVDEMVKVSDISLTSTCEHHFITIDGMAKVAYIPKEKIIGLSKINRIVRFFSQRPQVQERLTQQILVALQTLLNTQDVAVSIAATHYCVKSRGIMDSQSSTQTTALGGCFKTNSHTRAEFLG

SEQ ID NO: 14623 - protein, 214 aa, Shewanella colwelliana
  REGION 1..214: note = tr|A0A1E5ITI4|A0A1E5ITI4_SHECO GTP cyclohydrolase 1; OS = Shewanella colwelliana OX=23 GN=folE PE=3 SV=1
MALSEAAQQVQTALLARGLETPMLPCELSSEERKDKIEHHMREILTLMSLDLRDDSLVETPKRIAKMYVDEIFSGLDYANFPKITVIENKMGFDEMVKVKDISLTSTCEHHLVTIDGVATVAYLPRKNIIGLSKINRIVRFFAQRPQVQERLTQQVLVALQTLLETQDVAVKMDAVHYCVKSRGVMDSTSSTTTTALGGIFKSNPATRAEFLSN

SEQ ID NO: 14624 - protein, 216 aa, Shewanella decolorationis
  REGION 1..216: note = tr|A0A5B8R184|A0A5B8R184_9GAMM GTP cyclohydrolase 1; OS = Shewanella decolorationis OX=256839 GN=folE PE=3 SV=1
MALSEAAVKVQAALQERGLETPMLPSVFTPEERKDKIEHHMKEILTLMSLDLSDDSLADTPRRIAKMYVDEIFSGLDYENFPKITVIDNKMGFDEMVRVQDISLTSTCEHHLVTIDGTATIAYLPRKKIIGLSKINRIVRFFAQRPQVQERLTQQVLVALQTLLETKDVAVKMDAVHYCVKSRGVMDSTSSTTTTALGGIFKSNPATRAEFLNQSK

SEQ ID NO: 14625 - protein, 216 aa, Shewanella decolorationis; identical to SEQ ID NO: 14624
  REGION 1..216: note = tr|V1DI77|V1DI77_9GAMM GTP cyclohydrolase 1; OS = Shewanella decolorationis S12 OX=1353536 GN=folE PE=3; SV = 1

SEQ ID NO: 14626 - protein, 217 aa, Shewanella denitrificans
  REGION 1..217: note = sp|Q12SG0|GCH1_SHEDO GTP cyclohydrolase 1; OS = Shewanella denitrificans (strain OS217 / ATCC BAA-1090 / DSM 15013) OX=318161 GN=folE PE=3 SV=1
MALSDAAIKVQAALNERGLETPMLPKTSTPEERKIKIEHHMREILTLMSLDLTDDSLMDTPRRIAKMYVDEIFSGLDYDNFPKITVIDNKMGFDEMVRVQDISLTSTCEHHLVTIDGLATVAYLPRAKIIGLSKINRIVRFFAQRPQVQERLTQQILVALQTLLETKDVAVKIDAVHFCVKSRGVMDSTSSTTTTSLGGIFKSNPATRAEFLQQAKF

SEQ ID NO: 14627 - protein, 214 aa, Shewanella fodinae
  REGION 1..214: note = tr|A0A4R2FFF0|A0A4R2FFF0_9GAMM GTP cyclohydrolase 1; OS = Shewanella fodinae OX=552357 GN=folE PE=3 SV=1
MALSEAAKTVQAALLAKGLETPMVPCKLSNDERKLQIEGHIRDILQLMSLDLTDDSLADTPKRIAKMYVDEIFSGLDYQNFPKITVIDNKMGFDEMVRVQDISLTSTCEHHLVTIDGTATIAYLPRKKIIGLSKINRIVRFFSQRPQVQERLTQQVLVALQALLETKDVAVKIDAVHYCVKARGVMDSTSSTTTTALGGIFKSNPATRAEFLHP

SEQ ID NO: 14628 - protein, 222 aa, Shewanella frigidimarina
  REGION 1..222: note = tr|A0A106C0Y2|A0A106C0Y2_SHEFR GTP cyclohydrolase 1; OS = Shewanella frigidimarina OX=56812 GN=folE PE=3 SV=1
MTTINDITRAELSAEALKVQQALVAHGLETPLVPSDMTSEQKYQRIKGLMTEVVSTLGLDLTDDSLAETPHRIAKMYVNEIFSGLDYANFPKITQIDNKMGVEEMVKISNISVVSTCEHHFITIDGFAKVAYIPKDNIIGLSKINRIVRFFAQRPQVQERLTQQILVALQTLLATDDVAVSINATHYCVKSRGIMDTSSSTQTTALGGCFKANPASRAEFLT

SEQ ID NO: 14629 - protein, 216 aa, Shewanella frigidimarina
  REGION 1..216: note = tr|Q07WF5|Q07WF5_SHEFN GTP cyclohydrolase 1; OS = Shewanella frigidimarina (strain NCIMB 400) OX=318167; GN = folE PE=3 SV=1
MALSEAAIKVQAALKDRGLETPMLPKTSTPEERKVKIEHHMREILTLMSLDLTDDSLVDTPRRIAKMYVDEIFSGLDYENFPKITVIENKMGVDEMVRVQDISLTSTCEHHLVTIDGFATVAYLPRTKIIGLSKINRIVRFFSQRPQVQERLTQQVLVALQTLLETKDVAVKMDAVHYCVKSRGVMDSTSSTTTTALGGIFKSNPATRAEFLHQVK

SEQ ID NO: 14630 - protein, 219 aa, Shewanella halifaxensis
  REGION 1..219: note = tr|B0TQK6|B0TQK6_SHEHH GTP cyclohydrolase 1; OS = Shewanella halifaxensis (strain HAW-EB4) OX=458817; GN = folE PE=3 SV=1
MTSKNAILSESAQIVKSALIERGLETPMLPSELTAEERKDKIEQHMREILTLMSLDLSDDSLADTPRRVAKMYVDEIFSGLDYANFPKITVIENKMGFDEMVKVNGINLTSTCEHHLVTIDGLATVAYLPRKNIIGLSKINRIVRFFAQRPQVQERLTQQVLVALQALLGTKDVAVKMDAVHYCVKSRGVMDSTSSTTTTALGGIFKSNPATRAEFLSN

SEQ ID NO: 14631 - protein, 219 aa, Shewanella hanedai
  REGION 1..219: note = tr|A0A553JR49|A0A553JR49_SHEHA GTP cyclohydrolase 1; OS = Shewanella hanedai OX=25 GN=folE PE=3 SV=1
MTSKEAILSESALLVQKALLERGLETPMLPTEFSAEERKVKIEQHMREILTLMSLDLSDDSLTDTPRRIAKMYVDEIFSGLDYANFPKITVIENKMGFDEMVKVNGISLTSTCEHHLVTIDGLATVAYLPRKNIIGLSKINRIVRFFAQRPQVQERLTQQVLVALQTLLETQDVAVKMDAVHYCVKSRGVMDSTSSTTTTALGGVFKSNPSTRAEFLSN

SEQ ID NO: 14632 - protein, 216 aa, Shewanella livingstonensis
  REGION 1..216: note = tr|A0A3G8LQE9|A0A3G8LQE9_9GAMM GTP cyclohydrolase 1; OS = Shewanella livingstonensis OX=150120 GN=folE PE=3 SV=1
MALSEAAIKVQAALKDRGLETPMLPKTSTPEQRKVKIEHHMREILTLMSLDLSDDSLIDTPRRIAKMYVDEIFSGLDYENFPKITVIENKMGVDEMVRVQDISLTSTCEHHLVTIDGFATVAYLPRTKIIGLSKINRIVRFFSQRPQVQERLTQQVLVALQTLLETKDVAVKMDAVHYCVKSRGVMDSTSSTTTTALGGIFKSNPATRAEFLHLVK

SEQ ID NO: 14633 - protein, 222 aa, Shewanella livingstonensis
  REGION 1..222: note = tr|A0A3G8LQZ7|A0A3G8LQZ7_9GAMM GTP cyclohydrolase 1; OS = Shewanella livingstonensis OX=150120 GN=folE PE=3 SV=1
MTTINDITRAELSAEALKVQQALVAHGLETPLIPNDMTSEQKYQRIKGLMTEVVSTLGLDLTDDSLAETPHRIAKMYVNEIFSGLDYANFPKITQINNKMGVEEMIKISDISVVSTCEHHFITIDGLAKVAYIPKDNIIGLSKINRIVRFFAQRPQVQERLTQQILVALQTLLVTDDVAVSINATHYCVKSRGIMDTSSSTQTTALGGCFKANPATRAEFLA

SEQ ID NO: 14634 - protein, 214 aa, Shewanella loihica
  REGION 1..214: note = sp|A3QIQ4|GCH1_SHELP GTP cyclohydrolase 1; OS = Shewanella loihica (strain ATCC BAA-1088 / PV-4); OX = 323850 GN=folE PE=3 SV=1
MALSEAAKQVQTALLERGLETPMVPCGLSSEARKEKIEHHMREILTLMSLDLRDDSLVETPKRIAKMYVDEIFSGLDYENFPKITVIENKMGFDEMVKVNDISLTSTCEHHLVTIDGVATVAYLPRKNIIGLSKINRIVRFFAQRPQVQERLTQQVLVALQTLLETKDVAVKMDAVHYCVKSRGVMDSTSTTTTTALGGIFKSNPATRAEFLSN

SEQ ID NO: 14635 - protein, 215 aa, unidentified
  source 1..215: note = Shewanella mangrovi
  REGION 1..215: note = tr|A0A094LML4|A0A094LML4_9GAMM GTP cyclohydrolase 1; OS = Shewanella mangrovi OX=1515746 GN=folE PE=3 SV=1
MSLSEAAITVRSALEERGLETPMVPCTLSADERKVAIESHFSEIMKLMSLDLSDDSLADTPKRIAKMYVDEIFSGLDYANFPKITVIENKMGFDEMVRVQDISLTSTCEHHLVTIDGTATVAYLPRKKIIGLSKINRIVRFFAQRPQVQERLTQQVLVALQALLETKDVAVKMDAVHYCVKARGVMDSTSSTTTTALGGVFKSNPATRAEFLHQV

SEQ ID NO: 14636 - protein, 214 aa, Shewanella marisflavi
  REGION 1..214: note = tr|A0A4Y6J481|A0A4Y6J481_9GAMM GTP cyclohydrolase 1; OS = Shewanella marisflavi OX=260364 GN=folE PE=3 SV=1
MALSEAAQQVQTALLERGLETPMVPCGLSSEARKEKIEHHMREILTLMSLDLRDDSLIETPKRIAKMYVDEIFSGLDYANFPKITVIENKMGFDEMVKVNDISLTSTCEHHLVTIDGVATVAYLPRKNIIGLSKINRIVRFFAQRPQVQERLTQQVLVALQTLLETKDVAVKMDAVHYCVKSRGVMDSTSTTTTTALGGIFKSNPATRAEFLSN

SEQ ID NO: 14637 - protein, 216 aa, Shewanella morhuae
  REGION 1..216: note = tr|A0A1N6UJR6|A0A1N6UJR6_9GAMM GTP cyclohydrolase 1; OS = Shewanella morhuae OX=365591 GN=folE PE=3 SV=1
MSLSEAAVKVQAALSERGLETPMLPSVYSSEERKDKIEHHMKEILTLMSLDLSDDSLADTPRRIAKMYVDEIFSGLDYANFPKITVIDNKMGFDEMVRVQDISLTSTCEHHLVTIDGTATIAYLPRKKIIGLSKINRIVRFFAQRPQVQERLTQQVLVALQTLLETKDVAVKMDAVHYCVKSRGVMDSTSSTTTTALGGVFKSNPATRAEFLHQSK

SEQ ID NO: 14638 - protein, 216 aa, Shewanella oneidensis
  REGION 1..216: note = sp|Q8E9L6|GCH1_SHEON GTP cyclohydrolase 1; OS = Shewanella oneidensis (strain MR-1) OX=211586 GN=folE; PE = 3 SV=1
MPLSEAAVKVQAALQERGLETPMLPSVFTPEERKDKIEHHMKEILTLMSLDLSDDSLADTPRRIAKMYVDEIFSGLDYANFPKITVIDNKMGFDEMVRVQDISLTSTCEHHLVTIDGTATIAYLPRKKIIGLSKINRIVRFFAQRPQVQERLTQQVLVALQTLLETKDVAVKMDAVHYCVKSRGVMDSTSSTTTTALGGIFKSNPATRAEFLHQSK

SEQ ID NO: 14639 - protein, 216 aa, Shewanella oneidensis
  REGION 1..216: note = tr|A0A2W5DHL9|A0A2W5DHL9_SHEOE GTP cyclohydrolase 1; OS = Shewanella oneidensis OX=70863 GN=folE PE=3 SV=1
MSLSEAAVKVQAALQERGLETPMLPSVFTPEERKDKIEHHMKEILTLMSLDLSDDSLADTPRRIAKMYVDEIFSGLDYANFPKITVIDNKMGFDEMVRVQDISLTSTCEHHLVTIDGTATIAYLPRKKIIGLSKINRIVRFFAQRPQVQERLTQQVLVALQTLLETKDVAVKMDAVHYCVKSRGVMDSTSSTTTTALGGIFKSNPATRAEFLHQSK

SEQ ID NO: 14640 - protein, 219 aa, Shewanella pealeana
  REGION 1..219: note = tr|A8H9B5|A8H9B5_SHEPA GTP cyclohydrolase 1; OS = Shewanella pealeana (strain ATCC 700345 / ANG-SQ1); OX = 398579 GN=folE PE=3 SV=1
MTSKEAILSESAQIVQSALIERGLETPMLPSELSAEVRKDKIEHHMREILTLMSLDLSDDSLADTPRRIAKMYVDEIFSGLDYANFPKITVIENKMGFDEMVKVNDISLTSTCEHHLVTIDGLATVAYLPRKNIIGLSKINRIVRFFAQRPQVQERLTQQVLVALQALLGTKDVAVKMDAVHYCVKSRGVMDSTSSTTTTALGGIFKSNPATRAEFLSN

SEQ ID NO: 14641 - protein, 212 aa, Shewanella piezotolerans
  REGION 1..212: note = tr|B8CGZ6|B8CGZ6_SHEPW GTP cyclohydrolase 1; OS = Shewanella piezotolerans (strain WP3 / JCM 13877); OX = 225849 GN=folE PE=3 SV=1
MDVPQAQQVRDALIEQGLETPLIPSDMTAEQKYERIKGLMTEVVSTLGLDLSDDSLQETPHRIAKMYVNEIFSGLDYDNFPKIAQIENKMAVDEMVRITDISVVSTCEHHFVTIDGLARVAYIPNRTIIGLSKINRIVRFFAQRPQVQERLTKQILVALQTLLATDNVAVSIDATHYCVKSRGVMDTQSQTQTTALGGEFKTSAATRAEFFR

SEQ ID NO: 14642 - protein, 219 aa, Shewanella piezotolerans
  REGION 1..219: note = tr|B8CM24|B8CM24_SHEPW GTP cyclohydrolase 1; OS = Shewanella piezotolerans (strain WP3 / JCM 13877); OX = 225849 GN=folE PE=3 SV=1
MTSKEAILSESAQLVQTALLERGLETPMLPSEFTREERKDKIEHHMREILTLMSLDLRDDSLEETPRRIAKMYVDEIFSGLDYANFPKITVIENKMGFDEMVKVNDISLTSTCEHHLVTIDGLARVAYLPRKNIIGLSKINRIVRFFAQRPQVQERLTQQVLVALQTLLETKDVAVKMDAVHYCVKSRGVMDSTSSTTTTALGGIFKSNPATRAEFLSN

SEQ ID NO: 14643 - protein, 219 aa, Shewanella psychrophila
  REGION 1..219: note = tr|A0A1S6HSG1|A0A1S6HSG1_9GAMM GTP cyclohydrolase 1; OS = Shewanella psychrophila OX=225848 GN=folE PE=3 SV=1
MTSKEAQLSESALQVQTALLARGLETPMLPSEFSAEERKERIEHHMREILTLMSLDLTDDSLVDTPRRIAKMYVDEIFSGLDYANFPKITVIENKMGFDEMVKVKDISLTSTCEHHLVTIDGFATVAYLPRKNIIGLSKINRIVRFFAQRPQVQERLTQQVLVALQTLLETKDVAVKMDAVHYCVKSRGIMDSTSSTTTTALGGIFKSNPATRAEFLSN

SEQ ID NO: 14644 - protein, 214 aa, Shewanella putrefaciens
  REGION 1..214: note = sp|A4Y2K7|GCH1_SHEPC GTP cyclohydrolase 1; OS = Shewanella putrefaciens (strain CN-32 / ATCC BAA-453); OX = 319224 GN=folE PE=3 SV=1
MALSEAAVKVQAALLERGLETPMLPSVYSSEERKDKIEHHMKEILTLMSLDLSDDSLADTPRRIAKMYVDEIFSGLDYENFPKITVIDNKMGFDEMVRVQDISLTSTCEHHLVTIDGTATIAYLPRKKIIGLSKINRIVRFFAQRPQVQERLTQQVLVALQTLLETKDVAVKMDAVHYCVKSRGVMDSTSSTTTTALGGIFKSNPATRAEFLHQ

SEQ ID NO: 14645 - protein, 216 aa, Shewanella putrefaciens; identical to SEQ ID NO: 14619
  REGION 1..216: note = tr|A0A252EW16|A0A252EW16_SHEPU GTP cyclohydrolase 1; OS = Shewanella putrefaciens OX=24 GN=folE PE=3 SV=1

SEQ ID NO: 14646 - protein, 219 aa, Shewanella sediminis
  REGION 1..219: note = tr|A8FQ70|A8FQ70_SHESH GTP cyclohydrolase 1; OS = Shewanella sediminis (strain HAW-EB3) OX=425104 GN=folE; PE = 3 SV=1
MTSKDAVLSESAQLVQSALLTRGLETPMLPSELSADERKDQIEQHMRAILNLMSLDLTDDSLADTPRRIAKMYVDEIFSGLDYQNFPKITVIENKMGFDEMIKVNDISLTSTCEHHLVTIDGLATVAYLPRKNIIGLSKINRIVQFFAQRPQVQERLTQQVLVALQTLLETKDVAVKMDAVHYCVKSRGVMDSTSSTTTTALGGIFKSNPATRAEFLSN

SEQ ID NO: 14647 - protein, 216 aa, Shewanella sp.; identical to SEQ ID NO: 14619
  REGION 1..216: note = sp|Q0HE51|GCH1_SHESM GTP cyclohydrolase 1; OS = Shewanella sp. (strain MR-4) OX=60480 GN=folE PE=3 SV=1

SEQ ID NO: 14648 - protein, 216 aa, Shewanella sp.
  REGION 1..216: note = tr|A0A2M7LPQ8|A0A2M7LPQ8_9GAMM GTP cyclohydrolase 1; OS = Shewanella sp. CG_4_10_14_3_um_filter_42_91 OX=1975535; GN = folE PE=3 SV=1
MALSEAAIKVQAALKDRGLETPMLPKTSTPEQRKVKIEHHMREILTLMSLDLTDDSLADTPRRIAKMYVDEIFSGLDYENFPKITVIENKMGVDEMVRVQDISLTSTCEHHLVTIDGFATVAYLPRSKIIGLSKINRIVRFFAQRPQVQERLTQQVLVALQTLLETKDVAVKMDAVHYCVKSRGVMDSTSSTTTTALGGIFKSNPATRAEFLHQVK

SEQ ID NO: 14649 - protein, 219 aa, Shewanella violacea
  REGION 1..219: note = tr|D4ZDX4|D4ZDX4_SHEVD GTP cyclohydrolase 1; OS = Shewanella violacea (strain JCM 10179 / CIP 106290 / LMG 19151 / DSS12) OX=637905 GN=folE PE=3 SV=1
MTSKEAQLSESAIQVQTALLARGLETPMLPSKFSAEERKERIEHHMREILTLMSLDLTDDSLIDTPRRIAKMYVDEIFSGLDYANFPKITVIENKMGFDEMVKVKDISLTSTCEHHLVTIDGFATVAYLPRKNIIGLSKINRIVRFFAQRPQVQERLTQQVLVALQTLLETKDVAVKMDAVHYCVKSRGIMDSTSSTTTTALGGIFKSNPATRAEFLSN

SEQ ID NO: 14650 - protein, 219 aa, Shewanella woodyi
  REGION 1..219: note = tr|B1KL10|B1KL10_SHEWM GTP cyclohydrolase 1; OS = Shewanella woodyi (strain ATCC 51908 / MS32) OX=392500; GN = folE PE=3 SV=1
MTSKEAILSESAQLVQAALLERGLETPMLPSEFSAEDRKVKIEQHMREILTLMSLDLTDDSLADTPKRIAKMYVDEIFSGLDYANFPKITVIENKMGFDEMVKVNDISLTSTCEHHLVTIDGLARVAYLPRKNIIGLSKINRIVRFFAQRPQVQERLTQQVLVALQTLLETKDVAVKMDAVHYCVKSRGVMDSTSSTTTTALGGIFKSNPATRAEFLSN

SEQ ID NO: 14651 - protein, 216 aa, Shewanella xiamenensis; identical to SEQ ID NO: 14638
  REGION 1..216: note = tr|A0A1E3UWF0|A0A1E3UWF0_9GAMM GTP cyclohydrolase 1; OS = Shewanella xiamenensis OX=332186 GN=folE PE=3 SV=1

SEQ ID NO: 14652 - protein, 216 aa, Shewanella xiamenensis; identical to SEQ ID NO: 14639
  REGION 1..216: note = tr|A0A073KKC1|A0A073KKC1_9GAMM GTP cyclohydrolase 1; OS = Shewanella xiamenensis OX=332186 GN=folE PE=3 SV=1

SEQ ID NO: 14653 - protein, 222 aa, Shigella boydii; identical to SEQ ID NO: 7955
  REGION 1..222: note = sp|Q31YW1|GCH1_SHIBS GTP cyclohydrolase 1; OS = Shigella boydii serotype 4 (strain Sb227) OX=300268; GN = folE PE=3 SV=1

SEQ ID NO: 14654 - protein, 222 aa, Shigella boydii; identical to SEQ ID NO: 7955
  REGION 1..222: note = tr|A0A1Q8MQY8|A0A1Q8MQY8_SHIBO GTP cyclohydrolase 1; OS = Shigella boydii OX=621 GN=folE PE=3 SV=1

SEQ ID NO: 14655 - protein, 222 aa, Shigella dysenteriae; identical to SEQ ID NO: 7955
  REGION 1..222: note = sp|Q32EN8|GCH1_SHIDS GTP cyclohydrolase 1; OS = Shigella dysenteriae serotype 1 (strain Sd197); OX = 300267 GN=folE PE=3 SV=1

SEQ ID NO: 14656 - protein, 222 aa, Shigella dysenteriae; identical to SEQ ID NO: 7955
  REGION 1..222: note = tr|A0A2S8DHJ9|A0A2S8DHJ9_SHIDY GTP cyclohydrolase 1; OS = Shigella dysenteriae OX=622 GN=folE PE=3 SV=1

SEQ ID NO: 14657 - protein, 222 aa, Shigella flexneri; identical to SEQ ID NO: 7955
  REGION 1..222: note = sp|Q0T2X1|GCH1_SHIF8 GTP cyclohydrolase 1; OS = Shigella flexneri serotype 5b (strain 8401) OX=373384; GN = folE PE=3 SV=1

SEQ ID NO: 14658 - protein, 222 aa, Shigella flexneri; identical to SEQ ID NO: 7955
  REGION 1..222: note = tr|A0A2A2XM76|A0A2A2XM76_SHIFL GTP cyclohydrolase 1; OS = Shigella flexneri OX=623 GN=folE PE=3 SV=1

SEQ ID NO: 14659 - protein, 222 aa, Shigella sonnei; identical to SEQ ID NO: 7955
  REGION 1..222: note = sp|Q3Z053|GCH1_SHISS GTP cyclohydrolase 1; OS = Shigella sonnei (strain Ss046) OX=300269 GN=folE PE=3; SV = 1

SEQ ID NO: 14660 - protein, 222 aa, Shigella sonnei; identical to SEQ ID NO: 7955
  REGION 1..222: note = tr|A0A0H7L3Y5|A0A0H7L3Y5_SHISO GTP cyclohydrolase 1; OS = Shigella sonnei OX=624 GN=folE PE=3 SV=1

SEQ ID NO: 14661 - protein, 219 aa, Shigella sp.
  REGION 1..219: note = tr|A0A1D3DJY2|A0A1D3DJY2_9ENTR GTP cyclohydrolase 1; OS = Shigella sp. FC1655 OX=1898038 GN=folE PE=3 SV=1
MSSLSKEAQWVHAALVERGLETPLREPKLSPSESKQQIEHHMTEVMKLLNLDLSDDSLAETPRRIAKMYVDEIFSGLDYHNFPKITLIENKMQVDEMVTVRDITLTSTCEHHFVTIDGKATVAYIPKDKVIGLSKINRIVQFFAQRPQVQERLTQQILIALQTLLGTKNVAVSIDAVHYCVKARGIRDATSATTTTSLGGLFKSSQNTRQEFLRAVRHL

SEQ ID NO: 14662 - protein, 222 aa, Shigella sp.
  REGION 1..222: note = tr|A0A1E3MZC7|A0A1E3MZC7_9ENTR GTP cyclohydrolase 1; OS = Shigella sp. FC569 OX=1892897 GN=folE PE=3 SV=1
MPSLSKEAALVHEALVARGLETPLRPPVHEMDNETRKSLIAGHMTEIMQLLNLDLADDSLMETPHRIAKMYVDEIFSGLDYANFPKITLIENKMKVDEMVTVCDITLTSTCEHHFVTIDGKATVAYIPKDSVIGLSKINRIVQFFAQRPQVQERLTQQILIALQTLLGTNNVAVSIDAVHYCVKARGIRDATSATTTTSLGGLFKSSQNTRHEFLRAVRHHN

SEQ ID NO: 14663 - protein, 366 aa, unidentified
  source 1..366: note = Shimia abyssi
  REGION 1..366: note = tr|A0A2P8FB16|A0A2P8FB16_9RHOB GTP cyclohydrolase FolE2 OS=Shimia abyssi OX=1662395 GN=folE2 PE=3 SV=1
MNMQTPKGSDNMSFDEARDALERLRTWATSASVTEIAELDPAIARLLPERPMTNYPDLLRNYPEDFVADEAYRATLPDLQNGPSSLIKGEKQQIQHVGISNFRLPIRFRTRDNGDITLETSVTGTVSLEADKKGINMSRIMRSFYKHAEKTFSFEVMEAALADYITDLESFDARLQMRFSYPMKIESLRSGLSGFQYYDIALEKVQRGEKLHKIMHLDYVYSSTCPCSLELSEHARISRGQLATPHSQRSVARISVETLGEDCLWFEDLIELARTAVPSETQVMVKREDEQAFAELNAANPIFVEDAARLFCEQLKNDPRIGDFRVIASHQESLHSHDAVSVLTDGTLFATDSIDPKLFKTLFHVG

SEQ ID NO: 14664 - protein, 389 aa, unidentified
  source 1..389: note = Shimia aestuarii
  REGION 1..389: note = tr|A0A1I4J364|A0A1I4J364_9RHOB GTP cyclohydrolase FolE2 OS=Shimia aestuarii OX=254406 GN=folE2 PE=3 SV=1
MVILPGFAYISLATGRETKGTPPMNMQTPKGSDSLSRDDAREALERLRAWAAQATVTEIAELDPAVARLLPDQPLSNYPDLSRDYPEDFEVDAAYRASLPDLQNGPSSLIKGEKQQIQHVGISNFRLPIRFHTRDNGDITLETSVTGTVSLEADKKGINMSRIMRSFYKHAEKTFSFEVMEAALADYITDLESFDARLQMRFSYPMKIDSLRSGLQGYQYYDIALEKVQMNGELHKVMHLDYVYSSTCPCSLELSEHARMARGQLATPHSQRSVARISVEIIGDDCLWFEDLIDLARAAVPTETQVMVKREDEQAFAELNAANPIFVEDAARLFCEQLKNDPRIGDFRVIASHQESLHSHDAVSVLTEGPFFAGQSLDPKLFTTLFHVG

SEQ ID NO: 14665 - protein, 365 aa, unidentified
  source 1..365: note = Shimia haliotis
  REGION 1..365: note = tr|A0A1I4CQ77|A0A1I4CQ77_9RHOB GTP cyclohydrolase FolE2 OS=Shimia haliotis OX=1280847 GN=folE2 PE=3 SV=1
MNMQTPKSNDEISRKEAEAALETLRAWAKVASVTEIAELDPSVARLLPDQLKANYPALSRHYDENFEVTPEYRKSLPDLQNGPSSLIKGEKQQIQHVGISNFRLPIRFHTRDNGDISLQTSVTGTVSLEADKKGINMSRIMRSFYKHAEKTFSFEVMEAALADYITDLESFDARLQMRFSYPMKINSLRSGLQGYQYYDFALEKVQQDGQLHKVMHLDYVYSSTCPCSLELSEHARSERGQLATPHSQRSVARISVNVTDGMLWFEDLIDLARAAVPTETQVMVKREDEQAFAELNAANPIFVEDAARLFCEQLKADPRIGDFRVIASHQESLHSHDAVSILTDGPFFEAQSLDPKLFSTLFHVG

SEQ ID NO: 14666 - protein, 365 aa, Shimia isoporae
  REGION 1..365: note = tr|A0A4R1NTM0|A0A4R1NTM0_9RHOB GTP cyclohydrolase FolE2 OS=Shimia isoporae OX=647720 GN=folE2 PE=3 SV=1
MNMQTPKANDEITREEAETALEKLRAWAQSASVTEIAELDPSVARLLPDQPKANYPDLARNYDADFEVTPEYRKSLPDLQNGPSSLIKGEKQQIQHVGISNFRLPIRFHTRDNGDITLQTSVTGTVSLEADKKGINMSRIMRSFYKHAEKTFSFEVMEAALADYITDLETFDARLQMRFSYPMKINSLRSGLEGYQYYDFALEKVQQDGELHKVMHLDYVYSSTCPCSLELSEHARSERGQLATPHSQRSVARISVKVTDGMLWFEDLIDLARAAVPTETQVMVKREDEQAFAELNAANPIFVEDAARLFCEQLKADPRIGDFRVIASHQESLHSHDAVSVLTDGPFFEAQSLDPKLFSSLFHVG

SEQ ID NO: 14667 - protein, 366 aa, Shimia marina
  REGION 1..366: note = tr|A0A0P1EQP6|A0A0P1EQP6_9RHOB GTP cyclohydrolase FolE2 OS=Shimia marina OX=321267 GN=folE2 PE=3 SV=1
MNIQTSASNGNVTRDDAEEALAQLRAWAKTASVTEIAELDPAISRLLPDQPLANYPSLSRDYPTDFEATPEYRATLPDLQNGPSSLIKGEKQQIQHVGISNFRLPIRFHTRDNGDITLETSVTGTVSLEADKKGINMSRIMRSFYKHAEKTFSFSVMEAALADYITDLESFDARLQMRFSYPMKIQSLRSGLEGYQYYDIALEKVQQGGVMHKIMHLDYVYSSTCPCSLELSEHARMARGQLATPHSQRSVARISVQVVDRPKLWFEDLIDLARAAVPTETQVMVKREDEQAFAELNAANPIFVEDAARLFCEQLKADDRIGDFRVIASHQESLHSHDAVSVLTDGTLFASDSLDPKLFTTLFHVG

SEQ ID NO: 14668 - protein, 365 aa, Shimia sp.
  REGION 1..365: note = tr|A0A0M9EI25|A0A0M9EI25_9RHOB GTP cyclohydrolase FolE2 OS=Shimia sp. SK013 OX=1389006 GN=folE2 PE=3 SV=1
MNLQTPKAHDEITRDDAAAALEKLRAWAADASVTEIAELDPAIARLLPDQPKANYPALSRTYDPEFAVSPEYRATLPDLQNGPSSLIKGEKQQIQHVGISNFRLPIRFHTRDNGDIALQTSVTGTVSLEADKKGINMSRIMRSFYKHAEKTFSFEVMEAALADYITDLESFDARLQMRFSYPMKITSLRSGLEGYQYYEIALEKVQLDGVLHKVMHLDYVYSSTCPCSLELSEHARSERGQLATPHSQRSVARISVQVTEGMLWFEDLIDLARAAVPTETQVMVKREDEQAFAELNAANPIFVEDAARLFCEQLKADPRIGDFRVIASHQESLHSHDAVSVLTDGPFFEAQSLDPKLFTTLFHVG

SEQ ID NO: 14669 - protein, 222 aa, Shimwellia blattae
  REGION 1..222: note = tr|I2B7F5|I2B7F5_SHIBC GTP cyclohydrolase 1; OS = Shimwellia blattae (strain ATCC 29907 / DSM 4481 / JCM 1650 / NBRC 105725 / CDC 9005-74) OX=630626 GN=folE PE=3; SV = 1
MPSLSKEAALVHEALVARGLETPLRPPVNELDNETRKRLISGHMTEIMQLLNLDLSDDSLMETPHRIAKMYVDEIFSGLDYANFPKITLIENKMKVDEMVTVRDITLTSTCEHHFVTIDGKATVAYIPKDAVIGLSKINRIVQFFAQRPQVQERLTQQVLVALQTLLGTSNVAVSIDAVHYCVKARGIRDATSATTTTSLGGLFKSSQNTRQEFLRAVRHHN

SEQ ID NO: 14670 - protein, 203 aa, Shinella granuli
  REGION 1..203: note = tr|A0A4R2CQH0|A0A4R2CQH0_9RHIZ GTP cyclohydrolase 1; OS = Shinella granuli OX=323621 GN=folE PE=3 SV=1
MDAIVTNFPRVDDQSGRPSQKEAEDAVRVLLRWAGDDPEREGLLDTPARVAKSYRELFSGYDLAAEDVLGRTFEEVAGYDDMVLVKDIPFFSHCEHHMVPIIGKAHVAYLPNGRVLGLSKIARVVEIYGRRLQTQETMTAQIAKSIDETLNPRGVAVMIEAEHMCMAMRGIQKQGSTTLTTTFTGAFKTEPAEQVRFMTMIRS

SEQ ID NO: 14671 - protein, 203 aa, Shinella sp.
  REGION 1..203: note = tr|A0A4Y8QF00|A0A4Y8QF00_9RHIZ GTP cyclohydrolase 1; OS = Shinella sp. MEC087 OX=1967501 GN=folE PE=3 SV=1
MDAIVTNFPRPEDQTDRPSQKEAEDAVRVLLRWAGDDPEREGLLDTPKRVAKAYRELFSGYDLAAEDVLGRTFEEVAGYDDMVLVRDIPFFSHCEHHMVPIIGKAHVAYLPNGRVLGLSKIARVVEIYGRRLQTQETMTAQIAKSIDETLNPRGVAVMIEAEHMCMAMRGIQKQGSTTLTTTFTGAFKTEPTEQVRFMTMIRS

SEQ ID NO: 14672 - protein, 203 aa, Shinella sp.
  REGION 1..203: note = tr|A0A021X8P5|A0A021X8P5_9RHIZ GTP cyclohydrolase 1; OS = Shinella sp. DD12 OX=1410620 GN=folE PE=3 SV=1
MDAIVTNFPRVDDPSGRPSQKEAEDAVRVLLRWAGDDPEREGLLDTPKRVAKAYRELFSGYDLAAEDVLGRTFEEVAGYDDMVLVKDIPFFSHCEHHMVPIIGKAHVAYLPNGRVLGLSKIARVVEIYGRRLQTQETMTAQIARSIDETLNPRGVAVMIEAEHMCMAMRGIQKQGSTTLTTTFTGAFKTEPTEQVRFMTMIRS

SEQ ID NO: 14673 - protein, 231 aa, unidentified
  source 1..231: note = Siansivirga zeaxanthinifaciens
  REGION 1..231: note = tr|A0A0C5WM24|A0A0C5WM24_9FLAO GTP cyclohydrolase 1; OS = Siansivirga zeaxanthinifaciens CC-SAMT-1 OX=1454006; GN = folE PE=3 SV=1
MNLETLDAKKKNKNKLNGISHETIGDDHLYTGLETPMRKDAFKLTDKEKKEKISLLFEEIMHVMGLDLTDDSLKGTPDRVAKMYIDEIFSGLNPANKPQVALFENKYQYNQMLVEKDITFYSNCEHHFVPIIGKAHVAYISSGKVIGLSKLNRIVQYYAKRPQVQERLTNQIAEALKDILETEDVAVIIDAKHLCVSSRGIKDDTSSTVTVYYGGKFNTTEKITELQNYLK

SEQ ID NO: 14674 - protein, 195 aa, unidentified
  source 1..195: note = Siansivirga zeaxanthinifaciens
  REGION 1..195: note = tr|A0A0C5WMA7|A0A0C5WMA7_9FLAO GTP cyclohydrolase 1; OS = Siansivirga zeaxanthinifaciens CC-SAMT-1 OX=1454006; GN = folE PE=3 SV=1
MPYKKFEEYNIQVTDDVKDRYKNIIEDLGENTSREGLLKTPERAAKAMQFLTQGYHQDPVEILKGAMFKESYNEMVIVKDIELYSLCEHHILPFFGKAHIAYIPNGYIVGLSKLPRIVDVFARRLQVQERLTEQILDCINDTLKPQGVAVVIEASHMCMMMRGVQKQNSLTTTSGFRGQFEKIETRNEFLKLIGK

SEQ ID NO: 14675 - protein, 219 aa, unidentified
  source 1..219: note = Siccationidurans arizonensis
  REGION 1..219: note = tr|A0A1I6B0H0|A0A1I6B0H0_9BACT GTP cyclohydrolase 1; OS = Siccationidurans arizonensis OX=1227077 GN=folE PE=3; SV = 1
MDNPSGLAPATDAHLPTGLRTPLRDDAFDQADEAKIAAISGHFEAIMRELGLDLTDDSLAGTPRRVAKMYVQEWFKGLDPRNRPEVRMFDNRYNYHQLLVERDITLFSCCEHHFVPIIGKAHVAYLPGANVVGLSKLNRVVQYYARRPQVQERLTRQIAEELKQSLGTDDVAVLIEADHLCVMSRGVNDTSSSTLTSEYGGRFATDEALRGEFLRQIGK

SEQ ID NO: 14676 - protein, 223 aa, unidentified
  source 1..223: note = Siccibacter turicensis
  REGION 1..223: note = tr|A0A2P8VJG9|A0A2P8VJG9_9ENTR GTP cyclohydrolase 1; OS = Siccibacter turicensis OX=357233 GN=folE PE=3 SV=1
MPSLSKEAALVHEALVARGLETPLRPPVQELDNETRRSLIAGHMTEIMQLLNLDLSDDSLAETPHRIAKMYVNEIFSGLDYANFPKITIIENKMKVDEMVTVRDITFTSTCEHHFVTIDGKATVAYIPKDGVIGLSKINRIVQFFAQRPQVQERLTQQVLIALQTLLGTNNVAVSMDAVHYCVKARGVRDATSATTTTSLGGLFKSSQNTRQEFLRAVRHHTN

SEQ ID NO: 14677 - protein, 209 aa, unidentified
  source 1..209: note = Siculibacillus lacustris
  REGION 1..209: note = tr|A0A4V2KSJ7|A0A4V2KSJ7_9RHIZ GTP cyclohydrolase 1; OS = Siculibacillus lacustris OX=1549641 GN=folE PE=3 SV=1
MDAVVDARREKGAASFAPVPRPSREEAEAAVRTLLRWSGDDPEREGLIDTPKRVVKAYEELYRGYRESPADVLDRVFEEVEGYGSIVLVRDIPFFSHCEHHMVPFVGRAHIAYYPSKGVIGLSKLARLVDVYARRLQTQESLTAQIVTALEDHLKPRGIAVMIEAEHMCMSMRGVQKSGVSTLTTDFTGVFRDDAAEQAKFMMMVKGLR

SEQ ID NO: 14678 - protein, 265 aa, unidentified
  source 1..265: note = Sideroxydans lithotrophicus
  REGION 1..265: note = tr|D5CNN3|D5CNN3_SIDLE GTP cyclohydrolase FolE2; OS = Sideroxydans lithotrophicus (strain ES-1) OX=580332; GN = folE2 PE=3 SV=1
MNSIETIADVQNSADTRQLAINKVGIKSIRHPVVVKDKSEGVQHTIATFNMYVHLPHNFKGTHMSRFVQILNQHGREISVESFEGILREMTEKLEAKSGYIEMSFPYFVNKTAPISEVQSLLDYDVTFIGEIVDGNYRFNMKVQIPVTSLCPCSKEISERGAHNQRSHVTITVRTRRSVWIEEVVRFAEEQASSELYGLLKRPDEKFVTERAYDNPKFVEDMVRDVAAVLNADERIEAYIVESENFESIHNHSAYALIERDKTKD

SEQ ID NO: 14679 - protein, 232 aa, unidentified
  source 1..232: note = Sideroxydans sp.
  REGION 1..232: note = tr|A0A1G3IQV3|A0A1G3IQV3_9PROT GTP cyclohydrolase I (Fragment) OS=Sideroxydans sp. RIFOXYB12_FULL_59_6; OX = 1802155 GN=A3J87_03410 PE=3 SV=1
VVSDKSEGVQHTIATFNMYVRLPHNFKGTHMSRFVQILNDHGREISVESFESILREMVEKLEAKSGYIEMAFPYFVNKTAPISGVQSLLDYDVTFIGEVVDGKYRFTMKVLVPVTSLCPCSKEISERGAHNQRSHVTLTVRTKGSVWIEDVVRIAEEQASSELYGLLKRPDEKFVTERAYDNPKFVEDMVRDVAAALNADERIEAYIVESENFESIHNHSAYALIERDKTQG

SEQ ID NO: 14680 - protein, 265 aa, unidentified; identical to SEQ ID NO: 8440
  source 1..265: note = Sideroxydans sp.
  REGION 1..265: note = tr|A0A1G3IKI2|A0A1G3IKI2_9PROT GTP cyclohydrolase FolE2 OS=Sideroxydans sp. GWF2_59_14 OX=1802154 GN=folE2; PE = 3 SV=1

SEQ ID NO: 14681 - protein, 367 aa, unidentified
  source 1..367: note = Silicibacter sp.
  REGION 1..367: note = tr|C9CWD7|C9CWD7_9RHOB GTP cyclohydrolase FolE2; OS = Silicibacter sp. TrichCH4B OX=644076 GN=folE2 PE=3 SV=1
MNIHSRDVNDTPDRSDAEEALAVLRRWADEASETEVAQLDPAIARLLPGREVQNYPDLKRQYPEEFDASETYRATLPDLQNGPSSLIRGAKEQIQHVGISNFRLPIRFHTRDNGDLTLETSVTGTVSLDAEKKGINMSRIMRSFYKHAEKVFSFDVMEAALEDYLSDLESGDARLQMRFSFPVKVESLRSGLSGYQYYDVALELVQMGGQRHRIVHLDYVYSSTCPCSLELSEHARQARGQLATPHSQRSVARISVQMEQDSGCLWFEDLIDHCRRAVPTETQVMVKREDEQAFAELNAANPIFVEDAARLFCEALQSDARVGDFRVVASHQESLHSHDAVSVLTQGVMFAAPSLDPQLFSTLIHRG

SEQ ID NO: 14682 - protein, 261 aa, unidentified
  source 1..261: note = Silvanigrella aquatica
  REGION 1..261: note = tr|A0A1L4CZA1|A0A1L4CZA1_9PROT GTP cyclohydrolase FolE2 OS=Silvanigrella aquatica OX=1915309 GN=folE2 PE=3; SV = 1
MQDTQNIRDQRMVKISKVGIKEVSHPLFFYDRDEKESAALPSTGVFSFFVELPAEKKGTHMSRFPSILYEFAPYFNLKKFEHMAHEINEKLQSDTAFIETKFTYFYEKFAPVSKTRGLTDIKVALKIKAKKNSKNTETQLTLQIPVTSLCPCSKAISENGAHSQRSHMTLSLWNPKLSIKECIEVAEKAASCAIYPVLKRVDEKFVTEKAYNTPRFVEDLVREAAIQLKEKNCALRFEVSAENFESIHNHNAWAMVKSDDL

SEQ ID NO: 14683 - protein, 198 aa, unidentified
  source 1..198: note = Silvanigrella aquatica
  REGION 1..198: note = tr|A0A1L4D139|A0A1L4D139_9PROT GTP cyclohydrolase 1; OS = Silvanigrella aquatica OX=1915309 GN=folE PE=3 SV=1
MSSNFKKAVSANNVSAEAATEAVKTLLRYIGENPKRDGLLDTPDRFCRSLIEMTEGYALNPEEILATTFESDSDEMVLLKDIEFNSLCEHHLLSFAGKAHIAYLPSGGRIVGLSKLARIVDVYAQRLQVQERLTQQIANAINKYLKPDGVAVVVEGIHSCMCVRGVRKQNSTMITSSMLGQFRESMASRNEFMSLITK

SEQ ID NO: 14684 - protein, 259 aa, unidentified
  source 1..259: note = Silvanigrellales bacterium
  REGION 1..259: note = tr|A0A4V0P2A5|A0A4V0P2A5_9PROT GTP cyclohydrolase FolE2 OS=Silvanigrellales bacterium RF1110005 OX=2493639; GN = folE2 PE=3 SV=1
MQDTQNFLDNRKIKIAKVGIKDVKYPIYYQDINNISQIPSVADFSFYVELPADKKGTHMSRFPTLLYEFAPFFSLQKFEEMSVKMLEILECNKTFLNADFIYFYEKEAPVSKIKGMTDIAVSIEIAVTRNETALTKISLRIPIKSLCPCSKAISEFGAHSQRSHMTITLWNPQISVLDCIEIADNSASSAIYPVLKRADEKYVTEKAYNNPRFVEDLVREAAVLLKKKSPNLRFEVSAENFESIHNHNAYAIVRSDDIF

SEQ ID NO: 14685 - protein, 199 aa, unidentified
  source 1..199: note = Silvanigrellales bacterium
  REGION 1..199: note = tr|A0A4P2VV16|A0A4P2VV16_9PROT GTP cyclohydrolase 1; OS = Silvanigrellales bacterium RF1110005 OX=2493639 GN=folE; PE = 3 SV=1
MSPFFKKAVSSNNVTAQEATEAVRTLLRYIGENPNREGLIETPDRYCRALLELTEGYSAKPEEILSTTFESQSDEMVLLKDIEFSSTCEHHLLSFSGKAHVAYIPSEGRIVGLSKLARIVDTFSQRLQVQERLTQQVAEAIQTHLKPQGVAVVFEGMHSCMCVRGVRKQSAKMVTSTMLGLFRESPASRNEFMSFITRN

SEQ ID NO: 14686 - protein, 211 aa, Simiduia agarivorans
  REGION 1..211: note = tr|K4L147|K4L147_SIMAS GTP cyclohydrolase 1; OS = Simiduia agarivorans (strain DSM 21679 / JCM 13881 / BCRC 17597 / SA1) OX=1117647 GN=folE PE=3 SV=2
MSPIAEQVRQALITRGLETPMVGNSLPPSQKREAIAGHVRGILTTLGLDLADDSLCETPERMAKLYVDELFAGLDYGQFPKISQIENKMGVSEMVRVQDISVISTCEHHLITIDGRAKVAYIPGDKVLGLSKINRIVRFFAQRPQVQERLTQQILVALQTILGTEDVAVHMAATHYCVKARGVRDAESFTETQALAGAFKRDPGLRAEFLR

SEQ ID NO: 14687 - protein, 179 aa, Simiduia agarivorans
  REGION 1..179: note = tr|K4KUB5|K4KUB5_SIMAS GTP cyclohydrolase 1; OS = Simiduia agarivorans (strain DSM 21679 / JCM 13881 / BCRC 17597 / SA1) OX=1117647 GN=folE PE=3 SV=1
MKEQFAQIISAIGEDLNRPGLQDTPARAAKAFEFLTRGYHQDLDEVINGALFPSDSSEMIIVKDIELYSMCEHHLLPFIGKAHVAYIPTGKVLGLSKVARIVDMFARRLQIQEQLTVQIAETIKSVTGAEGVGVIVEAKHMCMMMRGVEKQNSAMKTSAMLGSFRDEHATRAEFLSLIR

SEQ ID NO: 14688 - protein, 256 aa, Simonsiella muelleri
  REGION 1..256: note = tr|V9H8C5|V9H8C5_9NEIS GTP cyclohydrolase FolE2; OS = Simonsiella muelleri ATCC 29453 OX=641147 GN=folE2 PE=3; SV = 1
MNIPDIQSTRDLRNLPINQVGIKDLRFPISVQSQSGIQNTIARMTMTVFLPAHQKGTHMSRFVALMEEQTATLNYTQLQHLTHEMLTRLQSDSGKISISFPFFRQKTAPVSGIKSLMDYDVTLCSEMKNGEYSHILKVMIPVTSLCPCSKEISQYGAHNQRSHVTLSLRCTQEVQIEEVIDLVENNASCQLYGLLKRPDEKYVTEKAYENPKFVEDMVRDMALALKNDSRIQSFEIESENFESIHNHSAYAYLAYP

SEQ ID NO: 14689 - protein, 279 aa, Simplicispira sp.
  REGION 1..279: note = tr|A0A398CBL4|A0A398CBL4_9BURK GTP cyclohydrolase FolE2 OS=Simplicispira sp. NY-02 OX=2315688 GN=folE2 PE=3; SV = 1
MNAPEKNRLLPDIQSSADVRGIEIGAVGIQGLRYPIKVRSGGRVAATVAQWAMTVTVPATVKGTHMSRFVELLQAQSDALDAAGFRALLRDMLGRLNAQAGTIEMRFPWFVEKTAPVSGVRSLLDHDVQWRASVSAQGQQSLWLKVVVPVTSLCPCSREISVYGAHNQRSHVAIEVEVLDPIEVEDLIAIAERSSSCEVYGLLKRADEKYVTERAYENPKFVEDMVRDVAAALNQERRVGAYTVEVENFESIHNHSAFARIARPAGAAVGVQVRHGAGS

SEQ ID NO: 14690 - protein, 222 aa, Singulisphaera acidiphila
  REGION 1..222: note = tr|L0DEJ6|L0DEJ6_SINAD GTP cyclohydrolase 1; OS = Singulisphaera acidiphila (strain ATCC BAA-1392 / DSM 18658 / VKM B-2454 / MOB10) OX=886293 GN=folE PE=3 SV=1
MSEAFPSERSAYDCGDGAFDDDNEDENASVSETKMDLERIRGAVREILIAVGEDPDREGLRDTPDRVARMYAEVFRGLHQDPKVHLQKLFTQKYDEMVLVKDIRFESFCEHHLLPFIGQAHVAYLPNGKVIGLSKIPRVIDVLAKRPQMQERLTEDVADLLMKELDARGVAVVIEASHSCMTVRGVHKPGSSFVTSAMRGAFKERLATRHEVLSLIFGGKPT

SEQ ID NO: 14691 - protein, 222 aa, Singulisphaera sp.
  REGION 1..222: note = tr|A0A1N6KT42|A0A1N6KT42_9BACT GTP cyclohydrolase 1; OS = Singulisphaera sp. GP187 OX=1882752 GN=folE PE=3 SV=1
MSEAFPSERSGYDCGDSAFDDDKEDEIARVADTKIDLERIRGAVREILIAVGEDPDREGLRDTPDRVARMYAEVFQGLHQDPKVHLQKLFTQKYDEMVLIKDIRFESFCEHHLLPFIGQAHVAYLPNGKVIGLSKIPRVIDVLAKRPQMQERLTEDVADLLMKELDARGVAVVIEASHSCMTVRGVHKPGSSFVTSAMRGAFKERLATRHEVLSLIFGGKQT

SEQ ID NO: 14692 - protein, 280 aa, Singulisphaera sp.
  REGION 1..280: note = tr|A0A1N6L3B4|A0A1N6L3B4_9BACT GTP cyclohydrolase FolE2 OS=Singulisphaera sp. GP187 OX=1882752 GN=folE2 PE=3; SV = 1
MLDLTGGVNDTRGTEPLVDVQNHADDRCVPIDQVGVSNLRYPIVVLDRANQKQPTVASLSMSVNLPHHFKGTHMSRFVEVLNEHRGEVTMFTLPAILDGLRSRLQAESARIEVRFPYFLERVAPVSGARALMGYDCSFIGEASEAGEDFVLGVRIPVTSLCPCSKAISDYGAHNQRGHVTIEVRGGQNGGTGPELIWIEELVEVAERSASAPVFALLKREDERFVTMQAYDNPAFVEDIVRNAALILRVDERITWFRVHAENQESIHNHDAFAQVEWARI

SEQ ID NO: 14693 - protein, 183 aa, unidentified
  source 1..183: note = Sinimarinibacterium flocculans
  REGION 1..183: note = tr|A0A318EAC5|A0A318EAC5_9GAMM GTP cyclohydrolase 1; OS = Sinimarinibacterium flocculans OX=985250 GN=folE PE=3; SV = 1
MEEHYRAIIESVGENPDREGLLRTPHRAARAMEFLTQGYEQDLGEIVNGAVFESGNDEMVIVKDIELYSLCEHHLLPFFGRAHVAYLPSGKVIGLSKIPRIVDMYARRLQIQENLTQQIGQSIEEVTGAVGVAVVIEAKHLCAMMRGVEKQNSSMITSVMLGRFRDDPRTRQEFLELIRSSGR

SEQ ID NO: 14694 - protein, 183 aa, unidentified
  source 1..183: note = Sinimarinibacterium sp.
  REGION 1..183: note = tr|A0A4U0GZR4|A0A4U0GZR4_9GAMM GTP cyclohydrolase 1; OS = Sinimarinibacterium sp. CAU 1509 OX=2562283 GN=folE; PE = 3 SV=1
MEENYRAIIEAIGENPDREGLLRTPYRAARAMEFLTQGYEQDINEIINGAVFESSNDEMVIVKDIEMYSMCEHHLLPFIGKAHVAYLPSGKVIGLSKIPRIVDMFARRLQIQENLTQQIGECIAEVTHAVGVAVVIEAKHLCAMMRGVEKQNSSMITSVMLGRFREDPTTRKEFLDLIRQRGC

SEQ ID NO: 14695 - protein, 271 aa, unidentified
  source 1..271: note = Sinimarinibacterium sp.
  REGION 1..271: note = tr|A0A4U0GC11|A0A4U0GC11_9GAMM GTP cyclohydrolase FolE2 OS=Sinimarinibacterium sp. CAU 1509 OX=2562283; GN = folE2 PE=3 SV=1
MNLPVAVLPDLQSSIDERDLAIDAVGIKDLRYPVQIREGASCQSTVANFTMTVALPARVKGTHMSRFVELLEAHSQPLEPSALRNLVMEMVERLGARHGELAIRFPFFIRKAAPISGAQSLVDYEITWRARASDGEYRQSVEVLVPATSLCPCSKEISSYGAHNQRSHIRISAELLEIIDVADLIGVAERSASCEVFGLLKRPDEKYVTERAYDNPRFVEDLVRCVAQSLRADPRVAAFTVEAENFESIHNHSAFARITYSPERHSMWRAE

SEQ ID NO: 14696 - protein, 369 aa, unidentified
  source 1..369: note = Sinirhodobacter ferrireducens
  REGION 1..369: note = tr|A0A443LCZ3|A0A443LCZ3_9RHOB GTP cyclohydrolase FolE2 OS=Sinirhodobacter ferrireducens OX=1215032 GN=folE2; PE = 3 SV=1
MNMHDRSNSPDTEAAKAALATLRAWAERADPVEVARLDPAIARLLPGHALSNYPDLARTYDAEFRPDAAYKDGMPDLQNGPASLITGAHASIAHVGISNFRLPIRYRLRPGTDNPPGEVTLETSVTGTVSLDAEKKGINMSRIIRSFYGHAEREFSFEVMAAALDGYKDDLDSFDARLMMRFSYPVRVESLRSGLSGWQYYDIALEMADQGGRRLKAIHLDYVYSSTCPCSLELSEHARASRGRLATPHSQRSVARISVAVEPGKVLWFEDLIDIARAAVPTETQVMVKREDEQAFAELNAAHPIFVEDAVRVFAAGLLAEPRVGDFRVVASHQESLHSHDAVAVLTEGPTFAAASLDPRFFASLVHAG

SEQ ID NO: 14697 - protein, 369 aa, unidentified
  source 1..369: note = Sinirhodobacter hungdaonensis
  REGION 1..369: note = tr|A0A3S3LEI0|A0A3S3LEI0_9RHOB GTP cyclohydrolase FolE2 OS=Sinirhodobacter hungdaonensis OX=2501515 GN=folE2; PE = 3 SV=1
MKMHERSNSPDTEAAKAALATLRDWALRADPVEIARLDPAIARLLPGHALSNYPDLVRSYDTGFQPDAAYKDGMPDLQNGPASLITGAHAPIAHVGISNFRLPIRYRLRPGTDNPAGEVTLETSVTGTVSLDAEKKGINMSRIIRSFYGHAEREFSFEVMAAALDGYKDHLDSFDARLMMRFSYPVRVESLRSGLSGWQYYDIALEMADQGGRRLKAIHLDYVYSSTCPCSLELSEHARRDRGRLATPHSQRSVARISVAVEPGAPLWFEDLIDIARAAVPTETQVMVKREDEQAFAELNAAHPIFVEDAVRVFAAGLLAEPRVGDFRVVASHQESLHSHDAVAVLTEGPTFAAASLDPRFFASLVHSG

SEQ ID NO: 14698 - protein, 364 aa, unidentified
  source 1..364: note = Sinirhodobacter populi
  REGION 1..364: note = tr|A0A443KQ99|A0A443KQ99_9RHOB GTP cyclohydrolase FolE2 OS=Sinirhodobacter populi OX=2306993 GN=folE2 PE=3; SV = 1
MNLQTRLTPDGEEAKAALDVLRAWAAQADPAEVARLDPAIARLLPGHEVSNYPDLSRHYDPDFTVDEAYRATLPDLQNGPASLIVGAKARIEHVGISNFRLPLRYRTRSGGEVTLETSVTGTVSLDANKKGINMSRVMRSFYTHAGKEFSFEVMAAALDDYRDKLDSFDARLMMRFSFPAEIESLRSGLKGWQYYEIGLEMVDQNGTRQKMIHLDYVYSSTCPCSLELSEHARRTRGQLATPHSQRSVARISVVLDETGGCLWFEDLIDIARRAVPTETQVMVKREDEQAFAELNAANPIFVEDAVRAFAGGLLADPRVGDFRVAASHQESLHSHDAVAVLTEGATFASASLDPRFFASLSHGG

SEQ ID NO: 14699 - protein, 364 aa, unidentified
  source 1..364: note = Sinirhodobacter populi
  REGION 1..364: note = tr|A0A443KIW2|A0A443KIW2_9RHOB GTP cyclohydrolase FolE2 OS=Sinirhodobacter populi OX=2306993 GN=folE2 PE=3; SV = 1
MNLQTRLTPDGEEAKAALDVLRAWAAQADPAEVARLDPAIARLLPGHEVSNYPDLSRHYDPDFTVDEAYRATLPDLQNGPASLIVGAKARIEHVGISNFRLPLRYRTRSGGEVTLETSVTGTVSLDANKKGINMSRVMRSFYTHAGKEFSFEVMAAALDDYRDKLDSFDARLMMRFSFPAEIESLRSGLRGWQYYEIGLEMVDQNGTRQKMIHLDYVYSSTCPCSLELSEHARRTRGQLATPHSQRSVARISVVLDETGGCLWFEDLIDIARRAVPTETQVMVKREDEQAFAELNAANPIFVEDAVRAFAGGLLADPRVGDFRVAASHQESLHSHDAVAVLTEGATFASASLDPRFFASLSHGG

SEQ ID NO: 14700 - protein, 189 aa, Sinobaca qinghaiensis
  REGION 1..189: note = tr|A0A419V2V9|A0A419V2V9_9BACL GTP cyclohydrolase 1; OS = Sinobaca qinghaiensis OX=342944 GN=folE PE=3 SV=1
MAPFDHKKIEQAVTLILEAVGEDPNREGLEDTPKRVARMYQEVFKGIHEDPSTHLKTVFGEQHEELVLVKDITFYSMCEHHLVPFYGKAHVGYIPKGGKVTGLSKLARTVESVASKPQLQERITSTIANTIVETLQPHGAIVVIEAEHMCMAMRGVKKPGSMTVTSAVRGSLQKDAAARAEVFSLINTR

SEQ ID NO: 14701 - protein, 227 aa, unidentified
  source 1..227: note = Sinobacteraceae bacterium
  REGION 1..227: note = tr|A0A2T5MBQ2|A0A2T5MBQ2_9GAMM GTP cyclohydrolase 1; OS = Sinobacteraceae bacterium GT1R17 OX=2029166 GN=folE; PE = 3 SV=1
MPTRLLGPGTNQVDRDFFNDGIWTLGHEPRAEQVWDNLRRNQKTSAAMEAQFRAIIEAVGENPEREGLVRTPLRAAKAMQYLTQGYEQDINEIVNGAIFESENDQMVIVRHIEMYSLCEHHLLPFIGKCHVAYLPDGKVIGLSKIPRIVDMFARRLQIQENLTKQIGECVQNVTGAKGVAVVIEAKHLCAMMRGVGKQNSDMVTSVMLGRFREDSRTRQEFLDLIRS

SEQ ID NO: 14702 - protein, 180 aa, unidentified
  source 1..180: note = Sinobacteraceae bacterium
  REGION 1..180: note = tr|A0A522KMX1|A0A522KMX1_9GAMM GTP cyclohydrolase 1; OS = Sinobacteraceae bacterium OX=1969813 GN=folE PE=3 SV=1
MEAEYRSILQAVGEDPTREGLLNTPQRAAKAMKFLTQGYRQSLDELINGALFATTNNEMVIVKDIELYSMCEHHLLPFFGRAHIGYIPDGKVLGLSKIPRIVDMFARRLQIQEQLTKQIGDCILEVTDAKGVAVVIEARHMCAMMRGVEKQNSSMTTSMMEGRFRDDSRTRQEFLTLIKS

SEQ ID NO: 14703 - protein, 180 aa, unidentified
  source 1..180: note = Sinobacterium caligoides
  REGION 1..180: note = tr|A0A3N2DNU5|A0A3N2DNU5_9GAMM GTP cyclohydrolase 1; OS = Sinobacterium caligoides OX=933926 GN=folE PE=3 SV=1
MEKAFAQIITAVGEDLTRPGLVDTPKRAAKAFEFLNKGYHQNIDEVVNNALFPSDASEMVIVKDIELYSMCEHHLLPFIGKVHVAYIPNGMVLGLSKVARIVDMFGRRMQIQENLTTQIAETIQQVTGAAGVGVIVEAKHMCMMMRGVEKQNSVMKTSSMLGCFRDNQATRAEFLTLVKD

SEQ ID NO: 14704 - protein, 198 aa, unidentified
  source 1..198: note = Sinomicrobium oceani
  REGION 1..198: note = tr|A0A1K1RU76|A0A1K1RU76_9FLAO GTP cyclohydrolase 1; OS = Sinomicrobium oceani OX=1150368 GN=folE PE=3 SV=1
MGYKRFEEYNLKVTDEIKGSYNTILNELGEDPGREGLQKTPERAAKAMQYLTQGYHQDAARILKSAMFKEGYNDMVVVKDIELYSLCEHHMLPFFGKAHVAYIPDGQIVGLSKIPRVVDVFARRLQVQERLTHDILECINNTLKPQGVAVVIEAAHMCMMMRGIQKQNSVTTTSGFRGVFEKVETRTEFLRLIGSDLS

SEQ ID NO: 14705 - protein, 226 aa, unidentified
  source 1..226: note = Sinomicrobium oceani
  REGION 1..226: note = tr|A0A1K1RT79|A0A1K1RT79_9FLAO GTP cyclohydrolase 1; OS = Sinomicrobium oceani OX=1150368 GN=folE PE=3 SV=1
MKIDKALEEHFEEIGDDHVSSSADTPLREDAFELSDDEKIEKIQQDVYNIMETLGLDLTDDSLRGTPRRVAKMFVKEIFAGLHPERKPKASTFQNKYKYGEMLVEKNITVYSTCEHHLLPIVGRAHVAYISKGNVIGLSKMNRIVDYFAKRPQVQERMTMQIVQELQQALGTKDVACVIDAKHLCVNSRGIRDIESSTVTAEFGGKFKDPAVRREFLDYIKLETEF

SEQ ID NO: 14706 - protein, 198 aa, unidentified
  source 1..198: note = Sinomicrobium pectinilyticum
  REGION 1..198: note = tr|A0A3N0DYI6|A0A3N0DYI6_9FLAO GTP cyclohydrolase 1; OS = Sinomicrobium pectinilyticum OX=1084421 GN=folE PE=3; SV = 1
MGYKRFEEYNLKVTDEIKNSYHTIIAELGEDSGREGLQKTPERAAKAMQFLTQGYHQDAAKILKSAMFREGYNDMVVVKDIELYSLCEHHMLPFFGKAHVAYIPKGHIVGLSKIPRVVDVFARRLQVQERLTHDILECINNTLKPQGVAVVIEASHMCMMMRGIQKQNSVTTTSGFRGVFETVETRTEFLRLIGSDLS

SEQ ID NO: 14707 - protein, 226 aa, unidentified
  source 1..226: note = Sinomicrobium pectinilyticum
  REGION 1..226: note = tr|A0A3N0ECS2|A0A3N0ECS2_9FLAO GTP cyclohydrolase 1; OS = Sinomicrobium pectinilyticum OX=1084421 GN=folE PE=3; SV = 1
MKIDKALEEHFEEIGDNHVSSSADTPLREDAFDLSDDEKIEKIQQDVYNIMETLGLDLTDDSLRGTPRRVAKMFVKEIFGGLHPERKPKASTFQNKYKYGEMLVEKNITVYSTCEHHLLPIVGRAHVAYISKGNVIGLSKMNRIVDYYAKRPQVQERMTMQIVQELQKALGTKDVACVIDAKHLCVNSRGIRDIESSTVTAEFGGKFKDPAVRREFLDYIKLETEF

SEQ ID NO: 14708 - protein, 198 aa, unidentified
  source 1..198: note = Sinomicrobium sp.
  REGION 1..198: note = tr|A0A329MUM4|A0A329MUM4_9FLAO GTP cyclohydrolase 1; OS = Sinomicrobium sp. N-1-3-6 OX=2219864 GN=folE PE=3 SV=1
MGYRRFEEYNLQVTDVIKQSYQTIISDLGENPEREGLLKTPERAAKAMQFLTQGYHQDPEEILKEATFREGYNDMVVVKDIEVYSLCEHHMLPFFGKAHVAYIPDGQIVGLSKIPRVVDVFARRLQVQERLTHDILECINTTLRPQGVAVVIEACHMCMMMRGVQKQNSVTTTSGFRGIFEKVETRTEFLRLIGSDLS

SEQ ID NO: 14709 - protein, 226 aa, unidentified
  source 1..226: note = Sinomicrobium sp.
  REGION 1..226: note = tr|A0A329N067|A0A329N067_9FLAO GTP cyclohydrolase 1; OS = Sinomicrobium sp. N-1-3-6 OX=2219864 GN=folE PE=3 SV=1
MKIDKALEEQFEEIGDNHVSSSADTPLREDAFELSDDEKMERIEQDVYHIMETLGLDLTDDSLRGTPRRVAKMFVKEIFGGLHPDRKPKASTFQNKYRYGEMLVEKNITVYSTCEHHLLPIVGRAHVAYISKGNVIGLSKMNRIVDYYAKRPQVQERMTMQIVQELQKALGTDDVACVVDAKHLCVNSRGIRDIESSTVTAEFGGRFKDPAVRREFLDYIKLDTEF

SEQ ID NO: 14710 - protein, 204 aa, Sinomonas atrocyanea
  REGION 1..204: note = tr|A0A126ZV63|A0A126ZV63_9MICC GTP cyclohydrolase 1; OS = Sinomonas atrocyanea OX=37927 GN=folE PE=3 SV=1
MTHFDDDDVSALPAEAEKMDLPRIEAAVREILLAVGEDPDRSGLKDTPQRVARAYAETFAGLHHDAEEILGVTFDMDHEELVLVKDIPFYSTCEHHLVPFHGVAHVGYIPSHDGRVTGLSKLARLVDVYARRPQVQERLTSQVADAIVSHLKPRGVIVVVDCEHMCMSMRGVRKPGAHTVTSAVRGQLHDPATRAEAMSLILGK

SEQ ID NO: 14711 - protein, 204 aa, unidentified
  source 1..204: note = Sinomonas humi
  REGION 1..204: note = tr|A0A0B2AHP9|A0A0B2AHP9_9MICC GTP cyclohydrolase 1; OS = Sinomonas humi OX=1338436 GN=folE PE=3 SV=1
MTHIDDDDVAAAADFDSRMDLPRIEAAVREILLAVGEDPDRHGLRDTPKRVARSFAETFAGLHQTPEDVLGVTFDLDHEELVLVKDIPFYSTCEHHLVPFHGVAHVGYIPSHDGRVTGLSKLARLVDIYARRPQVQERLTTDVAEALVKHLKPRGVIVVVECEHMCMSMRGVRKPGAKTVTSAVRGQLHDPATRAEAMSLILGR

SEQ ID NO: 14712 - protein, 186 aa, Sinomonas sp.
  REGION 1..186: note = tr|A0A221RB49|A0A221RB49_9MICC GTP cyclohydrolase 1; OS = Sinomonas sp. R1AF57 OX=2020377 GN=folE PE=3 SV=1
MDLPRIEAAVREILLAVGEDPDRSGLKDTPKRVAKAYAETFAGLHMDPEDVLGVTFDLDHEELVLVKDIPFYSTCEHHLVPFHGVAHVGYIPSHDGRVTGLSKLARLVDIYARRPQVQERLTTQVADAIVHHLKPRGVIVVISCEHMCMSMRGVRKPGAHTVTSAVRGQLHDPATRAEAMSLILGR

SEQ ID NO: 14713 - protein, 205 aa, Sinorhizobium americanum
  REGION 1..205: note = tr|A0A1L3LL80|A0A1L3LL80_9RHIZ GTP cyclohydrolase 1; OS = Sinorhizobium americanum OX=194963 GN=folE PE=3 SV=1
MDAIVKNFPVLDDTSGRPTQKEAEEAVRVLLRWAGEDPTREGLKDTPARVVKSYREIFGGYDLVAEDVLGRTFEEVSGYDDIVLEKDIPFYSHCEHHMVPIIGKAHVAYLPNGRVLGLSKIARVVDIYARRLQTQESMTAQIAKAIDETLAPRGVAVLIEAEHLCMAMRGIKKQGATTLTTTFTGAFKTEPAEQARFMTMLRGFK

SEQ ID NO: 14714 - protein, 205 aa, Sinorhizobium americanum
  REGION 1..205: note = tr|A0A2S3YW60|A0A2S3YW60_9RHIZ GTP cyclohydrolase 1; OS = Sinorhizobium americanum OX=194963 GN=folE PE=3 SV=1
MDAIVKNFPVLDDTSGRPTQKEAEEAVRVLLRWAGEDPTREGLKDTPARVVKSYREIFGGYDLVAEDVLGRTFEEVSGYDDIVLEKDIPFYSHCEHHMVPIIGKAHVAYLPSGRVLGLSKIARVVDIYARRLQTQESMTAQIAKAIDETLAPRGVAVLIEAEHLCMAMRGIKKQGATTLTTTFTGAFKKEPAEQARFMTMLRGFK

SEQ ID NO: 14715 - protein, 205 aa, unidentified
  source 1..205: note = Sinorhizobium fredii
  REGION 1..205: note = sp|C3MB45|GCH1_SINFN GTP cyclohydrolase 1; OS = Sinorhizobium fredii (strain NBRC 101917 / NGR234); OX = 394 GN=folE PE=3 SV=1
MDAIVKNFPLLDDTSGRPTQKEAEEAVRVLLRWAGEDPTREGLKDTPARVIKSYREIFGGYDLVAEDVLGRTFEEVSGYDDIVLEKDVPFYSHCEHHMVPIIGKAHVAYLPNGRVLGLSKIARVVDIYARRLQTQEAMTAQIARAIDETLAPRGVAVMIEAEHLCMAMRGIKKHGSTTLTTTFTGAFKTEPAEQARFMTLLRGFK

SEQ ID NO: 14716 - protein, 205 aa, unidentified; identical to SEQ ID NO: 13800
  source 1..205: note = Sinorhizobium fredii
  REGION 1..205: note = tr|A0A2Z3G0H5|A0A2Z3G0H5_RHIFR GTP cyclohydrolase 1; OS = Sinorhizobium fredii CCBAU 25509 OX=1128330 GN=folE; PE = 3 SV=1

SEQ ID NO: 14717 - protein, 205 aa, unidentified
  source 1..205: note = Sinorhizobium medicae
  REGION 1..205: note = sp|A6U8C2|GCH1_SINMW GTP cyclohydrolase 1; OS = Sinorhizobium medicae (strain WSM419) OX=366394 GN=folE; PE = 3 SV=1
MDAIVKNFPVLDDTSGRPTQKEAEEAVRVLLRWAGEDPAREGLKDTPARVAKAYREIFGGYDLAAEDVLGRTFEEVSGYDDIVLEKDIPFYSHCEHHMVPIIGKAHIAYLPNGRVLGLSKIARVVDIYARRLQTQEAMTAQIARAIDETLVPRGVAVMIEAEHLCMAMRGIKKQGATTMTTTFTGEFKSEPAEQVRFMTMLRGFK

SEQ ID NO: 14718 - protein, 205 aa, unidentified; identical to SEQ ID NO: 14717
  source 1..205: note = Sinorhizobium medicae
  REGION 1..205: note = tr|A0A508WWB4|A0A508WWB4_9RHIZ GTP cyclohydrolase 1; OS = Sinorhizobium medicae OX=110321 GN=folE PE=3 SV=1

SEQ ID NO: 14719 - protein, 204 aa, unidentified; identical to SEQ ID NO: 13820
  source 1..204: note = Sinorhizobium meliloti
  REGION 1..204: note = tr|A0A0E0UBX3|A0A0E0UBX3_SINMB GTP cyclohydrolase 1; OS = Sinorhizobium meliloti (strain BL225C) OX=698936; GN = folE PE=3 SV=1

SEQ ID NO: 14720 - protein, 204 aa, unidentified; identical to SEQ ID NO: 13820
  source 1..204: note = Sinorhizobium meliloti
  REGION 1..204: note = tr|H0G7Y2|H0G7Y2_RHIML GTP cyclohydrolase 1; OS = Sinorhizobium meliloti CCNWSX0020 OX=1107881 GN=folE; PE = 3 SV=1

SEQ ID NO: 14721 - protein, 205 aa, unidentified
  source 1..205: note = Sinorhizobium saheli
  REGION 1..205: note = tr|A0A178YET6|A0A178YET6_SINSA GTP cyclohydrolase 1; OS = Sinorhizobium saheli OX=36856 GN=folE PE=3 SV=1
MDAIVKNFPVLDDKIGRPTQKEAEEAVRVLLRWAGEDPTREGLRDTPARVAKSYREIFGGYDLVAEDVLGRTFEEVSGYDDIVLEKDIPFYSHCEHHMVPIIGKAHVAYLPNGRVLGLSKIARVVDIYARRLQTQEAMTAQIAKAIDETLAPRGVAVMIEAEHLCMAMRGIKKQGALTLTTTFTGAFKSEPAEQARFMTLLRGFK

SEQ ID NO: 14722 - protein, 205 aa, Sinorhizobium sp.
  REGION 1..205: note = tr|A0A2A6MK93|A0A2A6MK93_9RHIZ GTP cyclohydrolase 1; OS = Sinorhizobium sp. NG07B OX=1538174 GN=folE PE=3 SV=1
MDAIVKNFPVLDDTSGRPTQKEAEEAVRVLLRWAGEDPTREGLKDTPARVVKSYREIFGGYDLVAEDVLGRTFEEVSGYDDIVLEKDIPFYSHCEHHMVPIIGKAHVAYLPSGRVLGLSKIARVVDIYARRLQTQESMTAQIAKAIDETLAPRGVAVLIEAEHLCMAMRGIKKQGATTLTTTFTGAFKTEPAEQARFMTMLRGFK

SEQ ID NO: 14723 - protein, 205 aa, Sinorhizobium sp.; identical to SEQ ID NO: 7832
  REGION 1..205: note = tr|A0A0T6Y0A8|A0A0T6Y0A8_9RHIZ GTP cyclohydrolase 1; OS = Sinorhizobium sp. GW3 OX=647869 GN=folE PE=3 SV=1

SEQ ID NO: 14724 - protein, 194 aa, Sinosporangium album
  REGION 1..194: note = tr|A0A1G8FD49|A0A1G8FD49_9ACTN GTP cyclohydrolase 1; OS = Sinosporangium album OX=504805 GN=folE PE=3 SV=1
MANQHHLVDSDRIEKAVREILLAIGEDPDRDGLRATPARVARAYAEQFAGLGLTPEDVLTTVFDADHDEMILVKDIEVFSTCEHHLLPFHGVAHVGYVPNEKGQITGLSKLARLVDVYARRPQVQERMTSQIADGLMRVLEPRGVIVVIEAEHMCMTIRGVRKPGAKTTTSAVRGSFRDSDKTRAEAMSLIIGR

SEQ ID NO: 14725 - protein, 230 aa, Siphonobacter aquaeclarae
  REGION 1..230: note = tr|A0A1G9RVP4|A0A1G9RVP4_9BACT GTP cyclohydrolase 1; OS = Siphonobacter aquaeclarae OX=563176 GN=folE PE=3 SV=1
MKPNEISLNTLLVDDTPLDDELGNEHVSTSVETPLRPDAFELSDDQKIAKIQEHFREIMLTLGLDLNDDSLKGTPKRVAKMYVKEIFSGLNPANFPKATLFENKYRYQEMLVEKDIQFYSNCEHHFVPIIGKAHVAYISSGKVIGLSKLNRIVQYFSRRPQVQERLTMQIARALQKILETEDVAVVMDASHLCVSMRGVQDPTSSTVTSFYGGKFAEDDRKKEFLGYLNL

SEQ ID NO: 14726 - protein, 232 aa, unidentified
  source 1..232: note = Siphonobacter curvatus
  REGION 1..232: note = tr|A0A2S7IQC6|A0A2S7IQC6_9BACT GTP cyclohydrolase 1; OS = Siphonobacter curvatus OX=2094562 GN=folE PE=3 SV=1
MKPNEISLNTLLSDNSIVFSDEEIGEDHIATSVQTPLRADAFDLTDEQKIDKIQEHFREIMLTLGLDLNDDSLKGTPRRVAKMYVQEIFSGLNPKNMPAATLFDNKYRYQEMLVERDIQFYSNCEHHFVPIIGKAHVAYISNGKVIGLSKLNRLVQHFAKRPQVQERMTVQIARELQRVLETPDVAVLMDARHLCVSMRGIEDPTSSTVTSFYGGKFEEEAKKQEFLKYLQL

SEQ ID NO: 14727 - protein, 232 aa, Siphonobacter sp.
  REGION 1..232: note = tr|A0A2N7BGA5|A0A2N7BGA5_9BACT GTP cyclohydrolase 1; OS = Siphonobacter sp. BAB-5405 OX=1864825 GN=folE PE=3 SV=1
MKPNEISLNTLLSDNSIVFSDEEIGEDHIATSIQTPLRADAFDLTDEQKIDKIQEHFREIMLTLGLDLNDDSLKGTPRRVAKMYVQEIFSGLNPKNMPAATLFDNKYRYQEMLVERDIQFYSNCEHHFVPIIGKAHVAYISNGKVIGLSKLNRLVQHFAKRPQVQERMTVQIARELQRVLETPDVAVLMDARHLCVSMRGIEDPTSSTVTSFYGGKFEEEAKKQEFLKYLQL

SEQ ID NO: 14728 - protein, 232 aa, Siphonobacter sp.
  REGION 1..232: note = tr|A0A261Q8W8|A0A261Q8W8_9BACT GTP cyclohydrolase 1; OS = Siphonobacter sp. BAB-5385 OX=1864822 GN=folE PE=3 SV=1
MKPNEISLNTLLSDNSIVFSDEEIGEDHIATSIQTPLRADAFDLTDEQKIDKIQEHFREIMLTLGLDLNDDSLKGTPRRVAKMYVQEIFSGLNPKNMPAATLFDNKYRYQEMLVERDIQFYSNCEHHFVPIIGKAHVAYISNGKVIGLSKLNRLVQHFAKRPQVQERMTVQIARELQRVLETPDVAVLVDARHLCVSMRGIEDPTSSTVTSFYGGKFEEEAKKQEFLKYLQL

SEQ ID NO: 14729 - protein, 216 aa, Skermanella aerolata
  REGION 1..216: note = tr|A0A512DT80|A0A512DT80_9PROT GTP cyclohydrolase 1; OS = Skermanella aerolata OX=393310 GN=folE_1 PE=3 SV=1
MIADTLADAISDDRSLTGNLADASLRPAYPSRADAEEAVRTLLLWAGDNPDREGLLGTPDRVVRSYEEFFAGYKVDPVDLLQRTFEETDGYDEMVVLKDIRFESYCEHHMVPIIGKAHVAYLPRHRVVGISKLARVVDVYAKRLQIQEKMTSQIANTLEEVLQPLGVAVVLEGEHQCMTTRGIHKPGVSMVSSRMLGAFRTDPATRREFLDLIRSS

SEQ ID NO: 14730 - protein, 210 aa, Skermanella aerolata
  REGION 1..210: note = tr|A0A0D2UKF5|A0A0D2UKF5_9PROT GTP cyclohydrolase 1; OS = Skermanella aerolata KACC 11604 OX=1385368 GN=folE PE=3; SV = 1
MARNPDHSIPPAISQAGPRPSRAEAEEAVRTLLRWAGDDPSREGLAETPARVARAFDEFFAGYAIDPGLLLARTFEEVDGYDEMVLLRDIRFESYCEHHMVPIIGKVHVAYLPRHRVVGISKLARVIEVFAKRLQIQEKMTAQIANTIDEVLQPEGVAVVIEGEHQCMTTRGVHKPGVGMITSRMLGAFRTNPSTRQEFLSLVGNPGIHG

SEQ ID NO: 14731 - protein, 219 aa, Skermanella stibiiresistens
  REGION 1..219: note = tr|W9GXA1|W9GXA1_9PROT GTP cyclohydrolase 1; OS = Skermanella stibiiresistens SB22 OX=1385369 GN=folE; PE = 3 SV=1
MSASKSLTADHSVRGPSHHGRSAPGIARPSRAEAEEAVRTLLLWAGDDPDREGLLGTPDRVVRSYEEFFAGYAVDPVELLQRTFEETDGYDEMVVLKGIRFESYCEHHMVPIIGKAHVAYLPQRRVVGISKLARVVEAYAKRLQIQEKMTSQIANTIEDVLQPLGVAVVLEGEHQCMTTRGIHKPGVSMVTSRMLGAFRTDPTTRREFLAMIGGASGIG

SEQ ID NO: 14732 - protein, 195 aa, Skermania sp.
  REGION 1..195: note = tr|A0A554V2D8|A0A554V2D8_9ACTN GTP cyclohydrolase 1; OS = Skermania sp. ID1734 OX=2597516 GN=folE PE=3 SV=1
MTQTVLNLLDCGLPDLAAAEEAAAAFLRALGVATDTENMRETPARMARAYAELFSSDPFEPTTFPNDEGYDELVVARDIPLRSVCEHHLLPFTGTACVGYLPGERILGLSKLARVVEHFACRPQVQERLTKQIADWLTTELNPRAVGVVIRAEHTCMTLRGVQATGSTTLTSALLGRLRTDASSRQEFFALAGIG

SEQ ID NO: 14733 - protein, 209 aa, Skermania sp.
  REGION 1..209: note = tr|A0A554USD5|A0A554USD5_9ACTN GTP cyclohydrolase 1; OS = Skermania sp. ID1734 OX=2597516 GN=folE PE=3 SV=1
MSQDGRAGRDHHELTALETGRRFDQARAEAAIRELLLAVGEDPDRPGLVDTPARVARSYREVFAGLYVEPDSVLDTTFDEGHQELVLVRDIPLYSTCEHHLVSFHGVAHVGYIPGPSGRVTGLSKLARLVDLYAKRPQVQERLTSQIADAVMRKLDPRGAIVVIEAEHLCMAMRGIRKPGASTTTSAVRGLLQSSAVSRAEALDLILRR

SEQ ID NO: 14734 - protein, 186 aa, Slackia equolifaciens
  REGION 1..186: note = tr|A0A3N0AV80|A0A3N0AV80_9ACTN GTP cyclohydrolase 1; OS = Slackia equolifaciens OX=498718 GN=folE PE=3 SV=1
MFDQEKIQQATRLLLEAIGEDPQREGLLDTPARVARMYEEICGGMQQDAAEHLSTTFEASEAGMVVERDIPFYSLCEHHLLPFFGRAHIAYLPSGRVAGLSKLARTVEVFARRLQLQERLSAQVADALMEHLGAKGVIVMMEAEHMCMSMRGVCKPGTQTVTLVKRGAFEQDPALVDEFFRMVGQR

SEQ ID NO: 14735 - protein, 188 aa, Slackia exigua
  REGION 1..188: note = tr|D0WHK7|D0WHK7_SLAES GTP cyclohydrolase 1; OS = Slackia exigua (strain ATCC 700122 / DSM 15923 / CIP 105133 / JCM 11022 / KCTC 5966 / S-7) OX=649764 GN=folE; PE = 3 SV=1
MRGAMIDQQKIEAATRLLLEGIGEDPDREGLLETPERVARMYAEVCGGLDQSAEKHLSTTFTVDSDEVVLERDIPFHSLCEHHLLPFFGRAHIAYLPNGKVVGLSKLARTVEVYARRPQLQERLTAQVADAIMEHTGARGAIVMIEAEHMCMSMRGVSKPGTKTVTVAKRGEYTTDSSLVTEFFAMVR

SEQ ID NO: 14736 - protein, 184 aa, Slackia faecicanis
  REGION 1..184: note = tr|A0A3N0AFA1|A0A3N0AFA1_9ACTN GTP cyclohydrolase 1; OS = Slackia faecicanis OX=255723 GN=folE PE=3 SV=1
MVDHQKAQQAVAMLLEAIGEDPSREGLVETPARVARMYEEVCGGYDENAAEHLSTTFHVDGSEMVVERDIRFYSLCEHHLLPFFGTAHVAYIPDGEVTGLSKLARTVEVFARRLQLQERLTAQVADALMDDLHAKGAIVMVQAEHMCMSMRGVRKPGSQTVTLAKRGLFAQDERLVDDFFRMVR

SEQ ID NO: 14737 - protein, 195 aa, Slackia heliotrinireducens
  REGION 1..195: note = tr|C7N868|C7N868_SLAHD GTP cyclohydrolase 1; OS = Slackia heliotrinireducens (strain ATCC 29202 / DSM 20476 / NCTC 11029 / RHS 1) OX=471855 GN=folE PE=3 SV=1
MTDPIKPYGELDQARAEAAIREFLIAIGEDPDREGIRETPNRVARACAEIFGGLQSDPCEPLRKQFQEEHHEEMVIVKDIPFASMCEHHLLPFTGKVHVAYIPRKGRITGLSKIARCVEGYARRPQLQERLTSQVADAMMSTLEPRGVLVVAEAEHSCMTMRGVRKPGSVTVTSAVRGCFADLPTREEALRLLGL

SEQ ID NO: 14738 - protein, 194 aa, Slackia heliotrinireducens
  REGION 1..194: note = tr|C7N2I8|C7N2I8_SLAHD GTP cyclohydrolase 1; OS = Slackia heliotrinireducens (strain ATCC 29202 / DSM 20476 / NCTC 11029 / RHS 1) OX=471855 GN=folE PE=3 SV=1
MTESEYRKLDQPRAEAAIREFLYAIGEDPDREGLLETPSRVARACAEIFAGLQENPADHLKKQFHEADHEEMVIVKDIPFNSMCEHHLLPFSGRAHVAYIPRKGRITGLSKIARCVEGFARRPQVQERLASQVADALMEALDPLGAIVVIEAEHMCMTARGIRKPGSLTVTSAVRGVFKEDQKTRAEALALFRD

SEQ ID NO: 14739 - protein, 185 aa, Slackia isoflavoniconvertens
  REGION 1..185: note = tr|A0A369L4S2|A0A369L4S2_9ACTN GTP cyclohydrolase 1; OS = Slackia isoflavoniconvertens OX=572010 GN=folE PE=3 SV=1
MVDQEKIQQAVRLLLEGMGEDVEREGLLETPQRVGRMYAEICRGMDGSASEHLSTTFSIDSDDMVVERDIQFYSLCEHHLLPFYGKVHLAYIPNGRVTGLSKLARTVEVFSRRLQLQERLTSQIADALMDDLGAKGAIVMVEGEHMCMSMRGVSKPGASTATLAKRGVFEGDQALVDEFFRLIGK

SEQ ID NO: 14740 - protein, 185 aa, Slackia isoflavoniconvertens
  REGION 1..185: note = tr|A0A3N0IEC5|A0A3N0IEC5_9ACTN GTP cyclohydrolase 1; OS = Slackia isoflavoniconvertens OX=572010 GN=folE PE=3 SV=1
MVDQEKIQQAVRLLLEGMGEDVEREGLLETPQRVGRMYAEICRGMDESASEHLSTTFSIDSDDMVVERDIQFYSLCEHHLLPFYGKVHLAYIPNGRVTGLSKLARTVEVFSRRLQLQERLTSQIADALMDDLGAKGAIVMVEGEHMCMSMRGVSKPGASTATLAKRGVFEGDQALVDEFFRLIGK

SEQ ID NO: 14741 - protein, 185 aa, Slackia piriformis
  REGION 1..185: note = tr|K0YV41|K0YV41_9ACTN GTP cyclohydrolase 1; OS = Slackia piriformis YIT 12062 OX=742818 GN=folE PE=3 SV=1
MFDQEKIQQATRLLLEGIGEDPQREGLLETPARVARMYEEICGGMNQDPAEYLSTTFEVSDGGMVVERDIPFHSLCEHHLLPFVGKAHIAYMPNGRVTGLSKLARTVEVYARRLQLQERLTAQVADALMKELDAKGALVMIEAEHMCMSMRGVQKPGTQTVTLVKRGVFETDSQLVDDFFRMVRR

SEQ ID NO: 14742 - protein, 184 aa, Slackia sp.
  REGION 1..184: note = tr|J6II80|J6II80_9ACTN GTP cyclohydrolase 1; OS = Slackia sp. CM382 OX=1111137 GN=folE PE=3 SV=1
MIDQQKIEAATRLLLEGIGEDPDREGLLETPERVARMYAEVCGGLDQSAEKHLSTTFTVDSDEVVLERDIPFHSLCEHHLLPFFGRAHIAYLPNGRVVGLSKLARTVEVYARRPQLQERLTAQVADAIMAHTGARGAIVMIEAEHMCMSMRGVSKPGTKTVTVAKRGEYTTDSSLVTEFFAMVR

SEQ ID NO: 14743 - protein, 255 aa, Smithella sp.
  REGION 1..255: note = tr|A0A091AFZ5|A0A091AFZ5_9DELT GTP cyclohydrolase FolE2 OS=Smithella sp. F21 OX=1538640 GN=folE2 PE=3 SV=1
MIDIQNQKDFRNIDIKKVGVKNIKYPIIVLDRVRGTQPVNATINMYVNLPHHFKGTHMSRFVEVLNDFRGQINIKTFQTILEKMRQKLRAQSAHMEIEFPYFLKKTAPVSKARSMMEYRCLFAGENSAEKTDFLVGVVVPVTTLCPCSKEISAFGAHNQRSIVTVKVRFRKFFWIEDLIKAVEDSASGEVYSLLKRVDEKFVTEKAYKNPKFVEDLVRGVAVKLNADDNFIWYSIEAENFESIHNHSAYACVEKG

SEQ ID NO: 14744 - protein, 255 aa, Smithella sp.
  REGION 1..255: note = tr|A0A354H226|A0A354H226_9DELT GTP cyclohydrolase FolE2 OS=Smithella sp. OX=2053614 GN=folE2 PE=3 SV=1
MIDIQNQKDFRNIDIKKVGVKNIKYPIIVLDRAKGTQLVNATINMYVNLPHHFKGTHMSRFIEALNEFKGQISIKTFQSILEKTRQKLHAHSAHMEIEFAYFLEKTAPVSKAKSLMEYRCIFSGESNADKSDFQVGVVVPVTTVCPCSREISKFGAHNQRSIVTTKVRFKKFFWIEDLIKIVENSASGEVYSLLKRVDEKYVTEKAYENPKFVEDVVRSVAVKLNKDDNFTWYCVEAENFESIHNHSAYALVEKG

SEQ ID NO: 14745 - protein, 201 aa, Sneathiella sp.
  REGION 1..201: note = tr|A0A2G1Z583|A0A2G1Z583_9PROT GTP cyclohydrolase 1; OS = Sneathiella sp. OX=1964365 GN=folE PE=3 SV=1
MNKHFKPDDPTSKPPTKEEVEDAVRTLIRWAGDDPSREGLLGTPDRVARSYLEFFAGYKEDADAYLSKTFEEVNGYDEMVVLKDIRIESYCEHHMVPIIGHAHVAYMPNNRVVGISKLARVVDAYAKRLQIQEKLTRQIAETINRTLQPKGVAVIIESTHQCMTTRGVHKDGVTMVTSTMLGVFRSSDITRGELLAFIGKG

SEQ ID NO: 14746 - protein, 201 aa, Sneathiella sp.
  REGION 1..201: note = tr|A0A2D8HIB3|A0A2D8HIB3_9PROT GTP cyclohydrolase 1; OS = Sneathiella sp. OX=1964365 GN=folE PE=3 SV=1
MNKHTHPGTPAKDRPTKAEAEDAVRTLIRWAGDDPAREGLRGTPDRVVRSYLEFFAGYNEDPDAYLARTFEEVNGYDEMVVLKDIRVESYCEHHMVPIIGVAHVAYMPSNRVVGISKLARVVDAYAKRLQIQEKLTRQIAETIERALQPKGVAVIIESAHQCMTTRGVHKDGVTMVTSTMLGVFRRSDITRRELLSFIDKG

SEQ ID NO: 14747 - protein, 257 aa, unidentified
  source 1..257: note = Snodgrassella alvi
  REGION 1..257: note = tr|A0A2N9WZC1|A0A2N9WZC1_9NEIS GTP cyclohydrolase FolE2 OS=Snodgrassella alvi OX=1196083 GN=folE2 PE=3 SV=1
MDTIADVQSSVDKRNMPINQVGVKGLRLPLCIISAAGEQHTVADLTMTVSLPAEQKGTHMSRFIELMQEQQCNIDFAALQQLTIAMLQKLQAKAGKISMRFPFFRRKQAPVTAISSLLDYEVMLSGEIQAGVYQHSLQVIIPVTSLCPCSKEISAYGAHNQRSHVTVTLVSTEAVTIEEIIDLVEQEGSCQLYGLLKRPDEKYVTEYAYDNPKFVEDMVRDVATALKADARIQSFTVESENFESIHNHSAYALIQYP

SEQ ID NO: 14748 - protein, 257 aa, unidentified
  source 1..257: note = Snodgrassella alvi
  REGION 1..257: note = tr|A0A2N9XV30|A0A2N9XV30_9NEIS GTP cyclohydrolase FolE2 OS=Snodgrassella alvi OX=1196083 GN=folE2 PE=3 SV=1
MDIIADVQSSVDKRNMPINQVGVKGLRLPLSIICAAGEQHTVADLTMTVSLPAEQKGTHMSRFIELMQAQHGSIDFVALQQLTADMLQKLQATAGKISIRFPFFRRKQAPVTAISSLLDYEVMLSGEINDGVYQHSLQVIIPVTSLCPCSKEISAYGAHNQRSHVTVTLISTEAIAVEEVIDLVEQQGSCQLYGLLKRPDEKFVTEYAYDNPKFVEDMVRDVATALKADARIQSFTVESENFESIHNHSAYALIQYP

SEQ ID NO: 14749 - protein, 257 aa, unidentified
  source 1..257: note = Snodgrassella sp.
  REGION 1..257: note = tr|A0A1C4C524|A0A1C4C524_9NEIS GTP cyclohydrolase FolE2 OS=Snodgrassella sp. R-53583 OX=1798181 GN=folE2; PE = 3 SV=1
MDTIADVQSSVDKRNMPINQVGVKGLRLPLSIISAAGEQHTVADLTMTVALPAEQKGTHMSRFIELMLAQQGSMDFAALQRLTGDMLLKLQATAGRISIRFPFFRRKLAPVTAISSLLDYEVMLCGEILAGVYQHSLQVVIPVTSLCPCSKEISAYGAHNQRSHVTVTLISTEAVAIEEIIDLVEQQGSCQLYGLLKRPDEKYVTEYAYDNPKFVEDMVRDVATALKADARIQSFTVESENFESIHNHSAYALIQYP

SEQ ID NO: 14750 - protein, 238 aa, unidentified
  source 1..238: note = Snowella sp.
  REGION 1..238: note = tr|A0A2W7B782|A0A2W7B782_9CYAN GTP cyclohydrolase 1; OS = Snowella sp. OX=2164131 GN=folE PE=3 SV=1
MTIASSPNSDINNGKDLLNTQLTERIQTRPDRNTHDGQMAKVHPEALEISKEKMMDSVRGILEAVGEDPEREGLLKTPKRVAEAMQFLTQGYNQSLEKLVNGAIFNEGHNEMVLVRDIDFFSLCEHHMLPFMGKAHVAYIPNEKVVGLSKLARIVEMYSRRLQVQERLTRQIAEAVQEILEPRGVAVVMEATHMCMVMRGVQKPGSWTVTSAMIGSFQDEQKTREEFLNLIRHQPKFY

SEQ ID NO: 14751 - protein, 216 aa, unidentified
  source 1..216: note = Snowella sp.
  REGION 1..216: note = tr|A0A2W7B9L5|A0A2W7B9L5_9CYAN GTP cyclohydrolase 1; OS = Snowella sp. OX=2164131 GN=folE PE=3 SV=1
MTSLISSQKLTVDQAIAALPTQAAPPVSEAEMQAAVRTLLLGMGEDPDREGLRDTPKRVVKALKFLTSGYQQSLDELLNGAIFSENANEMVLIRDIDLFSSCEHHILPIIGRAHVAYIPNGKVIGLSKIARICEMYGRRLQVQERLTAQIADALQGLLQPQGVAVMVEATHMCMVMRGVQKPGSWTVTSSMQGIFADDAKTRDEFMNLIRHSPSFY

SEQ ID NO: 14752 - protein, 220 aa, unidentified
  source 1..220: note = Sodalis endosymbiont
  REGION 1..220: note = tr|A0A2C8CWH0|A0A2C8CWH0_9GAMM GTP cyclohydrolase 1; OS = Sodalis endosymbiont of Henestaris halophilus; OX = 1929246 GN=folE PE=3 SV=1
MVTMTKEASQVREALLACGLETQLQGKVLDNEVRKSLIADHMTAIMTLLNLDLTDDSLAKTPHRIAKLYVKEVFAGLDYANFPKITVLENKMQVNEMVTVRNITLTSTCEHHFVIIDGKATVSYIPKDYVIGLSKINRIVQFFSQRPQVQERLTQQILVALQMLLGTNNVAVSIGAVHYCVKARGIRDATSTTTTTSLGGLFKSSQNTRQEFLRAIMHTS

SEQ ID NO: 14753 - protein, 247 aa, unidentified
  source 1..247: note = Sodalis endosymbiont
  REGION 1..247: note = tr|A0A2C8CXU7|A0A2C8CXU7_9GAMM GTP cyclohydrolase 1 type 2 OS=Sodalis endosymbiont of Henestaris halophilus; OX = 1929246 GN=ybgI PE=4 SV=1
MLNIELENLINHKLNSSELQDYAPNGLQVEGRKDVKRIVTGVTACQALLDIALTHDVDAVIVHHGYFWKNEAPVIIGMKRRRLKTLLANDINLYSWHFPLDVHPELGNNAQLAVALDIRVTGSLDPMVLQGELAAPLSSEGLRKRLKQILGRSVFHFGESGPAQIKRLAWCSGGGQDFIELAARADVDAFITGEVSEQTIHIAREQGLHFYAAGHHATERGGIRALGEWLVQQYGFSVTFIDIPNPA

SEQ ID NO: 14754 - protein, 221 aa, Sodalis glossinidius
  REGION 1..221: note = sp|Q2NUE3|GCH1_SODGM GTP cyclohydrolase 1 OS=Sodalis glossinidius (strain morsitans) OX=343509 GN=folE PE=3 SV=1
MVTLTKEASQVRDALLARGLETPLRGEVLDNEVRKRLIAEHMTEIMTLLNLDLTDDSLAETPHRIAKMYVEEIFAGLDYANFPKITVIENKMKVDEMVTVRDITLTSTCEHHFVIIDGKATVSYIPKHCVIGLSKINRIVQFFAQRPQVQERLTQQIMLALQTLLGTNNVAVSIDAVHYCVKARGIRDATSTTTITSLGGLFKSSQNTRQEFLRAVTHYNG

SEQ ID NO: 14755 - protein, 221 aa, Sodalis glossinidius; identical to SEQ ID NO: 14754
  REGION 1..221: note = tr|A0A193QI21|A0A193QI21_SODGM GTP cyclohydrolase 1; OS = Sodalis glossinidius (strain morsitans) OX=343509; GN = folE PE=3 SV=1

SEQ ID NO: 14756 - protein, 221 aa, unidentified
  source 1..221: note = Sodalis praecaptivus
  REGION 1..221: note = tr|K7SK67|K7SK67_9GAMM GTP cyclohydrolase 1; OS = Sodalis praecaptivus OX=1239307 GN=folE PE=3 SV=1
MVTLTKEASQVREALLARGLETPLRGEVLDNEVRKRLIAEHMTEIMTLLNLDLTDDSLAETPHRIAKMYVEEVFAGLDYANFPKITVIENKMKVDEMVTVRDITLTSTCEHHFVIIDGKATVSYIPKHCVIGLSKINRIVQFFAQRPQVQERLTQQILLALQTLLGTNNVAVSIDAVHYCVKARGIRDATSTTTTTSLGGLFKSSQNTRQEFLRAVTHHNG

SEQ ID NO: 14757 - protein, 221 aa, Sodalis sp.
  REGION 1..221: note = tr|A0A1J7C6Q8|A0A1J7C6Q8_9GAMM GTP cyclohydrolase 1; OS = Sodalis sp. TME1 OX=1912097 GN=folE PE=3 SV=1
MVTLTKEASQVREALLARGLETPLRGEVLDNEVRKRLIVEHMTAIMTLLNLDLTDDSLAETPHRIAKMYVEEVFAGLDYANFPKITVIENKMKVDEMVTVRDITLTSTCEHHFVIIDGKATVSYIPKHCVIGLSKINRIVQFFAQRPQVQERLTQQILLALQTLLGTNNVAVSIDAVHYCVKARGIRDATSTTTTTSLGGLFKSSRNTRQEFLRAVTHHNG

SEQ ID NO: 14758 - protein, 221 aa, Sodalis sp.
  REGION 1..221: note = tr|A0A4R1NHR7|A0A4R1NHR7_9GAMM GTP cyclohydrolase 1; OS = Sodalis sp. 159R OX=2529856 GN=folE PE=3 SV=1
MVSLTKEASLVHETLLARGLETPLRGEALDGEIRKRRIAEHMTGIMQLLNLDLSDDSLAETPHRIAKMYVDEIFSGLDYANFPKITLIQNKMKVDEMVAVRNITLTSTCEHHFVIIDGKATVAYIPKESVIGLSKINRIVQFFAQRPQVQERLTQQILIALQTLLGTNNVAVSIDAVHYCVKARGIRDATSATTTTSLGGLFKSSQNTRQEFLRAVRHHDD

SEQ ID NO: 14759 - protein, 221 aa, unidentified
  source 1..221: note = Unknown
  REGION 1..221: note = tr|A0A151UJ28|A0A151UJ28_9GAMM GTP cyclohydrolase 1; OS = Sodalis-like endosymbiont of Proechinophthirus fluctus; OX = 1462730 GN=folE PE=3 SV=1
MVTLTKEASQVREALLDRGLETPLWGEVLDNEVRKRLIAEHMTAIMTLLNLDLADDSLAETPHRIAKMYVEEVFAGLDYANFPKITVIENKMKVDEMVTVRDITLTSTCEHHFVIIDGKATVSYIPKHCVIGLSKVNRIVQFFSQRPQVQERLTQQILLALQTLLGTNNVAVSVDAVHFCIKARGIRDATTTTTTTSLGGLFKSSQNTRQEFLRAVTHHNS

SEQ ID NO: 14760 - protein, 221 aa, unidentified
  source 1..221: note = Unknown
  REGION 1..221: note = tr|A0A261QRN0|A0A261QRN0_9GAMM GTP cyclohydrolase 1; OS = Sodalis-like symbiont of Philaenus spumarius OX=1189304; GN = folE PE=3 SV=1
MVTLTKEASQVRDALLARSLETPLGSEVLDNEVRKRLIAEHMTEIMTLLNLDLTDDSLAETPHRIAKMYVEEIFAGLDYANFPKITVIENKMKVDEMVTVRDITLTSTCEHHFIIIDGKATVSYIPKHCVIGLSKINRIVQFFAQRPQVQERLTQQILLALQTLLGTNNVAVSIDAVHYCVKARGILDATSTTTTTSLGGLFKSSQNTRQEFLRAVTHHNG

SEQ ID NO: 14761 - protein, 275 aa, unidentified
  source 1..275: note = Solemya elarraichensis
  REGION 1..275: note = tr|A0A1T2LCU6|A0A1T2LCU6_9GAMM GTP cyclohydrolase FolE2 OS=Solemya elarraichensis gill symbiont OX=1918949; GN = folE2 PE=3 SV=1
MSSATDIAKPVTAADIEDVQGSADTRQIAINKVGIKDIRHPVKVADRSGNEQHTVANFNMSVYLPHNFKGTHMSRFVGILNNHEREITVASFKDMLSEMAQLLESEVGHIEMSFPFFVNKKAPVSGVESLMDYEVTLIGEIRDSIPEMSTRVLVPATSLCPCSKKISERGAHNQRSHVTVTVCAEDFFWIEDLIDLVEKEASSELYGLLKRPDEKFVTERAYDNPKFVEDMVRDVAQRLNEDGRICAYTVEAENFESIHNHSAYAMIEHDKREAS

SEQ ID NO: 14762 - protein, 268 aa, unidentified
  source 1..268: note = Solemya pervernicosa
  REGION 1..268: note = tr|A0A1T2L152|A0A1T2L152_9GAMM GTP cyclohydrolase FolE2 OS=Solemya pervernicosa gill symbiont OX=642797; GN = folE2 PE=3 SV=1
MNQSAKPIADVQNSADTRQIAINKVGIKDIRHPIRVKDRSEGDQHTIANFNMYVNLPHNFKGTHMSRFVEILNHQDREISVESFETMLSEMVELLEAGSGHIEMNFPYFINKTAPISGVQSLLDYDVTLIGEIHDGKIDTNIKVVVPVTSLCPCSKKISERGAHNQRSHVTVNVRTSQFMWIEEVIELVEQEASCELFGLLKRPDEKFVTERAYDNPKFVEDMVRDVAARLNADERINYYVVESENFESIHNHSAYALIERDKAADPV

SEQ ID NO: 14763 - protein, 270 aa, unidentified
  source 1..270: note = Solemya velesiana
  REGION 1..270: note = tr|A0A1T2KVG2|A0A1T2KVG2_9GAMM GTP cyclohydrolase FolE2 OS=Solemya velesiana gill symbiont OX=1918948; GN = folE2 PE=3 SV=1
MTEGVETKSEIADVQSSADTRQIAINKVGIKDIRHPVQVKDRSDGIQHTIATFNMYVNLPHNFKGTHMSRFVEILNSHEKEISVESFKGMLGEMAERLEAASGHIEMNFPYFINKTAPVSGVQSLMDYDVTLIGEVHDGTPTMFIKVVVPVTSLCPCSKKISDRGAHNQRSHVTVQVRTNGFVWIEEIIDLVEKEASCELYGLLKRPDEKHVTEHAYDNPKFVEDMVRDVAGRLNEEERFSAYIVESENFESIHNHSAYALIEKDKEAEV

SEQ ID NO: 14764 - protein, 286 aa, Solemya velum
  REGION 1..286: note = tr|A0A0B0H9J2|A0A0B0H9J2_SOVGS GTP cyclohydrolase FolE2 OS=Solemya velum gill symbiont OX=2340 GN=folE2 PE=3; SV = 1
MSGSNPTADAQMSSATDIAKPTTAADIEDVQGSADTRQIAINKVGIKDIRHPVKVADRSGNEQHTVANFNMSVYLPHNFKGTHMSRFVGILNNHEREITVASFKDMLSEMAQLLESEVGHIEMSFPFFVNKKAPVSGVESLMDYEVTLIGEIRDSIPEMSTRVLVPATSLCPCSKSISERGAHNQRSHVTVTVCAEDFFWIEDLIDLVEREASSELYGLLKRPDEKFVTERAYDNPKFVEDMVRDVAQRLNEDERICAYTVEAENFESIHNHSAYAMIEHDKREAS

SEQ ID NO: 14765 - protein, 184 aa, Solemya velum
  REGION 1..184: note = tr|A0A1T2F130|A0A1T2F130_SOVGS GTP cyclohydrolase 1; OS = Solemya velum gill symbiont OX=2340 GN=folE PE=3 SV=1
MSLDKLTDHYAGIIENVGENLERDGLIRTPERAAQAMQFLCRGYSQSLDDVVNEAIFDSDADDMIIVKDIELYSLCEHHMLPFIGKAHIAYLPQGKVIGLSKIARIVDMYARRLQIQENMTIQIADAIEQAINPAGVAVTIEAEHLCMKMRGVEKQNSVMKTSVMLGAFRKSQATRMEYLNLIK

SEQ ID NO: 14766 - protein, 189 aa, unidentified
  source 1..189: note = Solibacillus isronensis
  REGION 1..189: note = tr|K1L5X8|K1L5X8_9BACL GTP cyclohydrolase 1; OS = Solibacillus isronensis B3W22 OX=1224748 GN=folE PE=3; SV = 1
MSNVDLNKIEEAVKMILEAVGEDVTREGLLDTPKRVSKMYAEMFSGLQEDPRDYFSTVFHEDHEELVLVKDIPFFSMCEHHLVPFYGTAHIAYIPKDGKVAGLSKLGRCLESVARRPQLQERITSTVADTIMEMLNPKGVYVVVEAEHMCMTMRGLKKPGAKTVTAVARGIYEQDVVKRNEVNTFIQMK

SEQ ID NO: 14767 - protein, 189 aa, Solibacillus silvestris
  REGION 1..189: note = tr|F2F6U9|F2F6U9_SOLSS GTP cyclohydrolase 1; OS = Solibacillus silvestris (strain StLB046) OX=1002809; GN = folE PE=3 SV=1
MSNVDLNKIEEAVKMILEAVGEDVTREGLLDTPKRVSKMYAEMFSGLQEDPRDYFSTVFHEDHEELVLVKDIPFFSMCEHHLVPFYGTAHIAYIPKDGKVAGLSKLGRCLESVARRPQLQERITSTVADTIMEMLNPKGVYVVVEAEHMCMTMRGLKKPGAKTVTAVARGIYEQDAVKRNEVNTFIQMK

SEQ ID NO: 14768 - protein, 189 aa, Solibacillus silvestris; identical to SEQ ID NO: 14767
  REGION 1..189: note = tr|A0A1A7LRB1|A0A1A7LRB1_9BACL GTP cyclohydrolase 1; OS = Solibacillus silvestris OX=76853 GN=folE PE=3 SV=1

SEQ ID NO: 14769 - protein, 189 aa, Solibacillus sp.
  REGION 1..189: note = tr|A0A2D1SR99|A0A2D1SR99_9BACL GTP cyclohydrolase 1; OS = Solibacillus sp. R5-41 OX=2048654 GN=folE PE=3 SV=1
MTNVDLKKIEEAVKMILEAVGEDVEREGLLDTPKRVSKMYAEMFSGLKEDPREYFNTVFHEDHEELVLVKDIPFFSMCEHHLVPFYGKAHIAYIPKDGKVAGLSKLGRCLESVARRPQLQERITSTVADTIMEMLDPKGVYVIIEAEHMCMTMRGLKKPGAKTITSVARGIYEQDDVKRNEVITFVQMS

SEQ ID NO: 14770 - protein, 194 aa, unidentified
  source 1..194: note = Solibacter usitatus
  REGION 1..194: note = tr|Q028J6|Q028J6_SOLUE GTP cyclohydrolase 1; OS = Solibacter usitatus (strain Ellin6076) OX=234267; GN = folE PE=3 SV=1
MNPKPEEAPIAPLIEDLLGRLGEDPKRDGLLRTPQRVDKSLRFLTSGYRMDIDKILNGALYEVKYDEMVVVKDIEFFSLCEHHMLPFYGKMHVAYLPQKKVIGLSKIPRLVDMFARRLQIQERLTQQVAQTIQEVIRPLGVGVICEAKHFCMMMRGVEKQHSGAMTSAMLGAFRDRKETRDEFLALVNHRSNGF

SEQ ID NO: 14771 - protein, 268 aa, unidentified
  source 1..268: note = Solimicrobium silvestre
  REGION 1..268: note = tr|A0A2S9GV01|A0A2S9GV01_9BURK GTP cyclohydrolase FolE2 OS=Solimicrobium silvestre OX=2099400 GN=folE2 PE=3; SV = 1
MNTRDLTLSIPDIQSTPDTRKIAIARVGVKGVRYPLVVKTSSGTQATVGHWNMYVHLDETQKGTHMSRFIALLEELNQQGAMDMPIFVGLMEKMTQLLDATAGRIELTFPYFINKTAPVSGVQSLMDYEVGITGEIKNGQVETTIKVMVPVTSLCPCSKKISAYGAHNQRSHINISALVSTDISVDELIANVEAQASCELYGLLKRPDEKYVTERAYDNPKFVEDLVRDVAGVLNADPRILAYTLEAENFESIHNHSAYALIENDKRA

SEQ ID NO: 14772 - protein, 181 aa, Solimonas aquatica
  REGION 1..181: note = tr|A0A1H9JX18|A0A1H9JX18_9GAMM GTP cyclohydrolase 1; OS = Solimonas aquatica OX=489703 GN=folE PE=3 SV=1
MEEHFRAIIEAIGEDPQRNGLLRTPHRAAKAMGFLTHGYRQDLGEIVNGAIFESSNDEMVLVRNIELYSLCEHHLLPFIGKAHVAYLPAGRVIGLSKIPRIVDMYARRLQIQENLTQQIGNCIAEVTGANGVAVVIEAQHLCAMMRGVQKQNSSMVTSMMLGRFREDARTREEFLSLVRGG

SEQ ID NO: 14773 - protein, 215 aa, unidentified
  source 1..215: note = Solimonas fluminis
  REGION 1..215: note = tr|A0A2S5TGS1|A0A2S5TGS1_9GAMM GTP cyclohydrolase 1; OS = Solimonas fluminis OX=2086571 GN=folE PE=3 SV=1
MDDLHPFSTESKEFETAGPEGEVDAPQEHRLAGLYRELMRGIGEDVRREGLVGTPNRAAKAFEFLTRGYREDIESLVNGAVFQSTSQDMVLVRNIEFYSLCEHHILPFFGKVHVAYLPAGKVIGLSKIPRIVDVFARRLQIQENLTEQIAQCIEQVTLARGVAVIVEARHMCMLMRGVEKQAASMLTSSLRGKFQQDESLRNQLLRFLPASAGES

SEQ ID NO: 14774 - protein, 188 aa, unidentified
  source 1..188: note = Solimonas fluminis
  REGION 1..188: note = tr|A0A2S5TIP0|A0A2S5TIP0_9GAMM GTP cyclohydrolase 1; OS = Solimonas fluminis OX=2086571 GN=folE PE=3 SV=1
MKENNGMEEQFRAIIEAIGENPEREGLLRTPHRAARAMEFLTQGYEQDVGEIVNGAVFESHNDEMVIVKDIELYSMCEHHMLPFIGRAHVAYLPNGKVIGLSKIPRIVDMFARRLQIQENLTQQIGQCLQDTIDAKGVGVVIEAKHLCAMMRGVQKQNSSMVTSFMLGRFREDHRTRQEFLDLIRRQN

SEQ ID NO: 14775 - protein, 180 aa, Solimonas sp.
  REGION 1..180: note = tr|A0A346N6M2|A0A346N6M2_9GAMM GTP cyclohydrolase 1; OS = Solimonas sp. K1W22B-7 OX=2303331 GN=folE PE=3 SV=1
MEEQFRAIIEAIGENPEREGLLRTPHRAAKAMEFLTQGYEQDIGEIVNGAVFESHNDEMVIVKDIELYSMCEHHMLPFIGRAHVAYLPNGKVIGLSKIPRIVDMFARRLQIQENLTQQIGQCLQDTIDAKGVGVVIEAKHLCAMMRGVQKQNSSMVTSFMLGRFREDHRTRQEFLDLIRR

SEQ ID NO: 14776 - protein, 221 aa, unidentified
  source 1..221: note = Solirubrum puertoriconensis
  REGION 1..221: note = tr|A0A0W8EDC6|A0A0W8EDC6_9BACT GTP cyclohydrolase 1; OS = Solirubrum puertoriconensis OX=1751427 GN=folE PE=3 SV=1
MAKQPDPAALPGADDRLDAELRTPLRPDAFALSEEDKIAGITAHFREIMHLLGLDLTDDSLNGTPRRVAKMFVNEWFRGLDPQHRPEVRLFENRYQYNHILVERDITLFSCCEHHFVPIIGKAHVAYLPGEHVVGLSKLNRVVQYYARRPQVQERLTRQIAEELKQSLRTDDVAVLIEADHLCVMSRGVNDTSSSTITAEYGGAFGRDEQLRREFLRLIGK

SEQ ID NO: 14777 - protein, 216 aa, Solitalea canadensis
  REGION 1..216: note = tr|H8KM92|H8KM92_SOLCM GTP cyclohydrolase 1; OS = Solitalea canadensis (strain ATCC 29591 / DSM 3403 / NBRC 15130 / NCIMB 12057 / USAM 9D) OX=929556 GN=folE PE=3; SV = 1
MEELKKFSSEMMEENEMDGYQKIDRYNPEKIKDISSKYYDILKDIGEDPDREGLLKTPERVAKALQYLTHGYDLKPDEILKSAMFTEEYSQMVLVKDIEVYSMCEHHLLPFFGKAHVAYIPNGKVVGLSKIPRVVDAYARRLQVQERLTNEIRDCIQDTLSPLGVAVVIECKHMCMSMRGIQKQNSVTTTSAFTGEFISNEKTRFEFMQLIASHLS

SEQ ID NO: 14778 - protein, 215 aa, Solitalea koreensis
  REGION 1..215: note = tr|A0A521AYU4|A0A521AYU4_9SPHI GTP cyclohydrolase 1; OS = Solitalea koreensis OX=543615 GN=folE PE=3 SV=1
MEQYKDHTPSMMEENEMDGYEKIDRYNAGKIKRIADKYHDILKDIGENPDREGLNKTPERVAKALQFLTHGYDLNPTEILKSAMFTEDYSQMVIVKDIEVYSMCEHHMLPFFGKAHVAYIPNGKVVGLSKIPRVVDAFSRRLQVQERLTNEIRDCIESTLKPLGVAVVIECKHMCMSMRGIQKQNSVTTTSAFTGEFVNENTRMEFMQLIAAKLS

SEQ ID NO: 14779 - protein, 216 aa, unidentified
  source 1..216: note = Solitalea longa
  REGION 1..216: note = tr|A0A2S5A9G9|A0A2S5A9G9_9SPHI GTP cyclohydrolase 1; OS = Solitalea longa OX=2079460 GN=folE PE=3 SV=1
MDDLKKLASSMMEENEMDGYQKIDRYNEEKIKDISDKYYDILKDLGEDPNREGLLKTPERVAKALQFLTHGYDLNPSEILKSAMFTEEYSQMVLVKDIEVYSMCEHHMLPFFGKAHVAYIPNGKVVGLSKIPRVVDAFSRRLQVQERLTNEIRDCIQETLNPLGVAVVIECKHMCMSMRGIQKQNSVTTTSAFTGEFINNEKTRYEFMQLIAAHLS

SEQ ID NO: 14780 - protein, 221 aa, Soonwooa buanensis
  REGION 1..221: note = tr|A0A1T5DID5|A0A1T5DID5_9FLAO GTP cyclohydrolase 1; OS = Soonwooa buanensis OX=619805 GN=folE PE=3 SV=1
MTEHFDNDDDLFTGKEHTPLREDAFALSPDEKIEKIQGLFGEIMQTLGLDMTDDSLKDSPKRVAKMYVNEIFGGLLPENKPGISTFSNKYKYRQMLVEKDITVYSFCEHHFLPIIGRAHVAYISNGEVIGLSKINRIVDYYAKRPQVQERLTMQIVEALKVALGTKDVACIIDAKHLCVNCRGIKDTASSTITAELSGIFRTNPITRQEFLHYVGSHAKLD

SEQ ID NO: 14781 - protein, 158 aa, Sorangium cellulosum
  REGION 1..158: note = tr|A0A150P8L7|A0A150P8L7_SORCE GTP cyclohydrolase 1 (Fragment) OS=Sorangium cellulosum OX=56 GN=BE04_09335; PE = 3 SV=1
MIDRQRAARAIEEFLRALGRDVEGELAGTGERVADAWADDLIEGEAIDAAAVLREGAMETGPFERGLVVARDLSVTTMCPHHLLPGHGTGVVAYLPGARVAGIGTIAHVLDALARRLTLQERIGGQLVDLLVGELGARGALCKLTLTHTCLIARGERK

SEQ ID NO: 14782 - protein, 191 aa, Sorangium cellulosum
  REGION 1..191: note = tr|A9GEC7|A9GEC7_SORC5 GTP cyclohydrolase 1; OS = Sorangium cellulosum (strain So ce56) OX=448385 GN=folE; PE = 3 SV=1
MIDRKRAAWAIEEFLRALGRDVEGDLAGTGERVADAWADDLIEGEAIDAAAVLREGAMETGPFERGLVVARDLAVTTMCPHHLLPGHGTGIIVYLPGARVAGIGTLAHVLDALARRLTLQERIGGQLVELLVRELGARGALCKLTLTHTCLIARGERKAGALIETVAAAGELAEPGPERDLALAALSGGRA

SEQ ID NO: 14783 - protein, 262 aa, unidentified
  source 1..262: note = Spartobacteria bacterium
  REGION 1..262: note = tr|A0A2A2XUD7|A0A2A2XUD7_9BACT GTP cyclohydrolase FolE2 OS=Spartobacteria bacterium AMD-G4 OX=1982325; GN = folE2 PE=3 SV=1
MLKDTQNERDDRQLPIDRVGVKSLRYPLQVRDKEHSVQSTVASIQLTVDLPHHFKGTHMSRFIEVLVAHGPVIHVENIRDILQEMCRRLESRCAHLEIEFPFFLGKKAPVSGAVGLMDYTVRFNATLENGEMDFVVTTVVPVTTLCPCSKAISAAGAHNQRGHVTLSVCCKRPMWIEDMVRLAEESASAELYSLLKRPDEKHVTEQAYANPVFVEDLVRNVAVRCEADENIIRYRVEVENFESIHNHSAYALIEKKGALPRG

SEQ ID NO: 14784 - protein, 258 aa, unidentified
  source 1..258: note = Spartobacteria bacterium
  REGION 1..258: note = tr|A0A2T6CZ30|A0A2T6CZ30_9BACT GTP cyclohydrolase FolE2 OS=Spartobacteria bacterium LR76 OX=2161866 GN=folE2; PE = 3 SV=1
MTLQDTQNQRDERRLPIDRVGVKDLRYPIQIRDKDHSLQSTIATVQLTVDLPHHFKGTHMSRFVEVLNSHGPILHVDNIRDVLEQLTKKLQSACAHVDFEFPFFLEKKAPVTGAVGLIDYVARFNATMENGRMDFVVTTVVPVTTLCPCSKAISARGAHNQRGHVTLAVRCTKPMWIEDMIRLVEDSASSELYSLLKRPDEKAVTERAYDNPVFVEDLVRNVASRCENDANIRWYRVEAENFESIHNHNAYALIEKHG

SEQ ID NO: 14785 - protein, 195 aa, Sphaerisporangium album
  REGION 1..195: note = tr|A0A367FG92|A0A367FG92_9ACTN GTP cyclohydrolase 1; OS = Sphaerisporangium album OX=509200 GN=folE PE=3 SV=1
MSVNPLKVDSARIEKAVREILLAIGEDPDRDGLVDTPARVARAYAEQFAGLGQSPEDVLTTVFDADHDEMVLVKDIEVFSTCEHHLVPFHGVAHVGYVPNEKGQITGLSKLARLVDVYARRPQVQERMTSQIADALMDVLAPRGVIVVIEAEHLCMTMRGVRKPGAKTITSAVRGDFRDSDKTRAEAMALILGRR

SEQ ID NO: 14786 - protein, 204 aa, Sphaerisporangium cinnabarinum; identical to SEQ ID NO: 6518
  REGION 1..204: note = tr|A0A2T5N537|A0A2T5N537_9ACTN GTP cyclohydrolase 1; OS = Sphaerisporangium cinnabarinum OX=47482 GN=folE PE=3; SV = 1

SEQ ID NO: 14787 - protein, 182 aa, Sphaerisporangium sp.
  REGION 1..182: note = tr|A0A366LVV2|A0A366LVV2_9ACTN GTP cyclohydrolase 1; OS = Sphaerisporangium sp. LHW63015 OX=2248750 GN=folE PE=3; SV = 1
MTMDEARIQALYRELLIAIGEDPDREGLRDTPRRAAAFWRDFLTYQPDRIDTTFRHEPAGEQFVQVNGISTWSLCEHHLLPIHLLVNIAYLPAGAVLGLSKLVRVTELAARRLQIQERIVEQVADELQKITGTDDVAVVAAGHHLCMSMRGTRAQGSRTLTRTLRGRFLQDPRLVSALGAGP

SEQ ID NO: 14788 - protein, 198 aa, Sphaerisporangium sp.
  REGION 1..198: note = tr|A0A2W2GPZ0|A0A2W2GPZ0_9ACTN GTP cyclohydrolase 1; OS = Sphaerisporangium sp. 7K107 OX=2070365 GN=folE PE=3 SV=1
MGDAYREEPLKVDSARIEGAVREILIAIGEDPDRDGLRDTPARVARAYAEQFAGLGQRPEDVLTTVFDADHDEMVLVRDIEVYSTCEHHLVPFHGVAHVGYIPNARGQITGLSKLARLIDVYARRPQVQERMTSQIADALMSVLEPRGVIVVVQCEHLCMTMRGVRKPGAKTITSAVRGSFRDSDKTRAEAMSLILGR

SEQ ID NO: 14789 - protein, 183 aa, Sphaerobacter thermophilus
  REGION 1..183: note = tr|D1C535|D1C535_SPHTD GTP cyclohydrolase 1; OS = Sphaerobacter thermophilus (strain DSM 20745 / S 6022); OX = 479434 GN=folE PE=3 SV=1
MDRERIAAAVAEILRAIGEDPDRPDLRRTPRRVADLFAEMFGGLAIDPRTYLAGALPEEHGELVVIHDVTVRSMCEHHLVPMVGLAHVAYLPAGRIAGFDRIVKVVDAYARRPQIQERLTRQVADTIDEMLSPAGVAVRFELEHMCMTIRGSRRPGSRVVTTAYRGVFRDDPAWRAEFHAALE

SEQ ID NO: 14790 - protein, 202 aa, unidentified
  source 1..202: note = Sphaerochaeta halotolerans
  REGION 1..202: note = tr|A0A372MLC6|A0A372MLC6_9SPIO GTP cyclohydrolase 1; OS = Sphaerochaeta halotolerans OX=2293840 GN=folE PE=3 SV=1
MAIDSAKIEEHVRGILLALGENPDREGLLDTPKRVAQMYEELFKGIAYSNEEIAQMFDKTFEDDLYLPQNNNEIVMMRDISFFSHCEHHMALMYNMKATIAYVPNKKILGLSKIARILDMVGKRLQLQERIGSDIAQIMQQATGSEDVAVIIEGQHACVTTRGIKNTNSVTVTTTMRGKFNTDQNFMNRLMIMYGKELHENH

SEQ ID NO: 14791 - protein, 198 aa, Sphaerochaeta pleomorpha
  REGION 1..198: note = tr|G8QRN3|G8QRN3_SPHPG GTP cyclohydrolase 1; OS = Sphaerochaeta pleomorpha (strain ATCC BAA-1885 / DSM 22778 / Grapes) OX=158190 GN=folE PE=3 SV=1
MAIDTVKIEEHIRGILQALGENPDREGLKATPKRVAHMYEELFEGIQYSNDDIAKMFDKTFEEDLYIAQGNNEIVMMRDIELFSFCEHHMALMYNMKASVAYIPNGKILGLSKIARIVDMVSKRLQLQERIGSDIAEVIQKVTGSEDVAVIIEGQHACITTRGIKNTKSVTATTTLRGRFHTDQNFMNKLMLLYRKEV

SEQ ID NO: 14792 - protein, 235 aa, unidentified
  source 1..235: note = Sphaerospermopsis kisseleviana
  REGION 1..235: note = tr|A0A1Z4ULX9|A0A1Z4ULX9_9CYAN GTP cyclohydrolase 1; OS = Sphaerospermopsis kisseleviana NIES-73 OX=1973480; GN = folE PE=3 SV=1
MTIASSNGSNRSQSPLIPDLAQVISSRPDRNTHNGKQADLHPPSEESTEQMMEAVRTMLIGVGEDPEREGLLKTPKRVAEAMKFLTSGYNQSLEELVNGAIFDEGHEEMVLVRDINFFSLCEHHMLPFMGRAHVAYIPNQKVVGLSKLARIVEMYARRLQVQERLTRQIAEAVQTILEPKGVAVVMEATHMCMVMRGVQKPGSWTVTSSMVGVFQDEQKTREEFLNLIRHQAAFF

SEQ ID NO: 14793 - protein, 216 aa, unidentified
  source 1..216: note = Sphaerospermopsis kisseleviana
  REGION 1..216: note = tr|A0A1Z4UNG3|A0A1Z4UNG3_9CYAN GTP cyclohydrolase 1; OS = Sphaerospermopsis kisseleviana NIES-73 OX=1973480; GN = folE PE=3 SV=1
MTLSISPVLNSADQVVSSLSTQQQPKVTEAEMMQAVRTLLIGLGENPDREGLKDTPKRVVKALQFLTKGYHESLDELLNGAVFTESADEMVLVRDIDIFSSCEHHILPVIGRAHVAYIPNGKVIGLSKIARICEMYARRLQVQERLTLQIADALQGLLKPKGVAVVIEATHMCMVMRGVQKPGSWTVTSAMRGVFSEDARTREEFMNLIRHNANFH

SEQ ID NO: 14794 - protein, 235 aa, unidentified; identical to SEQ ID NO: 14792
  source 1..235: note = Sphaerospermopsis reniformis
  REGION 1..235: note = tr|A0A480A2K8|A0A480A2K8_9CYAN GTP cyclohydrolase 1; OS = Sphaerospermopsis reniformis OX=531300 GN=folE PE=3 SV=1

SEQ ID NO: 14795 - protein, 216 aa, unidentified; identical to SEQ ID NO: 14793
  source 1..216: note = Sphaerospermopsis reniformis
  REGION 1..216: note = tr|A0A479ZZW9|A0A479ZZW9_9CYAN GTP cyclohydrolase 1; OS = Sphaerospermopsis reniformis OX=531300 GN=folE PE=3 SV=1

SEQ ID NO: 14796 - protein, 267 aa, Sphaerotilus hippei
  REGION 1..267: note = tr|A0A318GWX4|A0A318GWX4_9BURK GTP cyclohydrolase FolE2 OS=Sphaerotilus hippei OX=744406 GN=folE2 PE=3 SV=1
MNDRTFPSLPPALAIPDTQSERDERHLAIQRVGVRSLRYPLLVDVGGEVSRTVAQWCLDVALPAEQKGTHMSRFVAWLEALDRPLDADNLRTELAGMLDKLHATEGTIEARFPFFIRKHAPVSGVASLMDYQGGWTAEVRDGRMSIWAEAVVPVKSLCPCSKEISDYGAHNQRSNVTLKLELLQPVAWTEIVRFAEESASSEIWGLLKRPDEKWITERAYENPKFVEDLVRDVALRLNADARIGRYVAEVENFESIHNHSAWARIER

SEQ ID NO: 14797 - protein, 132 aa, unidentified
  source 1..132: note = Sphingobacteriaceae bacterium
  REGION 1..132: note = tr|A0A4Q5SN54|A0A4Q5SN54_9SPHI GTP cyclohydrolase 1; OS = Sphingobacteriaceae bacterium OX=2021370 GN=folE PE=3; SV = 1
MFKEEYSQMVVVKDIEVYSMCEHHMLPFFGKAHIAYIPNGHVVGLSKIPRIVDVFARRLQVQERLTNEIRDCIQKTLNPIGVGVVIECRHLCMSMRGVQKQNSATTTSAFTGEFLKEKTRTEFLNLISSRLS

SEQ ID NO: 14798 - protein, 211 aa, unidentified; identical to SEQ ID NO: 12463
  source 1..211: note = Sphingobacteriaceae bacterium
  REGION 1..211: note = tr|A0A1X9ZB28|A0A1X9ZB28_9SPHI GTP cyclohydrolase 1; OS = Sphingobacteriaceae bacterium GW460-11-11-14-LB5; OX = 1986952 GN=folE PE=3 SV=1

SEQ ID NO: 14799 - protein, 211 aa, unidentified
  source 1..211: note = Sphingobacteriales bacterium
  REGION 1..211: note = tr|A0A258WWC4|A0A258WWC4_9SPHI GTP cyclohydrolase 1; OS = Sphingobacteriales bacterium 16-39-50 OX=1970581; GN = folE PE=3 SV=1
MGLKNNNSEIDKIDGYVKIDSYDQEKIERIASHYKAILADLGEDPSREGLLQTPVRVAKALQFLTHGYDAKPEEILRGAMFKEDYSQMVVVKDIEVFSMCEHHMLPFFGKAHIAYIPNGHIVGLSKIPRVVDAFARRLQVQERLTNEIRDCIQETLNPVGVAVVIECKHLCMSMRGIQKQNSVTTTSAFTGEFVNETTRSEFLRLITASLS

SEQ ID NO: 14800 - protein, 198 aa, unidentified
  source 1..198: note = Sphingobacteriales bacterium
  REGION 1..198: note = tr|A0A1Q3JVK6|A0A1Q3JVK6_9SPHI GTP cyclohydrolase 1; OS = Sphingobacteriales bacterium 41-5 OX=1895836 GN=folE; PE = 3 SV=1
MAFKRKEEYDEQATQNLMHHYEGILNLIGEDTEREGLIKTPERKAKAIQYLTQGYNLDAHAIINSAKFHEEVSEMIIVKDIELYSLCEHHILPFFGKAHIAYIPNGWITGLSKIARVVDVFSRRLQVQERLTVQIMNAIKETLNPLGVAVVIEAKHMCMMMRGVQKQNSITTTSAFDGEFQKNSTRSEFLKLISADLY

SEQ ID NO: 14801 - protein, 240 aa, unidentified
  source 1..240: note = Sphingobacteriia bacterium
  REGION 1..240: note = tr|A0A1G3J2N9|A0A1G3J2N9_9BACT GTP cyclohydrolase 1; OS = Sphingobacteriia bacterium RIFOXYD2_FULL_35_12; OX = 1802167 GN=folE PE=3 SV=1
MKQNETLSNIRLNGDKIVFTDDELMEEMGDNHISTSVDTPMVPGAFDKSDEEKIAIIQDHFKAIMETLGLDLSDDSLKGTPKRVAKMYVKEIFSGLNPANKPSVALFDNKYKYNEMLVEKNISFYSNCEHHFVPIIGKAHLAYISNGRVIGLSKLNRLVEFYAKRPQVQERLTMQIAKELQKELGTEDVAIVIDAKHLCVASRGVEDDTSSTITSFYGGKFKEEKRKEEFLRYLELKTEF

SEQ ID NO: 14802 - protein, 240 aa, unidentified
  source 1..240: note = Sphingobacteriia bacterium
  REGION 1..240: note = tr|A0A258UB92|A0A258UB92_9BACT GTP cyclohydrolase 1; OS = Sphingobacteriia bacterium 28-36-52 OX=1970573 GN=folE; PE = 3 SV=1
MKQNETLSNIRLNGDKIIFTDDELMEEMGDNHISTSVDTPMVAGAFDKSDEEKIAIIQDHFKAIMETLGLDLTDDSLKGTPKRVAKMYVKEIFSGLNPANKPAVALFDNKYKYNEMLVEKNISFYSNCEHHFVPIIGKAHLAYISNGRVIGLSKLNRLVEYYAKRPQVQERLTMQIAKELQKELGTEDVAIVIDAKHLCVASRGVEDDTSSTITSFYGGKFKDEKRKEEFLRYLELKTEF

SEQ ID NO: 14803 - protein, 209 aa, unidentified
  source 1..209: note = Sphingobacterium alimentarium
  REGION 1..209: note = tr|A0A4R3VZH8|A0A4R3VZH8_9SPHI GTP cyclohydrolase 1; OS = Sphingobacterium alimentarium OX=797292 GN=folE PE=3; SV = 1
MINPTDFSEELDGYKKIDQYNEEHVDRIAHHYSDILEALGENPNREGLIKTPERVAKALQFLTHGYDIDAAEVLRSAMFEEDYSQMVVVKDIEVYSMCEHHMLPFFGKAHIAYIPNGHIVGLSKIPRVVDAYARRLQVQERLTNEIRDCIQQTLNPAGVAVVIECKHMCMAMRGVQKQNSVTTTSAFTGAFQNDVTRSEFLRLITASLD

SEQ ID NO: 14804 - protein, 209 aa, unidentified
  source 1..209: note = Sphingobacterium alkalisoli
  REGION 1..209: note = tr|A0A4V6WF79|A0A4V6WF79_9SPHI GTP cyclohydrolase 1; OS = Sphingobacterium alkalisoli OX=1874115 GN=folE PE=3 SV=1
MSNPTDFNEELDGYVKIDQYNTQHVERIADHYKDILAALGENPNREGLLKTPERVAKALQFLTHGYDIDAAAVLRGAMFEEEYSQMVVVKDIEVYSMCEHHMLPFFGKAHIAYIPNGHIVGLSKIPRVVDIYARRLQVQERLTNEIRDCIQQTLNPAGVAVVIECKHMCMAMRGVQKQNSVTTTSAFTGAFQSDVTRSEFLRLITASLD

SEQ ID NO: 14805 - protein, 210 aa, unidentified
  source 1..210: note = Sphingobacterium cellulitidis
  REGION 1..210: note = tr|A0A235DWR3|A0A235DWR3_9SPHI GTP cyclohydrolase 1; OS = Sphingobacterium cellulitidis OX=1768011 GN=folE PE=3; SV = 1
MSKFQQFDDDEQDGYLKIDQYNEKNVERIAEHYKDILQALGEDPNREGLIKTPERVAKALQFLTHGYDVNPAELLRAAMFEEEYSQMVVVKDIEVYSMCEHHMLPFFGKAHIAYIPNGHIVGLSKIPRVVDVFSRRLQVQERLTNEIRDCIQETLKPAGVAVVIECKHMCMAMRGVQKQNSVTTTSAFTGAFQNDVTRSEFLRLITASLD

SEQ ID NO: 14806 - protein, 210 aa, Sphingobacterium daejeonense
  REGION 1..210: note = tr|A0A4U9KY82|A0A4U9KY82_9SPHI GTP cyclohydrolase 1; OS = Sphingobacterium daejeonense OX=371142 GN=folE PE=3 SV=1
MSKFQQFEEEEQDGYLKIDQYNEKNVERIAEHYKDILQALGEDPNREGLIKTPERVAKALQFLTHGYDVDPAAVLRGAMFEEEYSQMVVVKDIEVYSMCEHHMLPFFGKAHIAYIPNGHIVGLSKIPRVVDIFARRLQVQERLTNEIRDCIQDTLKPAGVAVVIECKHMCMAMRGVQKQNSVTTTSAFTGAFQNDVTRSEFLRLITASLD

SEQ ID NO: 14807 - protein, 210 aa, unidentified
  source 1..210: note = Sphingobacterium deserti
  REGION 1..210: note = tr|A0A0B8T121|A0A0B8T121_9SPHI GTP cyclohydrolase 1; OS = Sphingobacterium deserti OX=1229276 GN=folE PE=3 SV=1
MSDLTSFEDEEQDGYIKIDRYNEKRVEKIAAHYPAILESLGENPAREGLVKTPERVAKALQYLTHGYDIDAAKVLRSAMFEEDYSQMVVVKDIEVYSMCEHHMLPFFGKAHIAYIPNGHIVGLSKIPRVVDAFARRLQVQERLTNEIRDCIQDTLKPAGVAVVMECKHMCMAMRGVQKQNSVTTTSAFTGAFQNDVTRSEFLRLITASLD

SEQ ID NO: 14808 - protein, 221 aa, unidentified
  source 1..221: note = Sphingobacterium detergens
  REGION 1..221: note = tr|A0A420BKX4|A0A420BKX4_9SPHI GTP cyclohydrolase 1; OS = Sphingobacterium detergens OX=1145106 GN=folE PE=3 SV=1
MNTLKDKNTSIDDIGDSHVMTSIETPMRSDAFAVSTSEKINRIAKLFYGIMHELGLDLTDDSLSGTPHRVAKMYINELFYGLNPLNKPNLSTFSNKYGYNKILIEKDIQVNSACEHHFLPIVGKAHIGYLAKEKVIGLSKLNRIVDYYAHRPQVQERLTIQIFNELKSILQTDDIIVVIEADHLCVSARGVKDITSSTLTVEHGGIFSTADKRAEFFNLIK

SEQ ID NO: 14809 - protein, 209 aa, unidentified
  source 1..209: note = Sphingobacterium detergens
  REGION 1..209: note = tr|A0A420AMA2|A0A420AMA2_9SPHI GTP cyclohydrolase 1; OS = Sphingobacterium detergens OX=1145106 GN=folE PE=3 SV=1
MSQHSFDNEELDGYIKIDKYNTEKVDRIASHYTDILECLGEDPKREGLVKTPERVAKALQFLTHGYDIDAAEVLRGAMFEEDYSQMVVVKDIEVYSLCEHHMLPFFGKAHIAYIPNGHIVGLSKIPRVVDIFARRLQVQERLTNEIRDCIQETLGARGVAVVMECKHMCMAMRGVQKQNSVTTTSAFTGAFQNDVTRSEFLRLITADLA

SEQ ID NO: 14810 - protein, 220 aa, Sphingobacterium faecium
  REGION 1..220: note = tr|A0A2T5YCB2|A0A2T5YCB2_9SPHI GTP cyclohydrolase 1; OS = Sphingobacterium faecium OX=34087 GN=folE PE=3 SV=1
MDKVLETLIVDEIGDSHLMTSIDTPLREDAFEKSDEEKIHCIARYFKGIMEELGLDLTDDSIQGTPYRVAKMYLKEIFHGLDPKNKPKISIFDNKYEYHKMLVEKDISVVSFCEHHFMPIVGKAHVAYVPKDHVIGLSKINRIVTYYCRRPQVQERLTLQIYRELTAVLGTDAVMVVVEAEHMCVSARGVQDVQSKTITMEYGGIFLEKERRDEFLTLIG

SEQ ID NO: 14811 - protein, 209 aa, Sphingobacterium faecium
  REGION 1..209: note = tr|A0A2T5Y4S2|A0A2T5Y4S2_9SPHI GTP cyclohydrolase 1; OS = Sphingobacterium faecium OX=34087 GN=folE PE=3 SV=1
MSNHSFEEEELDGYVKIDQYNQDKVDRIAAHYTDILESLGENPNREGLIKTPERVAKALQFLTHGYDIDPAKVLQGAMFEEDYSQMVVVKDIEVYSMCEHHMLPFFGKAHIAYIPNGHIVGLSKIPRVVDIFARRLQVQERLTNEIRDCIQETLGAKGVAVVIECKHMCMAMRGIQKQNSVTTTSAFTGAFQNDVTRSEFLKLITANLT

SEQ ID NO: 14812 - protein, 210 aa, unidentified
  source 1..210: note = Sphingobacterium gobiense
  REGION 1..210: note = tr|A0A2S9JL96|A0A2S9JL96_9SPHI GTP cyclohydrolase 1; OS = Sphingobacterium gobiense OX=1382456 GN=folE PE=3 SV=1
MSNLTAFESEEQDGYIKIDQYNQKQVEEIASYYPAILRAIGENPEREGLVKTPERVAKALQFLTHGNDVDAAEVLRSAMFEEEYSQMVVVKDIEVYSLCEHHMLPFFGKAHIAYIPNGHIVGLSKIPRVVDAFARRLQVQERLTNEIRDCIQETLKPAGVAVVIECKHMCMAMRGVQKQNSVTTTSAFTGAFQNDVTRSEFLRLIMASLD

SEQ ID NO: 14813 - protein, 210 aa, unidentified
  source 1..210: note = Sphingobacterium haloxyli
  REGION 1..210: note = tr|A0A2S9J142|A0A2S9J142_9SPHI GTP cyclohydrolase 1; OS = Sphingobacterium haloxyli OX=2100533 GN=folE PE=3 SV=1
MSNLTAFESEEQDGYIKIDQYNQKQVEEIASYYPAILRALGENPEREGLVKTPERVAKALQFLTHGNDVDAAEVLRSAMFEEEYSQMVVVKDIEVYSLCEHHMLPFFGKAHIAYIPNGHIVGLSKIPRVVDAFARRLQVQERLTNEIRDCIQETLKPAGVAVVIECKHMCMAMRGVQKQNSVTTTSAFTGAFQNDVTRSEFLRLIMASLD

SEQ ID NO: 14814 - protein, 210 aa, unidentified
  source 1..210: note = Sphingobacterium lactis
  REGION 1..210: note = tr|A0A1H5ZSQ7|A0A1H5ZSQ7_9SPHI GTP cyclohydrolase 1; OS = Sphingobacterium lactis OX=797291 GN=folE PE=3 SV=1
MSKIQQFDEAEQEGYLKIDQYNEKAVERIAEHYTDILEAIGEDPTREGLIKTPERVAKALQFLTHGYGVDPAEVLRGAMFQEEYSQMVVVKDIEVYSMCEHHMLPFFGKAHIAYIPNGHIVGLSKIPRVVDIFARRLQVQERLTNEIRDCIQETLNPAGVAVVIECKHMCMAMRGVQKQNSVTTTSAFTGAFQNDVTRSEFLRLITASLG

SEQ ID NO: 14815 - protein, 210 aa, Sphingobacterium mizutaii
  REGION 1..210: note = tr|A0A239Z4K7|A0A239Z4K7_9SPHI GTP cyclohydrolase 1; OS = Sphingobacterium mizutaii OX=1010 GN=folE PE=3 SV=1
MSKFQQFEEEEQDGYLKIDQYNEKNVERIAEHYTDILQAIGEDPSREGLIKTPERVAKALQFLTHGYDVDAAELLRGAMFEEEYSQMVVVKDIEVYSMCEHHMLPFFGKAHIAYIPNGHIVGLSKIPRVVDVFARRLQVQERLTNEIRDCIQETLKPAGVAVVIECKHMCMAMRGVQKQNSVTTTSAFTGAFQNDVTRSEFLRLITASLG

SEQ ID NO: 14816 - protein, 272 aa, Sphingobacterium multivorum
  REGION 1..272: note = tr|A0A380D9C4|A0A380D9C4_SPHMU GTP cyclohydrolase 1; OS = Sphingobacterium multivorum OX=28454 GN=folE_2 PE=3 SV=1
MTIKYSEKTLHATKLHLLLFHYIYKNKLTTPNCRSLRISNQRTLTKELFMNTSLKRDISSPIENLGDLHIMTSIDTPMRHDAFTRTDSEKIKKIAQLFQDIMHELGLDLQDDSLSGTPYRVAKMYINELFYGLNPANKPQLSTFENRYGYNKLLVEKNIRVNSACEHHFLPIVGRAHIGYIAKKKVIGLSKINRVVDYYAHRPQVQERLTLQIFNELKSTLETDDIIVLIDADHLCVSARGVKDTTSSTTTMEYSGIFASESQRNDFFNLLK

SEQ ID NO: 14817 - protein, 209 aa, Sphingobacterium multivorum
  REGION 1..209: note = tr|A0A2X2J0N3|A0A2X2J0N3_SPHMU GTP cyclohydrolase 1; OS = Sphingobacterium multivorum OX=28454 GN=folE_1 PE=3 SV=1
MSQHSFDNEELDGYIKIDKYNTEKVDRIAAHYTDILECLGEDPKREGLVKTPERVAKAFQFLTHGYDIDAAEVLRGAMFEEDYSQMVVVKDIEVYSLCEHHMLPFFGKAHIAYIPNGHIVGLSKIPRVVDIFARRLQVQERLTNEIRDCIQETLGARGVAVVMECKHMCMAMRGVQKQNSVTTTSAFTGAFQNDVTRSEFLRLITADLA

SEQ ID NO: 14818 - protein, 209 aa, unidentified
  source 1..209: note = Sphingobacterium nematocida
  REGION 1..209: note = tr|A0A1T5G7H1|A0A1T5G7H1_9SPHI GTP cyclohydrolase 1; OS = Sphingobacterium nematocida OX=1513896 GN=folE PE=3 SV=1
MSNPTDFNEELDRYKKVERYNVEQVDRIASHYNDILSAIGEDPNREGLIKTPERVAKALQYLTHGYDVDAAEVLRSAMFEEDYSQMVVVKDIEVYSMCEHHMLPFFGKAHIAYIPNGHIVGLSKIPRIVDAFARRLQVQERLTNEIRDCIQETLNPAGVAVVMECKHMCMAMRGVQKQSSVTTTSAFTGEFQNDVTRSEFLRLITASLD

SEQ ID NO: 14819 - protein, 210 aa, unidentified
  source 1..210: note = Sphingobacterium paludis
  REGION 1..210: note = tr|A0A4R7D226|A0A4R7D226_9SPHI GTP cyclohydrolase 1; OS = Sphingobacterium paludis OX=1476465 GN=folE PE=3 SV=1
MSDLTSFEDEEQDGYIKIDRYNEKRVEKIAAHYPAILESLGENPAREGLVKTPERVAKALQFLTHGYDIDAAKVLRSAMFEEDYSQMVVVKDIEVYSMCEHHMLPFFGKAHIAYIPNGHIVGLSKIPRVVDAFARRLQVQERLTNEIRDCIQETLKPAGVAVVMECKHMCMAMRGVQKQNSVTTTSAFTGAFQNDVTRSEFLRLITASLD

SEQ ID NO: 14820 - protein, 209 aa, unidentified
  source 1..209: note = Sphingobacterium paucimobilis
  REGION 1..209: note = tr|U2HSN9|U2HSN9_9SPHI GTP cyclohydrolase 1; OS = Sphingobacterium paucimobilis HER1398 OX=1346330; GN = folE PE=3 SV=1
MSNLTDFNEELEGYKKIDQYNGQQVERIASHYNDILSAIGEDPNREGLIKTPERVAKALQYLTHGYDIDAAEVLRSAMFEEDYSQMVVVKDIEVYSMCEHHMLPFFGKAHIAYIPNGHIVGLSKIPRIVDAFARRLQVQERLTNEIRDCIQDTLNPAGVAVVIECKHMCMAMRGVQKQNSVTTTSAFTGEFQNDVTRSEFLRLITASLA

SEQ ID NO: 14821 - protein, 210 aa, unidentified
  source 1..210: note = Sphingobacterium psychroaquaticum
  REGION 1..210: note = tr|A0A1X7KCW4|A0A1X7KCW4_9SPHI GTP cyclohydrolase 1; OS = Sphingobacterium psychroaquaticum OX=561061 GN=folE; PE = 3 SV=1
MSNLTPFDDEEQNGYIKIDQYNSKQVEHIAGHYPDILRAIGEDPTREGLIKTPERVAKALQYLTHGYDVNAAELLRSAMFEEDYSQMVVVKDIEVYSMCEHHMLPFFGKAHIAYIPNGHIVGLSKIPRVVDAFARRLQVQERLTNEIRDCIQETLKPAGVAVVIECKHMCMAMRGVQKQNSVTTTSAFTGAFQNDVTRSEFLRLITASLH

SEQ ID NO: 14822 - protein, 223 aa, Sphingobacterium siyangense
  REGION 1..223: note = tr|A0A562M768|A0A562M768_9SPHI GTP cyclohydrolase 1; OS = Sphingobacterium siyangense OX=459529 GN=folE PE=3 SV=1
MNTLLKKDTASNPEDLGDHHMMTSMDTPLRPDAFDRTDEEKISKISQLFKDIMYELGLDLQDDSLSGTPHRVAKMYINELFYGLNPVNKPKLSTFENRYGYNKLLMEKDIRVNSACEHHFLPIVGRAHIGYIPKDRVIGLSKINRIVDYYAHRPQVQERLTLQIYNELRSTLATDDIIVVIDADHLCVSARGVKDTSSCTTTLEYSGIFLSESKRNEFFNLLK

SEQ ID NO: 14823 - protein, 209 aa, Sphingobacterium siyangense
  REGION 1..209: note = tr|A0A420FH61|A0A420FH61_9SPHI GTP cyclohydrolase 1; OS = Sphingobacterium siyangense OX=459529 GN=folE PE=3 SV=1
MSQHSFDNEELDGYIKIDKYNTEKVDRIAAHYTDILECLGEDPKREGLVKTPERVAKALQFLTHGYDIDAAEVLRGAMFEEDYSQMVVVKDIEVYSLCEHHMLPFFGKAHIAYIPNGHIVGLSKIPRVVDIFARRLQVQERLTNEIRDCIQETLGARGVAVVMECKHMCMAMRGVQKQNSVTTTSAFTGAFQNDVTRSEFLRLITADLA

SEQ ID NO: 14824 - protein, 210 aa, Sphingobacterium sp.
  REGION 1..210: note = tr|A0A4P7DS58|A0A4P7DS58_9SPHI GTP cyclohydrolase 1; OS = Sphingobacterium sp. CZ-2 OX=2557994 GN=folE PE=3 SV=1
MSKFQQFEEAEQDGYLKIDQYNEKNVERIAAHYVDILEAIGENPKREGLEKTPERVAKALQFLTHGYDVDPAEVLRGAMFQEEYSQMVVVKDIEVYSMCEHHMLPFFGKAHIAYIPNGHIVGLSKIPRVVDIFARRLQVQERLTNEIRDCIQETLNPAGVAVVIECKHMCMAMRGVQKQNSVTTTSAFTGAFQNDVTRSEFIRLITASLD

SEQ ID NO: 14825 - protein, 209 aa, Sphingobacterium sp.
  REGION 1..209: note = tr|A0A088ESH0|A0A088ESH0_9SPHI GTP cyclohydrolase 1; OS = Sphingobacterium sp. ML3W OX=1538644 GN=folE PE=3 SV=1
MSNHSFEEEELDGYVKIDQYNQEKVDRIAAHYTDILESLGEDPNREGLLKTPERVAKALQFLTHGNNIDPAKILQGAMFEEDYSQMVVVKDIEVYSMCEHHMLPFFGKAHIAYIPNGHIVGLSKIPRVVDIFARRLQVQERLTNEIRDCIQETLGAKGVAVVIECKHMCMAMRGIQKQNSVTTTSAFTGAFQNDVTRSEFLKLITANLM

SEQ ID NO: 14826 - protein, 210 aa, Sphingobacterium spiritivorum
  REGION 1..210: note = tr|D7VIY9|D7VIY9_9SPHI GTP cyclohydrolase 1; OS = Sphingobacterium spiritivorum ATCC 33861 OX=525373; GN = folE PE=3 SV=1
MSNPSSLDHEEMDGYVKIDKYNPLHVDRIATHYTDILQALGEDPAREGLLKTPERVAKALKFLTHGYDLDPAAVLKGAMFEEDYSQMVVVKDIEVYSLCEHHMLPFFGKAHVAYIPNGHIVGLSKIPRVVDIFARRLQVQERLTNEIRDCIQETLGAQGVAVVMECKHMCMAMRGVQKQNSVTTTSAFTGAFQNDVTRSEFLRLITASLV

SEQ ID NO: 14827 - protein, 210 aa, Sphingobacterium spiritivorum
  REGION 1..210: note = tr|A0A380CBH8|A0A380CBH8_9SPHI GTP cyclohydrolase 1; OS = Sphingobacterium spiritivorum OX=258 GN=folE PE=3 SV=1
MSNPSSLDHEEMDGYVKIDKYNPLHVDRIATHYTDILQALGEDPAREGLLKTPERVAKALKYLTHGYDLDPAAVLKGAMFEEDYSQMVVVKDIEVYSLCEHHMLPFFGKAHVAYIPNGHIVGLSKIPRVVDIFARRLQVQERLTNEIRDCIQETLGAQGVAVVMECKHMCMAMRGVQKQNSVTTTSAFTGAFQNDVTRSEFLRLITASLV

SEQ ID NO: 14828 - protein, 209 aa, Sphingobacterium thalpophilum
  REGION 1..209: note = tr|A0A4U9USL7|A0A4U9USL7_9SPHI GTP cyclohydrolase 1; OS = Sphingobacterium thalpophilum OX=259 GN=folE PE=3 SV=1
MSQHSFESEELDGYIKIDKYNTEKVDRIASHYTDILESLGEDPKREGLLKTPERVAKALQFLTHGYDIDAAEVLRGAMFEEDYSQMVVVKDIEVYSLCEHHMLPFFGKAHIAYIPNGHIVGLSKIPRVVDIFARRLQVQERLTNEIRDCIQETLGARGVAVVMECKHMCMAMRGVQKQNSVTTTSAFTGAFQNDVTRSEFLRLITADLA

SEQ ID NO: 14829 - protein, 210 aa, Sphingobacterium wenxiniae
  REGION 1..210: note = tr|A0A1I6SEM4|A0A1I6SEM4_9SPHI GTP cyclohydrolase 1; OS = Sphingobacterium wenxiniae OX=683125 GN=folE PE=3 SV=1
MSNLTDFDSEEQDGYIKIDQYNTKHVDRIATYYKDILEAIGEDPKREGLIKTPERVAKALQFLTHGYDIDAAQVLRSAMFEEDYSQMVVVKDIEVYSMCEHHMLPFFGKAHIAYIPNGHIVGLSKIPRVVDVFARRLQVQERLTNEIRDCIQDTLNPAGVAVVMECKHMCMAMRGVQKQNSVTTTSAFTGAFQNDVTRSEFLRLITASLD

SEQ ID NO: 14830 - protein, 209 aa, unidentified
  source 1..209: note = Sphingobacterium yanglingense
  REGION 1..209: note = tr|A0A4R6WK62|A0A4R6WK62_9SPHI GTP cyclohydrolase 1; OS = Sphingobacterium yanglingense OX=1437280 GN=folE PE=3; SV = 1
MSNPTDFNEELEGYKKIDQYNVQQVERIASHYNDILSAIGEDPSREGLIKTPERVAKALQYLTHGYDVDAAEVLRSAMFEEDYSQMVVVKDIEVYSMCEHHMLPFFGKAHIAYIPNGHIVGLSKIPRIVDAFARRLQVQERLTNEIRDCIQDTLKPAGVAVVIECKHMCMAMRGVQKQNSVTTTSAFTGEFQNDVTRSEFLRLITASLA

SEQ ID NO: 14831 - protein, 201 aa, unidentified
  source 1..201: note = Sphingobium algicola
  REGION 1..201: note = tr|A0A5J5HIX6|A0A5J5HIX6_9SPHN GTP cyclohydrolase I FolE OS=Sphingobium algicola OX=2048546 GN=folE PE=4 SV=1
MACDLETETIGDGKEPVPADVSEAIRTLIRWSGDSPEREGLVETPERVARAWREYCRGYADDPAYHLSRIFHEVGGYDDVVLLKDIPFQSHCEHHMAPIVGKAHIAYLPGDYVVGISKLARVLHAYANRLQVQERLTSEVANCIWEHLKPQGVAVVIEATHGCMTGRGVRTPNVIMKTSRMLGVFRDDEKSREEVLKLIAS

SEQ ID NO: 14832 - protein, 193 aa, unidentified
  source 1..193: note = Sphingobium algorifonticola
  REGION 1..193: note = tr|A0A437JED3|A0A437JED3_9SPHN GTP cyclohydrolase 1; OS = Sphingobium algorifonticola OX=2008318 GN=folE PE=3 SV=1
MARPKKIDVPDDVQDAIRTLIRWSGDDPAREGLIDTPKRVARAWREYCEGYQDDPAYHLSRIFHEVGGYDEIVLLKDIPFQSHCEHHMAPIVGKAHIAYLPDQWVVGISKLARVLNAFSRRLQVQERMTAEIADCIWDNLKPLGVAVVIEGAHGCMSGRGVRTHGVSMKTSRMMGVFRDDEKSRKEVLKLMGV

SEQ ID NO: 14833 - protein, 201 aa, Sphingobium amiense
  REGION 1..201: note = tr|A0A494W9M4|A0A494W9M4_9SPHN GTP cyclohydrolase 1; OS = Sphingobium amiense OX=135719 GN=folE PE=3 SV=1
MACDADAETVGEGKEPVPAEVSEAIRTLIRWAGDAPEREGLFETPERVARAWREYCRGYADDPAYHLSRIFHEVGGYDDVVLLKDIPFQSHCEHHMAPIVGKAHIAYLPGEYVVGISKLARVLHAFANRLQVQERLTSEVANCIWEHLKPQGVAVVIEATHGCMTGRGVRTPNVIMKTSRMLGVFRDDEKSREEVLKLIAS

SEQ ID NO: 14834 - protein, 202 aa, unidentified
  source 1..202: note = Sphingobium baderi
  REGION 1..202: note = tr|T0HGP8|T0HGP8_9SPHN GTP cyclohydrolase 1; OS = Sphingobium baderi LL03 OX=1114964 GN=folE PE=3 SV=1
MIYDPDAETVGESSKEPVPAEVSDAIRALIRWSGDDPAREGLLETPERVARAWREYCRGYGDDPAYHLSRIFHEVGGYDDVVLLKDIPFQSHCEHHMAPIIGRAHIAYLPGDYVVGISKLARVLHAFAHRLQVQERLTSQVANCIWENLKPQGVAVVIEATHGCMTGRGVRTPNVIMKTSRMLGIFREDEKSREEVLKLIES

SEQ ID NO: 14835 - protein, 202 aa, unidentified
  source 1..202: note = Sphingobium baderi
  REGION 1..202: note = tr|A0A0S3F4I4|A0A0S3F4I4_9SPHN GTP cyclohydrolase 1; OS = Sphingobium baderi OX=1332080 GN=folE PE=3 SV=1
MIYDPDAESVGESSKEPVPTEVSDAIRTLIRWSGDNPEREGLIETPERVARAWREYCRGYGDDPAYHLSRIFHEVGGYDDVVLLKDIPFQSHCEHHMAPIIGRAHIAYLPGDYVVGISKLARVLHAFAHRLQVQERLTSEVANCIWENLKPQGVAVVIEATHGCMTGRGVRTPNVIMKTSRMLGVFRDDEKSREEVLKLIGS

SEQ ID NO: 14836 - protein, 202 aa, unidentified
  source 1..202: note = Sphingobium barthaii
  REGION 1..202: note = tr|A0A4R6FQS7|A0A4R6FQS7_9SPHN GTP cyclohydrolase 1; OS = Sphingobium barthaii OX=1054037 GN=folE PE=3 SV=1
MEYDPDAETAGESVKIPVPANVADAIRTLIRWSGDDPEREGLIETPERVARAWKEYCRGYEDDPAYHLSRIFHEVGGYDDVVLLKDIPFQSHCEHHMAPIVGVAHIAYLPGQYVVGISKLARVLHAFAHRLQVQERLTSEVANCIWKNLKPQGVAVVVEATHGCMTGRGVRTPNVVMKTSRMLGVFRDDEKSREEVLKLIAS

SEQ ID NO: 14837 - protein, 202 aa, Sphingobium chinhatense
  REGION 1..202: note = tr|W1KT80|W1KT80_9SPHN GTP cyclohydrolase 1; OS = Sphingobium chinhatense IP26 OX=1346790 GN=folE PE=3; SV = 1
MEYDPDAETAGESIKIPVPADVAEAIRTLIRWSGDDPEREGLVETPERVARAWKEYCRGYDDDPAYHLSRIFHEVGGYDDIVLLKDIPFQSHCEHHMAPIVGVAHIAYLPGQYVVGISKLARVLHAFAHRLQVQERLTSEVANCIWEHLRPQGVAVVVEATHGCMTGRGVRTPNVVMKTSRMLGVFRDDEKSREEVLKLIAS

SEQ ID NO: 14838 - protein, 202 aa, Sphingobium chlorophenolicum
  REGION 1..202: note = tr|A0A081RJK4|A0A081RJK4_SPHCR GTP cyclohydrolase 1; OS = Sphingobium chlorophenolicum OX=46429 GN=folE PE=3 SV=1
MEYDPDAEAAGESVKIPVPADVADAIRTLIRWSGDDAGREGLLETPERVARAWKEYCRGYGDDPAYHLSRIFHEVGGYDDIVLLKDIPFQSHCEHHMAPIVGVAHIAYLPGQYVVGISKLARVLHAFAHRLQVQERLTSEVANCIWEHLKPEGVAVVIEATHGCMTGRGVRTPNVVMKTSRMLGVFRDDVKSREEVLKLIGA

SEQ ID NO: 14839 - protein, 202 aa, Sphingobium chlorophenolicum
  REGION 1..202: note = tr|F6EUP9|F6EUP9_SPHCR GTP cyclohydrolase 1; OS = Sphingobium chlorophenolicum L-1 OX=690566 GN=folE PE=3; SV = 1
MEYDPDAEAAGESVKIPVPADVADAIRTLIRWSGDDTGREGLLETPERVARAWKEYCRGYGDDPAYHLSRIFQEVGGYDDIVLLKDIPFQSHCEHHMAPIVGVAHIAYLPGQYVVGISKLARVLHAFAHRLQVQERLTSEVANCIWEHLKPEGVAVVIEATHGCMTGRGVRTPNVVMKTSRMLGVFRDDVKSREEVLKLIGA

SEQ ID NO: 14840 - protein, 202 aa, Sphingobium chungbukense
  REGION 1..202: note = tr|A0A0M3AKT9|A0A0M3AKT9_9SPHN GTP cyclohydrolase 1; OS = Sphingobium chungbukense OX=56193 GN=folE PE=3 SV=1
MEYDPDAEAAGESVKIPVPQDVSEAIRTLIRWSGDTPGREGLLETPERVARAWKEYCRGYEDDPAYHLSRIFHEVGGYDDIVLLKDIPFQSHCEHHMAPIVGVAHIAYLPGEYVVGISKLARVLHAFAHRLQVQERLTSEVANCIWENLKPQGVAVVIEATHGCMTGRGVRTPNVVMKTSRMLGVFREDEKSREEVLKLIGS

SEQ ID NO: 14841 - protein, 202 aa, Sphingobium cloacae
  REGION 1..202: note = tr|A0A1E1F192|A0A1E1F192_9SPHN GTP cyclohydrolase 1; OS = Sphingobium cloacae OX=120107 GN=folE PE=3 SV=1
MIYDPDAETVRESVKESVPAEVADAIRTLIKWSGDDPRREGLMETPERVARAWREYCRGYGDDPAYHLSRIFHEVGGYDDVVLLKDIPFQSHCEHHMAPIVGHAHIAYLPGDYVVGISKLARVLHAFAHRLQVQERLTSQVANCIWEHLKPQGVAVVVEATHGCMTGRGVRTPDVIMKTSRMLGVFRDDVKSREEVLKLIES

SEQ ID NO: 14842 - protein, 201 aa, unidentified
  source 1..201: note = Sphingobium cupriresistens
  REGION 1..201: note = tr|A0A4Q4JTX9|A0A4Q4JTX9_9SPHN GTP cyclohydrolase 1; OS = Sphingobium cupriresistens OX=1132417 GN=folE PE=3 SV=1
MACELETETVGDGKEPVPAEVSEAIRTLIRWSGDAPEREGLVETPERVARAWREYCRGYGDDPAYHLSRIFHEVGGYDDVVLLKGIPFQSHCEHHMAPIVGQAHIAYLPGDYVVGISKLARVLHAFANRLQVQERLTSEVANCIWDHLKPQGVAVVIEATHGCMTGRGVRTPGVIMKTSRMLGVFRDDEKSREEVLKLIAS

SEQ ID NO: 14843 - protein, 201 aa, unidentified; identical to SEQ ID NO: 14842
  source 1..201: note = Sphingobium czechense
  REGION 1..201: note = tr|A0A0J7Y124|A0A0J7Y124_9SPHN GTP cyclohydrolase 1; OS = Sphingobium czechense LL01 OX=1420583 GN=folE PE=3 SV=1

SEQ ID NO: 14844 - protein, 202 aa, Sphingobium faniae
  REGION 1..202: note = tr|A0A1G4QN20|A0A1G4QN20_9SPHN GTP cyclohydrolase 1; OS = Sphingobium faniae OX=570446 GN=folE PE=3 SV=1
MDYDPDAETVGESVKEPVPAEVSEAIRTLIRWSGDDPRREGLMETPERVARAWREYCRGYGDDPAYHLSRIFHEVGGYDDVVLLKDIPFQSHCEHHMAPIVGRAHIAYLPGDYVVGISKLARVLHAFAHRLQVQERLTSEVANCIWENLKPQGVAVVIEATHGCMTGRGVRTPDVLMKTSRMLGVFRDDEKSREEVLKLIAS

SEQ ID NO: 14845 - protein, 202 aa, Sphingobium francense
  REGION 1..202: note = tr|A0A4Q4JB60|A0A4Q4JB60_9SPHN GTP cyclohydrolase 1; OS = Sphingobium francense OX=332057 GN=folE PE=3 SV=1
MEYDPDAETAGESIKIPVPADVAEAIRTLIRWSGDDPEREGLVETPERVARAWKEYCRGYDDDPAYHLSRIFHEVGGYDDIVLLKDIPFQSHCEHHMAPIVGVVHIAYLPGQYVVGISKLARVLHAFAHRLQVQERLTSEVANCIWEHLRPQGVAVVVEATHGCMTGRGVRTPNVVMKTSRMLGVFRDDEKSREEVLKLIAS

SEQ ID NO: 14846 - protein, 202 aa, Sphingobium fuliginis
  REGION 1..202: note = tr|A0A5B8CFC7|A0A5B8CFC7_SPHSA GTP cyclohydrolase 1; OS = Sphingobium fuliginis ATCC 27551 OX=1208342 GN=folE; PE = 3 SV=1
MEYDPDAETAGESIKIPVPADVADAIRTLIRWSGDDPEREGLVETPQRVARAWKEYCRGYDDDPAYHLSRIFHEVGGYDDIVLLKDIPFQSHCEHHMAPIVGVAHIAYLPGQYVVGISKLARVLHAFAHRLQVQERLTSEVANCIWEHLKPQGVAVVVEATHGCMTGRGVRTPNVVMKTSRMLGVFRDDEKSREEVLKLIGS

SEQ ID NO: 14847 - protein, 202 aa, Sphingobium fuliginis; identical to SEQ ID NO: 14846
  REGION 1..202: note = tr|A0A292ZE29|A0A292ZE29_SPHSA GTP cyclohydrolase 1; OS = Sphingobium fuliginis (strain ATCC 27551) OX=336203; GN = folE PE=3 SV=1

SEQ ID NO: 14848 - protein, 202 aa, Sphingobium herbicidovorans
  REGION 1..202: note = tr|A0A086P8M7|A0A086P8M7_SPHHM GTP cyclohydrolase 1; OS = Sphingobium herbicidovorans (strain ATCC 700291 / DSM 11019 / NBRC 16415 / MH) OX=1219045 GN=folE PE=3 SV=1
MDYDPDAEAVGEAVKEAVPADVSEAIRTLIRWSGDNPEREGLLETPERVARAWREYCRGYTDDPAYHLSRIFHEVGGYDDIVLLKDIPFQSHCEHHMAPIIGRAHIAYLPGKYVVGISKLARVLHAFSNRLQVQERLTAEVANCIWQHLNPQGVAVVIEATHGCMTGRGVRTPNVLMKTSRMLGVFRDDEKSREEVLKLIGS

SEQ ID NO: 14849 - protein, 201 aa, unidentified
  source 1..201: note = Sphingobium hydrophobicum
  REGION 1..201: note = tr|A0A249MWL1|A0A249MWL1_9SPHN GTP cyclohydrolase 1; OS = Sphingobium hydrophobicum OX=1673076 GN=folE PE=3 SV=1
MACDPDAEMVGEGKEPVPAEVSEAIRTLIRWSGDAPEREGLIETPERVARAWREYCRGYHDDPAYHLSRIFHEVGGYDDVVLLKDIPFQSHCEHHMAPIVGKAHIAYLPGDYVVGISKLARVLHAFANRLQVQERLTSEVANCIWEHLKPQGVAVVIEATHGCMTGRGVRTPNVIMKTSRMLGVFRDDEKSREEVLKLISS

SEQ ID NO: 14850 - protein, 205 aa, unidentified
  source 1..205: note = Sphingobium hydrophobicum
  REGION 1..205: note = tr|A0A249MS93|A0A249MS93_9SPHN GTP cyclohydrolase 1; OS = Sphingobium hydrophobicum OX=1673076 GN=folE PE=3 SV=1
MNFIPTGLGGYAFDDDGRPIVPEAVQDAVRTLIRWAGDDPDREGLRDTPARVGRAWRDYCTGYEEDPGRHLARTFEEVGGYDEIVLLKDIPFQSHCEHHMAPITGKASIAYLPRNRVVGISKLARVLHGFARRLQVQERLTAEVAQSIQDHLQPHGVAVVIEAQHGCMTGRGVRTPGVAMVTSRLLGCFLDDRASRRELLALMGY

SEQ ID NO: 14851 - protein, 202 aa, Sphingobium indicum; identical to SEQ ID NO: 14845
  REGION 1..202: note = tr|A0A1L5BLW3|A0A1L5BLW3_SPHIB GTP cyclohydrolase 1; OS = Sphingobium indicum (strain DSM 16412 / CCM 7286 / MTCC 6364 / B90A) OX=861109 GN=folE PE=3 SV=1

SEQ ID NO: 14852 - protein, 202 aa, Sphingobium japonicum; identical to SEQ ID NO: 14837
  REGION 1..202: note = tr|D4Z2S7|D4Z2S7_SPHJU GTP cyclohydrolase 1; OS = Sphingobium japonicum (strain DSM 16413 / CCM 7287 / MTCC 6362 / UT26 / NBRC 101211 / UT26S) OX=452662 GN=folE; PE = 3 SV =1

SEQ ID NO: 14853 - protein, 217 aa, Sphingobium japonicum
  REGION 1..217: note = tr|N1MIF7|N1MIF7_9SPHN GTP cyclohydrolase 1; OS = Sphingobium japonicum BiD32 OX=1301087 GN=folE PE=3 SV=1
MDLCEGGLAADVNYSGTASLCGSRSRPNDADIERAVSILISATGDDPMREGLVGTPERVARAWREWFGGYAIDPATLLTRTFGEALEYQDTIMLRAIPLTSTCEHHLAPITGFAHVAYRPASRVVGISKLSRLVDAFARRLQLQERLTRQIGQTLEDVLKPRGVAVVIEASHGCMSGRGVRQHGVSMVTHCWLGEFNDDQQLRRDLLAALPLGGTGR

SEQ ID NO: 14854 - protein, 201 aa, Sphingobium lactosutens
  REGION 1..201: note = tr|T0HSW3|T0HSW3_9SPHN GTP cyclohydrolase 1; OS = Sphingobium lactosutens DS20 OX=1331060 GN=folE PE=3; SV = 1
MACDIDAETVGAGKEPVPAEVSEAIRTLIRWAGDAPEREGLVETPERVARAWREYCRGYGDDPAYHLSRIFHEVGGYDDIVLLKDIPFQSHCEHHMAPIVGKAHIAYLPGDYVVGISKLARVLHAYANRLQVQERLTSEVANCIQEHLKPQGVAVVIEATHGCMTGRGVRTPNVIMKTSRMLGVFRDDEKSREEVLKLIGA

SEQ ID NO: 14855 - protein, 201 aa, unidentified; identical to SEQ ID NO: 14831
  source 1..201: note = Sphingobium limneticum
  REGION 1..201: note = tr|A0A5J5GZD7|A0A5J5GZD7_9SPHN GTP cyclohydrolase I FolE OS=Sphingobium limneticum OX=1007511 GN=folE PE=4 SV=1

SEQ ID NO: 14856 - protein, 202 aa, Sphingobium lucknowense; identical to SEQ ID NO: 14837
  REGION 1..202: note = tr|A0A081T3H2|A0A081T3H2_9SPHN GTP cyclohydrolase 1; OS = Sphingobium lucknowense F2 OX=1450518 GN=folE PE=3 SV=1

SEQ ID NO: 14857 - protein, 201 aa, unidentified; identical to SEQ ID NO: 14831
  source 1..201: note = Sphingobium paulinellae
  REGION 1..201: note = tr|A0A5J5I9N1|A0A5J5I9N1_9SPHN GTP cyclohydrolase I FolE OS=Sphingobium paulinellae OX=2048545 GN=folE PE=4; SV = 1

SEQ ID NO: 14858 - protein, 202 aa, Sphingobium quisquiliarum
  REGION 1..202: note = tr|T0H837|T0H837_9SPHN GTP cyclohydrolase 1; OS = Sphingobium quisquiliarum P25 OX=1329909 GN=folE PE=3; SV = 1
MDYDPDAEAVGEAIKEPVPADVAEAIRTLIRWSGDQPDREGLLETPERVARAWREYCRGYNDDPAYHLSRIFHEVGGYDDVVLLKDIPFQSHCEHHMAPIIGRAHIAYLPGKYVVGISKLARVLHAFANRLQVQERLTSEVANCIWEHLKPQGVAVVIEATHGCMTGRGVRTPNVLMKTSRMLGVFRDDEKSREEVLKLISA

SEQ ID NO: 14859 - protein, 201 aa, Sphingobium sp.
  REGION 1..201: note = tr|A0A2A3MTA6|A0A2A3MTA6_9SPHN GTP cyclohydrolase 1; OS = Sphingobium sp. D43FB OX=2017595 GN=folE PE=3 SV=1
MACDPDAETVGNGKEPVPSEVADAIRTLIRWSGDMPEREGLVETPERVARAWREYCRGYGDDPAYHLSRIFHEVGGYDDVVLLKDIPFQSHCEHHMAPIVGKAHIAYLPGDYVVGISKLARVLHAFANRLQVQERLTSEVANCIWEHLKPQGVAVVIEATHGCMTGRGVRTPGVIMKTSRMLGVFRDDEKSREEVLKLIGS

SEQ ID NO: 14860 - protein, 202 aa, Sphingobium sp.; identical to SEQ ID NO: 14846
  REGION 1..202: note = tr|A0A197C186|A0A197C186_9SPHN GTP cyclohydrolase 1; OS = Sphingobium sp. 20006FA OX=2056888 GN=folE PE=3 SV=1

SEQ ID NO: 14861 - protein, 202 aa, Sphingobium ummariense
  REGION 1..202: note = tr|T0J3E7|T0J3E7_9SPHN GTP cyclohydrolase 1; OS = Sphingobium ummariense RL-3 OX=1346791 GN=folE PE=3 SV=1
MDYDPDAEVVGESSKEPVPAEIAEAIRTLIRWSGDDPLREGLLETPERVARAWREYCRGYADDPAYHLSRIFHEVGGYDDVVLLKDIPFQSHCEHHMAPIVGKAHIAYLPGDYVVGISKLARVLHAFANRLQVQERLTSEVANCIWDHLKPQGVAVVIEATHGCMTGRGVRTPNVIMKTSRMLGVFRDDEKSREEVLKLISA

SEQ ID NO: 14862 - protein, 202 aa, Sphingobium wenxiniae; identical to SEQ ID NO: 14834
  REGION 1..202: note = tr|A0A562KKZ5|A0A562KKZ5_SPHWJ GTP cyclohydrolase 1; OS = Sphingobium wenxiniae (strain DSM 21828 / JZ-1); OX = 595605 GN=folE PE=3 SV=1

SEQ ID NO: 14863 - protein, 205 aa, Sphingobium xenophagum
  REGION 1..205: note = tr|A0A401IXI0|A0A401IXI0_SPHXE GTP cyclohydrolase 1; OS = Sphingobium xenophagum OX=121428 GN=folE PE=3 SV=1
MNFIPTGLGGYAFDDDGRPIVPEAVQDAVRTLIRWAGDDPDREGLRDTPARVGRAWRDYCTGYEEDPGRHLSRTFEEVGGYDEIVLLKDIPFQSHCEHHMAPITGKASIAYLPRNRVVGISKLARVLHGFARRLQVQERLTAEVAQSIQDHLQPHGVAVVIEAQHGCMTGRGVRTPGVAMVTSRLLGCFLDDRASRRELLALMGY

SEQ ID NO: 14864 - protein, 201 aa, Sphingobium xenophagum; identical to SEQ ID NO: 14849
  REGION 1..201: note = tr|A0A401IZM3|A0A401IZM3_SPHXE GTP cyclohydrolase 1; OS = Sphingobium xenophagum OX=121428 GN=folE PE=3 SV=1

SEQ ID NO: 14865 - protein, 202 aa, Sphingobium yanoikuyae
  REGION 1..202: note = tr|K9D5I4|K9D5I4_SPHYA GTP cyclohydrolase 1; OS = Sphingobium yanoikuyae ATCC 51230 OX=883163 GN=folE; PE = 3 SV=1
MAYDPDAETVGEGSKEPVPAEVSEAIRTLIRWSGDMPEREGLVETPERVARAWREYCRGYNDDPAYHLSRIFHEVGGYDDVVLLKDIPFQSHCEHHMAPIVGRAHIAYLPGDYVVGISKLARVLHAYANRLQVQERLTSEVANCIWENLKPQGVAVVIEATHGCMTGRGVRTPNVIMKTSRMLGVFRDDEKSREEVLKLIAS

SEQ ID NO: 14866 - protein, 200 aa, Sphingobium yanoikuyae
  REGION 1..200: note = tr|A0A291N7W9|A0A291N7W9_SPHYA GTP cyclohydrolase 1; OS = Sphingobium yanoikuyae OX=13690 GN=folE PE=3 SV=1
MDEDSSKSGPEPLSAPQEVHDAIRTLLRWTGDDPDREGLRDTPARVTRAWKEYCNGYEIDPATYLSRTFDEVGGYDEIVLLRDIPFQSHCEHHLAPITGTASIAYLPKDRVVGISKLARVLNGYARRLQVQERLTAQIADCIWNNLKPHGVAVIIKASHGCMTGRGVRTHGVTMTTSKMLGCFRDDPTSRREIMTLMQSQ

SEQ ID NO: 14867 - protein, 203 aa, unidentified
  source 1..203: note = Sphingomonadaceae bacterium
  REGION 1..203: note = tr|A0A2D4Y1J3|A0A2D4Y1J3_9SPHN GTP cyclohydrolase 1; OS = Sphingomonadaceae bacterium OX=1930536 GN=folE PE=3 SV=1
  VARIANT 20: note = Xaa can be any naturally occurring amino acid
  VARIANT 40: note = Xaa can be any naturally occurring amino acid
  VARIANT 56: note = Xaa can be any naturally occurring amino acid
MSSLVGPDEDDPRAKPPVPXHVQDAIRTLIEWTGDDPSRXGLLDTPKRVARAWKEXCVGYEEDPAQHLGRVFEEVGGYNEIVLLKDIPFQSHCEHHMAPIIGKAAIAYLPNDRVVGISKLARVLHGFARRLQVQERLTAEVADCIWDNLQPQGVAVVIDAQHSCMTARGVRTPGVGMVTSRMMGTFLDDHRSREEVLKLMGYG

SEQ ID NO: 14868 - protein, 203 aa, unidentified
  source 1..203: note = Sphingomonadaceae bacterium
  REGION 1..203: note = tr|A0A2D8FG19|A0A2D8FG19_9SPHN GTP cyclohydrolase 1; OS = Sphingomonadaceae bacterium OX=1930536 GN=folE PE=3 SV=1
  VARIANT 125: note = Xaa can be any naturally occurring amino acid
MSSLVGPDEDDPRGKLPVPEHVQDAIRTLIEWTGDDPAREGLLDTPKRVARAWKEYCIGYTEDPAVHLDRVFEEVGGYNEIVLLKDIPFQSHCEHHMAPIIGKAAIAYLPHDRVVGISKLARVLXGFARRLQVQERLTAEVADCIWENLQPQGVAVVIEASHACMTARGVRTPGVGMVTSRMMGTFLDDHRSREEVLKLMGYG

SEQ ID NO: 14869 - protein, 201 aa, unidentified
  source 1..201: note = Sphingomonadales bacterium
  REGION 1..201: note = tr|A0A258EB76|A0A258EB76_9SPHN GTP cyclohydrolase 1; OS = Sphingomonadales bacterium 32-67-7 OX=1970595 GN=folE; PE = 3 SV=1
MNLGGPDEDDPRGRPAVPENVREAVRTLIRWAGDNPEREGLRDTPDRVARAWKEYCQGYDEDPAIHLGRVFEEVGGYDEIVLLKDIPFQSHCEHHMAPIHGKAAIAYLPTSRVVGISKLARVLHGFARRLQIQERLTTEVAQCIWDNLQPKGVAVVIEASHACMTARGVRTPGVNMVTSQVMGTFRRDEKSRQEVLKLMGY

SEQ ID NO: 14870 - protein, 206 aa, unidentified
  source 1..206: note = Sphingomonadales bacterium
  REGION 1..206: note = tr|A0A5C7JQA6|A0A5C7JQA6_9SPHN GTP cyclohydrolase 1; OS = Sphingomonadales bacterium OX=1978525 GN=folE PE=3 SV=1
MDAICDPKTLAAYGDTPAAPRPTRQEAEAAVRTLIRWAGDNPEREGLVDTPRRVTKAYEEFFAGYDEDPVAILSRTFEEVEGYDDIVMLRDIALESHCEHHMVPILGKAHLAYLPDRRVVGISKLARTVEVFAKRLQTQETMTAQIARAIEEALQPRGVAILIDAKHQCMTMRGVHKPDVSTITTRFTGVFREERFERRFLELIRG

SEQ ID NO: 14871 - protein, 212 aa, Sphingomonas adhaesiva
  REGION 1..212: note = tr|A0A2A4IBG5|A0A2A4IBG5_9SPHN GTP cyclohydrolase 1; OS = Sphingomonas adhaesiva OX=28212 GN=folE PE=3 SV=1
MADDHAHTPHGDPADGDLVGGDGKLPVPDDVAAAVRTLIRWAGDDPTREGLIDTPKRVARAWREYCAGYGDDPSQHLSRVFEEVGGYDEIVLLKDIPFQSHCEHHMAPIIGKAHIAYLPRDHVVGISKLARVLHAYARRLQVQERLTAEVADCIWNGLKPQGVAVVIEASHACMTARGVRTPGVGMVTSRMMGVFRDDERSRKEVLSLMGMG

SEQ ID NO: 14872 - protein, 208 aa, Sphingomonas aerolata
  REGION 1..208: note = tr|A0A2T4YR52|A0A2T4YR52_9SPHN GTP cyclohydrolase 1; OS = Sphingomonas aerolata OX=185951 GN=folE PE=3 SV=1
MIAETPFADAEPAVGPDGKLIVPQEVEAAIRTLIRWTGDDPTREGLVDTPRRVARAWKEYCAGYGDDPARHLERVFEEVGGYDEIVLLKDIPFQSHCEHHMAPIIGKAHIAYLPRNHVVGISKLARVLHGFARRLQVQERLTAEVADCIWEQLQPQGVAVVIEATHACMAARGVRTPGVTMVTSRMMGVFREDERSRKEVLSLMGARA

SEQ ID NO: 14873 - protein, 208 aa, Sphingomonas aquatilis
  REGION 1..208: note = tr|A0A511PZT5|A0A511PZT5_9SPHN GTP cyclohydrolase 1; OS = Sphingomonas aquatilis NBRC 16722 OX=1219039 GN=folE; PE = 3 SV=1
MSHDHAAPDDGDLVGSAAEAAIPQDVAEAIRTLIRWAGDDPTREGLVDTPRRVAKAWREYCAGYGDDPAHHLSRVFEEVGGYDEIVLLKDIPFQSHCEHHMAPIIGKAHIAYLPKDHVVGISKLARVLHGFARRLQVQERLTAEVADCIWQNLRPQGVAVVIEASHACMTARGVRTPGVSMVTSRMMGVFRDDERSRKEVLSLMGLRS

SEQ ID NO: 14874 - protein, 212 aa, Sphingomonas aurantiaca
  REGION 1..212: note = tr|A0A2T5GJP5|A0A2T5GJP5_9SPHN GTP cyclohydrolase 1; OS = Sphingomonas aurantiaca OX=185949 GN=folE PE=3 SV=1
MRDETGGAEDWSAVANQVGPDGKPIVPEDVASAIRTLIRWAGDDPTREGLLDTPRRVARAWKEYCAGYGDDPARHLERVFEEVGGYDEIVLLKDIPFQSHCEHHMAPIIGKAHIAYLPKNHVVGISKLARVLHGFARRLQVQERLTAEVADCIWDNLKPQGVAVVIEATHACMAARGVRTPGVTMVTSRMMGVFRDDERSRKEVLSLMGARA

SEQ ID NO: 14875 - protein, 207 aa, unidentified
  source 1..207: note = Sphingomonas bacterium
  REGION 1..207: note = tr|A0A3D0WBR1|A0A3D0WBR1_9SPHN GTP cyclohydrolase 1; OS = Sphingomonas bacterium OX=1895847 GN=folE PE=3 SV=1
MIHEHDDAEDGDLVAGPPEVEVPDHVAEAIRTLIHWAGDDPTREGLVDTPRRVAKAWREYCAGYADDPGHHLERVFEEVGGYDDIVLLRDIPFQSHCEHHMAPIIGRAHIAYLPKDHVVGISKLARVLHGFARRLQVQERLTAEVADCIWKHLRPRGVAVVIEATHGCMTSRGVRTPGVTMTTSRMMGVFRDDERSRKEVLALIAKG

SEQ ID NO: 14876 - protein, 208 aa, unidentified
  source 1..208: note = Sphingomonas carotinifaciens
  REGION 1..208: note = tr|A0A1G7K7L1|A0A1G7K7L1_9SPHN GTP cyclohydrolase 1; OS = Sphingomonas carotinifaciens OX=1166323 GN=folE PE=3; SV = 1
MTVVPGEPEDGDLVAADGKIAVPSHVTDAIRTLIEWAGDDPTREGLVDTPKRVARAWREYCAGYADDPAIHLARVFEEVGGYDEIVLLKDIPFQSHCEHHMAPIIGVAHIAYLPRNHVVGISKLARVLHGFARRLQVQERLTAEVADCIWDNLKPLGVAVVIEATHACMTARGVRTPGVAMVTSRMMGVFRDDDRSRKEVLALMGRPA

SEQ ID NO: 14877 - protein, 203 aa, Sphingomonas changbaiensis
  REGION 1..203: note = tr|A0A0E9MNB8|A0A0E9MNB8_9SPHN GTP cyclohydrolase 1; OS = Sphingomonas changbaiensis NBRC 104936 OX=1219043; GN = folE PE=3 SV=1
MGDHLEDGDLIETPGKIPVPRNVAKAVRTLLAWAGDDPDREGLADTPLRVARAWKEYCQGYDEDPSAHLSRTFEEVGGYDEIVLLRDIPFQSHCEHHMAPIIGKAHIAYLPKDRVVGISKLARVLHGFARRLQVQERLTAEVADCIWDNLQPQGVAVVIEASHSCMAARGVRTPGVVMTTSRMMGVFREDERSRKEVLALMGC

SEQ ID NO: 14878 - protein, 207 aa, Sphingomonas desiccabilis
  REGION 1..207: note = tr|A0A4Q2IVN4|A0A4Q2IVN4_9SPHN GTP cyclohydrolase 1; OS = Sphingomonas desiccabilis OX=429134 GN=folE PE=3 SV=1
MQADNPATAEGDLVAPQPKLPVPDEVADAIRTLIRWAGDDPTREGLLDTPKRVARAWKEYCQGYGEDPAHHLARTFEEVGGYDEIVLLRDIPFQSHCEHHMAPIIGKAHIAYLPRDHVVGISKLARVLHGFARRLQVQERLTAQVADCIWEKLAPRGVAVVIEASHACMTARGVRTPGVTMTTSRMMGVFRDDDRSRKEVLSLMGLG

SEQ ID NO: 14879 - protein, 209 aa, Sphingomonas dokdonensis
  REGION 1..209: note = tr|A0A245ZHS2|A0A245ZHS2_9SPHN GTP cyclohydrolase 1; OS = Sphingomonas dokdonensis OX=344880 GN=folE PE=3 SV=1
MVNEGSPDDGDLIGDDGKIVVPDHVADAIQTLIRWAGDDPAREGLIDTPRRVARAWREYCAGYAEDPSHHLSRVFEEVGGYDEIVLLRDIPFQSHCEHHMAPIIGRAHIAYLPQDHVVGISKLARVLHAYARRLQVQERLTAEVADCIWNGLKPQGVAVVIEASHACMTARGVRTPGVSMVTSRMMGVFRDDERSRKEVLSLMGMQGRA

SEQ ID NO: 14880 - protein, 203 aa, unidentified
  source 1..203: note = Sphingomonas edaphi
  REGION 1..203: note = tr|A0A418Q255|A0A418Q255_9SPHN GTP cyclohydrolase 1; OS = Sphingomonas edaphi OX=2315689 GN=folE PE=3 SV=1
MTGSPDDGDLVSGAPKIAVPDDVADAVRTLIRWAGDDPTREGLIDTPLRVARAWKEYAKGYTEEPALHLSRTFEEVGGYDEIVLLKDIPFQSHCEHHLAPIIGRAAIAYLPGDKVVGISKLARVLHGFARRLQVQERLTAEVADCIWENLEPKGVAVVIEASHACMTARGVGTPGVMMTTSRMMGCFRDDERSRKEVLALMGY

SEQ ID NO: 14881 - protein, 206 aa, unidentified
  source 1..206: note = Sphingomonas elodea
  REGION 1..206: note = tr|A0A495F467|A0A495F467_SPHEL GTP cyclohydrolase 1; OS = Sphingomonas elodea OX=179878 GN=folE PE=3 SV=1
MHDHHHDPVDGDIVAPPPKIPVPEHVAEAIRTLIRWTGDDPDREGLLDTPQRVARAWKEYCAGYAEDPSHHLSRVFEEVGGYDEIVLLKDIPFQSHCEHHMAPITGKASIAYLPRNHVVGISKLARVLHAFARRLQVQERLTAEVADCIWNHLHPVGVAVVIEAQHGCMTGRGVRTPGVGMVTSRMMGVFREDERSRAEVLKLMGY

SEQ ID NO: 14882 - protein, 214 aa, unidentified
  source 1..214: note = Sphingomonas elodea
  REGION 1..214: note = tr|A0A495F346|A0A495F346_SPHEL GTP cyclohydrolase 1; OS = Sphingomonas elodea OX=179878 GN=folE PE=3 SV=1
MLPVKRKVGPMNFFCNDIERADNEPAQEMVPEEVQEAVRTLLRWVGEDPEREGLRDTPMRHAKAWREYCAGYDEDPGMHLARTFEEVAGYDEIVLLKDIPFQSHCEHHLAPITGKASIAYLPKDRVVGISKLARVLHGYARRLQIQERLTAEIAQAIWTHLKPAGVAVVIEAQHGCMTGRGVKTHGVGMVTSRMLGCFLEDRSSRAELMSLMGY

SEQ ID NO: 14883 - protein, 208 aa, unidentified
  source 1..208: note = Sphingomonas endophytica
  REGION 1..208: note = tr|A0A147I6W5|A0A147I6W5_9SPHN GTP cyclohydrolase 1; OS = Sphingomonas endophytica OX=869719 GN=folE PE=3 SV=1
MSDKGQGTPDDGDLVAADGKIAVPDEVAEAVRTLLRWAGDDPTREGLVDTPRRVARAWKEYCAGYGEDPGVHLSRVFEEVGGYDEIVLLKDIPFQSHCEHHMAPIIGKAHIAYLPRNHVVGISKLARVLHGYARRLQVQERLTAEVADCIWHGLKPLGVAVVIEASHACMTARGVRTSGVGMVTSRMMGVFRDDDRSRKEVLSLMGMA

SEQ ID NO: 14884 - protein, 225 aa, Sphingomonas faeni
  REGION 1..225: note = tr|A0A2T5U286|A0A2T5U286_9SPHN GTP cyclohydrolase 1; OS = Sphingomonas faeni OX=185950 GN=folE PE=3 SV=1
MFRCLGMLTKGVAMRDELNGSEERLVEDDVLGPDGKVIVPEDVASAIRTLIRWAGDDPTREGLLDTPRRVARAWKEYCAGYGDDPAKHLERVFEEVGGYDEIVLLKDIPFQSHCEHHMAPIIGKAHIAYLPRDHVVGISKLARVLHGFARRLQVQERLTAEVADCIWDNLKPQGVAVVIEASHACMTARGVRTPGVTMVTSRMMGVFRDDERSRKEVLALMGRGA

SEQ ID NO: 14885 - protein, 201 aa, Sphingomonas fennica
  REGION 1..201: note = tr|A0A2T4HUI1|A0A2T4HUI1_9SPHN GTP cyclohydrolase 1; OS = Sphingomonas fennica OX=114404 GN=folE PE=3 SV=1
MGAAMGEMMETPAKIAVPEDVEEAIRTLLRWAGDDPTREGLLDTPKRVARAWKEYCKGYGDDPARHLSRTFEEVGGYDEIVLLKDIPFQSHCEHHMAPIIGKAAIAYLPRERVVGISKLARVLHGFARRLQVQERLTAEVADCIWDNLAPHGVAVVIEATHACMTARGVQTPGVVMTTSRMMGVFRDDERSRAEVLKLMGY

SEQ ID NO: 14886 - protein, 206 aa, unidentified
  source 1..206: note = Sphingomonas gei
  REGION 1..206: note = tr|A0A4S1X8P4|A0A4S1X8P4_9SPHN GTP cyclohydrolase 1; OS = Sphingomonas gei OX=1395960 GN=folE PE=3 SV=1
MAEVHDPAEDGDLIAPPPKIAVPEDVAEAIRTLIRWAGDDPAREGLIDTPQRVARAWKEYCQGYGEDPAYHLARVFEEVGGYDEIVLLKDIPFQSHCEHHMAPIIGKASIAYLPKDHVVGISKLARVLNAFARRLQVQERLTAEVADCIWNGLKPIGVAVVIEASHACMTARGVRTPGVGMVTSRMMGVFRDDERSRQEVLKLMGY

SEQ ID NO: 14887 - protein, 212 aa, Sphingomonas ginsenosidimutans
  REGION 1..212: note = tr|A0A2A4HZN2|A0A2A4HZN2_9SPHN GTP cyclohydrolase 1; OS = Sphingomonas ginsenosidimutans OX=862134 GN=folE PE=3; SV = 1
MADDHAHTPHGDPADGDLVGGDGKLPVPDDVAAAVRTLIRWAGDDPTREGLLDTPQRVARAWREYCAGYADDPSKHLSRVFEEVGGYDEIVLLKDIPFQSHCEHHMAPIIGKAHIAYLPRDHVVGISKLARVLHAYARRLQVQERLTAEVADCIWNGLKPQGVAVVIEASHACMTARGVRTPGVGMVTSRMMGVFRDDERSRKEVLSLMGMA

SEQ ID NO: 14888 - protein, 207 aa, unidentified
  source 1..207: note = Sphingomonas ginsenosidivorax
  REGION 1..207: note = tr|A0A5C6UEE9|A0A5C6UEE9_9SPHN GTP cyclohydrolase 1; OS = Sphingomonas ginsenosidivorax OX=862135 GN=folE PE=3; SV = 1
MSDTYPSLGHDQIDTDGKPLVPSDVAEAIRTLIRWSGDDPDREGLVDTPRRVARAWKEYCAGYADDPARHLERVFEEVGGYDEIVLLKDIPFQSHCEHHMAPIIGKAHIAYLPRDHVVGISKLARVLHGFARRLQVQERLTAEVADCIWDNLKPLGVAVVIEASHACMTARGVRTPGVTMVTSRMMGVFRDDDRSRKEVLALMGARA

SEQ ID NO: 14889 - protein, 207 aa, Sphingomonas glacialis
  REGION 1..207: note = tr|A0A502FY23|A0A502FY23_9SPHN GTP cyclohydrolase 1; OS = Sphingomonas glacialis OX=658225 GN=folE PE=3 SV=1
MDGRNKTEFGVAEIGADGKVVVPDAVAEAVRTLIRWAGDNPTREGLRDTPARVARAWKEYCAGYTDDPAKHLSRVFEEVGGYDEIVLLKDIPFQSHCEHHMAPIIGKAHIAYLPGNYVVGISKLARVLQAFARRLQVQERLTAEVADCIWNNLKPVGVAVVIEASHACMTARGVRTQGVTMVTSRMMGVFRDDERSRKEVLALMGRG

SEQ ID NO: 14890 - protein, 206 aa, unidentified
  source 1..206: note = Sphingomonas guangdongensis
  REGION 1..206: note = tr|A0A285QYC3|A0A285QYC3_9SPHN GTP cyclohydrolase 1; OS = Sphingomonas guangdongensis OX=1141890 GN=folE PE=3 SV=1
MTDSGEPAGGDLIRPTPKIPVPDDVAAAVATLIRWAGDDPSREGLRDTPQRVARAWREYCSGYQDDPAHHLSRVFEEVGGYDEIVLLKDIPFQSHCEHHMAPIIGRAHIAYLPKDHVVGISKLARVLHAYARRLQVQERLTAEVADCIWAGLRPRGVAVVIEASHACMTARGVRTPGVGMVTSRMMGVFRDDERSRKEVLALMGRG

SEQ ID NO: 14891 - protein, 197 aa, Sphingomonas haloaromaticamans
  REGION 1..197: note = tr|A0A1S1HEF9|A0A1S1HEF9_9SPHN GTP cyclohydrolase 1; OS = Sphingomonas haloaromaticamans OX=653954 GN=folE PE=3; SV = 1
MGEMMETPAKIAVPEDVEEAIRTLLRWAGDDPTREGLLDTPKRVARAWKEYCKGYGDDPARHLSRTFEEVGGYDEIVLLKDIPFQSHCEHHMAPIIGKAAIAYLPRERVVGISKLARVLHGFARRLQVQERLTAEVADCIWDNLAPHGVAVVIEATHACMTARGVQTPGVVMTTSRMMGVFRDDERSRAEVLKLMGY

SEQ ID NO: 14892 - protein, 207 aa, unidentified
  source 1..207: note = Sphingomonas hengshuiensis
  REGION 1..207: note = tr|A0A2W4ZEN8|A0A2W4ZEN8_9SPHN GTP cyclohydrolase 1; OS = Sphingomonas hengshuiensis OX=1609977 GN=folE PE=3 SV=1
MCDANDDADGGELAGPVAKIPVPDEVAAAIRTLIRWTGDDPDREGLLDTPLRVARAWKEYTQGYGEDPARHLERVFEEVGGYDEIVLLRDIPFQSHCEHHMAPIVGKAHIAYLPQDHVVGISKLARVLHGYARRLQVQERLTAEVADCIWNGLRPRGVAVVIEATHGCMTSRGVRTPGVTMTTSRMMGVFRDDERSRKEVLALIARG

SEQ ID NO: 14893 - protein, 206 aa, Sphingomonas histidinilytica
  REGION 1..206: note = tr|A0A1T5F5J9|A0A1T5F5J9_9SPHN GTP cyclohydrolase 1; OS = Sphingomonas histidinilytica OX=439228 GN=folE PE=3 SV=1
MSILGDDDEALHGTPKGKIVVPEDVQEAIRTLIRWSGDNPDREGLLDTPSRVGRAWKEYCQGYDEDPSVHLSRTFEEVGGYDEIVLLRDIPFQSHCEHHMAPIIGHAHIAYLPHSRVVGISKLARVLHGFARRLQIQERLTAEIADCIWTNLEPLGVAVVIHATHACMTARGVRTPGVGMTTSRMMGVFRDDDRSRKEVLSLMGLG

SEQ ID NO: 14894 - protein, 204 aa, unidentified
  source 1..204: note = Sphingomonas indica
  REGION 1..204: note = tr|A0A1X7GRJ2|A0A1X7GRJ2_9SPHN GTP cyclohydrolase 1; OS = Sphingomonas indica OX=941907 GN=folE PE=3 SV=1
MSDTPEDGDLVEGTGGKPPVPEHVREAVQTLIRWAGDDPAREGLLDTPDRVARAWREYAQGYGEDPAIHLSRTFDEVGGYDEIVLLKDIPFQSHCEHHLAPIIGKAAIAYLPGDRVVGISKLARVLHGFARRLQVQERLTAQVADCIWEHLQPQGVAVVIEASHACMTARGVRTPGVMMTTSRMMGVFREDERSRREVLALMGY

SEQ ID NO: 14895 - protein, 205 aa, unidentified
  source 1..205: note = Sphingomonas jatrophae
  REGION 1..205: note = tr|A0A1I6JM02|A0A1I6JM02_9SPHN GTP cyclohydrolase 1; OS = Sphingomonas jatrophae OX=1166337 GN=folE PE=3 SV=1
MSELATDSIDAPRGPDGKIVVPDHVVEAFRTILRWTGDDPEREGLLDTPKRVARAWKEYCQGYGEDPSHHLSRTFDEVGGYDEIVLLKDIPFQSHCEHHMAPIIGKAAIAYLPNMRVVGISKLARVLHGFARRLQVQERLTAQVADCIWEHLHPHGVAVVIEASHACMTARGVRTPGVAMTTSRMMGVFREDERSRQEVLKLMGY

SEQ ID NO: 14896 - protein, 216 aa, unidentified
  source 1..216: note = Sphingomonas jeddahensis
  REGION 1..216: note = tr|A0A1V2EY71|A0A1V2EY71_9SPHN GTP cyclohydrolase 1; OS = Sphingomonas jeddahensis OX=1915074 GN=folE PE=3 SV=1
MHKGFSLMNVKGSPNEGDIVAEDGKMAVPDHVADAIRTLLRWAGDDPSREGLIDTPKRVARAWKEYCAGYAEDPAHHLARVFEEVGGYDEIVLLRDIPFQSHCEHHMAPIIGRAHIAYLPKNHVVGISKLARVLHAYARRLQVQERLTAEVADCIWNELKPQGVAVVIEASHACMTARGVRTPGVSMVTSRMMGVFRDDERSRKEVLALMGMQGRA

SEQ ID NO: 14897 - protein, 207 aa, Sphingomonas koreensis
  REGION 1..207: note = tr|A0A1L6JE04|A0A1L6JE04_9SPHN GTP cyclohydrolase 1; OS = Sphingomonas koreensis OX=93064 GN=folE PE=3 SV=1
MSCHDHDEPGDGDIVASPPKIAVPDEVAEAVRTILRWAGDDPSREGLLDTPKRVARAWKEYCQGYGEDPAHHLSRIFEEVGGYDEIVLLKDIPFQSHCEHHMAPIIGKASIAYLPQDHVVGISKLARVLHAYARRLQVQERLTAEVADCIWNHLHPRGVAVVIEASHACMTARGVRTPGVGMVTSRMMGVFREDERSRKEVLALMGY

SEQ ID NO: 14898 - protein, 207 aa, Sphingomonas koreensis
  REGION 1..207: note = tr|A0A2M8WH80|A0A2M8WH80_9SPHN GTP cyclohydrolase 1; OS = Sphingomonas koreensis OX=93064 GN=folE PE=3 SV=1
MSCHDHHEPGDGDIVASPPKIAVPDEVAEAVRTILRWAGDDPSREGLLDTPKRVARAWKEYCQGYGEDPAHHLSRIFEEVGGYDEIVLLKDIPFQSHCEHHMAPIIGKASIAYLPQDHVVGISKLARVLHAYARRLQVQERLTAEVADCIWNHLHPRGVAVVIEASHACMTARGVRTPGVGMVTSRMMGVFREDERSRKEVLALMGY

SEQ ID NO: 14899 - protein, 197 aa, unidentified
  source 1..197: note = Sphingomonas laterariae
  REGION 1..197: note = tr|A0A239BMF5|A0A239BMF5_9SPHN GTP cyclohydrolase 1; OS = Sphingomonas laterariae OX=861865 GN=folE PE=3 SV=1
MGEMMESPAKPAVPEDVEDAIRTLLRWAGDDPTREGLIDTPKRVARAWKEYCKGYGDDPAVHLSRTFEEVGGYDEIVLLKDIPFQSHCEHHMAPIIGKAAIAYLPKDRVVGISKLARVLHGFARRLQVQERLTAEVADCIWDNLQPYGVAVVIEATHACMTARGVQTPGVVMTTSRMMGVFRDDERSRAEVLKLMGY

SEQ ID NO: 14900 - protein, 208 aa, Sphingomonas melonis; identical to SEQ ID NO: 14873
  REGION 1..208: note = tr|A0A0D1MMC4|A0A0D1MMC4_9SPHN GTP cyclohydrolase 1; OS = Sphingomonas melonis OX=152682 GN=folE PE=3 SV=1

SEQ ID NO: 14901 - protein, 208 aa, Sphingomonas melonis
  REGION 1..208: note = tr|A0A175Y7U0|A0A175Y7U0_9SPHN GTP cyclohydrolase 1; OS = Sphingomonas melonis TY OX=621456 GN=folE PE=3 SV=1
MSHDHAAPDDGDLVASAAEAAIPQDVAEAIRTLIRWAGDDPTREGLIDTPRRVAKAWREYCAGYGDDPAHHLSRVFEEVGGYDEIVLLKDIPFQSHCEHHMAPIIGKAHIAYLPKDHVVGISKLARVLHGFARRLQVQERLTAEVADCIWKNLRPQGVAVVIEASHACMTARGVRTPGVSMVTSRMMGVFRDDERSRKEVLSLMGLRS

SEQ ID NO: 14902 - protein, 209 aa, Sphingomonas mucosissima
  REGION 1..209: note = tr|A0A245ZS87|A0A245ZS87_9SPHN GTP cyclohydrolase 1; OS = Sphingomonas mucosissima OX=370959 GN=folE PE=3 SV=1
MNCNDSPEDGDLVGEDGKIVVPDDVANAIRTLIRWAGDDPAREGLVDTPRRVARAWKEYCAGYAEDPSRHLARIFEEVGGYDEIVLLRDIPFQSHCEHHMAPIIGRAHIAYLPRNHVVGISKLARVLHAFARRLQVQERLTAEVADCIWNNLKPQGVAVVIEASHACMTARGVRTPGVSMVTSRMMGVFRDDERSRKEVLALMGMQGRG

SEQ ID NO: 14903 - protein, 206 aa, unidentified
  source 1..206: note = Sphingomonas naasensis
  REGION 1..206: note = tr|A0A4S1WSU7|A0A4S1WSU7_9SPHN GTP cyclohydrolase 1; OS = Sphingomonas naasensis OX=1344951 GN=folE PE=3 SV=1
MAEIHDPAEDGDLIAGPAKIAVPEDVAEAIRTLIRWSGDDPAREGLIDTPQRVARAWKEYCQGYGEDPAHHLARVFEEVGGYDEIVLLKDIPFQSHCEHHMAPIIGKASIAYLPKDHVVGISKLARVLHAFARRLQVQERLTAEVADCIWNGLKPVGVAVVIEASHACMTARGVRTPGVGMVTSRMMGVFRDDERSRQEVLKLMGY

SEQ ID NO: 14904 - protein, 209 aa, unidentified
  source 1..209: note = Sphingomonas olei
  REGION 1..209: note = tr|A0A4S4GAM0|A0A4S4GAM0_9SPHN GTP cyclohydrolase 1; OS = Sphingomonas olei OX=1886787 GN=folE PE=3 SV=1
MSVKGSPEDGDIIGEDGKIAVPEHVASAIRTLIEWAGDDPSREGLVDTPKRVARAWREYCAGYAEDPAHHLSRIFEEVGGYDEIVLLKDIPFQSHCEHHMAPILGRAHIAYLPRNHVVGISKLARVLHAYARRLQVQERLTAEVADCIWNGLKPQGVAVVIEASHACMTARGVRTPGVSMVTSRMMGVFRDDERSRKEVLALMGMQGRT

SEQ ID NO: 14905 - protein, 205 aa, unidentified
  source 1..205: note = Sphingomonas oleivorans
  REGION 1..205: note = tr|A0A2T5FV30|A0A2T5FV30_9SPHN GTP cyclohydrolase 1; OS = Sphingomonas oleivorans OX=1735121 GN=folE PE=3 SV=1
MSGCPEPEDGDLVAPTPKIPVPEYVEDAIRTLLRWSGEDPDREGLLDTPKRVARAWKEYCQGYESDPALHLSRTFEEVGGYDEIVLLRDIPFQSHCEHHMAPIVGKAAIAYLPRDRVVGISKLARVLHGFARRLQVQERLTAQVADCIWDHLNPLGVAVVIEASHGCMTARGVRTPGVAMTTSRMMGVFRDDERSRREVLALMGY

SEQ ID NO: 14906 - protein, 224 aa, Sphingomonas oligophenolica
  REGION 1..224: note = tr|A0A502CNQ5|A0A502CNQ5_9SPHN GTP cyclohydrolase 1; OS = Sphingomonas oligophenolica OX=301154 GN=folE PE=3 SV=1
MELCRNVGRGDVHAIGGENDVTEDTPDDGDLVAAPPADAVPRDVADAIRTLIRWAGDDPTREGLIETPRRVAKAWKEYCAGYADDPAHHLERVFEEVGGYDEIVLLKDIPFQSHCEHHLAPIIGKAHIAYLPQNHVVGISKLARVLHAFARRLQVQERLTAEVADCIWENLKPQGVAVVIEASHACMTARGVRTPGVSMVTSRMMGVFRDDDRSRKEVLALMGC

SEQ ID NO: 14907 - protein, 208 aa, unidentified
  source 1..208: note = Sphingomonas panacis
  REGION 1..208: note = tr|A0A1B3ZD65|A0A1B3ZD65_9SPHN GTP cyclohydrolase 1; OS = Sphingomonas panacis OX=1560345 GN=folE PE=3 SV=1
MSERAEIAISGDRFELDGKIAVPDDVADAVRTLIRWAGDDPAREGLIDTPRRVARAWKEYCAGYADDPAHHLSRVFEEVGGYDEIVLLKDIPFQSHCEHHMAPIIGKAHIAYLPGNYVVGISKLARVLHAFARRLQVQERLTAEVADCIWKNLKPLGVAVVIEANHACMSARGVRTPGVTMTTSRMMGVFRDDERSREEVLSLIGFKA

SEQ ID NO: 14908 - protein, 208 aa, Sphingomonas parapaucimobilis
  REGION 1..208: note = tr|A0A0A1WAA8|A0A0A1WAA8_9SPHN GTP cyclohydrolase 1; OS = Sphingomonas parapaucimobilis NBRC 15100 OX=1219049; GN = folE PE=3 SV=1
MSCAHGDPEDGDLIGQDGKIVVPDHVAEAIRTLIAWAGDDPTREGLVDTPKRVARAWREYCAGYGDDPAVHLSRVFEEVGGYDEIVLLKDIPFQSHCEHHMAPIMGRAHIAYLPRNHVVGISKLARVLHGFARRLQVQERLTAEVADCIWENLKPLGVAVVIEATHGCMTSRGVRTPGVSMVTSRMMGVFRDDDRSRKEVLSLMGMAG

SEQ ID NO: 14909 - protein, 208 aa, Sphingomonas paucimobilis
  REGION 1..208: note = tr|A0A0C9NKZ8|A0A0C9NKZ8_SPHPI GTP cyclohydrolase 1; OS = Sphingomonas paucimobilis NBRC 13935 OX=1219050 GN=folE; PE = 3 SV=1
MSCAPGDPEDGDLIGEDGKIAVPDHVAQAIRTLIAWAGDDPTREGLIDTPKRVARAWREYCAGYGDDPAVHLSRVFEEVGGYDEIVLLKDIPFQSHCEHHMAPIIGRAHIAYLPRNHVVGISKLARVLHGFARRLQVQERLTAEVADCIWENLKPLGVAVVIEATHACMTARGVRTPGVAMVTSRMMGVFRDDDRSRKEVLSLMGLGG

SEQ ID NO: 14910 - protein, 202 aa, Sphingomonas paucimobilis
  REGION 1..202: note = tr|A0A031J938|A0A031J938_SPHPI GTP cyclohydrolase 1; OS = Sphingomonas paucimobilis OX=13689 GN=folE PE=3 SV=1
MDYDPDAEAVGEAIKEPVPADVAEAIRTLIRWSGDQPDREGLLETPERVARAWREYCRGYNDDPAYHLSRIFHEVGGYDDVVLLKDIPFQSHCEHHMAPIIGRAHIAYLPGEYVVGISKLARVLHAFANRLQVQERLTSEVANCIWEHLKPQGVAVVIEATHGCMTGRGVRTPNVLMKTSRMLGVFRDDEKSREEVLKLISA

SEQ ID NO: 14911 - protein, 206 aa, unidentified
  source 1..206: note = Sphingomonas pokkalii
  REGION 1..206: note = tr|A0A2U0SDQ2|A0A2U0SDQ2_9SPHN GTP cyclohydrolase 1; OS = Sphingomonas pokkalii OX=2175090 GN=folE PE=3 SV=1
MHDHHDGPEDGDIVAPAPKIPVPEHVAEAIRTLIRWTGDDPDREGLLDTPQRVARAWKEYCAGYGEDPSHHLSRVFEEVGGYDEIVLLKDIPFQSHCEHHMAPITGKASIAYLPRNHVVGISKLARVLHAFARRLQVQERLTAEVADCIWNNLHPQGVAVVIEAQHGCMTARGVRTPGVGMVTSRMMGVFRDDERSRAEVLKLMGY

SEQ ID NO: 14912 - protein, 204 aa, unidentified
  source 1..204: note = Sphingomonas pokkalii
  REGION 1..204: note = tr|A0A2U0SD27|A0A2U0SD27_9SPHN GTP cyclohydrolase 1; OS = Sphingomonas pokkalii OX=2175090 GN=folE PE=3 SV=1
MNFFCNDLEGAELDQGAELVPDEVQEAVRTLLRWVGENPEREGLRDTPRRYAKAWLEYCQGYEEDPGAHLARTFEEVAGYDEIVLLKDIPFHSHCEHHLAPITGKASIAYLPKNRVVGISKLARVLHGYARRLQIQERLTAEVAQAIWDHLQPAGVAVVIEAQHGCMTGRGVKTPGVGMVTSRLRGCFLDDKSSRAEILSLMGY

SEQ ID NO: 14913 - protein, 200 aa, Sphingomonas rubra
  REGION 1..200: note = tr|A0A1I5QTQ8|A0A1I5QTQ8_9SPHN GTP cyclohydrolase 1; OS = Sphingomonas rubra OX=634430 GN=folE PE=3 SV=1
MSDLVEDDGKVAVPPHVAEAVRTLIEWAGDDPAREGLLDTPKRVARAWKEYCAGYGEDPARHLSRVFEEVGGYDEIVLLRDIPFQSHCEHHMAPIIGRAHIAYLPKDHVVGISKLARVLHGFARRLQVQERLTAEVADCIWDHLRPVGVAVVIEATHACMTARGVRTPGVSMTTSRMMGVFRDDERSRREVLALMGMNKG

SEQ ID NO: 14914 - protein, 208 aa, Sphingomonas sanguinis
  REGION 1..208: note = tr|A0A147HUI4|A0A147HUI4_9SPHN GTP cyclohydrolase 1; OS = Sphingomonas sanguinis OX=33051 GN=folE PE=3 SV=1
MSCAHGDPEDGDLIGEDGKIAVPDEVAQAIRTLIAWAGDDPTREGLVDTPKRVARAWAEYCAGYGDDPAVHLSRVFEEVGGYDEIVLLKDIPFQSHCEHHMAPIIGRAHIAYLPRNHVVGISKLARVLHGFARRLQVQERLTAEVADCIWENLKPLGVAVVIEATHACMTARGVRTPGVAMVTSRMMGVFRDDERSRKEVLSLMGLGG

SEQ ID NO: 14915 - protein, 202 aa, Sphingomonas sanxanigenens
  REGION 1..202: note = tr|W0A7Q4|W0A7Q4_9SPHN GTP cyclohydrolase 1; OS = Sphingomonas sanxanigenens DSM 19645 = NX02 OX=1123269; GN = folE PE=3 SV=1
MEDDSGDIAIGDDGKIVVPNDVEEAIRTLIRWAGDDPTREGLVDTPRRVARAWREYCQGYLEDPSVHLSRTFEEVGGYDEIVLLKDIPFQSHCEHHMAPIIGRAHIAYLPRDRVVGISKLARVLQGYARRLQVQERLTAEVADCIWRHLDPIGVAVVIEASHACMSARGVRTPGVAMTTSRMMGVFRDDDRSRKEVLALMGC

SEQ ID NO: 14916 - protein, 200 aa, Sphingomonas sanxanigenens
  REGION 1..200: note = tr|A0A2W5C9K3|A0A2W5C9K3_9SPHN GTP cyclohydrolase 1; OS = Sphingomonas sanxanigenens OX=397260 GN=folE PE=3 SV=1
MPVAAAAPESQSKIAVPEDVAEAVRTLIRWAGDDPSREGLIDTPKRVARAWREYCQGYAEDPAIHLSRTFEEVGGYDEIVLLKDIPFQSHCEHHMAPIIGKAHIAYLPRDRVVGISKLARVLHGFARRLQVQERLTAEVANCIWEHLHPHGVAVVIEASHACMTARGVRTPGVGMVTSRMMGVFRDDERSRKEVLALING

SEQ ID NO: 14917 - protein, 208 aa, Sphingomonas sp.; identical to SEQ ID NO: 14908
  REGION 1..208: note = tr|A0A1R1Z254|A0A1R1Z254_9SPHN GTP cyclohydrolase 1; OS = Sphingomonas sp. Sph1(2015) OX=1628084 GN=folE PE=3 SV=1

SEQ ID NO: 14918 - protein, 207 aa, Sphingomonas sp.
  REGION 1..207: note = tr|A0A430DG40|A0A430DG40_9SPHN GTP cyclohydrolase 1; OS = Sphingomonas sp. ABOLF OX=1985879 GN=folE PE=3 SV=1
MQADNPATAEGDLVAPQPKLPVPDEVADAIRTLIRWAGDDPEREGLLDTPKRVARAWKEYCQGYGEDPAHHLSRTFEEVGGYDEIVLLRDIPFQSHCEHHMAPIIGKAHIAYLPKDHVVGISKLARVLHGFARRLQVQERLTAQVADCIWDRLAPRGVAVVIEASHACMTARGVRTPGVTMTTSRMMGVFRDDDRSRKEVLALMGLG

SEQ ID NO: 14919 - protein, 207 aa, unidentified
  source 1..207: note = Sphingomonas spermidinifaciens
  REGION 1..207: note = tr|A0A2A4B5T4|A0A2A4B5T4_9SPHN GTP cyclohydrolase 1; OS = Sphingomonas spermidinifaciens OX=1141889 GN=folE PE=3; SV = 1
MIHDHDAAADGDLIAGLPEVEVPGDVADAIRTLIRWAGDDPTREGLIDTPRRVAKAWREYCAGYADDPGQHLARVFEEVGGYDDIVLLRDIPFQSHCEHHMAPITGRAHIAYLPKDHVVGISKLARVLHAFARRLQVQERLTAEVADCIWSHLKPRGVAVVIEATHGCMTSRGVRTPGVTMTTSRMMGVFRDDERSRKEVLALIGKK

SEQ ID NO: 14920 - protein, 208 aa, unidentified
  source 1..208: note = Sphingomonas taxi
  REGION 1..208: note = tr|A0A2W5NYD3|A0A2W5NYD3_9SPHN GTP cyclohydrolase 1; OS = Sphingomonas taxi OX=1549858 GN=folE PE=3 SV=1
MSDTTRATPDDGDLVAGDGKLPVPEEVAAAVRTLLRWAGDDPTREGLADTPHRVARAWKEYCAGYGEDPQAHLSRVFEEVGGYDEIVLLKDIPFQSHCEHHMAPIIGRAHIAYLPRNHVVGISKLARVLHAYARRLQVQERLTAEVADCIWTGLKPLGVAVVIEASHACMTARGVRTPGVGMVTSRMMGVFRDDDRSRKEVLSLMGLG

SEQ ID NO: 14921 - protein, 206 aa, unidentified
  source 1..206: note = Sphingomonas taxi
  REGION 1..206: note = tr|A0A097EFU0|A0A097EFU0_9SPHN GTP cyclohydrolase 1; OS = Sphingomonas taxi OX=1549858 GN=folE PE=3 SV=1
MTDQHHAPDEGATAATGDAPVVPIEVAEAIRTLIRWAGDDPGREGLIDTPRRVAKAWKEYCAGYADDPARHLSRVFEEVGGYDEIVLLKDIPFQSHCEHHMAPIIGKAHIAYLPRDHVVGISKLARVLHGFARRLQVQERLTAEVADCIWDNLKPQGVAVVIEASHACMTARGVRTPGVSMVTSRMMGVFREDDRSRKEVLALMGC

SEQ ID NO: 14922 - protein, 214 aa, Sphingomonas trueperi
  REGION 1..214: note = tr|A0A543M3U0|A0A543M3U0_9SPHN GTP cyclohydrolase 1; OS = Sphingomonas trueperi OX=53317 GN=folE PE=3 SV=1
MLPVKRKVGPMNFFCNDIERADNEPAQEMVPEEVQEAVRTLLRWVGEDPEREGLRDTPMRHAKAWREYCAGYDEDPGIHLARTFEEVAGYDEIVLLKDIPFQSHCEHHLAPITGKASIAYLPKDRVVGISKLARVLHGYARRLQIQERLTAEIAQAIWTHLKPAGVAVVIEAQHGCMTGRGVKTHGVGMVTSRMLGCFLEDRSSRAELMSLMGY

SEQ ID NO: 14923 - protein, 206 aa, Sphingomonas trueperi; identical to SEQ ID NO: 14881
  REGION 1..206: note = tr|A0A543M4G1|A0A543M4G1_9SPHN GTP cyclohydrolase 1; OS = Sphingomonas trueperi OX=53317 GN=folE PE=3 SV=1

SEQ ID NO: 14924 - protein, 206 aa, unidentified
  source 1..206: note = Sphingomonas turrisvirgatae
  REGION 1..206: note = tr|A0A1E3LUE7|A0A1E3LUE7_9SPHN GTP cyclohydrolase 1; OS = Sphingomonas turrisvirgatae OX=1888892 GN=folE PE=3 SV=1
MSDQHDAAADGDIVAPAPKIPVPDEVAEAVRTILRWAGDDPNREGLLDTPNRVARAWKEYCQGYAEDPAHHLSRVFEEVGGYDEIVLLKDIPFQSHCEHHMAPIIGKASIAYLPQNHVVGISKLARVLHAYARRLQVQERLTAEVADCIWNHLHPRGVAVVVEASHACMTARGVRTPGVGMVTSRMMGTFREDERSRKEVLALMGY

SEQ ID NO: 14925 - protein, 206 aa, Sphingomonas wittichii
  REGION 1..206: note = tr|A0A1X9UKH5|A0A1X9UKH5_SPHSD GTP cyclohydrolase 1; OS = Sphingomonas wittichii (strain DC-6 / KACC 16600); OX = 1283312 GN=folE PE=3 SV=1
MSILGDDDEALHGTPKGKIAVPEHVQEAIRTLIRWSGDNPDREGLLDTPSRVGRAWKEYCQGYDEDPSVHLSRTFEEVGGYDEIVLLRDIPFQSHCEHHMAPIIGHAHIAYLPHSRVVGISKLARVLHGFARRLQIQERLTAEIADCIWTNLEPLGVAVVIHATHACMTARGVRTPGVGMTTSRMMGVFRDDDRSRKEVLSLMGLG

SEQ ID NO: 14926 - protein, 206 aa, Sphingomonas wittichii; identical to SEQ ID NO: 14925
  REGION 1..206: note = tr|A5V3T4|A5V3T4_SPHWW GTP cyclohydrolase 1; OS = Sphingomonas wittichii (strain RW1 / DSM 6014 / JCM 10273) OX=392499 GN=folE PE=3 SV=1

SEQ ID NO: 14927 - protein, 208 aa, Sphingomonas yabuuchiae
  REGION 1..208: note = tr|A0A147IVA5|A0A147IVA5_9SPHN GTP cyclohydrolase 1; OS = Sphingomonas yabuuchiae OX=172044 GN=folE PE=3 SV=1
MSCAHGDPEDGDLIGQDGKIAVPDHVADAIRTLIAWAGDDPTREGLIDTPKRVARAWREYCAGYGDDPAVHLSRVFEEVGGYDEIVLLKDIPFQSHCEHHMAPIIGRAHIAYLPRNHVVGISKLARVLHGFARRLQVQERLTAEVADCIWENLKPLGVAVVIEATHGCMTSRGVRTPGVSMVTSRMMGVFRDDNRSRKEVLSLMGMAG

SEQ ID NO: 14928 - protein, 200 aa, Sphingopyxis alaskensis
  REGION 1..200: note = tr|Q1GRU9|Q1GRU9_SPHAL GTP cyclohydrolase 1; OS = Sphingopyxis alaskensis (strain DSM 13593 / LMG 18877 / RB2256) OX=317655 GN=folE PE=3 SV=1
MSELGQDLGPDGKLIVPDHVADAVRTLIEWAGDDPAREGLLDTPRRVARAWKEYCSGYGEDPSIHLSRTFEEVGGYDEVVLLRDIPFQSHCEHHMAPITGKASIAYLPRDRVVGISKLARVLNGYARRLQVQERLTAEVAQCIWDNLQPHGVAVVIDAQHGCMTGRGVRTPGVGMVTSRLLGCFLEDQRSRKEVLGLMGY

SEQ ID NO: 14929 - protein, 200 aa, Sphingopyxis bauzanensis
  REGION 1..200: note = tr|A0A246JZY5|A0A246JZY5_9SPHN GTP cyclohydrolase 1; OS = Sphingopyxis bauzanensis OX=651663 GN=folE PE=3 SV=1
MSDSKVELGVDGKVVVPDHVADAVRTLIEWAGDDPEREGLLDTPKRVARAWKEYCSGYADDPAIHLARTFEEVGGYDELVLLKDIPFQSHCEHHMAPITGKASIAYMPRDRVVGISKLARVLNGYARRLQVQERLTAEVARCIWDNLHPHGVAVVIDAQHGCMTGRGVRTPGVGMVTSRLLGCFLDDQRSRKEVLSLMGY

SEQ ID NO: 14930 - protein, 199 aa, unidentified
  source 1..199: note = Sphingopyxis flava
  REGION 1..199: note = tr|A0A1T5BSZ7|A0A1T5BSZ7_9SPHN GTP cyclohydrolase 1; OS = Sphingopyxis flava OX=1507287 GN=folE PE=3 SV=1
MIEDVELGEDGKIAVPDHVAEAVRTLIEWAGDDPTREGLFDTPKRVARAWKEYCQGYGEDPSAHLSRTFQEVGGYDEIVLLRDIPFQSHCEHHMAPITGKASIAYLPKDRVVGISKLARVLNGFAKRLQVQERLTAEVAQCIWENLHPQGVAVVIEAQHGCMTGRGVRTPGVGMVTSRLLGCFLDDERSRKEVLSLMGY

SEQ ID NO: 14931 - protein, 211 aa, unidentified
  source 1..211: note = Sphingopyxis fribergensis
  REGION 1..211: note = tr|A0A0A7PPL2|A0A0A7PPL2_9SPHN GTP cyclohydrolase 1; OS = Sphingopyxis fribergensis OX=1515612 GN=folE PE=3 SV=1
MRQDGNSESGAMSDSKTELGPDGKVVVPDHVADAVRTLIEWAGDDPAREGLLDTPRRVARAWKEYCSGYGEDPALHLSRTFQEVGGYDEIVLLRDIPFQSHCEHHMAPITGKASIAYLPRDRVVGISKLARVLNGFARRLQVQERLTAEVARCIWDNLHPHGVAVVIDAQHGCMTGRGVRTPGVGMVTSRLLGCFLDDERSRKEVLSLMGY

SEQ ID NO: 14932 - protein, 220 aa, Sphingopyxis granuli
  REGION 1..220: note = tr|A0A0X8QZW2|A0A0X8QZW2_9SPHN GTP cyclohydrolase 1; OS = Sphingopyxis granuli OX=267128 GN=folE PE=3 SV=1
MEMYDPDPEPVAMAAGESPCGTQAPPSRAAVEAAVRTLIAAAGDDPAREGLADTPARVARAYREWFAGYRVDPHRLLDRSFGDAAGYDETVLLRSIPLVSTCEHHLAPIVGVAHVAYRPRGRVVGISKLSRLVDAYARRLQLQERLTRQIAGAIDEALQPRGVAVIIEATHGCMTTRGVRQHGVSLVTKCWLGEFGADAALRRELLASLPCRGNGGRMDG

SEQ ID NO: 14933 - protein, 198 aa, Sphingopyxis granuli
  REGION 1..198: note = tr|A0A120LU37|A0A120LU37_9SPHN GTP cyclohydrolase 1; OS = Sphingopyxis granuli OX=267128 GN=folE2 PE=3 SV=1
MTEVELGPDGKILVPGPVQDAIRTLIEWAGDDPSREGLLDTPKRVARAWKEYCQGYAEDPGLHLSRTFEEVGGYDEIVLLRDIPFQSHCEHHMAPITGKASIAYLPKDRVVGISKLARVLNGYARRLQVQERLTAEVARCIWDHLQPHGVAVVIDAQHGCMTGRGVRTPGVGMVTSRLLGCFLDDERSRKEVLSLMGY

SEQ ID NO: 14934 - protein, 210 aa, unidentified
  source 1..210: note = Sphingopyxis indica
  REGION 1..210: note = tr|A0A239FK93|A0A239FK93_9SPHN GTP cyclohydrolase 1; OS = Sphingopyxis indica OX=436663 GN=folE PE=3 SV=1
MTQAKGTPGDGDLVDDRYDADGKLVVPAHVADAVRTLIEWAGDDPAREGLRDTPKRVARAWKEYCQGYSEDPSVHLSRTFEEVGGYDEIVLLRDIPFQSHCEHHMAPITGKASIAYLPRDRVVGISKLARVLNGYARRLQVQERLTAEVARCIWDNLQPQGVAVVIDAQHGCMTGRGVRTPGVGMVTSRLLGCFLDDERSRKEVLSLMGY

SEQ ID NO: 14935 - protein, 217 aa, unidentified
  source 1..217: note = Sphingopyxis lindanitolerans
  REGION 1..217: note = tr|A0A2S8B5N2|A0A2S8B5N2_9SPHN GTP cyclohydrolase 1; OS = Sphingopyxis lindanitolerans OX=2054227 GN=folE PE=3; SV = 1
MDLLQTPTPPDADNTDDTAPIDTAAPRPGRAAVEAAVRTLIAAAGDDPAREGLRDTPARVARAYGEWFSGYAIDPKAYLNRVFDEAEGYEDTVLLRDIPLVSTCEHHMAPITGRVHVAYRPRGRVVGISKLSRLVDAFGRRLQLQERLTQQIATTLFSVLKPSGVAVIVEARHGCMTTRGVNQPHVAMVTKAWLGDFREDAELRRDLLAAIPFGLDR

SEQ ID NO: 14936 - protein, 198 aa, unidentified
  source 1..198: note = Sphingopyxis lindanitolerans
  REGION 1..198: note = tr|A0A2S8B2L2|A0A2S8B2L2_9SPHN GTP cyclohydrolase 1; OS = Sphingopyxis lindanitolerans OX=2054227 GN=folE PE=3; SV = 1
MTKVELGADGKPVVPGPVLDAVRTLIEWAGDDPAREGLVDTPRRVARAWLEYCQGYEDDPAVHLSRTFEEVGGYDEIVLLRDIPFQSHCEHHMAPITGKASIAYLPRDRVVGISKLARVLNGFARRLQVQERLTAEVAKCIWDNLHPQGVAVVIDAQHGCMTGRGVRTPGVGMVTSRLLGCFLDDERSRKEVLSLMGY

SEQ ID NO: 14937 - protein, 198 aa, Sphingopyxis macrogoltabida
  REGION 1..198: note = tr|A0A0N7GSN4|A0A0N7GSN4_SPHMC GTP cyclohydrolase 1; OS = Sphingopyxis macrogoltabida OX=33050 GN=folE PE=3 SV=1
MTKVELGPDGKPVVPEEVLGAVRTLIEWAGDDPSREGLLDTPRRVARAWLEYCQGYADDPAIHLSRTFEEVGGYDEIVMLRDIPFQSHCEHHMAPITGKASIAYLPRDRVVGISKLARVLNGYARRLQVQERLTAEVAKCIWDNLQPHGVAVVIDAQHGCMTGRGVRTPGVGMVTSRLLGSFLDDERSRKEVLALMGY

SEQ ID NO: 14938 - protein, 198 aa, Sphingopyxis macrogoltabida
  REGION 1..198: note = tr|A0A0P0DV95|A0A0P0DV95_SPHMC GTP cyclohydrolase 1; OS = Sphingopyxis macrogoltabida OX=33050 GN=folE PE=3 SV=1
MTKVELGPDGKPVVPEEVLGAVRTLIEWAGDDPSREGLLDTPKRVARAWLEYCQGYADDPAIHLSRTFEEVGGYDEIVMLRDIPFQSHCEHHMAPITGKASIAYLPKDRVVGISKLARVLNGYARRLQVQERLTAEVAKCIWDNLQPHGVAVVIDAQHGCMTGRGVRTPGVGMVTSRLLGSFLDDERSRKEVLALMGY

SEQ ID NO: 14939 - protein, 218 aa, Sphingopyxis sp.
  REGION 1..218: note = tr|A0A270B9B6|A0A270B9B6_9SPHN GTP cyclohydrolase 1; OS = Sphingopyxis sp. GW247-27LB OX=2012632 GN=folE PE=3 SV=1
MEMYDLAPEPAPTETDGAFEEKCPRPGQAEIEAAVRTLIAAAGDDPAREGLAETPARVARAYREWFAGYRIDPRHLLSRTFGEAAGYDETILLRSIPLVSTCEHHLAPIVGVAHVAYRPRDRVVGISKLSRLVDAYARRLQLQERLTRQIAHALDEALQPRGVAVIIEAGHACMSTRGVRQHGVSLVTKCWLGEFGEDAELRRELLGSLPRRSVGGEG

SEQ ID NO: 14940 - protein, 200 aa, Sphingopyxis sp.
  REGION 1..200: note = tr|A0A0W1DPE4|A0A0W1DPE4_9SPHN GTP cyclohydrolase 1; OS = Sphingopyxis sp. H050 OX=1759072 GN=folE PE=3 SV=1
MLYVPPSIEARNDGEIPAEVLASVATLLRWVGEDPEREGLVDTPRRVARAWREYCLGYDEDPAIHLARTFEEVGGYDEVVLLRDIPFQSHCEHHMAPITGKASIAYLPKDRVVGISKLARVLNGYARRLQVQERLTAEVAQCIWDNLQPHGVAVVIDAQHGCMTGRGVRSHGVGMVTSRLLGCFLNDQRSRKEVLSLMGY

SEQ ID NO: 14941 - protein, 215 aa, Sphingopyxis terrae
  REGION 1..215: note = tr|A0A142VVY3|A0A142VVY3_9SPHN GTP cyclohydrolase 1; OS = Sphingopyxis terrae subsp. terrae NBRC 15098 OX=1219058; GN = folE PE=3 SV=1
MDLVTANELTENKPHTENLGYLAASDRPSRAAIEAAVRTLIAAAGDNPYREGLIETPARVARAYEEWFSGYQIDPAQHLLRVFDESNDYEDTVLLKAIPFTSTCEHHMAPIIGHAHVAYRPSGKVVGISKLSRLVDGFARRLQLQERLTQQIAQTLNDILEPRGVAVVLEASHGCMTSRGVNQRGVAMVTKAWLGDFADDAELRRELLMSIASGC

SEQ ID NO: 14942 - protein, 210 aa, Sphingopyxis terrae
  REGION 1..210: note = tr|A0A1Y6EUN7|A0A1Y6EUN7_9SPHN GTP cyclohydrolase 1; OS = Sphingopyxis terrae subsp. ummariensis OX=429001; GN = folE PE=3 SV=1
MNFVARTPFLDTPDGPPVSEDGKLPVPADVTRAIETLIRWVGDDPAREGLLDTPKRVARAWKEYCSGYGEDPAVHLSRTFEEVGGYDEIVLLRDIPFQSHCEHHMAPITGKASIAYLPRERVVGISKLARVLNGYARRLQVQERLTAEVAKCIWDNLHPQGVAVVIDAQHGCMTGRGVRTPGVGMVTSRVLGCFLEDQRSRKEVLSLMGY

SEQ ID NO: 14943 - protein, 213 aa, Sphingopyxis witflariensis
  REGION 1..213: note = tr|A0A246JD91|A0A246JD91_9SPHN GTP cyclohydrolase 1; OS = Sphingopyxis witflariensis OX=173675 GN=folE PE=3 SV=1
MEFQTGVEMREPDSKEELSDAATTLRPGRAAVETAVRTLIAAAGDNPMREGLVETPARVARAYAEWFAGYRVDPAAYLRRVFEEAEGYQETVLLRSIPLVSTCEHHMAPIVGRAHVAYRPSGKVVGISKLSRLVDAFARRLQLQERLTQQIAQTLFDTLEPRGVAVVIEASHGCMTSRGVNQPGVSMVTQAWLGDFASDAELRRDFLSSIMGV

SEQ ID NO: 14944 - protein, 198 aa, Sphingopyxis witflariensis
  REGION 1..198: note = tr|A0A246K4B2|A0A246K4B2_9SPHN GTP cyclohydrolase 1; OS = Sphingopyxis witflariensis OX=173675 GN=folE PE=3 SV=1
MSEVEVGPDGKIIVPDHVLDAVRTLIEWTGDDVAREGLLDTPRRVARAWKEYCQGYAEDPSVYLSRTFEEVGGYDEIVLLRDIPFQSHCEHHMAPITGKASIAYLPRDRVVGISKLARVLNGYARRLQVQERLTAEVAKCIWDNLQPHGVAVVIDAQHGCMTGRGVRTPGVGMVTSRLLGCFLDDQRSRKEVLSLMGY

SEQ ID NO: 14945 - protein, 206 aa, unidentified
  source 1..206: note = Sphingorhabdus contaminans
  REGION 1..206: note = tr|A0A553WKY4|A0A553WKY4_9SPHN GTP cyclohydrolase 1; OS = Sphingorhabdus contaminans OX=1343899 GN=folE PE=3 SV=1
MVFPIAHIHYHDEIDGNGKVIVPEDVQDAIRTLIRWSGDDPSREGLLDTPARVGRAWREYCAGYAEDPAAHLSRTFQEVGGYHELVLLKDIPFQSHCEHHMAPIIGKASIAYMPTDRVVGISKLARVLHGFAQRLQVQERLTAEVANCIWDNLKPEGVAVVIEAQHGCMTGRGVKVHGVGMVTSKLIGCFLDDQSSRKEVMSLMGY

SEQ ID NO: 14946 - protein, 206 aa, unidentified
  source 1..206: note = Sphingorhabdus marina
  REGION 1..206: note = tr|A0A1N6FC64|A0A1N6FC64_9SPHN GTP cyclohydrolase 1; OS = Sphingorhabdus marina DSM 22363 OX=1123272 GN=folE PE=3; SV = 1
MADYSDSIEDALAAREAAKLPVPDEVQEAVKTLLRWSGEDPDREGLLDTPKRVARAWKEYCEGYNENPAIHLARTFEEVGGYDELVLLKDIPFHSHCEHHMAPIIGKASIAYMPTDRVVGISKLARVLHGFARRLQVQERLTAEVAQCIWDNLKPHGVAVVVEASHSCMTARGVRTPGVGMTTSRLLGCFLEDARSRKEVMSLMGY

SEQ ID NO: 14947 - protein, 199 aa, unidentified
  source 1..199: note = Sphingorhabdus sp.
  REGION 1..199: note = tr|A0A2D3RIU6|A0A2D3RIU6_9SPHN GTP cyclohydrolase 1; OS = Sphingorhabdus sp. YGSMI21 OX=2077182 GN=folE PE=3 SV=1
MEDALAEREAQKIPVPEEVQEAVRTLLRWSGEDPEREGLIDTPKRVARAWKEYCEGYAENPAMHLARTFEEVGGYDELVLLKDIPFHSHCEHHMAPIIGKASIAYMPTDKVVGISKLARVLHGFARRLQVQERLTAEVAECIWENLKPDGVAVVIEASHSCMTARGVRTPGVSMTTSRLLGCFLEDARSREEVMSLMGY

SEQ ID NO: 14948 - protein, 206 aa, unidentified
  source 1..206: note = Sphingorhabdus sp.
  REGION 1..206: note = tr|A0A220W4G3|A0A220W4G3_9SPHN GTP cyclohydrolase 1; OS = Sphingorhabdus sp. SMR4y OX=2584094 GN=folE PE=3 SV=1
MADHSLSIEDALAEREAQKIPVPDEVQEAVRTLLRWSGEDPEREGLVDTPKRVARAWKEYCEGYAENPAMHLARTFEEVGGYDELVLLKDIPFHSHCEHHMAPIIGKASIAYMPTDKVVGISKLARVLHGFARRLQVQERLTAEVAECIWENLKPQGVAVVIEASHSCMTARGVRTPGVSMTTSRLLGCFLDDARSREEVMSLMGY

SEQ ID NO: 14949 - protein, 211 aa, unidentified
  source 1..211: note = Sphingorhabdus wooponensis
  REGION 1..211: note = tr|A0A426RRW3|A0A426RRW3_9SPHN GTP cyclohydrolase 1; OS = Sphingorhabdus wooponensis OX=940136 GN=folE PE=3 SV=1
MTKHEKVFPIAHIHYEDEIGENGKIVVPDDVQDAIRTLIRWSGDNPEREGLLDTPARVGRAWREYCAGYAEDPAAHLSRTFQEVGGYHELVLLKDIPFQSHCEHHMAPIIGKASIAYMPTDKVVGISKLARVLHGFAQRLQVQERLTAEVANCIWENLKPEGVAVVIEAQHGCMTGRGVKVHGVGMVTSKLIGCFLDDQSSRKEVMSLMGY

SEQ ID NO: 14950 - protein, 206 aa, unidentified
  source 1..206: note = Sphingosinicella ginsenosidimutans
  REGION 1..206: note = tr|A0A5C6TVL1|A0A5C6TVL1_9SPHN GTP cyclohydrolase 1; OS = Sphingosinicella ginsenosidimutans OX=1176539 GN=folE; PE = 3 SV=1
MAEQADASDDGDLVDEPGKVHVPDDVQEAIRTLIRWAGDDPEREGLRDTPKRVARAWREYARGYGEDPAHHLRRTFEEVGGYDEIVLLKDIPFQSHCEHHLAPIIGKAAIAYLPGDKVVGISKLARVLHGFARRLQVQERLTAQVADCIWDNLQPQGVAVVIEASHACMTARGVKTPGVMMTTSRMMGVFRDDERSRREVLALMGY

SEQ ID NO: 14951 - protein, 195 aa, Sphingosinicella microcystinivorans
  REGION 1..195: note = tr|A0A495RDW1|A0A495RDW1_SPHMI GTP cyclohydrolase 1; OS = Sphingosinicella microcystinivorans OX=335406 GN=folE; PE = 3 SV=1
MTASNDRDNGIPEDVLASVRRLIEWAGDDPAREGLADTPGRVARAYREYFRGYDEDPARHLSRTFEEVGGYDEIVLLRDIAFQSHCEHHMAPIIGKAHIAYLPGDRVVGISKLARVLKGFASRLQVQERLTAEVADCIWEHLQPRGVAVVIEAAHACMSARGVNTPGVTMTTSRMMGVFREDERSRKEVLSLMGL

SEQ ID NO: 14952 - protein, 205 aa, Sphingosinicella sp.
  REGION 1..205: note = tr|A0A2P7QP64|A0A2P7QP64_9SPHN GTP cyclohydrolase 1; OS = Sphingosinicella sp. GL-C-18 OX=2116704 GN=folE PE=3; SV = 1
MANGDNLSDGDLVRPAPKIEVPADVQEAVRTLIRWAGDDPAREGLLDTPLRVARAWKEYAKGYDEDPAYHLSRTFDEVGGYDEIVLLKDIPFQSHCEHHMAPIIGKASIAYLPNERVVGISKLARVLHGFARRLQVQERLTAQVADCVWEHLKPQGVAVVIEASHACMTARGVNTPGVMMTTSRMMGVFRQDERSRREVLALMGY

SEQ ID NO: 14953 - protein, 203 aa, Sphingosinicella sp.
  REGION 1..203: note = tr|A0A2U2J5P2|A0A2U2J5P2_9SPHN GTP cyclohydrolase 1; OS = Sphingosinicella sp. QZX222 OX=2068657 GN=folE PE=3 SV=1
MTSTPEDGDLYRSPKKIAVPQEVREAVRTLIRWAGDDPDREGLLDTPVRVARAWKEYAQGYAEDPAHHLSRTFEEVGGYDEIVLLKDIPFQSHCEHHLAPIIGKASIAYLPKDRVVGISKLARVLHGYARRLQVQERLTAEVADCIWGHLEPQGVAVVIEASHACMTARGVRTPGVMMTTSRMMGVFREDERSRREVLALMGY

SEQ ID NO: 14954 - protein, 187 aa, unidentified
  source 1..187: note = Spiribacter aquaticus
  REGION 1..187: note = tr|A0A557RM13|A0A557RM13_9GAMM GTP cyclohydrolase 1; OS = Spiribacter aquaticus OX=1935996 GN=folE PE=3 SV=1
MNPDLDHHFEQIITGLGEDPSRGGLEKTPYRAARAMEYLTQGYHQSLDELVNDAMFESDNDEMVIVRDIEFYSLCEHHVLPFFGHAQVGYIPDGRVIGLSKIARVVDMYARRLQIQENLAREVAEAIQQVTQARGVAVQMDAQHMCMMMRGVSKQNAEMSSSVMLGTFRESVSARNEFLQLIRRRPA

SEQ ID NO: 14955 - protein, 188 aa, unidentified
  source 1..188: note = Spiribacter curvatus
  REGION 1..188: note = tr|U5T5C5|U5T5C5_9GAMM GTP cyclohydrolase 1; OS = Spiribacter curvatus OX=1335757 GN=folE PE=3 SV=1
MMNPDLDHHFEQIITGLGEDTRRGGLEKTPYRAARAMEYLTQGYHQSLDELVNGAMFESDNDEMVIVRDVEFYSLCEHHVLPFFGHAQVGYIPDGRVIGLSKIARIVDMYARRLQIQENLAREVAEAIQHVTQARGVAVQMDAQHMCMMMRGVSKQNAEMSSSVMLGTFRESVSARNEFLQLIRRRPA

SEQ ID NO: 14956 - protein, 156 aa, unidentified
  source 1..156: note = Spiribacter salinus
  REGION 1..156: note = tr|A0A540VMZ6|A0A540VMZ6_9GAMM GTP cyclohydrolase 1 (Fragment) OS=Spiribacter salinus OX=1335746; GN = FKY71_15385 PE=3 SV=1
MDRFEQRRSAACLLLVAAEPLRHSRGGLNETPDRVAKAWEFWTSGYQQHPADVLKAFEDGADGYDEMVAVVGIPFYSKCEHHLADIFGTATVAYVPDGRIVGLSKLSRLVDVFARRLQVQERLTVQVADALDEHLAPLGVGVTISARHLCMESRGL

SEQ ID NO: 14957 - protein, 184 aa, unidentified
  source 1..184: note = Spiribacter salinus
  REGION 1..184: note = tr|A0A540VUJ6|A0A540VUJ6_9GAMM GTP cyclohydrolase 1; OS = Spiribacter salinus OX=1335746 GN=folE PE=3 SV=1
MNPDLDHHFEEIIRGIGEDVTREGLAKTPYRAARAIEYLTQGYQQSLDDLVNDALFESDSDEMVIVRDIEFYSLCEHHVLPFIGRAQVGYIPNGKVIGLSKIARIIDMYARRLQIQEKLTRDVAEAIQEATGALGVAVQMDAKHLCMMMRGVNKQNSEMSSSVMLGAFRDSQSTRNEFLQLIRR

SEQ ID NO: 14958 - protein, 184 aa, unidentified
  source 1..184: note = Spiribacter sp.
  REGION 1..184: note = tr|A0A2U2N1R4|A0A2U2N1R4_9GAMM GTP cyclohydrolase 1; OS = Spiribacter sp. E85 OX=2182432 GN=folE PE=3 SV=1
MDHDLDYHFEQIIRGIGEDVGREGLVKTPERAARAFEYLTQGYQQSLSELVNGALFESDSDEMVIVRDIEFYSLCEHHMLPFIGRAQVGYIPNGRVLGLSKIARIVDMYARRLQIQEKLTRDVAEAVLEVTGAKGVAVQMDARHLCMMMRGVNKQNSEMSTSVMLGSFRTSQSTRNEFLQLIRR

SEQ ID NO: 14959 - protein, 200 aa, unidentified
  source 1..200: note = Spirobacillus cienkowskii
  REGION 1..200: note = tr|A0A369KQE4|A0A369KQE4_9PROT GTP cyclohydrolase 1; OS = Spirobacillus cienkowskii OX=495820 GN=folE PE=3 SV=1
MTANATSKKAVDSNNVSAQQATEAVRTLLHYIGENPNREGLTDTPDRFCRALLEMSNGYQLTAKSILSTTFDSDSDEMVLLKNIEFTSLCEHHLLSFSGVAHVAYLPSNGKIVGLSKLARVVDLYAHRLQVQERLTQQVAQAIEHYLKPLGVAVVFEGVHSCMCVRGVRKQNSTMITSAMLGQFRDSLASRNEFMSLISK

SEQ ID NO: 14960 - protein, 261 aa, unidentified
  source 1..261: note = Spirobacillus cienkowskii
  REGION 1..261: note = tr|A0A369KS57|A0A369KS57_9PROT GTP cyclohydrolase FolE2 OS=Spirobacillus cienkowskii OX=495820 GN=folE2 PE=3; SV = 1
MQDTQDSKDDRMIKIAKVGIKNVKHPIFYCDHPLQKQNFPSVASFSFFVELPADKKGTHMSRFPSVLYEFAPHFTLQRFQEFALAINQKLESKVSYLEANFPYFYEKYAPVSHSKGLADVQIDLKITGFAQTNSVDTELSITIPVKSLCPCSKAISDYGAHSQRSYLNITVWNPQLSIHNYIEIAESSASAAVYPILKRIDEKFITEQAYNNPRFVEDLVREAAIKLKEKNSATRFTVSAENFESIHNHNAWAFVDSESIV

SEQ ID NO: 14961 - protein, 257 aa, unidentified
  source 1..257: note = Spirochaeta lutea
  REGION 1..257: note = tr|A0A098R0M3|A0A098R0M3_9SPIO GTP cyclohydrolase FolE2 OS=Spirochaeta lutea OX=1480694 GN=folE2 PE=3 SV=1
MQDVQSQPDGRNIPLQKVGVKNIKYPIVVLDKVNKTQATTATVDLYANLPHHFKGTHMSRFIEVFHDHSKNVKMENFIHMLHSIRSVLDAEQAYGRIAFPYFIEKKAPVSGQASMMQYHCTYEGTAGPVDHEFYVGIEVPVLTLCPCSKEISDRGAHNQRSMVKVLLKMGSFFWIEEIITLIENSASCGLFTLLKREDEKWVTEHSYDNPTFVEDLVREVTVKIEGLNKFPWFSVEAENMESIHLHDAYAYVERGVK

SEQ ID NO: 14962 - protein, 186 aa, Spirochaeta perfilievii
  REGION 1..186: note = tr|A0A5C1Q7K8|A0A5C1Q7K8_9SPIO GTP cyclohydrolase 1; OS = Spirochaeta perfilievii OX=252967 GN=folE PE=3 SV=1
MDKEKIERAVRDILEAIGEDPKREGLLDTPRRVANMYEEIFSAINKDPSDDLQVFFEQAGHEELVLVKDIPFYSCCEHHLVPFFGKAHIGYIPRNGKITGLSKLARVVDTVAKKPQLQERLTTEIVEALEKQLNPLGVIVVVEAEHMCMTMRGIKKPGSRTITSGVRGAFQSDAKVRAEALQLIKF

SEQ ID NO: 14963 - protein, 188 aa, Spirochaeta sp.
  REGION 1..188: note = tr|A0A1W9NAE6|A0A1W9NAE6_9SPIO GTP cyclohydrolase 1; OS = Spirochaeta sp. LUC14_002_19_P3 OX=1940821 GN=folE PE=3; SV = 1
MDEEKITRLIRELLIEIGEDPDREGLLRTPERVMDMWKFLSSGYRQDVKEIVNGAIFESEANNMILCRDIEVYSLCEHHLLPFFGTCTIGYIARHHVIGVSKLARIVDYFSRRLQLQERLTAQIARAVKDSVDAIGVGVIIEAKHMCMAMRGVEKQLSSMTTSSVLGCFQRDATCRSEFLHLAGRQNK

SEQ ID NO: 14964 - protein, 187 aa, Spirochaeta sp.
  REGION 1..187: note = tr|A0A3C0SWI6|A0A3C0SWI6_9SPIO GTP cyclohydrolase 1; OS = Spirochaeta sp. OX=28185 GN=folE PE=3 SV=1
MDQKKVESLIRELLIEIGEDPNREGLVKTPERAAKSWQFLTNGYTADFDKVINNAVFESTSNNMIIVRDIEVYSMCEHHMLPFFGKCHIGYVASDKILGVSKLARIVDHYARRLQIQENLTEQVAEAIMETVQPEGVGVVMECQHMCMMMRGVEKQNSVMTTSSVLGSFRKKEATRLEFLNLIHGAR

SEQ ID NO: 14965 - protein, 267 aa, Spirochaeta thermophila
  REGION 1..267: note = tr|E0RSF2|E0RSF2_SPITD GTP cyclohydrolase FolE2; OS = Spirochaeta thermophila (strain ATCC 49972 / DSM 6192 / RI 19.B1) OX=665571 GN=folE2 PE=3 SV=1
MVVDTQSAFDDRNIPIDKVGIKGLTYPVTVLDKRHRIQHTVATVNMFANLPHHFRGTHMSRFVEVFQAHYKNIQMKGFLSMLEDVRKALDAEAAFVDLSFPYFIEKEAPVSRQKSLLEYRCSYIGELNGEHRSFFVGIEVPINTVCPCSKEISRFGAHNQRGIVRLTVQLGPFFWIEDMIEEIEASASAGIYTLLKREDEKFITEHGYEHPRFVEDVAREVVLRVERFAAFPWFRVEVENMESIHNHNAYACIERGKRERSVWNSIV

SEQ ID NO: 14966 - protein, 266 aa, Spirochaeta thermophila
  REGION 1..266: note = tr|G0GCZ8|G0GCZ8_SPITZ GTP cyclohydrolase FolE2; OS = Spirochaeta thermophila (strain ATCC 700085 / DSM 6578 / Z-1203) OX=869211 GN=folE2 PE=3 SV=1
MVDTQSAFDDRNIPIDKVGIKGLTYPVTVLDKRHRIQHTVATVNMFANLPHHFRGTHMSRFVEVFQAHYKNIQMKGFLSMLEDVRKALDAEAAFVDLSFPYFIEKEAPVSRQKSLLEYRCSYIGELNGEHRSFFVGIEVPINTVCPCSKEISRFGAHNQRGMVRLTVQLGPFFWIEDMIEEIEASASAGIYTLLKREDEKFITEHGYEHPRFVEDVAREVVLRVERFAAFPWFRVEVENMESIHNHNAYACIERGKRERSVWNSIV

SEQ ID NO: 14967 - protein, 262 aa, unidentified
  source 1..262: note = Spirochaetaceae bacterium
  REGION 1..262: note = tr|A0A3C0WXF3|A0A3C0WXF3_9SPIO GTP cyclohydrolase FolE2 OS=Spirochaetaceae bacterium OX=1898206 GN=folE2; PE = 3 SV=1
MEDIQNSIDSRGIAIQHVGVSEAHLPFQIRTKEGDFQQVLARICFTVSLPQEYKGTHMSRFLEILNRWSMRPIAEPEMEAILDEAMQRLSAASANIEIRFKYFIKKVAPVSGKSSFLDLDCCFYGSKQRDKGFVFELGVNVPFTSLCPCSKSISRYGAHNQRGMMRARVRFQEGCTCIYIEDLAELMEQQASCPIYSLLKREDEKYVTEHAYENPKFVEDILRDLVIAFRDLPHLEWFSVVCENYESIHNHNAYASYEECIQ

SEQ ID NO: 14968 - protein, 186 aa, unidentified
  source 1..186: note = Spirochaetaceae bacterium
  REGION 1..186: note = tr|A0A1W9V450|A0A1W9V450_9SPIO GTP cyclohydrolase 1; OS = Spirochaetaceae bacterium 4572_59 OX=1971727 GN=folE; PE = 3 SV=1
MNKERVAQLINELLLEMGEDPDREGLVKTPERVAEAYSFLTSGYSMDLKEVVNGAVFESEANNMILCKDIEVYSLCEHHILPFFGTCHIGYIAKNKVIGVSKMARIVNYYARRLQIQERLTSQIAHTIREEVGAEGVGVVMECRHMCMMMRGVQKQNSAMVTSSVLGSFHSSAATREEFMSLIGRR

SEQ ID NO: 14969 - protein, 262 aa, unidentified
  source 1..262: note = Spirochaetae bacterium
  REGION 1..262: note = tr|A0A2N1TFI6|A0A2N1TFI6_9SPIR GTP cyclohydrolase FolE2 OS=Spirochaetae bacterium HGW-Spirochaetae-1; OX = 2013832 GN=folE2 PE=3 SV=1
MGKKDLRDIQSEPDYRNLAINRVGVKDISYPVVVLDRAEGEQHTVARVNMYVNLPHHFRGTHMSRFIEILNTYRKGISTLNIREILEAMKDQLDAETAHFEIEFPYFITKEAPVSRERAKMEYTCRLTANSDNDYYLLEVKVPVLSLCPCSKEISQYGAHNQRSILSVSIKARERIWIEDIVNVAEQSASSDVFSILKREDEKYITEKAYENPVFVEDIVRNAAEHLKKIEGILWFSVESENMESIHNHSAYAQIEMDLGGK

SEQ ID NO: 14970 - protein, 255 aa, unidentified
  source 1..255: note = Spirochaetae bacterium
  REGION 1..255: note = tr|A0A2N1R034|A0A2N1R034_9SPIR GTP cyclohydrolase FolE2 OS=Spirochaetae bacterium HGW-Spirochaetae-9; OX = 2013841 GN=folE2 PE=3 SV=1
MVDVQSMKDERRIPIQKVGVKGVRYPITLRDKAAQFQHTTAVVNLYADLPHDFKGTHMSRFIEVFEESRSDLSMPSFLGMLQKIRLELEAETAYSEIHFPYFIQKKAPVSGQSSMMSYDCSYEGKVSDAGHSFIVGVTVPIQTVCPCSKAISSQGAHNQRGLVTLKVALGPFFWIEDLVAIVEDSASSDLFTLLKREDEKYITERSYDRPRFVEDLVREVYLRVEALGKFPRFSVEAENFESIHNHSAYAFVEKA

SEQ ID NO: 14971 - protein, 188 aa, unidentified
  source 1..188: note = Spirochaetales bacterium
  REGION 1..188: note = tr|A0A2D6LA66|A0A2D6LA66_9SPIR GTP cyclohydrolase 1; OS = Spirochaetales bacterium OX=2026792 GN=folE PE=3 SV=1
MDKKRVATLIRELIMEIGENPDREGLLKTPERVALAWEFLTKGYRDKPDDIINGAVFNSEANNMIIARDIEVYSLCEHHMLPFYGRCHIGYIANSEVLGLSKIARIVNHYARRLQIQERLTADIANEMRRAVNAEGVGVVMECKHLCMMMRGVEKQHSFMTTSSVLGSFHGDQSTRLEFLNLIGRDTL

SEQ ID NO: 14972 - protein, 266 aa, unidentified
  source 1..266: note = Spirochaetales bacterium
  REGION 1..266: note = tr|A0A524IIP6|A0A524IIP6_9SPIR GTP cyclohydrolase FolE2 OS=Spirochaetales bacterium OX=2026792 GN=folE2 PE=3; SV = 1
MLCMVDVQSRKDNRKIQINKVGVKGLHYPIVVLDKQNKFQHTIADISLFADLAHNLKGTHMSRFIQIFNRYSADFSMENFLEMLKKIKNTLHAQNSFGEVSFPYFIEKEAPVSKEKSKMNYVCEYIGEVREEKTLFYIGIQVPVTTVCPCSKDISARGAHNQRGIVRVKLCLDKFFWIEDIISLIEKSASSELFTLLKREDEKYITERAFDNPRFVEDLVRDVTQRIEKMGQFPWFSVEAENFESIHNHSAYAYVERGNKNYELAE

SEQ ID NO: 14973 - protein, 263 aa, unidentified
  source 1..263: note = Spirochaetes bacterium
  REGION 1..263: note = tr|A0A522D3V6|A0A522D3V6_9SPIR GTP cyclohydrolase FolE2 OS=Spirochaetes bacterium OX=2202144 GN=folE2 PE=3; SV = 1
MPRRKLRDIQSEAPGIRDLPINKVGVKDISYPVVVLDRAEGRQHTVARVNMYVDLPHHFRGTHMSRFIEILNRYREGISTLNIREILDEMKSQLKARNAHFEIEFPYFITKGAPISGEKAKMEYACRLSANSYDDFYTLAVRVPVLSLCPCSKEISEFGAHNQRSIMTITVQARERIWIEEIVDLAEKSASSDIYSILKREDEKYLTEKSYENPMFVEDMVRSAAAKLAGLDKILWFSAESENMESIHNHSAYAQIEMDHRRS

SEQ ID NO: 14974 - protein, 297 aa, unidentified
  source 1..297: note = Spirochaetes bacterium
  REGION 1..297: note = tr|A0A1V5TBZ2|A0A1V5TBZ2_9SPIR GTP cyclohydrolase FolE2 OS=Spirochaetes bacterium ADurb.Bin269 OX=1852911; GN = folE2 PE=3 SV=1
MLDIQNEPDTREVPLQKVGIKGLQYPILVLDRDHKRQHTTAQANLFVNLPQHFKGTHMSRFIEVFHRHRDNLSMPHFLDMLAEIRESLEASSAFGELTFPYFMEKKAPVSRESALMSYECGYEGSVTADSTAFFVSVAVPVQTVCPCSKAISAYGAHNQRGIVRVKLELGPFFWIEDLVDLIEGCASSAVWTLLKREDEKYVTEAAYDNPKFVEDLVRDVILAVPRLGAYPWYSVEAENFESIHNHSAFAYAEGGTRSGSSPATQSPGCVSPGCVSPGCDSPAHPAPCRLPTENNPT

SEQ ID NO: 14975 - protein, 184 aa, unidentified
  source 1..184: note = Spirochaetia bacterium
  REGION 1..184: note = tr|A0A3D3AJN3|A0A3D3AJN3_9SPIR GTP cyclohydrolase 1; OS = Spirochaetia bacterium OX=2053615 GN=folE PE=3 SV=1
MSLEENVFQILKGLGEDPEREGLLKTPHRVAKALQFLTQGYTKNLDEIVNNAVFNNSYESEMIIVKDIELYSICEHHMLPFFGKCHVGYLPDKKIIGLSKIPRIVDLFSQRLQIQERLTTQIAETIEKILNPLGVAVVIEASHLCARMRGVQKQNSEMVTSCVKGAFRKNASTREEFLKLIGKK

SEQ ID NO: 14976 - protein, 179 aa, unidentified
  source 1..179: note = Spirochaetia bacterium
  REGION 1..179: note = tr|A0A352VAR7|A0A352VAR7_9SPIR GTP cyclohydrolase 1; OS = Spirochaetia bacterium OX=2053615 GN=folE PE=3 SV=1
MKDLIEKLIIDIGDNPNREGLLKTPHRVEKAIKFLTKGYHDNIEEIVNNAIFKAEDNEMIIIKDIEFYSLCEHHMLPFYGKCHIAYIPDKTIMGLSKFARITDHFSRKLQIQERLTTQITEYIDKTLNPMGVGVVIEAMHLCMMMRGVQKQNSYTVTSSLRGIFKSNSRTRNEFLSLIK

SEQ ID NO: 14977 - protein, 185 aa, unidentified
  source 1..185: note = Unknown
  REGION 1..185: note = tr|A0A421KAA2|A0A421KAA2_9SPIR GTP cyclohydrolase 1; OS = spirochete symbiont of Stewartia floridana OX=1968597; GN = folE PE=3 SV=1
MDKNRVTQLTRELLLEIGENPDREGLRCTPDRVAETWKFLTSGYRSNLNSLVNGAIFETEANNMIICRDIEIYSLCEHHLLPFFGTCTIGYIAKRHVMGLSKLARVADHFSRRLQLQERLTAQIAEAVMDRLDATGVGVVINAKHMCMTMRGVEKQNSTMTTSSVLGCFQSDPRSRNEFLTLANG

SEQ ID NO: 14978 - protein, 119 aa, Spiroplasma poulsonii
  REGION 1..119: note = tr|A0A2P6FFD4|A0A2P6FFD4_9MOLU Putative GTP cyclohydrolase 1 type 2 OS=Spiroplasma poulsonii OX=2138; GN = SMSRO_SF020620 PE=4 SV=1
MLIKKLYQEIETNFPLKTTAKWDYSGFQWEFKHNEITQVFVSLDLTTEVIDEAIAQKANVIITHHPFCFNKKKVWAQIKYKQEILKRLKEHQISVYAVHTNYDGLIDFLHYLLKNCKYL

SEQ ID NO: 14979 - protein, 268 aa, unidentified
  source 1..268: note = Spirosoma endophyticum
  REGION 1..268: note = tr|A0A1I2A2E3|A0A1I2A2E3_9BACT GTP cyclohydrolase 1; OS = Spirosoma endophyticum OX=662367 GN=folE PE=3 SV=1
MKLNGISSNTPSNGHSSTDAQHDGRATNGVSHNGSSVDGHSVACDCLTDELVDEIGDAHGTSSIDTPMRPDAFNLDDDFKIDLIEEHFREIMNILGLDLTDDSLKGSPRRVAKMYVNEIFSGLNPANKPTPTLFDNKFRYKEMLVEKDIIVQTYCEHHFVPIIGKSHVAYISSGKVIGLSKLNRVVEYFSKRPQVQERLTIQIAEELKRVLETDDVAVIIDAKHLCVSTRGVRDINSSTITSSYGGKFEEEATRQEFLRYVAQPSITI

SEQ ID NO: 14980 - protein, 257 aa, unidentified
  source 1..257: note = Spirosoma fluviale
  REGION 1..257: note = tr|A0A286F7H5|A0A286F7H5_9BACT GTP cyclohydrolase 1; OS = Spirosoma fluviale OX=1597977 GN=folE PE=3 SV=1
MKLNGTSSNTPSNSTSSNGQPVHGSHKNGYSLDGAYADELVDEIGDAHGASSIDTPMRPDAFALDDELKIDLIEEHFREIMSILGLDLTDDSLKGSPRRVAKMYINEVFSGLNPANKPKATLFDNKFRYNEMLVEKDITVQTYCEHHFVPIMGKAHVAYISSGKVIGLSKLNRIVEYFSKRPQVQERLTIQIAEELKRVLETEDVAVIIDAKHLCVSTRGIHDVNSSTITASYSGKFSEDATKQELLRYVTQPSVSI

SEQ ID NO: 14981 - protein, 241 aa, Spirosoma linguale
  REGION 1..241: note = tr|D2QJ43|D2QJ43_SPILD GTP cyclohydrolase 1; OS = Spirosoma linguale (strain ATCC 33905 / DSM 74 / LMG 10896) OX=504472 GN=folE PE=3 SV=1
MNGQPVNGNHKNGYALDGDYTDELVDEIGDAHGATSIDTPMRPDAFVLDDALKIDLIEEHFREIMTILGLDLTDDSLKGSPRRVAKMYVNEVFSGLNPANKPKSTLFDNKFRYNEMLVEKDITVQTYCEHHFVPILGKAHVAYISSGKVIGLSKLNRIVEYFSKRPQVQERLTVQIAEELKRVLETEDVAVIIDAKHLCVSTRGVHDVNSSTITSSYGGKFSEEATKQELLRFVTQPSVSI

SEQ ID NO: 14982 - protein, 253 aa, unidentified
  source 1..253: note = Spirosoma montaniterrae
  REGION 1..253: note = tr|A0A1P9WXD3|A0A1P9WXD3_9BACT GTP cyclohydrolase 1; OS = Spirosoma montaniterrae OX=1178516 GN=folE PE=3 SV=1
MKLNGISSNTPLNGNHLNGKHNGHTLNGHSHDVDQLIDAIGDEHGAASIDTPMRPDAFDLDDDTKIDLIEEHFREIMGILGLDLTDDSLKGSPRRVAKMYVKEIFRGLNPENKPAPTLFDNKFRYNEMLVEKDILVQTYCEHHFVPIIGKAHVAYISSGKVIGLSKLNRIVEYFSKRPQVQERLTVQIADELKKVLETEDVAVIVDAKHLCVSTRGVHDVNSSTITAAYGGKFEDEATRQEFLRYISCSNVTI

SEQ ID NO: 14983 - protein, 247 aa, unidentified
  source 1..247: note = Spirosoma oryzae
  REGION 1..247: note = tr|A0A2T0SM62|A0A2T0SM62_9BACT GTP cyclohydrolase 1; OS = Spirosoma oryzae OX=1469603 GN=folE PE=3 SV=1
MKPNGTSSNTPRNGVHRDGLYRDAPDYNGQPADQLLADEIGDVHGAAALDTPMRPDAFALDDDTKIDLIEEHFREIMNILGLDLTDDSLKGSPRRVAKMYVKEIFRGLNPDNKPAPTLFDNKFRYNEMLVEKDITVQTYCEHHFVPILGKAHVAYISSGKVIGLSKLNRIVEYYCKRPQVQERLTMQIADELKRVLETDDVAVLIDAKHLCVSTRGVQDINSSTITSSYSGKFADDATRQELLRYIG

SEQ ID NO: 14984 - protein, 252 aa, unidentified
  source 1..252: note = Spirosoma pollinicola
  REGION 1..252: note = tr|A0A2K8YSZ8|A0A2K8YSZ8_9BACT GTP cyclohydrolase 1; OS = Spirosoma pollinicola OX=2057025 GN=folE PE=3 SV=1
MKLNGTSSNTPSNGQAVNGHPANPVGMPAWEVDELVDEIGDAHGAASVDTPMRADAFAMDDDLKIDLIEEHFREIMTIMGLDLTDDSLKGSPRRVAKMYINEIFSGLNPANKPKPTLFDNKFGYDEMLVEKDITVQTYCEHHFVPILGKAHVAYISSGKVIGLSKLNRVVEYFSKRPQVQERLTIQIADELKRVLETEDVAVIIDAKHLCVSTRGIRDINSSTVTSSYSGKFAEDATKQELLRYVSQPSVTI

SEQ ID NO: 14985 - protein, 262 aa, unidentified
  source 1..262: note = Spirosoma radiotolerans
  REGION 1..262: note = tr|A0A0E3ZWB2|A0A0E3ZWB2_9BACT GTP cyclohydrolase 1; OS = Spirosoma radiotolerans OX=1379870 GN=folE PE=3 SV=1
MKLNGTSSNTPSTSQPTTGGQQNGHALDSHRTDSTGLSAWEVDELVDEIGDAHGASSIDTPMRPDAFAIDDDLKIDLIEEHFREIMGILGLDLTDDSLKGSPRRVAKMYVNEIFSGLNPANKPKPTLFDNKFRYNEMLVEKDITVQTYCEHHFVPIIGKAHVAYISSGKVIGLSKLNRVVEYFGKRPQVQERLTVQIAEELKRVLETDDVAVIIDAKHLCVSTRGVHDINSSTVTASYGGKFADEATKQELLRYIAQPSVTI

SEQ ID NO: 14986 - protein, 262 aa, Spirosoma sp.
  REGION 1..262: note = tr|A0A4Q2UKW2|A0A4Q2UKW2_9BACT GTP cyclohydrolase 1; OS = Spirosoma sp. TY50 OX=2502893 GN=folE PE=3 SV=1
MKRNGTSSSTPLNGQAMNGVSLNGNPMNGKHMNGNGLNGHHHDELIDEIGDEHGAASIDTPMRPDAFDLDDDTKIDLIEEHFREIMSILGLDLTDDSLKGSPRRVAKMYVKEIFRGLDPANKPAPTLFENKFRYNEMLVEKDILVQTYCEHHFVPIIGKAHVAYISSGKVIGLSKLNRIVEYYSKRPQVQERLTVQIADELKKVLETEDVAVIIDAKHLCVSTRGVHDVNSSTITAAYGGKFDEEATRQELLRYIGTSNVTI

SEQ ID NO: 14987 - protein, 244 aa, Spirosoma sp.
  REGION 1..244: note = tr|A0A514ZWZ7|A0A514ZWZ7_9BACT GTP cyclohydrolase 1; OS = Spirosoma sp. KCTC 42546 OX=2520506 GN=folE PE=3 SV=1
MKLNGTSSNTPSNGHALNGHGHHSDELVDELGDDHGTSSIDTPMRDDAFALDDDLKMELIEEHFREIMNILGLDLTDDSLKGSPRRVAKMYVKEIFSGLNPANKPKSTLFDNKFQYNEMLVEKDITVQTYCEHHFVPIIGKAHVAYISSGKVIGLSKLNRIVEYFCKRPQVQERLTIQIADELKRVLETEDVAVIIDAKHLCVSTRGVRDLNSTTITSSYSGKFEQEATRQELLRYVAQPSVGL

SEQ ID NO: 14988 - protein, 181 aa, Spongiibacter sp.
  REGION 1..181: note = tr|A0A2E9SIK7|A0A2E9SIK7_9GAMM GTP cyclohydrolase 1; OS = Spongiibacter sp. OX=2024860 GN=folE PE=3 SV=1
  VARIANT 181: note = Xaa can be any naturally occurring amino acid
MEKAFAKIIEEIGEDLSRDGLVDTPKRAAKAFEFITRGYRQSVDEVVNNALFESDANEMVVVSDIELYSLCEHHLLPFIGKCHVAYIPNGKVLGLSKVARIVDLYARRLQIQEGLTTQIANTVQDVTGAEGVAVIIEARHMCMMMRGVEKQNSVMRTSAMLGVFKENQATRAEFMALINKX

SEQ ID NO: 14989 - protein, 217 aa, Spongiibacter sp.
  REGION 1..217: note = tr|A0A2E9SRC9|A0A2E9SRC9_9GAMM GTP cyclohydrolase 1; OS = Spongiibacter sp. OX=2024860 GN=folE PE=3 SV=1
  VARIANT 2: note = Xaa can be any naturally occurring amino acid
  VARIANT 34: note = Xaa can be any naturally occurring amino acid
MXSKEATAVHEALLKAGLETPMRPQSALSNDQKXQRISDLMLGVMETLGLDLSDDSLEETPHRIAKMYVDEIFCGLDYSNFPKITNIDNKMRVEEMVKVSGVSVTSTCEHHFVTIDGEATVAYIPRDKVIGLSKINRIVRFFAQRPQVQERLTQQVLVALQTLLETDDVAVTVDAIHYCVKSRGVMDTNSRTQTTALGGSFKTDPSTRNEFLSQSCR

SEQ ID NO: 14990 - protein, 233 aa, unidentified
  source 1..233: note = Spongiibacteraceae bacterium
  REGION 1..233: note = tr|A0A2E2K0F3|A0A2E2K0F3_9GAMM GTP cyclohydrolase 1; OS = Spongiibacteraceae bacterium OX=2026793 GN=folE PE=3; SV = 1
MTVALKAAESFSHQDAHTNGPEFSEAAEQVRHALIEAGLETPQVENHLSRDQKYARIRSAMTEVVEALGLDLRDDSLAETPHRIAKMYVDEIFSGLDYGSFPKITAIDNKMQVDEMVRVSDISLTSTCEHHFITIDGTASIAYIPAQKVIGLSKINRLVRFFAQRPQVQERLTRQILVALQTLLGTDDVAVSISAAHYCVKARGVMDSTSTTQTTALGGAFRSDAKTRAEFLR

SEQ ID NO: 14991 - protein, 180 aa, unidentified
  source 1..180: note = Spongiibacteraceae bacterium
  REGION 1..180: note = tr|A0A2E7IQL9|A0A2E7IQL9_9GAMM GTP cyclohydrolase 1; OS = Spongiibacteraceae bacterium OX=2026793 GN=folE PE=3; SV = 1
MEKAFTDIIKAVGENPEREGLLDTPKRATKAFQFLTEGYRRSVDDIVNNALFESDCNEMVIVSDIEMYSLCEHHLLPFIGKCHVAYIPSGKVLGLSKVARIVDLFARRLQIQEQLTTQIAKTVQEVTSAAGVGVIIEAKHMCMMMRGVEKQNSVMRTSAMLGEFQNNQATRQEFLSLISR

SEQ ID NO: 14992 - protein, 188 aa, Sporobacter termitidis
  REGION 1..188: note = tr|A0A1M5UVI9|A0A1M5UVI9_9FIRM GTP cyclohydrolase 1; OS = Sporobacter termitidis DSM 10068 OX=1123282 GN=folE; PE = 3 SV=1
MDKVRIEKAVREILLAIGEDPEREGLVDTPRRIANMYEEIFSGLGEAPEKHLEIFFQKERYEELVLVKDIPFYSTCEHHLVPFVGKAHVAYIPKNGKLTGLSKLARVVETVSRRPQLQERLTATVADTIFNALEPYGVIVVVEAEHMCMTMRGVKKPGAMTVTSAIRGIFATDQKARAEVMSMINSGK

SEQ ID NO: 14993 - protein, 219 aa, Sporocytophaga myxococcoides
  REGION 1..219: note = tr|A0A098LHY5|A0A098LHY5_9BACT GTP cyclohydrolase 1; OS = Sporocytophaga myxococcoides OX=153721 GN=folE PE=3 SV=1
MNAITEISDIGEEHIGTSIDTPLRKDAFEMDDEVKIELIQKHFREIIFLLGLDLRDDSLNGTPHRVAKMYVKEVFSGLNPANKPRIKLFDNKYQYNEMLIEKNITLYSYCEHHFVPIIGKVHVAYISKGKVIGLSKINRLVQYYAKRPQVQERLTNQIAEGLKEALQSEDVAVIVDAVHLCVSSRGVQDISSNTITANYSGAFQEAKKKEEFLGLLGKL

SEQ ID NO: 14994 - protein, 230 aa, Sporocytophaga myxococcoides
  REGION 1..230: note = tr|A0A098LDP8|A0A098LDP8_9BACT GTP cyclohydrolase 1; OS = Sporocytophaga myxococcoides OX=153721 GN=folE PE=3 SV=1
MKQKGTLLNTQLIKDLTIEEIGDDHVPGSYETPLRSDAFEMSDEVKMQLIENHFREIMTIMGMDLNDDSLKGTPKRVAKMFIKEVFSGLNPENRPKIKLFDNKFKYNEMLVEKDITFYSYCEHHFVPIIGKAHVAYISSGKVIGLSKINRIVQYYSKRPQVQERLTVQIANDLKETLETEDVAVIMDASHLCVASRGVSDTSSRTVTAHYSGKFKLEAVKAEFLNHTKQV

SEQ ID NO: 14995 - protein, 187 aa, Sporolactobacillus inulinus
  REGION 1..187: note = tr|A0A0U1QLG7|A0A0U1QLG7_9BACL GTP cyclohydrolase 1; OS = Sporolactobacillus inulinus CASD OX=1069536 GN=folE; PE = 3 SV=1
MNVDHEKIEKAVRMILEAIGEQPDREGLIETPKRVARMYEEIFQGIRQDPREYLSKTFHEAHEELVLVKDIPFYSMCEHHLVPFFGKAHVGYIPRGGRVTGLSKLARAVEAVAKRPQLQERLTSEVANSIVETLRPYGVIVVIEAEHMCMTMRGVKKPGAKTITSAVRGIFQRDLNARAEAMSLINH

SEQ ID NO: 14996 - protein, 187 aa, Sporolactobacillus inulinus; identical to SEQ ID NO: 14995
  REGION 1..187: note = tr|A0A4Y3T3W1|A0A4Y3T3W1_9BACL GTP cyclohydrolase 1; OS = Sporolactobacillus inulinus OX=2078 GN=folE PE=3 SV=1

SEQ ID NO: 14997 - protein, 187 aa, Sporolactobacillus laevolacticus
  REGION 1..187: note = tr|V6IWR9|V6IWR9_9BACL GTP cyclohydrolase 1; OS = Sporolactobacillus laevolacticus DSM 442 OX=1395513; GN = folE PE=3 SV=1
MNVDHEKIEKAVRMILEAIGENPDRNGLLETPQRVARMYEEIFQGMRQDPKAYLSKTFDEAHEELVLVKDIPFYSMCEHHLVPFFGKAHVGYIPRGGRVTGLSKLARAVEAVAKRPQLQERLTTEVADSIVETLRPYGVIVVVEAEHMCMTMRGVKKPGAKTITSAVRGVFQKDSTARAEAMSLINH

SEQ ID NO: 14998 - protein, 187 aa, unidentified
  source 1..187: note = Sporolactobacillus nakayamae
  REGION 1..187: note = tr|A0A1I2MXS7|A0A1I2MXS7_9BACL GTP cyclohydrolase 1; OS = Sporolactobacillus nakayamae OX=269670 GN=folE PE=3 SV=1
MNVDHEKIEKAVRMILEAIGEDPDREGLLETPQRVARMYEEIFQGMQQDPKEYLSKIFNEAHEELVLVKDIPFYSMCEHHLVPFFGKAHVGYIPRGGRVTGLSKLARAVEVVAKRPQLQERLTTEVADSIVETLKPYGVIVVVEAEHMCMTMRGVKKPGSRTITSAVRGVFQKDSTARAEAMSLINH

SEQ ID NO: 14999 - protein, 187 aa, unidentified
  source 1..187: note = Sporolactobacillus shoreae
  REGION 1..187: note = tr|A0A4Z0GPZ2|A0A4Z0GPZ2_9BACL GTP cyclohydrolase 1; OS = Sporolactobacillus shoreae OX=1465501 GN=folE PE=3 SV=1
MSVDHEKIERAVRMILEAIGEDPDRKGLEETPQRVARMYDEIFQGMNQDPKTFLAKTFDEAHEELVLVKDIPFYSMCEHHLVPFFGKAHVGYIPKGGRVTGLSKLARAVEAVARRPQLQERLTTTVANSIVETLHPYGVIVVIEAEHMCMTMRGIKKPGARTITSAVRGIFQTDATARAEALSLINH

SEQ ID NO: 15000 - protein, 211 aa, Sporolactobacillus sp.
  REGION 1..211: note = tr|A0A4Q4IE92|A0A4Q4IE92_9BACL GTP cyclohydrolase 1; OS = Sporolactobacillus sp. THM19-2 OX=2511171 GN=folE PE=3; SV = 1
MDNKERTLMIKTFPETFENPLELNKKLDQGNHIMDAVKDLINLCGDNPHRDGMQETPYRVLKAFLEYTEGYREDPKLHLKKTFDVEHQGLVLVKDIDFYSMCEHHLAPFFGVAHVGYIPNKKITGLSKIARMVEGYAKRFQVQERLTTQITEAIEEILEPKGTMVVIEARHMCVCGRGIKKSNSSTTTSSVRGVFADKQSARDEFLSLLHK

SEQ ID NO: 15001 - protein, 188 aa, Sporolactobacillus sp.
  REGION 1..188: note = tr|A0A4Q4JHL8|A0A4Q4JHL8_9BACL GTP cyclohydrolase 1; OS = Sporolactobacillus sp. THM7-7 OX=2511172 GN=folE PE=3; SV = 1
MLSVDQKKIEKAVRLILEAIGEDPDREGLLETPERVARMYDEIFQGMHQDPKSYLSKTFDEAHEELVLVKDIPFYSMCEHHLVPFFGKAHVGYIPRGGRVTGLSKLARAVEAVAKRPQLQERLTTTVADSIVETLRPYGVIVVVEAEHMCMTMRGVKKPGTKTITSAVRGIFRTDATARAEAMSLINR

SEQ ID NO: 15002 - protein, 187 aa, Sporolactobacillus terrae
  REGION 1..187: note = tr|A0A410D989|A0A410D989_9BACL GTP cyclohydrolase 1; OS = Sporolactobacillus terrae OX=269673 GN=folE PE=3 SV=1
MNVDHEKIEKAVRMILEAIGEQPDREGLIETPKRVARMYEEIFQGMRQDPREYLSKTFHEAHEELVLVKDIPFYSMCEHHLVPFFGKAHVGYIPRGGRVTGLSKLARAVEAVAKRPQLQERLTSEVANSIVETLRPYGVIVVIEAEHMCMTMRGVKKPGAKTITSAVRGIFQKDLNARAEAMSLINH

SEQ ID NO: 15003 - protein, 266 aa, Sporolituus thermophilus
  REGION 1..266: note = tr|A0A1G7I683|A0A1G7I683_9FIRM GTP cyclohydrolase FolE2 OS=Sporolituus thermophilus DSM 23256 OX=1123285; GN = folE2 PE=3 SV=1
MKDVQNAADMRGIAIQKVGVSDVDLPFLIKTKNGSFQSVLAKIKLTVDLPKEYKGTHMSRFIEVLNEWSQKPVSYREMEYILGDIMHRLDAQRADIDINFKYFLEKRAPISGLKSYLDCDCLFSGTLLRGAHLKFVLGLAVPFTSLCPCSKEISQYGAHNQRGLMKVKIKHRPGHFIWIEDLAALMEEQGSCPVYPLLKREDEKYVTERAYENPKFVEDVLRDLVLALRRLKGVEWFEVECENYESIHNHNAYAAHREFVSEITSN

SEQ ID NO: 15004 - protein, 276 aa, Sporomusa acidovorans
  REGION 1..276: note = tr|A0A259UA81|A0A259UA81_9FIRM GTP cyclohydrolase FolE2 OS=Sporomusa acidovorans DSM 3132 OX=1123286; GN = folE2 PE=3 SV=1
MMRQTTQGRSSNSSIKDVQNSCDERGIAIQKVGVSDVHLPFLIKTKSGSFQSVLAKIKLTVDLPQEFKGTHMSRFIEILSDWSQKPVSYREIGNMLTDTIVRLHAKRAHIDIHFKYFVEKEAPVSGLKSMLDYDCTFSASLARGEQLDFVLGIIVPFTSLCPCSKEISQYGAHNQRGIMRVKIKQVHGKFIWIEDLAKMLEERGSCQVYPLLKREDEKYVTEKAYENPKFVEDVLRDLVLMLRKLDGIQWFEVECENYESIHNHSAYATHIENVDK

SEQ ID NO: 15005 - protein, 272 aa, Sporomusa malonica
  REGION 1..272: note = tr|A0A1W2E981|A0A1W2E981_9FIRM GTP cyclohydrolase FolE2 OS=Sporomusa malonica OX=112901 GN=folE2 PE=3 SV=1
MTQTTQGRNSIKDVQNSCDERGIAIQKVGVSDVHLPFLIKTKSGSFQTVLAKIKLTVDLPQEFKGTHMSRFIEILSDWSQKPVSYREVEYMLTDTIDRLHAQRAHIDIDFKYFIEKTAPVSGFKSMLDYDCMFSASLVRGEHLDFMFGITVPFTSLCPCSKEISQYGAHNQRGIMRVKIKHQPGGFIWIEDLAELMEQQGSCQVYPLLKRADEKYVTEKAYENPKFVEDVLRDLVLTLRQIDSVQWFEVECENYESIHNHSAYASHIETIAR

SEQ ID NO: 15006 - protein, 275 aa, Sporomusa silvacetica
  REGION 1..275: note = tr|A0A259UKH9|A0A259UKH9_9FIRM GTP cyclohydrolase FolE2 OS=Sporomusa silvacetica DSM 10669 OX=1123289; GN = folE2 PE=3 SV=1
MRQTTQGCSTNSTIKDVQNSCDERGIAIQKVGVSDVHLPFLIKTKSGSFQSVLAKIKLTVDLPQEFKGTHMSRFIEILSDWSQKPVSCREIGYMLTDTIDRLQAQRAHIDINFKYFIEKMAPVSGLKSMLDYDCVFSANLVRGEHLDFMFGITVPFTSLCPCSKEISLYGAHNQRGIMRVKIKQHPGKFIWIEDLAEMMEEQGSCQVYPLLKRGDEKYVTEKAYENPKFVEDVLRDLVLTLRKIDGVQWFEIECENYESIHNHSAYAAHNECVES

SEQ ID NO: 15007 - protein, 275 aa, Sporomusa sp.
  REGION 1..275: note = tr|A0A0U1KWH6|A0A0U1KWH6_9FIRM GTP cyclohydrolase FolE2 OS=Sporomusa sp. An4 OX=411922 GN=folE2 PE=3 SV=1
MRQTTQGRSTNSTIKDVQNSCDERGIAIQKVGVSDVHLPFLIKTKSGSFQSVLAKIKLTVDLPQEFKGTHMSRFIEILSDWSQKPVSYREIEYMLTDTIDRLQAKRAHIDINFKYFIEKMAPVSGFKSMLDYDCVFSGNLVRGGHLDLLFGITVPFTSLCPCSKEISQYGAHNQRGIMKAKIKQQPGKFIWIEDLAALMEEQGSCQVYPLLKRGDEKYVTEKAYENPKFVEDVLRDLVLTLRKIDGIEWFEIECENYESIHNHSAYATHIECVES

SEQ ID NO: 15008 - protein, 275 aa, Sporomusa sp.
  REGION 1..275: note = tr|A0A562GP05|A0A562GP05_9FIRM GTP cyclohydrolase FolE2 OS=Sporomusa sp. KB1 OX=943346 GN=folE2 PE=3 SV=1
MRQTTQGRSTNSTIKDVQNSCDERGIAIQKVGVSDVHLPFLIKTKSGSFQSVLAKIKLTVDLPQEFKGTHMSRFIEILSDWSQKPVSYREIEYMLTDTIDRLQAKRAHIDINFKYFIEKMAPVSGFKSMLDYDCVFSGNLVRGEHLDLMFGITVPFTSLCPCSKEISQYGAHNQRGIMKAKIKQQPGKFIWIEDLAEMMEEQGSCQVYPLLKRGDEKYVTEKAYENPKFVEDVLRDLVLTLRKIDGIEWFEIECENYESIHNHSAYAAHIECVES

SEQ ID NO: 15009 - protein, 272 aa, Sporomusa sphaeroides
  REGION 1..272: note = tr|A0A1U7MKJ7|A0A1U7MKJ7_9FIRM GTP cyclohydrolase FolE2 OS=Sporomusa sphaeroides DSM 2875 OX=1337886; GN = folE2 PE=3 SV=1
MKQTTQGKSGIKDVQNSCDERGIAIQKVGVSDVHLPFLIKTKSGSFQSVLAKIKLAVDLPQEFKGTHMSRFIEILSDWSQKPVSYREVEYMLTDTIDRLHAMRAHIDIHFKYFIEKAAPVSGLKSMLDYDCVFSAELVRGEQLDFMFGITVPFTSLCPCSKEISHYGAHNQRGTMRAKIKQLPGKFIWIEDLAAMMEEQGSCQVYALLKREDEKYVTEKAYENPKFVEDVLRDLVLTLRKIDGVEWFEVECENYESIHNHSAYAAHVECVEQ

SEQ ID NO: 15010 - protein, 272 aa, Sporomusa termitida
  REGION 1..272: note = tr|A0A517DSM6|A0A517DSM6_9FIRM GTP cyclohydrolase FolE2 OS=Sporomusa termitida OX=2377 GN=folE2 PE=3 SV=1
MKQTAQGRNSIKDVQNSCDERGIAIQKVGVSDVHLPFLIKTKGGSFQTVLAKIKLTVDLPQEFKGTHMSRFIEILSDWSQKPVSYKEIEYMLTDTIDRLQAQRAHIDIHFKYFIEKTAPVSGFKSMLDYDCMFSGSLARCDHLDFMFGITVPFTSLCPCSKEISQYGAHNQRGIMRVKIKHQHGRFIWIEDLASLMEQQGSCQVYPLLKRADEKYVTEKAYENPKFVEDVLRDLVLALRQIDSVQWFEVECENYESIHNHSAYAAHTETVSR

SEQ ID NO: 15011 - protein, 262 aa, unidentified
  source 1..262: note = Sporomusaceae bacterium
  REGION 1..262: note = tr|A0A402BQ36|A0A402BQ36_9FIRM GTP cyclohydrolase FolE2 OS=Sporomusaceae bacterium OX=1917525 GN=folE2 PE=3; SV = 1
MKDVQNAVDERGIAIQKVGVSDVHLPFFIKTKNGSLQSVLANIKLTVDLPKEYKGTHMSRFIEILSEWSQKPVSSREMEQILTDTLTRLDAKSAFLKIKFKYFIEKTAPVSGLKSMLDLDCSFSAKLTQGYPLDFIMGVNIPFTSLCPCSKEISQYGAHNQRGLMRVKLKHEPNKFIWIEDLAKLMEAQGSCPVFPLLKREDEKYVTELAYENPKFVEDILRDLVLALRDLDDVKWFEIECENYESIHNHSAYASHVEFVER

SEQ ID NO: 15012 - protein, 188 aa, unidentified
  source 1..188: note = Sporomusaceae bacterium
  REGION 1..188: note = tr|A0A3C0UD33|A0A3C0UD33_9FIRM GTP cyclohydrolase 1; OS = Sporomusaceae bacterium OX=1917525 GN=folE PE=3 SV=1
MIMVDEQKARQAIALLLEAIGEDAAREGLEDTPKRVGHMYAELFSGLDKDAEKELECFYSKEYYGLILVKDIFFHSMCEHHLLPFFGKAHVAYIPQEGMITGLGKLASTVEIFARRPQIQERLTAQIADVIEKKLKPAGVMVVIEAEHLCMSMRGVKKPGSITTTLAVRGTYSDDLAARAEVLAIIKR

SEQ ID NO: 15013 - protein, 188 aa, Sporosarcina globispora; identical to SEQ ID NO: 5014
  REGION 1..188: note = tr|A0A0M0GBK5|A0A0M0GBK5_SPOGL GTP cyclohydrolase 1; OS = Sporosarcina globispora OX=1459 GN=folE PE=3 SV=1

SEQ ID NO: 15014 - protein, 187 aa, Sporosarcina luteola
  REGION 1..187: note = tr|A0A511ZBA2|A0A511ZBA2_9BACL GTP cyclohydrolase 1; OS = Sporosarcina luteola OX=582850 GN=folE PE=3 SV=1
MTEVDLSKIEKAVSMILEAVGEDPEREGLLDTPKRVAKMYAEVFEGLNKDPRQYFETVFHENHDEVVLVKDIPFHSMCEHHLVPFFGHAHIAYIPRNGVVAGLSKLARAVETTAKRPQLQERITSTVANAMMDMLNPIGVYVIIEAEHMCMTMRGIKKPGAKTVTTVARGIYEHDDVKRAEILSLLK

SEQ ID NO: 15015 - protein, 189 aa, Sporosarcina newyorkensis
  REGION 1..189: note = tr|A0A1T4XE77|A0A1T4XE77_9BACL GTP cyclohydrolase 1; OS = Sporosarcina newyorkensis OX=759851 GN=folE PE=3 SV=1
MNEQDLNKIKQAVTMILEAIGEDPSREGLLDTPKRVAKMYHEVFEGLNKDPKEYFEVVFHENHDEVVLVKDIPFYSMCEHHLVPFFGVAHVAYIPRDGVVAGLSKLARAVETTAKRPQLQERITSTVADAMMEMLNPIGVYVIIEAEHMCMTMRGIKKPGSKTITTVARGIYEHDDVKRAEILSLLKTN

SEQ ID NO: 15016 - protein, 189 aa, Sporosarcina newyorkensis
  REGION 1..189: note = tr|F9DNT1|F9DNT1_9BACL GTP cyclohydrolase 1; OS = Sporosarcina newyorkensis 2681 OX=1027292 GN=folE PE=3; SV = 1
MNEQDLNKIEQAVTMILEAIGEDPSREGLLDTPKRVAKMYHEVFEGLNKDPKEYFEVVFHENHDEVVLVKDIPFHSMCEHHLVPFFGVAHVAYIPRDGVVAGLSKLARAVETTAKRPQLQERITSTVADAMMEMLNPIGVYVIIEAEHMCMTMRGIKKPGSKTITTVARGIYEHDDVKRAEILSLLKTN

SEQ ID NO: 15017 - protein, 188 aa, Sporosarcina pasteurii
  REGION 1..188: note = tr|A0A380BLL1|A0A380BLL1_SPOPA GTP cyclohydrolase 1; OS = Sporosarcina pasteurii OX=1474 GN=folE PE=3 SV=1
MHEVDYMKMEQAVTMILEAIGEDPAREGLIDTPKRVAKMYAEVFEGLHEDPRQYFETVFHENHDEVVLVKDIPFHSMCEHHLVPFFGHAHIAYIPRDGVVAGLSKLARAVETTARRPQLQERITSTVANAIMDMLNPVGVYVVVEAEHMCMTMRGIRKPGAKTMTTVARGIYEHDDIKRSEILSLIKM

SEQ ID NO: 15018 - protein, 189 aa, Sporosarcina psychrophila
  REGION 1..189: note = tr|A0A127W4R5|A0A127W4R5_SPOPS GTP cyclohydrolase 1; OS = Sporosarcina psychrophila OX=1476 GN=folE PE=3 SV=1
MNVVDYEKIEKAVSMILEAVGEDPEREGLIDTPKRVAKMYAEVFEGLNKDPKDYFKTVFHENHDEVVLVKDIPFYSMCEHHLVPFFGNAHIAYIPRDGVVAGLSKLARAVETTAKRPQLQERITSTIAEAMMEMLNPIGVYVVIEAEHLCMTMRGIKKPGAKTVTTVARGIYEQDDVKRAEILSLIKMS

SEQ ID NO: 15019 - protein, 187 aa, Sporosarcina sp.
  REGION 1..187: note = tr|A0A3D8YZ81|A0A3D8YZ81_9BACL GTP cyclohydrolase 1; OS = Sporosarcina sp. BI001-red OX=2282866 GN=folE PE=3 SV=1
MEEVDFGKIEQAVTMILEAIGEDPEREGLLETPKRVAKMYAEVFEGLNHDPRMYFETVFHEQHEEVVLVKDIPFYSMCEHHLVPFFGVAHIAYIPRDGVVAGLSKLARAVETTAKRPQLQERITTTVADIMMEMLKPLGVYVIIEAEHMCMTMRGIKKPGSKTVTTAARGIYEHDDVKRSEILSLVK

SEQ ID NO: 15020 - protein, 189 aa, Sporosarcina sp.
  REGION 1..189: note = tr|A0A5B0DNF1|A0A5B0DNF1_9BACL GTP cyclohydrolase 1; OS = Sporosarcina sp. ANT_H38 OX=2597358 GN=folE PE=3 SV=1
MNVVDYEKIEKAVLMILEAVGEDPEREGLLDTPKRVAKMYAEVFEGLNKDPKDYFKTVFHENHDEVVLVKDIPFYSMCEHHLVPFFGNAHIAYIPRDGVVAGLSKLARAVETTARRPQLQERITSTIAEAMMEMLNPIGVYVVIEAEHMCMTMRGIKKPGAKTVTTVARGIYEQDDVKRAEILSLIKMS

SEQ ID NO: 15021 - protein, 212 aa, Stackebrandtia albiflava
  REGION 1..212: note = tr|A0A562V2R1|A0A562V2R1_9ACTN GTP cyclohydrolase 1; OS = Stackebrandtia albiflava OX=406432 GN=folE PE=3 SV=1
MDHEAARIVNGRLGGGPVEDRVDIPRIEAAVREILIGVGEDPDREGLRRTPARVARAYAELFAGLRVDPSEILTTSFAEEHEEMVVVRDIEVASFCEHHLLPFVGYAHIGYIPGEHGRITGLSKLARLVEAYARRPQVQERLTSQIADRLLETLEARGVIVVVECEHMCMSMRGIRKPGAKTLTSAVRGTLRDNAKSRAEAMSLIQMSRGDR

SEQ ID NO: 15022 - protein, 212 aa, Stackebrandtia albiflava
  REGION 1..212: note = tr|A0A562VE33|A0A562VE33_9ACTN GTP cyclohydrolase 1; OS = Stackebrandtia albiflava OX=406432 GN=folE PE=3 SV=1
MNVTTATTPTTAPPEATATHRRLIHEGPEIDLRGAEKAIADLLAALGRDPASPHLADTPRRVAQAYAELLTPREFDLTTFPNEEGYDELVIARDIPVHSLCEHHLLPFHGVAHVGYLPGERILGLSKLARVVEWFARDLQVQERLTKQVTDWLQRHLAPKGVGVVIEAEHMCMALRGVRAAGSRTATSALEGTLRDDPRSRQEFFTLAGIRH

SEQ ID NO: 15023 - protein, 217 aa, unidentified
  source 1..217: note = Stackebrandtia endophytica
  REGION 1..217: note = tr|A0A543AZC2|A0A543AZC2_9ACTN GTP cyclohydrolase 1; OS = Stackebrandtia endophytica OX=1496996 GN=folE PE=3 SV=1
MSESDSHLDLDHEAARIVNGRLGGGPVSDAVDLPRIEAAVREILIAVGEDPDREGLQRTPARVARAYAELFAGLRVDASKVLATDFAEEHDEMVVVRDIEVASFCEHHLLPFVGVAHIGYIPGEHGRITGLSKLARLVEAYARRPQVQERLTSQIADQLLNTLGARGVIVVVECEHMCMSMRGIRKPGAKTLTSAVRGTLRDNAKTRAEAINLIRMT

SEQ ID NO: 15024 - protein, 214 aa, Stackebrandtia nassauensis
  REGION 1..214: note = tr|D3Q843|D3Q843_STANL GTP cyclohydrolase 1; OS = Stackebrandtia nassauensis (strain DSM 44728 / NRRL B-16338 / NBRC 102104 / LLR-40K-21) OX=446470 GN=folE PE=3; SV = 1
MNEELDHEAARIVNGRLGGKSVDTQVDLKRIETAVREILYAIGEDPDREGLAKTPGRVARAYAELFAGLRVDPAQVLKTVFSEDHDELIVVRDIEVFSFCEHHLLPFTGVAHIGYIPGAHGRITGLSKLARLVEAYARRPQVQERLTSQIADQLHETLEANGVIVVVECEHMCMSMRGIRKPGARTLTSAVRGILRDNAKSRAEAMSLINVSNR

SEQ ID NO: 15025 - protein, 220 aa, Stackebrandtia nassauensis
  REGION 1..220: note = tr|D3Q8D1|D3Q8D1_STANL GTP cyclohydrolase 1; OS = Stackebrandtia nassauensis (strain DSM 44728 / NRRL B-16338 / NBRC 102104 / LLR-40K-21) OX=446470 GN=folE PE=3; SV = 1
MASPAPNPANLSSLSEMKVPHAIPAQRTLRVVHDREDVDLDAAHKAVTDLLVALGRNPMSEHLADTPRRVAEAYAEMLTPREFNLTTFPNDEGYDELVLARGIPVQSLCQHHLLPFHGVAHVGYLPGERILGLSKLARVVELFARDLQVQERLTKQVADWLRDHLAPKGVGVVIEAEHMCMALRGVRATGSRTLTSAMHGQLRDDARSRQEFFALTGTNG

SEQ ID NO: 15026 - protein, 205 aa, Stakelama pacifica
  REGION 1..205: note = tr|A0A4R6FU86|A0A4R6FU86_9SPHN GTP cyclohydrolase 1; OS = Stakelama pacifica OX=517720 GN=folE PE=3 SV=1
MNDLPSPDDGDLYDDDGKIAVPEEVAEAIRTLIRWSGDDPAREGLIDTPRRVARAWKEYCQGYTDDPAQHLARVFEEVGGYEDIVLLKDIPFQSHCEHHMAPIIGKAHIAYLPQDRVVGISKLARVLHAFARRLQVQERLTAEVADCIWQHLAPRGVAVVIDATHACMTARGVRTPGVTMTTSRMMGIFREDPRSRAEVLKLMGY

SEQ ID NO: 15027 - protein, 242 aa, unidentified
  source 1..242: note = Stanieria cyanosphaera
  REGION 1..242: note = tr|K9XXJ2|K9XXJ2_STAC7 GTP cyclohydrolase 1; OS = Stanieria cyanosphaera (strain ATCC 29371 / PCC 7437); OX = 111780 GN=folE PE=3 SV=1
MTTVSSNGSNRSKSININSSNNLHSSLIEQVSSRPDRNTHNGQQAQIHAASEQAQEKMMAAVRVMLESVGEDPEREGLLKTPKRVAEAMQFLTQGYNQSLEKIVNDAIFDEGHNEMVLVRDISFFSLCEHHMLPFMGRAHVAYIPNQKVVGLSKLARIVEMYARRLQVQERLTRQIAEAIQEVLEPQGVAVVMEATHMCMVMRGVEKPGSWTVTSAMLGAFQDEQKTRDEFLNLIRHQPSFM

SEQ ID NO: 15028 - protein, 242 aa, unidentified
  source 1..242: note = Stanieria sp.
  REGION 1..242: note = tr|A0A140K0Q6|A0A140K0Q6_9CYAN GTP cyclohydrolase 1; OS = Stanieria sp. NIES-3757 OX=1807358 GN=folE PE=3 SV=1
MTTASSNGSNRSKSVNISGSNSLHSSLVEQVTSRPDRNTHNGQQAQIHATSEQAKGQMMDAVRVMLESVGEDPEREGLLKTPKRVAEAMQFLTQGYNQSLEKIVNDAIFDEGHNEMVLVRDISFFSLCEHHMLPFMGRAHVAYIPNQKVVGLSKLARIVEMYARRLQVQERLTRQIAEAIQEVLEPQGVAVVMEATHMCMVMRGVEKPGSWTVTSAMLGVFQEEQKTRDEFLNLIRHQPSFM

SEQ ID NO: 15029 - protein, 292 aa, Staphylococcus agnetis
  REGION 1..292: note = tr|A0A2T4MQH9|A0A2T4MQH9_9STAP GTP cyclohydrolase FolE2 OS=Staphylococcus agnetis OX=985762 GN=folE2 PE=3; SV = 1
MTEFDLSTREGRWKHFGSVDPIQGTKPTTKAEMTDLQSTHKNFLFEIEEVGIKNLVYPVWIDQFQTAGNFSFSTSLNKDEKGINMSRILEAVEAEYDNGIRLEFDTLTQLLNRLKSHMKQHSAGVDVSGKWFFERKSPVTDIKAVGHADVTYGLAVRGDDITRKELTIEAAVTTLCPCSKEISEYSAHNQRGIITVKAYMNKTAKLSDDYKEIILDAMEANASSMLYPILKRPDEKRVTERAYENPRFVEDLIRLIAADLVELDWLEGFDIECRNEESIHQHDAFAKLKYRK

SEQ ID NO: 15030 - protein, 292 aa, Staphylococcus agnetis
  REGION 1..292: note = tr|A0A2T4MFU5|A0A2T4MFU5_9STAP GTP cyclohydrolase FolE2 OS=Staphylococcus agnetis OX=985762 GN=folE2 PE=3; SV = 1
MTEFDLSTREGRWKHFGSVDPIQGTKPTTKAEMTDLQSTHKNFLFEIEEVGIKNLVYPVWIDQFQTAGNFSFSTSLNKDEKGINMSRILEAVEAEYDNGIRLEFDTLTQLLNRLKSHMKQHSAGVDVSGKWFFERKSPVTDIKAVGHADVTYGLAVRGDEITRKELTIEAAVTTLCPCSKEISEYSAHNQRGIITVKAYMNKTAKLSDDYKEIILDAMEANASSMLYPILKRPDEKRVTERAYENPRFVEDLIRLIAADLVELDWLEGFDIECRNEESIHQHDAFAKLKYRK

SEQ ID NO: 15031 - protein, 292 aa, unidentified
  source 1..292: note = Staphylococcus argensis
  REGION 1..292: note = tr|A0A2K4FD39|A0A2K4FD39_9STAP GTP cyclohydrolase FolE2 OS=Staphylococcus argensis OX=1607738 GN=folE2 PE=3; SV = 1
MSEFDLSTREGRWKHFGSVDPIKGNKPTSKEKMTDLQSTNKDFLFEIEEVGIKNLIYPVNIDRFQTAGNFSFSTSLNQDEKGINMSRILESVEKHYNHGIELDFDALYQVLRILQESMNQSSAGVDVSGKWFYDRYSPQTDIKAVGHADVTYGLAIKDDNVTRKELTIEAAVTTLCPCSKEISEYSAHNQRGIVTVKAYIDKDAELSDDYKSVILDAMEANASSVLYPILKRPDEKRVTERAYENPRFVEDLIRLIAADLVELDWLEGFDIECRNEESIHQHDAFAKLKHRK

SEQ ID NO: 15032 - protein, 292 aa, unidentified
  source 1..292: note = Staphylococcus argenteus
  REGION 1..292: note = tr|A0A348B8Q8|A0A348B8Q8_9STAP GTP cyclohydrolase FolE2 OS=Staphylococcus argenteus OX=985002 GN=folE2 PE=3; SV = 1
MTEFDLSTREGRWKHFGSVDPIEGTKPTTKNEMTDLQSTHKDFLFEIEEVGIKNLVYPVLVDQYQTAGTFSFSTSLTKDEKGINMSRIIESVEKHYDNGIELEFNTLYQVLRTLQTNMKQNAAGVDVSGKWFFDRYSPTTNIKAVGNADVTYGLAIDGDQVTRKELTIEATVTTLCPCSKEISEYSAHNQRGVVTVKTYINKEQDIVDDYKNKILDAMEANASSILYPILKRPDEKRVTERAYENPRFVEDLIRLIAADLVEFDWLEGFDIECRNEESIHQHDAFAKLKYRK

SEQ ID NO: 15033 - protein, 292 aa, Staphylococcus arlettae
  REGION 1..292: note = tr|A0A2T7BTG7|A0A2T7BTG7_9STAP GTP cyclohydrolase FolE2 OS=Staphylococcus arlettae OX=29378 GN=folE2 PE=3; SV = 1
MTEFDLSTREGRWKHFGSVDPIEGTKPTIKEKMKDLQSTHKNFLFEIEEVGIKNLVYPVLIDRFQTAGTFSFSTSLKLDEKGINMSRILESVEKHYNNGIELDFTALYQVLQSLQKSMNQNDAGVDVSGKWFFDRISPVTNIKAVGHADVTYGLAIDKHSVTRKELTVEAAVTTLCPCSKEISEYSAHNQRGIVTVKAYMNKDKELIDDYKEKILDAMEANASSILYPILKRPDEKSVTERAYENPRFVEDLIRLIAADLVELDWIDGFDIECRNEESIHQHDAFAKLKYRK

SEQ ID NO: 15034 - protein, 292 aa, Staphylococcus aureus
  REGION 1..292: note = sp|Q2YS98|GCH4_STAAB GTP cyclohydrolase FolE2; OS = Staphylococcus aureus (strain bovine RF122 / ET3-1); OX = 273036 GN=folE2 PE=3 SV=1
MTEFDLSTREGRWKHFGSVDPIEGTKPTTKNEMTDLQSTHKDFLFEIEEVGIKNLVYPVLVDQYQTAGTFSFSTSLTKDEKGINMSRIIESVEKHYDNGIELEFNTLYQVLRTLQTNMKQNAAGVDVSGKWFFDRYSPTTNIKAVGNADVTYGLAIDGDKVTRKELTIEATVTTLCPCSKEISEYSAHNQRGVVTVKTYINKDQDIVDDYKNKILDAMEANASSILYPILKRPDEKRVTERAYENPRFVEDLIRLIAADLVEFDWLDGFDIECRNEESIHQHDAFAKLKYRK

SEQ ID NO: 15035 - protein, 292 aa, Staphylococcus aureus; identical to SEQ ID NO: 15034
  REGION 1..292: note = tr|A0A0D1FSK9|A0A0D1FSK9_STAAU GTP cyclohydrolase FolE2 OS=Staphylococcus aureus subsp. aureus OX=46170; GN = folE2 PE=3 SV=1

SEQ ID NO: 15036 - protein, 293 aa, Staphylococcus auricularis
  REGION 1..293: note = tr|A0A2K4BZX9|A0A2K4BZX9_9STAP GTP cyclohydrolase FolE2 OS=Staphylococcus auricularis OX=29379 GN=folE2 PE=3; SV = 1
MTEYDLSTREGRWKHFGSVDPIEGTKPTTKDKMADLQGTHKNYLFEIEEVGIKNLTYPVLIDGFQTAGDFSFSTSLNQDEKGINMSRILESVEKHYDNGIKLEFDSLYQVLRSLQERMNQNAAGVDVSGTWFYDRYSPKTNIKALGHADVTYGLAIEGETTTRKELTIQAAVTTLCPCSKEISEYSAHNQRGIVTVKTYLNKDVDLDENYKELILDAMEANASSILYPILKRPDEKSVTERAYENPRFVEDLIRLIAADLVEFDWLDSFDIECRNEESIHQHDAFAKLKYRKP

SEQ ID NO: 15037 - protein, 293 aa, Staphylococcus auricularis
  REGION 1..293: note = tr|A0A2T4M4E1|A0A2T4M4E1_9STAP GTP cyclohydrolase FolE2 OS=Staphylococcus auricularis OX=29379 GN=folE2 PE=3; SV = 1
MTEYDLSTREGRWKHFGSVDPIEGTKPTTKDKMADLQGTHKNYLFEIEEVGIKNLTYPVLIDGFQTAGDFSFSTSLNQDEKGINMSRILESVEKHYDNGIKLEFDSLYQVLRSLQERMNQNAAGVDVSGTWFYDRYSPKTNIKALGHADVTYGLAIEGETTTRKELTIQAAVTTLCPCSKEISEYSAHNQRGIVTVKTYLNKDVDLDENYKELILDAMEANASSILYPILKRPDEKSVTERAYENPRFVEDLIRLIAADLVEFDWLDGFDIECRNEESIHQHDAFAKLKYRKP

SEQ ID NO: 15038 - protein, 292 aa, Staphylococcus capitis
  REGION 1..292: note = tr|A0A0S4ME87|A0A0S4ME87_STACP GTP cyclohydrolase FolE2 OS=Staphylococcus capitis OX=29388 GN=folE PE=3 SV=1
MTEFDLSTREGRWKHFGSVDPIEGTKPTTKNEMTDLQSTHKNFLFEIEEVGIKNLTYPVLIDQYQTAGLFSFSTSLNKDEKGINMSRILESVEKHYNNGIELEFNTLYQVLRTLQEKMNQNAAGVDVSGKWFFDRFSPVTNIKAVGNADVTYGLAIDGEKVTRKELTIEATVTTLCPCSKEISEYSAHNQRGIVTVKTYLDKDAEVVDDYKDKILDAMEANASSILYPILKRPDEKRVTERAYENPRFVEDLIRLIAADLVEFDWIDGFDIECRNEESIHQHDAFARLKYRK

SEQ ID NO: 15039 - protein, 292 aa, Staphylococcus capitis
  REGION 1..292: note = tr|A0A4U9TMP0|A0A4U9TMP0_STACP GTP cyclohydrolase FolE2 OS=Staphylococcus capitis OX=29388 GN=folE2 PE=3 SV=1
MTEFDLSTREGRWKHFGSVDPIEGTKPTTKNEMTDLQNTHKNFLFEIEEVGIKNLTYPVLIDQYQTAGLFSFSTSLNKDEKGINMSRILESVEKHYNNGIELEFNTLYQVLRTLQEKMNQNAAGVDVSGKWFFDRFSPVTNIKAVGNADVTYGLAIDGEKVTRKELTIEATVTTLCPCSKEISEYSAHNQRGIVTVKTYLDKDAKVVDDYKDKILDAMEANASSILYPILKRPDEKRVTERAYENPRFVEDLIRLIAADLVEFDWIDGFDIECRNEESIHQHDAFARLKYRK

SEQ ID NO: 15040 - protein, 292 aa, Staphylococcus caprae
  REGION 1..292: note = tr|C5QPS6|C5QPS6_9STAP GTP cyclohydrolase FolE2; OS = Staphylococcus caprae M23864:W1 OX=525378 GN=folE2 PE=3; SV = 1
MTEFDLSTREGRWKHFGSVDPVEGTKPTTKNEMTDLQSTHKNFLFEIEEVGIKNLTYPVLIDQYQTAGLFSFSTSLNKDEKGINMSRILESVEKHYNNGIELEFNTLYQVLRTLQEKMNQNAAGVDVSGKWFFDRFSPVTHIKAIGNADVTYGLAIDGEKVTRKELTIEAAVTTLCPCSKEISEYSAHNQRGIVTVKTYLNKDTDVVDDYKDKILDAMEANASSILYPILKRPDEKRVTERAYENPRFVEDLIRLIAADLVDFDWIDGFDIECRNEESIHQHDAFARLKYRK

SEQ ID NO: 15041 - protein, 292 aa, Staphylococcus carnosus
  REGION 1..292: note = sp|B9DKT0|GCH4_STACT GTP cyclohydrolase FolE2; OS = Staphylococcus carnosus (strain TM300) OX=396513; GN = folE2 PE=3 SV=1
MSEFDLTTREGRWRHFGSVDPIEGTKPTVKEEMTDLQSTHKDFLFEIEEVGIKNLVYPVVIDNYQTAGTFAFSTSLTREEKGINMSRILESVEKHYDNGLELSFNNLEAVLHTLEKHMKQSSAGVDVSGKWFFNRYSPVTNIKAVGNADVTYGLAVAGDQVTRKELTVQATVTTLCPCSKEISEYSAHNQRGVITVKMYIDPSATLPTDYKEVILDAMEANASSILYPILKRPDEKRVTERAYENPRFVEDLIRLIAADLVELDWAEGFDIECRNEESIHQHDAFAKLKYRK

SEQ ID NO: 15042 - protein, 292 aa, Staphylococcus carnosus
  REGION 1..292: note = tr|A0A380FA80|A0A380FA80_STACA GTP cyclohydrolase FolE2 OS=Staphylococcus carnosus subsp. utilis OX=147449; GN = folE2 PE=3 SV=1
MSEFDLTTREGRWRHFGSVDPIEGTKPTVKEEMTDLQSTHKDFLFEIEEVGIKNLVYPVVIDNYQTAGTFAFSTSLTREEKGINMSRILESVEKYYDNGLELSFNNLEAVLHTLEKHMKQSSAGVDVSGKWFFNRYSPVTNIKAVGNANVTYGLAVAGDQVTRKELTVQATVTTLCPCSKEISEYSAHNQRGVITVKMYIDPSATLPTDYKEVILDAMEANASSILYPILKRPDEKRVTERAYENPRFVEDLIRLIAADLVELDWAEGFDIECRNEESIHQHDAFAKLKYRK

SEQ ID NO: 15043 - protein, 292 aa, Staphylococcus chromogenes
  REGION 1..292: note = tr|A0A2T4M0H6|A0A2T4M0H6_STACR GTP cyclohydrolase FolE2 OS=Staphylococcus chromogenes OX=46126 GN=folE2 PE=3; SV = 1
MTEFDLSTREGRWKHFGSVDPIPGTKPTTKAEMTDLQSTHKNFLFEIEEVGIKNLVYPVWIDAFQTAGNFSFSTSLNKDEKGINMSRILEAVEAEYDNGIRLDFETLTQLLNRLKSHMKQHSAGVDVSGKWFFERRSPVTDIKAVGHADVTYGLAVKGDTTTRKELTIEAAVTTLCPCSKEISEYSAHNQRGIITVKAYIDKAASLTQDYKEIILDAMEANASSMLYPILKRPDEKRVTERAYENPRFVEDLIRLIAADLVELDWLDGFDIECRNEESIHQHDAFAKLKYRK

SEQ ID NO: 15044 - protein, 292 aa, Staphylococcus cohnii
  REGION 1..292: note = tr|A0A3A0JH07|A0A3A0JH07_9STAP GTP cyclohydrolase FolE2 OS=Staphylococcus cohnii OX=29382 GN=folE2 PE=3 SV=1
MTEFDLSTREGRWKHFGSVDPIEGTKPTVKEEMKDLQSTNKNYLFEIEEVGIKNLVYPVLVDRFQTAGNFSFSTSLNQDEKGINMSRILESVEKHYDNGIELDFDSLYRLLRSLQERMEQNAAGVDVSAKWFFDRYSPITNIKAVGHADVTYGMAINKENITRKEITLQAAVTTLCPCSKEISEYSAHNQRGIITVKAILNNETILTDDYKEKILDAMEANASSILYPILKRPDEKSVTERAYENPRFVEDLIRLIAADLVDFDWIEGFDIECRNEESIHQHDAFAKIKYRK

SEQ ID NO: 15045 - protein, 210 aa, Staphylococcus cohnii; identical to SEQ ID NO: 5291
  REGION 1..210: note = tr|A0A0M2P529|A0A0M2P529_STACC GTP cyclohydrolase 1; OS = Staphylococcus cohnii subsp. cohnii OX=74704 GN=folE; PE = 3 SV=1

SEQ ID NO: 15046 - protein, 292 aa, Staphylococcus condimenti
  REGION 1..292: note = tr|A0A143PAQ4|A0A143PAQ4_9STAP GTP cyclohydrolase FolE2 OS=Staphylococcus condimenti OX=70255 GN=folE2 PE=3; SV = 1
MSEFDLTTREGRWRHFGSVDPIEGTKPTVKEEMTDLQSTHKDFLFEIEEVGIKNLVYPVVIDNYQTAGTFAFSTSLTREEKGINMSRILESVEKHYDNGLELTFSNLETVLHTLEKHMKQSSAGVDVSGKWFFNRYSPVTNIKAVGNADVTYGLAVAGDQVTRKELTIQATVTTLCPCSKEISEYSAHNQRGVITVKMYIDPSATLPTDYKEVILDAMEANASSILYPILKRPDEKRVTERAYENPRFVEDLIRLIAADLVELDWSEGFDIECRNEESIHQHDAFAKLKYRK

SEQ ID NO: 15047 - protein, 292 aa, Staphylococcus delphini
  REGION 1..292: note = tr|A0A447Z0Y2|A0A447Z0Y2_9STAP GTP cyclohydrolase FolE2 OS=Staphylococcus delphini OX=53344 GN=folE2 PE=3; SV = 1
MTEFDLSTREGRWKHFGSVDPIKGSKPTTKAEMTDLQSTHKNFLFEIEEVGIKNLVYPVWIDQYQTAGNFSFSTSLNKDEKGINMSRILESVEAEYDNGIRLEFDALTQLLNQLKGRMKQHSAGVDVSGKWFFNRYSPVTQMKAVGSADVTFGLALENDAVSRKEITIEAAVTTLCPCSKEISEYSAHNQRGIITVKAYFDKTATLPEDYKEIILDAMEANASSMLYPILKRPDEKRVTERAYENPRFVEDLIRLIAADLVEVSWLEGFDIECRNEESIHQHDAFAKLKYRK

SEQ ID NO: 15048 - protein, 292 aa, Staphylococcus delphini
  REGION 1..292: note = tr|A0A2A4HC00|A0A2A4HC00_9STAP GTP cyclohydrolase FolE2 OS=Staphylococcus delphini OX=53344 GN=folE2 PE=3; SV = 1
MTEFDLSTREGRWKHFGSVDPIKGSKPTTKAEMTDLQSTHKNFLFEIEEVGIKNLVYPVWIDQYQTAGNFSFSTSLNKDEKGINMSRILESVEAEYDNGIRLEFDALTQLLNQLKGRMKQHSAGVDVSGKWFFNRYSPVTQMKAVGNADVTYGLALENDAVSRKEITIEAAVTTLCPCSKEISEYSAHNQRGIITVKAYLNKTATLPEDYKEIILDAMEANASSMLYPILKRPDEKRVTERAYENPRFVEDLIRLIAADLVEVSWLEGFDIECRNEESIHQHDAFAKLKYRK

SEQ ID NO: 15049 - protein, 292 aa, Staphylococcus devriesei
  REGION 1..292: note = tr|A0A2K4DQI9|A0A2K4DQI9_9STAP GTP cyclohydrolase FolE2 OS=Staphylococcus devriesei OX=586733 GN=folE2 PE=3; SV = 1
MTEFDLSTREGRWKHFGSVDPVEGTKPTTKSEMTDLQSTHKNFLFEIEEVGIKNLIYPVNIDRFQTAGRFSFSTSLNKDEKGINMSRILESVEKHYNNGLELNFNTLYQVLRTLQTNMKQNSAGVDVSGKWFFDRFSPVTNIKAVGNADVTYGLAIEQDQITRKEITIEASVTTLCPCSKEISEYSAHNQRGIVTVKVYLDKDNDVVDDYKDKILDAMEANASSILYPVLKRPDEKRVTERAYENPRFVEDLIRLVAADLVEFDWIDGFDIECRNEESIHQHDAFAKLKYRK

SEQ ID NO: 15050 - protein, 292 aa, Staphylococcus devriesei
  REGION 1..292: note = tr|A0A2T4KD56|A0A2T4KD56_9STAP GTP cyclohydrolase FolE2 OS=Staphylococcus devriesei OX=586733 GN=folE2 PE=3; SV = 1
MTEFDLSTREGRWKHFGSVDPVKGTKPTTKSEMTDLQSTHKNFLFEIEEVGIKNLIYPVNIDRFQTAGRFSFSTSLNKDEKGINMSRILESVEKHYNNGLELNFNTLYQVLRTLQTNMNQNSAGVDVSGKWFFDRFSPVTNIKAVGNADVTYGLAIEQDKITRKEITIEASVTTLCPCSKEISEYSAHNQRGIVTVKVYLDKDNDVVDDYKDKILDAMEANASSILYPILKRPDEKRVTERAYENPRFVEDLIRLVAADLVEFDWIDGFDIECRNEESIHQHDAFAKLKYRK

SEQ ID NO: 15051 - protein, 292 aa, unidentified
  source 1..292: note = Staphylococcus edaphicus
  REGION 1..292: note = tr|A0A2C6WI97|A0A2C6WI97_9STAP GTP cyclohydrolase FolE2 OS=Staphylococcus edaphicus OX=1955013 GN=folE2 PE=3; SV = 1
MTEFDLSTREGRWKHFGSVDPIEGTKPTIKEEMKDLQSTNKHFLFEIEEVGIKNLVYPVLVDRFQTAGNFSFSTSLNIDEKGINMSRILESVEKHYNNGIELDFDSLYQLLRSLQERMNQNAAGLDVSAKWFFDRHSPVTQIKAVGHADVTYGLAINKENVTRKELTIEAAVTTLCPCSKEISEYSAHNQRGIVTVKAYINKDIALIDDYKNVILDAMEANASSMLYPILKRPDEKSVTERAYENPRFVEDLIRLIAADLVDFEWLDGFDIECRNEESIHQHDAFAKLKYRK

SEQ ID NO: 15052 - protein, 292 aa, Staphylococcus epidermidis
  REGION 1..292: note = sp|Q5HRI1|GCH4_STAEQ GTP cyclohydrolase FolE2; OS = Staphylococcus epidermidis (strain ATCC 35984 / RP62A); OX = 176279 GN=folE2 PE=3 SV=1
MTEFDLSTREGRWKHFGSVDPVKGTKPTTKNEMTDLQSTHKNFLFEIEEVGIKNLTYPVLIDQYQTAGLFSFSTSLNKNEKGINMSRILESVEKHYDNGIELEFNTLHQLLRTLQDKMNQNAAGVDVSGKWFFDRYSPVTHIKAVGHADVTYGLAIENHTVTRKELTIQAKVTTLCPCSKEISEYSAHNQRGIVTVKAYLDKNNDVIDDYKNKILDAMEANASSILYPILKRPDEKRVTERAYENPRFVEDLIRLIAADLVEFDWIEGFDIECRNEESIHQHDAFARLKYRK

SEQ ID NO: 15053 - protein, 292 aa, Staphylococcus epidermidis
  REGION 1..292: note = tr|A0A447XNR6|A0A447XNR6_STAEP GTP cyclohydrolase FolE2 OS=Staphylococcus epidermidis OX=1282 GN=folE2 PE=3; SV = 1
MTEFDLSTREGRWKHFGSVDPIEGTKPTTKNEMTDLQSTHKNFLFEIEEVGIKNLTYPVLIDQFQTAGTFSFSTSLNKDEKGINMSRILESVEKHYHNGIELEFNTLYQVLRTLQEKMNQNAAGVDVSGKWFFDRFSPVTQIKAIGNADVTYGLAIEGTNVTRKELTIQAAVTTLCPCSKEISEYSAHNQRGIVTVKTYLNKDDIVIDDYKDKILDAMEANASSVLYPILKRPDEKRVTERAYENPRFVEDLIRLIAADLVEFDWIEGFDIECRNEESIHQHDAFARLKYRK

SEQ ID NO: 15054 - protein, 292 aa, Staphylococcus equorum
  REGION 1..292: note = tr|A0A3S0KSA6|A0A3S0KSA6_9STAP GTP cyclohydrolase FolE2 OS=Staphylococcus equorum subsp. equorum OX=29383; GN = folE2 PE=3 SV=1
MTEFDLSTREGRWKHFGSVDPVKGTKPTAKNKMTDLQSSHKNFLFKIEEVGIKNLTYPVLIDQYQTAGLFSFSTSLNKDEKGINMSRILESVEKHYDNGIELEFNTLYQLLRTLQEKMNQHAAGVDVSSKWFFDRFSPVTNIKAVGNASVTYGLAIDGHNVTRKELTVEAAVTTLCPCSKEISEYSAHNQRGIVTVKTYLVKNNDVVDDYKDKILDAMEANASSVLYPILKRPDEKRVTERAYENPRFVEDLIRLIAADLVEFDWIEGFDIECRNEESIHQHDAFARLKYRK

SEQ ID NO: 15055 - protein, 292 aa, Staphylococcus equorum
  REGION 1..292: note = tr|A0A1E5TRQ5|A0A1E5TRQ5_9STAP GTP cyclohydrolase FolE2 OS=Staphylococcus equorum OX=246432 GN=folE2 PE=3; SV = 1
MTEFDLSTREGRWKHFGSVDPIEGTKPTEKENMKDLQSTHKDFLFEIEEVGIKNLVYPVLVDRFQTAGNFSFSTSLNQDEKGINMSRILESVEKHYNNGIELNFDALYQLLRSLQVSMAQNAAGLDVSAKWFFDRYSPVTQIKAVGYADVTYGLAIDKDDVTRKEITIQAAVTTLCPCSKEISEYSAHNQRGIITVKAFLNKDVDLIGDYKEVILDAMEANASSMLYPILKRPDEKSVTEHAYENPRFVEDLIRLIAADLVGFEWLDGFEIECRNEESIHQHDAFAKLKYHK

SEQ ID NO: 15056 - protein, 292 aa, Staphylococcus felis
  REGION 1..292: note = tr|A0A2K3ZC47|A0A2K3ZC47_9STAP GTP cyclohydrolase FolE2 OS=Staphylococcus felis OX=46127 GN=folE2 PE=3 SV=1
MTEFDLSTREGRWKHFGSVDPIQGTKPTTKAEMTDLQSTHKNFLFEIEEVGIKNLTYPVLIDQYQTAGTFSFSTSLNQDEKGINMSRILESVEAEYDNGIRLEYDALTQLLNRLKTNMKQHSAGVDVSGKWFFDRISPITHIKAIGSADVTYGLAIEGDTITRKELTLTAAVTTLCPCSKEISEYSAHNQRGIITVKALINAQATLPEDYKDILLDAMEANASSMLYPILKRPDEKRVTERAYENPRFVEDLIRLIAADLVELDWLDGFDIECRNEESIHQHDAFAKLKYRK

SEQ ID NO: 15057 - protein, 293 aa, Staphylococcus fleurettii
  REGION 1..293: note = tr|A0A431YZM4|A0A431YZM4_9STAP GTP cyclohydrolase FolE2 OS=Staphylococcus fleurettii OX=150056 GN=folE2 PE=3; SV = 1
MTEFDLSTREGRWRHFGSVDPVNGSKPTTKSEMPDLQSTHKNFLFEIEEVGIKNLVYPAWIDQYQTAGNFSFSTSLTQDEKGINMSRILESVEAEYDNGIRLEFEALTQLMNRLKTSMKQRSAGVDVSGKWFFDRLSPVTQIKAIGHADVTYGLAVDNDQVTRKELTIEAAVTTLCPCSKEISEYSAHNQRGIITVKTYIDKNATLPENYKEIILDAMEANASSMLYPILKRPDEKRVTERAYENPRFVEDLIRLIAADLVEVNWIEGFDIECRNEESIHQHDAFAKLKYRKS

SEQ ID NO: 15058 - protein, 292 aa, Staphylococcus fleurettii
  REGION 1..292: note = tr|A0A380FWG6|A0A380FWG6_9STAP GTP cyclohydrolase FolE2 OS=Staphylococcus fleurettii OX=150056 GN=folE2 PE=3; SV = 1
MTQLDLSTREARWKYFGSVDPIKGNKPTEKEKMPDLQSSKKDFLFEIEHVGIKNLIYPVRIDDFQTVGNFEFSTSLNQDEKGINMSRIIESVEKHYDNGVKLEFDHLTTLLNTLQSVMLQNTASLDVTAKWFFNRFSPVTNQKAVGHADIRYILSVSDDKVTKKSLGIEVPVTTLCPCSKEISEYSAHNQRGIITVLIDLDPEIDLPDNYKDIVLDGMEANASSMLYPILKRTDEKAVTERAYENPRFVEDLIRLVAADLVDLDWIQGFEIECRNEESIHQHDAFARLKYTK

SEQ ID NO: 15059 - protein, 292 aa, Staphylococcus gallinarum
  REGION 1..292: note = tr|A0A418HNQ0|A0A418HNQ0_STAGA GTP cyclohydrolase FolE2 OS=Staphylococcus gallinarum OX=1293 GN=folE2 PE=3; SV = 1
MTEFDLSTREGRWKHFGSVDPVEGTKPTVKEKMKDLQSTHKDFLFEIEEVGIKNLVYPVHVDRFQTAGNFSFSTSLNQDEKGINMSRILESVEKHYHNGIELNFDTLYHVLRSLQESMNQSSAGLDVSAKWFFDRYSPVTQIKAVGHADVTYGIAIDEKDVTRKEITIEAAVTTLCPCSKEISEYSAHNQRGIVTVKAYLNKDVVLNDDFKDVILDAMEANASSILYPILKRPDEKSVTERAYENPRFVEDLIRLIAADLVGFDWLDGFDIECRNEESIHQHDAFAKLKYRK

SEQ ID NO: 15060 - protein, 292 aa, Staphylococcus gallinarum
  REGION 1..292: note = tr|A0A3A0H5S3|A0A3A0H5S3_STAGA GTP cyclohydrolase FolE2 OS=Staphylococcus gallinarum OX=1293 GN=folE2 PE=3; SV = 1
MTEFDLSTREGRWKHFGSVDPVEGTKPTVKEKMKDLQSTHKDFLFEIEEVGIKNLVYPVHVDRFQTAGNFSFSTSLNQDEKGINMSRILESVEKHYHNGIELNFDTLYHVLRSLQESMNQSAAGLDVSAKWFFDRYSPVTQIKAVGHADVTYGIAIDEKEVTRKEITIEAAVTTLCPCSKEISEYSAHNQRGIVTVKAYLNKDVVLNDDFKDVILDAMEANASSILYPILKRPDEKSVTERAYENPRFVEDLIRLIAADLVGFDWLDGFDIECRNEESIHQHDAFAKLKYRK

SEQ ID NO: 15061 - protein, 292 aa, Staphylococcus haemolyticus
  REGION 1..292: note = sp|Q4L3P5|GCH4_STAHJ GTP cyclohydrolase FolE2; OS = Staphylococcus haemolyticus (strain JCSC1435) OX=279808; GN = folE2 PE=3 SV=1
MTEFDLSTREGRWKHFGSVDPIEGTKPTTKNEMTDLQSTHKNFLFEIEEVGIKNLIYPVNIDRFQTAGRFSFSTSLNKDEKGINMSRILESVEKHYNNGLELNFDTLYQVLRTLQTNMKQNSSGVDVSGKWFFDRFSPVTNIKAVGNADVTYGLAIEQDQITRKEITIEATVTTLCPCSKEISEYSAHNQRGVVTVKVYLDKNNQVVDDYKDKILDAMEANASSILYPILKRPDEKRVTERAYENPRFVEDLIRLIAADLVEFDWIDGFDIECRNEESIHQHDAFAKLKYRK

SEQ ID NO: 15062 - protein, 292 aa, Staphylococcus haemolyticus
  REGION 1..292: note = tr|A0A4T9XMH1|A0A4T9XMH1_STAHA GTP cyclohydrolase FolE2 OS=Staphylococcus haemolyticus OX=1283 GN=folE2 PE=3; SV = 1
MTEFDLSTREGRWKHFGSVDPIEGTKPTTKNEMTDLQSTHKNFLFEIEEVGIKNLIYPVNIDRFQTAGQFSFSTSLNKDEKGINMSRILESVEKHYNNGLELNFDTLYQVLRTLQTNMKQNSSGVDVSGKWFFDRFSPVTNIKAVGNADVTYGLAIEQDQITRKEITIEATVTTLCPCSKEISEYSAHNQRGVVTVKVYLDKNNQVVDDYKDKILDAMEANASSILYPILKRPDEKRVTERAYENPRFVEDLIRLIAADLVEFDWIDGFDIECRNEESIHQHDAFAKLKYRK

SEQ ID NO: 15063 - protein, 292 aa, Staphylococcus hominis
  REGION 1..292: note = tr|A0A4Q9WSC3|A0A4Q9WSC3_STAHO GTP cyclohydrolase FolE2 OS=Staphylococcus hominis OX=1290 GN=folE2 PE=3 SV=1
MTEFDLSTREGRWKHFGSVDPIKGTKPTTKNEMTDLQSTHKNFLFEIEEVGIKNLVYPVKIDQFQTAGTFSFSTSLNKDEKGINMSRILESVEKHYNNGLELDFDTLYQVLRTLQDNMKQNAAGVDVSGKWFFDRYSPVTHIKAVGNADVTYGLAIHKDQVTRKELTITATVTTLCPCSKEISEYSAHNQRGVVTVKVYLDKNSEMIDDYKEKILDAMEANASSILYPILKRPDEKRVTERAYENPRFVEDLIRLIAADLVDFDWIDGFDIECRNEESIHQHDAFARLKYRK

SEQ ID NO: 15064 - protein, 292 aa, Staphylococcus hominis
  REGION 1..292: note = tr|A0A3S7GUE4|A0A3S7GUE4_STAHO GTP cyclohydrolase FolE2 OS=Staphylococcus hominis OX=1290 GN=folE2 PE=3 SV=1
MIEFDLSTREGRWKHFGSVDPIKGTKPTTKNEMTDLQSTHKNFLFEIEEVGIKNLVYPVKIDQFQTAGTFSFSTSLNKDEKGINMSRILESVEKHYNNGLELDFDTLYQVLRTLQDNMKQNAAGVDVSGKWFFDRYSPVTHIKAVGHADVTYGLAIHKDQVTRKELTITATVTTLCPCSKEISEYSAHNQRGVVTVKVYLDKNSEMIDDYKEKILDAMEANASSILYPILKRPDEKRVTERAYENPRFVEDLIRLIAADLVDFDWIDGFDIECRNEESIHQHDAFARLKYRK

SEQ ID NO: 15065 - protein, 292 aa, Staphylococcus hyicus
  REGION 1..292: note = tr|A0A418JKV5|A0A418JKV5_STAHY GTP cyclohydrolase FolE2 OS=Staphylococcus hyicus OX=1284 GN=folE2 PE=3 SV=1
MTEFDLSTREGRWKHFGSVDPIQGTKPTTKAEMTDLQSTHKNFLFEIEEVGIKNLVYPVWIDHFQTAGNFSFSTSLNKDEKGINMSRILEAVEAEYDNGIRLEYDMLTQLLNRLKTHMKQHSAGVDVSGKWFFDRKSPVTNIKAVGHADVTYGLAVRGDEITRKELTVEAAVTTLCPCSKEISEYSAHNQRGIITVKTYINKTATLTADYKEIILDAMEANASSMLYPILKRPDEKRVTERAYENPRFVEDLIRLIAADLVELEWLDGFDIECRNEESIHQHDAFAKLKYRK

SEQ ID NO: 15066 - protein, 292 aa, Staphylococcus hyicus
  REGION 1..292: note = tr|A0A4V6L6S1|A0A4V6L6S1_STAHY GTP cyclohydrolase FolE2 OS=Staphylococcus hyicus OX=1284 GN=folE2 PE=3 SV=1
MTEFDLSTREGRWKHFGSVDPIEGTKPTTKNEMTDLQSTHKDFLFEIEEVGIKNLVYPVLVDQYQTAGTFSFSTSLTKDEKGINMSRIIESVEKHYDNGIELEFNTLYQVLRTLQTNMKQNAAGVDVSGKWFFDRYSPTTNIKAVGNADVTYGLAIDGDKVTRKELTIEATVTTLCPCSKEISEYSAHNQRGVVTVKTYINKDQGIVDDYKNKILDAMEANASSILYPILKRPDEKRVTERAYENPRFVEDLIRLIAADLVEFDWLDGFDIECRNEESIHQHDAFAKLKYRK

SEQ ID NO: 15067 - protein, 214 aa, Staphylococcus intermedius
  REGION 1..214: note = tr|A0A380G9P1|A0A380G9P1_STAIN GTP cyclohydrolase 1; OS = Staphylococcus intermedius NCTC 11048 OX=1141106; GN = folE PE=3 SV=1
MFNQVESLKVISDEQYKKLEVLKPDIKKNEQDLLNIMIGLRKLIRVCGDDPTRDGLEETPFRVLKAYLEYTEGYREDPRKHLEKEFDVDGHQELVIVKDIEFNSLCEHHFAPFHGRVHIGYIPNKKITGLSKFGRLVDGYSKRFQVQERLTTQIADAIDEVLQAQGVMVVVEAKHMCMCGRGIKKATSSTTTSAIRGSFKDNAQLRNEFLSLIK

SEQ ID NO: 15068 - protein, 292 aa, Staphylococcus intermedius
  REGION 1..292: note = tr|A0A380GB90|A0A380GB90_STAIN GTP cyclohydrolase FolE2 OS=Staphylococcus intermedius NCTC 11048 OX=1141106; GN = folE2 PE=3 SV=1
MTEFDLSTREGRWKHFGSVDPIKGTKPTTKDEMTDLQSTHKNFLFEIEEVGIKNLVYPVWIDQYQTAGNFSFSTSLNKDEKGINMSRILESVEAEYDNGIRLEFDALTQLLNQLKSRMKQHSAGVDVSGKWFFNRYSPVTQMKAVGNADVTYGLALDNEAVTRKEITIEAAVTTLCPCSKEISEYSAHNQRGIITVKAYLDKTATLPEDYKEVILDAMEANASSMLYPILKRPDEKRVTERAYENPRFVEDLIRLIAADLVEVSWLEGFDIECRNEESIHQHDAFAKLKYRK

SEQ ID NO: 15069 - protein, 210 aa, Staphylococcus kloosii
  REGION 1..210: note = tr|A0A151A771|A0A151A771_9STAP GTP cyclohydrolase 1; OS = Staphylococcus kloosii OX=29384 GN=folE PE=3 SV=1
MENIDLEEKVNKLVSDNFSEDIDNKKASINSAMENIKSIIELCGDDPERDGLIETPYRFLKAFFEYTEGYKENPKDHLKKTFDVQQDDMVLVKDIEFYSMCEHHFAPFFGVAHVGYIPDQKVTGLSKIARVVEGYARRFQVQERLTSQIATAINEELKPKGVMVVIEAKHMCMCSRGIKKDQSSTLTSAVHGLFQSSYNTRSEFLTLIHK

SEQ ID NO: 15070 - protein, 292 aa, Staphylococcus kloosii
  REGION 1..292: note = tr|A0A512QIS4|A0A512QIS4_9STAP GTP cyclohydrolase FolE2 OS=Staphylococcus kloosii OX=29384 GN=folE2 PE=3 SV=1
MTELDLSTREGRWKHFGSVDPIEGTKPVVKEEMTDLQSTNKNFLFDIEEVGIKNLVYPVRIDDYQTAGTFSFSTSLNQDEKGINMSRILESVEQHYDNGIQLNFTSLNEVLRTLQTSMKQSSAGVDVSGKWFFNRLSPVTNIKAIGNADVTFGLAIEGDAITRKELTINAAVTTLCPCSKEISEYSAHNQRGYVTVKAYLDKDTTLNDNYKEIILDAMEANASSILYPILKRPDEKSVTERAYENPRFVEDLIRLIAADLVGFEWIEGFDIECRNEESIHQHDAFAKIKYRK

SEQ ID NO: 15071 - protein, 292 aa, Staphylococcus lentus
  REGION 1..292: note = tr|A0A4Y9KCV1|A0A4Y9KCV1_STALE GTP cyclohydrolase FolE2 OS=Staphylococcus lentus OX=42858 GN=folE2 PE=3 SV=1
MKQIDLSTREARWKYFGSVDPIKGTKPTEKEKMPDLQSSKKDFLFEIEHVGIKNLVYPVKIDGFQSIGNFEFSTSLNQDEKGINMSRIIESVEKHYDNGVPLSFDSLKSLLNTLESAMFQNTASVDVSAKWFFNRYSPITQQKAVGNADIRYILSVSDDKLTKKSLGIEVPVTTLCPCSKEISEYSAHNQRGIITVLIDLDTETDLPDNYKELILDGMEANASSMLYPILKRTDEKAVTEHAYENPRFVEDLIRLVAADLVELEWINGFEIECRNEESIHQHDAFARLKYSK

SEQ ID NO: 15072 - protein, 292 aa, Staphylococcus lentus
  REGION 1..292: note = tr|A0A178PMS5|A0A178PMS5_STALE GTP cyclohydrolase FolE2 OS=Staphylococcus lentus OX=42858 GN=folE2 PE=3 SV=1
MKQIDLSTREARWKYFGSVDPIKGTKPTEKEKMPDLQSSKKDFLFEIEHVGIKNLVYPVKIDGFQSIGNFEFSTSLNQDEKGINMSRIIESVEKHYDNGVPLSFDSLKSLLNTLESAMFQNTASVDVSAKWFFNRYSPITQQKAVGNADIRYILSVSDDKLTKKSLGIEVPVTTLCPCSKEISEYSAHNQRGIITVLIDLDTETDLPDNYKELILDGMEANASSMLYPILKRTDEKAVTERAYENPRFVEDLIRLVAADLVELEWINGFEIECRNEESIHQHDAFARLKYSK

SEQ ID NO: 15073 - protein, 293 aa, Staphylococcus lugdunensis
  REGION 1..293: note = tr|A0A133Q0V6|A0A133Q0V6_STALU GTP cyclohydrolase FolE2 OS=Staphylococcus lugdunensis OX=28035 GN=folE2 PE=3; SV = 1
MTEFDLSTREGRWKHFGSVDPVEGTKPTTKQDMTDLQSTHKNFLFEIEEVGIKNLVYPVRINQYQTAGTFSFSTSLTQNEKGINMSRILESVEKHYSNGLELDYSTLYQVLRTLQENMKQNSAGVDVKGKWFFDRYSPVTNIKAVGNADVTYGLAIEGNNITRKELTIEATVTTLCPCSKEISEYSAHNQRGIVTVKAYLDKDEQIVDDYKEKILDAMEANASSILYPILKRPDEKRVTERAYENPRFVEDLIRLIAADLVDFEWIDGFDIECRNEESIHQHDAFARLKYRKS

SEQ ID NO: 15074 - protein, 293 aa, Staphylococcus lutrae
  REGION 1..293: note = tr|A0A1W6BMJ4|A0A1W6BMJ4_9STAP GTP cyclohydrolase FolE2 OS=Staphylococcus lutrae OX=155085 GN=folE2 PE=3 SV=1
MTEFDLSTREGRWKHFGSVDPIEGSKPTTKAEMTDLQSTHKNFLFEIEEVGIKNLIYPVWIDQYQTAGNFSFSTSLNQDEKGINMSRILESVEAEYDNGIRLEFHTLTQLLNRLKSSMKQHSAGVDVSGKWFFNRYSPITHIKAVGYADVTYGLAIDEDTITRKELTIEAAVTTLCPCSKEISEYSAHNQRGIITVKSYLDKDVTLPENYKEVILDAMEANASSMLYPILKRPDEKRVTERAYENPRFVEDLIRLIAADLVDVAWIAGFDIECRNEESIHQHDAFAKLKYRKS

SEQ ID NO: 15075 - protein, 292 aa, Staphylococcus massiliensis
  REGION 1..292: note = tr|K9AJK5|K9AJK5_9STAP GTP cyclohydrolase FolE2; OS = Staphylococcus massiliensis S46 OX=1229783 GN=folE2; PE = 3 SV=1
MTEFDLSTREGRWKHFGSVDPIKGTKPTTKSEMTDLQSTHKDFLFEIEEVGITNLVYPVLVDQFQTAGNFSFSTSLNQDEKGINMSRILESVEKHYDNGIELEFHTLYRLLKSLQSKMEQRDAGLDVSAKWFFNRLSPVTNMKAIGHADVTYGMAIEDDTVTRKELTIKAMVTTLCPCSKEISEYSAHNQRGVITVKAYINKEEEIIDDYKDIILDAMEANASSLLYPILKRPDEKHVTETAYENPRFVEDLIRLVAADLVELTWLDGFDIECRNEESIHQHDAYARLKHRK

SEQ ID NO: 15076 - protein, 293 aa, Staphylococcus microti
  REGION 1..293: note = tr|A0A0D6XRS1|A0A0D6XRS1_9STAP GTP cyclohydrolase FolE2 OS=Staphylococcus microti OX=569857 GN=folE2 PE=3; SV = 1
MTEFDLSTREGRWKHFGSVDPIKGTKPTTKAEMTDLQSTHKNFLFEIEQVGIKNLVYPVWIDNFQTAGNFSFSTSLNQDEKGINMSRILEAVESEYDNGIRLDFDALTTLLNTLKTRMNQHSAGVDVEGKWFFNRLSPVTGIKAVGHADVTYGLAVHDNDVTRKTLTLKAAVTTLCPCSKEISEYSAHNQRGIITVKAYIDKVQTLPSDYKDVLLDAMEANASSMLYPILKRPDEKRVTERAYENPRFVEDLIRLIAADLVEVPWLTGFDIECRNEESIHQHDAFAKLTYRKP

SEQ ID NO: 15077 - protein, 293 aa, Staphylococcus muscae
  REGION 1..293: note = tr|A0A240BU61|A0A240BU61_9STAP GTP cyclohydrolase FolE2 OS=Staphylococcus muscae OX=1294 GN=folE2 PE=3 SV=1
MTEFDLSTREGRWKHFGSVDPIKGTKPTTKAEMTDLQSTHKNFLFEIEQVGIKNLVYPVWIDQFQTAGNFSFSTSLNQDEKGINMSRILEAVESEYDNGIRLEFDALTSLLHTLKSRMNQHSAGVDVSGKWFFNRLSPVTGIKAVGHADVSYGLAVQDDEVTRKTLTLTAAVTTLCPCSKEISEYSAHNQRGIITVKAYIDKHSTLPSDYKEVLLDAMEANASSMLYPILKRPDEKSVTERAYENPRFVEDLIRLIAADLVEVRWLTGFDIECRNEESIHQHDAFAKLTYRQP

SEQ ID NO: 15078 - protein, 292 aa, Staphylococcus nepalensis
  REGION 1..292: note = tr|A0A291JNN1|A0A291JNN1_9STAP GTP cyclohydrolase FolE2 OS=Staphylococcus nepalensis OX=214473 GN=folE2 PE=3; SV = 1
MTEFDLSTREGRWKHFGSVDPIEGTKPTVKEEMKDLQSTNKNFLFEIEEVGIKNLVYPVLVDRFQTAGNFSFSTSLNQDEKGINMSRILESVEKHYDNGIELDFDSLYRLLRSLQERMEQNAAGLDVSAKWFFDRHSPITNIKAVGHADVTYGMAIDKENVTRKEITLQVAVTTLCPCSKEISEYSAHNQRGIVTVKAYLSKDANLTDDYKEKILDAIEANASSILYPILKRPDEKSVTEHAYENPRFVEDLIRLIAADLVDFDWIEGFDIECRNEESIHQHDAFAKLKYRR

SEQ ID NO: 15079 - protein, 292 aa, Staphylococcus nepalensis; identical to SEQ ID NO: 6854
  REGION 1..292: note = tr|A0A2T4SD11|A0A2T4SD11_9STAP GTP cyclohydrolase FolE2 OS=Staphylococcus nepalensis OX=214473 GN=folE2 PE=3; SV = 1

SEQ ID NO: 15080 - protein, 292 aa, Staphylococcus pasteuri; identical to SEQ ID NO: 15053
  REGION 1..292: note = tr|A0A269XIW2|A0A269XIW2_9STAP GTP cyclohydrolase FolE2 OS=Staphylococcus pasteuri OX=45972 GN=folE2 PE=3; SV = 1

SEQ ID NO: 15081 - protein, 292 aa, Staphylococcus pasteuri
  REGION 1..292: note = tr|A0A0M2NU58|A0A0M2NU58_9STAP GTP cyclohydrolase FolE2 OS=Staphylococcus pasteuri OX=45972 GN=folE2 PE=3; SV = 1
MTEFDLSTREGRWKHFGSVDPIEGTKPTTKNEMTDLQSTHKNFLFEIEEVGIKNLTYPVLIDQFQTAGTFSFSTSLNKDEKGINMSRILESVEKHYNNGIELEFNTLYHVLRTLQEKMNQNAAGVDVSGKWFFDRFSPVTNIKAIGNADVTYGIAIEGTKVTRKEVTIQAAVTTLCPCSKEISEYSAHNQRGIVTVKAYLNKDDIVIDDYKDKILDAMEANASSILYPILKRPDEKSVTERAYENPRFVEDLIRLIAADLVEFDWIEGFDIECRNEESIHQHDAFARLKYRK

SEQ ID NO: 15082 - protein, 292 aa, unidentified
  source 1..292: note = Staphylococcus petrasii
  REGION 1..292: note = tr|A0A5F1B1F8|A0A5F1B1F8_9STAP GTP cyclohydrolase FolE2 OS=Staphylococcus petrasii subsp. petrasii; OX = 1276937 GN=folE2 PE=3 SV=1
MTEFDLSTREGRWKHFGSVDPVEGTKPTTKTEMTDLQSTHKNFLFEIEEVGIKNLIYPVKIDRYQTAGKFSFSTSLNQDEKGINMSRILESVEKHYSNGLELNFDTLYQVLRTLQGNMKQNSAGVDVTGKWFFDRYSPVTNIKAVANADVTYGLAIDKDNVTRKEVTIEATVTTLCPCSKEISEYSAHNQRGVVTVKVYLDKNSDVVDDYKEKILDAMEANASSILYPILKRPDEKRVTERAYENPRFVEDLIRLIAADLVEFDWIDGFDIECRNEESIHQHDAFAKLKYRK

SEQ ID NO: 15083 - protein, 292 aa, unidentified
  source 1..292: note = Staphylococcus petrasii
  REGION 1..292: note = tr|A0A380G4Z6|A0A380G4Z6_9STAP GTP cyclohydrolase FolE2 OS=Staphylococcus petrasii subsp. jettensis; OX = 1077965 GN=folE2 PE=3 SV=1
MTEFDLSTREGRWKHFGSVDPVEGTKPTTKTEMTDLQSTHKNFLFEIEEVGIKNLIYPVKIDRYQTAGKFSFSTSLNQDEKGINMSRILESVEKHYSNGLELNFDTLYQVLRTLQGNMKQNSAGVDVTGKWFFDRYSPVTNIKAVANADVTYGLAIDKDDVTRKEITIEATVTTLCPCSKEISEYSAHNQRGVVTVKVYLDKNSDVVDDYKEKILDAMEANASSILYPILKRPDEKRVTERAYENPRFVEDLIRLITADLVEFDWIDGFDIECRNEESIHQHDAFAKLKYRK

SEQ ID NO: 15084 - protein, 292 aa, Staphylococcus pettenkoferi
  REGION 1..292: note = tr|A0A1Z3U3L9|A0A1Z3U3L9_9STAP GTP cyclohydrolase FolE2 OS=Staphylococcus pettenkoferi OX=170573 GN=folE2; PE = 3 SV=1
MSEFDLSTREGRWKHFGSVDPIKGNKPTSKEKMTDLQSTNKDFLFEIEEVGIKNLIYPVNIDRFQTAGNFSFSTSLNQDEKGINMSRILESVEKHYNHGIELDFDALYQVLRSLQESMNQSSAGVDVSGKWFYDRYSPQTDIKAVGHADVTYGLAIKNDNVTRKELTIEAAVTTLCPCSKEISEYSAHNQRGIVTVKAYIDKDAELSDDYKSVILDAMEANASSVLYPILKRPDEKRVTERAYENPRFVEDLIRLIAADLVELDWLEGFDIECRNEESIHQHDAFAKLKHRK

SEQ ID NO: 15085 - protein, 292 aa, Staphylococcus piscifermentans
  REGION 1..292: note = tr|A0A239UG46|A0A239UG46_9STAP GTP cyclohydrolase FolE2 OS=Staphylococcus piscifermentans OX=70258 GN=folE2; PE = 3 SV=1
MSEFDLTTREGRWKHFGSVDPIEGTKPTVKEEMTDLQSTHKDFLFEIEEVGIKNLVYPVVIDDYQTAGTFAFSTSLTREEKGINMSRILESVEKHYDNGLELTFNNLEAVLHTLEKHMKQSSAGVDVSGKWFFNRYSPVTNMKAVGNADVTYGLAVAGDQVTRKELTIQATVTTLCPCSKEISEYSAHNQRGVITVKMYIDSSATLPTDYKEIILDAMEANASSILYPILKRPDEKRVTERAYENPRFVEDLIRLIAADLVELDWTEGFDIECRNEESIHQHDAFAKLKYRK

SEQ ID NO: 15086 - protein, 292 aa, Staphylococcus piscifermentans
  REGION 1..292: note = tr|A0A3S0KDM5|A0A3S0KDM5_9STAP GTP cyclohydrolase FolE2 OS=Staphylococcus piscifermentans OX=70258 GN=folE2; PE = 3 SV=1
MTEFDLSTREGRWKHFGSVDPIEGTKPTEKENMKDLQSTHKDFLFEIEEVGIKNLVYPVLVDRFQTAGNFSFSTSLNQDEKGINMSRILESVEKHYNNGIELNFDALYQLLRSLQVSMEQNAAGLDVSAKWFFDRYSPVTQIKAVGHADVTYGLAIDKDDVTRKEITIQAAVTTLCPCSKEISEYSAHNQRGIITVKAFLNKDVDLIGDYKEVILDAMEANASSILYPILKRPDEKSVTEHAYENPRFVEDLIRLIAADLVGFEWLDGFEIECRNEESIHQHDAFAKLKYHK

SEQ ID NO: 15087 - protein, 292 aa, Staphylococcus pseudintermedius
  REGION 1..292: note = tr|A0A317YV90|A0A317YV90_STAPS GTP cyclohydrolase FolE2 OS=Staphylococcus pseudintermedius OX=283734; GN = folE2 PE=3 SV=1
MTEFDLSTREGRWKHFGSVDPVKGTKPTTKDEMTDLQSTHKNFLFEIEEVGIKNLVYPVWIDQYQTAGNFSFSTSLNKDEKGINMSRILESVEAEYDNGIRLEFDALTQLLNQLKSRMKQHSAGVDVSGKWFFNRYSPVTQIKAVGHADVTYGFALENDVVSRKEITIEAAVTTLCPCSKEISEYSAHNQRGIITVKVYLDKTATLPEDYKEVILDAMEANASSMLYPILKRPDEKRVTERAYENPRFVEDLIRLIAADLVEVSWLEGFDIECRNEESIHQHDAFAKLKYRK

SEQ ID NO: 15088 - protein, 214 aa, Staphylococcus pseudintermedius
  REGION 1..214: note = tr|A0A317YVC2|A0A317YVC2_STAPS GTP cyclohydrolase 1; OS = Staphylococcus pseudintermedius OX=283734 GN=folE PE=3; SV = 1
MFNQVESLKVISDEQYKKLKVLKPDIKKSEQDLVNIMIGLRKLICVCGDDPTRDGLEETPFRVLKAYLEYTEGYREDPRKHLEKEFDVDGHQELVIVKDIEFNSLCEHHFAPFHGRVHIGYIPKKKITGLSKFGRLVDGYSKRFQVQERLTTQIADAIDEVLQAQGVMVVVEAKHMCMCGRGIKKATSSTTTSAIRGSFKDNAQLRNEFLSLIK

SEQ ID NO: 15089 - protein, 293 aa, Staphylococcus rostri
  REGION 1..293: note = tr|A0A2K3YME9|A0A2K3YME9_9STAP GTP cyclohydrolase FolE2 OS=Staphylococcus rostri OX=522262 GN=folE2 PE=3 SV=1
MTEFDLSTREGRWKHFGSVDPIKGTKPTTKDEMTDLQSTHKNFLFEIEQVGIKNLVYPVWIDNFQTAGNFSFSTSLNQDEKGINMSRILEAVESEYDNGIRLEFDALTKLLHTLKARMNQHSAGVDVQGKWFFNRLSPVTGIKAVGHADVTYGLAVHDDDITRKTLTLTAAVTTLCPCSKEISEYSAHNQRGIITVKAYIDKDATLPSDYKDVLLDAMEANASSMLYPILKRPDEKRVTERAYENPRFVEDLIRLIAADLVDISWLTGFDIECRNEESIHQHDAFAKLTYRQP

SEQ ID NO: 15090 - protein, 292 aa, Staphylococcus saccharolyticus; identical to SEQ ID NO: 15081
  REGION 1..292: note = tr|A0A3S0MM59|A0A3S0MM59_9STAP GTP cyclohydrolase FolE2 OS=Staphylococcus saccharolyticus OX=33028 GN=folE2; PE = 3 SV=1

SEQ ID NO: 15091 - protein, 292 aa, Staphylococcus saccharolyticus
  REGION 1..292: note = tr|A0A4V2HIZ7|A0A4V2HIZ7_9STAP GTP cyclohydrolase FolE2 OS=Staphylococcus saccharolyticus OX=33028 GN=folE2; PE = 3 SV=1
MTEFDLSTREGRWKHFGSVDPVKGTKPTTKNEMTDLQSTHKNFLFKIEEVGIKNLTYPVLIDQYQTAGLFSFSTSLNKDEKGINMSRILESVEKHYDNGIELEFNTLYQLLRTLQEKMNQHAAGVDVSGKWFFDRFSPVTSIKAVGNANVTYGLSIDGHNVTRKELTVEAAVTTLCPCSKEISEYSAHNQRGIVTVKAYLVKNNDMVDDYKDKILDAMEANASSVLYPILKRPDEKRVTERAYENPRFVEDLIRLIAADLVEFDWIEGFDIECRNEESIHQHDAFARLKYRK

SEQ ID NO: 15092 - protein, 292 aa, Staphylococcus saprophyticus
  REGION 1..292: note = sp|Q49VB3|GCH4_STAS1 GTP cyclohydrolase FolE2; OS = Staphylococcus saprophyticus subsp. saprophyticus (strain ATCC 15305 / DSM 20229 / NCIMB 8711 / NCTC 7292 / S-41) OX =342451 GN=folE2 PE=3 SV=1
MTEFDLSTREGRWKHFGSVDPIEGTKPTIKEEMKDLQSTHKNFLFEIEEVGIKNLVYPVLVDRFQTAGNFSFSTSLNLDEKGINMSRILESVEKHYHNGIELDFDALYQLLRSLQERMNQNAAGLDVSAKWFFDRFSPITQIKAVGHADVTYGLAIDKQNVTRKEITIEAAVTTLCPCSKEISEYSAHNQRGIVTVKAYINKDIELIDNYKDVILDAMEANASSILYPILKRPDEKSVTERAYENPRFVEDLIRLIAADLVDFDWLDGFDIECRNEESIHQHDAFAKLKYRK

SEQ ID NO: 15093 - protein, 292 aa, Staphylococcus saprophyticus
  REGION 1..292: note = tr|A0A1D4I487|A0A1D4I487_STASA GTP cyclohydrolase FolE2 OS=Staphylococcus saprophyticus OX=29385 GN=folE2; PE = 3 SV=1
MTEFDLSTREGRWKHFGSVDPIEGTKPTIKEEMKDLQSTNKNFLFEIEEVGIKNLIYPVFVDRFQSAGNFSFSTSLNLDEKGINMSRILESVEKHYNNGIELDFDTLYQVLRSLQKNMNQNAAGLDVSAKWFFDRYSPVTQIKAVGHADVTYGLAIDQKDVTRKEITIEAAVTTLCPCSKEISEYSAHNQRGIVTVKAYINKDAALTEDYKDTILDAMEANASSVLYPILKRPDEKSVTERAYENPRFVEDLIRLIAADLVGFEWLDGFDIECRNEESIHQHDAFAKLKYRK

SEQ ID NO: 15094 - protein, 292 aa, Staphylococcus schleiferi
  REGION 1..292: note = tr|A0A3S0M6L8|A0A3S0M6L8_9STAP GTP cyclohydrolase FolE2 OS=Staphylococcus schleiferi subsp. schleiferi; OX = 74707 GN=folE2 PE=3 SV=1
MTQLDLSTREARWKYFGSVDPIKGTKPTEKEKMPDLQSSKKDFLFEIEHVGIKNLIYPVRIDDFQTVGNFEFSTSLNQDEKGINMSRIIESVEKHYDNGVKLDFDHLTTLLNTLQTAMIQNTASVDVTAKWFFNRFSPVTNQKAVGHADIRYILSVSEDKITKKSLGIEVPVTTLCPCSKEISEYSAHNQRGIITVLIDLDPEVSLPDNYKDIVLDGMEANASSMLYPILKRTDEKAVTERAYENPRFVEDLIRLVAADLVELDWIQGFEIECRNEESIHQHDAFARLKYTK

SEQ ID NO: 15095 - protein, 293 aa, Staphylococcus schleiferi
  REGION 1..293: note = tr|A0A0K0ZWW2|A0A0K0ZWW2_9STAP GTP cyclohydrolase FolE2 OS=Staphylococcus schleiferi OX=1295 GN=folE2 PE=3; SV = 1
MTEFDLSTREGRWRHFGSVDPVNGSKPTTKSEMPDLQSTHKNFLFEIEEVGIKNLVYPVWIDQYQTAGNFSFSTSLTQDEKGINMSRILESVEAEYDNGIRLEFEALTQLMNRLKTSMKQRSAGVDVSGKWFFDRLSPVTQIKAIGHADVTYGLAVDNDQVTRKELTIEAAVTTLCPCSKEISEYSAHNQRGMITVKTYIDKNAILPENYKEIILDAMEANASSMLYPILKRPDEKRVTERAYENPRFVEDLIRLIAADLVEVNWIEGFDIECRNEESIHQHDAFAKLKYRKS

SEQ ID NO: 15096 - protein, 292 aa, unidentified
  source 1..292: note = Staphylococcus schweitzeri
  REGION 1..292: note = tr|A0A2K4AES2|A0A2K4AES2_9STAP GTP cyclohydrolase FolE2 OS=Staphylococcus schweitzeri OX=1654388 GN=folE2; PE = 3 SV=1
MTEFDLSTREGRWKHFGSVDPIEGTKPTTKNEMTDLQSTHKDFLFEIEEVGIKNLVYPVLVDQYQTAGTFSFSTSLTKDEKGINMSRIIESVEKHYDNGIELEFNTLYQVLRTLQTNMKQNAAGVDVSGKWFFDRYSPTTNIKAVGNADVTYGLAIDGNQVTRKELTIEATVTTLCPCSKEISEYSAHNQRGVVTVKTYINKDQDIVDDYKNKILDAMEANASSILYPILKRPDEKRVTERAYENPRFVEDLIRLIAADLVEFDWLDGFDIECRNEESIHQHDAFAKLKYRK

SEQ ID NO: 15097 - protein, 292 aa, Staphylococcus sciuri
  REGION 1..292: note = tr|A0A3S0LMS6|A0A3S0LMS6_STASR GTP cyclohydrolase FolE2 OS=Staphylococcus sciuri subsp. rodentium OX=147469; GN = folE2 PE=3 SV=1
MTEFDLSTREGRWKHFGSVDPIQGTKPTTKAEMTDLQSTHKNFLFEIEEVGIKNLVYPVWIDHFQTAGNFSFSTSLNKDEKGINMSRILEAVEAEYDNGIRLEYDMLTQLLNRLKTHMKQHSAGVDVSGKWFFDRKSPVTNIKAVGHADVTYGLAVRGDEITRKELTVEAAVTTLCPCSKEISEYSAHNQRGIITVKTYINKTATLIADYKEIILDAMEANASSMLYPILKRPDEKRVTERAYENPRFVEDLIRLIAADLVELEWLDGFDIECRNEESIHQHDAFAKLKYRK

SEQ ID NO: 15098 - protein, 292 aa, Staphylococcus sciuri
  REGION 1..292: note = tr|A0A1X0U092|A0A1X0U092_STASC GTP cyclohydrolase FolE2 OS=Staphylococcus sciuri OX=1296 GN=folE2 PE=3 SV=1
MTQLDLSTREARWKYFGSVDPIKGTKPTEKEKMPDLQSSKKDFLFEIEHVGIKNLIYPVRIDDFQTVGNFEFSTSLNQDEKGINMSRIIESVEKHYDNGVKLDFDHLTTLLNTLQTAMIQNTASVDVTAKWFFNRFSPVTNQKAVGHADIRYILSVSEDKITKKSLGIEVPVTTLCPCSKEISEYSAHNQRGIITVLIDLDPEVSLPDNYKDIVLDGMEANASSMLYPILKRTDEKAVTERAYENPRFVEDLIRLVAADLVELEWIQGFEIECRNEESIHQHDAFARLKYTK

SEQ ID NO: 15099 - protein, 292 aa, Staphylococcus simiae
  REGION 1..292: note = tr|G5JF52|G5JF52_9STAP GTP cyclohydrolase FolE2; OS = Staphylococcus simiae CCM 7213 = CCUG 51256 OX=911238; GN = folE2 PE=3 SV=1
MTEFDLSTREGRWKHFGSVDPIQGTKPTTKEEMTDLQSTHKNFLFEIEEVGIKNLTYPVLIDQYQTAGKFSFSTSLNQNEKGINMSRIIESVEKHYDNGIELEFNTLYQLLRTLQHNMKQNAAGVDVSGKWFFDRFSPVTHIKSVGNADVSYGLAIEGDRITRKELTIQATVTTLCPCSKEISEYSAHNQRGVVTVKVYIDKEQNIVDDYKNKVLDAMEANASSMLYPILKRPDEKRVTERAYENPRFVEDLIRLIAADLVEFDWIDGFDIECRNEESIHQHDAFARLKYRK

SEQ ID NO: 15100 - protein, 292 aa, Staphylococcus simulans
  REGION 1..292: note = tr|A0A2T4QYE2|A0A2T4QYE2_STASI GTP cyclohydrolase FolE2 OS=Staphylococcus simulans OX=1286 GN=folE2 PE=3 SV=1
MTEFDLSTREGRWKHFGSVDPIKGTKPTVKEEMTDLQSTHKDFLFEIEEVGIKNLVYPVIIDEYQTAGTFAFSTSLTREEKGINMSRILESVEKHYDNGVALTFDNLHTVLDTLQKHMKQTSAGVDVSGKWFFNRYSPVTNLKAVGNADVTYGMAVEGDNVTRKELTMEAKVTTLCPCSKEISEYSAHNQRGVITVKTYLNREATLPSDYKEVILDAMEANASSILYPILKRPDEKRVTERAYENPRFVEDLIRLIAADLVEVDWIEGFDIECRNEESIHQHDAFAKLKYRK

SEQ ID NO: 15101 - protein, 292 aa, Staphylococcus simulans
  REGION 1..292: note = tr|A0A2X3QTI4|A0A2X3QTI4_STASI GTP cyclohydrolase FolE2 OS=Staphylococcus simulans OX=1286 GN=folE2 PE=3 SV=1
MTEFDLSTREGRWKHFGSVDPIKGTKPTVKEEMTDLQSTHKDFLFEIEEVGIKNLVYPVIIDEYQTAGTFAFSTSLTREEKGINMSRILESVEKHYDNGVALTFDNLHTVLDTLQKHMKQTSAGVDVSGKWFFNRYSPVTNLKAVGNADVTYGMAVEGDKVTRKELTMEAKVTTLCPCSKEISEYSAHNQRGVITVKTYLNREATLPSDYKEVILDAMEANASSILYPILKRPDEKRVTERAYENPRFVEDLIRLIAADLVEVDWIEGFDIECRNEESIHQHDAFAKLKYRK

SEQ ID NO: 15102 - protein, 292 aa, Staphylococcus sp.; identical to SEQ ID NO: 15052
  REGION 1..292: note = tr|A0A1J4HFB9|A0A1J4HFB9_9STAP GTP cyclohydrolase FolE2 OS=Staphylococcus sp. HMSC34G04 OX=1608860 GN=folE2; PE = 3 SV=1

SEQ ID NO: 15103 - protein, 292 aa, Staphylococcus sp.
  REGION 1..292: note = tr|A0A5B2YMW2|A0A5B2YMW2_9STAP GTP cyclohydrolase FolE2 OS=Staphylococcus sp. GDX7P459A OX=2608390 GN=folE2; PE = 3 SV=1
MTEFDLSTREGRWKHFGSVDPIEGTKPTTKNEMTDLQSTHKNFLFEIEEVGIKNLIYPVNIDRFQTAGQFSFSTSLNKDEKGINMSRILESVEKHYSNGLELNFDTLYQVLRTLQTNMKQNSAGVDVSGKWFFDRFSPVTNIKAVGNADVTYGLAIEHDQITRKEITIEATVTTLCPCSKEISEYSAHNQRGVVTVKVYLDKNNQVVDDYKDKILDAMEANASSILYPILKRPDEKRVTERAYENPRFVEDLIRLIAADLVEFDWIDGFDIECRNEESIHQHDAFAKLKYRK

SEQ ID NO: 15104 - protein, 292 aa, unidentified
  source 1..292: note = Staphylococcus stepanovicii
  REGION 1..292: note = tr|A0A240A962|A0A240A962_9STAP GTP cyclohydrolase FolE2 OS=Staphylococcus stepanovicii OX=643214 GN=folE2; PE = 3 SV=1
MTQIDLSTREARWRHFGSVDPIKGTKPTEKENMPDLQSSKKDFLFEIEHVGIKNLIYPVRIDDFQTVGNFEFSTSLNQDEKGINMSRIIESVEKHYDNGVNLDFESLKALLNTLQSVMFQNTASVDVDAKWFFNRYSPITKQKAVGHADVRYILSVNNSKVTRKSLGIKVPVTTLCPCSKEISEYSAHNQRGIITVLIDLDTEITLPSDYKDIVLDGMEANASSMLYPILKRTDEKAVTERAYENPRFVEDLIRLVAADLVELDWIKGFEIECRNEESIHQHDAFARLKYNK

SEQ ID NO: 15105 - protein, 292 aa, Staphylococcus succinus
  REGION 1..292: note = tr|A0A2T4Q5J8|A0A2T4Q5J8_9STAP GTP cyclohydrolase FolE2 OS=Staphylococcus succinus OX=61015 GN=folE2 PE=3; SV = 1
MTEFDLSTREGRWKHFGSVDPIDGTKPTIKEKMKDLQSTHKNFLFEIEEVGIKNLVYPVLLDRFQTAGNFSFSTSLNQDEKGINMSRILESVEKHYNNGIELNFDTLYQLLRSLQDSMNQNAAGLDVSAKWFYDRYSPVTQIKAVGHADVTYGLAIDKKDVTRKEITIEAAVTTLCPCSKEISEYSAHNQRGIVTVKAYINKNVALTDDYKDTILDAMEANASSILYPILKRPDEKSVTERAYENPRFVEDLIRLIAADLVDFEWIDGFDIECRNEESIHQHDAFAKLKYRK

SEQ ID NO: 15106 - protein, 292 aa, Staphylococcus vitulinus
  REGION 1..292: note = tr|A0A2T4PSA6|A0A2T4PSA6_9STAP GTP cyclohydrolase FolE2 OS=Staphylococcus vitulinus OX=71237 GN=folE2 PE=3; SV = 1
MTQLDLSTREARWKHFGSVDPIKGNKPTEKEKMPDLQSSKKDFLFEIEHVGIKNLIYPVRIDDFQTVGNFEFSTSLNQDEKGINMSRIIESVEKHYDNGVKLEFDHLTTLLNTLQSVMLQNTASLDVTAKWFFNRYSPITNQKAVGHADIRYILSVSDDKVTQKSLGIEVPVTTLCPCSKEISEYSAHNQRGIITVLIDLNPEIDLPDNYKDIVLDGMEANASSMLYPILKRTDEKAVTERAYENPRFVEDLIRLVAADLVELDWIKGFEIECRNEESIHQHDAFARLKYTK

SEQ ID NO: 15107 - protein, 192 aa, Staphylococcus warneri
  REGION 1..192: note = tr|A0A2V3ZDV6|A0A2V3ZDV6_STAWA GTP cyclohydrolase 1; OS = Staphylococcus warneri OX=1292 GN=folE PE=3 SV=1
MKHNPNLNNSQIEQTMSGIRQLINACGEDVSRDGLQETPYRVLKAFMEYTEGYREEPKEHLRKTFDVDHNELVIVKDIEFNSMCEHHFAPFYGRIHIGYIPDDKVTGLSKFGRLVDGYAKRFQVQERLTTQIANAIDEELSPQGVMVVVEAQHMCMCGRGIKKSTSSTTTSAVRGEFENSAQLRNEFLSLLK

SEQ ID NO: 15108 - protein, 292 aa, Staphylococcus warneri
  REGION 1..292: note = tr|A0A2V3ZCF8|A0A2V3ZCF8_STAWA GTP cyclohydrolase FolE2 OS=Staphylococcus warneri OX=1292 GN=folE2 PE=3 SV=1
MTEFDLSTREGRWKHFGSVDPIEGTKPTTKNEMTDLQSTHKNFLFEIEEVGIKNLTYPVLIDQFQTAGTFSFSTSLNKDEKGINMSRILESVEKHYNNGIELEFNTLYQVLRTLQEKMNQNAAGVDVSGKWFFDRFSPVTQIKAIGNADVTYGLAIEGTNVTRKELTIQAAVTTLCPCSKEISEYSAHNQRGIVTVKTYLNKDDIVIDDYKDKILDAMEANASSVLYPILKRPDEKRVTERAYENPRFVEDLIRLIAADLVEFDWIEGFDIECRNEESIHQHDAFARLKYRK

SEQ ID NO: 15109 - protein, 292 aa, Staphylococcus xylosus
  REGION 1..292: note = tr|A0A418IH14|A0A418IH14_STAXY GTP cyclohydrolase FolE2 OS=Staphylococcus xylosus OX=1288 GN=folE2 PE=3 SV=1
MTEFDLSTREGRWKHFGSVDPIEGTKPTVKENMKDLQSTHKDFLFEIEEVGIKNLVYPVLVDRFQTAGNFSFSTSLNQDEKGINMSRILESVEKHYHNGIELDFDSLYQLLRSLQESMNQNAAGLDVSAKWFFDRHSPVTQIKAVGHADVTYGLAIDKKEVTRKEITIQAAVTTLCPCSKEISEYSAHNQRGIVTVKAYINKDVELVDDYKGKILDAMEANASSILYPILKRPDEKSVTERAYENPRFVEDLIRLIAADLVGFEWLDGFDIECRNEESIHQHDAFAKLKYRK

SEQ ID NO: 15110 - protein, 292 aa, Staphylococcus xylosus
  REGION 1..292: note = tr|A0A512STG3|A0A512STG3_STAXY GTP cyclohydrolase FolE2 OS=Staphylococcus xylosus OX=1288 GN=folE2 PE=3 SV=1
MTEFDLSTREGRWKHFGSVDPIEGTKPTVKENMKDLQSTHKDFLFEIEEVGIKNLVYPVLVDRFQTAGNFSFSTSLNQDEKGINMSRILESVEKHYHNGIELDFDSLYQLLRSLQESMNQNAAGLDVSAKWFFDRHSPVTQIKAVGHADVTYGLAIDKKEITRKEITIQAAVTTLCPCSKEISEYSAHNQRGIVTVKAYINKDVELVDDYKGKILDAMEANASSILYPILKRPDEKSVTERAYENPRFVEDLIRLIAADLVGFEWLDGFDIECRNEESIHQHDAFAKLKYRK

SEQ ID NO: 15111 - protein, 211 aa, Stappia indica
  REGION 1..211: note = tr|A0A285TRC3|A0A285TRC3_9RHOB GTP cyclohydrolase 1; OS = Stappia indica OX=538381 GN=folE PE=3 SV=1
MDAILKPVTTRDDTAAATRPRPSREEVEAAVRTLLAWTGDDPEREGLLDTPKRVAKAYEEIFSGYFQDPAEHLKRTFEDVGGYDDIVLVRGIPFFSHCEHHMLPFVGEAHVAYYPSEGVVGLSKIARVIDIFAKRLQTQENLTAQVVDAIDTHLAPRGIAVMIEAEHQCMTMRGVQKQGVSTITTQFTGVFRDDPSEQVRFMSLVRGGRRD

SEQ ID NO: 15112 - protein, 208 aa, Stappia sp.
  REGION 1..208: note = tr|A0A2E6Y9P4|A0A2E6Y9P4_9RHOB GTP cyclohydrolase 1; OS = Stappia sp. OX=1870903 GN=folE PE=3 SV=1
MDAILNPVGDNGQATRPERPTREEAEAAVRTLLAWAGDDPTREGLLDTPKRVAKAYGEIFAGYAQDPGEHLERTFEDVGGYDDIVLVRGIPFFSHCEHHMLPFVGTAHVAYYPSEGVVGLSKIARVVDIFAKRLQTQENLTAQIIGSLDEHLSPRGIAVMLEAEHQCMTMRGVQKQGVSTITTQFTGVFRDDPSEQVRFMSLVRDQRR

SEQ ID NO: 15113 - protein, 211 aa, Stappia sp.
  REGION 1..211: note = tr|A0A1H2GQZ8|A0A1H2GQZ8_9RHOB GTP cyclohydrolase 1; OS = Stappia sp. ES.058 OX=1881061 GN=folE PE=3 SV=1
MDAILNPVAQRDDSTESPLARPTREQAEAAVRTLLAWAGDDPTREGVLDTPKRVAKAYQEIFSGYDQDPAEHLKRTFEDVGGYDDIVLVRGIPFFSHCEHHMLPFVGEAHVAYYPSEGVVGLSKIARVVDIFAKRLQTQENLTAQITEAMDTHLAPRGIAVMLEAEHQCMTMRGVQKRGVSTITTQFTGVFRDDPTEQVRFMSLIRDARRG

SEQ ID NO: 15114 - protein, 221 aa, Starkeya novella
  REGION 1..221: note = tr|A0A2W5KLM5|A0A2W5KLM5_STANO GTP cyclohydrolase 1; OS = Starkeya novella OX=921 GN=folE PE=3 SV=1
MDAVVQHPWARVPIPAPKQSSVPAEFVKPRPTREQAEAAVRTLIAWAGDDPTREGLIDTPKRVVKAYAELFSGYGKDAATDLERVFEEVAGYDDMVVLRDIPYFSHCEHHMVPFFGKAHVAYFPSNGVVGLSKIARVVDAFSKRLQTQETLTSQIAEAIDEHLKPRGVAVMLEGEHMCMSMRGIQKAGVSTVTTQFSGLFKDEPAEQVRFITMVRAGQSGR

SEQ ID NO: 15115 - protein, 214 aa, Starkeya novella
  REGION 1..214: note = tr|A0A2W5QSS8|A0A2W5QSS8_STANO GTP cyclohydrolase 1; OS = Starkeya novella OX=921 GN=folE PE=3 SV=1
MDAVLKSLMRSAQNESDAAAAAVKRPSREEAEAAVRTLIAWTGDDPEREGLLDTPKRVVRAYEELYSGYRADAETILDRTFGEIGNFDDMVLVRDIEFYSHCEHHMVPFVGKAHVAYFPVERVVGLSKIARIVDIFARRLQTQEHLTSQITTAMDEILKPRGVAVLIEAEHMCMAMRGVRKQGASTVTSQFTGLFRDDPQEQVRFMSLLRGMRP

SEQ ID NO: 15116 - protein, 212 aa, Starkeya sp.
  REGION 1..212: note = tr|A0A556PG06|A0A556PG06_9RHIZ GTP cyclohydrolase 1; OS = Starkeya sp. 3C OX=2597768 GN=folE PE=3 SV=1
MDAVLKSLMRSAQNEIEASAARRPSREDAEAAVRTLIAWAGDDPSREGLLDTPKRVVRAYEELYSGYRADPESILDRTFGEIGNFDDMVLVRDIEFYSHCEHHMVPFVGKAHVAYFPVERVVGLSKIARIVDLFARRLQTQEHLTSQIVTAMDEILKPRGVAVLLEAEHMCMAMRGVRKQGASTVTTQFTGVFRDDPQEQVRFMSLLRGMRP

SEQ ID NO: 15117 - protein, 208 aa, Stella humosa
  REGION 1..208: note = tr|A0A3N1L0A7|A0A3N1L0A7_9PROT GTP cyclohydrolase 1; OS = Stella humosa OX=94 GN=folE PE=3 SV=1
MTTEDPQAPPSDRPTQSEAEAAVRTLIRWAGDDPAREGLLDTPSRVARSFAEFFGGYELDPVGVLQRTFEEVEGYDEMVVLRDIRFESHCEHHLAPIIGKAHVAYLPRTRVVGISKLARVVDLYARRLQIQEKMTAQIANAIEEVLQPHGVAVVIEASHQCMTTRGVHKPGTSLVTSRMLGAFRADAATRREFLAFVGVGGAPGMTNV

SEQ ID NO: 15118 - protein, 213 aa, Stella humosa
  REGION 1..213: note = tr|A0A3N1M688|A0A3N1M688_9PROT GTP cyclohydrolase 1; OS = Stella humosa OX=94 GN=folE PE=3 SV=1
MDALTLPPPDRTSAAPTTGRPTREEAEAAIRTLIGWAGDDVGREGLLDTPARVVRAYEEFFGGYRLDPVEILNRTFDETEGYDEMVLLKDIRFESHCEHHMVPIIGRAHVAYLPRSRVVGISKLARVVDAYARRLQIQEKLTAQIAQAIDTALQPLGVAVVIEAQHQCMTTRGVHKPGVSMVTSRMLGAFRTDPVARQEFMLAIGGRAGAAAA

SEQ ID NO: 15119 - protein, 312 aa, Stenotrophomonas acidaminiphila
  REGION 1..312: note = tr|A0A2W5LLP5|A0A2W5LLP5_9GAMM GTP cyclohydrolase FolE2 OS=Stenotrophomonas acidaminiphila OX=128780; GN = folE2 PE=3 SV=1
MTMAPSLPVAPRADLPDVAHQRVPLARPLDWVGMENIALPVRIADGQGGQLQVAASIDLSVNLANPDARGIHMSRLYLQLQDGLAREAITPAGLRHLLQDGVASQAGLATSARLKIRYDALLQRKALESDYAGWKRYPVEIEATLVDGHLGLALSFAVEYSSTCPASAALSRQANAERFASDFDGSPALSVAAVHDWLASERGLAATPHAQRSRASVRVELRPQFDELPLVPLVDAIEAALGTPVQTAVKRVDEQAFARLNAENLMFCEDAARRVASVLAGDARVARYDATVAHYESLHPHDAVARVSGSND

SEQ ID NO: 15120 - protein, 199 aa, Stenotrophomonas acidaminiphila
  REGION 1..199: note = tr|A0A0R0E0M3|A0A0R0E0M3_9GAMM GTP cyclohydrolase 1; OS = Stenotrophomonas acidaminiphila OX=128780 GN=folE PE=3; SV = 1
MADSNNPSVTQAQAEEAVRTLLRWAGEDPAREGLLDTPRRVAEAYGDWFKGYQDDPREYLARTFEEVAGYDEMIVLRDIEYESHCEHHMAPIIGRVHVGYVPNGRVVGISKLARVVEAYARRFQVQEKMTAQIADVIQDVLQPLGVGVVVEGSHECMTTRGIHKRGVSMVTSRMRGSFHDDARTRAEFLRFIEVGHARR

SEQ ID NO: 15121 - protein, 203 aa, Stenotrophomonas chelatiphaga
  REGION 1..203: note = tr|A0A0R0D6A4|A0A0R0D6A4_9GAMM GTP cyclohydrolase 1; OS = Stenotrophomonas chelatiphaga OX=517011 GN=folE PE=3; SV = 1
MSNDNNSKAPQGDVSQTQAEEAVRTLLRWAGEDPTREGLLDTPRRVAEAYGDWFSGYRDDPRAYMERTFEEVAGYDELIVLRDIEYESHCEHHMAPIIGRVHVGYLPAGKVVGISKLARVVEAYARRFQVQEKMTAQIAQCIQDVLQPIGVGVVVEGAHECMTTRGIHKRGVSMVTSKMLGSFREDARTRAEFLRFIEVGGKR

SEQ ID NO: 15122 - protein, 199 aa, Stenotrophomonas daejeonensis
  REGION 1..199: note = tr|A0A0R0E3Z1|A0A0R0E3Z1_9GAMM GTP cyclohydrolase 1; OS = Stenotrophomonas daejeonensis OX=659018 GN=folE PE=3; SV = 1
MADPENPSVTQAQAEEAVRTLLRWAGEDPAREGLLDTPRRVAEAYGDWFKGYHDDPREYLERTFEEVAGYDEMIVLRDIEYESHCEHHMAPIIGRVHVGYVPDGRVVGISKLARVVEAYARRFQVQEKMTAQIADCIQDVLRPLGVGVVVEGAHECMTTRGIHKRGVSMVTSRMRGTFHDDARTRAEFLRFIEVGHARR

SEQ ID NO: 15123 - protein, 199 aa, Stenotrophomonas ginsengisoli
  REGION 1..199: note = tr|A0A0R0D6G3|A0A0R0D6G3_9GAMM GTP cyclohydrolase 1; OS = Stenotrophomonas ginsengisoli OX=336566 GN=folE PE=3; SV = 1
MADSDKSTITQAQAEEAVRTLLLWAGEDPSREGLLDTPRRVAKAYGDWFSGYREDPREYMARTFEEVAGYDEMIVLRDIEYESHCEHHMAPIIGRVHVGYIPNGKVVGISKLARVVETYARRFQVQEKMTAQIASCIQDVLQPLGVAVVVEGSHECMTTRGVHKRGVSMVTSRMLGIFHDDARTRAEFLQFVQSGNGRR

SEQ ID NO: 15124 - protein, 199 aa, Stenotrophomonas humi
  REGION 1..199: note = tr|A0A0R0C821|A0A0R0C821_9GAMM GTP cyclohydrolase 1; OS = Stenotrophomonas humi OX=405444 GN=folE PE=3 SV=1
MADSKNPSVTQAQAEDAVRTLLRWAGEDPTREGLLDTPRRVAEAYGDWFKGYNDDPREYLARTFEEVAGYDEMIVLRDIEYESHCEHHMAPIIGRVHVGYIPNGRVVGISKLARVVEAYARRFQVQEKMTAQIADVIQDVLQPLGVGIVVEGAHECMTTRGIHKRGVSMVTSRMRGTFHDDARTRAEFLRFIEVGQARR

SEQ ID NO: 15125 - protein, 199 aa, Stenotrophomonas koreensis
  REGION 1..199: note = tr|A0A0R0BTJ6|A0A0R0BTJ6_9GAMM GTP cyclohydrolase 1; OS = Stenotrophomonas koreensis OX=266128 GN=folE PE=3 SV=1
MADSDKSPVTQAQAEEAVRTLLLWAGEDPTREGLLDTPRRVAKAYGDWFSGYDIDPREYLQRTFEEVAGYDEMIVLRDIEYESHCEHHMAPIIGKVHVGYIPNGKVVGISKLARVVEAYARRFQVQEKMTAQIATCIQDVLQPLGVAVVVEGAHECMTTRGVHKRGVSMVTSRMLGSFHDDARTRAEFLQFVQSGSGRR

SEQ ID NO: 15126 - protein, 203 aa, unidentified
  source 1..203: note = Stenotrophomonas lactitubi
  REGION 1..203: note = tr|A0A2M9QQK2|A0A2M9QQK2_9GAMM GTP cyclohydrolase 1; OS = Stenotrophomonas lactitubi OX=2045214 GN=folE PE=3 SV=1
MSKNNEKAAPQGDVTQVQAEDAVRTLLRWAGEDPTREGLLDTPRRVAEAYGDWFSGYRDDPRAYMERTFEEVAGYDELIVLRDIEYESHCEHHMAPIIGRVHVGYLPAGKVVGISKLARVVEAYARRFQVQEKMTAQIAQCIQDVLQPVGVGVVVEGAHECMTTRGIHKRGVSMVTSKMLGSFREDARTRAEFLRFIEVGGKR

SEQ ID NO: 15127 - protein, 203 aa, Stenotrophomonas maltophilia
  REGION 1..203: note = tr|A0A2J0V6V9|A0A2J0V6V9_STEMA GTP cyclohydrolase 1; OS = Stenotrophomonas maltophilia OX=40324 GN=folE PE=3 SV=1
MSKNNEKAAPQGDVTQDQAEDAVRILLRWAGEDPSREGLLDTPRRVAEAYGDWFSGYRDDPRAYMERTFEEVAGYDELIVLRDIEYESHCEHHMAPIIGRVHVGYLPAGKVVGISKLARVVEAYARRFQVQEKMTAQIAQCIQDVLQPIGVGVVVEGAHECMTTRGIHKRGVSMVTSKMLGSFRDDARTRAEFLRFIEVGGKR

SEQ ID NO: 15128 - protein, 203 aa, Stenotrophomonas maltophilia; identical to SEQ ID NO: 5274
  REGION 1..203: note = tr|A0A0F5ZPA8|A0A0F5ZPA8_STEMA GTP cyclohydrolase 1; OS = Stenotrophomonas maltophilia OX=40324 GN=folE PE=3 SV=1

SEQ ID NO: 15129 - protein, 201 aa, unidentified
  source 1..201: note = Stenotrophomonas panacihumi
  REGION 1..201: note = tr|A0A0R0A909|A0A0R0A909_9GAMM GTP cyclohydrolase 1; OS = Stenotrophomonas panacihumi OX=676599 GN=folE PE=3 SV=1
MSASKNTPDSDVTQAQAEEAVRTLLRWAGEDPAREGLLDTPRRVAEAYGDWFSGYRDDPREYLARTFEEVAGYDELIVLRDIEYESHCEHHMAPIIGKVHVGYLPDGKVVGISKLARVVETYARRFQVQEKMTAQIAQCIQDVLGPRGVGVVVEGAHECMTTRGIHKRGVSMVTSKMLGTFREDARTRAEFLRFIEVGGKR

SEQ ID NO: 15130 - protein, 203 aa, Stenotrophomonas pavanii; identical to SEQ ID NO: 5274
  REGION 1..203: note = tr|A0A246KZ33|A0A246KZ33_9GAMM GTP cyclohydrolase 1; OS = Stenotrophomonas pavanii OX=487698 GN=folE PE=3 SV=1

SEQ ID NO: 15131 - protein, 199 aa, unidentified
  source 1..199: note = Stenotrophomonas pictorum
  REGION 1..199: note = tr|A0A0R0AJQ6|A0A0R0AJQ6_9GAMM GTP cyclohydrolase 1; OS = Stenotrophomonas pictorum JCM 9942 OX=1236960 GN=folE; PE = 3 SV=1
MAESPKSPVTQAQAEAAVRTLLEWAGEDPTREGLLDTPRRVAEAYGDWFSGYREDPRAYMARTFEEVAGYDEMIVLRDIEYESHCEHHMAPIIGRVHVGYVPNGRVVGISKLARVVEAYARRFQVQEKMTAQIADCIQDVLQPLGVGVVVEGAHECMTTRGIHKRGVSMVTSRMRGSFHDDARTRAEFLRFIEVGQARR

SEQ ID NO: 15132 - protein, 210 aa, Stenotrophomonas rhizophila
  REGION 1..210: note = tr|A0A1B2MZ04|A0A1B2MZ04_9GAMM GTP cyclohydrolase 1; OS = Stenotrophomonas rhizophila OX=216778 GN=folE PE=3 SV=1
MLAPLRVLYVMSKQDNDVTPVTQDEAESAVRTLLRWAGEDPTREGLLDTPRRVAEAYGDWFSGYRDDPRAYMERTFEEVAGYDELIVLRDIEYESHCEHHMAPIIGRVHVGYLPAGKVVGISKLARVVEAYARRFQVQEKMTAQIAQCIQDVLQPIGVGVVVEGAHECMTTRGIHKRGVSMVTSKMLGSFREDARTRAEFLRFIEVGGKR

SEQ ID NO: 15133 - protein, 200 aa, Stenotrophomonas rhizophila
  REGION 1..200: note = tr|A0A023Y9H0|A0A023Y9H0_9GAMM GTP cyclohydrolase 1; OS = Stenotrophomonas rhizophila OX=216778 GN=folE PE=3 SV=1
MSKKDNDATPVTQADAESAVRTLLRWAGEDPTREGLLDTPRRVAEAYGDWFSGYRDDPRAYMERTFEEVAGYDELIVLRDIEYESHCEHHMAPIIGRVHVGYLPAGKVVGISKLARVVEAYARRFQVQEKMTAQIAQCIQDVLQPVGVGVVVEGAHECMTTRGIHKRGVSMVTSKMLGSFREDARTRAEFLRFIEVGGKR

SEQ ID NO: 15134 - protein, 199 aa, Stenotrophomonas sp.
  REGION 1..199: note = tr|A0A4R4IER3|A0A4R4IER3_9GAMM GTP cyclohydrolase 1; OS = Stenotrophomonas sp. ATCM1_4 OX=2259330 GN=folE PE=3; SV = 1
MTDSKNPPVTQAQAEDAVRTLLRWAGEDPAREGLLDTPRRVAEAYGDWFKGYQDDPREYLARTFEEVAGYDEMIVLRDIEYESHCEHHMAPILGRVHVGYVPNGRVVGISKLARVVEAYARRFQVQEKMTAQIADVIQDVLQPLGVGVVVEGSHECMTTRGIHKRGVSMVTSRMRGTFHDDARTRAEFLRFIEVGHARR

SEQ ID NO: 15135 - protein, 203 aa, Stenotrophomonas sp.
  REGION 1..203: note = tr|A0A2T3WLS5|A0A2T3WLS5_9GAMM GTP cyclohydrolase 1; OS = Stenotrophomonas sp. Nf4 OX=2116542 GN=folE PE=3 SV=1
MSKNNEKAAPQGDVTQDQAEDAVRTLLRWAGEDPSREGLLDTPRRVAEAYGDWFSGYRDDPRAYMERTFEEVAGYDELIVLRDIEYESHCEHHMAPIIGRVHVGYLPAGKVVGISKLARVVEAYARRFQVQEKMTAQIAQCIQDVLQPIGVGVVVEGAHECMTTRGIHKRDVSMVTSKMLGSFRDDARTRAEFLRFIEVGGKR

SEQ ID NO: 15136 - protein, 199 aa, Stenotrophomonas terrae
  REGION 1..199: note = tr|A0A0R0C752|A0A0R0C752_9GAMM GTP cyclohydrolase 1; OS = Stenotrophomonas terrae OX=405446 GN=folE PE=3 SV=1
MADSKNPSVTQAQAEDAVRTLLRWAGEDPAREGLLDTPRRVAEAYGDWFKGYHEDPREYLARTFEEVAGYDEMIVLRDIEYESHCEHHMAPIIGRVHVGYVPNGRVVGISKLARVVEAYARRFQVQEKMTAQIADVIQDVLQPMGVGIVVEGAHECMTTRGIHKRGVSMVTSRMRGTFHDDARTRAEFLRFIEVGHARR

SEQ ID NO: 15137 - protein, 283 aa, Steroidobacter denitrificans
  REGION 1..283: note = tr|A0A127FAR2|A0A127FAR2_STEDE GTP cyclohydrolase FolE2 OS=Steroidobacter denitrificans OX=465721 GN=folE2; PE = 3 SV=1
MSTLPSNVQSATQPPTITSIEDVQGRADSRRIPINKVGIKEVYHPVRVKDRSRGEQHTVASFNMYVALPHHFKGTHMSRFVEILHGNEREISVESFREILIEMTRRLDAQSGHIEMEFPYFVMKKAPVSGVESLMNYKASLIGEFHGGEPELWLKVVVAVTSLCPCSKGISDYGAHNQRSHITIKARIDGHMWLEELIDIAEQEASCEVYGILKRPDEKFVTERAYDNPKFVEDIVRDVAVRMNDEARVLAYVVEAENFESIHNHSAYALIEHNKTAEPVQGD

SEQ ID NO: 15138 - protein, 202 aa, Steroidobacter denitrificans
  REGION 1..202: note = tr|A0A127FBT6|A0A127FBT6_STEDE GTP cyclohydrolase 1; OS = Steroidobacter denitrificans OX=465721 GN=folE PE=3 SV=1
MIRVPRKKSPRPAVPGVTEEQAQEAIRVLLRWAGEDPRREGLLDTPARVVGAYRDWFAGYLSDPADYLRRTFEEVDGYDEMIVLRGIEFESHCEHHMAPIIGCAHVGYLPTNKVVGISKLARVVDGYARRFQVQEKLTAQIANCIESVLKPRGVAVVVNAVHQCMTTRGVHKRGVSMITSAMRGDFRDDARTRDEFLRFIKE

SEQ ID NO: 15139 - protein, 153 aa, Stigmatella aurantiaca
  REGION 1..153: note = tr|Q08SR8|Q08SR8_STIAD GTP cyclohydrolase I 2; OS = Stigmatella aurantiaca (strain DW4/3-1) OX=378806; GN = STIAU_7211 PE=4 SV=1
MTEFLDGYALTPEEAIGTVYPAPPDSAGEMVVVTDLRFHSMCPHHLLPYEGRAHVAYVPGKHVVGFGRLSTLVDCFAHRLILQEDLARHVASALARVLGSPATACILEAKQACMRLRGEQQRDAITHVEAYEGRLRKEGPLRRELWARLGART

SEQ ID NO: 15140 - protein, 211 aa, Streptacidiphilus jiangxiensis
  REGION 1..211: note = tr|A0A1H7VNT8|A0A1H7VNT8_STRJI GTP cyclohydrolase 1; OS = Streptacidiphilus jiangxiensis OX=235985 GN=folE PE=3; SV = 1
MSTLLDTTAEEPELTTVSRLRVSHQSEGIDLDEAERAAAAFLSALGVATDSASLKDTPKRMAHAYAEMFSPRPFDLTTFPNDEGYDELVLARRIPVRSVCEHHLLPFVGIAHVGYLPGKGILGLSKLARVVEHFSCRPQVQERLTKQIADWLDEHLEPKGVGVVIEAEHTCMSLRGVRAVGSNTVTSTLLGTLRKDARSRQEFFALTGMNP

SEQ ID NO: 15141 - protein, 202 aa, Streptacidiphilus jiangxiensis
  REGION 1..202: note = tr|A0A1H7PZS1|A0A1H7PZS1_STRJI GTP cyclohydrolase 1; OS = Streptacidiphilus jiangxiensis OX=235985 GN=folE PE=3; SV = 1
MIDPVTVEGSTGAVREFDQKRAEDAVRELLIAVGENPDREGLRDTPARVARAYKEIFAGLYQEPEDVLTTVFDLGHDELVLVKDIELVSCCEHHLLPFHGVAHVGYIPAESGKITGLSKLARLVDVFARRPQVQERLTTQIADSLMRILEARGVIVVVEAEHMCMSVRGIRKPGAKTMTSAVRGQLRDGKTRAEAMSLIVSR

SEQ ID NO: 15142 - protein, 202 aa, unidentified
  source 1..202: note = Streptacidiphilus pinicola
  REGION 1..202: note = tr|A0A2X0ISR8|A0A2X0ISR8_9ACTN GTP cyclohydrolase 1; OS = Streptacidiphilus pinicola OX=2219663 GN=folE PE=3 SV=1
MIDPVTVEGSIGAVREFDQKRAEDAVRELLIAVGENPDREGLRDTPARVARAYKEIFAGLYQEPEDVLTTVFDLGHDELVLVKDIELVSCCEHHLLPFHGVAHVGYIPAENGKITGLSKLARLVDVFARRPQVQERLTTQIADSLMRILEARGVIVVVEAEHMCMSVRGIRKPGAKTMTSAVRGQLRDGKTRAEAMSLIIGR

SEQ ID NO: 15143 - protein, 201 aa, Streptacidiphilus sp.
  REGION 1..201: note = tr|A0A345SYT1|A0A345SYT1_9ACTN GTP cyclohydrolase 1; OS = Streptacidiphilus sp. DSM 106435 OX=2126346 GN=folE; PE = 3 SV=1
MTDPVTLDGEATVGVFDQKRAEDAVRELLIAIGEDPDREGLRETPARVARAYQEIFSGLWQQPEDVLTTTFDLGHDEMVLVKDIEVYSTCEHHLVPFRGVAHVGYIPSTSGKITGLSKLARLVDVYARRPQVQERLTTQVADALMRILEPRGVIVVFECEHMCMSMRGIRKPGAKTLTSAVRGQLRDPATRAEAMSLIIGR

SEQ ID NO: 15144 - protein, 209 aa, Streptoalloteichus hindustanus
  REGION 1..209: note = tr|A0A1M4VZ37|A0A1M4VZ37_STRHI GTP cyclohydrolase 1; OS = Streptoalloteichus hindustanus OX=2017 GN=folE PE=3 SV=1
MTSTVDDVTDAAGGVLPRRRAFDQARAEAAVRELLLACGEDPDREGLRDTPARVARAYRELFAGLHTDPDAVLNRTFDESHEELVLVTDIPMYSTCEHHLLPFHGVAHVGYIPNEHGRVTGLSKLARLVDLYAKRPQVQERLTSQVADALVRKLDPRGVIVVVEAEHLCMGMRGIRKAGSKTTTSAVRGLLRTSASSRAEALALINQRR

SEQ ID NO: 15145 - protein, 209 aa, Streptoalloteichus hindustanus
  REGION 1..209: note = tr|A0A1M5DBX5|A0A1M5DBX5_STRHI GTP cyclohydrolase 1; OS = Streptoalloteichus hindustanus OX=2017 GN=folE PE=3 SV=1
MTNTLDRLAPPRGSQDLMSSGPVDIERVADLVGQLLAAIGEDPGREGLSETPVRVAAWWRSFFSPEPSATPTCFTEQHLSDQLVVIGGMSVWSLCEHHLLPMNLDVAVGYVPDDEVMGLSKFGRIAQRCAGRLQVQERFTQQVADEIAVVIGSTDLAVAVRGTHLCMSARGVRMEAARTTTLKAGGRFKSDPVLSQQFLTLATARWRAA

SEQ ID NO: 15146 - protein, 187 aa, Streptococcus acidominimus
  REGION 1..187: note = tr|A0A239X6P2|A0A239X6P2_STRAI GTP cyclohydrolase 1; OS = Streptococcus acidominimus OX=1326 GN=folE PE=3 SV=1
MINQKKAEEAIYSLLQAIGEDPEREGLLDTPKRVAKMYAEMFSELNSDPREQFTAVFSEGHEEMILVKDIPFYSMCEHHLIPFYGVAHAAYLPSDGRVTGLSKVARAVEVAARRPQLQERLTAQVANALQEAMQPKGVYVMLEAEHLCMTMRGIKKPGSKTVTTVSRGIYQTDVEARGQVIAMIRGK

SEQ ID NO: 15147 - protein, 187 aa, Streptococcus agalactiae
  REGION 1..187: note = sp|Q3K0Y1|GCH1_STRA1 GTP cyclohydrolase 1; OS = Streptococcus agalactiae serotype Ia (strain ATCC 27591 / A909 / CDC SS700) OX=205921 GN=folE PE=3 SV=1
MPNQEKMEKAIYQFLEALGENPDREGLKDTPKRVAKMYIEMFSGLNQDPKEQFTAVFSENHEEVVIVKDIPFYSMCEHHLVPFYGKAHIAYLPNDGRVTGLSKLARAVEVASKRPQLQERLTAQVAQALEDALAPKGIFVMIEAEHMCMTMRGIKKPGSKTITTVARGLYKDDRYERQEILSLIQKG

SEQ ID NO: 15148 - protein, 187 aa, Streptococcus agalactiae
  REGION 1..187: note = tr|K0JNG7|K0JNG7_STRAG GTP cyclohydrolase 1; OS = Streptococcus agalactiae OX=1311 GN=folE PE=3 SV=1
MPNQEKMEKAIYQFLEALGENPNREGLKDTPKRVAKMYIEMFSGLNQDPKEQFTAVFSENHEEVVIVKDIPFYSMCEHHLVPFYGKAHIAYLPNDGRVTGLSKLARAVEVASKRPQLQERLTAQVAQALEDALAPKGIFVMIEAEHMCMTMRGIKKPGSKTITTVARGLYKDDRYERQEILSLIQKG

SEQ ID NO: 15149 - protein, 184 aa, Streptococcus australis
  REGION 1..184: note = tr|A0A428HNG3|A0A428HNG3_9STRE GTP cyclohydrolase 1; OS = Streptococcus australis OX=113107 GN=folE PE=3 SV=1
MDTKKIQEAVKMIIDAVGEDGSREGLQETPERIAKMYQEIFAGLNQTAEVHLSKSFEIVDNNMVVEKDIFFHSMCEHHFLPFYGKVHIAYIPNGRVAGLSKLARTVEVYAKKPQIQERLTVEIADALMEYLGAQGALVWVEAEHMCMNMRGVRKPGTATVTTAARGLLETDKDLKNEAYKLMGH

SEQ ID NO: 15150 - protein, 265 aa, Streptococcus australis
  REGION 1..265: note = tr|A0A3R9KZT2|A0A3R9KZT2_9STRE Putative GTP cyclohydrolase 1 type 2 OS=Streptococcus australis; OX = 113107 GN=D8785_01035 PE=4 SV=1
MLASEVIKRYEAYCPQELSMEGDVRGLQVGTLQKVIKKVMVALDIREQTVAEAIAHGVDLIIVKHAPIFRPIKDLVADRAQNQIYIDLIKHDIAVYVSHTNIDIVPDGLNDWFCQLLEIENPEPLSLTGEGLGIGRIGQVRAQTFGQLAEKVKETFGLDALRLIGYDQADLDRVIERVAICGGSGQSFYKDALAKGAEVYITGDIYYHTAQDMLSDGLLGLDPGHHIEVLFVKKLVEKLNQWKSEEAWEIEVFGSQASTNPFYHI

SEQ ID NO: 15151 - protein, 187 aa, unidentified
  source 1..187: note = Streptococcus bovimastitidis
  REGION 1..187: note = tr|A0A1L8MP70|A0A1L8MP70_9STRE GTP cyclohydrolase 1; OS = Streptococcus bovimastitidis OX=1856638 GN=folE PE=3; SV = 1
MNSQKAEEAIYQLLEALGEDPQREGLLDTPKRVAKMYAEMFAGLEQDPKEEFTAVFAEETYDDIVLVKDIPFYSMCEHHLVPFYGKAHVAYYPADGRVTGLSKLARAVEVASKRPQLQERLTSQIATALDEALHPHGVFVVVEAEHMCMTMRGIKKPGSKTITKMAKGSLVGDRDSQRYILELMKDK

SEQ ID NO: 15152 - protein, 188 aa, Streptococcus canis
  REGION 1..188: note = tr|A0A2D4DMW0|A0A2D4DMW0_STRCB GTP cyclohydrolase 1; OS = Streptococcus canis OX=1329 GN=folE PE=3 SV=1
MSINKEKAEAAIYQFLEAIGENPNREGLLDTPKRVTKMYAEMFVGLEKDPKEEFTAVFTEHHEDVVIVKDISFYSMCEHHLVPFYGKAHIAYLPSDGRVTGLSKLARAVEVASKRPQLQERLTSQIADALVEALRPKGVLVLVEAEHMCMTMRGIKKPGSKTITTTARGLYKENRAERQEIMALMTRD

SEQ ID NO: 15153 - protein, 188 aa, Streptococcus canis
  REGION 1..188: note = tr|A0A3P5XN55|A0A3P5XN55_STRCB GTP cyclohydrolase 1; OS = Streptococcus canis OX=1329 GN=folE PE=3 SV=1
MSINKEKAEAAIYQFLEAIGENPNREGLLDTPKRVAKMYAEMFVGLEKDPKEEFTAVFTEHHEDVVIVKDISFYSMCEHHLVPFYGKAHIAYLPSDGRVTGLSKLARAVEVASKRPQLQERLTSQIADALVEALRPKGVLVLVEAEHMCMTMRGIKKTGSKTITTTARGLYKENRAERQEIMALMTRD

SEQ ID NO: 15154 - protein, 265 aa, Streptococcus constellatus
  REGION 1..265: note = tr|A0A564TUV2|A0A564TUV2_STRCV GTP cyclohydrolase 1 type 2 OS=Streptococcus constellatus OX=76860; GN = SCSS39_01978 PE=4 SV=1
MLASDVINRYEAYCPQDLSEEGDVRGLQIGTLNKEVKRILVALDIREQTVAEAIEKGVDLILVKHAPIFRPIKDLVAERSQNQIYINLIKHDIAVYVSHTNIDIVDDGLNDWFCDLLEITDTDYLSETAPGHGIGRVGKIAPQTFGEFSSKVKEIFDLDSLRLVSYSAVDLERMIEKVAICGGSGQSLYKEALAKGAQVYITGDIYYHTAQDMLSDGLLALDPGHHIEVLFVKKLVEKFQDWKVEEGWEVEFLASQVSTNPFKHI

SEQ ID NO: 15155 - protein, 187 aa, Streptococcus criceti
  REGION 1..187: note = tr|G5JNJ8|G5JNJ8_STRCG GTP cyclohydrolase 1; OS = Streptococcus criceti HS-6 OX=873449 GN=folE PE=3 SV=1
MINQEKAEAAIYQLLEAVGEDPHREGLLDTPQRVARMYAEMFAGLDENPKDQFTAVFSENHEEVVLVKDIPFYSMCEHHLVPFYGVAHVAYLPDQGKVTGLSKLARAVEVASKRPQLQERLTEQVATALEEALAPKGVFVMVEAEHMCMTMRGIKKPGSKTVTTVARGIFQEDKGQRQELLHLIKEF

SEQ ID NO: 15156 - protein, 265 aa, Streptococcus cristatus
  REGION 1..265: note = tr|A0A3R9KW11|A0A3R9KW11_STRCR Putative GTP cyclohydrolase 1 type 2 OS=Streptococcus cristatus; OX = 45634 GN=D8790_04455 PE=4 SV=1
MLASEIIARYEAYCPQELSMEGDISGLQIGTLNKEVDKVLVALDIREQTVAEAIEAGAGLIIVKHAPIFRPLKNLVGDKAQNQMILDLIKHDIAVYVSHTNIDIVEDGLNDWFCQLLEIEETSFLSQTGPENGIGRVGNIAPQTFGDFAVKVKATFGLDSLRLVAYEETDLERVVERVAICGGSGQSFYPEAIAKGAQVYITGDIYYHTAQEMLTEGLLALDPGHHIEVLFTEKLKEKLDTWKAEEGWEIEILASQASTNPFRHI

SEQ ID NO: 15157 - protein, 184 aa, Streptococcus cristatus
  REGION 1..184: note = tr|A0A5B0DDY5|A0A5B0DDY5_STRCR GTP cyclohydrolase 1; OS = Streptococcus cristatus OX=45634 GN=folE PE=3 SV=1
MDTKKIEAAVAQIIEAVGEDGSREGLQETPQRIAKMYQEIFAGLGETAEEHLAKSFEIIDNNMVVEKDIFFHSMCEHHFLPFYGKVHIAYVPNGRVAGLSKLARTVEVYAKKPQIQERLTVEIAEALMDYLGAQGALVWVEAEHMCMNMRGVRKPGTATVTTAARGILATDKDLKNEAYKLMGH

SEQ ID NO: 15158 - protein, 187 aa, Streptococcus downei
  REGION 1..187: note = tr|A0A380JEA0|A0A380JEA0_STRDO GTP cyclohydrolase 1; OS = Streptococcus downei MFe28 OX=764290 GN=folE PE=3 SV=1
MVNQEKAEKAIYQLLEAIGEDPQREGLLETPKRVAKMYAEMFSGLEENPKDQFTAVFSENHEEVVLVKDIPFYSMCEHHLVPFYGVAHVAYLPSQSKVTGLSKLARAVEVASKRPQLQERLTEQVAKALEEALNPKGVFVMVEAEHMCMTMRGIKKPGSKTVTTVARGLFKEDRDQRQELLTLIKEH

SEQ ID NO: 15159 - protein, 188 aa, Streptococcus dysgalactiae
  REGION 1..188: note = tr|A0A380JT64|A0A380JT64_STRDY GTP cyclohydrolase 1; OS = Streptococcus dysgalactiae subsp. dysgalactiae OX=99822; GN = folE PE=3 SV=1
MSINKEKAEAAIYQFLEAIGENPNREGLLDTPKRVAKMYAEMFAGLNKDPKEEFTAVFTEHHEDVVIVKDISFYSMCEHHLVPFYGKAHIAYLPSDGCVTGLSKLARAVEVASKRPQLQERLTAQIADALVEALHPTGVLVLVEAEHMCMTMRGIKKPGSKTITTTARGLYKEDRSERQEVMALMTKA

SEQ ID NO: 15160 - protein, 188 aa, Streptococcus dysgalactiae
  REGION 1..188: note = tr|M4YXP8|M4YXP8_STREQ GTP cyclohydrolase 1; OS = Streptococcus dysgalactiae subsp. equisimilis RE378; OX = 617121 GN=folE PE=3 SV=1
MSINKEKAEAAIYQFLEAIGENPNREGLLDTPKRVAKMYAEMFAGLNKDPKEEFTAVFTEHHEDVVIVKDISFYSMCEHHLVPFYGKAHISYLPSDGRVTGLSKLARAVEVASKRPQLQERLTAQIADALVEALHPTGVLVLVEAEHMCMTMRGIKKPGSKTITTTARGLYKEDRSERQEVMALMTKV

SEQ ID NO: 15161 - protein, 207 aa, Streptococcus equi
  REGION 1..207: note = tr|C0MEX5|C0MEX5_STRS7 GTP cyclohydrolase 1; OS = Streptococcus equi subsp. zooepidemicus (strain H70); OX = 553483 GN=folE PE=3 SV=1
MLTHINSPNKINQLKRGKPLPINQKKAEAAIYQLLEAIGEDPNREGLRDTPKRVAKMYLEMLSGLEKDAKDEFTAVFTEHHDDLVIVKDISFYSMCEHHLVPFYGKAHIAYLPSDGRVTGLSKLARAVEVTSRRPQLQERLTAQIANALVDALQPKGVFVMVEAEHMCMTMRGVKKPGSKTITTTARGIYKDSRDDRREVMQLIMEG

SEQ ID NO: 15162 - protein, 188 aa, Streptococcus equi
  REGION 1..188: note = tr|B4U349|B4U349_STREM GTP cyclohydrolase 1; OS = Streptococcus equi subsp. zooepidemicus (strain MGCS10565) OX=552526 GN=folE PE=3 SV=1
MPINQKKAEAAIYQLLEAIGEDPNREGLRDTPKRVAKMYLEMLSGLEKDAKDEFTAVFTEHHDDLVIVKDISFYSMCEHHLVPFYGKAHIAYLPSDGRVTGLSKLARAVEVASKRPQLQERLTAQIANALVDALQPKGVFVMVEAEHMCMTMRGVKKPGSKTITTTARGIYKDSRDDRREVMQLIMEG

SEQ ID NO: 15163 - protein, 187 aa, Streptococcus equinus
  REGION 1..187: note = tr|A0A1V0GH06|A0A1V0GH06_STREI GTP cyclohydrolase 1; OS = Streptococcus equinus OX=1335 GN=folE PE=3 SV=1
MANQEKVEQAVYQLLEALGENPEREGLLDTPKRVAKMYAEMFSGLNEDPKDQFTAVFSEVHDEVVLVKDIPFYSMCEHHLVPFYGKAHVAYLPSGDKVTGLSKLARAVEVAARRPQLQERLTDQVATALEEALNPRGVFVMVEAEHMCMTMRGIKKPGSKTITTVAKGLYKEDREERKEILSLMRDF

SEQ ID NO: 15164 - protein, 187 aa, Streptococcus equinus
  REGION 1..187: note = tr|A0A1H0YGI6|A0A1H0YGI6_STREI GTP cyclohydrolase 1; OS = Streptococcus equinus OX=1335 GN=folE PE=3 SV=1
MANQEKLEAAVYQLLEALGEDPKREGLLDTPKRVAKMYQEMFSGLNEDPKDQFTAVFTENHDEVVLVKDIPFYSMCEHHLVPFYGKAHVAYLPSDGRVTGLSKLARAVEVASKRPQLQERLTDQVATALEEALHPKGIFVMIEAEHMCMTMRGIKKPGSKTVTTVAKGIFKEDREERKEILSLILGK

SEQ ID NO: 15165 - protein, 186 aa, Streptococcus ferus
  REGION 1..186: note = tr|A0A2X3VG54|A0A2X3VG54_9STRE GTP cyclohydrolase 1; OS = Streptococcus ferus OX=1345 GN=folE PE=3 SV=1
MLKEEKIEQAVYQLLEAIGENPNREGLLDTPSRVAKMYQEVFSGLGENPKEEFTAVFSESYEEVVLVKDIPFYSMCEHHLVPFYGVAHIAYLPDGGRVTGLSKLARAVEVASKRPQLQERLTGQVAAALDEALSPKGVFVMVEAEHMCMTMRGIKKPGSKTVTSVAKGVYQTDTALRQEVLAMIQR

SEQ ID NO: 15166 - protein, 187 aa, Streptococcus gallolyticus
  REGION 1..187: note = tr|F5X1C7|F5X1C7_STRG1 GTP cyclohydrolase 1; OS = Streptococcus gallolyticus (strain ATCC 43143 / F-1867); OX = 981539 GN=folE PE=3 SV=1
MANQEKLEAAVYQLLEALGENPEREGLLDTPKRVAKMYQEMFSGLNEDPKDQFTAVFTENHDEVVLVKDIPFYSMCEHHLVPFYGKAHVAYLPSDGRVTGLSKLARAVEVASKRPQLQERLTDQVATALEEALHPKGVFVMLEAEHMCMTMRGIKKPGSKTITTVAKGIFKENREERNEILSLILGK

SEQ ID NO: 15167 - protein, 187 aa, Streptococcus gallolyticus; identical to SEQ ID NO: 15166
  REGION 1..187: note = tr|A0A0E1XGL6|A0A0E1XGL6_STRGY GTP cyclohydrolase 1; OS = Streptococcus gallolyticus subsp. gallolyticus TX20005; OX = 545774 GN=folE PE=3 SV=1

SEQ ID NO: 15168 - protein, 187 aa, Streptococcus gordonii
  REGION 1..187: note = sp|A8AZD8|GCH1_STRGC GTP cyclohydrolase 1; OS = Streptococcus gordonii (strain Challis / ATCC 35105 / BCRC 15272 / CH1 / DL1 / V288) OX=467705 GN=folE PE=3 SV=1
MSDFEKLQETVYQLLELVGENPDREGLLDTPKRVAKMYQEVFSGLGRDPKDEFTAVFSEGHEEVVLVKDIPFHSMCEHHLLPFYGVAHVAYLPSNGKVTGLSKLARAVEVASKRPQLQERLTAQIATALDEALSPEGVFVMVEAEHMCMTMRGIKKPGSKTITTVAKGIYKENVHQRQEILSMIHHD

SEQ ID NO: 15169 - protein, 265 aa, Streptococcus gordonii
  REGION 1..265: note = tr|A0A1V0H422|A0A1V0H422_STRGN Nif3-like dinuclear metal center hexameric protein OS=Streptococcus gordonii; OX = 1302 GN=A6J85_09610 PE=4 SV=1
MLASEIIARYEAYCPQELSMEGDISGLQIGTLDKEVDKVLVALDIREQTVAEAIEASAGLIIVKHAPIFRPLKDLVADKAQNQMILDLIKHDIAVYVSHTNIDVVEDGLNDWFCQLLDIEETSYLSQTGPDYGIGRVGKIAPQTFGEFAAKVKATFGLDSLRLVTYDETDFERVIERVAICGGSGQSFYPEAIAKGAQVYITGDIYYHTAQEILTEGLLALDPGHHIEVLFTEKLKEKLDTWKVEEGWEIEILASQASTNPFRHI

SEQ ID NO: 15170 - protein, 184 aa, unidentified
  source 1..184: note = Streptococcus halitosis
  REGION 1..184: note = tr|A0A3R8MWH0|A0A3R8MWH0_9STRE GTP cyclohydrolase 1; OS = Streptococcus halitosis OX=2172545 GN=folE PE=3 SV=1
MDTQKIETAVKMIIEAVGEDANREGLQETPARVARMYQEIFSGLGQTAEEHLSKSFEIIDDNMVVEKDIFFHTMCEHHFLPFYGRAHIAYIPDGRVAGLSKLARTVEIYSKKPQIQERLNIEVADALMDYLGAKGAFVVIEAEHMCMSMRGVRKPGTATLTTVARGVFETDKDLRDQAYRLMGL

SEQ ID NO: 15171 - protein, 187 aa, Streptococcus henryi
  REGION 1..187: note = tr|A0A1G6BAG7|A0A1G6BAG7_9STRE GTP cyclohydrolase 1; OS = Streptococcus henryi OX=439219 GN=folE PE=3 SV=1
MANQEKLEQAVYQLLEALGENPQREGLLDTPKRVAKMYQEMFAGLNEDPKDQFTAVFTENHEEVVLVKDIPFYSMCEHHLVPFYGVAHVAYLPSDGRVTGLSKLARAVEVASKRPQLQERLTDQVATALEEALHPKGIFVMLEAEHMCMTMRGIKKPGSKTITTVAKGLYKEDREERKEILSLIREK

SEQ ID NO: 15172 - protein, 187 aa, Streptococcus hyointestinalis
  REGION 1..187: note = tr|A0A380K9U5|A0A380K9U5_9STRE GTP cyclohydrolase 1; OS = Streptococcus hyointestinalis OX=1337 GN=folE PE=3 SV=1
MDLEKAEQAVYQLLEALGENPEREGLKETPARVVRMYQEMWQGLHKDPKDEFTAVFNEGNGEAVIVRDIPFYSMCEHHLVPFYGKAHIAYLPNTDRQVTGLSKLARCVETASKRPQVQERLTAEIADGIEQALKPQGVYVFVEAEHMCMTMRGIKKPGSKTITTASRGCYQKDALLRQELLTLLKLG

SEQ ID NO: 15173 - protein, 188 aa, Streptococcus ictaluri
  REGION 1..188: note = tr|G5K3H8|G5K3H8_9STRE GTP cyclohydrolase 1; OS = Streptococcus ictaluri 707-05 OX=764299 GN=folE PE=3; SV = 1
MSINKEKAEAAIYQFLEAIGENPDREGLLDTPKRVAKMYAEMFSGLEKDPKEEFTAVFTEHHEDVVIVKDIPFYSMCEHHLVPFYGKAHIAYLPSDGRVTGLSKLARAVEVASKKPQLQERLTSQVADALVEALNPKGVFVMIEAEHMCMTMRGIKKPGSKTITTTARGLYKENREERRDIMDLILHR

SEQ ID NO: 15174 - protein, 187 aa, Streptococcus infantarius
  REGION 1..187: note = tr|A0A380KMZ9|A0A380KMZ9_9STRE GTP cyclohydrolase 1; OS = Streptococcus infantarius OX=102684 GN=folE PE=3 SV=1
MATQEKLEAAVYQLLEALGEDPKREGLLDTPKRVAKMYQEMFSGLNEDPKDQFTAVFTENHDEVVLVKDIPFYSICEHHLVPFYGKAHVAYLPSDGRVTGLSKLARAVEVASKRPQLQERLTDQVATALEEALHPKGIFVMIEAEHMCMTMRGIKKPGSKTVTTVAKGIFKEDREERKEILSLILGK

SEQ ID NO: 15175 - protein, 184 aa, Streptococcus infantis
  REGION 1..184: note = tr|F9PZC0|F9PZC0_9STRE GTP cyclohydrolase 1; OS = Streptococcus infantis SK970 OX=1035189 GN=folE PE=3; SV = 1
MDTQKIETAVKMIIEAVGEDVNREGLQETPARVARMYQEIFSGLGRTAEEHLSKSFEIIDDNMVVEKDIFFHTMCEHHFLPFYGKAHIAYVPDGRVAGLSKLARTVEVYAKKPQIQERLNIEVADALMEYLGAKGAFVVIEAEHMCMSMRGVRKPGTATLTTVARGVFETDKDLRDQAYRLMGL

SEQ ID NO: 15176 - protein, 184 aa, Streptococcus infantis
  REGION 1..184: note = tr|E8JZ01|E8JZ01_9STRE GTP cyclohydrolase 1; OS = Streptococcus infantis ATCC 700779 OX=889204 GN=folE; PE = 3 SV=1
MDTQKIEEAVKMIIEAVGEDANREGLQETPARVARMYQEIFSGLGQTAEEHLSKSFEIIDDNMVVEKDIFFHTMCEHHFLPFYGKAHIAYIPDGRVAGLSKLARTVEVYAKKPQIQERLNIEVADALMDYLGAKGAFVVIEAEHMCMSMRGVRKPGTATLTTVARGVFETDKDLRDQAYRLMGL

SEQ ID NO: 15177 - protein, 187 aa, Streptococcus iniae
  REGION 1..187: note = tr|A0A1J0MZ39|A0A1J0MZ39_STRIN GTP cyclohydrolase 1; OS = Streptococcus iniae OX=1346 GN=folE PE=3 SV=1
MVNLEKAEAAIYDLLEALGENPQREGLLDTPKRVAKMYQEMFSGLEQDPKEQFTAVFTENHDDVVIVKDIPFYSMCEHHLVPFYGKAHIAYLPSDGRVTGLSKLARALEVASKRPQLQERLTAQVADSLVEALNPKGVFVMVEAQHMCMTMRGIKKPGSLTITTTARGIYKDNQAERKEVLALIKEH

SEQ ID NO: 15178 - protein, 187 aa, Streptococcus iniae
  REGION 1..187: note = tr|A0A3L8GHJ6|A0A3L8GHJ6_STRIN GTP cyclohydrolase 1; OS = Streptococcus iniae OX=1346 GN=folE PE=3 SV=1
MIDYEKAKKAIYDLLEAIGENPEREGLLDTPKRVAKMYAQVFSGMEEDPKDQFTAVFSEGYDDLIIVKDIPFHSMCEHHLLPFYGKAHLAYLPNDGKVTGLSKLARAVEVASQRPQLQERLTGQIADAMQEALQPKGILVMLEAEHMCMNMRGVKKSGSKTVTLMTRGIYQEDSQLRKEVLELIKER

SEQ ID NO: 15179 - protein, 265 aa, Streptococcus intermedius
  REGION 1..265: note = tr|A0A3R9LMQ9|A0A3R9LMQ9_STRIT Putative GTP cyclohydrolase 1 type 2 OS=Streptococcus intermedius; OX = 1338 GN=D8829_02305 PE=4 SV=1
MLASDFINRYEAYCPQDLSEEGDVRGLQIGTLNKEVKRVLVALDIREQTVAEAIEKRVDLILVKHAPIFRPIKDLVAERSQNQIYIDLIKHDIAVYVSHTNIDIVDDGLNDWFCDLLEITDTDYLSETAPGYGIGRIGKIVPQTFGEFAIKVKEKFGLDSLRLVSYMATDLERMVEKVAICGGSGQSLYKEALAKGAQVYITGDIYYHTAQDMLSEGLLALDPGHHIEVLFVEKLVEKFQDWKVEEGWEVKFLASQVSTNPFKYK

SEQ ID NO: 15180 - protein, 265 aa, Streptococcus intermedius
  REGION 1..265: note = tr|A0A428ESP6|A0A428ESP6_STRIT Putative GTP cyclohydrolase 1 type 2 OS=Streptococcus intermedius; OX = 1338 GN=D8831_01120 PE=4 SV=1
MLASDFINRYEAYCPQDLSEEGDVRGLQIGTLNKEVKRVLVALDIREQTVAEAIEKGVDLILVKHAPIFRPIKDLVAERSQNQIYIDLIKHDIAVYVSHTNIDIVDDGLNDWFCDLLEITDTDYLSETAPGYGIGRIGKIVPQTFGEFAIKVKEKFGLDSLRLVSYMATDLERMVEKVAICGGSGQSLYKEALAKGAQVYITGDIYYHTAQDMLSEGLLALDPGHHIEVLFVEKLVEKFQDWKVEEGWEVKFLASQVSTNPFKYK

SEQ ID NO: 15181 - protein, 187 aa, Streptococcus lutetiensis
  REGION 1..187: note = tr|S5R0F3|S5R0F3_9STRE GTP cyclohydrolase 1; OS = Streptococcus lutetiensis 033 OX=1076934 GN=folE PE=3; SV = 1
MANQEKLEAAVYQLLEALGEDPKREGLLDTPKRVAKMYQEMFSGLNEDPKDQFTAVFTENHDEAVLVKDISFYSMCEHHLVPFYGKAHVAYLPSAGRVTGLSKLARAVEVASKRPQLQERLTDQVATALEEALHPKGIFVMIEAEHMCMTMRGIKKPGSKTVTTVAKGIFKEDHEERKEILSLILGK

SEQ ID NO: 15182 - protein, 186 aa, Streptococcus lutetiensis
  REGION 1..186: note = tr|A0A4V0E542|A0A4V0E542_9STRE GTP cyclohydrolase 1; OS = Streptococcus lutetiensis OX=150055 GN=folE PE=3 SV=1
MAQEKLEAAVYQLLEALGEDPKREGLLDTPKRVAKMYQEMFSGLNEDPKDQFTAVFTENHDEAVLVKDISFYSMCEHHLVPFYGKAHVAYLPSAGRVTGLSKLARAVEVASKRPQLQERLTDQVATALEEALHPKGIFVMIEAEHMCMTMRGIKKPGSKTVTTVAKGIFKEDHEERKEILSLILGK

SEQ ID NO: 15183 - protein, 189 aa, Streptococcus macacae
  REGION 1..189: note = tr|G5JU64|G5JU64_9STRE GTP cyclohydrolase 1; OS = Streptococcus macacae NCTC 11558 OX=764298 GN=folE PE=3; SV = 1
MSNQKKIEQAVYQLLEALGENPKREGLLDTPKRVAKMYQEIFSGLQENPKDQFTAVFSEGYEEVVLVKDIPFASMCEHHLLPFYGTAHVAYIPSQGRVTGLSKLARAVEIASKRPQLQERLTAQIADALQEALQPQGIFVMLAAEHMCMTMRGIKKPGSKTVTSAARGIYKEDKEARKEIIAMIHNKEK

SEQ ID NO: 15184 - protein, 187 aa, unidentified
  source 1..187: note = Streptococcus macedonicus
  REGION 1..187: note = tr|H2A6Q4|H2A6Q4_STRMD GTP cyclohydrolase 1; OS = Streptococcus macedonicus (strain ACA-DC 198); OX = 1116231 GN=folE PE=3 SV=1
MANQEKLETAVYQLLEALGENPKREGLLDTPKRVAKMYQEMFSGLNEDPKDQFTAVFTENHDEVVLVKDIPFYSMCEHHLVPFYGKAHVAYLPSDGRVTGLSKLARAVEVASKRPQLQERLTDQVATALEEALHPKGIFVMLEAEHMCMTMRGIKKPGSKTVTTVAKGIFKENREERNEILSLILGK

SEQ ID NO: 15185 - protein, 187 aa, unidentified; identical to SEQ ID NO: 15184
  source 1..187: note = Streptococcus macedonicus
  REGION 1..187: note = tr|A0A081JH02|A0A081JH02_STRMC GTP cyclohydrolase 1; OS = Streptococcus macedonicus OX=59310 GN=folE PE=3 SV=1

SEQ ID NO: 15186 - protein, 184 aa, Streptococcus massiliensis
  REGION 1..184: note = tr|A0A380KWU8|A0A380KWU8_9STRE GTP cyclohydrolase 1; OS = Streptococcus massiliensis OX=313439 GN=folE PE=3 SV=1
MDTKKIEAAVKMIIEAVGEDENREGLQETPERIAKMYEEIFSGLGQTAEEHLAKSFEIVDNNLVVEKDIFFHSMCEHHFLPFYGKVHIAYVPNGRVAGLSKLARTVEVYAKKPQIQERLTVEIADALMTYLGAQGALVWVEAEHMCMNMRGVRKPGTETVTTAARGILATDKDLKNEAYRMMNR

SEQ ID NO: 15187 - protein, 188 aa, Streptococcus merionis
  REGION 1..188: note = tr|A0A239SQ04|A0A239SQ04_9STRE GTP cyclohydrolase 1; OS = Streptococcus merionis OX=400065 GN=folE PE=3 SV=1
MTINQTQVEDAVRQLLVAMGENPDREGLLDTPKRVAKMYQEMWSGLGKDPKDEFTAVFSEGHEEVILVRDIPFYSMCEHHLVPFYGLAHVAYIPSRGHVTGLSKLARAVEVASKRPQLQERLTAQVATALDEALSPEGVFVMVEAEHLCMTMRGIKKPGAKTVTTVAKGVFKDNIDQRKEILAMIQNG

SEQ ID NO: 15188 - protein, 184 aa, Streptococcus mitis
  REGION 1..184: note = tr|D3H6R1|D3H6R1_STRM6 GTP cyclohydrolase 1; OS = Streptococcus mitis (strain B6) OX=365659 GN=sulC PE=3; SV = 1
MDTQKIEAAVKMIIEAVGEDVNREGLQGTPARVARMYQEIFSGLGQTAEEHLSKSFEIIDDNMVVEKDIFFHTMCEHHFLPFYGRAHIAYIPDGRVAGLSKLARTVEVYSKKPQIQERLNIEVADALMDYLGAKGAFVVIEAEHMCMSMRGVRKPGTATLTTVARGLFETDKDLRDQAYRLMGL

SEQ ID NO: 15189 - protein, 184 aa, Streptococcus mitis
  REGION 1..184: note = tr|A0A081QZU6|A0A081QZU6_STRMT GTP cyclohydrolase 1; OS = Streptococcus mitis OX=28037 GN=folE PE=3 SV=1
MDTQKIEAAVKMIIEAVGEDANREGLQETPARVARMYQEIFSGLGQTAEEHLSKSFEIIDDNMVVEKDIFFHTMCEHHFLPFYGRAHIAYIPDGRVAGLSKLARTVEVYSKKPQIQERLNIEVADALMEYLGAKGAFVVIEAEHMCMSMRGVRKPGTATLTTVARGLFETDKDLRDQAYRLMGL

SEQ ID NO: 15190 - protein, 192 aa, Streptococcus mutans
  REGION 1..192: note = sp|Q8DUG2|GCH1_STRMU GTP cyclohydrolase 1; OS = Streptococcus mutans serotype c (strain ATCC 700610 / UA159) OX=210007 GN=folE PE=3 SV=1
MNEKIMSDQKKIEEAVYQLLEALGEDPNREGLLDTPKRVAKMYQEMFAGLNEDPKDQFTAVFSEEHEDVVLVKDIPFYSMCEHHLVPFHGLAHVAYIPSDGCVTGLSKLARAVEVVSKRPQLQERLTVQIANALEEALKPKGVLVMIEAEHMCMTMRGIKKPGSKTVTRVVRGICQSDKETRQEIIAMIHHN

SEQ ID NO: 15191 - protein, 186 aa, Streptococcus mutans
  REGION 1..186: note = tr|A0A448RXC5|A0A448RXC5_STRMG GTP cyclohydrolase 1; OS = Streptococcus mutans OX=1309 GN=folE PE=3 SV=1
MSDQKKIEEAVYQLLEALGENPEREGLLDTPKRVARMYQEMFSGLNEDPKDQFTAVFSEEHDEVVLVKDIPFYSMCEHHLVPFYGRAHVAYMPSGGRVTGLSKLARAVEVASRRPQLQERLTAQVADALEKALNPKGVFVMIEAEHMCMTMRGIKKPGSKTVTSAARGLYRSDKEVRQEIISMIHN

SEQ ID NO: 15192 - protein, 265 aa, Streptococcus oralis
  REGION 1..265: note = tr|A0A3R9I5Y7|A0A3R9I5Y7_STROR Putative GTP cyclohydrolase 1 type 2 OS=Streptococcus oralis OX=1303; GN = D8860_01870 PE=4 SV=1
MLASEVIRAYEAFCPQEFSMEGDSRGLQIGTLDKDIQRVMVALDIREETVAEAIEKGVDLIIVKHAPIFRPIKDLVASRPQNQIYIDLIKHDIAVYVSHTNIDIVDNGLNDWFCQMLGIEETTYLQETGPERGIGRIGNIQPQPFGELAQHVKQVFGLDGLRLVHYHESDLQKPISRVAICGGSGQSFYKDALAKGADVYITGDIYYHTAQDMLSDGLLALDPGHYIEVLFVEKIAELLTQWKAEKGWGIDIVPSQASTNPFHLI

SEQ ID NO: 15193 - protein, 184 aa, Streptococcus oralis
  REGION 1..184: note = tr|D4FQX4|D4FQX4_STROR GTP cyclohydrolase 1; OS = Streptococcus oralis ATCC 35037 OX=655813 GN=folE PE=3; SV = 1
MDTQKIEAAVKMIIEAVGEDANREGLQETPARVARMYQEIFSGLGQTAEEHLSKSFEIIDDNMVVEKDIFFHTMCEHHFLPFYGKAHIAYIPDGRVAGLSKLARTVEVYSKKPQIQERLNIEVADALMNYLGAKGAFVVIEAEHMCMSMRGVRKPGTATLTTVARGLFETDKDLRDQAYRLMGL

SEQ ID NO: 15194 - protein, 186 aa, unidentified
  source 1..186: note = Streptococcus pantholopis
  REGION 1..186: note = tr|A0A172Q707|A0A172Q707_9STRE GTP cyclohydrolase 1; OS = Streptococcus pantholopis OX=1811193 GN=folE PE=3 SV=1
MINQEKVEEAIYQLLQALGENPEREGLSETPRRVAKMYQEVFAGINEDPKNQFTAVFAEDHEEIVMVKDIPFYSMCEHHLLPFYGTAHVAYLPEQGRITGLSKLARAVEMAGKRPQLQERMTEQIASALDDALQPRGVFVMVEAEHLCMSMRGIKKPGSKTVTLAARGLFQEDFQKRQELLSLMRQ

SEQ ID NO: 15195 - protein, 265 aa, Streptococcus parasanguinis
  REGION 1..265: note = tr|A0A3R9HNC8|A0A3R9HNC8_STRPA Putative GTP cyclohydrolase 1 type 2 OS=Streptococcus parasanguinis; OX = 1318 GN=D8866_03045 PE=4 SV=1
MLASEVIKRYEAYCPLELSMEGDVRGLQVGTLQKDIHKVMVALDIREQTVAEAIAHGVDLIIVKHAPIFRPLKDLVADRAQNQIYIDLIKHDIAVYVSHTNIDIVPEGLNDWFCQLLDIENTEPLSMTGEGFGIGRIGRVATQTFGQLAEKVKETFGLDALRIVSYDQADLERVIEHVAICGGSGQSFYKDALAKGAEVYITGDIYYHTAQDMLSDGLLALDSGHHIEVLFVSKLVEKLNQWKAEEAWEIEVIGSQASTNPFYHI

SEQ ID NO: 15196 - protein, 184 aa, Streptococcus parasanguinis
  REGION 1..184: note = tr|F8DH02|F8DH02_STREP GTP cyclohydrolase 1; OS = Streptococcus parasanguinis (strain ATCC 15912 / DSM 6778 / CIP 104372 / LMG 14537) OX=760570 GN=folE PE=3 SV=1
MDTKKIEEAVKMIIEAVGEDENREGLQETPTRIAKMYQEIFAGLGQTAEEHLSKSFEIIDNNMVVEKDIFFHSMCEHHFLPFYGKVHIAYIPNGRVAGLSKLARTVEVYAKKPQIQERLTVEIADALMEYLGAQGALVWVEAEHMCMNMRGVRKPGTATVTTAARGVLATNKDLKNEAYKLMGH

SEQ ID NO: 15197 - protein, 187 aa, unidentified
  source 1..187: note = Streptococcus parasuis
  REGION 1..187: note = tr|A0A4Q8L0P3|A0A4Q8L0P3_9STRE GTP cyclohydrolase 1; OS = Streptococcus parasuis OX=1501662 GN=folE PE=3 SV=1
MSKQEQIEQTIYQLLELLGEDPNREGLLDTPKRVAKMYLEMFNGLKEDPKDQFTAVFSEGHEEVVLVKDIPFHSMCEHHLVPFYGIAHVAYIPSKGRVTGLSKLARAVEVASRRPQLQERLTHQVAHALQDALEPEGVFVMVEAEHMCMSMRGIRKPGSKTVTTVALGKYKEDAVLRRELLSMIHKK

SEQ ID NO: 15198 - protein, 186 aa, Streptococcus parauberis
  REGION 1..186: note = tr|A0A0E2U9V9|A0A0E2U9V9_9STRE GTP cyclohydrolase 1; OS = Streptococcus parauberis OX=1348 GN=gch1 PE=3 SV=1
MNIEKAEQAIYDLLEAIGENPNREGLLDTPKRVAKMYQEMFSELQADPKDQFTAVFTENHEDAVIVKDIYFHSMCEHHLVPFYGKAHIAYLPSDGRVTGLSKLARAVEVASKRPQLQERLTAQVADALEEALHPKGVFVMLEAEHMCMTMRGIRKPGSKTITTTARGIYQTDREERKEILSLINEK

SEQ ID NO: 15199 - protein, 186 aa, Streptococcus parauberis
  REGION 1..186: note = tr|F1YZC7|F1YZC7_9STRE GTP cyclohydrolase 1; OS = Streptococcus parauberis NCFD 2020 OX=873447 GN=folE; PE = 3 SV=1
MNIEKAEQAIYDLLEAIGENPNREGLLDTPKRVAKMYQEMFSELQADPKDQFTAVFTENHEDAVIVKDIYFHSMCEHHLVPFYGKAHIAYLPSDGRVTGLSKLARAVEVASKRPQLQERLTAQVANALEEALHPKGVFVMLEAEHMCMTMRGIRKPGSKTITTTARGIYQTDREERKEILSLINEK

SEQ ID NO: 15200 - protein, 187 aa, unidentified
  source 1..187: note = Streptococcus pasteurianus
  REGION 1..187: note = tr|F5X6W1|F5X6W1_STRPX GTP cyclohydrolase 1; OS = Streptococcus pasteurianus (strain ATCC 43144 / JCM 5346 / CDC 1723-81) OX=981540 GN=folE PE=3 SV=1
MANQEKLELAVYQLLEALGENPEREGLLDTPKRVAKMYQEMFSGLNEDPKDQFTAVFTENHDEVVLVKDIPFYSMCEHHLVPFYGKAHVAYLPSDGRVTGLSKLARAVEVASKRPQLQERLTDQVATALEEALHPKGVFVMLEAEHMCMTMRGIKKPSSKTVTTVAKGIFKENREERNEILSLILGK

SEQ ID NO: 15201 - protein, 249 aa, unidentified
  source 1..249: note = Streptococcus pasteurianus
  REGION 1..249: note = tr|A0A564TL56|A0A564TL56_9STRE GTP cyclohydrolase 1 type 2 OS=Streptococcus pasteurianus OX=197614; GN = SPSS39_02262 PE=4 SV=1
MKASEIIARYEAYCPRELSMEGDISGLQIGTLDKDVKRVMIALDVRETTVAEVIEKGVDLIIVKHAPIFKPLKDLVATAQNQIYIDLVRHDIAVYVSHTNIDIVPDGLNDWFCELLEIKDTDILTPTADGYGIGRIGKIEEQTFSDFALKVKEKFHLDSVRLVAYGNQETLVNRVAICGGSGQGFYRDAMEKGAQVYITGDIYYHTAQEMITNGMLAIDPGHHIEVLFIDKLVANSMLGKPIINGMLIL

SEQ ID NO: 15202 - protein, 187 aa, unidentified
  source 1..187: note = Streptococcus penaeicida
  REGION 1..187: note = tr|A0A2N8LCH5|A0A2N8LCH5_9STRE GTP cyclohydrolase 1; OS = Streptococcus penaeicida OX=1765960 GN=folE PE=3 SV=1
MNSQKAEEAIYQLLEALGEDPQREGLLDTPKRVAKMYAEMFAGLEQDPKEEFTAVFAEETYDDIVLVKDIPFYSMCEHHLVPFYGKAHVAYYPADGRVTGLSKLARAVEVASKRPQLQERLTSQIATALDEALHPHGVFVVVEAEHMCMTMRGIKKPGSKTVTKMAKGSLVGDRDSQRYILELIKDK

SEQ ID NO: 15203 - protein, 184 aa, Streptococcus peroris
  REGION 1..184: note = tr|E8K9S5|E8K9S5_9STRE GTP cyclohydrolase 1; OS = Streptococcus peroris ATCC 700780 OX=888746 GN=folE; PE = 3 SV=1
MDTQKIETAVKMIIEAVGEDVNREGLQETPARVARMYQEIFSGLGQTAEEHLSKSFEIIDDNMVVEKDIFFHTMCEHHFLPFYGKAHIAYIPDGRVAGLSKLARTVEVYSKKPQIQERLNIEVADALMDYLGAKGAFVVIEAEHMCMSMRGVRKPGTATLTTVARGVFETDKDLRDQAYRLMGL

SEQ ID NO: 15204 - protein, 188 aa, Streptococcus phocae
  REGION 1..188: note = tr|A0A0P6S6U4|A0A0P6S6U4_9STRE GTP cyclohydrolase 1; OS = Streptococcus phocae OX=119224 GN=folE PE=3 SV=1
MPINHKKAEAAIYQLLEALGENPEREGLLDTPKRVAKMYAEMFSGLAQNPKGEFTAVFSEEHDDMILVKDISFYSMCEHHLVPFYGKAHIAYLPRDGRVTGLSKLARAVEVASKKPQLQERLTSQIANALVDALNPKGVFVMVEAEHMCMTMRGIKKPGSKTITTTARGCYHDNREDRRDIMSLIEKH

SEQ ID NO: 15205 - protein, 186 aa, Streptococcus pluranimalium
  REGION 1..186: note = tr|A0A2L0D3H5|A0A2L0D3H5_9STRE GTP cyclohydrolase 1; OS = Streptococcus pluranimalium OX=82348 GN=folE PE=3 SV=1
MMNQEKVEAAIYQLLEAIGENPEREGLLDTPKRVAKMYAEMFSGLSEDPKDQFTAVFSEGHEEMILVKDIPFYSMCEHHLVPFYGVAHVAYLPSDGRVTGLSKLARAVEVASRRPQLQERLTAQVANALEEAMHPKGVFVMVEAEHLCMTMRGIKKPGSKTVTTVARGLYQEDGAARREVMAMIKE

SEQ ID NO: 15206 - protein, 185 aa, Streptococcus pluranimalium
  REGION 1..185: note = tr|A0A345VJQ1|A0A345VJQ1_9STRE GTP cyclohydrolase 1; OS = Streptococcus pluranimalium OX=82348 GN=folE PE=3 SV=1
MNQEKVEAAVYQLLEAIGENPEREGLLDTPKRVAKMYAEMFSGLSENPKDQFTAVFSEGHEEMILVKDIPFYSMCEHHLVPFYGVAHVAYLPSDGRVTGLSKLARAVEVAARRPQLQERLTAQVANALEEAMHPKGVFVMVEAEHMCMTMRGIKKPGSKTVTTVARGLYQEDGAARREVMAMIKE

SEQ ID NO: 15207 - protein, 184 aa, Streptococcus pneumoniae
  REGION 1..184: note = sp|C1CB65|GCH1_STRP7 GTP cyclohydrolase 1; OS = Streptococcus pneumoniae (strain 70585) OX=488221; GN = folE PE=3 SV=1
MDTQKIEAAVKMIIEAVGEDANREGLQETPARVARMYQEIFSGLGQTAEEHLSKSFEIIDDNMVVEKDIFFHTMCEHHFLPFYGRAHIAYIPDGRVAGLSKLARTVEVYSKKPQIQERLNIEVADALMDYLGAKGAFVVIEAEHMCMSMRGVRKPGTATLTTVARGLFETDKDLRDQAYRLMGL

SEQ ID NO: 15208 - protein, 184 aa, Streptococcus pneumoniae; identical to SEQ ID NO: 15189
  REGION 1..184: note = tr|A0A0T7TRC9|A0A0T7TRC9_STREE GTP cyclohydrolase 1; OS = Streptococcus pneumoniae OX=1313 GN=folE PE=3 SV=1

SEQ ID NO: 15209 - protein, 187 aa, Streptococcus porcinus
  REGION 1..187: note = tr|A0A4U9YHB8|A0A4U9YHB8_STRPO GTP cyclohydrolase 1; OS = Streptococcus porcinus OX=1340 GN=folE PE=3 SV=1
MNSKKAEEAIYQLLEALGEDPKREGLRDTPKRVVKMYREMFAGLEMDPKNEFTTVFAEETYDDLVLVKDIPFYSMCEHHLVPFYGKAHVAYIPSGGRVTGLSKLARAVEVASKKPQLQERLTSQIAIALEEALQPKGVFVLVEAEHMCMTMRGIKKPGSKTVTKMARGSFIEDRESQRYILELIKDK

SEQ ID NO: 15210 - protein, 187 aa, Streptococcus porcinus
  REGION 1..187: note = tr|A0A4U9YQ80|A0A4U9YQ80_STRPO GTP cyclohydrolase 1; OS = Streptococcus porcinus OX=1340 GN=folE PE=3 SV=1
MNSKKAEEAIYQLLEALGEDPQREGLIDTPKRVVKMYQEMFAGLEMDPKNEFTTVFAEETYDDIVLVKDIPFYSMCEHHLVPFYGKAHVAYIPRGGRVTGLSKLARAVEVASKRPQLQERLTSQIAIALEEALHPEGVFVLVEAEHMCMTMRGIKKPGSKTVTKMARGSFIENRESQRYILELIRDK

SEQ ID NO: 15211 - protein, 184 aa, Streptococcus pseudopneumoniae
  REGION 1..184: note = tr|A0A3A4RZM1|A0A3A4RZM1_9STRE GTP cyclohydrolase 1; OS = Streptococcus pseudopneumoniae OX=257758 GN=folE PE=3; SV = 1
MDTQKIEAAVKMIIEAVGEDVNREGLQETPARVARMYQEIFSGLGQTAEEHLSKSFEIIDDNMVVEKDIFFHTMCEHHFLPFYGRAHIAYIPDGRVAGLSKLARTVEVYSKKPQIQERLNIEVADALMEYLGAKGAFVVIEAEHMCMSMRGVRKPGTATLTTVARGLFETDKDLRDQAYRLMGL

SEQ ID NO: 15212 - protein, 184 aa, Streptococcus pseudopneumoniae
  REGION 1..184: note = tr|A0A3A4N0F7|A0A3A4N0F7_9STRE GTP cyclohydrolase 1; OS = Streptococcus pseudopneumoniae OX=257758 GN=folE PE=3; SV = 1
MDTQKIETAVKMIIEAVGEDANREGLQETPARVARMYQEIFSGLGQTAEEHLSKSFEIIDDNMVVEKDIFFHTMCEHHFLPFYGRAHIAYIPDGRVAGLSKLARTVEVYSKKPQIQERLNIEVADALMDYLGAKGAFVVIEAEHMCMSMRGVRKPGTATLTTVARGLFETDKDLRDQAYRLMGL

SEQ ID NO: 15213 - protein, 187 aa, Streptococcus pseudoporcinus; identical to SEQ ID NO: 15209
  REGION 1..187: note = tr|G5KBM5|G5KBM5_9STRE GTP cyclohydrolase 1; OS = Streptococcus pseudoporcinus LQ 940-04 OX=875093; GN = folE PE=3 SV=1

SEQ ID NO: 15214 - protein, 194 aa, Streptococcus pyogenes
  REGION 1..194: note = sp|P0C0C2|GCH1_STRP1 GTP cyclohydrolase 1; OS = Streptococcus pyogenes serotype M1 OX=301447 GN=folE; PE = 3 SV=1
MKRERLMSINKEKAEAAIYQFLEAIGENPNREGLLDTPKRVAKMYAEMFLGLGKDPKEEFTAVFKEQHEDVVIVKDISFYSICEHHLVPFYGKAHIAYLPSDGRVTGLSKLARAVEVASKRPQLQERLTSQIADALVEALNPKGTLVMVEAEHMCMTMRGIKKPGSKTITTTARGLYKESRAERQEVISLMTKD

SEQ ID NO: 15215 - protein, 200 aa, Streptococcus pyogenes
  REGION 1..200: note = tr|A0A4U7G4L9|A0A4U7G4L9_STRPY GTP cyclohydrolase 1; OS = Streptococcus pyogenes OX=1314 GN=folE PE=3 SV=1
MKRKKLMKRERLMSINKEKAEAAIYQFLEAIGENPNREGLLDTPKRVAKMYAEMFLGLGKDPKEEFTAVFKEQHEDVVIVKDISFYSICEHHLVPFYGKAHIAYLPSDGRVTGLSKLARAVEVASKRPQLQERLTSQIADALVEALNPKGTLVMVEAEHMCMTMRGIKKPGSKTITTTARGLYKESRAERQEVISLMTKD

SEQ ID NO: 15216 - protein, 186 aa, Streptococcus ratti; identical to SEQ ID NO: 15191
  REGION 1..186: note = tr|J3F9L3|J3F9L3_STRRT GTP cyclohydrolase 1; OS = Streptococcus ratti FA-1 = DSM 20564 OX=699248 GN=folE; PE = 3 SV=1

SEQ ID NO: 15217 - protein, 186 aa, Streptococcus ratti; identical to SEQ ID NO: 15191
  REGION 1..186: note = tr|A0A5J6NQI3|A0A5J6NQI3_STRRT GTP cyclohydrolase I FolE OS=Streptococcus ratti OX=1341 GN=folE PE=4 SV=1

SEQ ID NO: 15218 - protein, 184 aa, unidentified
  source 1..184: note = Streptococcus rubneri
  REGION 1..184: note = tr|A0A4Z1DSZ1|A0A4Z1DSZ1_9STRE GTP cyclohydrolase 1; OS = Streptococcus rubneri OX=1234680 GN=folE PE=3 SV=1
MDTKKIQEAVKMIIEAVGEDGNREGLQETPERIAKMYQEIFAGLNQTAEEHLSKSFEIIDNNMVVEKDIFFHSMCEHHFLPFYGKVHIAYIPNGRVAGLSKLARTVEVYAKKPQIQERLTVEIADALMEYLGAQGALVWVEAEHMCMNMRGVRKPGTATVTTAARGLLETDKDLKNEAYKLMGH

SEQ ID NO: 15219 - protein, 187 aa, unidentified
  source 1..187: note = Streptococcus ruminantium
  REGION 1..187: note = tr|A0A2Z5TLV9|A0A2Z5TLV9_9STRE GTP cyclohydrolase 1; OS = Streptococcus ruminantium OX=1917441 GN=folE PE=3 SV=1
MSKQEQIEQTIYQLLELLGEDPKREGLLDTPKRVAKMYLEMFSGLQEDPKDQFTAVFSEGHEEVVLVKDIPFHSMCEHHLVPFYGIAHVAYIPSKGRVTGLSKLARAVEVASRRPQLQERLTYQVAHALQDALNPEGVFVMVEAEHMCMSMRGIRKPGSKTVTTVALGKYKEDAILRRELLSMIHNK

SEQ ID NO: 15220 - protein, 187 aa, Streptococcus salivarius; identical to SEQ ID NO: 15163
  REGION 1..187: note = tr|I0QK73|I0QK73_STRSL GTP cyclohydrolase 1; OS = Streptococcus salivarius PS4 OX=1157946 GN=folE PE=3; SV = 1

SEQ ID NO: 15221 - protein, 262 aa, Streptococcus salivarius
  REGION 1..262: note = tr|A0A3R9ISE4|A0A3R9ISE4_STRSL Putative GTP cyclohydrolase 1 type 2 OS=Streptococcus salivarius; OX = 1304 GN=D8867_03785 PE=4 SV=1
MLASELIKTYEEFCPQELSMEGDVVGLQIGSLDKEIQKVMVTLDVRENTVAEAIEKGVDLIIAKHAPIFRPVKDLVSSPDRDILLDLVKHDIAVYVSHTNIDVVNDGLNDWFCDLLDIKDTTYLTQTSENHGIGRVGDIVPQTIEELALKVKSVFGLDSVRLVRYNHDNPLVNRVAICGGSGQGFYKDALKKGAQVFITGDVYYHTGQEMITNGLLAIDPGHHIEALFISKIAEKLEAWKREHDWNVTILESQSSTNPFDHL

SEQ ID NO: 15222 - protein, 184 aa, Streptococcus sanguinis
  REGION 1..184: note = sp|A3CKF4|GCH1_STRSV GTP cyclohydrolase 1; OS = Streptococcus sanguinis (strain SK36) OX=388919 GN=folE; PE = 3 SV=1
MDTKKIEAAVAQIIEAVGEDGSREGLQETPQRIAKMYQEIFAGLGETAEEHLAKSFEIIDNNMVVEKDIFFHSMCEHHFLPFYGKVHIAYVPNGRVAGLSKLARTVEVYAKKPQIQERLTVEIAEALMDYLGAQGALVWVEAEHMCMNMRGVRKPGTATVTTAARGVLATDKDLKNEAYKLMGH

SEQ ID NO: 15223 - protein, 184 aa, Streptococcus sanguinis; identical to SEQ ID NO: 15222
  REGION 1..184: note = tr|F3UPJ8|F3UPJ8_STRSA GTP cyclohydrolase 1; OS = Streptococcus sanguinis SK355 OX=888816 GN=folE PE=3; SV = 1

SEQ ID NO: 15224 - protein, 184 aa, Streptococcus sinensis
  REGION 1..184: note = tr|A0A0A0DFD6|A0A0A0DFD6_9STRE GTP cyclohydrolase 1; OS = Streptococcus sinensis OX=176090 GN=folE PE=3 SV=1
MDTKKIEAAVAQIIEAIGEDGSREGLQETPQRIAKMYQEIFAGLGETAEEHLAKSFEIIDNNMVVEKDIFFHSMCEHHFLPFYGKVHIAYVPNGRVAGLSKLARTVEVYAKKPQIQERLTVEIAEALMDYLGAQGALVWVEAEHMCMNMRGVRKPGTATVTTAARGVLATDKDLKNEAYKLMGH

SEQ ID NO: 15225 - protein, 187 aa, Streptococcus sobrinus
  REGION 1..187: note = tr|U2J2S0|U2J2S0_9STRE GTP cyclohydrolase 1; OS = Streptococcus sobrinus W1703 OX=1227275 GN=folE PE=3; SV = 1
MFNQEKAQEAIYQLLEAIGENPQREGLLETPKRVAKMYAEMFAGLGENPKDQFTAVFSENHEEVVLVKDIPFYSMCEHHLVPFYGVAHVAYLPSQGKVTGLSKLARAVEVASKRPQLQERLTEQVATALEEALNPKGVFVMIEAEHMCMTMRGIKKPGSKTVTTVARGIFQEDRDQRQELLSLIREH

SEQ ID NO: 15226 - protein, 184 aa, Streptococcus sp.
  REGION 1..184: note = tr|A0A1E9GAD3|A0A1E9GAD3_9STRE GTP cyclohydrolase 1; OS = Streptococcus sp. HMSC076C08 OX=1739270 GN=folE PE=3; SV = 1
MDTQKIETAVKMIIEAVGEDANREGLQETPARVARMYQEIFSGLGQTAEEHLSKSFEIIDDNMVVEKDIFFHTMCEHHFLPFYGRAHIAYIPDGRVAGLSKLARTVEVYSKKPQIQERLNIEVADALMDYLGAKGAFVVIEAEHMCMSMRGVRKPGTATLTTVARGVFETDKDLRDQAYRLMGL

SEQ ID NO: 15227 - protein, 187 aa, Streptococcus sp.
  REGION 1..187: note = tr|F9HJG3|F9HJG3_9STRE GTP cyclohydrolase 1; OS = Streptococcus sp. oral taxon 056 str. F0418 OX=904294; GN = folE PE=3 SV=1
MADIEKVQETIYQLLQLLGENPDREGLLDTPKRVAKMYQEVFSGLNQDPKDEFTAVFSEGHEEVVLVKDIPFHSMCEHHLLPFYGVAHVAYLPSKGKVTGLSKLARAVEVASKRPQLQERLTAQIATALDEALAPKGVFVMVEAEHMCMTIRGIKKPGSKTVTTVAKGIYKEDVHQRQEILSMIHHH

SEQ ID NO: 15228 - protein, 187 aa, Streptococcus suis
  REGION 1..187: note = sp|A4W1S9|GCH1_STRS2 GTP cyclohydrolase 1; OS = Streptococcus suis (strain 98HAH33) OX=391296 GN=folE; PE = 3 SV=1
MSKQEQIEQTIYQLLELLGEDPNREGLLDTPKRVAKMYLEMFNGLEEDPKDQFTAVFSEGHEEVVLVKDIPFHSMCEHHLVPFYGIAHVAYIPSKGRVTGLSKLARAVEVASRRPQLQERLTHQVAHALQDALEPEGVFVMVEAEHMCMSMRGIRKPGSKTVTTVALGKYKEDAILRRELLSMIHNK

SEQ ID NO: 15229 - protein, 187 aa, Streptococcus suis; identical to SEQ ID NO: 15228
  REGION 1..187: note = tr|A0A0M9FDZ4|A0A0M9FDZ4_STRSU GTP cyclohydrolase 1; OS = Streptococcus suis OX=1307 GN=folE PE=3 SV=1

SEQ ID NO: 15230 - protein, 187 aa, Streptococcus thermophilus
  REGION 1..187: note = sp|Q5M391|GCH1_STRT2 GTP cyclohydrolase 1; OS = Streptococcus thermophilus (strain ATCC BAA-250 / LMG 18311) OX=264199 GN=folE PE=3 SV=1
MENQEKVEQAVYQLLEALGENPEREGLLDTPKRVAKMYAEMFSGLNEDPKDQFTAVFSEVHDEVVLVKDIPFYSMCEHHLVPFYGMAHVAYLPSGDKVTGLSKLARAVEVAARRPQLQERLTDQVATALEEALNPRGVFVMVEAEHMCMTMRGIKKPGSKTITTVAKGIYKEDREERKEILSLMRDF

SEQ ID NO: 15231 - protein, 187 aa, Streptococcus thermophilus; identical to SEQ ID NO: 15230
  REGION 1..187: note = tr|A0A0M4I0H6|A0A0M4I0H6_STRTR GTP cyclohydrolase 1; OS = Streptococcus thermophilus OX=1308 GN=folE PE=3 SV=1

SEQ ID NO: 15232 - protein, 187 aa, unidentified
  source 1..187: note = Streptococcus troglodytae
  REGION 1..187: note = tr|A0A1L7LJQ4|A0A1L7LJQ4_9STRE GTP cyclohydrolase 1; OS = Streptococcus troglodytae OX=1111760 GN=folE PE=3 SV=1
MSNQKKIEEAVYQLLEALGEDPNREGLLDTPKRVARMYQEMFAGLNEDPKDQFTAVFSEGHEEVVLVKDIPFYSMCEHHLVPFYGLAHVAYIPSDGRVTGLSKLARAVEVASKRPQLQERLTDQIANALEEALKPKGVLVMIEAEHMCMTMRGIKKPGSKTVTRVVRGVCQSDKETRQEIIAMIHHN

SEQ ID NO: 15233 - protein, 186 aa, Streptococcus uberis
  REGION 1..186: note = tr|A0A380MGV1|A0A380MGV1_STRUB GTP cyclohydrolase 1; OS = Streptococcus uberis OX=1349 GN=folE PE=3 SV=1
MMDIKKAEDAIYQLLEAIGEDPQREGLLETPKRVAKMYEEMFSSLKSDAKEAFTAVFTEAYDDLVLVKDIPFYSMCEHHLVPFYGVAHIAYYPQNGKVTGLSKLARAVEIASKKPQLQERLTSQIADALDQSLHPRGVFVMVEAEHMCMTMRGIKKPGSKTMTTTARGIFAEDKKEQAYVLSLIKD

SEQ ID NO: 15234 - protein, 186 aa, Streptococcus uberis
  REGION 1..186: note = tr|B9DRZ2|B9DRZ2_STRU0 GTP cyclohydrolase 1; OS = Streptococcus uberis (strain ATCC BAA-854 / 0140J); OX = 218495 GN=folE PE=3 SV=1
MMDIKKAEDAIYQLLEAIGEDPQREGLLETPKRVAKMYEEMFSSLKSDAKEAFTAVFTEAYDDLVLVKDIPFYSMCEHHLVPFYGVAHIAYYPQNGKVTGLSKLARAVEIASKKPQLQERLTSQIADALDQSLHPRGVFVMVEAEHMCMTMRGIKKPGSKTMTTTARGIFTEDKKEQAYVLSLIKD

SEQ ID NO: 15235 - protein, 185 aa, Streptococcus urinalis
  REGION 1..185: note = tr|G5KFP1|G5KFP1_9STRE GTP cyclohydrolase 1; OS = Streptococcus urinalis 2285-97 OX=764291 GN=folE PE=3; SV = 1
MADQKKMEAAIYQFLEALGEDPEREGLKDTPKRVSNMYLEMFSGLHQDPKNEFTALFQEDYENLVLVKDIPFYSMCEHHLVPFYGKVHIAYLPQDGKVTGLSKLARAVEVASKRPQLQERLTEQIADALDQALNPQGVYVMVEAEHMCMTMRGIKKPGSKTITTIAKGLYQSNDSLRQEVMSLIK

SEQ ID NO: 15236 - protein, 187 aa, Streptococcus vestibularis
  REGION 1..187: note = tr|A0A448ABP1|A0A448ABP1_STRVE GTP cyclohydrolase 1; OS = Streptococcus vestibularis OX=1343 GN=folE PE=3 SV=1
MANQEKVEQAVYQLLEALGENPEREGLLDTPKRVAKMYAEMFSGLNEDPKDQFTAVFSEVHDEVVLVKDIPFYSMCEHHLVPFYGKAHVAYLPSGDKVTGLSKLARAVEVAARRPQLQERLTDQVATALEEALNPRGVFVMVEAEHMCMTMRGIKKPGSKTITTVAKGLYKEDREERKEILSLIRDL

SEQ ID NO: 15237 - protein, 187 aa, Streptococcus vestibularis; identical to SEQ ID NO: 15163
  REGION 1..187: note = tr|A0A3E4XCZ0|A0A3E4XCZ0_STRVE GTP cyclohydrolase 1; OS = Streptococcus vestibularis OX=1343 GN=folE PE=3 SV=1

SEQ ID NO: 15238 - protein, 184 aa, unidentified
  source 1..184: note = Streptococcus viridans
  REGION 1..184: note = tr|A0A447Z2D7|A0A447Z2D7_9STRE GTP cyclohydrolase 1; OS = Streptococcus viridans OX=78535 GN=folE PE=3 SV=1
MDTKKIQEAVKMIIDAVGEDGSREGLQETPERIAKMYQEIFAGLNQTAEVHLSKSFEIVDNNMVVEKDIFFHSMCEHHFLPFYGKVHIAYIPNGRVAGLSKLARTVEVYAKKPQIQERLTVEIADALMEYLGAQGALVWVEAEHMCMNMRGVRKPGTATVTTAARGLFETDKDLKNEAYKLMGH

SEQ ID NO: 15239 - protein, 310 aa, Streptohalobacillus salinus
  REGION 1..310: note = tr|A0A2V3WT26|A0A2V3WT26_9BACI GTP cyclohydrolase FolE2 OS=Streptohalobacillus salinus OX=621096 GN=folE2; PE = 3 SV=1
MNNKQKQIKRLPKKAERHRIFGSTSPGKRTKPTVKDAMVDLQNKQDDYFFKLDQVGISNVKHPVKIYGEKEPQLQTSIATFGFYSSIDKGSKGTNMSRFTEQLAEAYRHDQLDLKLKTLKAFTKALANRLKTEDATLEVTVPYFYQQPAPDSHLSGLNHVDLVTKVTYRAPDTYTVEVGLTATITTLCPCSKEISEYSAHNQRGIVQVEVELHSDFDESIEDWKHFILEAAESNASARIHPILKRPDEKVVTEHAYENPRFVEDMVRLVSADIYEWEAAAAFKVSCRNEESIHLHDAFASITFDKRVDER

SEQ ID NO: 15240 - protein, 198 aa, Streptomonospora alba
  REGION 1..198: note = tr|A0A0C2JF89|A0A0C2JF89_9ACTN GTP cyclohydrolase 1; OS = Streptomonospora alba OX=183763 GN=folE PE=3 SV=1
MPLVVPEHHEVDHARIEKAVREILLAIGEDPERDGLRDTPARVARAYEEQFAGLGQKPEDVLTTVFEAGHEEMVLIRDIELYSTCEHHLVPFYGSAHVGYIPNSKGQITGLSKIARLVDVYARRPQVQERLTTQVADGIMAHLDPRGVIVVIEAEHLCMTMRGVRKPGAKTVTSAVRGDFRNRDRTRSEAMSLILGRD

SEQ ID NO: 15241 - protein, 209 aa, Streptomonospora sp.
  REGION 1..209: note = tr|A0A4P6Q9U1|A0A4P6Q9U1_9ACTN GTP cyclohydrolase 1; OS = Streptomonospora sp. M2 OX=2498135 GN=folE PE=3 SV=1
MSAESPDADTDIPLVVPAHKSVDHGRIEKAVREILLAIGEDPDRDGLRETPARVARAYEEQFAGLSQRPEDVLTTVFEAGHEEMVLVRDIELYSTCEHHLVPFYGSAHVGYIPNSKGQITGLSKIARLVDVYARRPQVQERLTTQVADGIMANLEPRGVIVVIEAEHLCMTMRGVRKPGAKTVTSAVRGDFRNRDRTRAEAMSLILGQH

SEQ ID NO: 15242 - protein, 279 aa, Streptomonospora sp.
  REGION 1..279: note = tr|A0A4P6Q5W6|A0A4P6Q5W6_9ACTN GTP cyclohydrolase 1 type 2 OS=Streptomonospora sp. M2 OX=2498135; GN = EKD16_14915 PE=4 SV=1
MTESPADLSLHDVTRAFEGVYDPAWAASWDAVGLVCGEPAQPVRRVLFAVDPVAEVVEEAREWGADLVITHHPLLLRGVTGVAATTPKGRLVHRLISSGIALYTAHTNADTADPGVSDALAAAVGLPGPLRPLDPDPADPAGRRGIGRVGALPEPVPLRDFAARAAAGLPRTAGGIRVSGDPERPVQRVAVSGGAGDALLDRARAAGVDVYLTSDLRHHPASEFAEHGGTALVDTAHWASEWPWLAEGAARLVSALGGERANVETRVSTIVTDAWSLAL

SEQ ID NO: 15243 - protein, 202 aa, unidentified
  source 1..202: note = Streptomyces abyssalis
  REGION 1..202: note = tr|A0A1E7JQN3|A0A1E7JQN3_9ACTN GTP cyclohydrolase 1; OS = Streptomyces abyssalis OX=933944 GN=folE PE=3 SV=1
MTDPVTLGGEGDFKPSDFDEKRAENAVRELLIAVGEDPDREGLLETPARVTRAYKELFAGLHQRPEEVLTTTFDLGHDEMVLVKDIEVFSTCEHHLVPFHGVAHVGYIPSADGKITGLSKLARLVDVYARRPQVQERLTTQIAESLMRILEPRGVIVVVECEHMCMSMRGIRKPGAKTLTSAVRGQLRDAATRSEAMSLILR

SEQ ID NO: 15244 - protein, 196 aa, Streptomyces acidiscabies
  REGION 1..196: note = tr|A0A100JEB7|A0A100JEB7_9ACTN GTP cyclohydrolase 1; OS = Streptomyces acidiscabies OX=42234 GN=folE_2 PE=3 SV=1
MSDFDSPESVDTPLSVRDPLEDIARRLLTEIGEDPDRDGLKETPARFARWWREFSGYEAGKVDTRFPMFTQGQIVMVSDIDVWSLCEHHLLPFSCTLTIAYRPDGEVLGLSKFARIAHRHAHRLQVQERLVRDIAEEVVATTGSADVAVVGRGEHLCMSMRGVRASARMTSSVFTGVFEEYGPAREELIATISAAR

SEQ ID NO: 15245 - protein, 198 aa, Streptomyces acidiscabies
  REGION 1..198: note = tr|A0A0L0JHZ9|A0A0L0JHZ9_9ACTN GTP cyclohydrolase 1; OS = Streptomyces acidiscabies OX=42234 GN=IQ63_41120 PE=3; SV = 1
MTVSDFDSPESVDTPLSVRDPLEDIARRLLTEIGEDPDRDGLKETPARFARWWREFSGYEAGKVDTRFPMFTQGQIVMVSDIDVWSLCEHHLLPFSCTLTIAYRPDGEVLGLSKFARIAHRHAHRLQVQERLVRDIAEEVVATTGSADVAVVGRGEHLCMSMRGVRASARMTSSVFTGVFEEYGPAREELIATISAAR

SEQ ID NO: 15246 - protein, 201 aa, unidentified
  source 1..201: note = Streptomyces actuosus
  REGION 1..201: note = tr|A0A2U9P6Q9|A0A2U9P6Q9_STRAS GTP cyclohydrolase 1; OS = Streptomyces actuosus OX=1885 GN=folE PE=3 SV=1
MTDPVTLDGEGPIGEFDEKRAENAVRELLIAVGEDPDREGLRETPARVARAYKELLAGLRQQPEEVLTTTFDLGHDEMVLVKDIEIVSLCEHHLLPFHGVAHVGYIPAETGKITGLSKLARLVEVFARRPQVQERLTTQVADSLMRILEARGAIVVIEAEHMCMSVRGIRKPGAKTTTSAVRGQLRDSTTRAEAMSLILAK

SEQ ID NO: 15247 - protein, 216 aa, unidentified
  source 1..216: note = Streptomyces actuosus
  REGION 1..216: note = tr|A0A2U9PAP2|A0A2U9PAP2_STRAS GTP cyclohydrolase 1; OS = Streptomyces actuosus OX=1885 GN=folE PE=3 SV=1
MTESSHRTAVRIRTADQAAPAVPALRVVHEPDGIDLAAAERAAGQFLNALGVSTASESLRGTPGRMARAYAELFSPRPFDLTTFPNDEGYDELVLARRIPVRSVCEHHLLPFVGTAHVGYLPGGRILGLSKLARVVEHFSCRPQVQERLTKQVADWLQTHLEPKGVGVVIEAEHSCMTLRGVQATGSSTMTSTLLGLLRTDARSRSEFLALTGTTS

SEQ ID NO: 15248 - protein, 228 aa, Streptomyces afghaniensis
  REGION 1..228: note = tr|S4MN14|S4MN14_9ACTN GTP cyclohydrolase 1; OS = Streptomyces afghaniensis 772 OX=1283301 GN=folE PE=3; SV = 1
MDLAGSINAHPSRTADLPAPSASIPRPQTPPSTAGPLRVVHDTDGIDLAEAERAAADFLAALGIDTGTESLRGTPGRMARAYAELFSPRPFDLTTFPNDEGYDELVLARSIPVRSVCEHHLLPFTGTAHVGYLPGHRILGLSKLARVVEHFACRPQVQERLTKQVADWLQAHLEPKGVGVVIEAEHSCMTLRGVQATGSSTLTSTLLGTLRHDARSRAEFLSLTGLQS

SEQ ID NO: 15249 - protein, 201 aa, Streptomyces afghaniensis
  REGION 1..201: note = tr|S4NTG5|S4NTG5_9ACTN GTP cyclohydrolase 1; OS = Streptomyces afghaniensis 772 OX=1283301 GN=folE PE=3; SV = 1
MTDPVMLDGEGQIGEFDEKRAENAVRELLIAVGEDPDREGLRETPARVARAYREIFAGLWQKPEDVLTTTFDIGHDEMVLVKDIEVYSTCEHHLVPFRGVAHVGYIPAHSGKITGLSKLARLVDVYARRPQVQERLTTQIADSLMEILEPRGVIVVVECEHMCMSMRGIRKPGAKTLTSAVRGQLRDAATRNEAMSLIMAR

SEQ ID NO: 15250 - protein, 197 aa, unidentified
  source 1..197: note = Streptomyces agglomeratus
  REGION 1..197: note = tr|A0A1E5PI11|A0A1E5PI11_9ACTN GTP cyclohydrolase 1; OS = Streptomyces agglomeratus OX=285458 GN=folE PE=3 SV=1
MSDEDLDTDLEFEEIDLAGAEKAANQFLTALGMRTDTEALSDTPGRMTRAYAELFSPRPFHLTTFPNDEGYDQLVLARSITLRSVCEHHVLPLVGYAHVGYLPGARILGISKLARVVEHFACRPQVQERLTMQIAQWLQEQLQPKGVGVVIEAEHTCMTLRGVQSAGSSTVTSALLGEIRDNGRTRSEFLSFASISR

SEQ ID NO: 15251 - protein, 201 aa, unidentified
  source 1..201: note = Streptomyces agglomeratus
  REGION 1..201: note = tr|A0A1E5P868|A0A1E5P868_9ACTN GTP cyclohydrolase 1; OS = Streptomyces agglomeratus OX=285458 GN=folE PE=3 SV=1
MTDPVTLDGEGTIGEFDEKRAENAVRELLISIGEDPDREGLRATPGRVARAYKEIFAGLWQQPEDVLTTTFDLGHDEMILVKDIEVFSTCEHHLVPFRGVAHVGYIPATSGKITGLSKLARLVDVFARRPQVQERLTTQVADSLMEILEPRGVIVVIECEHMCMSMRGIRKPGAKTITSAVRGQLRDSATRNEAMSLIMAR

SEQ ID NO: 15252 - protein, 201 aa, unidentified
  source 1..201: note = Streptomyces ahygroscopicus
  REGION 1..201: note = tr|K7STK8|K7STK8_9ACTN GTP cyclohydrolase 1; OS = Streptomyces ahygroscopicus subsp. wuzhouensis; OX = 387850 GN=tymD PE=3 SV=1
MSTVSGAPELDVLDDSGPQVPDPLEDVARKLLIEIGEDPERDGLKETPARFARWWREFSRYDAGAVDTLFPLQTEGQLVMVSDINVWSLCEHHLLPFSCSLTIAYRPKGDVLGLSKFARIAHRHAHRLQVQERLVRDIADEVTKVTGSVDVAVIATGEHLCMSMRGIRTPAVMTSTAYSGVFEEYGPARQELVATVFPLRK

SEQ ID NO: 15253 - protein, 201 aa, unidentified
  source 1..201: note = Streptomyces aidingensis
  REGION 1..201: note = tr|A0A1I1R9B0|A0A1I1R9B0_9ACTN GTP cyclohydrolase 1; OS = Streptomyces aidingensis OX=910347 GN=folE PE=3 SV=1
MTDPVTPDGESPLGEFDEKRAENAIRELLIAVGEDPDREGLRETPARVARAYKEIFAGLWQRPEDVLTTTFDLGHDEMVLVKDIEVFSSCEHHLVPFQGVAHVGYIPSTSGKITGLSKLARLVDVYARRPQVQERLTTQIADSLMRILEPRGVIVVLECEHMCMTMRGVRKPGAKTTTSAVRGQLRDAATRAEAMSLILAR

SEQ ID NO: 15254 - protein, 201 aa, Streptomyces albidoflavus
  REGION 1..201: note = tr|A0A2A2UQ51|A0A2A2UQ51_9ACTN GTP cyclohydrolase 1; OS = Streptomyces albidoflavus OX=1886 GN=folE PE=3 SV=1
MTDPVTLDGLGAIGEFDEKRAEHAVRELLLAVGEDPDREGLRETPARVARAYREIFAGLWQKPEDVLTTTFDLGHDEMVLVKDIEVQSSCEHHLVPFVGVAHVGYIPSADGKITGLSKLARLVDVYARRPQVQERLTTQIADSLMEILEPRGVIVVVECEHMCMTMRGVRKPGAKTITSAVRGQLRDAATRNEAMSLIMAR

SEQ ID NO: 15255 - protein, 201 aa, unidentified
  source 1..201: note = Streptomyces albireticuli
  REGION 1..201: note = tr|A0A2A2DG57|A0A2A2DG57_9ACTN GTP cyclohydrolase 1; OS = Streptomyces albireticuli OX=1940 GN=folE PE=3 SV=1
MTDPVTLDAENSIGEFDEKRAENAVRELLIAVGEDPDREGLRETPARVARAYKEIFAGLWQEPEDVLTTTFDLGHDEMVLVRDIEVYSTCEHHLVPFHGVAHVGYIPATSGKITGLSKLARLVDVFARRPQVQERLTTQIADSLMEILEPRGVVVVVECEHMCMSMRGIRKPGAKTLTSAVRGQLRDPATRAEAMSLIMAR

SEQ ID NO: 15256 - protein, 201 aa, unidentified
  source 1..201: note = Streptomyces albireticuli
  REGION 1..201: note = tr|A0A1Z2L307|A0A1Z2L307_9ACTN GTP cyclohydrolase 1; OS = Streptomyces albireticuli OX=1940 GN=folE PE=3 SV=1
MTDPVTLDAENSIGEFDEKRAENAVRELLIAVGEDPDREGLRETPARVARAYKEIFAGLWQEPEDVLTTTFDLGHDEMVLVRDIEVYSTCEHHLVPFHGVAHVGYIPSTSGKITGLSKLARLVDVYARRPQVQERLTTQIADSLMEILEPRGVVVVVECEHMCMSMRGIRKPGAKTLTSAVRGQLRDPATRAEAMSLIMAR

SEQ ID NO: 15257 - protein, 201 aa, Streptomyces alboflavus
  REGION 1..201: note = tr|A0A1Z1WG22|A0A1Z1WG22_9ACTN GTP cyclohydrolase 1; OS = Streptomyces alboflavus OX=67267 GN=folE PE=3 SV=1
MTDPVTLDGEGTIGEFDEKRAENAVRELLIAVGEDPDREGLRETPGRVARAYKEIFAGLWQEPEDVLTTTFDLGHDEMVLVKDIEVMSSCEHHLVPFVGVAHVGYIPSSDGKITGLSKLARLVDVYARRPQVQERLTTQIADSLMQILEPRGVIVVVECEHMCMTMRGVRKPGAKTITSAVRGQLRDPATRNEAMSLIMAR

SEQ ID NO: 15258 - protein, 201 aa, Streptomyces alboniger
  REGION 1..201: note = tr|A0A5J6HQQ9|A0A5J6HQQ9_STRAD GTP cyclohydrolase I FolE OS=Streptomyces alboniger OX=132473 GN=folE PE=4 SV=1
MTDPVTLDGEHSIGEFDEKRAENAVRELLIAVGEDPDREGLLETPARVARAYREIFSGLRQKAEDVLTTTFDLGHDEMVLVKDIEVMSSCEHHLVPFVGVAHVGYIPSTDGKITGLSKLARLVDVYARRPQVQERLTTQIADSLMEILEPRGVIVVVECEHMCMTMRGVRKPGAKTITSAVRGQLRDPATRNEAMSLIMAR

SEQ ID NO: 15259 - protein, 202 aa, Streptomyces albulus
  REGION 1..202: note = tr|A0A059W5H3|A0A059W5H3_STRA9 GTP cyclohydrolase 1; OS = Streptomyces albulus OX=68570 GN=folE_1 PE=3 SV=1
MTDPVTLDVEGGAIGTFDEKRAADAVRELLIAVGEDPDREGLLETPARVARAYREIFAGLWQKPEDVLTTTFDLGHDEMVLVKDIEVVSNCEHHLVPFVGVAHVGYIPSTDGKITGLSKLARLVDVFARRPQVQERLTTQIADSLMKILEPRGVIVVIECEHMCMTMRGVRKPGAKTTTSAVRGQLRDPATRAEAMSLILAR

SEQ ID NO: 15260 - protein, 201 aa, Streptomyces albulus
  REGION 1..201: note = tr|A0A401RB46|A0A401RB46_STRA9 GTP cyclohydrolase 1; OS = Streptomyces albulus OX=68570 GN=folE_2 PE=3 SV=1
MSTVSGAPELDVLDDSGPQVPDPLEDVARKLLIEIGEDPERDGLKETPARFARWWREFSRYDAGAVDTLFPLQTEGQLVMVSDINVWSLCEHHLLPFSCSLTIAYRPKGDVLGLSKFARIAHRHAHRLQVQERLVRDIAEEVTKVTGSVDVAVIATGEHLCMSMRGIRTPAVMTSTAYSGVFEEYGPARQELVATVFPSRR

SEQ ID NO: 15261 - protein, 201 aa, Streptomyces albus
  REGION 1..201: note = tr|A0A0B5ENW5|A0A0B5ENW5_STRA4 GTP cyclohydrolase 1; OS = Streptomyces albus (strain ATCC 21838 / DSM 41398 / FERM P-419 / JCM 4703 / NBRC 107858) OX=1081613 GN=folE PE =3 SV=1
MTDPVTLDGEGNIGTFDEKRAQNAVRELLIAVGEDPDREGLRETPARVARAYREIFAGLWQEPEDVLTTTFDLGHDEMVLVKDIEVMSSCEHHLVPFVGVAHVGYIPSSDGKITGLSKLARLVDVYARRPQVQERLTTQIADSLMHILEPRGVIVVVECEHMCMTMRGVRKPGAKTLTSAVRGQLRHPATRAEAMSLIMAR

SEQ ID NO: 15262 - protein, 200 aa, Streptomyces albus
  REGION 1..200: note = tr|A0A4Z0VU83|A0A4Z0VU83_9ACTN GTP cyclohydrolase 1; OS = Streptomyces albus OX=1888 GN=folE PE=3 SV=1
MTDPVTLDGERPIGDFDEKRAENAVRELLIAVGEDPDREGLLETPARVARAYKEIFAGLRQKPEDVLTTTFDIGHDEMVLVKDIEVYSTCEHHLVPFQGVAHVGYIPAASGKITGLSKLARLVDVYARRPQVQERLTTQIADSLMRILEPRGVIVVVECEHMCMSMRGIRKPGAKTVTSAVRGQLRDAATRSEAMSLILR

SEQ ID NO: 15263 - protein, 201 aa, unidentified
  source 1..201: note = Streptomyces alfalfae
  REGION 1..201: note = tr|A0A1P8THH3|A0A1P8THH3_9ACTN GTP cyclohydrolase 1; OS = Streptomyces alfalfae OX=1642299 GN=folE PE=3 SV=1
MTDPVTLDSEGSIGEFDEKRAENAVRELLIAVGEDPDREGLLETPARVARAYREIFAGLWQQPEDVLTTTFDLGHDEMVLVKDIEVMSSCEHHLVPFVGVAHVGYIPSTDGKITGLSKLARLVDVYARRPQVQERLTTQIADSLMKILEPRGVIVVVECEHMCMTMRGVRKPGAKTITSAVRGQLRDPATRNEAMSLIMAR

SEQ ID NO: 15264 - protein, 202 aa, Streptomyces alni
  REGION 1..202: note = tr|A0A1I2INQ1|A0A1I2INQ1_9ACTN GTP cyclohydrolase 1; OS = Streptomyces alni OX=380248 GN=folE PE=3 SV=1
MTDPVTIDGDSPVGEFDEKRAEAAVRELLYAVGEDPDREGLRETPARVARAYKEIFAGLWQQPEDVLTTTFDLGHDEMVLVKDIEVMSSCEHHLVPFVGVAHVGYIPSTSGKITGLSKLARLVDVYARRPQVQERLTTQIADALMRILEPRGVIVVIECEHMCMTMRGVRKQGAKTITSAVRGQLRDSATRAEAMSLIIGRG

SEQ ID NO: 15265 - protein, 201 aa, Streptomyces ambofaciens
  REGION 1..201: note = tr|A0A0K2AVP2|A0A0K2AVP2_STRA7 GTP cyclohydrolase 1; OS = Streptomyces ambofaciens (strain ATCC 23877 / 3486 / DSM 40053 / JCM 4204 / NBRC 12836 / NRRL B-2516) OX=27899 2 GN=folE PE=3 SV=1
MTDPVTLDGDGQIGEFDEKRAENAVRELLIAVGEDPDREGLRETPARVARAYREIFAGLWQEPEDVLTTTFDLGHDEMVLVKDIEVFSTCEHHLVPFRGVAHVGYIPSPSGKITGLSKLARLVDVYARRPQVQERLTTQIADSLMEILEPRGVIVVVECEHMCMSMRGIRKPGAKTLTSAVRGQLRDLATRNEAMSLIMAR

SEQ ID NO: 15266 - protein, 288 aa, Streptomyces ambofaciens
  REGION 1..288: note = tr|A0A0K2AQN7|A0A0K2AQN7_STRA7 Putative GTP cyclohydrolase 1 type 2 OS=Streptomyces ambofaciens (strain ATCC 23877 / 3486 / DSM 40053 / JCM 4204 / NBRC 12836 / NRRLB-2516) OX=278992 GN=SAM23877_2376 PE=4 SV=1
MPRLSEVIAALENLWPAERAESWDAVGTVVGDPDQEVSRVLFAVDPVQETVDEAVGLGADLLVTHHPLYLRGTTTVAASTFKGRVVHTLIKNDIALHVAHTNADTADPGVSDALAGALDLRVVRPLVPDAGDPEGRRGLGRVCELDHPLTVREFAARAAERLPATAQGIRVAGDPEATVRTVAVSGGSGDSLFAHVRAAGVDAFLTADLRHHPASEFLADRAHSPLALLDAAHWATEWPWCELGAAQLDEISDRNGWDLRVHVSKTVTDPWTAHAASTPTSDAMGAPN

SEQ ID NO: 15267 - protein, 198 aa, Streptomyces antibioticus
  REGION 1..198: note = tr|A0A0L8PFQ0|A0A0L8PFQ0_STRAT GTP cyclohydrolase 1; OS = Streptomyces antibioticus OX=1890 GN=folE PE=3 SV=1
MPGRPALRVVHERDGIDLAAAEAAAGQFLAALGVSTASESLRGTPGRMARAYAELFTPRPFDLTTFPNDEGYDELVLARRIPVRSVCEHHLLPFVGTAHVGYLPGARILGLSKLARVVEHFACRPQVQERLTKQVADWLQDHLEPKGVGVVIEAEHSCMTLRGVQATGSSTMTSTLLGLLRSDARSRSEFLGLTGAAS

SEQ ID NO: 15268 - protein, 201 aa, Streptomyces antibioticus
  REGION 1..201: note = tr|A0A0L8NMN0|A0A0L8NMN0_STRAT GTP cyclohydrolase 1; OS = Streptomyces antibioticus OX=1890 GN=folE PE=3 SV=1
MTDPVTLDGEGPIGEFDEKRAENAVRELLIAVGEDPDREGLRETPARVARAYKEIFAGLWQQPEDVLTTTFDLGHDEMVLVKDIEVYSTCEHHLVPFRGVAHVGYIPSETGKITGLSKLARLVDVYARRPQVQERLTTQIADSLMNILEPRGVIVVVECEHMCMSMRGIRKPGAKTITSAVRGQLRDAATRNEAMSLIMAR

SEQ ID NO: 15269 - protein, 201 aa, Streptomyces antimycoticus
  REGION 1..201: note = tr|A0A4D4K3S8|A0A4D4K3S8_9ACTN GTP cyclohydrolase 1; OS = Streptomyces antimycoticus OX=68175 GN=folE PE=3 SV=1
MTDPVMLDGESPIGVFDEKRAENAIRELLIAVGEDPDREGLRETPGRVARAYKEIFAGLRQEPEDVLTTTFDLGHDEMVLVKDIEVMSSCEHHLVPFVGVAHVGYIPSHDGKITGLSKLARLVDVFARRPQVQERLTTQIAESLMRILEPRGVIVVVECEHMCMTMRGVRKPGAKTLTSAVRGQLRDSATRAEAMSLIMAR

SEQ ID NO: 15270 - protein, 201 aa, unidentified
  source 1..201: note = Streptomyces antioxidans
  REGION 1..201: note = tr|A0A1V4DCR9|A0A1V4DCR9_9ACTN GTP cyclohydrolase 1; OS = Streptomyces antioxidans OX=1507734 GN=folE PE=3 SV=1
MTDPVTLDGESPIGVFDEKRAENAIRELLIAVGEDPDREGLRETPGRVARAYKEIFAGLRQEPEDVLTTTFDLGHDEMVLVKDIEVMSSCEHHLVPFVGVAHVGYIPSHDGKITGLSKLARLVDVFARRPQVQERLTTQIADSLMRILEPRGVIVVVECEHMCMTMRGVRKPGAKTLTSAVRGQLRAPATRAEAMSLIMAR

SEQ ID NO: 15271 - protein, 201 aa, unidentified
  source 1..201: note = Streptomyces argenteolus
  REGION 1..201: note = tr|A0A561R697|A0A561R697_9ACTN GTP cyclohydrolase 1; OS = Streptomyces argenteolus OX=67274 GN=folE PE=3 SV=1
MTDPVTLDGQGSIGVFDEKRAEAAVRELLIAVGEDPDREGLLETPGRVARAYKEIFAGLHQEPEDVLTTTFDLGHDEMVLVKDIEVFSTCEHHLVPFHGVAHVGYIPATSGKITGLSKLARLVDVYARRPQVQERLTTQIAESLMAILEPRGVIVVVECEHMCMSMRGIRKPGAKTLTSAVRGQLRDPATRAEAMSLIMAR

SEQ ID NO: 15272 - protein, 201 aa, Streptomyces armeniacus
  REGION 1..201: note = tr|A0A345XVN7|A0A345XVN7_9ACTN GTP cyclohydrolase 1; OS = Streptomyces armeniacus OX=83291 GN=folE PE=3 SV=1
MTDPVTVDVEGSIAEFDEKRAENAVRELLLAVGEDPDREGLRETPARVARAYRELFAGLRQRPEDVLTTTFDLGHDEMVLVKDIEVVSQCEHHLLPFHGVAHVGYIPAATGKITGLSKLARLVEVFARRPQVQERLTTQVADSLLKILEPRGVIVVIECEHMCMSLRGVRKPGAKTLTSAVRGQLRDATTRAEAMSLIMAR

SEQ ID NO: 15273 - protein, 201 aa, Streptomyces asterosporus
  REGION 1..201: note = tr|A0A514JS55|A0A514JS55_9ACTN GTP cyclohydrolase 1; OS = Streptomyces asterosporus OX=285570 GN=folE PE=3 SV=1
MTDPVTLDGIATVGEFDEKRAENAVRELLIAVGEDPDREGLQETPARVARAYREIFAGLWQKPEDVLTTTFDIGHDEMVLVKDIEVYSTCEHHLVPFRGVAHVGYIPATSGKITGLSKLARLVDVYARRPQVQERLTTQIADSLMEILEPRGVIVVVECEHMCMSMRGIRKPGAKTLTSAVRGQLRDAATRNEAMSLIMAR

SEQ ID NO: 15274 - protein, 203 aa, Streptomyces atratus
  REGION 1..203: note = tr|A0A2Z5J766|A0A2Z5J766_STRAR GTP cyclohydrolase 1; OS = Streptomyces atratus OX=1893 GN=folE PE=3 SV=1
MATTITPVSDAPAARRKTVQAYRQGLRSWLAGRGLDPDSPALTDTPDRVLRALEEMTAGYDEDPAEHLARVFPVDHDGGPIMVTGVPFTSLCEHNMLPFTGHADIAYQPRPGQPVAGLSKLPRVLDVYARRLQTQEQLTRQVTATLDTHLQPVGSACVIRSEHGCLAHRGARKPGSVMVTASYTGTFRDDPEARAELHRLMTG

SEQ ID NO: 15275 - protein, 201 aa, Streptomyces atratus
  REGION 1..201: note = tr|A0A1K2DHF0|A0A1K2DHF0_STRAR GTP cyclohydrolase 1; OS = Streptomyces atratus OX=1893 GN=folE PE=3 SV=1
MTDPVTLDGQGSIGEFDEKRAEAAVRELLIAVGEDPDREGLRETPGRVARAYKEIFAGLYQEPEDVLTTTFDLGHDEMVLVKDIEVFSTCEHHLVPFRGVAHVGYIPATSGKITGLSKLARLVDVFARRPQVQERLTTQIADSLMEILEPRGVVVVVECEHMCMSMRGIRKPGAKTLTSAVRGQLRDPATRAEAMSLIMAR

SEQ ID NO: 15276 - protein, 201 aa, Streptomyces aurantiacus
  REGION 1..201: note = tr|S3ZEL5|S3ZEL5_9ACTN GTP cyclohydrolase 1; OS = Streptomyces aurantiacus JA 4570 OX=1286094 GN=folE; PE = 3 SV=1
MTDPVTLDGEGSIGEFDEKRAEHAVRELLIAVGEDPDREGLKETPGRVARAYREIFAGLWQKPEDVLTTTFDLGHDEMVLVKDIEVMSSCEHHLVPFVGVAHVGYIPSHDGKITGLSKLARLVDVYARRPQVQERLTTQIADSLMQILEPRGVIVVVECEHMCMTMRGVRKPGAKTITSAVRGQLRDPATRNEAMSLIMAR

SEQ ID NO: 15277 - protein, 201 aa, Streptomyces auratus
  REGION 1..201: note = tr|J1RQD5|J1RQD5_9ACTN GTP cyclohydrolase 1; OS = Streptomyces auratus AGR0001 OX=1160718 GN=folE PE=3; SV = 1
MTDPVTLDIAGKLGVFDEKRAENAVRELLIAVGEDPDREGLLETPARVARAYKEIFAGLWQKPEDVLTTTFDLGHDEMVLVKDIELVSSCEHHLVPFVGVAHVGYIPSADGKITGLSKLARLVDVFARRPQVQERLTTQIADSLMEILEPRGVIVVIECEHMCMTMRGVRKPGAKTTTSAVRGQLRDAATRAEAMSLILAR

SEQ ID NO: 15278 - protein, 201 aa, unidentified
  source 1..201: note = Streptomyces autolyticus
  REGION 1..201: note = tr|A0A1P8XWX7|A0A1P8XWX7_9ACTN GTP cyclohydrolase 1; OS = Streptomyces autolyticus OX=75293 GN=folE PE=3 SV=1
MTDPVTLDGESPIGVFDEKRAENAVRELLIAVGEDPDREGLRDTPGRVARAYKEIFAGLHQEPEDVLTTTFDLGHDEMVLVKDIEVMSSCEHHLVPFVGVAHVGYIPSHDGKITGLSKLARLVDVFARRPQVQERLTTQIAESLMRILEPRGVIVVVECEHMCMTMRGVRKPGAKTLTSAVRGQLRDPATRAEAMSLIMAR

SEQ ID NO: 15279 - protein, 201 aa, Streptomyces avermitilis
  REGION 1..201: note = sp|Q82EE8|GCH1_STRAW GTP cyclohydrolase 1; OS = Streptomyces avermitilis (strain ATCC 31267 / DSM 46492 / JCM 5070 / NBRC 14893 / NCIMB 12804 / NRRL 8165 / MA-4680) OX= 227882 GN=folE PE=3 SV=1
MTDPVTLDGEGTIGEFDEKRAENAVRELLIAVGEDPDREGLRETPGRVARAYREIFAGLWQKPEDVLTTTFDIGHDEMVLVKDIEVLSSCEHHLVPFVGVAHVGYIPSTDGKITGLSKLARLVDVYARRPQVQERLTTQVADSLMEILEPRGVIVVVECEHMCMSMRGVRKPGAKTITSAVRGQLRDPATRNEAMSLIMAR

SEQ ID NO: 15280 - protein, 201 aa, Streptomyces avermitilis; identical to SEQ ID NO: 15279
  REGION 1..201: note = tr|A0A4D4LY59|A0A4D4LY59_STRAX GTP cyclohydrolase 1; OS = Streptomyces avermitilis OX=33903 GN=folE PE=3 SV=1

SEQ ID NO: 15281 - protein, 201 aa, Streptomyces avidinii
  REGION 1..201: note = tr|A0A329CHQ2|A0A329CHQ2_STRAV GTP cyclohydrolase 1; OS = Streptomyces avidinii OX=1895 GN=folE PE=3 SV=1
MTDPVTLDGQGSIGVFDEKRAEAAVRELLIAVGEDPDREGLRETPGRVARAYKEIFAGLHQEPEDVLTTTFDLGHDEMVLVKDIEVFSTCEHHLVPFRGVAHVGYIPATTGKITGLSKLARLVDVYARRPQVQERLTTQIAESLMAILEPRGVIVVVECEHMCMSMRGIRKPGAKTLTSAVRGQLRDPATRAEAMSLIMAR

SEQ ID NO: 15282 - protein, 201 aa, Streptomyces azureus
  REGION 1..201: note = tr|A0A0K8PD70|A0A0K8PD70_STRAJ GTP cyclohydrolase 1; OS = Streptomyces azureus OX=146537 GN=folE PE=3 SV=1
MTDPVTLDGEGQIGEFDEKRAENAVRELLIAVGEDPDREGLRETPARVARAYREIFAGLWQKPEDVLTTTFDLGHDEMVLVKDIEVLSSCEHHLVPFVGVAHVGYIPSIEGKITGLSKLARLVDVYARRPQVQERLTTQIADSLMQILEPRGVIVVVECEHMCMSMRGVRKPGAKTITSAVRGQLRDPATRNEAMSLIMAR

SEQ ID NO: 15283 - protein, 201 aa, Streptomyces badius
  REGION 1..201: note = tr|A0A328JG50|A0A328JG50_STRBA GTP cyclohydrolase 1; OS = Streptomyces badius OX=1941 GN=folE PE=3 SV=1
MTDPVTLDGQGSIGEFDEKRAEAAVRELLLAVGEDPDREGLRETPGRVARAYKEIFAGLYQQPEDVLTTTFDLGHDEMVLVKDIEVFSTCEHHLVPFRGVAHVGYIPASSGKITGLSKLARLVDVYARRPQVQERLTTQIAESLMSILEPRGVIVVVECEHMCMSMRGIRKPGAKTLTSAVRGQLRDPATRAEAMSLIMAN

SEQ ID NO: 15284 - protein, 201 aa, unidentified
  source 1..201: note = Streptomyces bingchenggensis
  REGION 1..201: note = tr|D7CGD8|D7CGD8_STRBB GTP cyclohydrolase 1; OS = Streptomyces bingchenggensis (strain BCW-1) OX=749414; GN = folE PE=3 SV=1
MTDSISLDGQGPVGVFDEKRAEQAIRELLIAVGEDPDREGLRETPGRVARAYREIFAGLRQKPEEVLTTTFDLGHDEMVLVKDIEVMSSCEHHLVPFVGVAHVGYIPSNDGKITGLSKLARLVDVFARRPQVQERLTTQIADSLMRILEPRGVIVVVECEHMCMTMRGVRKPGAKTLTSAVRGQLRDPATRAEAMSLIMAR

SEQ ID NO: 15285 - protein, 201 aa, Streptomyces bottropensis
  REGION 1..201: note = tr|M3FW15|M3FW15_9ACTN GTP cyclohydrolase 1; OS = Streptomyces bottropensis ATCC 25435 OX=1054862 GN=folE; PE = 3 SV=1
MTDPVTLDGGGAIGEFDEKRAENAVRELLIAVGEDPDREGLRETPARVARAYREIFAGLWQQPEGVLTTTFDLGHDEMVLVKDIEVYSTCEHHLVPFRGVAHVGYIPSTSGKITGLSKLARLVDVYARRPQVQERMTTQIADSLMEILEPRGVIVVVECEHMCMSMRGIRKPGAKTITSAVRGQLRDAATRNEAMSLIMAR

SEQ ID NO: 15286 - protein, 201 aa, Streptomyces brevispora
  REGION 1..201: note = tr|A0A561UX92|A0A561UX92_9ACTN GTP cyclohydrolase 1; OS = Streptomyces brevispora OX=887462 GN=folE PE=3 SV=1
MTDPVTLDGQGSIGEFDEKRAAAAVRELLFAVGEDPDREGLRETPGRVARAYKEVFAGLYQAPEDVLTTTFDLGHDEMVLVKDIEVFSTCEHHLVPFHGVAHVGYIPAVSGKITGLSKLARLVDVFARRPQVQERLTTQIADSLMTILEPRGVVVVVECEHMCMSMRGIRKPGAKTLTSAVRGQLRDPATRAEAMSLIMAR

SEQ ID NO: 15287 - protein, 201 aa, Streptomyces bungoensis
  REGION 1..201: note = tr|A0A117R8T0|A0A117R8T0_9ACTN GTP cyclohydrolase 1; OS = Streptomyces bungoensis OX=285568 GN=folE PE=3 SV=1
MTDPVTLDGEGTIGEFDEKRAENAVRELLIAVGEDPDREGLRETPARVARAYREIFAGLWQKPEDVLTTTFDLGHDEMVLVKDIEVYSTCEHHLVPFRGVAHVGYIPSVSGKITGLSKLARLVDVYARRPQVQERMTTQIADSLMKILEPRGVIVVVECEHMCMSMRGIRKPGAKTITSAVRGQLRDAATRNEAMSLIMAG

SEQ ID NO: 15288 - protein, 202 aa, unidentified
  source 1..202: note = Streptomyces caatingaensis
  REGION 1..202: note = tr|A0A0K9XHC6|A0A0K9XHC6_9ACTN GTP cyclohydrolase 1; OS = Streptomyces caatingaensis OX=1678637 GN=folE PE=3 SV=1
MIDPVTLDGERSIGEFDEKRAVNAVRELLIAVGEDPDREGLRETPARVARAYKEIFAGLWQEPEDVLTTTFDLGHDEMVLVRDIEVYSTCEHHLVPFHGVAHIGYIPATSGKITGLSKLARLVDVYARRPQVQERLTTQIADSMTEILEARGVVVVIECEHMCMSMRGIRKPGAKTITSAVRGQLRDPASRAEAMSLIMSGR

SEQ ID NO: 15289 - protein, 201 aa, Streptomyces cacaoi
  REGION 1..201: note = tr|A0A4Y3R1H3|A0A4Y3R1H3_STRCI GTP cyclohydrolase 1; OS = Streptomyces cacaoi subsp. cacaoi OX=66857 GN=folE PE=3; SV = 1
MTDPVTLDGETPIGEFDEKRAENAVRELLIAVGEDPDREGLLETPARVARAYREMFAGLRQRPEDVLTTTFDLGHDEMVLVKDIEVVSQCEHHLLPFHGVAHVGYIPSASGKITGLSKLARLVEVFARRPQVQERLTTQIADSLMRILEPRGVIVVIECEHMCMSVRGVRKPGAKTTTSAVRGQLRDSTTRAEAMSLILAK

SEQ ID NO: 15290 - protein, 201 aa, Streptomyces caelestis
  REGION 1..201: note = tr|A0A0M8QNT4|A0A0M8QNT4_9ACTN GTP cyclohydrolase 1; OS = Streptomyces caelestis OX=36816 GN=folE PE=3 SV=1
MTDPVTLDGMATIGEFDEKRARNAVRELLIAIGEDPDREGLLETPARVARAYREIFAGLWQKPEDVLTTTFDLGHDEMVLVKDIEVYSTCEHHLVPFRGVAHVGYIPSTSGKITGLSKLARLVDVYARRPQVQERLTTQIADSLMEILEPRGVIVVVECEHMCMSMRGIRKPGAKTLTSAVRGQLRDAATRNEAMSLIMAR

SEQ ID NO: 15291 - protein, 200 aa, Streptomyces caelestis
  REGION 1..200: note = tr|A0A0N0S6G0|A0A0N0S6G0_9ACTN GTP cyclohydrolase 1; OS = Streptomyces caelestis OX=36816 GN=ADK41_00730 PE=3 SV=1
MTTTDTRLPTTGGIDIGEVEALYRKLLVALGQDVDSEGLRDTPARVARFWKDFLQHDPGTTDTAFTHQESGGQYVVVSGIRAWSLCQHHLLPFRLDVHIGYVPAGRVLGLSKLPRIVQTYAHRLQIQEALTTQVAHEVAALSGSGDVGVWSVGEHLCMAMRGVRDQAARTTTACLLGRLESDDRLAERLRTAAFLPLGAR

SEQ ID NO: 15292 - protein, 207 aa, Streptomyces caeruleatus
  REGION 1..207: note = tr|A0A124I9L6|A0A124I9L6_9ACTN GTP cyclohydrolase 1; OS = Streptomyces caeruleatus OX=661399 GN=folE PE=3 SV=1
MAADGAQTPAPAPAALRVAHEPQGTDLEAAELAAAQFLRALGVSTDSESLRDTPRRMTHAYAELFSPRPFDLTTFPNDEGYDELVLARGIPLRSVCEHHLMPFVGTAHIGYLPGQRILGLSKLARVLEHFAFRPQVQERLTKQVADWLQHQLEPKGVGVVIQAEHTCMTLRGVQATGTATMTSTLLGLLRTDARSRSKFLALTGLPR

SEQ ID NO: 15293 - protein, 201 aa, Streptomyces caeruleatus
  REGION 1..201: note = tr|A0A117RKA7|A0A117RKA7_9ACTN GTP cyclohydrolase 1; OS = Streptomyces caeruleatus OX=661399 GN=folE PE=3 SV=1
MTDPVTLDGEGRIGEFDEKRAENAVRELLIAVGEDPDREGLRETPGRVARAYKEIFAGLWQKPEDVLTTTFDIGHDEMVLVKDIEVYSTCEHHLVPFRGVAHVGYIPATSGKITGLSKLARLVDVYARRPQVQERLTTQIADSLMEILEPRGVIVVVECEHMCMSMRGIRKPGAKTITSAVRGQLRDAATRNEAMSLIMAR

SEQ ID NO: 15294 - protein, 201 aa, Streptomyces canus
  REGION 1..201: note = tr|A0A101RV21|A0A101RV21_9ACTN GTP cyclohydrolase 1; OS = Streptomyces canus OX=58343 GN=folE PE=3 SV=1
MTDPVTLDGEGSIGEFDEKRAENAIRELLIAVGEDPDREGLRETPARVARSYKEIFAGLWQKPEDVLTTTFDLGHDEMVLVKDIEVYSTCEHHLVPFRGVAHVGYIPATTGKITGLSKLARLVDVYARRPQVQERLTTQIADSLMEILEPRGVIVVVECEHMCMSMRGIRKPGAKTLTSAVRGQLRDAATRNEAMSLIMAR

SEQ ID NO: 15295 - protein, 201 aa, Streptomyces canus
  REGION 1..201: note = tr|A0A101NXG5|A0A101NXG5_9ACTN GTP cyclohydrolase 1; OS = Streptomyces canus OX=58343 GN=folE PE=3 SV=1
MTDPVTLDGEGSIGEFDEKRAENAVRELLIAVGEDPDREGLRETPARVARSYKEIFAGLWQRPEDVLTTTFDLGHDEMVLVKDIEVYSTCEHHLVPFRGVAHVGYIPATTGKITGLSKLARLVDVYARRPQVQERLTTQIADSLMEILEPRGVIVVVECEHMCMSMRGIRKPGAKTLTSAVRGQLRDAATRNEAMSLIMAR

SEQ ID NO: 15296 - protein, 201 aa, Streptomyces capillispiralis
  REGION 1..201: note = tr|A0A561TG81|A0A561TG81_9ACTN GTP cyclohydrolase 1; OS = Streptomyces capillispiralis OX=68182 GN=folE PE=3 SV=1
MTDPVTLDGMAPVGEFDEKRAENAVRELLIAVGEDPDREGLQQTPARVARAYREIFAGLWQKPEDVLTTTFDIGHDEMVLVKDIEVYSTCEHHLVPFRGVAHVGYIPATSGKITGLSKLARLVDVYARRPQVQERLTTQIADSLMEILEPRGVIVVVEAEHMCMSMRGIRKPGAKTLTSAVRGQLRDAATRNEAMSLIMAR

SEQ ID NO: 15297 - protein, 196 aa, unidentified
  source 1..196: note = Streptomyces cattleya
  REGION 1..196: note = tr|F8JT12|F8JT12_STREN GTP cyclohydrolase 1; OS = Streptomyces cattleya (strain ATCC 35852 / DSM 46488 / JCM 4925 / NBRC 14057 / NRRL 8057) OX=1003195 GN=folE PE=3; SV = 1
MTNPDPSLRVAARRFTAGLTAWFASIGLDPDSPALAETPTRVLRALGEFTAGYRDDPAFHLSRTFPADHAGQPIAVTGVPFTSLCEHHLLPFSGTADIAYQPKPGASVAGLSKLPRVLDVYARRLQTQEQLTRQVTAALDEHLDTLGAACIIRSEHGCLAHRGARKPGASMVTASYTGRFLTDPQARADLHTLLTR

SEQ ID NO: 15298 - protein, 202 aa, unidentified
  source 1..202: note = Streptomyces cattleya
  REGION 1..202: note = tr|F8K1L8|F8K1L8_STREN GTP cyclohydrolase 1; OS = Streptomyces cattleya (strain ATCC 35852 / DSM 46488 / JCM 4925 / NBRC 14057 / NRRL 8057) OX=1003195 GN=folE PE=3; SV = 1
MTDPVTLNDAGNAAGEFDEKRAENAVRELLLAVGEDPDREGLQETPARVARAYKEIFAGLWQRPEDVLTTTFDLGHDEMVLVRDIEVYSTCEHHLVPFHGVAHVGYIPATTGKITGLSKLARLVDVYARRPQVQERLTTQIADSLMDILEPRGVIVVVECEHMCMSMRGIRKPGAKTTTSAVRGQLRDPATRAEAMSLILAR

SEQ ID NO: 15299 - protein, 201 aa, Streptomyces cavourensis
  REGION 1..201: note = tr|A0A543VNL6|A0A543VNL6_9ACTN GTP cyclohydrolase 1; OS = Streptomyces cavourensis OX=67258 GN=folE PE=3 SV=1
MTDPVTLDGQGSIGEFDEKRAEAAVRELLIAVGEDPDREGLRETPGRVARAYKEIFAGLYQQPEDVLTTTFDLGHDEMVLVKDIEVFSTCEHHLVPFRGVAHVGYIPATTGKITGLSKLARLVDVYARRPQVQERLTTQIAESLMTILEPRGVIVVIECEHMCMSMRGIRKPGAKTLTSAVRGQLRDPATRAEAMSLIMAN

SEQ ID NO: 15300 - protein, 201 aa, Streptomyces cellostaticus
  REGION 1..201: note = tr|A0A101NFW0|A0A101NFW0_9ACTN GTP cyclohydrolase 1; OS = Streptomyces cellostaticus OX=67285 GN=folE PE=3 SV=1
MTDPVTLDGEGTIGEFDEKRAENAVRELLIAVGEDPDREGLRETPGRVARAYREIFAGLWQKPEDVLTTTFDLGHDEMVLVKDIEVYSTCEHHLVPFRGVAHVGYIPSVTGKITGLSKLARLVDVYARRPQVQERLTTQIADSLMEILEPRGVIVVVECEHMCMSMRGIRKPGAKTITSAVRGQLRDAATRNEAMSLIMAR

SEQ ID NO: 15301 - protein, 228 aa, Streptomyces chartreusis
  REGION 1..228: note = tr|A0A2N9B1Y2|A0A2N9B1Y2_STRCX GTP cyclohydrolase 1; OS = Streptomyces chartreusis NRRL 3882 OX=1079985 GN=folE_1; PE = 3 SV=1
MDLAGSINAHASRTADLPAPSASIPRPQAPAPSPAPLRVVHDTDGIDLAGAERAAADFLAALGIDTSSESLHGTPGRMARAYAELFSPRPFDLTTFPNDEGYDELVLARSIPVRSVCEHHLLPFTGTAHVGYLPGHRILGLSKLARVVEHFACRPQVQERLTKQVADWLQAHLEPKGVGVVIEAEHSCMTLRGVQATGSSTLTSTLLGTLRHDARSRAEFLSLTGLHS

SEQ ID NO: 15302 - protein, 201 aa, Streptomyces chartreusis
  REGION 1..201: note = tr|A0A5J6JZ29|A0A5J6JZ29_STRCX GTP cyclohydrolase I FolE OS=Streptomyces chartreusis OX=1969 GN=folE PE=4 SV=1
MTDPVTLDGEGRIGEFDEKRAENAVRELLIAVGEDPDREGLRETPARVARAYKEIFGGLWQKPEDVLTTTFDIGHDEMVLVKDIEVYSTCEHHLVPFRGVAHVGYIPATSGKITGLSKLARLVDVYARRPQVQERLTTQIADSLMEILEPRGVIVVVECEHMCMSMRGIRKPGAKTITSAVRGQLRDAATRNEAMSLIMAR

SEQ ID NO: 15303 - protein, 201 aa, Streptomyces chattanoogensis
  REGION 1..201: note = tr|A0A0N0H375|A0A0N0H375_9ACTN GTP cyclohydrolase 1; OS = Streptomyces chattanoogensis OX=66876 GN=folE PE=3 SV=1
MTDPVTLDGDGVIGTFDEKRAENAVRELLIAVGEDPDREGLLETPARVARAYKEIFAGLWQKPEDVLTTTFDLGHDEMVLVKDIELVSSCEHHLVPFVGVAHVGYIPSVEGKITGLSKLARLVDVYARRPQVQERLTTQIADSLMEILEPRGVIVVIECEHMCMTMRGVRKPGAKTTTSAVRGQLRDPATRAEAMSLILAR

SEQ ID NO: 15304 - protein, 201 aa, Streptomyces cinereoruber
  REGION 1..201: note = tr|A0A5J6IM16|A0A5J6IM16_9ACTN GTP cyclohydrolase I FolE OS=Streptomyces cinereoruber OX=67260 GN=folE PE=4; SV = 1
MTDPVTLDGEGRIGDFDEKRAENAVRELLIAVGEDPDREGLRETPARVARAYKEIFAGLRQEPQDVLTTTFDLGHDEMVLVKDIEVFSTCEHHLVPFRGVAHVGYIPSTSGKITGLSKLARLVDVYARRPQVQERLTTQVADSLMEILEPRGVIVVFECEHMCMSMRGIRKPGAKTITSAVRGQLRDPATRAEAMSLIMAR

SEQ ID NO: 15305 - protein, 201 aa, Streptomyces cinnamoneus
  REGION 1..201: note = tr|A0A2G1XGU2|A0A2G1XGU2_STRCJ GTP cyclohydrolase 1; OS = Streptomyces cinnamoneus OX=53446 GN=folE PE=3 SV=1
MTDPVTLDAERSIGVFDEKRAENAVRELLIAVGEDPDREGLRETPARVARAYREIFAGLWQEPEDVLTTTFDLGHDEMVLVRDIEVYSTCEHHLVPFHGVAHVGYIPATTGKITGLSKLARLVDVFARRPQVQERLTTQIADSLMEILEPRGVIVVVECEHMCMSMRGIRKPGAKTLTSAVRGQLRDPASRAEAMSLIMAR

SEQ ID NO: 15306 - protein, 201 aa, Streptomyces clavuligerus
  REGION 1..201: note = tr|B5GPB7|B5GPB7_STRC2 GTP cyclohydrolase 1; OS = Streptomyces clavuligerus (strain ATCC 27064 / DSM 738 / JCM 4710 / NBRC 13307 / NCIMB 12785 / NRRL 3585 / VKM Ac-602)OX=443255 GN=folE PE=3 SV=1
MTDPVTLDGQGAIGEFDEKRAENAIRELLAAVGEDPDREGLRETPARVARAYRELLAGLRQRPEDVLTTTFDLGHDEMVLVKDIEIVSLCEHHLLPFHGVAHVGYIPADSGKITGLSKLARLVEVFARRPQVQERLTTQIADSLMRILDARGAIVVIEAEHMCMSVRGIRKPGAKTTTSAVRGQLRDASTRAEAMSLILAR

SEQ ID NO: 15307 - protein, 198 aa, Streptomyces coelicoflavus
  REGION 1..198: note = tr|H1QLA5|H1QLA5_9ACTN GTP cyclohydrolase 1; OS = Streptomyces coelicoflavus ZG0656 OX=1120227 GN=folE; PE = 3 SV=1
MTATVPLQVVEDVTGPDLEAAECAAREFLAALGIMVDSEGTRETPARMARGYAELLTARPFQMTTFPNDEGYDELVLARDIPVRSVCQHHMLPFVGKAHVGYLPGTRILGLSKLARVVEHFACRPQVQERLTKQTADWLAEQLQPRGVGVVVEAEHTCMTLRGVQATGSRTVTSTMLGVLRDDAASRHEFLALTGVQR

SEQ ID NO: 15308 - protein, 110 aa, Streptomyces coelicoflavus
  REGION 1..110: note = tr|H1QFE9|H1QFE9_9ACTN GTP cyclohydrolase 1 (Fragment) OS=Streptomyces coelicoflavus ZG0656 OX=1120227; GN = SMCF_3638 PE=3 SV=1
VSFCEHHMLPVVGRAHVAYLPTDRVVGISKLARVVRGFARRLQIQEKMTAEIAEAINTVLKPHGVGVVIEAEHSCMTLRGVNAPGASLSTSHLIGVVRDDPRTREEFLRL

SEQ ID NO: 15309 - protein, 201 aa, unidentified
  source 1..201: note = Streptomyces coelicolor
  REGION 1..201: note = sp|Q9X8I3|GCH1_STRCO GTP cyclohydrolase 1; OS = Streptomyces coelicolor (strain ATCC BAA-471 / A3(2) / M145) OX=100226 GN=folE PE=3 SV=1
MTDPVTLDGEGQIGEFDEKRAENAVRELLIAVGEDPDREGLRETPARVARAYREIFAGLWQEPEDVLTTTFDLGHDEMVLVKDIEVFSTCEHHLVPFRGVAHVGYIPSTSGKITGLSKLARLVDVYARRPQVQERLTTQIADSLMEILEPRGVIVVVECEHMCMSMRGIRKPGAKTLTSAVRGQLRDVATRNEAMSLIMAR

SEQ ID NO: 15310 - protein, 201 aa, unidentified; identical to SEQ ID NO: 15309
  source 1..201: note = Streptomyces coelicolor
  REGION 1..201: note = tr|A0A4V3HI70|A0A4V3HI70_STRCH GTP cyclohydrolase 1; OS = Streptomyces coelicolor OX=1902 GN=folE PE=3 SV=1

SEQ ID NO: 15311 - protein, 198 aa, Streptomyces coeruleorubidus
  REGION 1..198: note = tr|A0A5J6I0Z6|A0A5J6I0Z6_STRC4 GTP cyclohydrolase I FolE OS=Streptomyces coeruleorubidus OX=116188 GN=folE; PE = 4 SV=1
MPSITPLRVVHDTGGIDLPGAERAAAQFLEALGIQTDTESLNGTPGRMARAYAELFSPRPFDLTTFPNDEGYDELVLARRIPVRSVCEHHMLPVIGTAHVGYLPGSRILGLSKLARVVEHFAFRPQVQERLTKQVADWLHTHLEPKGVGVVIEAEHTCMTLRGVQATGSSTLTSTLLGTLRHDARSRAEFLSLTGMPT

SEQ ID NO: 15312 - protein, 201 aa, Streptomyces coeruleorubidus
  REGION 1..201: note = tr|A0A5J6I5Z3|A0A5J6I5Z3_STRC4 GTP cyclohydrolase I FolE OS=Streptomyces coeruleorubidus OX=116188 GN=folE; PE = 4 SV=1
MTDPVTLDGEGQIGEFDEKRAENAVRELLIAVGEDPDREGLRETPARVARAYKEIFAGLWQKPEDVLTTTFDLGHDEMVLVKDIEVLSSCEHHLVPFVGVAHVGYIPSVEGKITGLSKLARLVDVYARRPQVQERLTTQIADSLMEILEPRGVIVVIECEHMCMSMRGVRKPGAKTITSAVRGQLRDPATRNEAMSLIMAR

SEQ ID NO: 15313 - protein, 201 aa, Streptomyces collinus
  REGION 1..201: note = tr|S5VK54|S5VK54_STRC3 GTP cyclohydrolase 1; OS = Streptomyces collinus (strain DSM 40733 / Tu 365); OX = 1214242 GN=folE PE=3 SV=1
MTDPVTLAGDGFIGEFDEKRAENAVRELLIAVGEDPDREGLRDTPARVARAYRELLAGLWQEPEDVLTTTFDLGHDEMVLVKDIEIVSLCEHHLLPFHGVAHVGYIPAETGKITGLSKLARLVEVFARRPQVQERLTTQIADSLVRILEARGAIVVIEAEHMCMSVRGIRKPGAKTTTSAVRGQLRDATTRAEAMSLILAR

SEQ ID NO: 15314 - protein, 201 aa, Streptomyces corchorusii
  REGION 1..201: note = tr|A0A117QGA3|A0A117QGA3_STRCK GTP cyclohydrolase 1; OS = Streptomyces corchorusii OX=1903 GN=folE PE=3 SV=1
MTDPVTLDGEGPIGEFDEKRAENAVRELLIAVGEDPDREGLRETPARVARAYREIFAGLWQQPEDVLTTTFDLGHDEMVLVKDIEVYSTCEHHLVPFRGVAHVGYIPSETGKITGLSKLARLVDVYARRPQVQERLTTQIADSLMNILEPRGVIVVVECEHMCMSMRGIRKPGAKTITSAVRGQLRDAATRNEAMSLIMAR

SEQ ID NO: 15315 - protein, 201 aa, Streptomyces curacoi
  REGION 1..201: note = tr|A0A117PHA6|A0A117PHA6_9ACTN GTP cyclohydrolase 1; OS = Streptomyces curacoi OX=146536 GN=folE PE=3 SV=1
MTDPVTLDGEGRIGEFDEKRAENAVRELLIAVGEDPDREGLKETPARVARAYREIFAGLWQKPEDVLTTTFDIGHDEMVLVKDIEVYSTCEHHLVPFRGVAHVGYIPATSGKITGLSKLARLVDVFARRPQVQERLTTQIADSLMEILEPRGVIVVVECEHMCMSMRGIRKPGAQTITSAVRGQLRDAATRNEAMSLIMAR

SEQ ID NO: 15316 - protein, 201 aa, unidentified
  source 1..201: note = Streptomyces cyaneogriseus
  REGION 1..201: note = tr|A0A0C5G331|A0A0C5G331_9ACTN GTP cyclohydrolase 1; OS = Streptomyces cyaneogriseus subsp. noncyanogenus; OX = 477245 GN=folE PE=3 SV=1
MTDPVTLDGEGQIGEFDEKRAENAVRELLIAVGEDPDREGLRETPARVARAYREIFAGLWQKPEDVLTTTFDIGHDEMVLVKDIEVYSTCEHHLVPFRGVAHVGYIPSTTGKITGLSKLARLVDVYARRPQVQERLTTQIADSLMEMLEPRGVIVVVECEHMCMSMRGIRKPGAKTITSAVRGQLRDVATRNEAMSLIMAH

SEQ ID NO: 15317 - protein, 201 aa, unidentified
  source 1..201: note = Streptomyces davaonensis
  REGION 1..201: note = tr|K4QWJ0|K4QWJ0_STRDJ GTP cyclohydrolase 1; OS = Streptomyces davaonensis (strain DSM 101723 / JCM 4913 / KCC S-0913 / 768) OX=1214101 GN=folE PE=3 SV=1
MTDPVTLDGEGRIGEFDEKRAENAVRELLIAVGEDPDREGLRETPGRVARAYKEIFAGLWQQPEDVLTTTFDLGHDEMVLVKDIEVYSTCEHHLVPFRGVAHVGYIPATTGKITGLSKLARLVDVYARRPQVQERLTTQIADSLMEILEPRGVIVVVECEHMCMSMRGIRKPGAKTLTSAVRGQLRDAATRAEAMSLIMAR

SEQ ID NO: 15318 - protein, 201 aa, Streptomyces decoyicus
  REGION 1..201: note = tr|A0A0L8LU12|A0A0L8LU12_9ACTN GTP cyclohydrolase 1; OS = Streptomyces decoyicus OX=249567 GN=folE PE=3 SV=1
MTDPVTLDVDGKIGTFDEKRAENAVRELLIAVGEDPEREGLLETPGRVARAYKEIFAGLWQKPEDVLTTTFDLGHDEMVLVKDIELVSSCEHHLVPFVGVAHVGYIPSADGKITGLSKLARLVDVYARRPQVQERLTTQIADSLMEILEPRGVIVVIECEHMCMTMRGVRKPGAKTTTSAVRGQLRDAATRAEAMSLILAR

SEQ ID NO: 15319 - protein, 266 aa, unidentified
  source 1..266: note = Streptomyces dengpaensis
  REGION 1..266: note = tr|A0A2L2MWD6|A0A2L2MWD6_9ACTN GTP cyclohydrolase FolE2 OS=Streptomyces dengpaensis OX=2049881 GN=folE2 PE=3; SV = 1
MIPDVQSWPDDRGIGLDEVGITGVRYPVSVFDAGHGKQDTVAGVTLSVSLPPEKKGARLSRFVEVLDAHAGEVTPQTIPVILTALQDRLGSPAARLHLRFPYFLRRSAPVSGATAMMDYECGITASARGDDVRLAISARVPVTSVCPCSKAISDYGAHNQRSHITIEAEPAAGVGPAQAPVWLEGLITAAETTASSPVFPLLKRADERQVIMHGYDHPVFVEDMARGVTERLRADSWIARFTVEAASDESIHDHSAFARLSWPPHR

SEQ ID NO: 15320 - protein, 201 aa, unidentified
  source 1..201: note = Streptomyces dengpaensis
  REGION 1..201: note = tr|A0A2L2ML68|A0A2L2ML68_9ACTN GTP cyclohydrolase 1; OS = Streptomyces dengpaensis OX=2049881 GN=folE PE=3 SV=1
MTDPVTLDGEGVIGEFDEKRAENAIRELLIAVGEDPDREGLKETPGRVARAYREIFSGLWQKPEDVLTTTFDLGHDEMVLVKDIEVLSSCEHHLVPFVGVAHVGYIPSTDGKITGLSKLARLVDVYARRPQVQERLTTQIADSLMEILEPRGVIVVVECEHMCMSMRGVRKPGAKTITSAVRGQLRDLATRNEAMSLIMAR

SEQ ID NO: 15321 - protein, 201 aa, Streptomyces diastatochromogenes
  REGION 1..201: note = tr|A0A233SDB5|A0A233SDB5_9ACTN GTP cyclohydrolase 1; OS = Streptomyces diastatochromogenes OX=42236 GN=folE PE=3; SV = 1
MTDPVTLDGEGTIGEFDEKRAENAVRELLIAVGEDPDREGLRETPARVARAYKEIFAGLWQKPEDVLTTTFDLGHDEMVLVKDIEVYSTCEHHLVPFRGVAHVGYIPSVTGKITGLSKLARLVDVYARRPQVQERLTTQIADSLMEILEPRGVIVVVECEHMCMSMRGIRKPGAKTITSAVRGQLRDAATRNEAMSLIMAR

SEQ ID NO: 15322 - protein, 198 aa, Streptomyces diastatochromogenes
  REGION 1..198: note = tr|A0A1L7B5N3|A0A1L7B5N3_9ACTN GTP cyclohydrolase 1; OS = Streptomyces diastatochromogenes OX=42236 GN=toyD PE=3; SV = 1
MSGAPELDVLDDSGPQVPDPLEDVARKLLIEIGEDPERDGLKETPARFARWWREFSRYDAGAVDTLFPLQTEGQLVMVSDINVWSLCEHHLLPFSCSLTIAYRPKGDVLGLSKFARIAHRHAHRLQVQERLVRDIADEVTKVTGSVDVAVIATGEHLCMSMRGIRTPAVMTSTAYSGVFEEYGPARQELVATVFPLRK

SEQ ID NO: 15323 - protein, 201 aa, Streptomyces eurocidicus
  REGION 1..201: note = tr|A0A2N8NXA8|A0A2N8NXA8_STREU GTP cyclohydrolase 1; OS = Streptomyces eurocidicus OX=66423 GN=folE PE=3 SV=1
MTDPVTLDAENSIGEFDEKRAENAVRELLIAVGEDPDREGLRETPARVARAYKEIFAGLWQEPEDVLTTTFDLGHDEMVLVRDIEVYSTCEHHLVPFHGVAHVGYIPATSGKITGLSKLARLVDVYARRPQVQERLTTQIADSLMEILEPRGVVVVVECEHMCMSMRGIRKPGAKTLTSAVRGQLRDPATRAEAMSLIMAR

SEQ ID NO: 15324 - protein, 195 aa, Streptomyces filamentosus
  REGION 1..195: note = tr|D6AIR2|D6AIR2_STRFL GTP cyclohydrolase 1; OS = Streptomyces filamentosus NRRL 15998 OX=457431; GN = SSGG_00404 PE=3 SV=1
MDASAITILEQDEAQGGDPLESIARRLLIEIGEDPDREGLRDTPRRYARWWREFVDYDAGNLDTVFSSVASNQIVMVSGMRVWSLCEHHLLPFNCDLQVAYRAHDSLLGLSKFARIAHKHAHKLQVQERLVADIAAEIEEITKSPDVAVIGRGEHLCMTMRGIKTGAQMTSAVFQGVFRENSFERTELLSLMNGS

SEQ ID NO: 15325 - protein, 201 aa, Streptomyces filamentosus
  REGION 1..201: note = tr|W9FPG0|W9FPG0_STRFL GTP cyclohydrolase 1; OS = Streptomyces filamentosus NRRL 11379 OX=457430 GN=folE; PE = 3 SV=1
MTDPVTLDGQGSIGEFDEKRAEAAVRELLLAVGEDPDREGLRETPGRVARAYKEIFAGLYQQPEDVLTTTFDLGHDEMVLVKDIEVFSTCEHHLVPFRGVAHVGYIPASTGKITGLSKLARLVDVYARRPQVQERLTTQIAESLMSILEPRGVIVVVECEHMCMSMRGIRKPGAKTLTSAVRGQLRDPATRAEAMSLIMAN

SEQ ID NO: 15326 - protein, 329 aa, unidentified
  source 1..329: note = Streptomyces formicae
  REGION 1..329: note = tr|A0A291QCP2|A0A291QCP2_9ACTN GTP cyclohydrolase I type 1 OS=Streptomyces formicae OX=1616117 GN=KY5_4453; PE = 4 SV=1
MGYGLPSNQTVNAVGGRQRARDIRVGSRLWTLDGERTVQTTVTEVEVVKAREVVDVVADGVTLTVAADQMLGAPDGWVHARDAADTVLAWTPARKLCRARLTIRPGYEFGYLIGATCSDGTVGVNYVSLVVNDERFAQRYARCLTVATGLSAGLEPVTRPSGYLRRQVPGYRVRVVSSYLADVLRQYVGGDAHHLRQGFPRVVLRDPETFQGFLDGYTDGDGYLIKTWPGRVLVSANVPFLTELARIVGARFTPRADGRASRLIITDRWPSRGTFRPEQHPIQLRESGWSQVHAVRRREAGDKPFTLYGFRLAPYPSFLVNGHLARQQW

SEQ ID NO: 15327 - protein, 201 aa, unidentified
  source 1..201: note = Streptomyces formicae
  REGION 1..201: note = tr|A0A291QCF4|A0A291QCF4_9ACTN GTP cyclohydrolase 1; OS = Streptomyces formicae OX=1616117 GN=folE PE=3 SV=1
MTDPVTLDGEGAIGEFDEKRAENAVRELLIAVGEDPDREGLRETPGRVARAYKEIFAGLWQKPEDVLTTTFDLGHDEMVLVKDIEVTSCCEHHLVPFRGLAHVGYIPSASGKITGLSKLARLVDVYARRPQVQERMTTQIADSLMGILEPRGVIVVVECEHMCMSMRGIRKPGAKTITSAVRGQLRDPATRNEAMSLIMAR

SEQ ID NO: 15328 - protein, 201 aa, Streptomyces fradiae
  REGION 1..201: note = tr|A0A1Y2NNR6|A0A1Y2NNR6_STRFR GTP cyclohydrolase 1; OS = Streptomyces fradiae ATCC 10745 = DSM 40063 OX=1319510; GN = folE PE=3 SV=1
MTDAVTLDGEGRIGEFDEQRAVAAVRELLIAVGEDPDREGLRETPARVARAYKEIFAGLWQEPEDVLTTTFDLGHDEMVLVKDIEVFSTCEHHLVPFRGVAHVGYIPSTTGKITGLSKLARLVDVYARRPQVQERLTTQIADSLMKILEPRGVIVVIECEHMCMSMRGIRKPGAKTITSAVRGQLRDMATRSEAMSLIMAN

SEQ ID NO: 15329 - protein, 201 aa, Streptomyces fradiae; identical to SEQ ID NO: 15263
  REGION 1..201: note = tr|A0A3B7QIL9|A0A3B7QIL9_STRFR GTP cyclohydrolase 1; OS = Streptomyces fradiae OX=1906 GN=folE PE=3 SV=1

SEQ ID NO: 15330 - protein, 201 aa, Streptomyces fulvissimus
  REGION 1..201: note = tr|N0CYF0|N0CYF0_9ACTN GTP cyclohydrolase 1; OS = Streptomyces fulvissimus DSM 40593 OX=1303692 GN=folE; PE = 3 SV=1
MTDPVTLDGQGSIGDFDEKRAEAAVRELLLAVGEDPDREGLRETPGRVARAYKEILAGLRQEPEDVLTTTFDLGHDEMVLVKDIEIMSLCEHHLLPFHGVAHVGYIPADTGKITGLSKLARLVDVFARRPQVQERLTTQVADSLMRILEARGAIVVIEAEHMCMSVRGIRKPGAKTITSAVRGQLRAPATRAEAMSLIMAR

SEQ ID NO: 15331 - protein, 201 aa, unidentified
  source 1..201: note = Streptomyces fungicidicus
  REGION 1..201: note = tr|A0A494UYA8|A0A494UYA8_9ACTN GTP cyclohydrolase 1; OS = Streptomyces fungicidicus OX=68203 GN=folE PE=3 SV=1
MTDPVTLDGVTPIGEFDEKRARNAVRELLIAVGEDPDREGLLETPARVARAYREIFAGLWQKPEDVLTTTFDLGHDEMVLVKDIEVYSTCEHHLVPFRGVAHVGYIPATSGKITGLSKLARLVDVYARRPQVQERLTTQIADSLMEILEPRGVIVVVECEHMCMSMRGIRKPGAKTLTSAVRGQLRDAATRNEAMSLIMAR

SEQ ID NO: 15332 - protein, 203 aa, Streptomyces galbus
  REGION 1..203: note = tr|A0A4U5WUR4|A0A4U5WUR4_STRGB GTP cyclohydrolase 1; OS = Streptomyces galbus OX=33898 GN=folE PE=3 SV=1
MTDPVTLDGDRGGAIGEFDEKRAENAVRELLLAVGEDPDREGLKETPARVARAYREIFAGLWQQPEDVLTTTFDLGHDEMVLVKDIEVFSTCEHHLVPFRGVAHVGYIPSASGKITGLSKLARLVDVYARRPQVQERLTTQIADSLMEILEPRGVIVVIECEHMCMSMRGIRKPGAKTLTSAVRGQLRDAATRNEAMSLIMAR

SEQ ID NO: 15333 - protein, 218 aa, Streptomyces galbus
  REGION 1..218: note = tr|A0A4U5X180|A0A4U5X180_STRGB GTP cyclohydrolase 1; OS = Streptomyces galbus OX=33898 GN=folE PE=3 SV=1
MTEHPHQATARTDLHGDRDTAPARPALRVVHEPAGIDLAAAEAAAGQFLTALGIPTTSESLRGTPGRMARAYAELFSPRPFDLTTFPNDEGYDELVLARRIPVRSVCEHHLLPFTGTAHVGYLPGARILGLSKLARIVEHFACRPQVQERLTKQIADWLQTHLEPKGVGVVIEAEHACMSLRGVQATGSTTMTSTLLGLLRSDARSRSEFLALTGATP

SEQ ID NO: 15334 - protein, 201 aa, Streptomyces galilaeus
  REGION 1..201: note = tr|A0A5J6EUS8|A0A5J6EUS8_STRGJ GTP cyclohydrolase I FolE OS=Streptomyces galilaeus OX=33899 GN=folE PE=4 SV=1
MTDPVTLDGEGLVGEFDEKRAENAVRELLIAVGENPDREGLRETPARVARAYREIFAGLWQQPEDVLTTTFDLGHDEMVLVKDIEVYSTCEHHLVPFRGVAHVGYIPATSGKITGLSKLARLVDVYARRPQVQERLTTQIADSLMEILEPRGVIVVVECEHMCMSMRGIRKPGAKTITSAVRGQLRDAATRNEAMSLIMAR

SEQ ID NO: 15335 - protein, 201 aa, Streptomyces gancidicus
  REGION 1..201: note = tr|M3E578|M3E578_9ACTN GTP cyclohydrolase 1; OS = Streptomyces gancidicus BKS 13-15 OX=1284664 GN=folE; PE = 3 SV=1
MTDPVTLDGIAPVGEFDEKRARNAVRELLIAVGEDPDREGLQETPARVARAYREIFAGLWQKPEDVLTTTFDIGHDEMVLVKDIEVYSTCEHHLVPFRGVAHVGYIPSTSGKITGLSKLARLVDVYARRPQVQERLTTQIADSLMEILEPRGVIVVVECEHMCMSMRGIRKPGAKTITSAVRGQLRDAATRNEAMSLIMAR

SEQ ID NO: 15336 - protein, 202 aa, Streptomyces gardneri
  REGION 1..202: note = tr|A0A4Y3RU94|A0A4Y3RU94_9ACTN GTP cyclohydrolase 1; OS = Streptomyces gardneri OX=66892 GN=folE PE=3 SV=1
MTDPVTLDGEGTIGEFDEKRAENAVRELLIAVGEDPDREGLRETPARVARAYKELFAGLWQTPEDVLTTTFDLGHDEMVLVKDIELVSQCEHHLLPFHGVAHIGYIPAESGKITGLSKLARLVDVFARRPQVQERLTTQIADSLMRILDARGAIVVIEAEHMCMALRGVRKPGAKTTTSAVRGQLRDATTRSEAMSLILARS

SEQ ID NO: 15337 - protein, 203 aa, unidentified
  source 1..203: note = Streptomyces gilvigriseus
  REGION 1..203: note = tr|A0A1J7BDY9|A0A1J7BDY9_9ACTN GTP cyclohydrolase 1; OS = Streptomyces gilvigriseus OX=1428644 GN=folE PE=3 SV=1
MTDPVNRDYNEEWQPGAFDEKRAEAAVREILYAIGEDPDREGLRETPARVARAYREIFAGLWQQPEDVLTTTFDMGHDEMVLVKDIEVFSNCEHHLLPFHGVAHVGYIPAESGKITGLSKLARLVDVYARRPQVQERLTTQIADALMRILDARGVIVVVEAEHLCMSARGVRKPGAKTTTSAVRGQLRDPATRSEAMSLILSH

SEQ ID NO: 15338 - protein, 201 aa, unidentified
  source 1..201: note = Streptomyces gilvosporeus
  REGION 1..201: note = tr|A0A1V0TV14|A0A1V0TV14_9ACTN GTP cyclohydrolase 1; OS = Streptomyces gilvosporeus OX=553510 GN=folE PE=3 SV=1
MTDPVTLDGDGTIGVFDEKRAENAVRELLIAVGEDPDREGLLETPARVARAYKEILAGLRQTPEEVLTTTFDLGHDEMVLVKDIEIVSLCEHHLLPFHGVAHVGYIPAENGKITGLSKLARLVEVYARRPQVQERLTTQIADSLMRILEARGAIVVVEAEHMCMSVRGIRKPGAKTTTSAVRGQLRDASTRAEAMSLIMAR

SEQ ID NO: 15339 - protein, 226 aa, Streptomyces glaucescens
  REGION 1..226: note = tr|A0A089XLM9|A0A089XLM9_STRGA GTP cyclohydrolase 1; OS = Streptomyces glaucescens OX=1907 GN=folE PE=3 SV=1
MDISAPSAAAAPGTAGVRAGVAGIPGPQLPPPVTPLRVVHDTRAVDLPAAERAAAQFLAALGIATDTESLYGTPGRMARAYAELFSPRPFDLTTFPNDEGYDELVLARSIPVRSVCEHHMLPVVGTAHVGYLPGDRILGLSKLARVVEHFACRPQVQERLTKQVADWLHTHLEPKGVGVVIEAEHTCMTLRGVQATGSSTITSTLLGALRQDARSRAEFLALTGAG

SEQ ID NO: 15340 - protein, 201 aa, Streptomyces glaucescens
  REGION 1..201: note = tr|A0A089X917|A0A089X917_STRGA GTP cyclohydrolase 1; OS = Streptomyces glaucescens OX=1907 GN=folE PE=3 SV=1
MTDPVTLDGEGTIGEFDEKRAENAVRELLIAVGEDPDREGLRETPARVARAYREIFAGLWQKPEDVLTTTFDLGHDEMVLVKDIEIYSTCEHHLVPFRGVAHVGYIPSTSGKITGLSKLARLVDVYARRPQVQERLTTQIADSLMEILEPRGVIVVIECEHMCMSMRGIRKPGAKTITSAVRGQLRDAATRNEAMSLIMAH

SEQ ID NO: 15341 - protein, 202 aa, Streptomyces glauciniger
  REGION 1..202: note = tr|A0A239B6C2|A0A239B6C2_9ACTN GTP cyclohydrolase 1; OS = Streptomyces glauciniger OX=235986 GN=folE PE=3 SV=1
MTDPVTLEGELRPVGEFDEKRAENAVRELLIAVGEDPDREGLRETPARVARAYREIFAGLYQEPEDVLTTTFDLGHDEMVLVKDIEVLSSCEHHLVPFVGVAHVGYIPSSDGKITGLSKLARLVDVFARRPQVQERLTTQIADSLMRILEPRGVIVVIECEHMCMTMRGVRKPGAKTITSAVRGQLRDSATRAEAMSLIMAK

SEQ ID NO: 15342 - protein, 201 aa, Streptomyces globisporus; identical to SEQ ID NO: 15283
  REGION 1..201: note = tr|A0A2U8NQL3|A0A2U8NQL3_STRGL GTP cyclohydrolase 1; OS = Streptomyces globisporus OX=1908 GN=folE PE=3 SV=1

SEQ ID NO: 15343 - protein, 201 aa, Streptomyces globisporus; identical to SEQ ID NO: 15325
  REGION 1..201: note = tr|A0A0U3KJ07|A0A0U3KJ07_STRGL GTP cyclohydrolase 1; OS = Streptomyces globisporus C-1027 OX=1172567 GN=folE PE=3; SV = 1

SEQ ID NO: 15344 - protein, 201 aa, Streptomyces globosus
  REGION 1..201: note = tr|A0A344TUL0|A0A344TUL0_9ACTN GTP cyclohydrolase 1; OS = Streptomyces globosus OX=68209 GN=folE PE=3 SV=1
MTDPVTLDGEGTIGVFDEKRAEAAVRELLLAVGEDPDREGLLETPARVARAYREILAGLWQKPEDVLTTTFDLGHDEMVLVKDIEIVSLCEHHLLPFHGVAHVGYIPAESGKITGLSKLARLVDVYARRPQVQERLTTQIADSLMEILEARGAIVVVEAEHMCMSVRGIRKPGAKTTTSAVRGQLRAPATRSEAMSLIMAR

SEQ ID NO: 15345 - protein, 201 aa, Streptomyces griseoaurantiacus
  REGION 1..201: note = tr|F3NM25|F3NM25_9ACTN GTP cyclohydrolase 1; OS = Streptomyces griseoaurantiacus M045 OX=996637 GN=folE; PE = 3 SV=1
MTDPVTLDGESTIGEFDEKRAENAVRELLLAIGEDPDREGLRDTPGRVARAYQEIFAGLRQRPEDVLTTTFDLGHDEMVLVKDIEVFSTCEHHLVPFRGVAHVGYIPSANGKITGLSKLARLVDVYARRPQVQERLTTQIAESLMEILEPRGVIVVVECEHMCMSMRGIRKPGAKTLTSAVRGQLRDAATRNEAMSLIMAR

SEQ ID NO: 15346 - protein, 201 aa, Streptomyces griseocarneus
  REGION 1..201: note = tr|A0A3L8IXP4|A0A3L8IXP4_9ACTN GTP cyclohydrolase 1; OS = Streptomyces griseocarneus OX=51201 GN=folE PE=3 SV=1
MTDPVTLAAENSIGAFDEKRAENAVRELLLAVGEDPDREGLRETPARVARAYKEIFAGLWQEPEDVLTTTFDLGHDEMVLVRDIEVYSTCEHHLVPFHGVAHVGYIPSTSGKITGLSKLARLVDVYARRPQVQERLTTQIADSLMEILEPRGVIVVVECEHMCMSMRGIRKPGAKTLTSAVRGQLRDPATRAEAMSLIMAR

SEQ ID NO: 15347 - protein, 202 aa, Streptomyces griseocarneus
  REGION 1..202: note = tr|A0A3L8IJB1|A0A3L8IJB1_9ACTN GTP cyclohydrolase 1; OS = Streptomyces griseocarneus OX=51201 GN=folE PE=3 SV=1
MTAVTDTPFVTAVDAEEALAASITAWLSARGLDPHSAELADTPRRVVAALAEFTAGYDQDPAEHLARTFPVEHSGQPIIVTGVPFTSLCGHHLLPFSGTATIAYLPTPGAPVVGLSKLPRVLDIYARRLQTQENLTQQVTAALDTHLDALGSACLIRSVHGCLAHRGAHKPGAAMVTASYTGVLRSDRHIRADLHALINTMP

SEQ ID NO: 15348 - protein, 205 aa, Streptomyces griseochromogenes
  REGION 1..205: note = tr|A0A1B1B2T5|A0A1B1B2T5_9ACTN GTP cyclohydrolase 1; OS = Streptomyces griseochromogenes OX=68214 GN=AVL59_29105; PE = 3 SV=1
MAVTLEPEQAPRLLDRPEGTPDPLEGLARQLLIEIGEDPDREGLADTPRRYAKWWREFIGYEAGKTETLFDSISDNQLVYVSGMLVWSLCEHHLLPFNCNLTIAYRSDKNLLGLSKFARIAHKHAHRLQVQERLVSDVADEISQITGSEDVAVIGRGEHLCMTMRGIRTPALMTSAAFRGAFAQDGPERTQLLMLAQNSGGSASH

SEQ ID NO: 15349 - protein, 201 aa, Streptomyces griseochromogenes
  REGION 1..201: note = tr|A0A1B1AQ01|A0A1B1AQ01_9ACTN GTP cyclohydrolase 1; OS = Streptomyces griseochromogenes OX=68214 GN=folE PE=3; SV = 1
MTDPVTLDGEGTIGEFDEKRAENAVRELLIAVGEDPDREGLRETPARVARAYQEIFAGLWQKPEDVLTTTFDLGHDEMVLVKDIEVYSTCEHHLVPFRGVAHVGYIPSVTGKITGLSKLARLVDVYARRPQVQERLTTQIADSLMEILEPRGVIVVVECEHMCMSMRGIRKPGAKTITSAVRGQLRDAATRNEAMSLIMAR

SEQ ID NO: 15350 - protein, 201 aa, Streptomyces griseoflavus; identical to SEQ ID NO: 15331
  REGION 1..201: note = tr|D9Y1C1|D9Y1C1_9ACTN GTP cyclohydrolase 1; OS = Streptomyces griseoflavus Tu4000 OX=467200 GN=folE PE=3; SV = 1

SEQ ID NO: 15351 - protein, 196 aa, Streptomyces griseoflavus
  REGION 1..196: note = tr|A0A0L8NMX5|A0A0L8NMX5_9ACTN GTP cyclohydrolase 1; OS = Streptomyces griseoflavus OX=35619 GN=ADK76_10870 PE=3; SV = 1
MVKAVWERQEAADVSVDAARLEELARQILIEIGEDPTREGLRETPRRYAKWWKEFVEYDAGKVDTLFESSTLGQTVMVSGMTVWSLCEHHLLPFSCDLTVAYKSGGVLLGLSKFARIAHKHAHKLQVQERLVVDIADEISDITGTNDLAVMGRGEHLCMTMRGIRTPSTMSSSIFRGVFDQSERARAELFAQLGVK

SEQ ID NO: 15352 - protein, 201 aa, Streptomyces griseofuscus
  REGION 1..201: note = tr|A0A3R8RV52|A0A3R8RV52_9ACTN GTP cyclohydrolase 1; OS = Streptomyces griseofuscus OX=146922 GN=folE PE=3 SV=1
MTDPVTLDSERPVGEFDEKRAENAVRELLIAIGEDPDREGLRETPARVARAYQEIFAGLWQQPEDVLTTTFDLGHDEMVLVKDIEVYSTCEHHLVPFRGVAHVGYIPSVTGKITGLSKLARLVDVYARRPQVQERLTTQIADSLMEILEPRGVIVVVECEHMCMSMRGIRKPGAKTITSAVRGQLRDAATRNEAMSLIMAR

SEQ ID NO: 15353 - protein, 201 aa, Streptomyces griseofuscus
  REGION 1..201: note = tr|A0A1X4GSI0|A0A1X4GSI0_9ACTN GTP cyclohydrolase 1; OS = Streptomyces griseofuscus OX=146922 GN=folE PE=3 SV=1
MTDPVTLDSERPVGEFDEKRAENAVRELLIAIGEDPDREGLRETPARVARAYQEIFAGLWQKPEDVLTTTFDLGHDEMVLVKDIEVYSTCEHHLVPFRGVAHVGYIPSVTGKITGLSKLARLVDVYARRPQVQERLTTQIADSLMEILEPRGVIVVVECEHMCMSMRGIRKPGAKTITSAVRGQLRDAATRNEAMSLIMAR

SEQ ID NO: 15354 - protein, 201 aa, Streptomyces griseoluteus
  REGION 1..201: note = tr|A0A4Z1DJJ4|A0A4Z1DJJ4_STRGP GTP cyclohydrolase 1; OS = Streptomyces griseoluteus OX=29306 GN=folE PE=3 SV=1
MTDAVTLAGDGTIGEFDEKRAENAVRELLIAVGEDPDREGLRETPARVARAYRELLAGLRQKPEEVLTTTFDLGHDEMVLVKDIEIVSLCEHHLLPFHGVAHVGYIPAESGKITGLSKLARLVEVFARRPQVQERLTTQIADSLMGILEARGAIVVIEAEHMCMSVRGIRKPGAKTTTSAVRGQLRDSTTRAEAMSLILAR

SEQ ID NO: 15355 - protein, 201 aa, Streptomyces griseoruber
  REGION 1..201: note = tr|A0A101SR99|A0A101SR99_9ACTN GTP cyclohydrolase 1; OS = Streptomyces griseoruber OX=1943 GN=folE PE=3 SV=1
MTDPVTLDGEGSIGEFDEKRAENAVRELLIAVGEDPDREGLKETPARVARAYREIFAGLWQKPEDVLTTTFDLGHDEMVLVKDIEVFSTCEHHLVPFRGVAHVGYIPSTSGKITGLSKLARLVDVFARRPQVQERLTTQIADSLMEILEPRGVIVVVECEHMCMSMRGIRKPGAKTITSAVRGQLRDMATRNEAMSLIMAH

SEQ ID NO: 15356 - protein, 201 aa, Streptomyces griseorubiginosus
  REGION 1..201: note = tr|A0A385ZKZ8|A0A385ZKZ8_9ACTN GTP cyclohydrolase 1; OS = Streptomyces griseorubiginosus OX=67304 GN=folE PE=3; SV = 1
MTDPVTLDGEGPIGEFDEKRAENAVRELLIAVGENPDREGLRETPGRVARAYREILAGLWQVPEDVLTTTFDLGHDEMVLVKDIEIVSLCEHHLLPFHGVAHIGYIPAETGKITGLSKLARLVEVFARRPQVQERLTTQIADSLMRILEARGAIVVIEAEHMCMSVRGIRKPGAKTTTSAVRGQLRDATTRAEAMSLILAR

SEQ ID NO: 15357 - protein, 201 aa, Streptomyces griseorubiginosus
  REGION 1..201: note = tr|A0A3N1N226|A0A3N1N226_9ACTN GTP cyclohydrolase 1; OS = Streptomyces griseorubiginosus OX=67304 GN=folE PE=3; SV = 1
MTDPVTLDGEGPIGEFDEKRAENAVRELLIAVGEDPDREGLRETPARVARAYKEIFAGLWQKPEDVLTTTFDLGHDEMVLVKDIEVYSTCEHHLVPFRGVAHVGYIPSTSGKITGLSKLARLVDVYARRPQVQERLTTQIADSLMEILEPRGVIVVVECEHMCMSMRGIRKPGAKTLTSAVRGQLRDAATRNEAMSLIMAR

SEQ ID NO: 15358 - protein, 201 aa, Streptomyces griseoviridis
  REGION 1..201: note = tr|A0A3S9ZDE0|A0A3S9ZDE0_STRGD GTP cyclohydrolase 1; OS = Streptomyces griseoviridis OX=45398 GN=folE PE=3 SV=1
MTDPVMLGGEASIGEFDEKRAENAVRELLIAVGEDPDREGLRETPGRVARAYKEIFAGLWQTPEDVLTTTFDLGHDEMVLVKDIEVLSSCEHHLVPFVGVAHVGYIPSADGKITGLSKLARLVDVYARRPQVQERLTTQIAESLMTVLEPRGVIVVVECEHMCMSMRGVRKPGAKTITSAVRGQLRDPATRAEAMSLIMAR

SEQ ID NO: 15359 - protein, 201 aa, Streptomyces griseus
  REGION 1..201: note = sp|B1VSG4|GCH1_STRGG GTP cyclohydrolase 1; OS = Streptomyces griseus subsp. griseus (strain JCM 4626 / NBRC 13350) OX=455632 GN=folE PE=3 SV=1
MTDPVTLDGQGSIGAFDEKRAEAAVRELLIAVGEDPDREGLRETPGRVARAYKEIFAGLYQEPEDVLTTTFDLGHDEMVLVKDIEVFSTCEHHLVPFRGVAHVGYIPATTGKITGLSKLARLVDVYARRPQVQERLTTQIAESLMSILEPRGVIVVVECEHMCMSMRGIRKPGAKTLTSAVRGQLRDPATRAEAMSLIMAR

SEQ ID NO: 15360 - protein, 201 aa, Streptomyces griseus; identical to SEQ ID NO: 15359
  REGION 1..201: note = tr|A0A2X2M7V9|A0A2X2M7V9_STRGR GTP cyclohydrolase 1; OS = Streptomyces griseus OX=1911 GN=folE_1 PE=3 SV=1

SEQ ID NO: 15361 - protein, 203 aa, Streptomyces guanduensis
  REGION 1..203: note = tr|A0A1H0FJ90|A0A1H0FJ90_9ACTN GTP cyclohydrolase 1; OS = Streptomyces guanduensis OX=310781 GN=folE PE=3 SV=1
MVDPVTLDGDGKPIGEFDEKRAEAAIRELLYAVGEDPEREGLRETPARVARAYREIFAGLWQQPEDVLTTTFDIGHDEMVLVKDIEVMSSCEHHLVPFVGVAHIGYIPATSGKITGLSKLARLVDVYARRPQVQERLTTQIADALMRILEPRGVIVVVECEHMCMTMRGVRKPGAKTLTSAVRGQLRDPATRSEAMSLIIGRG

SEQ ID NO: 15362 - protein, 204 aa, Streptomyces hainanensis
  REGION 1..204: note = tr|A0A4V2Y3M8|A0A4V2Y3M8_9ACTN GTP cyclohydrolase 1; OS = Streptomyces hainanensis OX=402648 GN=folE PE=3 SV=1
MTDPVTLPDQPGPGPIGEFDEKRAESAIRELLIAVGEDPDREGLRDTPARVARAYREIFAGLWQRPEDVLTTTFDLGHDEMVLVKDIEVLSSCEHHLVPFVGYAHIGYIPAASGKITGLSKLARLVDVFARRPQVQERLTTQIADSLMRILEPRGVIVVVECEHMCMTMRGVRKPGAKTTTSAVRGQLRDAATRAEAMSLILAR

SEQ ID NO: 15363 - protein, 200 aa, unidentified
  source 1..200: note = Streptomyces harbinensis
  REGION 1..200: note = tr|A0A1I6THU3|A0A1I6THU3_9ACTN GTP cyclohydrolase 1; OS = Streptomyces harbinensis OX=1176198 GN=folE PE=3 SV=1
MTDPVTAGTGHVGTFDEKRAENAVRELLIAVGEDPDREGLRDTPARVARAYREIFAGLWQEPEDVLTTTFDLGHDEMVLVKDIEVMSSCEHHLVPFVGKAHVGYIPSSSGKITGLSKLARLVDVYARRPQVQERLTTQIADSLMRILEPRGVIVVVECEHMCMTMRGVRKPGAKTTTSAVRGQLRDAATRAEAMSLILSR

SEQ ID NO: 15364 - protein, 201 aa, Streptomyces himastatinicus
  REGION 1..201: note = tr|D9WBV9|D9WBV9_9ACTN GTP cyclohydrolase 1; OS = Streptomyces himastatinicus ATCC 53653 OX=457427; GN = folE PE=3 SV=1
MTDPVTLDGESTIGVFDEKRAENAIRELLIAVGEDPDREGLRETPGRVARAYKEIFAGLRQEPEDVLTTTFDLGHDEMVLVKDIEVMSSCEHHLVPFVGVAHVGYIPSHDGKITGLSKLARLVDVFARRPQVQERLTTQIADSLMRILEPRGVIVVVECEHMCMTMRGVRKPGAKTLTSAVRGQLRDPATRAEAMSLIMAR

SEQ ID NO: 15365 - protein, 214 aa, Streptomyces himastatinicus
  REGION 1..214: note = tr|D9WJ58|D9WJ58_9ACTN GTP cyclohydrolase 1; OS = Streptomyces himastatinicus ATCC 53653 OX=457427; GN = folE PE=3 SV=1
MSEQLDATAARLVSSRDPEVRTRGTVDLARIEEAVRDILVAVGEDPDRRGLKETPRRVAHAYAELFAGLRVDPTDVLDTTFEEGHQELIMVCDIEVQSFCEHHLLPFLGRAHIGYVPGESGCVAGLSKLARLVEVYARRPQVQERLTSQIADCLHTTLDAAGVLVVVECEHTCMTMRGIRKAGARTVTSAVRGTLQSDPRTRNEAMELLRRTAV

SEQ ID NO: 15366 - protein, 205 aa, unidentified
  source 1..205: note = Streptomyces hoynatensis
  REGION 1..205: note = tr|A0A3A9Z3C7|A0A3A9Z3C7_9ACTN GTP cyclohydrolase 1; OS = Streptomyces hoynatensis OX=1141874 GN=folE PE=3 SV=1
MTDPVTLGERDSLRGAIGEFDEKRAEAAVRELLLAVGEDPDREGLRDTPARVARAYREIFAGLWQQPEDVLTTTFDLGHDEMVLVKDIEVMSSCEHHLVPFVGSAHIGYIPSTSGKITGLSKLARLVDVFARRPQVQERLTTQIADSLMRILEPRGVIVVVECEHMCMTMRGVRKPGAKTTTSAVRGQLRDPATRAEAMSLILAR

SEQ ID NO: 15367 - protein, 211 aa, unidentified
  source 1..211: note = Streptomyces hoynatensis
  REGION 1..211: note = tr|A0A3A9YSF8|A0A3A9YSF8_9ACTN GTP cyclohydrolase 1; OS = Streptomyces hoynatensis OX=1141874 GN=D7294_22690 PE=3; SV = 1
MKGGGMAELEEAASPLPPKRVDVDAIETAVGDLLRGLGQGDKAEVMAQTPRRVAELYAQSINPGDIDIEEDFKVFDNPGLDDLILVNDVHYVSMCEHHLAPAFGIAHLGYVPDRKVAGYSKLKKGLNYLSRQPQLNERLVVQAVDFLESRLQPKGIGLILRSAHCCIALRTNAPSQEVVTVADLRGVLREDRYRQPLWSSAVAERPSFLGR

SEQ ID NO: 15368 - protein, 201 aa, unidentified
  source 1..201: note = Streptomyces hundungensis
  REGION 1..201: note = tr|A0A387HKQ8|A0A387HKQ8_9ACTN GTP cyclohydrolase 1; OS = Streptomyces hundungensis OX=1077946 GN=folE PE=3 SV=1
MTDPVTLDGEAKIGEFDEKRAENAVRELLIAVGENPDREGLQETPARVARAYREILAGLRQTPEEVLTTTFDLGHDEMVLVKDIEIVSLCEHHLLPFHGVAHVGYIPAESGKITGLSKLARLVDVFARRPQVQERLTTQVADSLMRILDARGAIVVIEAEHMCMSVRGIRKPGAKTTTSAVRGQLRDPATRSEAMSLIMAR

SEQ ID NO: 15369 - protein, 202 aa, unidentified
  source 1..202: note = Streptomyces hyalinus
  REGION 1..202: note = tr|A0A401YRM6|A0A401YRM6_9ACTN GTP cyclohydrolase 1; OS = Streptomyces hyalinus OX=516124 GN=folE PE=3 SV=1
MTIDPVTFDGSPAVGEFDQDRAERAVRELLLAVGENPDREGLKDTPARVARSYREIFAGLRQEPEDVLTTTFDLGHDELVLVKDIEVYSTCEHHLVTFHGVAHVGYIPSEDGQITGLSKLARLVDVYAKRPQVQERLTTQIADALVNILRPRGVIVVVECEHLCMTMRGIRKPGARTLTSAVRGQLLNAATRAEAMSLILSR

SEQ ID NO: 15370 - protein, 201 aa, Streptomyces hygroscopicus; identical to SEQ ID NO: 15268
  REGION 1..201: note = tr|A0A0S2P3A5|A0A0S2P3A5_STRHL GTP cyclohydrolase 1; OS = Streptomyces hygroscopicus subsp. limoneus OX=264445; GN = folE PE=3 SV=1

SEQ ID NO: 15371 - protein, 201 aa, Streptomyces hygroscopicus
  REGION 1..201: note = tr|A0A1S6RLD9|A0A1S6RLD9_STRHY GTP cyclohydrolase 1; OS = Streptomyces hygroscopicus OX=1912 GN=folE PE=3 SV=1
MTDPVTLDGESPIGVFDEKRAEHAIRELLIAVGEDPDREGLRETPGRVARAYKEIFAGLRQEPEDVLTTTFDLGHDEMVLVKDIEVMSSCEHHLVPFVGVAHVGYIPSHDGKITGLSKLARLVDVFARRPQVQERLTTQIAESLMRILEPRGVIVVVECEHMCMTMRGVRKPGAKTLTSAVRGQLRDPATRAEAMSLIMAR

SEQ ID NO: 15372 - protein, 201 aa, unidentified
  source 1..201: note = Streptomyces incarnatus
  REGION 1..201: note = tr|A0A0G3AIX4|A0A0G3AIX4_9ACTN GTP cyclohydrolase 1; OS = Streptomyces incarnatus OX=665007 GN=folE PE=3 SV=1
MTDPVTLDGEGPIGEFDEKRAENAVRELLIAVGEDPDREGLRETPARVARAYREIFAGLWQKPEDVLTTTFDLGHDEMVLVKDIEVYSTCEHHLVPFRGVAHVGYIPSVTGKITGLSKLARLVDVYARRPQVQERLTTQIADSLMEILEPRGVIVVVECEHMCMSMRGIRKPGAKTITSAVRGQLRDAATRNEAMSLIMAH

SEQ ID NO: 15373 - protein, 201 aa, Streptomyces indicus
  REGION 1..201: note = tr|A0A1G9BUM0|A0A1G9BUM0_9ACTN GTP cyclohydrolase 1; OS = Streptomyces indicus OX=417292 GN=folE PE=3 SV=1
MTDPVTLDGASKIGEFDEKRAENAVRELLIAVGEDPDREGLLETPARVARAYREIFAGLWQKPEDVLTTTFDLGHDEMVLVKDIEVMSSCEHHLVPFHGVAHVGYIPSTDGKITGLSKLARLVDVYARRPQVQERLTTQIADSLMEILEPRGVIVVVECEHMCMTMRGVRKPGAKTLTSAVRGQLRDPATRAEAMSLIMAR

SEQ ID NO: 15374 - protein, 228 aa, Streptomyces ipomoeae
  REGION 1..228: note = tr|A0A540QPB9|A0A540QPB9_9ACTN GTP cyclohydrolase 1; OS = Streptomyces ipomoeae OX=103232 GN=folE PE=3 SV=1
MDIAASATASTSDTADIPARFTAIPSPQTARASTTPLRVVHDTDGIDLAEAERAAAQFLGALGIETDTESLRGTPGRMARAYAELFSPRPFDLTTFPNDEGYDELVLARSIPVRTVCEHHMLPVVGTAHVGYLPGHRILGLSKLARVVEHFACRPQVQERLTKQVADWLQAHLEPKGVGVVIAAEHSCMTLRGVQATGSSTLTSTLLGTLRNDARSRAEFLSLTGMLT

SEQ ID NO: 15375 - protein, 201 aa, Streptomyces ipomoeae
  REGION 1..201: note = tr|A0A540Q1H4|A0A540Q1H4_9ACTN GTP cyclohydrolase 1; OS = Streptomyces ipomoeae OX=103232 GN=folE PE=3 SV=1
MTDPVTLDGEGTIGEFDRKRAENAIRELLIAVGEDPDREGLRETPARVARAYRELLAGHGQEPEDVLTTTFDIGHDEMVLVKDIEIVSLCEHHMLPFHGVAHIGYIPAESGKITGLSKLARLVEVFARRLQVQERLTTQVADSLMKILEARGVIVVIEAEHMCMSVRGIRKPGAKTTTSAVRGQLRDATTRAEAMSLILAR

SEQ ID NO: 15376 - protein, 218 aa, Streptomyces iranensis
  REGION 1..218: note = tr|A0A060ZC10|A0A060ZC10_9ACTN GTP cyclohydrolase 1; OS = Streptomyces iranensis OX=576784 GN=folE PE=3 SV=1
MTELAPRATARIHPDAPEEPAPAGPTLRVVHESGDIDLAAAEAAAGQFLNALGISTSSESLRGTPGRMARAYAELFSPRPFDLTTFPNDEGYDELVLARRIPVRSVCEHHLLPFVGTAHVGYLPGGRILGLSKLARVVEHFACRPQVQERLTKQVADWLQTHLEPKGVGVVIEAEHSCMTLRGVQATGSSTMTSTLLGLLRSDARSRSEFLALTGAAS

SEQ ID NO: 15377 - protein, 196 aa, Streptomyces iranensis
  REGION 1..196: note = tr|A0A060ZZ01|A0A060ZZ01_9ACTN GTP cyclohydrolase 1; OS = Streptomyces iranensis OX=576784 GN=folE PE=3 SV=1
MSVTELDLDGDSSASRTTEDPLVGLARQLLEEIGEDPNRDGLRDTPARFARWWREFINYDPGSLGTLFESIGTSQLVVVSDIQVWSLCEHHLLPFNCSVTIAYRPTGQLLGLSKFARVAHQYAHKLQVQERLVDQIALEISTLSGTPDVAVIAKGEHLCMSMRGIKAAAQMTSTAYRGEFSTDPGLRGELFDLLRV

SEQ ID NO: 15378 - protein, 201 aa, unidentified
  source 1..201: note = Streptomyces jeddahensis
  REGION 1..201: note = tr|A0A177HKI5|A0A177HKI5_9ACTN GTP cyclohydrolase 1; OS = Streptomyces jeddahensis OX=1716141 GN=folE PE=3 SV=1
MTDPVTLDGEGPIGEFDEKRAENAVRELLIAVGEDPDREGLRETPGRVARAYREIFAGLWQKPEDVLTTTFDLGHDEMVLVKDIEVLSSCEHHLVPFVGFAHIGYIPSTDGKITGLSKLARLVDVFARRPQVQERLTTQIADSLMDILEPRGAIVVIECEHMCMTMRGVRKPGAKTITSAVRGQLRDPATRAEAMSLIMAK

SEQ ID NO: 15379 - protein, 201 aa, Streptomyces jietaisiensis; identical to SEQ ID NO: 15345
  REGION 1..201: note = tr|A0A1G7RJQ3|A0A1G7RJQ3_9ACTN GTP cyclohydrolase 1; OS = Streptomyces jietaisiensis OX=235987 GN=folE PE=3 SV=1

SEQ ID NO: 15380 - protein, 201 aa, Streptomyces kanamyceticus
  REGION 1..201: note = tr|A0A5J6GFT1|A0A5J6GFT1_STRKN GTP cyclohydrolase I FolE OS=Streptomyces kanamyceticus OX=1967 GN=folE PE=4; SV = 1
MTDPVTLDGEGAIGEFDEKRAENAVRELLIAVGEDPDREGLRETPGRVARAYKEIFAGLWQKPEDVLTTTFDLGHDEMVLVKDIEVQSSCEHHLVPFHGVAHVGYIPSADGKITGLSKLARLVDVYARRPQVQERLTTQVADSLMQILEPRGVIVVVECEHMCMSMRGVRKPGAKTITSAVRGQLRDPATRNEAMSLIMAR

SEQ ID NO: 15381 - protein, 201 aa, unidentified
  source 1..201: note = Streptomyces kanasensis
  REGION 1..201: note = tr|A0A124ECJ9|A0A124ECJ9_9ACTN GTP cyclohydrolase 1; OS = Streptomyces kanasensis OX=936756 GN=folE PE=3 SV=1
MTDPVTLDGESAIGVFDAKRAESAVRELLIAVGEDPDREGLRETPARVARAYREILSGLWQEPEDVLTTTFDLGHDEMVLVKDIEIVSLCEHHLLPFHGVAHVGYIPAESGKITGLSKLARLVEVYARRPQVQERLTTQIADSLMRILEARGAIVVIEAEHMCMSVRGIRKPGAKTTTSAVRGQLRDGSTRAEAMSLIMAR

SEQ ID NO: 15382 - protein, 201 aa, Streptomyces kasugaensis
  REGION 1..201: note = tr|A0A4Q9HR45|A0A4Q9HR45_STRKA GTP cyclohydrolase 1; OS = Streptomyces kasugaensis OX=1946 GN=folE PE=3 SV=1
MTDPVTLDSDGTIGAFDEKRAENAVRELLIAVGEDPDREGLLETPARVARAYKEIFAGLWQEPADVLTTTFDIGHDEMVLVRDIEVFSTCEHHLVPFHGVAHVGYIPSADGKITGLSKLARLVDVYARRPQVQERLTTQIADSLMQILEPRGVIVVVECEHMCMSMRGIRKPGAKTITSAVRGQLRDAATRSEAMSLIIGR

SEQ ID NO: 15383 - protein, 202 aa, Streptomyces katrae
  REGION 1..202: note = tr|A0A0F4JTR1|A0A0F4JTR1_9ACTN GTP cyclohydrolase 1; OS = Streptomyces katrae OX=68223 GN=folE PE=3 SV=1
MTDPVTLTGDEGTIGEFDEKRAEAAVRELLIAVGEDPDREGLLETPARVARAYKEIFAGLYQKPEDVLTTTFDLGHDEMVLVKDIEVMSSCEHHLVPFHGVAHVGYIPSADGKITGLSKLARLVDVFARRPQVQERLTTQIADSLMEILDPRGCIVVIECEHMCMTMRGVRKPGAKTITSAVRGQLRDPATRNEAMSLIMAR

SEQ ID NO: 15384 - protein, 201 aa, unidentified
  source 1..201: note = Streptomyces klenkii
  REGION 1..201: note = tr|A0A3B0BSU7|A0A3B0BSU7_9ACTN GTP cyclohydrolase 1; OS = Streptomyces klenkii OX=1420899 GN=folE PE=3 SV=1
MTDPVTLDAERSVGAFDEKRAENAVRELLLAVGEDPDREGLRETPARVARAYKEIFAGLWQEPEDVLTTTFDLGHDEMVLVRDIEVYSTCEHHLVPFHGVAHVGYIPSTSGKITGLSKLARLVDVYARRPQVQERLTTQIADSLMEILEPRGVVVVIECEHMCMSMRGIRKPGAKTLTSAVRGQLRDPATRAEAMSLIMAR

SEQ ID NO: 15385 - protein, 201 aa, Streptomyces koyangensis; identical to SEQ ID NO: 15254
  REGION 1..201: note = tr|A0A385DDF0|A0A385DDF0_9ACTN GTP cyclohydrolase 1; OS = Streptomyces koyangensis OX=188770 GN=folE PE=3 SV=1

SEQ ID NO: 15386 - protein, 203 aa, unidentified
  source 1..203: note = Streptomyces lasaliensis
  REGION 1..203: note = tr|A0A4V6AW11|A0A4V6AW11_STRLS GTP cyclohydrolase 1; OS = Streptomyces lasaliensis OX=324833 GN=folE PE=3 SV=1
MTDPVTLDGDSGGARGEFDEKRAENAVRELLLAVGEDPDREGLKETPARVARAYREIFAGLWQKPEDVLTTTFDLGHDEMVLVKDIEVFSTCEHHLVPFRGVAHVGYIPSTSGKITGLSKLARLVDVYARRPQVQERLTTQIADSLMEILEPRGVIVVIECEHMCMSMRGIRKPGAKTLTSAVRGQLRDAATRNEAMSLIMAR

SEQ ID NO: 15387 - protein, 201 aa, Streptomyces laurentii
  REGION 1..201: note = tr|A0A160NZ53|A0A160NZ53_STRLU GTP cyclohydrolase 1; OS = Streptomyces laurentii OX=39478 GN=folE PE=3 SV=1
MTDPVTLDGEGTIGEYDEKRAEAAVRELLLAVGEDPDREGLRETPARVARAYKELFAGLWQKPEEVLTTTFDLGHDEMVLVKDIELMATCEHHLLPFHGVAHIGYIPAESGKITGLSKLARLVDVFARRPQVQERLTTQIADSLMEILEARGAIVVIEAEHMCMTLRGVRKPGAKTTTSAVRGQLRDATTRAEAMSLILAR

SEQ ID NO: 15388 - protein, 186 aa, Streptomyces laurentii
  REGION 1..186: note = tr|A0A160NS97|A0A160NS97_STRLU GTP cyclohydrolase 1; OS = Streptomyces laurentii OX=39478 GN=folE PE=3 SV=1
MSPDPLERIARELLLAIGEDPDREGLRDTPARYARWWREFSDYDPGTLDTSFLCASSAEAVSVSGIHLWSLCEHHLLPFSCEVTIGYLPREQVLGLSKFARIAQQHAHRLQVQERLTADIADSVEKLTGSADVAVVCHGEHLCMAMRGIRTPATMTTATWRGAFRDAAVRAEFLALQPARPHSAGR

SEQ ID NO: 15389 - protein, 285 aa, Streptomyces lavendulae
  REGION 1..285: note = tr|A0A2K8PLI1|A0A2K8PLI1_STRLA GTP cyclohydrolase 1 type 2 OS=Streptomyces lavendulae subsp. lavendulae; OX = 58340 GN=SLAV_25785 PE=4 SV=1
MPRLSEVIAALDALWPPSRAEQWDAVGTVCGEPDAEVTRVLFAVDPVQEIVDEAVELGADLLVTHHPLYLRGTTTVEAGTFKGRVVHTLIKNDIALHVAHTNADTADPGVSDALAGALDLRVTGPLVPDPTDPAGRRGLGRICELDHPETLREFAARAASRLPSTAQGIRAAGDPDALIRTVAVSGGSGDSLFEQVRAAGVDAFLTADLRHHPASEARERSPLALVDAAHWATEWPWCEQAAAQLDAISERRGWGLRTHVSRTVTDPWTAHAPSVTSPSTSGAPN

SEQ ID NO: 15390 - protein, 201 aa, Streptomyces lavendulae
  REGION 1..201: note = tr|A0A5C8GTC9|A0A5C8GTC9_STRLA GTP cyclohydrolase 1; OS = Streptomyces lavendulae OX=1914 GN=folE PE=3 SV=1
MTDPVTLDSERPVGEFDEKRAENAVRELLFAIGEDPDREGLRETPARVARAYREIFAGLWQKPEDVLTTTFDLGHDEMVLVKDIEVYSTCEHHLVPFRGVAHVGYIPSVSGKITGLSKLARLVDVYARRPQVQERLTTQIADSLMEILEPRGVIVVVECEHMCMSMRGIRKPGAKTITSAVRGQLRDAATRNEAMSLIMAR

SEQ ID NO: 15391 - protein, 201 aa, unidentified
  source 1..201: note = Streptomyces leeuwenhoekii
  REGION 1..201: note = tr|A0A0F7VYS9|A0A0F7VYS9_9ACTN GTP cyclohydrolase 1; OS = Streptomyces leeuwenhoekii OX=1437453 GN=sle_32260 PE=3; SV = 1
MTDPVTLDGEGQIGEFDEKRAENAVRELLIAVGEDPDREGLRETPARVARAYREIFAGLWQKPEDVLTTTFDIGHDEMVLVKDIEVYSTCEHHLVPFRGVAHVGYIPSTTGKITGLSKLARLVDVYARRPQVQERLTTQIADSLMEMLEPRGVIVVVECEHMCMSMRGIRKPGAKTITSAVRGQLRDVATRNEAMSLIMAR

SEQ ID NO: 15392 - protein, 201 aa, Streptomyces lincolnensis
  REGION 1..201: note = tr|A0A1B1MEP8|A0A1B1MEP8_STRLN GTP cyclohydrolase 1; OS = Streptomyces lincolnensis OX=1915 GN=folE PE=3 SV=1
MTDPVTLDGEGSIGEFDEKRAENAVRELLIAVGEDPDREGLRETPARVARAYREIFAGLWQQPEDVLTTTFDLGHDEMVLVKDIEVYSTCEHHLVPFRGVAHVGYIPAVSGKITGLSKLARLVDVFARRPQVQERLTTQIADSLMQILEPRGVIVVVECEHMCMSMRGIRKPGAKTITSAVRGQLRDAATRNEAMSLIMAR

SEQ ID NO: 15393 - protein, 204 aa, unidentified
  source 1..204: note = Streptomyces lividans
  REGION 1..204: note = tr|A0A076LX57|A0A076LX57_STRLI GTP cyclohydrolase 1; OS = Streptomyces lividans TK24 OX=457428 GN=folE PE=3 SV=1
MTATAALQVIEDVTGPDEVTGPDLEAAERAAREFLRALGVVVDGEGTRDTPGRMARGYAELLNARPFRMTTFPNDEGYDELVLARDIPLRSVCQHHMLPFVGVAHVGYLPGARILGLSKLARVVEHYACRPQVQERLTKQVADHLVEQLQPRGVGVVVEAEHTCMTLRGVRATGSRTVTSTLLGTLRDDAASRQEFLALTGVQR

SEQ ID NO: 15394 - protein, 201 aa, unidentified; identical to SEQ ID NO: 15309
  source 1..201: note = Streptomyces lividans
  REGION 1..201: note = tr|D6EQN2|D6EQN2_STRLI GTP cyclohydrolase 1; OS = Streptomyces lividans TK24 OX=457428 GN=folE PE=3 SV=1

SEQ ID NO: 15395 - protein, 203 aa, Streptomyces longwoodensis
  REGION 1..203: note = tr|A0A101QPS7|A0A101QPS7_9ACTN GTP cyclohydrolase 1; OS = Streptomyces longwoodensis OX=68231 GN=folE PE=3 SV=1
MTDPVTLDGASGGASGEFDEKRAENAVRELLLAVGEDPDREGLKETPARVARAYREIFAGLWQKPQDVLTTTFDIGHDEMVLVKDIEVFSTCEHHLVPFRGVAHVGYIPSSSGKITGLSKLARLVDVYARRPQVQERLTTQIADSLMEILEPRGVIVVIECEHMCMSMRGIRKPGAKTLTSAVRGQLRDAATRNEAMSLIMAR

SEQ ID NO: 15396 - protein, 201 aa, unidentified
  source 1..201: note = Streptomyces lunaelactis
  REGION 1..201: note = tr|A0A2R4T5T2|A0A2R4T5T2_9ACTN GTP cyclohydrolase 1; OS = Streptomyces lunaelactis OX=1535768 GN=folE PE=3 SV=1
MTDPVTLDGEGTIGIFDEKRAENAVRELLIAVGEDPDREGLRETPSRVARAYREIFAGLWQQPEDVLTTTFDLGHDEMVLVKDIEVMSSCEHHLVPFHGVAHVGYIPSADGKITGLSKLARLVDVFARRPQVQERLTTQIADSLMQILEPRGVIVVVECEHMCMTMRGVRKPGAKTITSAVRGQLRDPATRAEAMSLIMAR

SEQ ID NO: 15397 - protein, 201 aa, unidentified
  source 1..201: note = Streptomyces luteoverticillatus
  REGION 1..201: note = tr|A0A3Q9FVA7|A0A3Q9FVA7_STRLT GTP cyclohydrolase 1; OS = Streptomyces luteoverticillatus OX=66425 GN=folE PE=3; SV = 1
MTDPVTLEAEGPIGEFDEKRAENAVRELLIAVGEDPDREGLRETPARVARAYKEIFAGLRQEPEDVLTTTFDLGHDEMVLVRDIEVYSTCEHHLVPFHGVAHVGYIPSTTGKITGLSKLARLVDVYARRPQVQERLTTQIADSLMDILEPRGVVVVIECEHMCMSMRGIRKPGAKTLTSAVRGQLRDPATRAEAMSLIMAR

SEQ ID NO: 15398 - protein, 201 aa, unidentified
  source 1..201: note = Streptomyces luteus
  REGION 1..201: note = tr|A0A086N185|A0A086N185_9ACTN GTP cyclohydrolase 1; OS = Streptomyces luteus OX=1915400 GN=folE PE=3 SV=1
MTDPVTLDGEGQIGEFDEKRAENAVRELLIAVGEDPDREGLRETPARVARAYKEMFAGLWQEPEDVLTTTFDLGHDEMVLVKDIEVFSTCEHHLVPFRGVAHVGYIPATNGKITGLSKLARLVDVYARRPQVQERLTTQIADSLMEILEPRGVIVVVECEHMCMSMRGIRKPGAKTLTSAVRGQLRDVATRNEAMSLIMAR

SEQ ID NO: 15399 - protein, 201 aa, Streptomyces lydicus
  REGION 1..201: note = tr|A0A3S9YEC6|A0A3S9YEC6_9ACTN GTP cyclohydrolase 1; OS = Streptomyces lydicus OX=47763 GN=folE PE=3 SV=1
MTDPVTLDVGGKIGTFDEKRAENAVRELLIAVGEDPDREGLLETPARVARAYKEIFAGLWQKPEDVLTTTFDLGHDEMVLVKDIELVSSCEHHLVPFVGVAHVGYIPSTDGKITGLSKLARLVDVYARRPQVQERLTTQIADSLMEILEPRGVIVVIECEHMCMTMRGVRKPGAKTTTSAVRGQLRDAATRAEAMSLILAR

SEQ ID NO: 15400 - protein, 201 aa, Streptomyces lydicus; identical to SEQ ID NO: 15303
  REGION 1..201: note = tr|A0A0D4DP48|A0A0D4DP48_9ACTN GTP cyclohydrolase 1; OS = Streptomyces lydicus OX=47763 GN=folE PE=3 SV=1

SEQ ID NO: 15401 - protein, 201 aa, unidentified
  source 1..201: note = Streptomyces malaysiense
  REGION 1..201: note = tr|A0A1J4Q3B3|A0A1J4Q3B3_9ACTN GTP cyclohydrolase 1; OS = Streptomyces malaysiense OX=1428626 GN=folE PE=3 SV=1
MTDPVTLDSERPVGEFDEKRAENAVRELLIAIGEDPDREGLRETPARVARAYQEIFAGLWQRPGDVLTTTFDLGHDEMVLVKDIEVYSTCEHHLVPFRGVAHVGYIPSVSGKITGLSKLARLVDVYARRPQVQERLTTQIADSLMEILEPRGVIVVVECEHMCMSMRGIRKPGAKTITSAVRGQLRDAATRNEAMSLIMAR

SEQ ID NO: 15402 - protein, 201 aa, Streptomyces malaysiensis; identical to SEQ ID NO: 15278
  REGION 1..201: note = tr|A0A291SSF0|A0A291SSF0_9ACTN GTP cyclohydrolase 1; OS = Streptomyces malaysiensis OX=92644 GN=folE PE=3 SV=1

SEQ ID NO: 15403 - protein, 201 aa, unidentified
  source 1..201: note = Streptomyces mangrovisoli
  REGION 1..201: note = tr|A0A1J4NXH5|A0A1J4NXH5_9ACTN GTP cyclohydrolase 1; OS = Streptomyces mangrovisoli OX=1428628 GN=folE PE=3 SV=1
MTDPVTLDGEAIIGEFDEKRAENAVRELLIAVGEDPDREGLRETPARVARAYREIFAGLRQQPEDVLTTTFDLGHDEMVLVKDIEVFSTCEHHLVPFRGVAHVGYIPATSGKITGLSKLARLVDVFARRPQVQERLTTQIADSLMEILEPRGVIVVVECEHMCMSMRGIRKPGAKTLTSAVRGQLRDAATRNEAMSLIMAR

SEQ ID NO: 15404 - protein, 214 aa, Streptomyces melanosporofaciens
  REGION 1..214: note = tr|A0A1H4KSC5|A0A1H4KSC5_STRMJ GTP cyclohydrolase 1; OS = Streptomyces melanosporofaciens OX=67327 GN=folE PE=3; SV = 1
MTNAIYGASGLSPAAPPQPAAELSRPEVDAERVAVLVGQLLTALGENPDREGLAETPTRVAAWWTSFLSPDAATPTCFTEVHLSGQLVVVGGVSVWSLCEHHMLPMNLRVVAGYVPDGEAVGLSKFGRIAQRYAGRLQVQERFTRQVAEEITAAIGGKDVAVAVRGTHLCMSMRGVRMEEARTTTLQADGRFQTDPVLSAQFLTLATGQWGAVE

SEQ ID NO: 15405 - protein, 201 aa, Streptomyces melanosporofaciens
  REGION 1..201: note = tr|A0A1H4Q6U8|A0A1H4Q6U8_STRMJ GTP cyclohydrolase 1; OS = Streptomyces melanosporofaciens OX=67327 GN=folE PE=3; SV = 1
MTDPVTLDGESPIGVFDEKRAENAIRELLIAVGEDPDREGLRETPGRVARAYKEIFAGLRQEPEDVLTTTFDLGHDEMVLVKDIEVMSSCEHHLVPFVGVAHVGYIPSHDGKITGLSKLARLVDVFARRPQVQERLTTQIAESLMRILEPRGVIVVVECEHMCMTMRGVRKPGAKTLTSAVRGQLRDSATRAEAMSLIMAR

SEQ ID NO: 15406 - protein, 201 aa, Streptomyces microflavus; identical to SEQ ID NO: 15281
  REGION 1..201: note = tr|A0A285DCM7|A0A285DCM7_STRMI GTP cyclohydrolase 1; OS = Streptomyces microflavus OX=1919 GN=folE PE=3 SV=1

SEQ ID NO: 15407 - protein, 201 aa, Streptomyces mirabilis
  REGION 1..201: note = tr|A0A1I2TLT2|A0A1I2TLT2_9ACTN GTP cyclohydrolase 1; OS = Streptomyces mirabilis OX=68239 GN=folE PE=3 SV=1
MTDPVTLDGEGVIGEFDEKRAENAVRELLIAVGEDPDREGLRETPGRVARAYREIFAGLWQKPEDVLTTTFDLGHDEMVLVKDIEVLSSCEHHLVPFVGVAHVGYIPSVDGKITGLSKLARLVDVYARRPQVQERLTTQIADSLMGILEPRGVIVVVECEHMCMSMRGVRKPGAKTITSAVRGQLRDPATRNEAMSLIMAR

SEQ ID NO: 15408 - protein, 201 aa, Streptomyces misionensis
  REGION 1..201: note = tr|A0A1H4ZJ23|A0A1H4ZJ23_9ACTN GTP cyclohydrolase 1; OS = Streptomyces misionensis OX=67331 GN=folE PE=3 SV=1
MTDPVTLDSERPVGEFDEKRAENAVRELLIAVGEDPDREGLRETPARVARAYKEIFAGLWQQPEDVLTTTFDLGHDEMVLVKDIEVYSTCEHHLVPFRGVAHVGYIPSVSGKITGLSKLARLVDVYARRPQVQERLTTQIADSLMEILEPRGVIVVVECEHMCMSMRGIRKPGAKTITSAVRGQLRDAATRNEAMSLIMAR

SEQ ID NO: 15409 - protein, 201 aa, Streptomyces misionensis
  REGION 1..201: note = tr|A0A5C6JWF1|A0A5C6JWF1_9ACTN GTP cyclohydrolase 1; OS = Streptomyces misionensis OX=67331 GN=folE PE=3 SV=1
MTDPVTLDSERPVGEFDEKRAENAVRELLIAVGEDPDREGLRETPARVARAYKEIFAGLWQQPEDVLTTTFDLGHDEMVLVKDIEVYSTCEHHLVPFRGVAHVGYIPSVSGKITGLSKLARLVDVYARRPQVQERLTTQIADSLMEILEPRGVIVVIECEHMCMSMRGIRKPGAKTITSAVRGQLRDAATRNEAMSLIMAR

SEQ ID NO: 15410 - protein, 202 aa, Streptomyces mobaraensis
  REGION 1..202: note = tr|M3CCB5|M3CCB5_STRMB GTP cyclohydrolase 1; OS = Streptomyces mobaraensis NBRC 13819 = DSM 40847; OX = 1223523 GN=folE PE=3 SV=1
MIDPVTLDGERAIGPFDEKRAEQAVRELLIAVGEDPDREGLRETPARVARAYKEIFAGLRQEPADVLTTTFDLGHDEMVLVRDIEVYSTCEHHLVPFHGVAHIGYIPATSGKITGLSKLARLVDVYARRPQVQERLTTQIADSLVEILEARGVVVVIECEHMCMSMRGIRKPGAKTITSAVRGQLRDPASRAEAMSLIMSAR

SEQ ID NO: 15411 - protein, 202 aa, Streptomyces nanshensis
  REGION 1..202: note = tr|A0A1E7LAE2|A0A1E7LAE2_9ACTN GTP cyclohydrolase 1; OS = Streptomyces nanshensis OX=518642 GN=folE PE=3 SV=1
MTDPVTLGGEGEFQPADFDEKRAENAVRELLIAVGEDPDREGLLETPARVTRAYKEMFAGLHQRPEDVLTTTFDLGHDEMVLVKDIEVFSTCEHHLVPFHGVAHVGYIPSADGKITGLSKLARLVDVYARRPQVQERLTTQIAEALMRILEPRGVIVVVECEHMCMSMRGIRKPGAKTLTSAVRGQLRDAATRSEAMSLILR

SEQ ID NO: 15412 - protein, 201 aa, Streptomyces nanshensis; identical to SEQ ID NO: 15299
  REGION 1..201: note = tr|A0A1E7LI95|A0A1E7LI95_9ACTN GTP cyclohydrolase 1; OS = Streptomyces nanshensis OX=518642 GN=folE PE=3 SV=1

SEQ ID NO: 15413 - protein, 201 aa, unidentified
  source 1..201: note = Streptomyces natalensis
  REGION 1..201: note = tr|A0A0D7CWJ6|A0A0D7CWJ6_9ACTN GTP cyclohydrolase 1; OS = Streptomyces natalensis ATCC 27448 OX=1240678 GN=folE; PE = 3 SV=1
MTDPVTLDGDGTIGVFDEKRAENAVRELLIAVGEDPDREGLLETPARVARAYKEILAGLWQTPEDVLTTTFDLGHDEMVLVKDIEIVSLCEHHLLPFHGVAHVGYIPAENGKITGLSKLARLVEVYARRPQVQERLTTQIADSLMRILEARGAIVVVEAEHMCMSVRGIRKPGAKTTTSAVRGQLRDASTRAEAMSLIMAR

SEQ ID NO: 15414 - protein, 201 aa, Streptomyces netropsis
  REGION 1..201: note = tr|A0A445N9Q5|A0A445N9Q5_STRNE GTP cyclohydrolase 1; OS = Streptomyces netropsis OX=55404 GN=folE PE=3 SV=1
MTDPVTLDIEGPVGEFDEKRAENAVRELLIAVGEDPDREGLRETPARVARAYKEIFAGLWQEPEDVLTTTFDIGHDEMVLVRDIEVYSTCEHHLVPFHGVAHVGYIPATSGKITGLSKLARLVDVYARRPQVQERLTTQIADSLMEILEPRGVVVVIECEHMCMSMRGIRKPGAKTLTSAVRGQLRDPATRAEAMSLIMAR

SEQ ID NO: 15415 - protein, 201 aa, unidentified
  source 1..201: note = Streptomyces nigra
  REGION 1..201: note = tr|A0A2S1IGB5|A0A2S1IGB5_9ACTN GTP cyclohydrolase 1; OS = Streptomyces nigra OX=1827580 GN=folE PE=3 SV=1
MTDPVTLDGEGRIGEFDEKRAEAAVRELLIAVGEDPDREGLRETPARVARAYRELLAGLRQDPEDVLTTTFDLGHDEMVLVKDIEIVSLCEHHMLPFHGVAHVGYIPAESGKITGLSKLARLVEVFARRLQVQERLTTQIADSLMRILEARGVIVVVEAEHMCMSVRGIRKPGAKTTTSAVRGQLRDATTRAEAMSLILAR

SEQ ID NO: 15416 - protein, 201 aa, Streptomyces nitrosporeus
  REGION 1..201: note = tr|A0A5J6FDB3|A0A5J6FDB3_9ACTN GTP cyclohydrolase I FolE OS=Streptomyces nitrosporeus OX=28894 GN=folE PE=4; SV = 1
MTDPVTLDGQGPIGEFDEKRAEAAVRELLIAVGEDPDREGLRETPGRVARAYKEIFAGLRQKPEDVLTTTFDLGHDEMVLVKDIEVFSTCEHHLVPFRGVAHVGYIPATSGKITGLSKLARLVDVYARRPQVQERLTTQIAESLMEILEPRGVIVVIECEHMCMSMRGIRKPGAKTLTSAVRGQLRDPATRAEAMSLIMAR

SEQ ID NO: 15417 - protein, 201 aa, unidentified
  source 1..201: note = Streptomyces niveus
  REGION 1..201: note = tr|A0A1U9QTT6|A0A1U9QTT6_STRNV GTP cyclohydrolase 1; OS = Streptomyces niveus OX=193462 GN=folE PE=3 SV=1
MTNPVKLDGEGVIGEFDEKRAENAVRELLIAVGEDPDREGLRETPGRVARSYREIFAGLWQRPEEVLTTTFDIGHDEMVLVKDIEVQSSCEHHLVPFHGVAHVGYIPSADGKITGLSKLARLVDVFARRPQVQERMTTQIADSLMKILEPRGVIVVVECEHMCMSMRGVRKPGAKTITSAVRGQLRDPVTRNEAMSLIMAR

SEQ ID NO: 15418 - protein, 210 aa, unidentified
  source 1..210: note = Streptomyces niveus
  REGION 1..210: note = tr|V6K586|V6K586_STRNV GTP cyclohydrolase 1; OS = Streptomyces niveus NCIMB 11891 OX=1352941 GN=folE PE=3; SV = 1
MERQRNEAQMTNPVRLDGEGVIGEFDEKRAEAAVRELLIAVGEDPDREGLRETPERVARSYKEIFAGLWQRPEDVLTTTFDLGHDEMVLVKDIEVQSSCEHHLVPFHGVAHVGYIPSADGKITGLSKLARLVDVFARRPQVQERLTTQIADSLMKILDPRGVIVVIECEHMCMSMRGVRKPGAKTITSAVRGQLRDPATRNEAMSLIMAR

SEQ ID NO: 15419 - protein, 201 aa, Streptomyces nodosus
  REGION 1..201: note = tr|A0A0B5DKV9|A0A0B5DKV9_9ACTN GTP cyclohydrolase 1; OS = Streptomyces nodosus OX=40318 GN=folE PE=3 SV=1
MTDPVTLDGEGTIGEFDEKRAENAVRELLIAVGEDPDREGLRETPGRVARAYREIFAGLWQKPEDVLTTTFDLGHDEMVLVKDIEVFSTCEHHLVPFRGVAHVGYIPATSGKITGLSKLARLVDVFARRPQVQERLTTQIADSLMDILEPRGVIVVVECEHMCMSMRGIRKPGAKTITSAVRGQLRDAATRNEAMSLIMAR

SEQ ID NO: 15420 - protein, 201 aa, Streptomyces noursei
  REGION 1..201: note = tr|A0A2N8P514|A0A2N8P514_STRNR GTP cyclohydrolase 1; OS = Streptomyces noursei OX=1971 GN=folE PE=3 SV=1
MTDPVTLDVEGAIGTFDEKRAENAVRELLIAVGEDPDREGLLETPARVARAYKEIFAGLWQKPEDVLTTTFDLGHDEMVLVKDIEVVSNCEHHLVPFVGVAHVGYIPSTDGKITGLSKLARLVDVFARRPQVQERLTTQIADSLMKILEPRGVIVVIECEHMCMTMRGVRKPGAKTTTSAVRGQLRDPATRAEAMSLILAR

SEQ ID NO: 15421 - protein, 201 aa, Streptomyces noursei
  REGION 1..201: note = tr|A0A1B2GT93|A0A1B2GT93_STRNR GTP cyclohydrolase 1; OS = Streptomyces noursei ATCC 11455 OX=316284 GN=folE PE=3; SV = 1
MTDPVTLDVEGAIGTFDEKRAENAVRELLIAVGEDPDREGLLQTPARVARAYKELFAGLWQKPEDVLTTTFDLGHDEMVLVKDIEVVSNCEHHLVPFVGVAHVGYIPSTDGKITGLSKLARLVDVFARRPQVQERLTTQIAESLMQILEPRGVIVVIECEHMCMTMRGVRKPGAKTTTSAVRGQLRDPATRAEAMSLILAR

SEQ ID NO: 15422 - protein, 206 aa, unidentified
  source 1..206: note = Streptomyces oceani
  REGION 1..206: note = tr|A0A1E7JVH1|A0A1E7JVH1_9ACTN GTP cyclohydrolase 1; OS = Streptomyces oceani OX=1075402 GN=folE PE=3 SV=1
MTDPVLLDGESAIPEGAIPEFDEKRAENAIRELLLAVGEDPDREGLRETPARVARAYRELFAGLRQRPEDVLTTTFDMGHDEMVLVRDIEVVSQCEHHLLPFHGVAHVGYIPSTTGKITGLSKLARLVEVYARRPQVQERLTTQIADSLLEILEPRGVIVIIECEHMCMSVRGVRKPGAKTMTSAVRGQLRDATTRAEAMSLIMSR

SEQ ID NO: 15423 - protein, 201 aa, Streptomyces olivaceus
  REGION 1..201: note = tr|A0A1D8SSR9|A0A1D8SSR9_STROV GTP cyclohydrolase 1; OS = Streptomyces olivaceus OX=47716 GN=folE PE=3 SV=1
MTDPVTLDGEGQIGEFDEKRAENAVRELLIAVGEDPDREGLRETPARVARAYRELLAGNTQEPEDVLTTTFDIGHDEMVLVKDIEIVSLCEHHMLPFHGVAHIGYIPAESGKITGLSKLARLVEVFARRLQVQERLTTQVADSLVKILEARGVIVVIEAEHMCMSVRGVRKPGAKTTTSAVRGQLRDATTRAEAMSLILAR

SEQ ID NO: 15424 - protein, 201 aa, Streptomyces olivochromogenes
  REGION 1..201: note = tr|A0A250VGV2|A0A250VGV2_STROL GTP cyclohydrolase 1; OS = Streptomyces olivochromogenes OX=1963 GN=folE PE=3 SV=1
MTDPVTLDGEGVIGEFDEKRAENAVRELLIAVGEDPDREGLRETPGRVARAYREIFAGLWQKPEDVLTTTFDLGHDEMVLVKDIEVLSSCEHHLVPFVGVAHVGYIPSTDGKITGLSKLARLVDVYARRPQVQERLTTQIADSLMEILEPRGVIVVVECEHMCMSMRGVRKPGAKTITSAVRGQLRDPATRNEAMSLIMAR

SEQ ID NO: 15425 - protein, 196 aa, Streptomyces olivochromogenes
  REGION 1..196: note = tr|A0A250VL26|A0A250VL26_STROL GTP cyclohydrolase 1; OS = Streptomyces olivochromogenes OX=1963 GN=folE2 PE=3 SV=1
MSVTELDLDGDSAASRTTEDPLVEIARQLLAEIGEDPNRDGLRDTPARFARWWREFINYDPGSLGTLFESIGTSQLVVVSDIQVWSLCEHHLLPFNCSVTIAYRPTGQLLGLSKFARVAHQYAHRLQVQERLVDQIALEISTLSGTPDVAVIAKGEHLCMSMRGIKAAAQMTSTAYRGEFSTDSGLRAELFDLLRA

SEQ ID NO: 15426 - protein, 201 aa, unidentified
  source 1..201: note = Streptomyces ossamyceticus
  REGION 1..201: note = tr|A0A3N1LSW2|A0A3N1LSW2_9ACTN GTP cyclohydrolase 1; OS = Streptomyces ossamyceticus OX=249581 GN=folE PE=3 SV=1
MTDPVTLDGEGAIGEFDEKRAENAVRELLIAVGEDPDREGLRETPARVARAYKEIFAGLWQKPEDVLTTTFDIGHDEMVLVKDIEVYSTCEHHLVPFRGVAHVGYIPATSGKITGLSKLARLVDVYARRPQVQERLTTQIADSLMEILEPRGVIVVVECEHMCMSMRGIRKPGAKTLTSAVRGQLRDAATRNEAMSLIMAR

SEQ ID NO: 15427 - protein, 201 aa, Streptomyces pactum
  REGION 1..201: note = tr|A0A1S6J9E3|A0A1S6J9E3_9ACTN GTP cyclohydrolase 1; OS = Streptomyces pactum OX=68249 GN=folE PE=3 SV=1
MTDPVTLDGEGQIGEFDEKRAENAVRELLIAVGEDPDREGLRETPARVARAYRELLAGHAQEPEDVLTTTFDIGHDEMVLVKDIEIVSLCEHHMLPFHGVAHIGYIPAANGKITGLSKLARLVEVFARRLQVQERLTTQVADSLMRILEARGVIVVIEAEHMCMSVRGVRKPGAKTTTSAVRGQLRDATSRAEAMSLIVAR

SEQ ID NO: 15428 - protein, 201 aa, unidentified
  source 1..201: note = Streptomyces palmae
  REGION 1..201: note = tr|A0A4Z0HAL7|A0A4Z0HAL7_9ACTN GTP cyclohydrolase 1; OS = Streptomyces palmae OX=1701085 GN=folE PE=3 SV=1
MTDPVTLDGAGPIGVFDEKRAESAVRELLLAVGEDPDREGLRETPARVARAYAEIFAGLWQEPEDVLTTTFDLGHDEMVLVKDIEVYSTCEHHLVPFHGVAHVGYIPSQDGKITGLSKLARLVDVYARRPQVQERLTTQIAESLVRILEPRGVIVVVECEHMCMSMRGIRKPGAKTITSAVRGQLRDPASRSEAMSLIIGR

SEQ ID NO: 15429 - protein, 201 aa, Streptomyces parvulus
  REGION 1..201: note = tr|A0A191V151|A0A191V151_9ACTN GTP cyclohydrolase 1; OS = Streptomyces parvulus OX=146923 GN=folE PE=3 SV=1
MTDPVTLDGEGEIGEFDEKRAENAVRELLIAVGEDPDREGLRETPGRVARAYKEIFAGLWQQPEDVLTTTFDLGHDEMVLVKDIEVFSTCEHHLVPFRGVAHVGYIPSSSGKITGLSKLARLVDVFARRPQVQERLTTQIADSLMEILEPRGVIVVVECEHMCMSMRGIRKPGAKTLTSAVRGQLRDVATRNEAMSLIMAR

SEQ ID NO: 15430 - protein, 201 aa, Streptomyces parvus; identical to SEQ ID NO: 15325
  REGION 1..201: note = tr|A0A5D4JDY9|A0A5D4JDY9_9ACTN GTP cyclohydrolase 1; OS = Streptomyces parvus OX=66428 GN=folE PE=3 SV=1

SEQ ID NO: 15431 - protein, 201 aa, Streptomyces paucisporeus
  REGION 1..201: note = tr|A0A1M7HU73|A0A1M7HU73_9ACTN GTP cyclohydrolase 1; OS = Streptomyces paucisporeus OX=310782 GN=folE PE=3 SV=1
MTDPVTLDGEGRISEFDEKRAAAAVRELLLAVGEDPDREGLRETPNRVARAYREIFSGLWQEPEDVLTTTFDIGHDEMVLVKDIEVMSSCEHHLVPFVGVAHVGYIPSLSGKITGLSKLARLVDVYARRPQVQERLTTQIADSLMRILEPRGVIVVVECEHMCMTMRGVRKPGAKTITSAVRGQLRDPATRSEAMSLIIGR

SEQ ID NO: 15432 - protein, 206 aa, Streptomyces peucetius
  REGION 1..206: note = tr|A0A2D3UKR9|A0A2D3UKR9_STRC0 GTP cyclohydrolase 1; OS = Streptomyces peucetius subsp. caesius ATCC 27952; OX = 316280 GN=folE PE=3 SV=1
MTDQASTPAPEPVALRVVHQAQEADLAAAELAAGQFLQALGISTDSESLRGTPGRMARAYAELFSPRPFDLTTFPNDEGYDELVLARGIPLRSVCEHHLLPFVGTAHIGYLPGNRILGLSKLARVLEHFACRPQVQERLTKQVADWLQDQLEPKGVGVVIQAEHTCMTLRGALATGTTTMTSTLLGLLRTDGRSRSEFLALTGPHH

SEQ ID NO: 15433 - protein, 237 aa, Streptomyces peucetius
  REGION 1..237: note = tr|A0A2D3U340|A0A2D3U340_STRC0 GTP cyclohydrolase 1; OS = Streptomyces peucetius subsp. caesius ATCC 27952; OX = 316280 GN=folE PE=3 SV=1
MNDHLPQMNGPPPVAGLVGESLVPATDEIEWAAVSPRQITPEEWQRFEGHLKEIFEALGLAAGATATADTPRRFLRALFDATSGYEGDEKLVTAFQTECHGGSDCRISQIVEGPIPFFALCEHHALPFFGKAYVGYIAHEHILGLSKLTRLVRLFARRFSVQERIGRQLAESLQQILLPHGVAVHLEAVHLCTQMRGVREIESSTRTTHWRGTYDEDPQLRGEFFTLCGQRGLAGYG

SEQ ID NO: 15434 - protein, 201 aa, Streptomyces phaeoluteigriseus
  REGION 1..201: note = tr|A0A1V6MKL6|A0A1V6MKL6_9ACTN GTP cyclohydrolase 1; OS = Streptomyces phaeoluteigriseus OX=114686 GN=folE PE=3; SV = 1
MTDPVTLDGEGLVGEFDEKRAENAVRELLMAVGENPDREGLRETPARVARAYREIFAGLWQQPEDVLTTTFDIGHDEMVLVKDIEVYSTCEHHLVPFRGVAHVGYIPATSGKITGLSKLARLVDVYARRPQVQERLTTQIADSLMEILEPRGVIVVVECEHMCMSMRGIRKPGAKTITSAVRGQLRDAATRNEAMSLIMAR

SEQ ID NO: 15435 - protein, 201 aa, Streptomyces pharetrae
  REGION 1..201: note = tr|A0A1Y2Q0Y3|A0A1Y2Q0Y3_9ACTN GTP cyclohydrolase 1; OS = Streptomyces pharetrae CZA14 OX=1144883 GN=folE PE=3; SV = 1
MTDPVTLDGEGTIGEFDEKRAENAVRELLIAVGEDPDREGLRETPARVARAYRELLAGLWQEPEEVLTTTFDLGHDEMVLVKDIEIVSLCEHHLLPFHGVAHVGYIPAETGKITGLSKLARLVEVFARRPQVQERLTTQIADSLMRILEARGAIVVIEAEHMCMSVRGIRKPGAKTTTSAVRGQLRDSTTRAEAMSLILAR

SEQ ID NO: 15436 - protein, 226 aa, unidentified
  source 1..226: note = Streptomyces pini
  REGION 1..226: note = tr|A0A1I4KAW1|A0A1I4KAW1_9ACTN GTP cyclohydrolase 1; OS = Streptomyces pini OX=1520580 GN=folE PE=3 SV=1
MPAAPLRLTTGGARLFAAAIEKEDHMIDPVTLEGEGSVGEFDEKRAENAIRELLIAVGEDPDREGLRETPARVARAYREIFAGLRQRPEDVLTTTFDLGHDEMVLVKDIELLSSCEHHLLPFHGVAHVGYIPADSGKITGLSKLARLVEVFARRPQVQERLTTQVADSLMEILEARGVIVVIECEHMCMTVRGVRKPGAKTITSAVRGQLRDSATRAEAMSLIMAR

SEQ ID NO: 15437 - protein, 237 aa, Streptomyces platensis
  REGION 1..237: note = tr|A0A1Y2N2H9|A0A1Y2N2H9_STRPT GTP cyclohydrolase 1; OS = Streptomyces platensis OX=58346 GN=folE_4 PE=3 SV=1
MNDASEQMHSPPPVAGLVGERLVPVTDEVEWAAVSPREIAPEDWQRYEDHVKEIFQALGLAVGSAATADTPRRFLRALFDATSGYEGDEKLVTAFETECHGGSDCRISQIVEGPIPFFSLCEHHSLPFFGKAYVGYIAHEHILGLSKLTRLVRLFARRFSMQERIGRQLAGSLQQILQPHGVAVHLEAVHLCTQMRGVREIESSTRTTHWRGTYDEDPLLRAEFFTMCGQRGLPGHG

SEQ ID NO: 15438 - protein, 216 aa, Streptomyces platensis
  REGION 1..216: note = tr|A0A1Y2NBB3|A0A1Y2NBB3_STRPT GTP cyclohydrolase 1; OS = Streptomyces platensis OX=58346 GN=folE_2 PE=3 SV=1
MTQHPHTALHLAPGDSGIPAPAQPALRVVQETDAVDLAAAERAAGQFLHALGISTETESLRGTPGRMARAYAELFSPRPFDLTTFPNDEGYDELVLARSIPVRSVCEHHLLPFVGTAHVGYLPGRRILGLSKLARVVEHFACRPQVQERLTKQVADWLQTQLEPKGVGVVIEAEHSCMTLRGVQATGSSTLTSTLLGTLRNDARSRGEFLALAGLT

SEQ ID NO: 15439 - protein, 197 aa, unidentified
  source 1..197: note = Streptomyces pluripotens
  REGION 1..197: note = tr|A0A221P7R6|A0A221P7R6_9ACTN GTP cyclohydrolase 1; OS = Streptomyces pluripotens OX=1355015 GN=folE PE=3 SV=1
MSVTTWVQEGDVDSEEPREEDPLVGLARQLLKEIGENPDRDGLRDTPTRFARWWREFINYEPGSVGTLFESVDTKQLVIVSDIQVWSLCEHHLLPFNCSVTIAYRPTDRLLGLSKFARIAHRHAHKLQVQERLVSEIAEDIAQLSGAEDVAVIARGEHLCMTMRGIKAAAQMTSTAYRGAFGEDAALRAEMFNLLRP

SEQ ID NO: 15440 - protein, 201 aa, unidentified
  source 1..201: note = Streptomyces pluripotens
  REGION 1..201: note = tr|A0A221P002|A0A221P002_9ACTN GTP cyclohydrolase 1; OS = Streptomyces pluripotens OX=1355015 GN=folE PE=3 SV=1
MTDPVTLAGDGPIGEFDEKRAENAVRELLIAVGEDPDREGLRETPARVARAYQEIFAGLRQKPEDVLTTTFDLGHDEMVLVKDIEVLSSCEHHLVPFVGFAHVGYIPSVDGKITGLSKLARLVDVYARRPQVQERLTTQIADSLMKILEPRGVIVVVECEHMCMTMRGVRKPGAKTITSAVRGQLRDPATRNEAMSLIMAR

SEQ ID NO: 15441 - protein, 201 aa, unidentified
  source 1..201: note = Streptomyces populi
  REGION 1..201: note = tr|A0A2I0SHN6|A0A2I0SHN6_9ACTN GTP cyclohydrolase 1; OS = Streptomyces populi OX=2058924 GN=folE PE=3 SV=1
MTDPVTLDGEAAIGEFDEKRAENAVRELLLAVGEDPDREGLQETPARVARAYKEIFAGLRQRAEDVLTTTFDLGHDEMVLVKDIEVFSTCEHHLVPFRGVAHVGYIPSTSGKITGLSKLARLVDVYARRPQVQERLTTQIADSLMEILEPRGVIVVVECEHMCMSMRGIRKPGAKTITSAVRGQLRDAATRNEAMSLVMAR

SEQ ID NO: 15442 - protein, 201 aa, Streptomyces prasinopilosus
  REGION 1..201: note = tr|A0A1G6VZE9|A0A1G6VZE9_9ACTN GTP cyclohydrolase 1; OS = Streptomyces prasinopilosus OX=67344 GN=folE PE=3 SV=1
MTDPVTLGGEATLGEFDEKRAENAVRELLIAVGEDPDREGLQETPGRVARAYKEIFAGLWQKPEDVLTTTFDIGHDEMVLVKDIEVYSTCEHHLVPFRGVAHVGYIPSTSGKITGLSKLARLVDVYARRPQVQERLTTQIADSLMEILEPRGVIVVIECEHMCMSMRGIRKPGAKTLTSAVRGQLRDAATRNEAMSLIMAR

SEQ ID NO: 15443 - protein, 201 aa, Streptomyces prasinus
  REGION 1..201: note = tr|A0A5J6H032|A0A5J6H032_9ACTN GTP cyclohydrolase I FolE OS=Streptomyces prasinus OX=67345 GN=folE PE=4 SV=1
MTDPVTLGGEATFGEFDEKRAENAVRELLIAVGEDPDREGLQETPARVARAYKEIFAGLLQKPEDVLTTTFDIGHDEMVLVKDIEVYSTCEHHLVPFRGVAHVGYIPSTSGKITGLSKLARLVDVYARRPQVQERLTTQIADSLMEILEPRGVIVVIECEHMCMSMRGIRKPGAKTLTSAVRGQLRDAATRNEAMSLIMAR

SEQ ID NO: 15444 - protein, 198 aa, Streptomyces prasinus
  REGION 1..198: note = tr|A0A5J6HA91|A0A5J6HA91_9ACTN GTP cyclohydrolase I FolE OS=Streptomyces prasinus OX=67345 GN=folE PE=4 SV=1
MPSVTALRVVRDTGGVDLAEAERAAAQFLDALGIDTGTESLHNTPGRMARAYAELISPRPFDLTTFPNDEGYDELVLARSIPVRSVCEHHMLPFVGTAHVGYLPGHRILGLSKLARVVEHFACRPQVQERLTKQVADWLQTQLQPKGVGVVIEAEHTCMTLRGVQATGSSTLTSTLLGTLRHDARSRAEFLSLTGLTA

SEQ ID NO: 15445 - protein, 201 aa, unidentified; identical to SEQ ID NO: 15281
  source 1..201: note = Streptomyces pratensis
  REGION 1..201: note = tr|E8WG63|E8WG63_STRFA GTP cyclohydrolase 1; OS = Streptomyces pratensis (strain ATCC 33331 / IAF-45CD); OX = 591167 GN=folE PE=3 SV=1

SEQ ID NO: 15446 - protein, 192 aa, unidentified
  source 1..192: note = Streptomyces pristinaespiralis
  REGION 1..192: note = tr|B5H7B4|B5H7B4_STRE2 GTP cyclohydrolase 1; OS = Streptomyces pristinaespiralis (strain ATCC 25486 / DSM 40338 / CBS 914.69 / JCM 4507 / NBRC 13074 / NRRL 2958 / 5647)OX=457429 GN=folE PE=3 SV=1
MRVVREAAEPDLAAAELAAGQFLEALGISTDSESLRGTPGRMARAYAELFSPRPFDLTTFPNDEGYDELVLARGIPLRSVCEHHLLPFVGTAHIGYLPGSRILGLSKLARVLEHFACRPQVQERLTKQVADWIQTQLEPKGVGVVIQAEHTCMTLRGAQATGTTTMTSTLLGLLRTDGRSRSEFLALTGPPR

SEQ ID NO: 15447 - protein, 201 aa, unidentified
  source 1..201: note = Streptomyces pristinaespiralis
  REGION 1..201: note = tr|B5HIA5|B5HIA5_STRE2 GTP cyclohydrolase 1; OS = Streptomyces pristinaespiralis (strain ATCC 25486 / DSM 40338 / CBS 914.69 / JCM 4507 / NBRC 13074 / NRRL 2958 / 5647)OX=457429 GN=folE PE=3 SV=1
MTDPVTLDGEGYLAEFDEKRAENAVRELLIAVGEDPDREGLRETPARVARAYREIFAGLWQQPEDVLTTTFDIGHDEMVLVKDIEVYSTCEHHLVPFRGVAHVGYIPSTTGKITGLSKLARLVDVFARRPQVQERMTTQIADSLMEILEPRGVIVVVECEHMCMSMRGIRKPGAKTITSAVRGQLRDPATRNEAMSLIMAH

SEQ ID NO: 15448 - protein, 201 aa, Streptomyces pseudovenezuelae
  REGION 1..201: note = tr|A0A117PQP2|A0A117PQP2_9ACTN GTP cyclohydrolase 1; OS = Streptomyces pseudovenezuelae OX=67350 GN=folE PE=3 SV=1
MTDPVTLDVEGTIGEFDEKRAENAVRELLIAVGEDPDREGLRETPGRVARAYKEIFAGLWQKPEDVLTTTFDLGHDEMVLVKDIEVYSTCEHHLVPFRGVAHVGYIPATTGKITGLSKLARLVDVYARRPQVQERLTTQIADSLMEILEPRGVIVVVECEHMCMSMRGIRKPGAKTLTSAVRGQLRDAATRNEAMSLIMAR

SEQ ID NO: 15449 - protein, 196 aa, Streptomyces puniciscabiei
  REGION 1..196: note = tr|A0A1D7YJF0|A0A1D7YJF0_9ACTN GTP cyclohydrolase 1; OS = Streptomyces puniciscabiei OX=164348 GN=folE PE=3 SV=1
MSVTEVNLDGEQSVPATAEDRLVELARQLLEEIGEDPNRDGLRDTPERFARWWREFINYDPGSLGTLFESIGTSQLVVVSDIQVWSLCEHHLLPFNCSVTIAYRPTGQLLGLSKFARVAHQYAHRLQVQERLVDQIALEISTLSGTPDVAVIAKGEHLCMSMRGIKAAAQMTSTAYRGEFSTDSGLRAELFDLLRA

SEQ ID NO: 15450 - protein, 201 aa, Streptomyces puniciscabiei
  REGION 1..201: note = tr|A0A542UEA9|A0A542UEA9_9ACTN GTP cyclohydrolase 1; OS = Streptomyces puniciscabiei OX=164348 GN=folE PE=3 SV=1
MTDPVTLDGEGPIGEFDEKRAENAVRELLIAVGEDPDREGLRETPARVARAYKEIFAGLWQQPEDVLTTTFDLGHDEMVLVKDIEVYSTCEHHLVPFRGVAHVGYIPSVTGKITGLSKLARLVDVYARRPQVQERLTTQIADSLMEILEPRGVIVVVECEHMCMSMRGIRKPGAKTITSAVRGQLRDAATRNEAMSLIMAR

SEQ ID NO: 15451 - protein, 201 aa, unidentified
  source 1..201: note = Streptomyces qaidamensis
  REGION 1..201: note = tr|A0A143C3H9|A0A143C3H9_9ACTN GTP cyclohydrolase 1; OS = Streptomyces qaidamensis OX=1783515 GN=folE PE=3 SV=1
MTDPVTLDGEGQIGEFDEKRAENAVRELLIAVGEDPDREGLRETPARVARAYKEIFAGLWQKPEDVLTTTFDLGHDEMVLVKDIEVLSSCEHHLVPFVGVAHVGYIPSVEGKITGLSKLARLVDVYARRPQVQERLTTQIADSLMEILEPRGVIVVVECEHMCMSMRGVRKVGAKTITSAVRGQLRDPATRNEAMSLIMAR

SEQ ID NO: 15452 - protein, 201 aa, Streptomyces qinglanensis
  REGION 1..201: note = tr|A0A1E7KD21|A0A1E7KD21_9ACTN GTP cyclohydrolase 1; OS = Streptomyces qinglanensis OX=943816 GN=folE PE=3 SV=1
MTDPVTLDGESSNSAFDEKRAENAIRELLIAVGEDPDREGLLETPARVARAYREMFAGLNQRPEDVLTTTFDLGHDEMVLVKDIEVVSQCEHHLLPFHGMAHVGYIPSASGKITGLSKLARLVDVFARRPQVQERLTTQIADSLMRILEPRGVIVVIECEHMCMSVRGVRKPGAKTTTSAVRGQLRDATTRAEAMSLILAR

SEQ ID NO: 15453 - protein, 201 aa, Streptomyces qinglanensis
  REGION 1..201: note = tr|A0A1H9W6R2|A0A1H9W6R2_9ACTN GTP cyclohydrolase 1; OS = Streptomyces qinglanensis OX=943816 GN=folE PE=3 SV=1
MTDPVTLDGESPNSAFDEKRAENAIRELLIAVGEDPDREGLLETPARVARAYREMFAGLNQRPEDVLTTTFDLGHDEMVLVKDIEVVSQCEHHLLPFHGMAHVGYIPSASGKITGLSKLARLVDVFARRPQVQERLTTQIADSLMRILEPRGVIVVIECEHMCMSVRGVRKPGAKTTTSAVRGQLRDATTRAEAMSLILAR

SEQ ID NO: 15454 - protein, 201 aa, Streptomyces radiopugnans
  REGION 1..201: note = tr|A0A1H9CY91|A0A1H9CY91_9ACTN GTP cyclohydrolase 1; OS = Streptomyces radiopugnans OX=403935 GN=folE PE=3 SV=1
MIDPVTLEGDGSVGEFDEKRAENAIRELLIAVGEDPDREGLRETPARVARAYREIFAGLRQRPEDVLTTTFDLGHDEMVLVKDIELLSSCEHHLLPFHGVAHVGYIPADSGKITGLSKLARLVEVFARRPQVQERLTTQIADSLMEILEARGVIVVIECEHMCMTVRGVRKPGAKTITSAVRGQLRDSTTRAEAMSLIMAR

SEQ ID NO: 15455 - protein, 201 aa, Streptomyces rapamycinicus
  REGION 1..201: note = tr|A0A0A0NAX9|A0A0A0NAX9_STRRN GTP cyclohydrolase 1; OS = Streptomyces rapamycinicus (strain ATCC 29253 / DSM 41530 / NRRL 5491 / AYB-994) OX=1343740 GN=folE PE=3 SV=1
MTDPVTLDGESPIGVFDEKRAENAIRELLIAVGEDPDREGLRETPGRVARAYKEIFAGLRQEPEDVLTTTFDLGHDEMVLVKDIEVMSSCEHHLVPFVGVAHVGYIPSHDGKITGLSKLARLVDVYARRPQVQERLTTQIADSLMRILEPRGVIVVVECEHMCMTMRGVRKPGAKTLTSAVRGQLRDPATRAEAMSLIMAR

SEQ ID NO: 15456 - protein, 218 aa, Streptomyces rapamycinicus
  REGION 1..218: note = tr|A0A0A0N6J9|A0A0A0N6J9_STRRN GTP cyclohydrolase 1; OS = Streptomyces rapamycinicus (strain ATCC 29253 / DSM 41530 / NRRL 5491 / AYB-994) OX=1343740 GN=folE PE=3 SV=1
MTELAPRATARIRPHDPEEPAPAGPALRVVHESGDIDLAAAEAAAGQFLNALGISTSSESLRGTPGRMARAYAELFSPRPFDLTTFPNDEGYDELVLARRIPVRSVCEHHLLPFVGTAHVGYLPGGRILGLSKLARVVEHFACRPQVQERLTKQVADWLQTHLEPKGVGVVIEAEHSCMTLRGVQATGSSTMTSTLLGLLRSDARSRAEFLALTGATS

SEQ ID NO: 15457 - protein, 201 aa, unidentified
  source 1..201: note = Streptomyces regalis
  REGION 1..201: note = tr|A0A0X3VD15|A0A0X3VD15_9ACTN GTP cyclohydrolase 1; OS = Streptomyces regalis OX=68262 GN=folE PE=3 SV=1
MTDPVTLDGEGFIGEFDEKRAENAVRELLIAVGEDPDREGLRETPARVARAYRELLAGHTQEPEDVLTTTFDIGHDEMVLVKDIEIVSLCEHHMLPFHGVAHIGYIPAESGKITGLSKLARLVEVFARRLQVQERLTTQVADSLMKILEARGVIVVIEAEHMCMSVRGIRKPGAKTTTSAVRGQLRDATTRAEAMSLILAR

SEQ ID NO: 15458 - protein, 201 aa, Streptomyces resistomycificus
  REGION 1..201: note = tr|A0A0L8LB89|A0A0L8LB89_9ACTN GTP cyclohydrolase 1; OS = Streptomyces resistomycificus OX=67356 GN=folE PE=3 SV=1
MTDPVTLDGVGSVGEFDEKRAENAVRELLIAVGEDPDREGLRETPARVARAYREIFAGLWQKPEDVLMTTFDLGHDEMVLVKDIEVYSTCEHHLVPFRGVAHVGYIPATSGKITGLSKLARLVDVYARRPQVQERLTTQIADSLMEILEPRGVIVVIECEHMCMSMRGIRKPGAKTITSAVRGQLRDATSRNEAMSLIMAR

SEQ ID NO: 15459 - protein, 196 aa, Streptomyces rimosus
  REGION 1..196: note = tr|A0A0M9XC35|A0A0M9XC35_STRRM GTP cyclohydrolase 1; OS = Streptomyces rimosus subsp. rimosus OX=132474; GN = ADK43_35850 PE=3 SV=1
MVKAAWERQEAVDVSVDAARLEELARQILIEIGEDPTREGLRETPRRYAKWWKEFVEYDAGKVDTLFESSTLGQTVMVSGMTVWSLCEHHLLPFSCDLTVAYKSGGVLLGLSKFARIAHKHAHKLQVQERLVVDIADEISDITGTDDLAVMGRGEHLCMTMRGIRTPSTMSSSIFRGVFDQSERARAELFAQLGVK

SEQ ID NO: 15460 - protein, 201 aa, Streptomyces rimosus; identical to SEQ ID NO: 9369
  REGION 1..201: note = tr|L8EQB8|L8EQB8_STRR1 GTP cyclohydrolase 1; OS = Streptomyces rimosus subsp. rimosus (strain ATCC 10970 / DSM 40260 / JCM 4667 / NRRL 2234) OX=1265868 GN=folE; PE = 3 SV= 1

SEQ ID NO: 15461 - protein, 201 aa, Streptomyces rochei; identical to SEQ ID NO: 15352
  REGION 1..201: note = tr|A0A510D517|A0A510D517_STRRO GTP cyclohydrolase 1; OS = Streptomyces rochei OX=1928 GN=folE PE=3 SV=1

SEQ ID NO: 15462 - protein, 201 aa, unidentified
  source 1..201: note = Streptomyces roseochromogenus
  REGION 1..201: note = tr|V6KDL4|V6KDL4_STRRC GTP cyclohydrolase 1; OS = Streptomyces roseochromogenus subsp. oscitans DS 12.976; OX = 1352936 GN=folE PE=3 SV=1
MTDPVTLDGEGRIGEFDEKRAENAVRELLIAVGEDPDREGLRETPARVARAYKEIFAGLWQKPEDVLTTTFDLGHDEMVLVKDIEVYSTCEHHLVPFRGVAHVGYIPSTTGKITGLSKLARLVDVFARRPQVQERLTTQIADSLMTILEPRGVIVVIECEHMCMSMRGIRKPGAKTITSAVRGQLRNVATRNEAMSLIMAR

SEQ ID NO: 15463 - protein, 202 aa, unidentified
  source 1..202: note = Streptomyces roseus
  REGION 1..202: note = tr|A0A0J6XWL5|A0A0J6XWL5_9ACTN GTP cyclohydrolase 1; OS = Streptomyces roseus OX=66430 GN=folE PE=3 SV=1
MTDPVTLTGDEGTIGEFDEKRAQAAVRELLIAVGEDPDREGLLETPARVARAYKEIFAGLYQKPEEVLTTTFDLGHDEMVLVKDIEVMSNCEHHLVPFHGVAHVGYIPSTDGKITGLSKLARLVDVYARRPQVQERLTTQIADSLMEILEPRGVIVVVECEHMCMTMRGVRKPGAKTITSAVRGQLRDPATRNEAMSLIMAR

SEQ ID NO: 15464 - protein, 201 aa, unidentified
  source 1..201: note = Streptomyces rubellomurinus
  REGION 1..201: note = tr|A0A0F2TLK2|A0A0F2TLK2_STRR3 GTP cyclohydrolase 1; OS = Streptomyces rubellomurinus (strain ATCC 31215); OX = 359131 GN=folE PE=3 SV=1
MIDPVTLDGPPAVGTFDQKRAENAIRELLLAVGEDPDREGLLETPARVARAYKEIFAGLWQEPEDVLTTTFDLGHDEMVLVKDIELTSVCEHHLVPFRGVAHVGYIPSTSGKITGLSKLARLVDVYARRPQVQERLTSQVADALMRILEPRGAIVVVECEHMCMSMRGIRKPGAKTITSCVRGQLRDPATRAEAMSLIIGR

SEQ ID NO: 15465 - protein, 202 aa, Streptomyces rubidus
  REGION 1..202: note = tr|A0A1H8DG87|A0A1H8DG87_9ACTN GTP cyclohydrolase 1; OS = Streptomyces rubidus OX=310780 GN=folE PE=3 SV=1
MTDPVTLLGATPAGEFDEKRAEAAVRELLIAVGEDPDREGLRETPARVARAYREIFAGLWQQPEDVLTTTFDLGHDEMVLVKDIEVMSSCEHHLVPFVGVAHVGYIPSTSGKITGLSKLARLVDVYARRPQVQERLTTQIADALMTILEPRGVIVVVECEHMCMTMRGVRKPGAKTLTSAVRGQLRDPATRSEAMSLIIGRG

SEQ ID NO: 15466 - protein, 201 aa, unidentified; identical to SEQ ID NO: 15328
  source 1..201: note = Streptomyces rubrolavendulae
  REGION 1..201: note = tr|A0A1D8G463|A0A1D8G463_9ACTN GTP cyclohydrolase 1; OS = Streptomyces rubrolavendulae OX=285473 GN=folE PE=3 SV=1

SEQ ID NO: 15467 - protein, 279 aa, unidentified
  source 1..279: note = Streptomyces rubrolavendulae
  REGION 1..279: note = tr|A0A1D8FZK7|A0A1D8FZK7_9ACTN Putative GTP cyclohydrolase 1 type 2 OS=Streptomyces rubrolavendulae; OX = 285473 GN=A4G23_01452 PE=4 SV=1
MPRLTEVLAELDALWPPERAEQWDAVGTVCGDPDAEIDRVLFAVDPVQEIAEEAIRLGAQLVVTHHPLYLRGTTSVAASHFKGRVVHTLIKHDIALHVAHTNADTADPGVSDALAGALGLRVIGPLVPENGLGRICELDPPETLAAFATRAAERLPATAQGVRVAGDPDATVRRVAVSGGSGDSLFDAVRAAGVDAFLTADLRHHPASEAVQYSPLGLVDAAHWATEWPWCELAAAQLDEISDRRGWNLRVHVSKTVTDPWAAHHTSSSAHHTSPGAPN

SEQ ID NO: 15468 - protein, 201 aa, Streptomyces scabiei
  REGION 1..201: note = tr|C9Z0U3|C9Z0U3_STRSW GTP cyclohydrolase 1; OS = Streptomyces scabiei (strain 87.22) OX=680198 GN=folE; PE = 3 SV=1
MTDPVTLDGGGAIGEFDEKRAENAVRELLIAVGEDPDREGLKETPARVARAYQEIFAGLWQQPEDVLTTTFDLGHDEMVLVKDIEVYSTCEHHLVPFRGVAHVGYIPSTSGKITGLSKLARLVDVYARRPQVQERMTTQIADSLMEILEPRGVIVVVECEHMCMSMRGIRKPGAKTITSAVRGQLRDAATRNEAMSLIMAR

SEQ ID NO: 15469 - protein, 201 aa, Streptomyces scabiei
  REGION 1..201: note = tr|A0A100JWB5|A0A100JWB5_STRSC GTP cyclohydrolase 1; OS = Streptomyces scabiei OX=1930 GN=folE PE=3 SV=1
MTDPVTLDGGGTIGEFDEKRAENAVRELLIAVGEDPDREGLKETPARVARAYQEIFAGLWQKPEDVLTTTFDLGHDEMVLVKDIEVYSTCEHHLVPFRGVAHVGYIPSTSGKITGLSKLARLVDVYARRPQVQERMTTQIADSLMEILEPRGVIVVVECEHMCMSMRGIRKPGAKTITSAVRGQLRDAATRNEAMSLIMAR

SEQ ID NO: 15470 - protein, 202 aa, Streptomyces scabrisporus
  REGION 1..202: note = tr|A0A1T3P087|A0A1T3P087_9ACTN GTP cyclohydrolase 1; OS = Streptomyces scabrisporus OX=159449 GN=folE PE=3 SV=1
MTIDPVTFDGRPAVGEFDQDRAERAVRELLLAVGENPDREGLKDTPARVARSYREIFAGLRQEPEDVLTTTFDLGHDELVLVKDIEVYSTCEHHLVTFHGVAHVGYIPSEDGQITGLSKLARLVDVYAKRPQVQERLTTQIADALVNILRPRGVIVVVECEHLCMTMRGIRKPGARTLTSAVRGQLLNAATRAEAMSLILSR

SEQ ID NO: 15471 - protein, 201 aa, Streptomyces scopuliridis
  REGION 1..201: note = tr|A0A2T7TAZ9|A0A2T7TAZ9_9ACTN GTP cyclohydrolase 1; OS = Streptomyces scopuliridis RB72 OX=1440053 GN=folE PE=3; SV = 1
MTDPVMLDGESPIREFDEKRAENAVRELLIAVGEDPDREGLRATPGRVARAYREIFAGLWQTPEEVLTTTFDIGHDEMVLVKDIEVMSSCEHHLVPFVGVAHVGYIPSSDGKITGLSKLARLVDVFARRPQVQERLTTQIADSLMEILDPRGVIVVVECEHMCMTMRGVRKPGAKTITSAVRGQLRVPATRAEAMSLIMAR

SEQ ID NO: 15472 - protein, 205 aa, Streptomyces sedi
  REGION 1..205: note = tr|A0A5C4UXG9|A0A5C4UXG9_9ACTN GTP cyclohydrolase 1; OS = Streptomyces sedi OX=555059 GN=folE PE=3 SV=1
MTDPVSWTGGERAPGRIGAFDEKRAENAVRELLLAVGEDPDREGLRDTPARVARAYREIFAGLWQRPEDVLTTTFDLGHDEMVLVKDIEVMSTCEHHLVPFVGVAHIGYIPSGSGKITGLSKLARLVDVFARRPQVQERLTTQVADSMMRILEPRGVIVVMECEHMCMTMRGVRKPGAKTTTSAVRGQLRTPATRAEAMSLILAR

SEQ ID NO: 15473 - protein, 211 aa, Streptomyces sedi
  REGION 1..211: note = tr|A0A5C4ULR9|A0A5C4ULR9_9ACTN GTP cyclohydrolase I FolE OS=Streptomyces sedi OX=555059 GN=folE PE=4 SV=1
MTSFATGSTPDPSLAPTTNRAIAAIDTGRVAGLISQLLVELGEDPSREGLLGTPHRIAAWWSTFLSPGDAAPAACFAESRVSDQLVVVGGMSVWSLCEHHLLPMNLHVTAGYVPEGEMVGLSKFGRTARHFAGRLQVQERFTRQFAEHLAGVIGREDVAVAVRGTHLCMNMRGVRMEDARTTTVHTGGRFRSDPALNQQFLTLAAARWNAA

SEQ ID NO: 15474 - protein, 201 aa, Streptomyces seoulensis
  REGION 1..201: note = tr|A0A4P6TYG9|A0A4P6TYG9_STRSO GTP cyclohydrolase 1; OS = Streptomyces seoulensis OX=73044 GN=folE PE=3 SV=1
MTDPVTLAGDGTIGEFDEKRAENAVRELLIAVGEDPDREGLLDTPARVARAYREIFSGLRQRAEDVLTTTFDLGHDEMVLVKDIEVYSTCEHHLVPFRGVAHVGYIPSVTGKITGLSKLARLVDVYARRPQVQERLTTQIADSLMEILEPRGVIVVIECEHMCMSMRGIRKPGAKTITSAVRGQLRDATTRNEAMSLIMAR

SEQ ID NO: 15475 - protein, 201 aa, unidentified
  source 1..201: note = Streptomyces shenzhenensis
  REGION 1..201: note = tr|A0A3M0I4J1|A0A3M0I4J1_9ACTN GTP cyclohydrolase 1; OS = Streptomyces shenzhenensis OX=943815 GN=folE PE=3 SV=1
MTDPVTLDGEGTIGEFDEKRAENAVRELLIAVGEDPDREGLRETPARVARAYRELLAGLKQEPEDVLTTTFDLGHDEMVLVKDIEIVSLCEHHLLPFHGVAHVGYIPAESGKITGLSKLARLVEVFARRLQVQERLTTQIADSLVRILEARGVIVVIEAEHMCMSVRGIRKPGAKTTTSAVRGQLRDATTRAEAMSLILAR

SEQ ID NO: 15476 - protein, 201 aa, unidentified
  source 1..201: note = Streptomyces silvensis
  REGION 1..201: note = tr|A0A0W7WYD2|A0A0W7WYD2_9ACTN GTP cyclohydrolase 1; OS = Streptomyces silvensis OX=1765722 GN=folE PE=3 SV=1
MTDPVTLDGEGSIGEFDEKRAENAVRELLIAVGEDPDREGLRETPGRVARAYREIFAGLWQKPEDVLTTTFDLGHDEMVLVKDIEVTSCCEHHLVPFRGVAHVGYIPAATGKITGLSKLARLVDVYARRPQVQERMTTQIADSLMDILEPRGVIVVVECEHMCMSMRGIRKPGAKTITSAVRGQLRDAATRNEAMSLIMAH

SEQ ID NO: 15477 - protein, 201 aa, Streptomyces sioyaensis
  REGION 1..201: note = tr|A0A4Q1QLV9|A0A4Q1QLV9_9ACTN GTP cyclohydrolase 1; OS = Streptomyces sioyaensis OX=67364 GN=folE PE=3 SV=1
MTDPVTLDVDGKLGTFDEKRAENAVRELLIAVGEDPDREGLLETPARVARAYKEIFAGLWQKPEDVLTTTFDLGHDEMVLVKDIELVSSCEHHLVPFVGVAHVGYIPSADGKITGLSKLARLVDVFARRPQVQERLTTQIADSLMEILEPRGVIVVIECEHMCMTMRGVRKPGAKTTTSAVRGQLRDAATRAEAMSLILAR

SEQ ID NO: 15478 - protein, 201 aa, Streptomyces sp.
  REGION 1..201: note = tr|A0A5C8Q3H0|A0A5C8Q3H0_9ACTN GTP cyclohydrolase 1; OS = Streptomyces sp. IB2014 016-6 OX=2517818 GN=folE PE=3; SV = 1
MTNPVKLDGEGVIGDFDEKRAENAVRELLIAVGEDPDREGLRETPGRVARSYREIFAGLWQRPEEVLTTTFDIGHDEMVLVKDIEVQSSCEHHLVPFHGVAHVGYIPSADGKITGLSKLARLVDVFARRPQVQERMTTQIADSLMKILEPRGVIVVVECEHMCMSMRGVRKPGAKTITSAVRGQLRDQVTRNEAMSLIMAR

SEQ ID NO: 15479 - protein, 201 aa, Streptomyces sp.
  REGION 1..201: note = tr|A0A1Q5NDI9|A0A1Q5NDI9_9ACTN GTP cyclohydrolase 1; OS = Streptomyces sp. CB02488 OX=1703920 GN=folE PE=3 SV=1
MTDPVTLDGQEPIGEFDEKRAAAAVRELLIAVGEDPDREGLRETPGRVARAYQEIFAGLYQAPEDVLTTTFDLGHDEMVLVKDIEVYSTCEHHLVPFHGVAHVGYIPATSGKITGLSKLARLVDVYARRPQVQERLTTQIAESLMTILEPRGVIVVVECEHMCMSMRGIRKPGAKTLTSAVRGQLRDPATRAEAMSLIMAR

SEQ ID NO: 15480 - protein, 218 aa, Streptomyces sparsogenes
  REGION 1..218: note = tr|A0A1R1SBT6|A0A1R1SBT6_9ACTN GTP cyclohydrolase 1; OS = Streptomyces sparsogenes DSM 40356 OX=1331668 GN=folE; PE = 3 SV=1
MTERPHRTATRIDPHDEETTVPARPALRVVHQPADIDLEAAEEAAGRFLTALGISTDSESLRGTPGRMARAYAELFSPRAFDLTTFPNDEGYDELVLARRIPVRSVCEHHLLPFVGTAHVGYLPGARILGLSKLARVVEHFACRPQVQERLTKQVADWLQTHLEPKGVGVVIEAEHSCMTLRGVQATGSSTMTSTLLGLLRSDARSRSEFLALTGATS

SEQ ID NO: 15481 - protein, 201 aa, Streptomyces sparsogenes
  REGION 1..201: note = tr|A0A1R1SJJ1|A0A1R1SJJ1_9ACTN GTP cyclohydrolase 1; OS = Streptomyces sparsogenes DSM 40356 OX=1331668 GN=folE; PE = 3 SV=1
MTDPITLDGEVPLGVFDEKRAERAIRELLIAVGEDPEREGLRETPARVARAYREIFAGLWQKPEEVLTTTFDLGHDEMVLVKDIEVMSSCEHHLVPFVGVAHVGYIPSSDGKITGLSKLARLVDVYARRPQVQERLTTQIADSLMRILEPRGVIVVVECEHMCMTMRGVRKPGAKTLTSAVRGQLHDPATRAEAMSLIMAR

SEQ ID NO: 15482 - protein, 201 aa, Streptomyces spectabilis
  REGION 1..201: note = tr|A0A516RB79|A0A516RB79_STRST GTP cyclohydrolase 1; OS = Streptomyces spectabilis OX=68270 GN=folE PE=3 SV=1
MTDPVTLAGEGSIGEFDEKRAENAVRELLIAVGEDPDREGLRDTPARVARAYREILSGLRQEPEDVLTTTFDLGHDEMVLVKDIEIVSLCEHHLLPFHGVAHVGYIPADSGKITGLSKLARLVDVYARRPQVQERLTTQIADSLMRILEARGAIVVVEAEHMCMSVRGIRKPGAKTTTSAVRGQLRDATTRAEAMSLILAR

SEQ ID NO: 15483 - protein, 201 aa, Streptomyces spinoverrucosus
  REGION 1..201: note = tr|A0A4Y3VSW6|A0A4Y3VSW6_9ACTN GTP cyclohydrolase 1; OS = Streptomyces spinoverrucosus OX=284043 GN=folE PE=3 SV=1
MTDPVTLDGEGTIGEFDEKRAENAIRELLIAVGEDPDREGLRETPARVARAYKEIFAGLWQQPEDVLTTTFDIGHDEMVLVKDIEVYSTCEHHLVPFRGVAHVGYIPSTSGKITGLSKLARLVDVYARRPQVQERLTTQIADSLMEILEPRGVIVVVECEHMCMSMRGIRKPGAQTITSAVRGQLRDAATRNEAMSLIMAR

SEQ ID NO: 15484 - protein, 201 aa, unidentified
  source 1..201: note = Streptomyces spongiicola
  REGION 1..201: note = tr|A0A2S1Z2H4|A0A2S1Z2H4_9ACTN GTP cyclohydrolase 1; OS = Streptomyces spongiicola OX=1690221 GN=folE PE=3 SV=1
MTDPVTLDGEGSIGEFDEKRAENAVRELLIAVGEDPDREGLRETPSRVARAYREIFAGLWQQPEDVLTTTFDLGHDEMVLVKDIELVSCCEHHLVPFRGVAHVGYIPSTTGKITGLSKLARLVDVFARRPQVQERLTTQIADSLMEILEPRGVIVVIECEHMCMSMRGIRKPGAKTITSAVRGQLRDVATRNEAMSLIMAR

SEQ ID NO: 15485 - protein, 201 aa, Streptomyces stelliscabiei; identical to SEQ ID NO: 15285
  REGION 1..201: note = tr|A0A0L0JTE4|A0A0L0JTE4_9ACTN GTP cyclohydrolase 1; OS = Streptomyces stelliscabiei OX=146820 GN=folE PE=3 SV=1

SEQ ID NO: 15486 - protein, 202 aa, Streptomyces subrutilus
  REGION 1..202: note = tr|A0A1E5PSK7|A0A1E5PSK7_9ACTN GTP cyclohydrolase 1; OS = Streptomyces subrutilus OX=36818 GN=folE PE=3 SV=1
MTDPVTLTGEEGTIGVFDEKRAEAAVRELLIAVGEDPEREGLLETPARVARAYREILAGLWQQPEDVLTTTFDIGHDEMVLVKGIEIVSLCEHHLLPFHGIAHVGYIPAETGKITGLSKLARLVDVFARRPQVQERLTTQIADSLMRILEARGAIVVIEAEHMCMSVRGIRKPGAKTTTSAVRGQLRDPATRSEAMSLIMAR

SEQ ID NO: 15487 - protein, 201 aa, unidentified
  source 1..201: note = Streptomyces sviceus
  REGION 1..201: note = tr|B5HYD9|B5HYD9_9ACTN GTP cyclohydrolase 1; OS = Streptomyces sviceus ATCC 29083 OX=463191 GN=folE PE=3; SV = 1
MTDPVTLDSDGSIGEFDEKRAENAVRELLIAVGEDPDREGLRETPGRVARAYREIFAGLWQKPEDVLTTTFDIGHDEMVLVKDIEVYSTCEHHLVPFRGVAHVGYIPATTGKITGLSKLARLVDVYARRPQVQERLTTQIADSLMEILEPRGVIVVVECEHMCMSMRGIRKPGAKTLTSAVRGQLRDAATRNEAMSLIMAR

SEQ ID NO: 15488 - protein, 201 aa, unidentified
  source 1..201: note = Streptomyces swartbergensis
  REGION 1..201: note = tr|A0A243RYH2|A0A243RYH2_9ACTN GTP cyclohydrolase 1; OS = Streptomyces swartbergensis OX=487165 GN=folE PE=3 SV=1
MTDPVTLDGEGQIGEFDEKRAENAVRELLIAVGEDPDREGLRETPARVARAYKEIFAGLWQKPEDVLTTTFDIGHDELVLVKDIEVYSTCEHHLVPFRGVAHVGYIPATSGKITGLSKLARLVDVYARRPQVQERLTTQIADSLMEILEPRGVIVVVECEHMCMSMRGIRKPGAKTLTSAVRGQLRDAATRNEAMSLIMAR

SEQ ID NO: 15489 - protein, 183 aa, unidentified
  source 1..183: note = Streptomyces swartbergensis
  REGION 1..183: note = tr|A0A243RKS7|A0A243RKS7_9ACTN GTP cyclohydrolase 1; OS = Streptomyces swartbergensis OX=487165 GN=folE PE=3 SV=1
MDLAEAERAAARFLAALGIDTSTESLLGTPGRMARAYAELFSPRPFDLTTFPNDEGYDELVLARSIPVRSVCEHHLLPFTGTAHVGYLPGHRILGLSKLARVVEHFACRPQVQERLTKQVADWLHAHLEPKGVGVVIEAEHTCMTLRGVQATGSSTLTSTLLGTLRHDARSRAEFLSLAGLHS

SEQ ID NO: 15490 - protein, 201 aa, Streptomyces tateyamensis
  REGION 1..201: note = tr|A0A2V4NIF8|A0A2V4NIF8_9ACTN GTP cyclohydrolase 1; OS = Streptomyces tateyamensis OX=565073 GN=folE PE=3 SV=1
MTDPVTLDGQATVGTFDQKRAENAIRELLIAVGEDPEREGLRETPARVARAYKEIFAGLWQQAEDVLTTTFDLGHDELVLVRDIELVSTCEHHLLTFHGVAHIGYIPSTSGKITGLSKLARLVDVYARRPQVQERLTTQIADSLMRVLEPRGAIVVVEAEHMCMTVRGIRKPGAKTLTSAVRGQLRDPATRAEAMSLIIGR

SEQ ID NO: 15491 - protein, 194 aa, Streptomyces thermoautotrophicus
  REGION 1..194: note = tr|A0A132MLB6|A0A132MLB6_9ACTN GTP cyclohydrolase 1; OS = Streptomyces thermoautotrophicus OX=1469144 GN=folE; PE = 3 SV=1
MPDQALRPFDEARAEAAVRELLIAIGEDPDREGLRDTPRRVARAYREMFAGLWQRPEDVLTTTFDLGHDEMVLVKDIEVFSMCEHHLVPFHGVAHVGYVPSEEGRITGLSKLARLVEVYARRPQVQERMTSQIADALMRILQPRGVIVVIECEHLCMSMRGIRKPGSKTITSAVRGQLRDPATRAEAMSLILEN

SEQ ID NO: 15492 - protein, 202 aa, Streptomyces thermoautotrophicus
  REGION 1..202: note = tr|A0A132NF57|A0A132NF57_9ACTN GTP cyclohydrolase 1; OS = Streptomyces thermoautotrophicus OX=1469144 GN=folE; PE = 3 SV=1
MPDAAQRRPVLQVVRDHGERDLAAAERAAAEFLTALGVELDRESLRDTPRRMAQAYAELLTPRPFNLTTFPNEEGYDQLVLAREIPVRSVCEHHLLPFVGVAHVAYLPGERILGLSKLARVVELFAHGPQVQERLTKQVADWLAEHLRPKGVGVVLEAEHLCMTLRGVRAAGTKTITSALHGTLREDSRSRQEFFSLVGVTP

SEQ ID NO: 15493 - protein, 201 aa, unidentified
  source 1..201: note = Streptomyces thermolilacinus
  REGION 1..201: note = tr|A0A1D3DRU9|A0A1D3DRU9_9ACTN GTP cyclohydrolase 1; OS = Streptomyces thermolilacinus SPC6 OX=1306406 GN=folE; PE = 3 SV=1
MTDAVTLDGEGTIGEFDEKRAENAVRELLIAVGEDPDREGLRETPARVARAYKEIFAGLWQEPEDVLTTTFDLGHDEMVLVKDIEVFSTCEHHLVPFRGVAHVGYIPSTSGKITGLSKLARLVDVYARRPQVQERLTTQIADSLMKILEPRGVIVVIECEHMCMSMRGIRKPGAKTLTSAVRGQLRDMATRAEAMSLIMAN

SEQ ID NO: 15494 - protein, 201 aa, unidentified
  source 1..201: note = Streptomyces tirandamycinicus
  REGION 1..201: note = tr|A0A2S1SV16|A0A2S1SV16_9ACTN GTP cyclohydrolase 1; OS = Streptomyces tirandamycinicus OX=2174846 GN=folE PE=3; SV = 1
MTDPVTLDGEGTIGEFDEKRAENAVRELLIAVGEDPDREGLRETPARVARAYREIFAGLWQQPEDVLTTTFDLGHDEMVLVKDIELVSCCEHHLVPFRGVAHVGYIPSTTGKITGLSKLARLVDVFARRPQVQERLTTQIADSLMEILEPRGVIVVIECEHMCMSMRGIRKPGAKTITSAVRGQLRDVATRNEAMSLIMAR

SEQ ID NO: 15495 - protein, 201 aa, unidentified
  source 1..201: note = Streptomyces toyocaensis
  REGION 1..201: note = tr|A0A081XSB7|A0A081XSB7_STRTO GTP cyclohydrolase 1; OS = Streptomyces toyocaensis OX=55952 GN=folE PE=3 SV=1
MTDPVTLDGIAPVGEFDEQRARNAVRELLIAVGEDPDREGLLETPARVARAYREIFAGLWQKPEDVLTTTFDIGHDEMVLVKDIEVYSTCEHHLVPFRGVAHVGYIPSTSGKITGLSKLARLVDVYARRPQVQERLTTQIADSLMEILEPRGVIVVVECEHMCMSMRGIRKPGAKTITSAVRGQLRDAATRNEAMSLIMAR

SEQ ID NO: 15496 - protein, 201 aa, unidentified
  source 1..201: note = Streptomyces tsukubensis
  REGION 1..201: note = tr|A0A1V4A583|A0A1V4A583_9ACTN GTP cyclohydrolase 1; OS = Streptomyces tsukubensis OX=83656 GN=folE PE=3 SV=1
MTDAVTLDGEGSIGEFDEKRAADAVRELLLAVGEDPDREGLRETPARVARAYKEIFAGLWQKPEDVLTTTFDLGHDEMVLVKDIEVQSSCEHHLVPFVGVAHVGYIPSADGKITGLSKLARLVDVYARRPQVQERLTTQIAESLMEILEPRGVIVVVECEHMCMSMRGVRKPGAKTITSAVRGQLRDPATRNEAMSLIMAR

SEQ ID NO: 15497 - protein, 202 aa, unidentified
  source 1..202: note = Streptomyces tsukubensis
  REGION 1..202: note = tr|I2N3M3|I2N3M3_STRT9 GTP cyclohydrolase 1; OS = Streptomyces tsukubensis (strain DSM 42081 / NBRC 108919 / NRRL 18488 / 9993) OX=1114943 GN=folE PE=3 SV=1
MTDPVTLDGDAHPIGEFDEKRAENAIRELLIAVGEDPDREGLLETPARVARAYREIFAGLWQRPEDVLTTTFDLGHDEMVLVKDIEVMSSCEHHLVPFVGVAHVGYIPSADGKITGLSKLARLVDVFARRPQVQERLTTQIADSLMEILEPRGVIVVVECEHMCMTMRGVRKPGAKTITSAVRGQLRDPATRAEAMSLIMAR

SEQ ID NO: 15498 - protein, 201 aa, Streptomyces turgidiscabies
  REGION 1..201: note = tr|L7FAQ6|L7FAQ6_9ACTN GTP cyclohydrolase 1; OS = Streptomyces turgidiscabies Car8 OX=698760 GN=folE PE=3; SV = 1
MTDPVTLDGEGTIGVFDEKRAASAVRELLIAVGEDPDREGLRETPGRVARAYREIFAGLWQRPEDVLTTTFDLGHDEMVLVKDIEVLSSCEHHLVPFVGVAHVGYIPSVDGKITGLSKLARLVDVYARRPQVQERLTTQVADSLMKILEPRGVIVVVECEHMCMSMRGVRKPGAKTITSAVRGQLRDPATRNEAMSLIMAR

SEQ ID NO: 15499 - protein, 201 aa, unidentified
  source 1..201: note = Streptomyces uncialis
  REGION 1..201: note = tr|A0A1Q4UXS0|A0A1Q4UXS0_9ACTN GTP cyclohydrolase 1; OS = Streptomyces uncialis OX=1048205 GN=folE PE=3 SV=1
MTDPVTLGGERTIGEFDEKRAENAIRELLFAIGEDPDREGLLDTPARVARAYREILAGLWQQPEDVLTTTFDIGHDEMVLVKDIEIVSLCEHHLLPFHGVAHVGYIPAESGKITGLSKLARLVEVFARRPQVQERLTTQVADSLMRILEARGAIVVIEAEHMCMSVRGIRKPGAKTTTSAVRGQLRDSTTRAEAMSLILAR

SEQ ID NO: 15500 - protein, 201 aa, Streptomyces variegatus
  REGION 1..201: note = tr|A0A0M2GP15|A0A0M2GP15_9ACTN GTP cyclohydrolase 1; OS = Streptomyces variegatus OX=284040 GN=folE PE=3 SV=1
MTDPVTLDGEGTIGEFDEKRAENAVRELLIAVGEDPDREGLRETPSRVARAYKEIFAGLWQQPEDVLTTTFDIGHDEMVLVKDIEVYSTCEHHLVPFRGVAHVGYIPSTSGKITGLSKLARLVDVYARRPQVQERLTTQIADSLMEILEPRGVIVVVECEHMCMSMRGIRKPGAKTLTSAVRGQLRDMATRNEAMSLIMAR

SEQ ID NO: 15501 - protein, 140 aa, Streptomyces varsoviensis
  REGION 1..140: note = tr|A0A0L8QFI7|A0A0L8QFI7_9ACTN GTP cyclohydrolase 1 (Fragment) OS=Streptomyces varsoviensis OX=67373; GN = ADK38_33925 PE=3 SV=1
EPQDVLTTTFDLGHDEMVLVRDIEVFSTCEHHLVPFHGVAHVGYIPATSGKITGLSKLARLVDVFARRPQVQERLTTQIADSMMEILEPRGAIVVIECEHMCMSMRGIRKPGAKTLTSAVRGQLRDPATRSEAMSLIIGR

SEQ ID NO: 15502 - protein, 201 aa, Streptomyces venezuelae
  REGION 1..201: note = tr|F2RA59|F2RA59_STRVP GTP cyclohydrolase 1; OS = Streptomyces venezuelae (strain ATCC 10712 / CBS 650.69 / DSM 40230 / JCM 4526 / NBRC 13096 / PD 04745) OX=953739; GN = f olE PE=3 SV=1
MTDPVTLDGEGTIGEFDEKRAEAAVRELLIAVGEDPDREGLRETPARVARAYKEIFAGLWQVPEGVLTTTFDLGHDEMVLVKDIEVYSTCEHHLVPFRGVAHVGYIPSTSGKITGLSKLARLVDVYARRPQVQERLTTQVADSLMDILEPRGVIVVFECEHMCMSMRGIRKPGAKTITSAVRGQLRDPATRAEAMSLIMAR

SEQ ID NO: 15503 - protein, 201 aa, Streptomyces venezuelae
  REGION 1..201: note = tr|A0A0M7QTZ6|A0A0M7QTZ6_STRVZ GTP cyclohydrolase 1; OS = Streptomyces venezuelae OX=54571 GN=folE PE=3 SV=1
MTDPVTLDGEGTIGEFDEKRAENAVRELLIAVGEDPDREGLRETPARVARAYQEIFAGLRQQPEDVLTTTFDLGHDEMVLVKDIEVYSTCEHHLVPFRGVAHVGYIPSTSGKITGLSKLARLVDVYARRPQVQERLTTQVADSLMEILEPRGVIVVFECEHMCMSMRGIRKPGAKTITSAVRGQLRDPATRAEAMSLIMAR

SEQ ID NO: 15504 - protein, 201 aa, Streptomyces vietnamensis
  REGION 1..201: note = tr|A0A0B5HZL4|A0A0B5HZL4_9ACTN GTP cyclohydrolase 1; OS = Streptomyces vietnamensis OX=362257 GN=folE PE=3 SV=1
MTDPVTLDGEGTIGEFDEKRAENAVRELLIAVGEDPDREGLRETPARVARAYKEIFAGLWQQPEDVLTTTFDLGHDEMVLVKDIEVYSTCEHHLVPFRGVAHVGYIPSTSGKITGLSKLARLVDVYARRPQVQERLTTQVADSLMEMLEPRGVIVVFECEHMCMSMRGIRKPGAKTITSAVRGQLRDPATRAEAMSLIMAH

SEQ ID NO: 15505 - protein, 202 aa, Streptomyces vinaceus
  REGION 1..202: note = tr|A0A5J6JEW1|A0A5J6JEW1_STRVI GTP cyclohydrolase I FolE OS=Streptomyces vinaceus OX=1960 GN=folE PE=4 SV=1
MTDPVTLTGDEGTIGEFDEKRAQAAVRELLIAVGEDPDREGLLETPARVARAYREILAGLRQEPEDVLTTTFDLGHDEMVLVKDIEIVSLCEHHLLPFHGVAHVGYIPAESGKITGLSKLARLVEVYARRPQVQERLTTQIADSLMRILEARGAIVVIEAEHMCMSVRGIRKPGAKTTTSAVRGQLRDPATRSEAMSLIIAR

SEQ ID NO: 15506 - protein, 201 aa, Streptomyces violaceoruber
  REGION 1..201: note = tr|A0A1V0UEE6|A0A1V0UEE6_STRVN GTP cyclohydrolase 1; OS = Streptomyces violaceoruber OX=1935 GN=folE PE=3 SV=1
MTDPVTLDGEGPIGAFDEKRAEAAVRELLLAVGEDPDREGLRETPGRVARAYKEIFAGLYQQPEDVLTTTFDLGHDEMVLVKDIEVFSTCEHHLVPFRGVAHVGYIPASTGKITGLSKLARLVDVYARRPQVQERLTTQIAESLMSILEPRGVIVVVECEHMCMSMRGIRKPGAKTLTSAVRGQLRDPATRAEAMSLIMAR

SEQ ID NO: 15507 - protein, 201 aa, Streptomyces violaceusniger
  REGION 1..201: note = tr|A0A0X3XC89|A0A0X3XC89_STRVO GTP cyclohydrolase 1; OS = Streptomyces violaceusniger OX=68280 GN=folE PE=3 SV=1
MTDPVTLDGESPIGVFDEKRAENAIRELLIAVGEDPDREGLRETPGRVARAYKEIFAGLRQEPEDVLTTTFDLGHDEMVLVKDIEVMSSCEHHLVPFVGVAHVGYIPSHDGKITGLSKLARLVDVFARRPQVQERLTTQIAESLMRILEPRGVIVVVECEHMCMTMRGVRKPGAKTLTSAVRGQLRDPATRAEAMSLIMAR

SEQ ID NO: 15508 - protein, 201 aa, Streptomyces violaceusniger
  REGION 1..201: note = tr|G2P1D7|G2P1D7_STRVO GTP cyclohydrolase 1; OS = Streptomyces violaceusniger Tu 4113 OX=653045 GN=folE; PE = 3 SV=1
MTDPVTLDGESPIGVFDEKRAENAIRELLIAVGEDPDREGLRETPGRVARAYKEIFAGLRQEPEDVLTTTFDLGHDEMVLVKDIEVMSSCEHHLVPFVGVAHVGYIPSHDGKITGLSKLARLVDVFARRPQVQERLTTQVAESLMRILEPRGVIVVVECEHMCMTMRGVRKPGAKTLTSAVRGQLRDPATRAEAMSLIMAR

SEQ ID NO: 15509 - protein, 202 aa, Streptomyces virginiae
  REGION 1..202: note = tr|A0A0L8M627|A0A0L8M627_STRVG GTP cyclohydrolase 1; OS = Streptomyces virginiae OX=1961 GN=folE PE=3 SV=1
MTDPVTLTGDEGTIGVFDEKRAEAAVRELLIAVGEDPDREGLLETPARVARAYKEIFAGLYQTPEEVLTTTFDLGHDEMVLVKDIEVMSSCEHHLVPFHGVAHVGYIPSTDGKITGLSKLARLVDVFARRPQVQERLTTQIADSLMEILEPRGAIVVIECEHMCMTMRGVRKPGAKTITSAVRGQLRDPATRNEAMSLIMAR

SEQ ID NO: 15510 - protein, 201 aa, unidentified; identical to SEQ ID NO: 9368
  source 1..201: note = Streptomyces viridifaciens
  REGION 1..201: note = tr|A0A1L9DLL5|A0A1L9DLL5_STRVF GTP cyclohydrolase 1; OS = Streptomyces viridifaciens OX=48665 GN=folE PE=3 SV=1

SEQ ID NO: 15511 - protein, 201 aa, Streptomyces viridochromogenes
  REGION 1..201: note = tr|D9X5B9|D9X5B9_STRVT GTP cyclohydrolase 1; OS = Streptomyces viridochromogenes (strain DSM 40736 / JCM 4977 / BCRC 1201 / Tue 494) OX=591159 GN=folE PE=3 SV=1
MTDPVTLDGEGQIGEFDEKRAENAVRELLIAVGEDPNREGLRETPARVARAYRELLAGLRQEPEDVLTTTFDLGHDEMVLVKDIEIVSLCEHHLLPFHGVAHVGYIPAETGKITGLSKLARLVEVFARRPQVQERLTTQIADSLMKILEARGAIVVIEAEHMCMSVRGIRKPGAKTTTSAVRGQLRDATTRAEAMSLILAR

SEQ ID NO: 15512 - protein, 201 aa, Streptomyces viridochromogenes
  REGION 1..201: note = tr|A0A0L8JKT7|A0A0L8JKT7_STRVR GTP cyclohydrolase 1; OS = Streptomyces viridochromogenes OX=1938 GN=folE PE=3 SV=1
MTDPVTLDGEGTIGEFDEKRAENAVRELLIAVGEDPDREGLRETPARVARAYRELLAGMRQEPEDVLTTTFDLGHDEMVLVKDIELVSFCEHHLLPFHGVAHVGYIPAESGKITGLSKLARLVDVFARRPQVQERLTTQIADSLMKILEARGAIVVIEAEHMCMSLRGIRKPGAKTTTSAVRGQLRDATTRAEAMSLILAR

SEQ ID NO: 15513 - protein, 202 aa, Streptomyces viridosporus
  REGION 1..202: note = tr|A0A5J6FYN5|A0A5J6FYN5_STRVD GTP cyclohydrolase I FolE OS=Streptomyces viridosporus T7A OX=665577 GN=folE; PE = 4 SV=1
MTNPVTLDDGTVPIGEFDEKRAENAVRELLIAIGEDPDREGLLETPARVARAYRELLAGLRQEPEDVLTTTFDLGHDEMVLVKDIEIVSLCEHHMLPFHGVAHVGYIPAETGKITGLSKLARLVEVFARRLQVQERLTTQVADSLMRILEARGVIVVIEAEHMCMSVRGVRKPGAKTTTSAVRGQLRDATTRAEAMSLILAR

SEQ ID NO: 15514 - protein, 202 aa, Streptomyces viridosporus; identical to SEQ ID NO: 15513
  REGION 1..202: note = tr|D6A7L5|D6A7L5_STRV1 GTP cyclohydrolase 1; OS = Streptomyces viridosporus (strain ATCC 14672 / DSM 40746 / JCM 4963 / KCTC 9882 / NRRL B-12104 / FH 1290); OX = 566461 GN =folE PE=3 SV=1

SEQ ID NO: 15515 - protein, 201 aa, Streptomyces vitaminophilus
  REGION 1..201: note = tr|A0A0T6LS49|A0A0T6LS49_9ACTN GTP cyclohydrolase 1; OS = Streptomyces vitaminophilus OX=76728 GN=folE PE=3 SV=1
MTDPVTLDGSQGAAGVFDHERVENAVRELLIAVGEDPDRDGLRDTPARVARSYKEIFAGLWQDPHDVLTTTFDLGHDEMVLVKDIEVFSMCEHHLLPFHGVAHIGYIPASSGKITGLSKLARLVDVYARRPQVQERLTTQIADSLVSILEARGVIVVIECEHMCMSLRGIRKPGAKTTTSAVRGQLRDATSRAEAMSLILG

SEQ ID NO: 15516 - protein, 201 aa, unidentified
  source 1..201: note = Streptomyces wuyuanensis
  REGION 1..201: note = tr|A0A1H0BHE4|A0A1H0BHE4_9ACTN GTP cyclohydrolase 1; OS = Streptomyces wuyuanensis OX=1196353 GN=folE PE=3 SV=1
MTDPVTLDGEGTIGEFDEKRAENAVRELLIAVGEDPDREGLKETPARVARAYKEIFAGLWQQPEDVLTTTFDLGHDEMVLVKDIELVSCCEHHLVPFRGVAHVGYIPSTTGKITGLSKLARLVDVFARRPQVQERLTTQIADSLMEILEPRGVIVVIECEHMCMSMRGIRKPGAKTITSAVRGQLRDVATRNEAMSLIMAR

SEQ ID NO: 15517 - protein, 200 aa, Streptomyces xiamenensis
  REGION 1..200: note = tr|A0A0F7FV26|A0A0F7FV26_9ACTN GTP cyclohydrolase 1; OS = Streptomyces xiamenensis OX=408015 GN=folE PE=3 SV=1
MTDPVTAQAGQMGTFDEKRAENAIRELLIAVGEDPDREGLRDTPARVARAYREIFAGLWQEPEDVLTTTFDLGHDEMVLVKDIEVMSSCEHHLVPFVGKAHVGYIPSSSGKITGLSKLARLVDVFARRPQVQERLTTQIADSLMRILEPRGVIVVVECEHMCMTMRGVRKPGAKTTTSAVRGQLRDAATRAEAMSLILSR

SEQ ID NO: 15518 - protein, 201 aa, Streptomyces xinghaiensis
  REGION 1..201: note = tr|A0A3R7FTX8|A0A3R7FTX8_9ACTN GTP cyclohydrolase 1; OS = Streptomyces xinghaiensis OX=1038928 GN=folE PE=3 SV=1
MTDPVTLNSGRAVGEFDEKRAENAVRELLIAVGEDPDREGLLETPARVARAYREILGGLRQDPEDVLTTTFDLGHDELVLVKDIEIVSLCEHHLLPFHGVAHVGYIPAETGKITGLSKLARLVDVFARRPQVQERLTTQVADSLMRILEARGAIVVIEAEHMCMSVRGIRKPGAKTTTSAVRGQLRDATTRAEAMSLILAR

SEQ ID NO: 15519 - protein, 202 aa, Streptomyces yanglinensis
  REGION 1..202: note = tr|A0A1H5Z4H6|A0A1H5Z4H6_9ACTN GTP cyclohydrolase 1; OS = Streptomyces yanglinensis OX=310779 GN=folE PE=3 SV=1
MTDPITLDGDEYAGEFDEKRAEAAIRELLYAVGEDPDREGLRETPGRVARAYREIFSGLWQRPEDVLTTTFDLGHDEMVLVKDIEVMSSCEHHLVPFVGVAHIGYIPASSGKITGLSKLARLVDVYARRPQVQERLTTQVADAMMRILEPRGVIVVVECEHMCMTMRGVRKPGAKTITSAVRGQLRDPATRSEAMSLIIGRS

SEQ ID NO: 15520 - protein, 203 aa, Streptomyces yokosukanensis
  REGION 1..203: note = tr|A0A101P466|A0A101P466_9ACTN GTP cyclohydrolase 1; OS = Streptomyces yokosukanensis OX=67386 GN=folE PE=3 SV=1
MPDAGPDTPVDARVAGGPATERDLVAAELAAGELLTALGLPVDAPSVRATPGRLVRALAEMITPGEFTATTFPNDEGYTELVLQTGIPFRSLCEHHMLAFSGTAHVGYLPGERIVGLSKLARLVQHHAARPQVQERLTQQIGAWLDENLNARGVGVVLSAEHSCMSLRGVRVSGTRTVTSAWFGALREEPRERDAFLTLAGLG

SEQ ID NO: 15521 - protein, 201 aa, Streptomyces yokosukanensis
  REGION 1..201: note = tr|A0A101PE81|A0A101PE81_9ACTN GTP cyclohydrolase 1; OS = Streptomyces yokosukanensis OX=67386 GN=folE PE=3 SV=1
MIDPVTLDGEGRIGEFDEKRAENAVRELLIAVGEDPGREGLRETPARVARAYKEIFAGLWQKPEDVLTTTFDLGHDEMVLVKDIEVYSTCEHHLVPFRGVAHVGYIPSTSGKITGLSKLARLVDVYARRPQVQERLTTQIADSLMAILEPRGVIVVVECEHMCMSMRGIRKPGAKTITSAVRGQLRDVATRNEAMSLIMAR

SEQ ID NO: 15522 - protein, 201 aa, Streptomyces yunnanensis; identical to SEQ ID NO: 15420
  REGION 1..201: note = tr|A0A1M7CED3|A0A1M7CED3_9ACTN GTP cyclohydrolase 1; OS = Streptomyces yunnanensis OX=156453 GN=folE PE=3 SV=1

SEQ ID NO: 15523 - protein, 205 aa, unidentified
  source 1..205: note = Streptomyces zhaozhouensis
  REGION 1..205: note = tr|A0A286DWT2|A0A286DWT2_9ACTN GTP cyclohydrolase 1; OS = Streptomyces zhaozhouensis OX=1300267 GN=folE PE=3 SV=1
MTDPVSLTGGERAPGAIGAFDEKRAENAVRELLFAVGEDPDREGLRDTPARVARAYREIFAGLWQRPEDVLTTTFDLGHDEMVLVKDIEVMSTCEHHLVPFVGVAHIGYIPSASGKITGLSKLARLVDVFARRPQVQERLTTQVADSMMRILEPRGVIVVMECEHMCMTMRGVRKPGAKTTTSAVRGQLRTPATRAEAMSLILAR

SEQ ID NO: 15524 - protein, 201 aa, Streptomyces zinciresistens
  REGION 1..201: note = tr|G2GHS4|G2GHS4_9ACTN GTP cyclohydrolase 1; OS = Streptomyces zinciresistens K42 OX=700597 GN=folE PE=3; SV = 1
MTDPVTLDGEGSVGEFDEKRAENAVRELLIAVGEDPDREGLRETPGRVARAYQEIFAGLRQRPEDVLTTTFDIGHDEMVLVKDIEVYSTCEHHLVPFRGVAHVGYIPATSGKITGLSKLARLVDVYARRPQVQERLTTQIADSLMDILEPRGVIVVVECEHMCMSMRGIRKPGAKTLTSAVRGQLRDAATRNEAMSLIMAR

SEQ ID NO: 15525 - protein, 211 aa, Streptomyces zinciresistens
  REGION 1..211: note = tr|G2G775|G2G775_9ACTN GTP cyclohydrolase 1; OS = Streptomyces zinciresistens K42 OX=700597 GN=folE PE=3; SV = 1
MTTSVASSEPDLSPVPVAGPCGAAIDTCRVADLIAQLLVALGEDPAREGLAGTPDRVAAWWRAFLSPDDAATATCFTESQLSDQLVIVGGMSVWSLCEHHMLPMNLQVTAGYVPNGEVVGLSKFGRIAQHYAGRLQVQERFTQQFAEHLAGVIGREDVAVAVRGVHLCMSMRGVRMEAARTTTVHAGGQFRSDPVLNQQFVTLAAAQWNAA

SEQ ID NO: 15526 - protein, 201 aa, unidentified
  source 1..201: note = Streptomycetaceae bacterium
  REGION 1..201: note = tr|V6L3H7|V6L3H7_9ACTN GTP cyclohydrolase 1; OS = Streptomycetaceae bacterium MP113-05 OX=1380770 GN=folE; PE = 3 SV=1
MTDPVTLDGEGTLGKFDEKRVQDAVRELLTAVGEDPDREGLRETPARVARAYREIFAGLWQEPEDVLTTTFDLGHDEMVLVKDIEVLSSCEHHLVPFVGSAHVGYIPSASGKITGLSKLARLVDVYARRPQVQERLTTQIADSLMEILEPRGAIVVIECEHMCMTMRGVRKPGAKTLTSAVRGQLRDPATRSEAMSLIMAR

SEQ ID NO: 15527 - protein, 196 aa, unidentified
  source 1..196: note = Streptosporangiaceae bacterium
  REGION 1..196: note = tr|A0A3A4A4E5|A0A3A4A4E5_9ACTN GTP cyclohydrolase 1; OS = Streptosporangiaceae bacterium YIM 75507 OX=2339229; GN = folE PE=3 SV=1
MAQHPHLDVDSDRIEKAVREILLAIGEDPNRDGLRETPARVARAYAEQFAGLGQEPEDVLNTVFDADHDEMVLVKDIEMVSTCEHHLVPFVGVAHVGYTPNEKGQITGLSKLARLVDVYARRPQVQERMTSQIADAIMRVLEPRGAIVVVEAEHLCMTMRGVRKPGAKTITSAVRGDFRECEKTRAEAMSLILGRR

SEQ ID NO: 15528 - protein, 196 aa, unidentified
  source 1..196: note = Streptosporangiaceae bacterium
  REGION 1..196: note = tr|A0A3A4BB44|A0A3A4BB44_9ACTN GTP cyclohydrolase 1; OS = Streptosporangiaceae bacterium YIM 75507 OX=2339229; GN = folE PE=3 SV=1
MDRELRTGRRDFEGAWLHARGLMDALGFPVDSPGMAGTARRLVQALDELTSGMHEDPGRHLLVTFPPEAEKQGMIAVTDIPFISVCEHHLLPFTGTADVAYVPAPGAPVVGLSKLARLVQGYAARPQLQERLGEQIVSAIADRLETSGAACRLRAEHACLTLRGARAAGARMVTIHVKGVFETDAEARAEFVELSS

SEQ ID NO: 15529 - protein, 193 aa, Streptosporangium canum
  REGION 1..193: note = tr|A0A1I4DV40|A0A1I4DV40_9ACTN GTP cyclohydrolase 1; OS = Streptosporangium canum OX=324952 GN=folE PE=3 SV=1
MSVKPLQVDSARIERAVREILIALGEDPDRDGLQDTPARVARAYAEQFAGLGQSPEDVLTTVFDVDHDEMVLVRDIEVYSTCEHHLVPFHGVAHVGYIPNEKGQVTGLSKLARLVDVYARRPQVQERMTSQIADALMSVLEPRGVIVVIECEHLCMTMRGVRKPGAKTITSAVRGDFRNSDKTRAEAMALILR

SEQ ID NO: 15530 - protein, 193 aa, unidentified; identical to SEQ ID NO: 15529
  source 1..193: note = Streptosporangium minutum
  REGION 1..193: note = tr|A0A243RW10|A0A243RW10_9ACTN GTP cyclohydrolase 1; OS = Streptosporangium minutum OX=569862 GN=folE PE=3 SV=1

SEQ ID NO: 15531 - protein, 201 aa, Streptosporangium nondiastaticum
  REGION 1..201: note = tr|A0A2P7PHG9|A0A2P7PHG9_9ACTN GTP cyclohydrolase 1; OS = Streptosporangium nondiastaticum OX=35764 GN=folE PE=3; SV = 1
MTDPVTLDAERSVGAFDEKRAENAVRELLLAVGEDPDREGLRETPARVARAYKEIFAGLWQEPEDVLTTTFDLGHDEMVLVRDIEVYSTCEHHLVPFHGVAHVGYIPSTSGKITGLSKLARLVDVFARRPQVQERLTTQIADSLMEILEPRGVVVVIECEHMCMSMRGIRKPGAKTLTSAVRGQLRDPATRAEAMSLIMAR

SEQ ID NO: 15532 - protein, 193 aa, Streptosporangium roseum
  REGION 1..193: note = tr|D2BB29|D2BB29_STRRD GTP cyclohydrolase 1; OS = Streptosporangium roseum (strain ATCC 12428 / DSM 43021 / JCM 3005 / NI 9100) OX=479432 GN=folE PE=3 SV=1
MSVKPLQVDSARIEKAVREILIALGEDPDRDGLQDTPARVARAYAEQFAGLGQSPEDVLTTVFDVDHDEMVLVRDIEVYSTCEHHLVPFHGVAHVGYIPNEKGQVTGLSKLARLVDVYARRPQVQERMTSQIADALMSVLEPRGVIVVIECEHLCMTMRGVRKPGAKTITSAVRGDFRNSDKTRAEAMALILR

SEQ ID NO: 15533 - protein, 193 aa, Streptosporangium sp.
  REGION 1..193: note = tr|A0A2Z3V7Y0|A0A2Z3V7Y0_9ACTN GTP cyclohydrolase 1; OS = Streptosporangium sp. 'caverna' OX=2202249 GN=folE PE=3; SV = 1
MSGKPLEVDSARIEKAVREILIAIGEDPDRDGLQNTPARVARAYAEQFAGLRQTPEDVLTTIFDAGHDEMVLVRDIEVYSTCEHHLVPFHGVAHVGYIPNEKGQITGLSKLARLVDVYARRPQVQERMTSQIADALMSVLEPRGVIVVIECEHLCMTMRGVRKPGAKTTTSAVRGLFRDSDRTRAEAMALIIR

SEQ ID NO: 15534 - protein, 192 aa, Streptosporangium subroseum
  REGION 1..192: note = tr|A0A239NTV7|A0A239NTV7_9ACTN GTP cyclohydrolase 1; OS = Streptosporangium subroseum OX=106412 GN=folE PE=3 SV=1
MGKPLEVDSARIEKAVREILIAIGEDPDRDGLQDTPARVARAYAEQFAGLGQTPEDVLTTVFDAGHDEMVLVRDIEVYSTCEHHLVPFHGVAHVGYIPNEKGQITGLSKLARLVDVYARRPQVQERMTSQIADALMNVLEPRGVIVVIECEHLCMTMRGVRKPGAKTTTSAVRGLFRDSDRTRAEAMALIIR

SEQ ID NO: 15535 - protein, 218 aa, Subsaximicrobium wynnwilliamsii
  REGION 1..218: note = tr|A0A5C6ZND0|A0A5C6ZND0_9FLAO GTP cyclohydrolase 1; OS = Subsaximicrobium wynnwilliamsii OX=291179 GN=folE PE=3; SV = 1
MKKELIEEIGDNHILTNIETPLLSNAFEKSDEEKIENIQRYFSKIMQELGLDLKDESLSGTPYRFAKMYVKELFYGLNPINKPKLSTFPNKYGYKKMLVEQDITIDSSCEHHFLPITGHAHIGYVPNEKVIGLSKINRLVDYYSHRPQVQERLCLQILNDLQETLNTKNVIVVLNAKHLCVSSRGIKDKDSSTTTIEFGGCFEDIENRNEFFLTLNKK

SEQ ID NO: 15536 - protein, 225 aa, Subsaximicrobium wynnwilliamsii
  REGION 1..225: note = tr|A0A5C6ZJB4|A0A5C6ZJB4_9FLAO GTP cyclohydrolase 1; OS = Subsaximicrobium wynnwilliamsii OX=291179 GN=folE PE=3; SV = 1
MSIEKNIEELDLLGNDHIGTSADTPLRENAFELSDSEKIKIIRKDVHHILETLGLDLNDDSLKGTPNRVAKMFVNEIFSGLHPNNKPSASTFDNKYKYGEMLVEKNINLYSTCEHHLLPIVGKAHIAYISSGKVVGLSKMNRIVDYFAKRPQVQERLTIQIVKELQQVLKTEDVACVIDAKHLCVNSRGIRDVDSSTVTSEFGGQFKNKDTKREFLDYIKLDTAF

SEQ ID NO: 15537 - protein, 208 aa, Subtercola boreus
  REGION 1..208: note = tr|A0A3E0VDG7|A0A3E0VDG7_9MICO GTP cyclohydrolase 1; OS = Subtercola boreus OX=120213 GN=folE PE=3 SV=1
MAVDRGRVEAAVYELIAALGEDPSRAELESTPRRVAEAYSEFFSGVGVDARDQLGETYPFGGDIDGGFGGSVGPGAASGASPEPVLVKGLSFRSVCEHHLLPFRGTAHVAYVPRDRLVGLGRIPAVIEVLANRPQLQERLGEQIASTLSEGLDARGVLVVLEAAHGCVTLRGPQQVASTTVTVASRGSLSEPAARAELMGLIGAEVSS

SEQ ID NO: 15538 - protein, 222 aa, Subtercola boreus
  REGION 1..222: note = tr|A0A3E0W7M8|A0A3E0W7M8_9MICO GTP cyclohydrolase 1; OS = Subtercola boreus OX=120213 GN=folE PE=3 SV=1
MAVNRQRIEAAVLELIEAIGEDPQREGLVNTPRRVAEAYSEFFAGVGADARQALGETYPFDGSAPPEPVLVRGLAFRSVCEHHLLPFRGVAHVAYVPDDRLIGLGRIPAVIEVLANRPQLQERLGEEIASTLSEALDAAGVLVVLEASHGCVTMRGPQQAGSTTVTVASRGTLSEPAARAELMGLIGASAFGARAGAGMAAAAGSAAAVTAAAGRAGREVSL

SEQ ID NO: 15539 - protein, 227 aa, Subtercola sp.
  REGION 1..227: note = tr|A0A2S5W1Q1|A0A2S5W1Q1_9MICO GTP cyclohydrolase 1; OS = Subtercola sp. Z020 OX=2080582 GN=folE PE=3 SV=1
MAVDRQRIEAAVLELIEAIGDDPRREGLTNTPRRVADAYAEFFSGVGVDARAALGETFPFTGDAPREPVLVRGVTFRSICEHHLLPFRGTAHVAYVPNDRLVGLGRIPAVIEVLANRPQLQERLGEQIASTLSEALDAAGTLVVLEASHGCVTLRGPQQADSTTVTVASRGSLSEPAARAELMALIAAGDAAIHAPTPSGAPRAAAAPPTAPTPAAPSPATAHGVAL

SEQ ID NO: 15540 - protein, 199 aa, unidentified
  source 1..199: note = Subtercola vilae
  REGION 1..199: note = tr|A0A4V4RG54|A0A4V4RG54_9MICO GTP cyclohydrolase 1; OS = Subtercola vilae OX=2056433 GN=folE PE=3 SV=1
MVDRARIEAAVLEILEAIGEDPNREGLGSTPRRVAEAYSEFFSGVGVDARALLGETFAFDEAAPREPVLMRGITFRSVCEHHLLPFEGLAHIAYVPTDRLIGLGRLPAVVDALASRPQLQERLGEQLADTIADGLDATGVLVVLEASHGCVTLRGPRQVGSTTVTVASRGSLSEPAARSELMGLIGQPTAGATGHEAAL

SEQ ID NO: 15541 - protein, 218 aa, Succinatimonas hippei
  REGION 1..218: note = tr|E8LJN6|E8LJN6_SUCHY GTP cyclohydrolase 1; OS = Succinatimonas hippei (strain DSM 22608 / JCM 16073 / KCTC 15190 / YIT 12066) OX=762983 GN=folE PE=3 SV=1
MSEDKDLLPEARLVRNALIERGLETPWHDNGLDDVEKRRRIAACMTEIMETLGLDLQDDSLTKTPERVGKMFVNEIFSGLDYRNFPSITLIENKMHFDEMIKVKDISLTSTCEHHFVVIDGMAKVAYMPGTKIIGLSKINRIVQFFAKRPQVQERMTQQILVALQTLLDTKNVAVTITATHYCVKARGVKDPTSSTTTTALGGHFKHNPSSRHEFLTD

SEQ ID NO: 15542 - protein, 220 aa, Succinatimonas sp.
  REGION 1..220: note = tr|R5EUK9|R5EUK9_9GAMM GTP cyclohydrolase 1; OS = Succinatimonas sp. CAG:777 OX=1262974 GN=folE PE=3 SV=1
MEAQSDKELSSEAVMVRDALIECGLETPWHDNGLSSSQKKDIIMKNMSEIMNTLGLDLNDDSLRETPTRVARMFVDEVFSGLDYRNFPKVSVFDNKMHFDEMVKVDNITVTSTCEHHFVVMDGYAKVAYMPSDKIIGLSKINRIVQFFGHRPQVQERMTQQIKVALQTLLNTKNVAVSITATHYCVKSRGVRDQTSETTTTALGGHFKTNPSSRHEFLTD

SEQ ID NO: 15543 - protein, 267 aa, Succiniclasticum ruminis
  REGION 1..267: note = tr|A0A1G6MQE6|A0A1G6MQE6_9FIRM GTP cyclohydrolase FolE2 OS=Succiniclasticum ruminis OX=40841 GN=folE2 PE=3; SV = 1
MLNEALEKKKQFLKDVQSEQDSRNIPLKHVGISDLRWPLVLRDRQKGEQHTVATVSVAVDLPKDLRGTHMSRFVQCLQKLDIVNLSALEEVLDDLKESLLADRAFLKLEFPYFIQKEAPVSGLSSVMDLNCVYTMEKGTRFTQKVEVQVPIQTLCPCSREISAYGAHNQRAVASLEIEASEFVWIEELAEMADVGASAPVYGLLKRPDEKFVTEEAYDNPRFVEDAVREIALRLEADPRISWYRATVKSFESIHNHNAFACVEKGWK

SEQ ID NO: 15544 - protein, 267 aa, Succiniclasticum ruminis
  REGION 1..267: note = tr|A0A1I1ZQI0|A0A1I1ZQI0_9FIRM GTP cyclohydrolase FolE2 OS=Succiniclasticum ruminis DSM 9236 OX=1123323; GN = folE2 PE=3 SV=1
MLNEALEKKKQFLKDVQSEQDSRNIPLKHVGISDLRWPLVLRDRQKGEQHTVATVSVAVDLPKDLRGTHMSRFVQCLQKLDIVNLSALEEVLDDLKESLLADRAFLKLEFPYFIQKEAPVSGLSSVMDLNCVYTMEKGTHFTQKVEVQVPIQTLCPCSREISAYGAHNQRAVASLEIEASEFVWIEELAEMADAGASAPVYGLLKRPDEKFVTEEAYDNPRFVEDAVREIALRLEADPRISWYRATVKSFESIHNHNAFACVEKGWK

SEQ ID NO: 15545 - protein, 221 aa, Succinivibrio dextrinosolvens
  REGION 1..221: note = tr|A0A1T4UZJ0|A0A1T4UZJ0_9GAMM GTP cyclohydrolase 1; OS = Succinivibrio dextrinosolvens DSM 3072 OX=1123324; GN = folE PE=3 SV=1
MTTQTNNSELSPEAILVRDALIRHGLESPWVDNGLTSEEKKDIIRSHMSSIMTTLGLDLSDDSLSETPSRVARMFVDEVFSGLDYRNFPKVSVFENKMHFDEMVKVCNITVTSTCEHHFVVMDGVAKVAYMPSDKIIGLSKVNRIVQFFGHRPQVQERLTQQIKVALQTLLDTKNVAVTITATHYCVKSRGVKDQTSETTTTALGGLFKTNPSSRHEFLTD

SEQ ID NO: 15546 - protein, 217 aa, Succinivibrio sp.
  REGION 1..217: note = tr|A0A3C1W1B2|A0A3C1W1B2_9GAMM GTP cyclohydrolase 1; OS = Succinivibrio sp. OX=2053619 GN=folE PE=3 SV=1
MNDNELSPEAILVRNALIEHGLETPWHDNGLSSEEKKTIIQEHMSSIMQTLGLDLSDDSLTQTPHRVARMFVDEIFSGLDYKNFPKVSVFENKMHFDEMVKVCNITITSTCEHHFVVMDGIAKVAYMPSDKIIGLSKVNRIVQFFGHRPQVQERLTQQIKVALQTLLNTKNVAVSITATHYCVKSRGVKDQTSVTTTTALGGLFKNNPSSRHEFLTD

SEQ ID NO: 15547 - protein, 364 aa, Sulfitobacter brevis
  REGION 1..364: note = tr|A0A1I1Z4M0|A0A1I1Z4M0_9RHOB GTP cyclohydrolase FolE2 OS=Sulfitobacter brevis OX=74348 GN=folE2 PE=3 SV=1
MNVVPTMPEKADRAAAEAALATLKTWAATASSAEIAALDAGVARLLSDAEPYPAFSRIYPDDFAAGGNYTSTLPDLQNGPASLIRGSRQQIQHVGISNFRLPIRFQTRDGDALTLETSVTGSVSLEADKKGINMSRIMRSFYKHAEATFSFEVIEAALDDYKADLESLDARIQMRFSFPMKINSLRSGLSGYQYYDIALELIETAGQRQKIIHLDYVYSSTCPCSLELSEHARSTRGQLATPHSQRSVARVSVVVNCDEDCLWFEDLIEACRRAVPTETQVMVKREDEQAFAELNAANPIFVEDAARLFCEQLLAEARVGDFRIVASHQESLHSHDAISILTEGPTFAARSIDPKLFNTLFHVG

SEQ ID NO: 15548 - protein, 363 aa, Sulfitobacter delicatus
  REGION 1..363: note = tr|A0A1G7LCS6|A0A1G7LCS6_9RHOB GTP cyclohydrolase FolE2 OS=Sulfitobacter delicatus OX=218672 GN=folE2 PE=3; SV = 1
MNIVTEVSETPDREAAEAALNTLRAWAETATPAELAALDPAMSRMLAPSDYPTLSRAYPSDFTAGANYMATLPDLQNGPASLIRGAQQLIQHVGISNFRLPIRYRSREGGDLQLETSVTGSVSLDAEKKGINMSRIMRSFYRHAEATFSFEVIEAALDDYKADLESLDARIQMRFSFPMKIGSLRSGLTGYQYYDIALELVEQGGKRKKLIHLDYVYSSTCPCSLELSEHARQTRGQLATPHSQRSVARISVETLDAGDCLWFEDLIDLCRRAVPTETQVMVKREDEQAFAELNAANPIFVEDAARLFCEQLLAEDRVGDFRIVASHQESLHSHDAISILTQGETFAAESIDPKLFNTLFHVG

SEQ ID NO: 15549 - protein, 363 aa, Sulfitobacter delicatus
  REGION 1..363: note = tr|A0A1G7Z673|A0A1G7Z673_9RHOB GTP cyclohydrolase FolE2 OS=Sulfitobacter delicatus OX=218672 GN=folE2 PE=3; SV = 1
MNAVTEMSEAPDEDAVKAALATLRAWSNHATAAELNALDPSMEPLLNGATYPALTRTYPENFSASANYVATLPDLQNGPSSLIRGAQQLIQHVGISNFRLPIRYRSREGSDLRLQTSVTGSVSLDAEKKGINMSRIMRSFYRHAEATFSFEVIEAALDDYKADLESLDARIQMRFSFPMKIESLRSGLTGYQYYDISLELCEQGGQRRKIVHLDYVYSSTCPCSLELSEHARQTRGQLATPHSQRSVARISVETIDSADCLWFEDLIEICRRAVPTETQVMVKREDEQAFAELNAANPIFVEDAARLFCAQLSADERIGDFRIVASHQGSLHSHDAISVLTQGDTFATRSIDPKLFSTLFHVG

SEQ ID NO: 15550 - protein, 292 aa, Sulfitobacter donghicola; identical to SEQ ID NO: 15108
  REGION 1..292: note = tr|A0A410XWR9|A0A410XWR9_9RHOB GTP cyclohydrolase FolE2 OS=Sulfitobacter donghicola OX=421000 GN=folE2 PE=3; SV = 1

SEQ ID NO: 15551 - protein, 364 aa, Sulfitobacter donghicola
  REGION 1..364: note = tr|A0A073II94|A0A073II94_9RHOB GTP cyclohydrolase FolE2 OS=Sulfitobacter donghicola DSW-25 = KCTC 12864 = JCM 14565 OX=1300350 GN=folE2 PE=3 SV=1
MNISTPISPKPNRTEAEQALETLRAWAADVDASELAALDPAIAQVLTGGKAYPLFDREYPADFEIEAEYKASLPDLQNGPSSLIKGANQQIQHVGISNFRLPVQFETRSGGPITLETSVTGSVSLEADKKGINMSRIMRSFYKHAEQTFSFKVIEAALDDYITDLESFDARIQMRFSFPMKITSLRSGLEGYQYYDVALELVEQDGVRQQIIHLDYVYSSTCPCSLELSEHARATRNQLATPHSQRSVARISVLVKDGAECLWFENLIEACRRAVPTETQVMVKREDEQAFAELNAANPIFVEDAARLFCEQLLEDERVSDFRIIASHQESLHSHDAVSVLTEGPTFAQASFDPKLFNTLFHVG

SEQ ID NO: 15552 - protein, 363 aa, Sulfitobacter dubius
  REGION 1..363: note = tr|A0A1I2SU38|A0A1I2SU38_9RHOB GTP cyclohydrolase FolE2 OS=Sulfitobacter dubius OX=218673 GN=folE2 PE=3 SV=1
MNIVTEMSETPDRSAAEAALATLRAWADTATPAEIAALDPAMARMLAPAEYPALSRAYPEDFTAGDNYRASLPDLQNGPSSLIRGAQQLIQHVGISNFRLPIRYRSREGGDLRLETSVIGSVSLDAEKKGINMSRIMRSFYRHAEATFSFEVIEAALDDYKADLESLDARIQMRFSFPMKIGSLRSGLTGYQYYDIALELVEQDGQRKKIVHLDYVYSSTCPCSLELSEHARETRGQLATPHSQRSVARISVETNDAGDCLWFEDLVEICRRAVPTETQVMVKREDEQAFAELNAANPIFVEDAARLFCEQLLADGRVGDFRIVASHQESLHSHDAISVLTQGDTFAAQSIDPKMFNTLFHVG

SEQ ID NO: 15553 - protein, 364 aa, unidentified
  source 1..364: note = Sulfitobacter geojensis
  REGION 1..364: note = tr|A0A196QYC6|A0A196QYC6_9RHOB GTP cyclohydrolase FolE2 OS=Sulfitobacter geojensis OX=1342299 GN=folE2 PE=3; SV = 1
MNVITSVEKAPERAKAEQALATLKAWATSATAAEIDALDPAVTRLLSQTGAYPEFNRVYPDDFAVGDTYHASLPDLQNGPSSLIRGAKQQIQHVGISNFRLPIGFHTRDNGDLTLETSVTGSVSLEADKKGINMSRIMRSFYKHAERTFSFEVIEAALDDYKADLESMDARIQMRFSFPMRIESLRSGLSGYQYYDVALELVEKDGVRRKMIHLDYVYSSTCPCSLELSEHARATRGQLATPHSQRSVARVSAVINEDDSCLWFEDLIDACRRAVPTETQVMVKREDEQAFAELNAANPIFVEDAARLFCEQLQAEPRIGDFRVIASHQESLHSHDAISVLTEGPTFEMQSIDPKLFNTLFHVG

SEQ ID NO: 15554 - protein, 364 aa, Sulfitobacter guttiformis
  REGION 1..364: note = tr|A0A420DJL3|A0A420DJL3_9RHOB GTP cyclohydrolase FolE2 OS=Sulfitobacter guttiformis OX=74349 GN=folE2 PE=3; SV = 1
MNISTPITPTPDRVAAEKALETLRAWASSADATELATLDPAVAQMLTGGAAYPLLKRDYPADFAIEPEYKESLPDLQNGPSSLIKGAKQQIQHVGISNFRLPVQFETRDNGPLTLETSVTGTVSLEADKKGINMSRIMRSFYKHAESTFSFKVIEAALEDYITDLESFDARIQMRFSFPMKISSLRSGLTGYQYYDVALELVEHAGVRQQIIHLDYVYSSTCPCSLELSEHARATRNQLATPHSQRSVARVSVLLDNDAGVMWFEDLIEACRRAVPTETQVMVKREDEQAFAELNAANPVFVEDAARLFCEQLLADARISDFRVIASHQESLHSHDAVSVLTEGPTFAQSSFDPKLFNTLFHVG

SEQ ID NO: 15555 - protein, 363 aa, unidentified
  source 1..363: note = Sulfitobacter indolifex
  REGION 1..363: note = tr|A9EFJ7|A9EFJ7_9RHOB GTP cyclohydrolase FolE2; OS = Sulfitobacter indolifex HEL-45 OX=391624 GN=folE2 PE=3; SV = 1
MTIETKVSETPDRKAAKAALATLRAWAQEATSAEVAALDPAVARMVNGAGYPAFNRIYPADFTGGANYKATLPDLQNGPSSLIRGAQQLIQHVGISNFRLPIRYHSRGAGDLQLETSVTGSVSLDAQKKGINMSRIMRSFYRHAEATFSFEVIEAALDDYKADLESLDARIQMRFSFPMKIESLRSGLAGYQYYDIALELVEQEGKRKKIVHLDYVYSSTCPCSLELSEHARATRGQLATPHSQRSVARISVEVLDAEGCLWFEDLIDFCRRAVPTETQVMVKREDEQAFAELNAANPIFVEDAARLFCEQLLADARVGDFRIVASHQESLHSHDAISVLTQGDTFAAQSFDPKLFNTLFHVG

SEQ ID NO: 15556 - protein, 363 aa, unidentified
  source 1..363: note = Sulfitobacter indolifex
  REGION 1..363: note = tr|A9E2N6|A9E2N6_9RHOB GTP cyclohydrolase FolE2; OS = Sulfitobacter indolifex HEL-45 OX=391624 GN=folE2 PE=3; SV = 1
MNIVTEMSETPDRDAAEAALATLRAWADTATPAEIAALDPAMSQMLSSAEYPALSRAYPEDFTAGDNYRASLPDLQNGPSSLIRGAQQLIQHVGISNFRLPIRYRSREGGDLRLETSVTGSVSLDAEKKGINMSRIMRSFYRHAEATFSFEVIEAALDDYKTDLESLDARIQMRFSFPMKIASLRSGLTGYQYYDIALELVEQDGERKKIVHLDYVYSSTCPCSLELSEHARETRGQLATPHSQRSVARISVETQDEGDCLWFEDLIEICRRAVPTETQVMVKREDEQAFAELNAANPIFVEDAARLFCEQLLADGRVGDFRIVASHQESLHSHDAISVLTQGGTFAAQSIDPKLFNTLFHVG

SEQ ID NO: 15557 - protein, 362 aa, Sulfitobacter litoralis
  REGION 1..362: note = tr|A0A1H0M8I3|A0A1H0M8I3_9RHOB GTP cyclohydrolase FolE2 OS=Sulfitobacter litoralis OX=335975 GN=folE2 PE=3; SV = 1
MNIAATVIPDRDDAVAALDTLRAWARKADAIEIEALDPSLAKLLQNVESYPQFNRDYPGDFAVGDNYKATLPDLQNGPSSLIRGAKQQIQHVGISNFRLPMRFHTRDGGDLTLETSVTGSVSLEADKKGINMSRIMRSFYKHADEVFSFEVMEAALDDYKSDLESYDARIQMRFSFPVKIGSLRSGLSGYQYYDIALELVEAGGARKKIIHLDYVYSSTCPCSLELSEHARATRGQLATPHSQRSVARISVEVNCNETCLWFEDLIDLARRAVPTETQVMVKREDEQAFAELNAANPIFVEDAARLFCEQLQAEPRVGDFRVVASHQESLHSHDAISMLTQGETFAAQSIDPKLFSTLFHVG

SEQ ID NO: 15558 - protein, 364 aa, Sulfitobacter marinus
  REGION 1..364: note = tr|A0A1I6S022|A0A1I6S022_9RHOB GTP cyclohydrolase FolE2 OS=Sulfitobacter marinus OX=394264 GN=folE2 PE=3 SV=1
MNVIAPGSTKPDREAAVAALDTLRAWASKASQADMDALDPALARLLTKVDAYPEFNRIYPEDFAVGDNYKATLPDLQNGPSSLIRGAKQQIQHVGISNFRLPLRFHTRDDGDLTLETSVTGSVSLEADKKGINMSRIMRSFYKHGDQTFSFEVMEAALDDYKADLESLDARIQMRFSFPMKIESLRSGLSGYQYYDIVLELVEIAGLRKKIMHLDYVYSSTCPCSLELSEHARATRGQLATPHSQRSVARISVDVNYDAPCLWFEDLIEAARRAVPTETQVMVKREDEQAFAELNAANPIFVEDAARLFCEQLQADPRIGDFRVVASHQESLHSHDAISILTQGDTFAAQSIDPKLFTTLFHVG

SEQ ID NO: 15559 - protein, 364 aa, Sulfitobacter mediterraneus
  REGION 1..364: note = tr|A0A061SXL5|A0A061SXL5_9RHOB GTP cyclohydrolase FolE2 OS=Sulfitobacter mediterraneus OX=83219 GN=folE2; PE = 3 SV=1
MNAITSVEKGPDRSDAEQALATLKAWAAGASATEIDALDPQVVRLLQGKGDYPKFNRDYPQDFKVDAAYKAGLPDLQNGPSSLIRGAKQQIQHVGISNFRLPIRFHTRNNGDLTLETSITGSVSLEADKKGINMSRIMRSFYKHAERTFSFHVIEAALDDYKSDLESFDARIQMRFSFPMKIESLRSGLSGYQYYDIALELVEKDGVRQKIIHLDYVYSSTCPCSLELSEHARATRNQLATPHSQRSVARISAVLEGDNSCLWFEDLIEACRRAVPTETQVMVKREDEQAFAELNAANPIFVEDAARLFCQQLQEDPRVGDFRVIASHQESLHSHDAISVLTEGPTFEMQSIDPKLFNTLFHVG

SEQ ID NO: 15560 - protein, 362 aa, Sulfitobacter pontiacus
  REGION 1..362: note = tr|A0A1H2QIT3|A0A1H2QIT3_9RHOB GTP cyclohydrolase FolE2 OS=Sulfitobacter pontiacus OX=60137 GN=folE2 PE=3; SV = 1
MNIAATVIPDRDDAVAALDTLRAWARKASAAEIETLDPSLARLLQSAESYPQFSRDYPSDFAVGDNYKATLPDLQNGPSSLIRGAKQQIQHVGISNFRLPMRFHTREGSDLTLETSVTGSVSLEADKKGINMSRIMRSFYKHADEVFSFEVMEAALDDYKSDLESYDARIQMRFSFPVRIDSLRSGLSGYQYYDIALELVEAEGARKKIIHLDYVYSSTCPCSLELSEHARATRGQLATPHSQRSVARISVEVNCEESCLWFEDLIDAARRAVPTETQVMVKREDEQAFAELNAANPIFVEDAARLFCEQLQAEPRVRDFRVVASHQESLHSHDAISVLTQGDTFAAQSIDPRLFSTLFHVG

SEQ ID NO: 15561 - protein, 368 aa, unidentified
  source 1..368: note = Sulfitobacter pseudonitzschiae
  REGION 1..368: note = tr|A0A221JY73|A0A221JY73_9RHOB GTP cyclohydrolase FolE2 OS=Sulfitobacter pseudonitzschiae OX=1402135; GN = folE2 PE=3 SV=1
MNIHTPEFQQIPERDDAKAALDVLRRWAKSATPTEILELDASVARLLPGDSGSNYPAFSRNYPEEFVVDAAYKNTLPDLQNGPSSLIRGAHQQIQHVGISNFRLPIRYRSRDTDASLLLETSVTGTVSLEAEKKGINMSRIMRSFYAHADQTFSFEVIEAALDDYKTDLESFDARIQMRFSFPMKVKSLRSGLSGYQYYDIALELVEQNGVRKKIVHLDYVYSSTCPCSLELSEHARATRGQLATPHSQRSVARISVVLDCDAGPLWFEDLIDACRRAVPTETQVMVKREDEQAFAELNAANPIFVEDAARLFCEQLLADHRVGDFRVVASHQESLHSHDAVSVLTEGDTFAAESIDPRLFQSLFHVG

SEQ ID NO: 15562 - protein, 368 aa, unidentified
  source 1..368: note = Sulfitobacter pseudonitzschiae
  REGION 1..368: note = tr|A0A073IZK3|A0A073IZK3_9RHOB GTP cyclohydrolase FolE2 OS=Sulfitobacter pseudonitzschiae OX=1402135; GN = folE2 PE=3 SV=1
MNIHTPDIQQIPERDDAAAALDVLRRWAKSATPTEILELDASVARLLPGDSGVDYPAFSRSYPEGFEVDESYKATLPDLQNGPSSLIKGAHQQIQHVGISNFRLPIRYRSRNTETPLLLETSVTGTVSLEADKKGINMSRIMRSFYTHAERTFSFEVIEAALDDYKTDLESFDARIQMRFSFPIKVESLRSGLSGYQYYDIALELVEHNGVRKKIVHLDYVYSSTCPCSLELSEHARATRGQLATPHSQRSVARISVVLDCDAGPLWFEDLIDACRRAVPTETQVMVKREDEQAFAELNAANPIFVEDAARLFCEQLLADHRVGDFRIVASHQESLHSHDAVSVLTEGETFAADSLDPRLFQSLFHIG

SEQ ID NO: 15563 - protein, 364 aa, Sulfitobacter sp.
  REGION 1..364: note = tr|A0A345QPZ1|A0A345QPZ1_9RHOB GTP cyclohydrolase FolE2 OS=Sulfitobacter sp. SK012 OX=1389005 GN=folE2 PE=3; SV = 1
MNIAAPISETPDRDAAEAALNTLRAWASTASSGDIAALDPTVARVLGGADGYPQFDRNYPEGFVAGPNYMATLPDLQNGPASLIRGARQQIQHVGISNFRLPIRFHSLDGDDLTLETSVTGTVSLEADKKGINMSRIMRSFYKHAEATFSFEVIEAALDDYKADLESIDARIQMRFSFPMKIESLRSGLSGYQYYDVALELVESNGLRQKIIHLDYVYSSTCPCSLELSEHARATRNQLATPHSQRSVARVSVLMEDCDNCLWFEDLINACRRAVPTETQVMVKREDEQAFAELNAANPIFVEDAARLFCQQLQTDERISDFRVIASHQESLHSHDAVSVLTEGPTFAQASFDPKLFNTLFHVG

SEQ ID NO: 15564 - protein, 364 aa, Sulfitobacter sp.
  REGION 1..364: note = tr|A0A196PK24|A0A196PK24_9RHOB GTP cyclohydrolase FolE2 OS=Sulfitobacter sp. EhC04 OX=1849168 GN=folE2 PE=3; SV = 1
MNAITSVEKAPERSDAEKALSVLKAWARAASPEEVAALDPSVSRLLSDAPAYPEFRRDYPDDFAVGEVYKSTLPDLQNGPSSLIRGAQQQIQHVGISNFRLPIRFRTRDNGELTLETSVTGSVSLEADKKGINMSRIMRSFYKHAEATFSFEVIEKALDDYKADLDSMDARIQMRFSFPMKIESLRSGLSGYQYYDIALELVEKGGVRQKMIHLDYVYSSTCPCSLELSEHARATRGQLATPHSQRSVARISAVIDCDRECLWFEDLIDACRRAVPTETQVMVKREDEQAFAELNAANPIFVEDAARLFCQQLQQDGRVGDFRVIASHQESLHSHDAISVLTEGPTFEVASIDPKLFNTLFHVG

SEQ ID NO: 15565 - protein, 185 aa, Sulfobacillus acidophilus
  REGION 1..185: note = tr|A0A2T2WN67|A0A2T2WN67_9FIRM GTP cyclohydrolase 1; OS = Sulfobacillus acidophilus OX=53633 GN=folE PE=3 SV=1
MDQEKIRRAVSMILEAIGEDPTREGLQETPSRVARMYTEICAGLHQEGRDVLATRFHVDHDEVVLVKDIHFYSLCEHHLLPFFGVAHVAYLPNRGMVTGLSKLARLVEVYARRPQVQERMTNQIADILEEELSAVGTFVMVQAEHLCMSMRGIQKPGSHTVTTAARGDFNTRPELRSEILRLIQS

SEQ ID NO: 15566 - protein, 217 aa, Sulfobacillus acidophilus
  REGION 1..217: note = tr|G8TZP0|G8TZP0_SULAD GTP cyclohydrolase 1; OS = Sulfobacillus acidophilus (strain ATCC 700253 / DSM 10332 / NAL) OX=679936 GN=folE PE=3 SV=1
MQTSEPPRNIINASDLDAWEESVDPQSTGPIDTVKIQTAVRMILEAIGENPDREGLVETPARVARMYQEIFQGLYQNPHDVLATRFHVKQADLVLVKDIPFYSACEHHLLPFFGVAHIAYLPEAGEVTGLSKLARLVDIFAKRPQVQERMTEDIAQALNDELGAQGVVVMVEAEHLCMAMRGVKKPGSRTLTIAARGLYETEEAKRREVIDLMRRSL

SEQ ID NO: 15567 - protein, 210 aa, Sulfobacillus benefaciens
  REGION 1..210: note = tr|A0A2T2XF75|A0A2T2XF75_9FIRM GTP cyclohydrolase 1; OS = Sulfobacillus benefaciens OX=453960 GN=folE PE=3 SV=1
MSQNVGAHRSRVASHSTPPVPETVDHEKIEQAVRMILEAIGEDPDREGLIDTPKRVARMYQEIFSGLHSDPAEELSARFHVDHDELVLVKDITFYSACEHHLLPFYGLAHVAYLPANGTVTGLSKLARLVDHVAKQPQIQERMTNTIADVLHNTLNPQGVMVVIEAEHLCMTMRGVKKPGSKTVTIASRGLYETNPEKQQQVLRMLHLEV

SEQ ID NO: 15568 - protein, 199 aa, Sulfobacillus benefaciens
  REGION 1..199: note = tr|A0A2T2X7K3|A0A2T2X7K3_9FIRM GTP cyclohydrolase 1; OS = Sulfobacillus benefaciens OX=453960 GN=folE PE=3 SV=1
MTAAEVKDDSEESLVNREKVEQAVRMILEAIGENPDREGLHDTPARVARMYEEIFSGLHRDPSEVLSARFHVDHDEVVLVKDIPFYSSCEHHLLPFFGEAHVAYLPRHGVVTGLSKLARLVDIVAKRPQIQERMTNIIADTLENDLDAVGVMVVIEAEHLCMTMRGIKKPGSKTVTMASRGAYEDSARQQEILRMLNLS

SEQ ID NO: 15569 - protein, 199 aa, Sulfobacillus sp.; identical to SEQ ID NO: 15568
  REGION 1..199: note = tr|A0A356ZWK0|A0A356ZWK0_9FIRM GTP cyclohydrolase 1; OS = Sulfobacillus sp. OX=33949 GN=folE PE=3 SV=1

SEQ ID NO: 15570 - protein, 220 aa, Sulfobacillus sp.
  REGION 1..220: note = tr|A0A2S3QIW9|A0A2S3QIW9_9FIRM GTP cyclohydrolase 1; OS = Sulfobacillus sp. hq2 OX=2039167 GN=folE PE=3 SV=1
MSQSLHTNKSSQPVGLDTAVTVTDSPEMNITAAHSVDRQKIEAAVRMILEAVGEDPTREGLLETPARVARMYEEIFSGLHRDPAETLSARFHVDHNEVVLVKDIPFYSACEHHLLPFFGAAHVAYLPRHGVVTGLSKLARLVDLVAKRPQIQERMTNIVADTLEQELDAEGVMVVIEAEHLCMTMRGIKKPGSKTVTIASRGTYEESSRQMEILRLLNLG

SEQ ID NO: 15571 - protein, 219 aa, Sulfobacillus thermosulfidooxidans
  REGION 1..219: note = tr|A0A1W1W872|A0A1W1W872_SULTA GTP cyclohydrolase 1; OS = Sulfobacillus thermosulfidooxidans (strain DSM 9293 / VKM B-1269 / AT-1) OX=929705 GN=folE PE=3 SV=1
MSQSLRSKKATSKSGDGVLAVTPPEIVKESDAPLVDHEKIEQAVRMILEAIGENPDREGLQDTPARVARMYEEIFSGLHRDPSEVLSARFHVDHNEVVLVKDIPFYSACEHHLLPFFGQAHVAYLPRHGVVTGLSKLARLVDLVAKRPQIQERMTNIIADTLENDLDAAGVMVVIEAEHLCMTMRGIKKPGSKTVTIASRGAYEDPDRQQEILRMLKLG

SEQ ID NO: 15572 - protein, 219 aa, Sulfobacillus thermosulfidooxidans; identical to SEQ ID NO: 15571
  REGION 1..219: note = tr|A0A1R0IKF9|A0A1R0IKF9_SULTH GTP cyclohydrolase 1; OS = Sulfobacillus thermosulfidooxidans OX=28034 GN=folE; PE = 3 SV=1

SEQ ID NO: 15573 - protein, 193 aa, Sulfobacillus thermotolerans
  REGION 1..193: note = tr|A0A3S6Z933|A0A3S6Z933_9FIRM GTP cyclohydrolase 1; OS = Sulfobacillus thermotolerans OX=338644 GN=folE PE=3 SV=1
MNITAAHSVDRQKIEAAVRMILEAIGEDPTREGLLETPARVARMYEEIFSGLHRDPAETLSARFHVDHNEVVLVKDIPFYSACEHHLLPFFGAAHVAYLPRHGVVTGLSKLARLVDLVAKRPQIQERMTNIVADTLEQELDAEGVMVVIEAEHLCMTMRGIKKPGSKTVTIASRGTYEESSRQMEILRLLNLG

SEQ ID NO: 15574 - protein, 273 aa, unidentified
  source 1..273: note = Sulfuricaulis limicola
  REGION 1..273: note = tr|A0A1B4XHZ3|A0A1B4XHZ3_9GAMM GTP cyclohydrolase FolE2 OS=Sulfuricaulis limicola OX=1620215 GN=folE2 PE=3; SV = 1
MKLKSKTRPVEEEIADVQSTPDLRHLPIDKVGIKEIRHPVVVRDRSQGVQHTIASFNMYVELPHNFKGTHMSRFVEILNSHDMELSVESFRDMLAEMRRRLEANTGHIEMSFPYFINKAAPVSGVKSLMDYQVVFIGEITGNQDVMTIKVVVPVTSLCPCSKEISQYGAHNQRSHVTLTVRTNTFVWVEDLIDLVENQASCQLYGLLKRPDEKYVTEKAYENPKFVEDMVRDVAAKLNADDRIDAYVVESENFESIHNHSAYAMIKKDKTLDS

SEQ ID NO: 15575 - protein, 212 aa, Sulfuricella denitrificans
  REGION 1..212: note = tr|S6A9M5|S6A9M5_SULDS GTP cyclohydrolase 1; OS = Sulfuricella denitrificans (strain DSM 22764 / NBRC 105220 / skB26) OX=1163617 GN=folE PE=3 SV=1
MSDCCDHDHSAPLPGGLGIPRIGTFDAVAFEQAITDLLRACGVSPDSTHTGRTARRVRELWEKRLLGGYDMDPAEVLGEGFVDLREDMVVIRGIAVHGVCPHHLVPFRGIAHVAYIPGGRLHGFGRIARLVDAIGHRFTYQEWMTRDVAEALVTHGKAKGAACVIEAEQLCLLLGEDRRGDERVYTQAFAGCFNDNDQFRQEFLRSISGRMP

SEQ ID NO: 15576 - protein, 271 aa, Sulfuricella denitrificans
  REGION 1..271: note = tr|S6B659|S6B659_SULDS GTP cyclohydrolase FolE2; OS = Sulfuricella denitrificans (strain DSM 22764 / NBRC 105220 / skB26) OX=1163617 GN=folE2 PE=3 SV=1
MNAPVCDKDAIADVQNYADSRQIAIDKVGIKSIRHPVRVADKSEGVQHTIAMFNMNVYLPHNFKGTHMSRFVEILNSDANEREISVESFEAMLREMVQRLEAESGHVEMSFPYFINKTAPVSGVQSLLDYDVTFVGEIVKGKYQLTMKVVIPVTSLCPCSKKISDYGAHNQRSHVTVAVRTNEMVWIEDVVRMVEDQASCELYGLLKRPDEKFVTERAYDNPKFVEDMVRDVAAALNADKRIDAYVVEAENFESIHNHSAYALIERDKTAS

SEQ ID NO: 15577 - protein, 212 aa, Sulfuricella sp.
  REGION 1..212: note = tr|A0A0E9MEW6|A0A0E9MEW6_9PROT GTP cyclohydrolase 1; OS = Sulfuricella sp. T08 OX=1632857 GN=SCT_1343 PE=3 SV=1
MSDCCDHDHPAPPPGGLGIPRIGTFNAAAFEQAVTDLLRACGISPDSTHTGKTARRVRELWEKRLLGGYDMDPAEVLGEGFADTREDMVVIRGIAVHGVCPHHLVPFRGIAHVAYIPGGRLHGFGRIARLVDAIGHRFTYQEWMTRDVAEALVTHGMAKGAACVIEAEQLCLLLGEDRRGDERVYTQAFAGCFNDYDQFRQEFLRSISGRMP

SEQ ID NO: 15578 - protein, 280 aa, Sulfuricella sp.
  REGION 1..280: note = tr|A0A0E9MBW5|A0A0E9MBW5_9PROT GTP cyclohydrolase FolE2 OS=Sulfuricella sp. T08 OX=1632857 GN=folE2 PE=3 SV=1
MTDCNATCDVNSPVCDKDAIADVQNYADSRQIAIDKVGIKSIRHPVRVADKSEGVQHTIAMFNMNVYLPHNFKGTHMSRFVEILNSDANEREISVESFEAMLREMVQRLEAESGHVEMSFPYFINKTAPVSGVQSLLDYDVTFIGEIVKGKYQLTMKVVIPVTSLCPCSKKISDYGAHNQRSHVTVAVRTNEMVWIEDVVRLVEDQASCELYGLLKRPDEKFVTERAYDNPKFVEDMVRDVAAALNADKRIDAYVIEAENFESIHNHSAYALIERDKTAS

SEQ ID NO: 15579 - protein, 195 aa, Sulfuricurvum kujiense
  REGION 1..195: note = tr|A0A2D3WK44|A0A2D3WK44_9HELI GTP cyclohydrolase 1; OS = Sulfuricurvum kujiense OX=148813 GN=folE PE=3 SV=1
MSKAIEQQNFEEAVKTMIRYVGEDVNREGLEKTPNRVLKAYEFMFGGYQEDPQEILNSAMFASSNDEMVLIKDIEFYSTCEHHLLPIIGRAHVAYIPDGKVVGLSKIPRVVDVFARRMQIQEQLTEQIADALMEAVSPKGVAVVIQARHMCMEMRGVQKISSTTTSSALRGLFKRDEKTRMEFFSLINSSSGNRY

SEQ ID NO: 15580 - protein, 192 aa, Sulfuricurvum kujiense
  REGION 1..192: note = tr|E4TZF6|E4TZF6_SULKY GTP cyclohydrolase 1; OS = Sulfuricurvum kujiense (strain ATCC BAA-921 / DSM 16994 / JCM 11577 / YK-1) OX=709032 GN=folE PE=3 SV=1
MDNNELFIKAVKTMIAHVGEDVEREGLLKTPERVLKAYEFMFGGYKEDPQSILNSAMFESSNDEMVLIKDIEFYSTCEHHLLPIIGRAHVAYIPDGKVVGLSKIPRVVDVFARRMQIQEQLTEQIADALMHAIAPKGVAVVVQARHMCMEMRGVEKISSTTTSSALRGLFKRDEKTRMEFFSLINSSSGNRY

SEQ ID NO: 15581 - protein, 195 aa, Sulfuricurvum sp.
  REGION 1..195: note = tr|A0A4R4G5C1|A0A4R4G5C1_9HELI GTP cyclohydrolase 1; OS = Sulfuricurvum sp. IAE1 OX=2546102 GN=folE PE=3 SV=1
MSKTTTQQAFEDAVKTMIRYVGEDETREGLLKTPERVMKAYEFMFGGYNEDPQAILNSAMFETSNDEMVLIKDIEFYSTCEHHLLPIIGRAHVAYIPDGKVVGLSKIPRVVDVFARRMQIQEQLTEQIADALMHAISPKGVAVVVQARHMCMEMRGVEKISSTTTSSALRGLFKRDEKTRMEFFNLINSPAGTRY

SEQ ID NO: 15582 - protein, 191 aa, Sulfuricurvum sp.
  REGION 1..191: note = tr|A0A0C2VZL7|A0A0C2VZL7_9HELI GTP cyclohydrolase 1; OS = Sulfuricurvum sp. PC08-66 OX=1539066 GN=folE PE=3 SV=1
MDQNSFEEAVRTLIASTGEDIHREGLVKTPTRVFKAYEHIFGGYKLDAETILRSALFESSNDEMVVIKDIEFYSMCEHHLLPIIGHAHVAYIPNGKVVGLSKIPRVVDVFARRMQIQEQMTEQIADAIMRTIAPKGVAVVIQARHMCMEMRGVEKVNATTTSSALRGLFKSNEATRKEFFAHINASAGKRY

SEQ ID NO: 15583 - protein, 211 aa, unidentified
  source 1..211: note = Sulfuriferula multivorans
  REGION 1..211: note = tr|A0A401JH93|A0A401JH93_9PROT GTP cyclohydrolase 1; OS = Sulfuriferula multivorans OX=1559896 GN=folE PE=3 SV=1
MDNHSCDHDPAGHPIPGSIGIPRQGEFNPAAFEQAITDLLRACGVNPDSTHTGKTAQRVRELWQKRLLGGYAIDPAEALGEGFEDSRQDMVVVRGIAIHGVCPHHLVPFRGVAHVAYIPGGRLHGFGRIARLVDAIGHRFTYQEWMTRDIAEALMTHGKALGAACIIEAEQLCLLLGEDRRGDERVVTQAFTGCFDTSHQTRNEFLRALRG

SEQ ID NO: 15584 - protein, 277 aa, unidentified
  source 1..277: note = Sulfuriferula multivorans
  REGION 1..277: note = tr|A0A401JEY3|A0A401JEY3_9PROT GTP cyclohydrolase FolE2 OS=Sulfuriferula multivorans OX=1559896 GN=folE2; PE = 3 SV=1
MNDCCGVAAMPDVQNYADTRQLAINKVGIKSIRHPVRVADKSGGVQHTVASFNMYVYLPHNFKGTHMSRFVEILNTREREISVENFESMMRQMVERLEAESGYIEMNFPYFINKAAPVSGVQSLMDYDVTFIGAIENGRYTHTTKIVVPVTSLCPCSKKISDYGAHNQRSHVTVSARTNGFLWIEDIVRMVEDQASCELYGLLKRPDEKYVTERAYDNPKFVEDMVRDVAAALEKETKIDAYVVESENFESIHNHSAYALIENDKTHPTQISSEGTA

SEQ ID NO: 15585 - protein, 269 aa, unidentified
  source 1..269: note = Sulfuriferula plumbiphila
  REGION 1..269: note = tr|A0A512L7F5|A0A512L7F5_9PROT GTP cyclohydrolase FolE2 OS=Sulfuriferula plumbiphila OX=171865 GN=folE2 PE=3; SV = 1
MNDCCEVAAMPDVQNYADTRQIAINKVGIKSIRHPVRVADKSGGVQHTVASFSMYVHLPHNFKGTHMSRFVEILNTREREISVENFETMMRQMVERLEAESGYIEMNFPYFINKTAPVSGVQSLMDYDVTFIGAIENGRYTHTTKIAVPVTSLCPCSKKISDYGAHNQRSHVTVSARTNDFLWIEDLVRMVEDQASCELYGLLKRPDEKYVTERAYDNPKFVEDMVRDVAAALEKEAKIDAYVVESENFESIHNHSAYALIEHDKVRPA

SEQ ID NO: 15586 - protein, 211 aa, unidentified
  source 1..211: note = Sulfuriferula plumbiphila
  REGION 1..211: note = tr|A0A512L4S8|A0A512L4S8_9PROT GTP cyclohydrolase 1; OS = Sulfuriferula plumbiphila OX=171865 GN=folE PE=3 SV=1
MSDHGCDHDPAGHPIPGSIGIPRQGEFDPAAFERAVTDLLLACGVNPDSTHTGKTAQRVRELWQKRLLGGYAIDPAGALGEGFEDTRQDMVVVRGIAIHGVCPHHLVPFRGVAHVAYIPGGRLHGFGRIARLVDAIGHRFTYQEWMTRDIAEALMSHGHALGAACIIEAEQLCLLLGEDRRGDERVVTQAFTGCFDTSHQTRNEFLRALQG

SEQ ID NO: 15587 - protein, 269 aa, unidentified
  source 1..269: note = Sulfuriferula sp.
  REGION 1..269: note = tr|A0A1Y0G5Q4|A0A1Y0G5Q4_9PROT GTP cyclohydrolase FolE2 OS=Sulfuriferula sp. AH1 OX=1985873 GN=folE2 PE=3; SV = 1
MNDCCDITAPMPDVQNYADTRQIAINKVGIKSIRHPVKVADKSSGIQHTIANFNMYVFLPHNFKGTHMSRFVEILNTNEREISIENFESILRQMVQRLEADSGYIEMSFPYFINKTAPVSGVQSLMDYDVTLIGAIENGQYVHTTKVVVPVTSLCPCSKKISEYGAHNQRSHVTISARTNDFMWIEDIVAVAEKQASCELYGLLKRPDEKFVTERAYDNPKFVEDMVRDVAAALDREPRIDSYVVESENFESIHNHSAYALIERDKRKL

SEQ ID NO: 15588 - protein, 272 aa, unidentified
  source 1..272: note = Sulfurifustis variabilis
  REGION 1..272: note = tr|A0A1B4V6H5|A0A1B4V6H5_9GAMM GTP cyclohydrolase FolE2 OS=Sulfurifustis variabilis OX=1675686 GN=folE2 PE=3; SV = 1
MKLKTKAEPIPIADVQSTPDTRRLPIDKVGIKDIRHPVRVKDKTQGEQHTIANFNMYVELPHNFKGTHMSRFVEILNQHDIEISVESFKEMLSEMSERLEARRGHIEMSFPYFINKSAPVSGVKSLMDYQVTFIGEIEDGRHVMTIKVIVPVTSLCPCSKEISDRGAHNQRSHVTLTVRTNSFVWIEELIELVESQASCELYGLLKRPDEKYVTERAYDNPKFVEDMVRDVAAMLNQDERVDAFCVESENFESIHNHSAYAMIKRDKLEPAD

SEQ ID NO: 15589 - protein, 187 aa, Sulfurihydrogenibium azorense
  REGION 1..187: note = tr|C1DVQ4|C1DVQ4_SULAA GTP cyclohydrolase 1; OS = Sulfurihydrogenibium azorense (strain Az-Fu1 / DSM 15241 / OCM 825) OX=204536 GN=folE PE=3 SV=1
MAIDKNKIEQAIRLFLEGIGEDPNREGLRDTPKRVAKMWEEFESHGEFNMTVFEDVGSYDEMVVVRDIQFFSFCEHHLLPFFGKAHVAYIPDKKVCGLSKIVRVVNKFSYRPQVQERLTAEIAEFLEKELQPKGVAVVMEAIHLCMAMRGVRNPDSVTVTSKLTGRFLECQKTREEFLNLINSHKKL

SEQ ID NO: 15590 - protein, 187 aa, Sulfurihydrogenibium sp.
  REGION 1..187: note = sp|B2V9P4|GCH1_SULSY GTP cyclohydrolase 1; OS = Sulfurihydrogenibium sp. (strain YO3AOP1) OX=436114; GN = folE PE=3 SV=1
MVIDKNKIEQAIRLFLEGIGEDPNREGLRDTPKRVAKMWEEFESYREMNMTIFEEVGSYDEMVVVRDIQFYSLCEHHLLPFFGKAHVAYIPDKKVCGLSKIVRVVNKFSYRPQVQERLTAEIAEYLEKELQPKGVAVVMEAVHLCMAMRGVRNPESITVTSKLTGRFLECQKTREEFLNLINSHKKM

SEQ ID NO: 15591 - protein, 187 aa, Sulfurihydrogenibium sp.
  REGION 1..187: note = tr|A0A2J6X1K7|A0A2J6X1K7_9AQUI GTP cyclohydrolase 1; OS = Sulfurihydrogenibium sp. OX=2053621 GN=folE PE=3 SV=1
MAIDKSKIEQAIRLFLEGIGEDPNREGLRDTPKRVAKMWEEFESFREFDMTTFEEIGTYDEMVVVRDIKFFSLCEHHLLPFFGKAHVAYIPDKKVCGLSKIVRVVNKFSYRPQVQERLTIEIAEFLEKELKPKGVAVVMEAVHLCMAMRGVRNPDSVTVTSKLTGKFLECQKTKEEFLNLINSHKKL

SEQ ID NO: 15592 - protein, 187 aa, Sulfurihydrogenibium yellowstonense
  REGION 1..187: note = tr|C4FIV5|C4FIV5_9AQUI GTP cyclohydrolase 1; OS = Sulfurihydrogenibium yellowstonense SS-5 OX=432331; GN = folE PE=3 SV=1
MAIDKNKIEQAIKLFLEGIGEDPNREGLRDTPKRVAKMWEEFESYREMNMTVFEEVGNYDEMVVVRDIQFYSLCEHHLLPFFGKAHVAYIPDKKVCGLSKIVRVVNKFSYRPQVQERLTAEIAEYLEKELQPKGVAVVMEAVHLCMAMRGVRNPEAITVTSKLTGRFLECQKTREEFLNLINSHKKI

SEQ ID NO: 15593 - protein, 194 aa, Sulfurimonas autotrophica
  REGION 1..194: note = tr|E0US95|E0US95_SULAO GTP cyclohydrolase 1; OS = Sulfurimonas autotrophica (strain ATCC BAA-671 / DSM 16294 / JCM 11897 / OK10) OX=563040 GN=folE PE=3 SV=1
MSDNKNSEFENAVKVMMHHVGEDPQREGLIDTPSRVRKAYEFIYGGYKEDPAEILKKALFTTSNDEMVLVKDIEFYSTCEHHLLPIIGRVHVAYIPDGKVVGLSKIPRVVNVFARRMQIQEQLTEQIADAIMDTIAPKGVGVVIQARHMCMEMRGVEKINSTTTSSALRGLFKKDEKTRSEFFSLINSPTGNRY

SEQ ID NO: 15594 - protein, 179 aa, Sulfurimonas denitrificans
  REGION 1..179: note = tr|Q30NS1|Q30NS1_SULDN GTP cyclohydrolase 1; OS = Sulfurimonas denitrificans (strain ATCC 33889 / DSM 1251) OX=326298 GN=folE PE=3 SV=1
MMLHVGENPDREGLLKTPQRVKKAYEFIFGGYKEDPEEILNSALFTSSNDEMVLLKDIEFYSTCEHHLLPIIGRVHVAYIPNGKVVGLSKIPRVVNVFARRMQIQEQLTEQIADAIMNTIKPKGVAVVVQARHMCMEMRGVEKINSTTTSSALRGLFKKDEKTRSEFFSLINSPNGSRY

SEQ ID NO: 15595 - protein, 194 aa, unidentified
  source 1..194: note = Sulfurimonas gotlandica
  REGION 1..194: note = tr|B6BGW8|B6BGW8_SULGG GTP cyclohydrolase 1; OS = Sulfurimonas gotlandica (strain DSM 19862 / JCM 16533 / GD1) OX=929558 GN=folE PE=3 SV=1
MKKKEDIEFENAVKTMMLHVNEDPTREGLLETPGRVRKAYEFIYGGYKENPKEILEKALFTSSNDEMVLLKDIEFYSTCEHHLLPIIGRVHVAYIPDGKVVGLSKIPRVVNVFARRMQIQEQLTEQIADAIMEAIAPKGVAVVIQARHMCMEMRGVEKINSTTTSSALRGLFKKDEKTRSEFFSLINSPTGTRY

SEQ ID NO: 15596 - protein, 194 aa, unidentified
  source 1..194: note = Sulfurimonas hongkongensis
  REGION 1..194: note = tr|T0JQ05|T0JQ05_9HELI GTP cyclohydrolase 1; OS = Sulfurimonas hongkongensis OX=1172190 GN=folE PE=3 SV=1
MDNKKNIEFENAVKIMMLYVDEDPEREGLKATPSRVRKAYEFIYGGYKEDPKAILEKALFTSSNDEMVLLKDIEFYSTCEHHLLPIIGRVHVAYIPDGKVVGLSKIPRVVNVFARRMQIQEQLTEQIADAIMDAIAPKGVAVVIAARHMCMEMRGVEKINSTTTSSALRGLFKKDEKTRSEFFSLINSPTGTRY

SEQ ID NO: 15597 - protein, 193 aa, Sulfurimonas sp.
  REGION 1..193: note = tr|A0A2D3W161|A0A2D3W161_9HELI GTP cyclohydrolase 1; OS = Sulfurimonas sp. UBA12504 OX=2015903 GN=folE PE=3 SV=1
MKKEDLDFENAVKSMMLHVGENPEREGLLETPKRVRKAYEFIFGGYKENPKEILEKALFTSSNDEMVLIKDIEFYSTCEHHLLPIIGRVHVAYIPDGKVVGLSKIPRVVNVFARRMQIQEQLTEQIADAIMSTIEPKGVAVVIQARHMCMEMRGVEKINSTTTSSALRGLFKKDQKTRSEFFSLINSPTGTRY

SEQ ID NO: 15598 - protein, 194 aa, Sulfurimonas sp.
  REGION 1..194: note = tr|A0A2G1YP96|A0A2G1YP96_9HELI GTP cyclohydrolase 1; OS = Sulfurimonas sp. OX=2022749 GN=folE PE=3 SV=1
MSQTKDLEFENAVKIMMLHVDEDPNREGLLETPSRVRKAYEFIYGGYKENPKEILQKALFTSSNDEMVLLKDIEFYSTCEHHLLPIIGRVHVAYIPDGKVVGLSKIPRVVNVFARRMQIQEQLTEQIADAIMDTIAPKGVAVVVQARHMCMEMRGVEKINSTTTSSALRGLFKKDEKTRSEFFSLINSPTGTRY

SEQ ID NO: 15599 - protein, 268 aa, unidentified
  source 1..268: note = Sulfurirhabdus autotrophica
  REGION 1..268: note = tr|A0A4R3XXK0|A0A4R3XXK0_9PROT GTP cyclohydrolase FolE2 OS=Sulfurirhabdus autotrophica OX=1706046 GN=folE2; PE = 3 SV=1
MNQCCDTDAIPDVQNTPDTRQLAIDKVGIKSIRHPVKVADKTGGVQHTIAMFNMYVYLPHNFKGTHMSRFVEILNGYEREITVESFEQMLRQMVVLLEAESGHVEMTFPYFINKAAPISGVQSLLDYDVTFIGEILKGEYRQTMKVVVPVTSLCPCSKKISDYGAHNQRSHVTVTARTNDFMWIEDVVRIVEEQASCELFGLLKRPDEKYVTERAYDNPKFVEDMVRDIAAKLNDDARIDSYVVESENFESIHNHSAYALIERDKTKQ

SEQ ID NO: 15600 - protein, 208 aa, unidentified
  source 1..208: note = Sulfurisoma sediminicola
  REGION 1..208: note = tr|A0A497XCI7|A0A497XCI7_9PROT GTP cyclohydrolase 1; OS = Sulfurisoma sediminicola OX=1381557 GN=folE PE=3 SV=1
MPTCDDHCPVPGAAGGIGIPRRDPFDPAAFERAVADLLSACGIAPDAAHMGRTAQRVRELWQKRLLGGYDIDPAEALGEGFADHRSDMVVIRGIAVHGVCPHHLVPFRGVAHVGYLPGGRLHGFGRIARLVDAIGHRFTYQEWMTRDIAEALMQHGKARGGACVVEAEQLCLLLGEDRRGDERVVTQAFTGAFAESDQLRNEFLRAIG

SEQ ID NO: 15601 - protein, 269 aa, unidentified
  source 1..269: note = Sulfurisoma sediminicola
  REGION 1..269: note = tr|A0A497XB51|A0A497XB51_9PROT GTP cyclohydrolase FolE2 OS=Sulfurisoma sediminicola OX=1381557 GN=folE2 PE=3; SV = 1
MNARDTMIIPDVQSSADSRQLPINKVGIKSIRHPVKVLDKSGGVQHTIANFNMYVGLPHNFKGTHMSRFVEILNSREKEISVESFEAMLREMVKKLEAETGIIEMSFPYFINKEAPVSKVKSLMDYEVTFIGEIRDGGVYRQTMKVQVPATSLCPCSKKISDYGAHNQRSHITVTATTNSFLWIEELVQMVEGQASCEVYGLLKRPDEKYVTERAYDNPKFVEDMVRDVAGVLNAEPRIDAYMLEAENFESIHNHSAYAVIERDKTIGA

SEQ ID NO: 15602 - protein, 268 aa, Sulfuritalea hydrogenivorans
  REGION 1..268: note = tr|W0SGQ4|W0SGQ4_9PROT GTP cyclohydrolase FolE2; OS = Sulfuritalea hydrogenivorans sk43H OX=1223802 GN=folE2; PE = 3 SV=1
MAPPEKSVIADVQSSEDSRQLPINKVGIKDIRHPFKVLDKSGGVRHTIATFNMYVGLPHNFKGTHMSRFVEILNAHEDEISVESFETMLREMVTRLEAATGHLEMSFPYFINKVAPVSGVKSLMDYEVTFIGEIIEGGRYRQTIKVVVPVTSLCPCSKKISERGAHNQRSHVTISATTNQLVWIEDIVRMAETQASCELYGLLKRPDEKYVTERAYDNPKFVEDLVRDVAGALNADPRIDAYVVESENFESIHNHSAYALIESNKKRY

SEQ ID NO: 15603 - protein, 279 aa, unidentified
  source 1..279: note = Sulfuritortus calidifontis
  REGION 1..279: note = tr|A0A4R3JZ10|A0A4R3JZ10_9PROT GTP cyclohydrolase FolE2 OS=Sulfuritortus calidifontis OX=1914471 GN=folE2; PE = 3 SV=1
MSTTCDAVCHTAAPCPTKDAIPDVQNYPDSRKLAIDKVGIKSIRHPVRVADKNGGVQHTIASFNMYVYLPHHFKGTHMSRFVEILNSYEREISVENFEDMLRQMVKRLEAESGHVEMNFPYFINKKAPVSGVESMIDYDVTFIGEIKDGEYIQTIKVVVPVTSLCPCSKKISDYGAHNQRSHITIAARTNTFVWIEDIVRMAEDNASCELYGLLKRPDEKYVTERAYDNPKFVEDIVRDVAATLNADDRIDAYVVESENFESIHNHSAYALIERDKKAS

SEQ ID NO: 15604 - protein, 213 aa, unidentified
  source 1..213: note = Sulfuritortus calidifontis
  REGION 1..213: note = tr|A0A4V2UQU4|A0A4V2UQU4_9PROT GTP cyclohydrolase 1; OS = Sulfuritortus calidifontis OX=1914471 GN=folE PE=3 SV=1
MSDCSDHDCMPAPRPGSLGIPRSGKFDVAAFEQAITDLLRACGVEPDAVHTGRTAQRVRELWQRRLLGGYDMDPGEALGEGFQDERDDMVVVRGIAVHGVCPHHLVPFRGVAHVAYVPGGRLHGFGRIARMVDAIGHRFTYQEWMTRDIAEALITHGKAKGAACVIEAEQLCLLLGEDRRGDERVVTQAYTGCFKQDAQYRNEFLRALGGPLP

SEQ ID NO: 15605 - protein, 316 aa, Sulfurivirga caldicuralii
  REGION 1..316: note = tr|A0A1N6GWY4|A0A1N6GWY4_9GAMM GTP cyclohydrolase FolE2 OS=Sulfurivirga caldicuralii OX=364032 GN=folE2 PE=3; SV = 1
MKKPLPDVACEAQSETRGRLNWVGMSQIELPIEVLDGEDQPVRVPTLADAFVNLIDPNSKGIHMSRLYLRLDQFSLGGAVSVERLQGLLADFIDSHAGLSDRAHVAFRFDYYERRASLLSDNSGWKHYPAEIRAQLGPGGFMCELGVEIPYSSTCPCSAALSRQLIMEHFAERFAGQESVALDEALAWLATPEGVNATPHSQRSIAQIRVRLQPGQEIDISALISLIEGALQTPVQAAVKREDEQEFARLNAANLMFCEDAARRLQAALNAAESHFADFWARVNHYESLHPHDAVAVVTKGVPGGYSDDPELVCKR

SEQ ID NO: 15606 - protein, 191 aa, Sulfurospirillum barnesii
  REGION 1..191: note = tr|I3Y060|I3Y060_SULBS GTP cyclohydrolase 1; OS = Sulfurospirillum barnesii (strain ATCC 700032 / DSM 10660 / SES-3) OX=760154 GN=folE PE=3 SV=1
MHRKEEFEQAVKTMLEIIGENTEREGLLKTPTRVFKAYEYMTQGYHQSPNEVLGEALFESDNNQMVLIKDIEFYSMCEHHLLPIIGRAHVAYIPDGKVVGLSKIPRMVDIFARRLQIQEQLTEQIAKAIDDVIAPKGVGVVIQARHMCMEMRGVEKTHSNTTTSALRGLFLKADTRKEFFDIINAPQANRY

SEQ ID NO: 15607 - protein, 191 aa, Sulfurospirillum cavolei
  REGION 1..191: note = tr|A0A2D3W3U5|A0A2D3W3U5_9PROT GTP cyclohydrolase 1; OS = Sulfurospirillum cavolei OX=366522 GN=folE PE=3 SV=1
MHRQEEFENAVRTMLEIIGENTKREGLLKTPTRVFKAYEYMTQGYTQSPNDVLGEALFESDNNQMVLIKDIEFYSMCEHHLLPIIGRAHVAYIPNGKVVGLSKIPRMVDVFARRLQIQEQLTEQIAKAIDDVIAPKGVGVVIQARHMCMEMRGVEKTHSNTTTSALRGLFLKPDTRKEFFDIINAPQANRY

SEQ ID NO: 15608 - protein, 193 aa, Sulfurospirillum deleyianum
  REGION 1..193: note = tr|D1B4Z8|D1B4Z8_SULD5 GTP cyclohydrolase 1; OS = Sulfurospirillum deleyianum (strain ATCC 51133 / DSM 6946 / 5175) OX=525898 GN=folE PE=3 SV=1
MIMERKEEFENAVKTMLEIIGENTQREGLLKTPSRVFKAYEYMTQGYHQSPTEVLNEALFESDNNQMVLIKDIEFYSMCEHHLLPIIGRAHVAYIPNGKVVGLSKIPRMVDIFARRLQIQEQLTEQIAKAIDDVIAPKGVGVVIQARHMCMEMRGVEKTHSNTTTSALRGLFLKADTRKEFFDIINAPQANRY

SEQ ID NO: 15609 - protein, 191 aa, Sulfurospirillum halorespirans
  REGION 1..191: note = tr|A0A1D7TNN0|A0A1D7TNN0_9PROT GTP cyclohydrolase 1; OS = Sulfurospirillum halorespirans DSM 13726 OX=1193502; GN = folE PE=3 SV=1
MQRREEFEQAVKTMLEIIGENTEREGLLKTPTRVFKAYEHMTQGYHQSPNEVLGEALFESDNNQMVLIKDIEFYSMCEHHLLPIIGRAHVAYIPNGKVVGLSKIPRMVDIFARRLQIQEQLTEQIAKAIDDVIAPKGVGVVIQARHMCMEMRGVEKTHSNTTTSALRGLFLKADTRKEFFDIINAPQANRY

SEQ ID NO: 15610 - protein, 191 aa, Sulfurospirillum multivorans; identical to SEQ ID NO: 15609
  REGION 1..191: note = tr|A0A5B9TVD0|A0A5B9TVD0_SULMU GTP cyclohydrolase 1; OS = Sulfurospirillum multivorans OX=66821 GN=folE PE=3 SV=1

SEQ ID NO: 15611 - protein, 239 aa, Sulfurospirillum multivorans
  REGION 1..239: note = tr|A0A5B9TTL1|A0A5B9TTL1_SULMU NIF3 family protein; OS = Sulfurospirillum multivorans OX=66821 GN=SMN_2273 PE=4; SV = 1
MKLGALYDFLDTLSPFATQASWDNSGLLIGSREDEVEQIYLSLDVDSALLEEVAENSLIITHHPLIFSSLKQLNFAKYPSNLIQIMVQKKISLIAMHTNFDLSHLNAFVASKLGFEIVDSNEFVAYCEVNQRLDDLALHVKHVLGIENLRIVRGREWVGRCAITTGAGGDLISKIEADCFLSGDLKYHQAMEAKENNLSLIDIGHFESERYFPECLAQYLKNLPLKAIMSNSKNPFEYK

SEQ ID NO: 15612 - protein, 239 aa, Sulfurospirillum sp.
  REGION 1..239: note = tr|A0A1Y0HMD4|A0A1Y0HMD4_9PROT GTP cyclohydrolase 1 type 2 OS=Sulfurospirillum sp. SL2-1 OX=1986224; GN = Sdiek1_2120 PE=4 SV=1
MKLGAIYDFLDTLSPFATQARWDNSGLLIGSLDDEVEQIYLSLDVDSLLLEQVVPNSLIITHHPLIFSGLKQLNFAKYPSNLIQIMVQKKISLIAMHTNFDLSHLNAYVASKLGFEVKETKEFVAYCEVNQSLDDLALHVKHVLGIEHLRIVRAKEWIGLCAITTGSGGDLIAQIEADCFLSGDLKYHQAMEAKENNLSLIDIGHFESERYFPECLGDYLKNLPLKAIISNSKNPFEYK

SEQ ID NO: 15613 - protein, 239 aa, Sulfurospirillum sp.
  REGION 1..239: note = tr|A0A290HFE2|A0A290HFE2_9PROT NIF3 family protein; OS = Sulfurospirillum sp. JPD-1 OX=220622 GN=SJPD1_2042 PE=4; SV = 1
MTLGALYDFLDTLSPFATQARWDNSGLLIGSLDDEVEQIYLSLDVDGSLLEQVTPNSLIITHHPLIFNGLKQLDFAKYPSNLIQIMVQKKISLIAMHTNFDLSHLNAYVASKLGFEVSETKEFVAYCEVNQSLDDLALHVKHVLGIEHLRIVRAREWIGRCAITTGSGGDLITQIEADCFLSGDLKYHQAMEAKENNLSLMDIGHFESERYFPECLGNYLKNLPLKAIISNSKNPFEYK

SEQ ID NO: 15614 - protein, 192 aa, unidentified
  source 1..192: note = Sulfurovum riftiae
  REGION 1..192: note = tr|A0A151CEL4|A0A151CEL4_9PROT GTP cyclohydrolase 1; OS = Sulfurovum riftiae OX=1630136 GN=folE PE=3 SV=1
MNKEKEFEEAVTKVLELLGEDPKREGLLKTPNRVVKALRFLTEGYQQDPEEILNQALFSTSNDEMVLVRDIEFYSMCEHHMLPIIGRCHVAYIPDGKVVGLSKIPRIVNVYARRLQIQEQMTEQIADAILGTIKPKGVAVVVHARHMCMEMRGVQKINSTTVSSALRGLFKSDERTRNEFYNLINTPTPSNF

SEQ ID NO: 15615 - protein, 192 aa, Sulfurovum sp.
  REGION 1..192: note = tr|A0A432T6J9|A0A432T6J9_9PROT GTP cyclohydrolase 1; OS = Sulfurovum sp. OX=1969726 GN=folE PE=3 SV=1
MEKNQEFEQTITKMLELLGEDPKREGLLKTPSRVAKALKFLTEGYHQDPKEILNQALFTSSNDEMVVVRDIEFYSMCEHHMLPIIGRAHIAYIPDGKVVGLSKIPRIVNVFARRLQIQEQMTEQIADAILETIKPKGVAVVLHARHMCMEMRGVEKINSTTVSSALRGLFKSDQRTRFEFYNIINTPAPSNF

SEQ ID NO: 15616 - protein, 192 aa, Sulfurovum sp.
  REGION 1..192: note = tr|I2K5K9|I2K5K9_9PROT GTP cyclohydrolase 1; OS = Sulfurovum sp. AR OX=1165841 GN=folE PE=3 SV=1
MNKEEEFEQAVTKVLELLGEDPTREGLLKTPSRVAKALQFLTEGYQQDPKEILNQALFSTSNDEMVLVRDIEFYSMCEHHMLPIIGRAHVAYIPDGKVVGLSKIPRIVNVYARRLQIQEQMTEQIADAILETIKPKGVAVVVHARHMCMEMRGVQKINSTTVSSALRGLFKSDERTRNEFYNLINTPTPSNF
